United States Patent Application Publication US 2004/0123343 A1 - sequence listing, part 20

SEQ ID NO: 54702 - DNA, 1068 bp, Oryza sativa
  Clone ID: PAT_MRT4530_56781C.1
gagctccaccctccttcatcctgcgacgacgacgccggcagctgccaaaagacgtccgtggcgtgcaaccgccagcgccacaagatcctcatcgtgaacctgctatatgaactcatgtttttcgctttcatgttcctatgcttgtatcacgcgttgtacgacttcccgtccgagttctccgtccagatcacggccatccacggcctcgaccggggattggtttggcacagggggccgtcgtttacacgtaagctacgggtgaagcatgcaaggcctggcagtccgccccaccctccttcctcctgcgacgacaacgccggcgcctgccaaaaggcgtcagagacgtgcaaccgccagcgccgcaagatcttcgtcgtgtacctgctatatgaattcaccaatttcattttcatattcctatgcttgtatcacgcgttgtacgacttcccatccgagttctccgtccagattacggccatccgcggcctggacgacgcggcgccggcgtctccgacgatcatctcccctgctatcgacgtcacacttcacgtcaacaaccggcgcggcacggcgagatgctaccgcggcggcgaggcggtggtgagctacgagggcttcaccgtcgcgtccggcaccgtgccgggcttctgcgcgcaggggaagagggcaccggaggtgccgttcctggcgtcggccgacggcgtgggtctgcctcagcggctttgcggacgcatggccctggagcggcgtatcggcgccatgcagctggaggtcgaggtgaagctgttcgggcgcgacggcggcacggcgcccaggccgacgtggatgtcgtgcgggctgaggatggatgaagcgcaactgccgaacacggcgcattgctcggtgttggctttgcagaattggttctctcaacccttgttcggataatagaacattcagatcaatcttttacgggttaagggatcgccaaagggattaattctcggctggtttatgagaataccggaggtgttgcaattagttagctaggtacatgatttcaaggtttcaacaggactctttctttgg

SEQ ID NO: 54703 - DNA, 529 bp, Oryza sativa
  Clone ID: PAT_MRT4530_56782C.1
tatataggaacgcgcaccatccgagccgatatcagccactggaggcttccatcgcaatgcttcctttggcggggcagcgtagggaattcctaaaaaggagccatgttcctcagaaactgagccaatcaagcgtcctccggatacctgaacttcaaaggagtttctctcagtgacaaagcttgctttcattttgagaagtaccctacatggatttttgacatgctagctttaatataccgactatcctgattggaagaaaaaagggatttgaatatctagcgtaacgtcttgatcccaccatacaagtcggtctgagcgagaggggttacaacggaagaactcggaatccaggtcgccgtcatagccgctggtgcccagcccaagcgggatgtattgaaccagtaaaacaactacaaaaatcctgggactggatgcctaattaggttgtgacaaagtaagccaaaaggacagattagagatagcttttaaggcgtggggagcattggccggcataacaataaacacccct

SEQ ID NO: 54704 - DNA, 1889 bp, Oryza sativa
  Clone ID: PAT_MRT4530_56783C.1
ccggccggggtgcgcttaccatttgcgccgcccatcgcgtccagctagcgcctggcgcggctgcagatgcagctgctgagctgcaggtgcatgcacctttcccacccccacctccctctctccccttcgtcttcctctatagcccgcgccgcgcctccctgtccccgagtccgaagcccgaatccgaagcgaagtgaccgcaagagctcacccccgagtccccccctcgccggatcgcgcgggccgcctacctcctcccgtcgcaccagctaccgcgggaatgcgaagatcttgcgatggaagctagtcaaatctgatttcgtttaagtacaagtaacaacaatggcaccaaacaaaatttcctcaatggatgctggagcagcttttgatgacgaagatgctagttccagcaattcactgcaggagttgtggccagttggcgagatagatcctaagagagcaagatttccttgttgcattgtttggactcctcttcctattgtctcgtggcttgctccttacatagggcatgctggaatctgtcgagaggatgggactgtcttggattttgctggttcaaatctggtgagcatggataattgtgcatatggttctattgcgagatatctccagcttgacagaaagaagtgttgctttcctgttaatctcgcgacacatgtatgtgagcggtcctacaagcatgcagaagcagggacgggcgatttcctgggacgacgctctgcaactgggcatgagaagtttcgggcacaagttctataatctgtttacctgcaattgctactcatttgtggcaaactgcttgaatcggcttgcctacaatggctccgtgaagtggaatgtgttgaatgtggctgctcttgtttggttgcgtggccaatgggtggataaaatgtctgttgttcgttcattctttccttttctaactgtgacatgcgttggcattttaatggctggctggcctttcctaatagggatggcagccttctcttctctcttgattggatggtttgtatttgctgtatactgcatgaaggatctagtgtgctgactcttttaaagaacaaaaaaaaaaaaaaaaaaaaaaaatcacggccacccgcggcctcgacgacgcggcgccggcggctccgacgatcatctcccctgccatcgacgtcacacttcacgtcaacaaccggcggggcacggcgagatgctaccgcggcggtggtgagctacgagggcttcaccgtcgcgtccggcaccgtgccgggcttctgcgtgccggggaagagggcacgggaggtgccgttcctggcgtcggccgacggcgtgggtctacctcagcggcttcgcgaccgcatggcggtggagaggcgtatcggcgccatgcagctggaggtcgaggtgaagctgttcgggcgcgacgacggcggcacggcgcccaggccgacgtggatgtcgtgcgggctgaggatggatgaagcgcagctgccgaacacggcacattgcacggggcaaacgaggtggggtgcaagccagggcggatctacccatatgccatagaacattcagatcaatcttttacgggttaagggatcgccaaagggattaattttcgtctggtttatgagaataccgcaggtgttccaattagttagctagttacatgatttcaagttttcaacagcactctttcttgtatcagacattaatggcattgataaaattactccagctccgccccatatttagtaatgcagcttcaaaaagatttggtcgtgcacgctactttctttgttatgcattaattaaaccacaattaattaatctgtaaagaagacacacatgaaattaacatatgtaaaaagggattgaaaatatttttg

SEQ ID NO: 54705 - DNA, 1014 bp, Oryza sativa
  Clone ID: PAT_MRT4530_56784C.1
atggaccaatcgacatcgaaaaacaagaattcctccaatctacaagacccccaaaatatgggaataaaccagcccatgctactctttgaagatcctccccaagcttccaggaacaaaggacgagtccaagcctcactaaagcctgaagactacaccatcaatctgaatcacctaaagcaatattcttcgaatgaaaggtgccacctgactccagcaaaacgaaggataaatgtcacgtgttatagatgtggcgaggaaggacattgtgccttggattgccctaagaaaaagctaggaaatggacaagtaaggaatatacctcgacacccaaaaaggaaaatgagggcaggaataccaccaaaaccgatgccacattcactctatccaaaacctatgtatcagcaatttcgtagacaaggaactacaccacattggtggaagggaaaacggaaaagaaaagcgtcatcacgaataacatatgctgaacttgacctcagtaaaatgggaatagaaatcggtgatttgcctgaagatgttgaagagctacaactatggcaacgaaagagagatggctgttgtttttcttgtggacaatttggacattatgcgataggctgtactcaagacaccaatgaagaacaagaaacactgccctcacagatcggcccggaagagcatagagttccagacccatccaaagaagtttcgaagattaaggcatgtagtcgttgcggagagataggacactacggtagtaattgcattactcaatgcccctactgtgacgaagaccatccaaacggagaatgcccaacaacgaagatcacgtgcttcctctgcgaaaagacggatcatgtgccccaagattgtcaactaagtccgttgctgaccaagacggcggaagtacaaagagtgtcgcttcgcttcgcccatcgactcatgacatccagaagccacgaagacccgggatttcctacttttgatttgcatgtttgtttgtcgaacaatatttaa

SEQ ID NO: 54706 - DNA, 260 bp, Oryza sativa
  Clone ID: PAT_MRT4530_56785C.1
atggaggaaagcatagagcggcagcataaagttgaaattgtcttgccaaatggaacatcaaagctggcagagaatcgagttgataaataaaaaattactgcgtcttcaggttgggggtatttatgcagtaccctagcgtcaatcaaagcctggagtatgtcttcatttatcatctttctgcgattaaacgatgcttgtccttccttaaaacggaaagaaggaaagcttagttctgaacataataaaaaaaaaaaaaaaaa

SEQ ID NO: 54707 - DNA, 1812 bp, Oryza sativa
  Clone ID: PAT_MRT4530_56786C.1
atgacgggcatggccatgggcactgcagaagcagtagtaattccggtcgaagaggagttgaagagagcagccgaaaaggttgaggctaacttcaccgagaacaagaccaagatccacaggttcccagcaaacctgcgcggcgttaccaaagaaggccgatatttggtaccgagcgcagtagccatcggcccttaccaccacgatttaccgcacctgcaggaggcggaggaggtgaagcgagcggctgcctactacttctggagggactggggggactcggctcagggggctgatccgccgcagtcggctgaggcggcctacgagaaaatcctctccgttgcaggcaacgtgcgaagctgctatgttggtgacacggcggcaggtatgagctgtgaggccgactttgcagctatgatgttccgggatggctgtttcttgctgcagtttatgattttcatccgtagcagtccaggtgggctagttgctccgtcattgcaaggttggttcaactccaaactagccagcatcctgcgggacatctttctgatggagaaccagatcccatggctggtgcttcagaccctcatgtccttcaagccagcgctggacgtggaggattttatcgctcgagcaggtttgggattcgaggcccggttagacctagttaaaaggcctctcgtcctcaacggcagctacacaccagcgcatctcctcggtctcctccgttactaccaatgtgggagcatccctatcggaaggacggacctccacctccctgaaggcgtcacgtcactgccacagtctagcagtgccatcgagcttgcagagatcggcatccagcttgtggccaacgacacgtcacagctcaaggacatgggcatctacgaaggagcccataggtcttatcaagctttgaaccaaatgcaagggttaatgcaacaaagttttgcatttgttctgcttggttccctgagcatctattttcctataagaccaagaagcgtggtattggtgttggagttattgtacactgctccttagttgtcactttattccctcaggtgcaagaaccttgtgccttgaaggcacgaaccgttggcacaatactgtagagatatagcatgcttatctttttaggcaatgtgcaagtgccaacacggtaatccgggctatctcccggcagcgctttgtttatggtcacaagcttgaccacggagacatcatgctgcaagattagtgccacgaataaaaacgagattttgtagtatttaggataaacataagcattcacaaccactgatctaaacatgttagaaatgaggactgtaaggtggatgtggtcctcgcacagataagcggtactaatcaaacaggactctgaggattccttatgcgagcgtgaatctttgggaattttgaaagaaattttcatactcatttgtggaatgttttgtttcatcctcaagagtcgatgtctcaagcttgtccgtgacctgaaggttctcctttccaagagatgtattgtgcaagattcgggttgtttcttgatgattaataagaacaacattccgatggccagagtgacaaggcttaggctcgatcgagggcgatgaaggccgtttggtttcaggaagatggaaaaaaggtttagatgaaacgaacagagatacctaacatcaccttctcgaatgactcacgattttcagctgcgtgaacttcatgctgcggccggagcgttcagatgcttggccagtgcttgcttcgatggcgaaatgggacaggaactggatgcagaaatggttctatatcagc

SEQ ID NO: 54708 - DNA, 548 bp, Oryza sativa
  Clone ID: PAT_MRT4530_56787C.1
taccacagtagatgtttttgtagctcgaaaccagatgtgccacaagattagaaaaaaagggtactatttccattgcagtgttacttaatgttttggcatcgtccacatctccaagataaaaaggtattgtttcatcattacttgttctaactatatatataattacacgaacttgctaaaatataactatatgaatgttttttcatggtctactaataccgtttccattgttcatatatcaaatcctaatacttttgcatcaattaatgttgtatgatattgaggtttgattgcaccattctaggatgtcattttttatatgagaaaggagggagtaatttggaacagatcagcagaggacaagggctagtttggaacatgcatacagcatgaaaatgaaaaagaaaattgacaccaacaaccaagactacccaggaaattaactttgatgtgctattttgaggtcctatatatccttttattgtttttgaaaccttgcaagaagaatttaagttggcatctatcatttcgttaaaaaaaaaaaaaaa

SEQ ID NO: 54709 - DNA, 665 bp, Oryza sativa
  Clone ID: PAT_MRT4530_56788C.1
cccgccgtcaccgtccgattcccgggacgtccgacccgtcgagctagctagcttcgatcagtagctggaggatgatgaggaagttggcggtgttggtgttggcggtggcgatggtggcggcgtgcggcggcggcgtcgtgggtgtagcgggggccggttgcaacgctgggcagctgacggtgtgcacgggggcgatcgcgggcggggcgcggccgacggcggcgtgctgctccagcctgcgggcgcagcagggctgcttctgccagttcgccaaggacccgcgctacgggcgctacgtcaacagccccaacgcccgcaaggccgtctcctcctgcggcatcgccctccccacctgccactgatccatccatccatcgtctcctactcttttattttgtgatgtggtgtacgtgttcgtagtattgtcttggcgtcatctcgtcacgacgcgtatatgcatgcgcagtgcggcttttgaataaaaggggatcgaccgatgttatgtgcttgggtggtcagttcgcggttggctgcagcctgcagctgacttgcctatgtatacatgtcgtcgtgttatacagatataaactcgatcgatcgatccgattccgatcgatattctcaaaaaaaaaaaaaaaaaaaaaaaaaaaaaaataaatatattg

SEQ ID NO: 54710 - DNA, 2550 bp, Oryza sativa
  Clone ID: PAT_MRT4530_56789C.1
atggcgcccagctccccgtcctccgccgccgcgcccacgcgtacctccacgcgtaagcgcgccgcctccgcctccgcctccgccaaggccaccgacgagccctccaccaagcgcacccgcaggcccaaggcggagaccaagcccaggaagaagaaggacgaggtaaaggaggaggagaagccgcccatggaggacgacgcctgcggggaggagccggatgcggaggagatggccttgggggaggaagccgaggccgaggaggcggaggcggagcagaagcagctggacgcccccgcccccggtgtggcgaggaagcgggtggcgcagcccagcagggtccgacacggcagcgacggcgaccacgacccggagttcgtcggcgaccccttccccgccaaggaggcgcgcgacaagtggccgcagcgctaccagcgcaacgccgccaccaggaggcccgatgaggaggaggacatcaaggcgcgctgccactacagctccgccaaggtcgatggcacgctctactgcctccacgacgacgtctatgtcaaggctgaggaagataaggccgactacatcggtagaattactgagttctttgaggggactgaccactgccactattttacctgccgttggttctttcgggcggaggatacggtcatctcatccataatgatggagaatgctgatgatgaaaagcatgatctcaagcgtgtttttctttctgaagaaaagaatgacaatgtgcttgattgcatcatttcaaaggttaaaatcgtgtatattgatccaaatatggaatcagaagccaaagctcgacggttggctgattgtgatctgtactatgacatgtcgtacaccgttgcttattcaacatttgctaatatcccacttggcaaagttgtctctgattcagaggcatcttcagtgggaaaggctacactccttgatctgtactctggttgtggcggtatgtctaccgggctctgtttgggtgcggcacttgctggactcaatcttgaaacgcgatgggctgttgatttcaatagttttgcgtgcgagagtctcaagtataatcatccaagaactgaggtccggaatgaaaaggcggatgagtttcttgctcttcttaagggatggcatagcctttgtgatgaatatgtcaagaaagatattgatttcagttcagctggtgcctcagagaacgaagaggatgatgatgagcctcttgaaaaggatgagtttgttgtggagaaactagctggaatctgctacggtggcagtggtagagaagatggcctctatttcaaggtacaatggaaaggctatggccgtgaagaggacacttgggagcctattgagaacctcagggattgcccattgaaaattaaagaatttgtgcaagaaggatacaggagaaaaatcttgcctcttccgggtgatgttgatgtcatttgtggtgggccaccatgccaaggaataagtggtttcaatcggttcagaaaccgcaaagagccactaaaagacgagaaaaacaaacagatggtgacattcatggatattgtggcatacctgaagcctaagtatgtcctgatggaaaatgttgtagacatactgaagtttgcagatggttaccttggacgttatgccttgagccgtctggtggctatgaagtaccaagcacgacttggaatgatggttgcaggttgttatggcttgccacaatttaggatgcgtgtgttcctctggggagctcttcctaccatggtgctgccaaagtatccgcttcccactcataatgttgttgtccgtggtggtgccccaaatgctttttctgtaaacaaccatcagcctaatgaagtgatggaatatggttcttcccccaaaacagaattccagcgctatatccggcttagccgtaaagaaatgctggatagttcttttgaagggaaggatggtccagatctaggcaagcttttggatcaccagcccttaaagctaaataaggatgaccatgagcgtgtgcagcaaattccagtaaagaagggagccaacttccgggacctgaagggtgtcagggttggggcaaacaacatcgtggagtgggatccagacgttccccgtgtatatttatcttctggcaagcctttggttcctgactacgcgatgtctttcatcaaagggagatcactgaagccatttgggcgcttgtggtgggatgagacggttcctacagttgtgacccgagcagagccacacaaccaggcgagagttctgaccgtaagggagaatgcaaggttgcaggggttcccagactactacaagatgtttggccctatcaaagagaagtatatacaagttggcaatgcagttgctgtacctgttgctcgtgcattgggttactcccttgggcttgcataccagcgtgagtcggaggggagcagccctctgttcgtcctgccagacagcttcacggaagtcgggcgacaggcggcgccggcaagagcatcctctgttggtatccctgttggcgaggttgttgagcaatag

SEQ ID NO: 54711 - DNA, 1466 bp, Oryza sativa
  Clone ID: PAT_MRT4530_5678C.1
aaacaaagagaacatctcaattctcagccggatcaagaacacacggcataaaaggtggcattgactcacgaaccctgcgactgcgtttcgaccagggcaaacacacacgaacagcgcgcgcgcgcgcgcacacacacacacacacacacaaaacaggagcacaggagtgtcaaggcaggagagaccaagagagatccaaaaccctcggacctacttctccccagcttcagccctcctacaggtaaatccttgaagcaaaccaagcagcaaaacgctctcttctccttcggagagggcggctacctgttgcgcatgggccatctccctgattcctgaacaaactactcacactgacacacactcaccaaaacagctaaattagctacactaaccatgaatagaatcatgaatgatcagaccaactaatatgatgagctgcataacaatggaggatgcctggctctcctgcctgaccgactgccacgtcgggcctgcctttgcgggcccacctggcagtttcccgggccgataaaacgtgggccctgggccggcggacccccacccgatcagagggcggcctcgaagttgaggcgcgaggtgtaggtggccgtgggcttccagttcctggggatgacgtcccgggccgtgagcgccttctgggccgacagcgtcgtcaacctcaccgagaagggcccgacaagcgggccccgcacgaggcaccacgtggccccccacacatgcttcatgtccagccactccactgagttcgctatcctgtctcgcaagtgctcccttcttttgtgtaaacttgtattggaacaaaggactaaatcctgctttatctgcatggatccaatgtcgccctggccgtcctcgaactcgaccagcagtgacagccagaagttcgtcgagccctcgtttacacggaaggctatgttcttcccgccgtacttgcacgcagtccttctgtagacgaccgacagctggcctcggtctcgcaggtggccgccggcgccggcgaccgccatcctgctgaatgcggcgccgctgaggtcgaagtgcgtgcggccgaaggcgcacagcccgccggggcactcgtcggtgacgatgaccgtgacggcgcggcgggagcagatgccgtggtcgaggcacttcaccttgtagcaggcgccgcagccctcgccgtccttgaacagcaccgggctcaccgaccccacccgcgccttcatcggcaccacgtccaccagcgatccatacccacacgccccgccggtgctgccgtcgccttcggcgtcgccgtaccacgtcgcggtcgccggccgccactccatgtcgaccgccgccgcagccgccgcggacttggacttcccgccgtcgaacaagaacgaggcggagatggggggcgcgagcagcagcaacagcagcagaacgcagagcgagaaggagcgcgaggaggcagccgccat

SEQ ID NO: 54712 - DNA, 749 bp, Oryza sativa
  Clone ID: PAT_MRT4530_56790C.1
atgaagaaaaacaaagaagattgcagtcttttagttcttcgaatggcttcattggtgatgaagctcctgtacctgaagaaccacgacaagttcctacagatgcttcgtggtggtggccacggggcgcggagggaggggatccgcgcggcgctggctcgcggagggagggagcggcgacgcaggcttgtggagggagggagcggcggcggcagcctgagacgaacttcctcccgccgccctccttgtgcaacggctgctgcacggcgccggcggtggctagatgaagaggacggtcggcggcggctcgacgaggcggaggagtggctgcggcggtggcggcatgagagggatggcggcggctcgacgaagaggaggagcagtggcggccacacgaggagtagggtcagcggtggctcgatgaggcggaggagtggcggtggtggcttgacgacgaggaggaggggcgacgccgacaggatggatccagtagaggctcggcgacaaggcgatggatccggtggcaccgaggcatgcgcgcggcgcatccagtggcgccgaggcgtgcgcgcgatggatctggctccggcgggttggcgaaggcggcgcggcggtggcggacttcggtggcgaggcggaggttctgcggggatggagggagcactaacggcggcagcgcacggcgaggcgacagtggtggcggcggctgctccgcatggatgggctcaggagttcaccattggcggcgtgat

SEQ ID NO: 54713 - DNA, 759 bp, Oryza sativa
  Clone ID: PAT_MRT4530_56791C.1
atggctagaaaggatgaggcggaagggctcaaggcaagactgtcgctgcccaagtcaaagaggtgtggggacaaaggcgacggcggcggagggaggaagcggaagaagacgtacctaaatgtccttggtgtgtgctgctccaaggagggcgtcgaggtgctaatgtggctgccggcaccggcgatggagaggctggtggcagagattgaccacgtcagcgctgccccttgtccgccacgccgtcgaccgctgccgaggccgccgccgtccactgccttgtcgttatccaccgtcgctcgcttgcatcctctgcccgtgctcgccatcgtcgccgggtcaagcgcctccatcgctgctcactcgcatcctccgccgtccgctgcctcgtcgttatccaccgccgcgggtcaaccgccggccgaccagtgcaacgagcggagcggaggcggcggcgcaacggtgagggagggagggcgcgacggcgagggagtagcaagggaaggagggaggctatatggcggatggctgtcgaggaagacgaggctagcaaggaacggatctgccattgtcgtcgcctcgcgcgcatggattcgacgtcgccatagtcatcgctcccaccggccttcgctgcctgtgccgctcccattgtcctccgccacctgtgtagctcccgtcgtcctccgtcgctcgcgctactcctgccggcgccacctccatagccgtgccgcactgcagagaagagaggaggagagaggtggg

SEQ ID NO: 54714 - DNA, 600 bp, Oryza sativa
  Clone ID: PAT_MRT4530_56792C.1
ccggaacttctgggttcaaaataatatttttgatcaattgaacaacaacatacacgtgggggccaagttttaaaactttttttggcccaaacaaatcccttaactgttttgtacataatgaaatttattccgggttttcctaaaaaaaaaattgttattctcgaaaaaatgaaaaattagatctctaatggcctaaacgggttgcaaaacttcaaaatgtccgtgttggatcaaacaactggacaacctttttattcaggggggtcatgcaagggttccccgcggcatcaatttccataagtatcgggtccccaggtttgggtttcccaaatgaaattgcttgtgtgatcacatcctcaataaggggggggacgggtttcctcaggggccgcgcaccgtaatttttggcataaccttcttcgcaaatcagggccttatttgcattggacacctcgggggctattccaaggggtaacagcctaccctttattttttgtaggaggaaattaaaaattgctagcttctgagttttctctaagggacggaatacaaccatttctttaattttgttgagcaattttggacggaaaaatgccttca

SEQ ID NO: 54715 - DNA, 606 bp, Oryza sativa
  Clone ID: PAT_MRT4530_56793C.1
gtctaacttaggaggtgtccatgaatctagtactaaatctcaagacagcttcttctgttctgtaacatttctgggattggaatgctggaactggtattactaatagtctctcggtttggacaaaaaaaaaaaaaaaaaaaaaaaaaaaaaaaaaaaaaaaaaaaaaaaaaaaaaaaaaaaaaaaaaaaaaaaaaaaaaaaaaaaaaaaaaaaaaaaaaaaaaaaaaaaaaaaaaaaaaaaaaaaaaaaaaaaaaaaaaaaaaaaaaaaaaaaaatgggctttttttttttttttaaaggcaaatttaaaaaaaccggatttttgaaaaagaaaaaaaagggaaaaaaaatttttttttggttaacagggaaactaaaaaaattttccgagaaaaaatttttccgggccctttttttttttgaatttttaaaacccccaaatttaaaaaaatttttccgtgcaatgggtttcctttggtggccccttgaaaatttgggccccttcccaacaggaaacccctttaaattttttttaccccaaaaacctgaaaaacccttttcagggaaacttcccccctccaattttttttaggaaaaaactcccggg

SEQ ID NO: 54716 - DNA, 226 bp, Oryza sativa
  Clone ID: PAT_MRT4530_56794C.1
ggcacactactaggaaaagcattatcgcaagcggccgaaaagggtctttgcaggcggggcgaccgtccgcctgtatgccaacgactatgaaaatcgccgatcttcgcaggcggggcggccgtccacctgcgaagataattttcgcaggtggacgttggctagtccggtccgcctgcgaaaataggaatcggccgcctgcaaaaaaaaaaacttccgcctgcgaaga

SEQ ID NO: 54717 - DNA, 406 bp, Oryza sativa
  Clone ID: PAT_MRT4530_56795C.1
ggatcactcgcacaaagagaacacctgcctcgtgtagctggacacaacattggctacatggctgatcatcgctacagggaacttagtgtatggctggcattgtgacctcaagagtcctgccattgcttgtggatcaagaccctcgaactctaaactggtatcactactcaaagacccgcccaaattacacacatgaccttcggactgtgatggaatgtgctatgcatacagatcccatctgtgcaactgtaatcctcgccattcattaacctgactgtatcgttcatgcacgtgaaggatcagggcttctacacgacactataaccctgattggagagaccaaagctcaccaacatgtgatctcaatgaacgggtactagcttgcagacatgatctaacaaaacct

SEQ ID NO: 54718 - DNA, 864 bp, Oryza sativa
  Clone ID: PAT_MRT4530_56796C.1
atgaacattcagaacttaaaccagtacttagaccataagctagctaagccgacatcctgcctgaaaaaccgacgggtcgtcgttgattgcattgtgacagctgacgcgcgcgcgagagagagagacaaggtagagaggattcgtgggggatgtggagccatagaagtccagaagatggtccaatacaacctagaacactttgagcgataccagccaaccaggtgcatagtcaaaaatgaacgcggaaggtgcgaaaggcgaatttttcaggttttaacggcgttgtgttttcagttggtagccgatgtacctgtcgacagtgatgcgcctgtggtgacttcgtcaatttctccaggatttgccggcccagtcttcgaagatgctcatacgggtagggtttacgtgcgcgtgcattatgagtgtctgcgaggcatcacgcgtggcggcgccgtgcgggaggtgctgctcacgcggtgggaggggcgggacgaccaggtgctggtgtacggtctcctcctagcaggggtggaccacggcgagctcatgggcagagcgcggttctgcctatgcccgaccggcgacgacgagggcgcggccgcggcgagccgccgcgtcgtggaggccatcactgtcgggtgctgcgccatggacatcaccgtctccttcctgcgccgccgtcgccgagccccgtgccgtgccaccgggttcgcctccatctcctcttgccaacgccgacgctcgtcgcggcagccatgcgctgtcaccgatgaacaccgccgcgccacagccatggcagagcacggccagggagccatggctgctctgcctcctcctccttctctcacatctggttgcagccggacc

SEQ ID NO: 54719 - DNA, 942 bp, Oryza sativa
  Clone ID: PAT_MRT4530_56797C.1
agcacaaggaaggccgtggcgatcccaatggccaacgcagcatgccaccatttttcacaggtggcgaccatataaaacacgaagaaaatggctactatcgccgtgcctctcgagatcgactaagacattgttaagatgagtcgccatcatctatgatctatgatcgatcaatctgccgttcggtggcatccttggctccagatctcctcttcgctgttccccagcttctccgcggttcacgcccggttgcttctggcctggtgaacaactcttgggtctctgacatccgcggtgccctcactgccccgatcatctcccaatttctctttatttgggatgcggtacttcacgttcagctctcaccaggtatcgaggatcgtctcatttggtgttggacgtctggccatcgctactcagcgcgttcggtgtaccaggctttcttccatggctagcattccttcgcatgtgctgatcttccttggcacgtgctaaatgcagattcttcctttagtttgctttccagcggcactgctggacgactgatctcctccagaagcgtggcatcaatagtcacttggcctgccccttttgcggtcaggatcttgagacggtgaaccacatcctcctcgactgcgtgtttgctcggcaggtctggctccgtgtgctgtcgcctcctggatgggctgccctccccctccccctccccgtggcagctggttccaggactggtgaccgtcctccagggcctgcttactagagcatctccgtgctggcttcgactccctgatcctcctagtctcctggcagctgtggaaggaacggaaatctaaggttttcgactctgtgctctattctatatccgtggttctagagtccatccactcggagggtcatctgtggtctttagctggcattgccgtttttggagatttgttgggagtg

SEQ ID NO: 54720 - DNA, 948 bp, Oryza sativa
  Clone ID: PAT_MRT4530_56798C.1
atggctccctggacgtgctctgccatggcggcggcgcggcggcgtttgtcggtgacggcgcatggctgccgcgacgagcgtcagcgtcggcaagaggagatggaggcgaacccggtggcgcggcatggggctctgggatggcgtggaggtggcgctgcggcaacggacggcattggccggaattggggaaaaaaaaaaaaggcagtggcgcgagggaaaaaaggcttcggccttggagctcaccggcgacggcggcacaggaaggagacggcgatgtccatggcgcagcacccggccgtgatgggctccacgacgcgatgtgagaggaggaggaggcagagcagccatggctccctggacgtgctctgccatggcggcggcgcggcggcgtttgtcggtgacggcgcatggctgccgcgacgagcgtcagcgtcggcaagaggagatggaggcgaacccggtggcgcggcatggggctctgggatggcgtggaggtggcgctgcggcaacggacggcattggccggaattggggaagagagagagaggcagtggcgcgagggaaagaaggcttcggccttggagctcaccggcgacggcggcacaggaaggagacggcgatgtccatggcgcagcacccggccgtgatggcctccacgacgcggcggctcgcggccgcgccctcgtcgtcaccggtcgggcacaggcagaaccgcgctctgcccatgagctcgccgtggtccacccctgccgggaggagaccgtacagcagcacctggtcgtcccgcccctcccaccgcgtgagcagcacctcccgcatggcgccgccacctgcagcgaagaacgcgacccgtgccagccattggctctgccaatcagtgagaaagcaagtgattacagatctagagatgaccgagcggtgagggcagggtcgagcgggcgaacatga

SEQ ID NO: 54721 - DNA, 348 bp, Oryza sativa
  Clone ID: PAT_MRT4530_56799C.1
ttgttacggtgagggccatattgagacacacaaggcgtattttgagatactctgtgttgataggaaagatgtaaagcccaacataccaacattatcttcaggcaaaaaagcagaatcatttgatggccaggtcatccactccatggattactccaatatcggcaccaagacttataaggaaatgatcaaaggcaagcgtgtaacgatcgatggctatctcaaatgagtggtatacattgctgcacaatgtgcagaagtaaatggtactgagattccatgtacgatggtggtccgaacaaagcattggatcataccaaactattttgcatggggcgttcacattttaaa

SEQ ID NO: 54722 - DNA, 2910 bp, Oryza sativa
  Clone ID: PAT_MRT4530_5679C.1
ttaaagaggcccatgtggccctctgacatctactaggcccatatcggctttgaccccacctgtcaatgggatgggcgcgtccccgattcgccccgccgccgccgccgccgccccgccgccacagcccgccggcgaaccgtggccgtatctctctctatcctctccggagatggccggcgcgggtgccgggtgcgggccccaatccccgctcttctcccgcgcctcagctctggtgcgttgcctggcgtgaattgctgctgccgtatgacgtacatacagctcgcgcctcagctgtttcgacgtaatgcctagctccttctgatgaattgctcccgtttctttccagttcgctctttttcctcctaaacatcgtgcagcgccggcgcgtccctcggtggcgcggtgtccacctcgccgtccgagcaggagaagcagcggcagcagtcggagctcattttcctcgggcacgggcaccagcgagggcatcccgcgtgtcagctgcctcaccaatccctccaagactttcttctttgtcctttcctgcacgcaggtctgtaccaaggcagccgagccagggaatcggaacaggaggcgcaacacgtccatcctcctgcgccatgccacgccgtctggcacggcggacggagagcgctggtttttgtgtggggggggtcaataaaccatttgatctgcaatatcacatgacacaaatgattactgggtacagatgaaactcctagcttgtctttcttcggtgaatcacactagatcccagcaataattagtaatttttcttctctaggtcacacataacaaaaggctggtgtccaggaatcgattacactccagctgctcgacctagtcttccccttaggatcatcactccaaaatatctgcccatcatcatgaccgtggcttgagggttcgtccctggtgatctagaaaatgttgagccatcgactacacggacgcctgaaactccaagcacacggtgttgctgatcaaccaccttccctacatggcatccaccatggtagtgccagatggttattactgtatccctgcaaaattgctctagggattctgtgtcatttgtatgcttgggtatcaagttcacattagcctgcacactcatattgagcactctttccattgaatgtccatcagtgttggcagacagttcagagaaacggtttgtcttcagtattcgttcaatggtcttgataccatagacgcaacgagtgagatcctgtggatgactgaagtagttgaaggtaaccgcagggttcttcttgacatcagtgtctatcagggcaagatgtcccgtagacagtggaccatcaatcttctcgaggataaaaccaccatggaatatctctttgggtagattaagtttggtatttgcatacttctgtgctttttccaggcttctttccttcggaggaattgtggacagctgtccaatctcagcggacatgattccatggtggcaatggatgctttctggtgactggccaaaaccactactggcctcaatgaacacaccagcttcagttattccaacagtctcaatcagggactggcgaggggggcttttcgtcggtatgaatatggagttcatggggttatcagccatccctttacccacatacttgttatggagaactacaggaattttatggctcctaaggtcattcttgggtccaatcccactgagcaatagcagctgggggctgccaattgcgccagcagagacaatgatttcactatcacagttgctgttgaggaatgcctggtggagtcctccattctcatcggtgaactgaactccggttgctcttggcttcagttgccctctctgcgagttaaagactatcctgttcacactagcatgaagcagcacccttaggttgttagggtctccagctgcaagtaagtcggctgctgtgtggcggtagccagtctcatcaaagatggtgccaccaactttggtcccagaaacatggtcatatgtgtagccattgaaaggagatacacctgcttggagtagcccatcccttagtgcagcctgccacatatcggtagtcagccactggagattcttctgcttggagtagcccatccactcgtgcagcctgccaaggtgcgatcttaggccactggacgatcttgtcctccacccaagggaaggactcattcaccaggtcttcatcccagcctacctcctggatgaagtttgagctggcccggctgtagaagccggcattgatgcaggtgccacctcccaacaccctcgctcgggcattgatgacgccgtcagtggagatgaaggcctgagacgccgagtccggcgccatattgctcaggccaatgtggaagttctccatgtaggagacgttgcggttgccatacggagaccctcccctctccagcaggagcaccttgtacttgagcgacaatgtcgccgccagggggcaaccggcggtgcccccgccgacgacaatgtagtcgtatgtctcgtggcgcatcgctgggaagctgctcgccttctggagggtagggagattccttaagctgaattgctggttgccttgggataaactgaaggagcagaggcaaaccatggcctggaagatgaatagcattctcttgctcaaagccattgagcctgagaaccacctgccaagctaaactctttccccttcttaggattttccttccctccaaaacaacggtggcaaaacctctctccctcccctgtttcctgatctccacctctcaagcttgctccctgcatttgagtaggtttatgtagagggcttggcattgggggattgatagcaataggctgcgtgtgtatatgcattaaagagagcctcgtgctcagaattcctgcagacccgggggatc

SEQ ID NO: 54723 - DNA, 2649 bp, Oryza sativa
  Clone ID: PAT_MRT4530_567C.1
atggcagcctcgccgcccaaccggaagcggcggctcgcggcggcggaggcggaggcggagccggagttgtcgccgccggatgcgctcggcgcgctccccgtcgaagtcctcgacaacatcctcggccgcctacacatctacgacgtggtccgcacctcggcgctctcccgcgcgtggcggcgccgctgggagtcgctccccaccgtcgacctgacccgcagccccggcgtcgcggcgtccgacgtcgacgcggtcctcctccggcgctccgcccccgtccgcgccttccgcctcgccgcgcgcgacccctcctggttcgtcgacgccctccacgactggctcctctacctctcccgcagcggcgtccaggccctgtacctgtggttcccaacgcccagcttccggctccactcctgcctcttctcctgccgcgagctcacctccctcgacctcgagggttgccgcctcccacccgcgccctcggggttcgaggggttccagaacctgaagaagctacacctcacgaaagtttccctcccggagcacggggacaaggcattggcggccttgttcgccgggtcgccattgttggaggatgtggagcttatgaacgcgttgctcgtcggcgatggcgccgacgaatgggtgattcgcgcgcccaatctccggaagcttataatggttgctccgtttccttatgctggacgagtggaggatcttccacgacttgaggaagggattctgtgcggccccaattacgccaagtttttgacggggatggctcatgtgaccaagctagagttcgtgtgcagtttcatgcggggacaaggcgatgatgctcaggatattgatgcgaatgatgagttcttgaatgctcagtcaaccaatgatatgtttgcgaaacttcatgttgtgcgaatgaagaaagttgcttgcctctgtaatgagatgcactttatggagtttgttctaaacaaagcaggagtactgcgagtgctatctgtttatccttcttctggcagcacatgtagtaatgagcagacaattataacagaacatccgagagtttcacctgatgcacaagtcatcttcatgaatagagaatctgcaaataatggttacatgcacacatccagcgtaaactatgagttggaaacaataagatcaggcacctggttagatgttgaacaccctcggaaaattcatcggttggatctggatgccgtggatcagcagaagcagcttgagaagtatctgtccgagaaaagcaacattcctattcccccatttcctgattcttcttcagtctcgtcgtcttcccaacctgtggtccgcacctccgcgctctcccgcgcgtggcgccgccgctgggcggcgctcccctccgtcgacctcgcccgcagcccggggatctcggagcccgacgtcgacgcgatcctcctccgccgccccgccgcgctccgcaccttccgcctcgtcgcgcgcgcgcgcaagggcacctggtccgtcgacgccctgcaccactggctcctctacctctcccggagcggcgtccaggccctggacctctcgttcccggagctccgcttccggctccacccatgcctcttctcctgcggggagttcacctcgctcgccctcaactcctgccgcctcccaccggcgccctcggggttcgccggattccccaatatcaagaccttacgcctcgaggatgttgacgtcccgaggcacggggggaaggaagtggcggcgctgatagccgcgtcgccattgctcgaggatttggggctcttggccgtgaagctcattggggatggccctgacgaggagtgggttattcgggcgcccaatctgcgtaatctgacaatggtgtgtgaaactgcttttggtggccgagtggaggatctcccacgactggacgaagggagattgtttggtcccaattgcgcaaagttcttggcaggaatgtcgcaggtgaccaagctcgatttcttctgcaactgcatgttgggatgcactgaaggagctaaggaatttgaagcaaacgacaaattcttgaatgctcagttgactgatgatatgtttgtgaaacttcatgttgtgcaactgaagaatattgcatgtgttcgtaatgaaatgcactttatggagtttgttctttctaaagcaagactgctaagaaagctatatgttcgtctttcattctacgctatatgcagtaatgaggaggcagttattgatatagcagaatatccgagaacttcatctgatgctgagatcatcttcatggaatgtggcattgactgtcctgagtttccagagctaacagctcctcatcaacccatcttaaattcaagtcttatacaacttttgatgttaaaggccatgctcagacaaggagacattactgatcctgtcagtaacggtgttggcaatgcacatgtgtattctgaagagggccatatcgtcaaccatgttgccaatgttaatgctgattctccagagggccatgtctgggatcgggaggcgacagactctcatcccatcgtccatggttctgtcagtgccgtgcagatctggagcagaccatgcttgctagtcgtaggtgcactcgctgtcttttgtgattatactagtatattctag

SEQ ID NO: 54724 - DNA, 2393 bp, Oryza sativa
  Clone ID: PAT_MRT4530_56800C.1
ccgccggtaaccgccgtaccgccgggtggcggtaaccgggcccccggcggtttttgaaaccctgccaccaactcctccagctacagccgctgcatcagctgctgctacttctactcctactgctgctgctgctctctctctcctctcaccattttcgttttctaccgctccccacatctctcctcctcctccctttttcctctcctcttctctcctcacctcccaaatctgaaggaatccgccattctctgagcttgctctgtgtgtgtgcgtgtgtggagttctttctttggttggagaggaggtgatgttttgtgtagcttcgggcgtggtcgatccggggtgttgctgttcttggtgggtggcctgctgctgctgctgaggaggtgaaggaggagatctggagatctctcaggagcgaagcattgacattccgctatggaggctccttcgtcgtccccgtcatcgccaagtctgaaagatcatctctcttcgccaactggccctttgcatctcaaagtatgggaggtcatatgcattgtcttgggggctttcatggtggtcatcttctttgtaaccgtgtggctcacgatccggagtcggaagagggttagacgggcttcggcaaatatcccaatcacccaaatccctgccatttccaaggaaatcaaggaagtgagggtggagcaagtcccaacaagcgattttgcagcacatgatggagtcctgatgacaatccaagacaagtctagtgagaaggagtcagacaaggtcatggtccatttgggtgtaagcaaatcgaagcgtggcgatgagagccactcaggatcattccgttacatggacaaggatttaggattccagtcagctgatgaaggaggctcaggaacatttcggcataattcagctcatgcaataactgctccttcacctttggttggcctgccagagttctcttacctaggctgttatgattgtattactatacaaggtgttggtttttctacttatgaatttatatatatatatacatatacttaacggtggtcttgacaatttgttgttgtaagtttttaacagtgtgtacagttgtagcattatgaatactggtcgaacccgaatatttgtgaaaaagaaataagagatgaagttgaggctattggtcatgttcgccacaagaacttggtccggcttctgggttactgtgtggagggtactcaaagaatgcttgtctatgagtatgtaaacaatggaaacctagagcaatggcttcatggagctatgagtcaccgtggttcccttacatgggaggcccgtgtaaagattcttcttgggacagctaaagcgcttgcttacttgcatgaggcaattgaacccaaagtggtgcaccgtgatatcaaatccagcaatatattgattgatgatgattttgatgccaaagtatcagactttggtttagctaaacttcttggtgctggcaagagtcatgtcactactagggttatgggaaccttcggctacgtggcaccagagtatgcaaacactggactcttgaatgaaaagagtgacatttacagctttggggtagtacttctagaagcaattacagggagggatcctgttgactatggtcgtccagcgaatgagatatctgtgcccttccagaaattttgttattattctattttacttaagctgaccaggcgatcagaggaggtggtggatcccaccatagagacccggccttcgacaagagctctcaagcgtgcacttttaactgctctgagatgtgtggatccagattcagaaaagagaccaaagatgggtcaagttgtgaggatgctggaatcggatgacccaattcctcgtggggacagaagatctaagcacaaccgtggagggagcaccgaaatggattcccaaagggacaacaactccgacacggacaagagtgacaatccagattccaaaccaagcaggagcagagcctcatcttccaaatgagaacatccagcattcctctcctattatattcctttggtccataacggaccgtcccccctctgtttctgctgacgaattggtaaccgccattgctgaagcttgaatacaaaagaagctcgaagacacattggttctcattccttttttttcttctttttcgtggctgtaacggtttatgatttatttgtagacaaggtgttggtttttctacttatgaatttatatatatatatacatatacttaacggtggtcttgacaatttgttgttgtaagtttttaacagtgtgtacagttgtagcattatgaatactggtcgaacccagaatatttgtgaatgatatatattccaattggaagcctctgcccgttttggaatgtgcatgtacct

SEQ ID NO: 54725 - DNA, 477 bp, Oryza sativa
  Clone ID: PAT_MRT4530_56801C.1
atggatggatcgagaggtgtttgcaagagtcccaatcgcgagaagagatgccaatattctcgtcggtttggaggtttcttggtcgatctgactgaatattttgatcactattcgtcgatcagtcagtcgttgtcgattggtcatcgttgccaccactggaatccgggcatccagctgcgacctgcgactgcatctgcatgcaccatccagatgagaacaccttgctgggaatctgagttcacgacatcaacatgttttttaggcataccaactatagctcaacaatcagagttgtgtttcaatggattatttgccaaggactacttgcttccaagaaacatcattctggaaaccatcaaaccaagtgcctacgtgctttgcaagtggatgctgatctctgtcagccaaaatgattcagagaaacaacttggctatgtaccacgtgatcagttaatcgagacacttatttttagataa

SEQ ID NO: 54726 - DNA, 165 bp, Oryza sativa
  Clone ID: PAT_MRT4530_56802C.1
ctgtgccagccgtccgtatggttatcagaaaccctacagagcgagatcgacacctattactgtagaaggatgagattgtgtcaatcactggagctgcgatcatgttggatcatgcagtaatggaacaccttcctctgagtatgccatatttcggatttctgatgt

SEQ ID NO: 54727 - DNA, 2094 bp, Oryza sativa
  Clone ID: PAT_MRT4530_56803C.1
atgtacgacgatggtcctcgcaagggaaaacccggcggcctctccatggacgccgccaccgccgcggggctcgcggcggtctggccggagtacttcccggaggagagcgagttcgccgcggacggccgcagcgcgcgcctcgccgccgacctggtcgacctcttctcctcccccgacgcgagcgacctcctctcgcgaaatatatcagtggtggcatttctcgataatgtctacgattttagcggatggacgctccaatcgttaattgaaatgttctggaaatcgcaactaaagatacaagagcttgctagtggtgaaagccatgaagaaggcagagtgccacgaactatagagtgtgagcttacagaggatcttgtagattgttgcatccctggagagactgtaacagttactggaatcgtcaaagtactgaacaactacatggatgttggaggagggaaatccaaaagcaggaaccaaggtttatactacctgtacctggaagcaatttcagtaagaaactcaaaggtccatgctgcttcaggaaattcagatgctgctagtggatctttcggttttcaagcttttactgaaaaggatcttgaattcatctccaaatttaaggaagaacacggtgctgatgtttttcgtcaaattcttcactccttttgcccctctatctatggacatgaacttgtaaaagctggtatcacccttgcgcttttcggtggtgtgcagaagcactccattgatcaaaacaaggtcccagtgagaggagacattcatgctgttgttgttggtaatccttcacttatagagggtctaagcttcttggtaagaattttcttagcatttctcacagtgcaattaaaactcttgctcaatgcaattctaggtgatcctggactaggcaagagtcaactgctacaggctgcagcagctgtttctccacggggtatatatgtttgtgggaatacaacaacaaatgctggtctaactgttgctgtggttaaagattctatgtcaaatgattatgcatttgaggctggtgccatggtccttgctgaccgtggaatatgctgtatcgatgagttcgataaaatgtcagcagagcatcaggctttactggaagccatggagcagcaatgtgtatctgtggcaaaggctggccttgtggcaagtttatcagcccgtacttctgtgctagcggctgctaatcctgttggtggtcattacgaccgagcaaaaacagtgaatgagaatttaaagatgagtgccgccctcctctctcggtttgacttggttttcattttacttgacaagccagatgaattgctggataagagagtatcagatcacataattgcactccactccaatgatggaggccctttcacagccaacaagaggataagaacagtgcctcaatttaatgccagtacagagtttggtgtcggtagaacttcattagcttcaaggctgagattgcaccctgagaaagacaaggatttctgtccattacctggaccattacttcgcaagtatatatcttatgcaagaagccatgttaacccccgaatctccatgccgtcgccagcagctgacagtctgcaaaagttctatttggatttgagaaaacaaagtgattctgctgatggtacgcccatcacagcccggcaactggaaagccttgtaaggttggcagaagctcgtgcgcgggtggatctaagagaagaagtgactttagaagatgctaaggaggtcatagacataatgacggaatccttatatgacaagtgtgttgatgagcacggtgttgtggactttgctcgaagtggtgggatgagcaatcaaaagcaatcaaagaaatttctccgcgccttaaacgagcagtgtgatttgcagaaaaaggattgcttttcaatgaatgagatgtacaacttagctgatcgtatcagcttgcaagttgcaaatttagatgctattgtggaaagtttgaacaatgctggctatatcactaaaaagggatcatcaatgtatcaggtagtgacttcgtcataccaggggagccaagctacatggtcaagacgatga

SEQ ID NO: 54728 - DNA, 291 bp, Oryza sativa
  Clone ID: PAT_MRT4530_56804C.1
atgcgcactatatactttgggcaggctggaagtggagaacttcaattgaagtggatgactcaaggacaacaatacaaggtcactgtatctcgctttgctggccttgatccagatgatctcaaccgtaccaacattcacactgagaagcccatatccattaacggcaccatgttcatgtatgcattaggctcaccaatatataacaatttgttaacagtgaaatttgttaaggaaattgatctactaaaggaagcttatccagaagagacggcatggcaagttatctattaa

SEQ ID NO: 54729 - DNA, 236 bp, Oryza sativa
  Clone ID: PAT_MRT4530_56805C.1
actagtggatccccgggctgcaggatcaactcacttgcggtctgaaactagtttgctgcttgttaatatgcactctcacagaacttgtttcaatgtggaatttgacaaaggtggaaattcaactgtgcaacatgttgtctcccgaagggccaaaagtctctcttggttcttataactggggactcgtcttcatagctgtgttggtagacaactttctctaccctatatctgcattc

SEQ ID NO: 54730 - DNA, 519 bp, Oryza sativa
  Clone ID: PAT_MRT4530_56806C.1
atgcagtggaaaagaaaaaaacgagataagcctgaagacttgactcctgcagcgggcgactccattccacaggcaatccttgacggtagcgacgaaaccaacctcttcgagacatcaccaactgagaagaacttcaactctggtgtgggggaaaaagagagcaagactgagtactacccactgtactcagcaagtcataccagaagaggagggctgacgtcatccaaggggtggggcggcgccgacaggcggggcccacgggtcagcggcacaagagagagggtggtgacctggcgggtgggccccaccaggtggtggcttaaaggggaggaggaagacggccttggtcggctcagcttcaagccggccggccggttatggcgagggcggcggcggcaagcgaccaccgacggcggcggcggcaagcgtccaccgatggcggcgacaggcgagaagacggcggcggccggcgagaagacggcggtggccggcgacgcgggcgacggcgcatcgcggtga

SEQ ID NO: 54731 - DNA, 541 bp, Oryza sativa
  Clone ID: PAT_MRT4530_56807C.1
ttgtcctctcctctccacgccgaccgccatggccgccgccgccgaggtcgacgcggcccccgacctccccaacggatcctccgccaccgccacaaccgacgacgccgccgaggagaagcctgatgtcaaaccccaggtggaggtggaggtggagtacgtcccggagcaggcggacctggacgacggcctcctcgccgacttcaagagcatcttcgacaagttcaccttcaaggattcctctgccgacgccgaggatgacgagaagaaagatgaggctggcactgatgccgcaaagaaggctgcagggtctgattcggacgacgacgagcaggggacacagcaaaagaaggaagggggcttgtccaacaagcaaaagaaactacaacgaaggatgaagattgcagaactgaaacagatatgcaatagacctgatgttgtggaggtctgggatgcaacggcatcggatccatcattacttgtctatctgaagtcttacaggaacactgtacctgtcccaggcattggtgtaaaaggccaaatt

SEQ ID NO: 54732 - DNA, 411 bp, Oryza sativa
  Clone ID: PAT_MRT4530_56808C.1
gtttgtcttgcttattgacaattttgatgctcaataggggggtgttgaaaatgatggggatgaatttacatttttgaccaataaaagtgcccctaagaataagctggtaagggtaaatataaaaatccagagctgtggactgatgttctctcagagcatgaaaaagatgtgctcgaatcagccgacgccggtaacaataaccaacttttggtgaattatatgtcagatgttaagcatattctgcagataagagaccttacaactggaaactttattcatcaggtgcctttggagatcggttctggttcagagatctcgtgcacacgagaagacaaggaagtatttattggcttcacaagctttctttctccaggcattatttttaggggcaacttaacatctacaatccct

SEQ ID NO: 54733 - DNA, 2085 bp, Oryza sativa
  Clone ID: PAT_MRT4530_56809C.1
aggaattcggcacgccggttccgccctctcgactctggacctctcctctccacgccgaccgccatggccgccgccgccgaggtcgacgcggcccccgacctccccaacggatcctccgccaccgccacaaccgacaagaagaagtcgcgggagagcgagcgccgccgccgccgccgcaagcagaagaagaacaaggccgcgtccaacgccgcagatgcggatgcggccggggacgccggggccgacgacgacgccgccgaggagaagcctgatgtcaaaccccaggtggaggtggaggtggagtacgtcccggagcaggcggacctggacgacggcctcctcgccgacttcaagagcatcttcgacaagttcaccttcaaggattcctctgccgacgccgaggatgacgagaagaaagatgaggctggcactgatgccgcaaagaaggctgcagggtctgattcggacgacgacgagcaggggacacagcaaaagaaggaagggggcttgtccaacaagcaaaagaaactacaacgaaggatgaagattgcagaactgaaacagatatgcaatagacctgatgttgtggaggtctgggatgcaacggcatcggatccatcattacttgtctatctgaagtcctacaggaacactgtacctgtcccaaggcattggtgtcaaaagcgcaaattcttgcagggtaagcgaggtatcgagaaacaaccttttcaactccctgacttcatcgctgcaactggaatagaaaaaataagacaggcatatattgagaaggaggatagtaaaaagttgaaacaaaagcagcgggagcgtatgcaaccaaaaatgggcaagatggatatagattatcaggtcttgcatgacgccttcttcaaataccaaacaaagccaaaattgactagtcatggtgacctgtattatgaagggaaagagtttgaggtcaagcttagggaaatgaagccaggcatgctgtcgcgagaacttaaagaggctcttggtatgcctgatggtgcgccacctccatggcttataaacatgcagagatatggtcctccgccctcttatcctcagctgaagattcctgggctaaatgctccgattcctcctggtgctagcttcggataccgacctggggaatggggaaaacctcctgttgatgagcatgggcgccccttatatggagatgtttttggagtcctacagcaggatgaacctaattatgatgaagaacctgttgatcgcagcaagcactggggagacttggaggaggaagaggaggaggaggaagaagaggaggaagaggaggaagaagagccaatggaagatgaagacatggaagacggcatgcaatctgttgacaccatctcaagcactccaactggtgtggaaacacctgatgtgattgatcttcggaagctgcagcggaaagagcctgaaaagcagaccgagaagcaactataccagattcttgagcaaaaagaagaaagaattgctcctggggctatctatggatcaagccatacgtatgcgattggtgcacaggataaggctggtcctaaaagggtggatcttctcaagaatcagaagtctgataaggtggatgtcaccatacaacctgaggagcttgaagttatggatgatgttttggctgccaagtacgaggaagcccgggaggaggagaagctacggaaccagaaggaagatttcagcgacatggtggcggagaacgcaagcaagaggaagaggaagcaggagaaggacgggaagtcgaagaagaaagacttcaagttctagatgttgccctttgcgagttagccagatccaaggaagaggaggcggcacggcatccatctgtttttttagattgcccttgtctgagaatagatgaatgcgtaggcacgagtgtagcagcagcacagcccttttttatgtgtgtgtgtattgtatgactgatggccttcaccttgatatgatgatgatgtttactttactggacaattatcgtgtagtagaggacagagagcgttacgttctcttttcacatactagtaacatcttcttagcttc

SEQ ID NO: 54734 - DNA, 522 bp, Oryza sativa
  Clone ID: PAT_MRT4530_5680C.1
atggagccaccggaacgtgaccacgccaacgacgccctggagcacgcaccggagcgccgccgcttagacatcgttgtcgtccggccattctcgtccatcccgaagcaagccgctgtgccaagaatctcgcctcgaccacctcttcaagacgcctcaagaaccccagccggaaacatcaagaacacggagaacacatccttttcttcctcgacgccgatccgaactcgcctccaccgtcatcgtcgattaccactgcctcgctcgtcgtcccgtttgagccgtcgccgttcacccgaggaggagcgtcgccgtcgaaccgttccaactgaagccgctgctatccaagcttcggagatttcttcctacagcttggtgagcctcctggacctcttaggaaacacatgcatggatgcatctagcaaaatcaaagcccctaggcaacatgcagtaacagctcatgtataccttccgctcaccctcactatcggcgctactccgatgtctcctagccaacaaaactag

SEQ ID NO: 54735 - DNA, 327 bp, Oryza sativa
  Clone ID: PAT_MRT4530_56810C.1
atggcgggaaagatgaagcagcagctgggaggtgagatggagattgatcagcttagggttagggatgatctcgaggaggaggaggaggatgagatgagctggatggccaggaagctgttcctgtacaacgtcaccattgggctgtacggcttggattgtttttttaattctttaagaaaattttatgaaaaacataatttagcatctcaggaagtatgctctactaagagcgagtacaatatgatggtgttgtttgaatcttctgaagatgaagataaagataaagatgaaatgtttcacgcaaaacgagatattaataacgtgtga

SEQ ID NO: 54736 - DNA, 717 bp, Oryza sativa
  Clone ID: PAT_MRT4530_56811C.1
atgtgcatgtatgttacagtacgacaagggtttgtccaatccaccaggctactgatttgcagtattttcctgacatcaatagagagaaaggagaaattagcaattaaaataggagcggcagaggcgcgggggcccgaggcgtccgatttttccaactgccgtcgggcgcccgcgcggagcattctccctgtaaacctacaaatgttatacacatatggtctccatgctctgcgtctaccccaagcccagctcgatcgccggcggcttcgacttcgacgacgtcgcgtcgtcgccgccttcgtctccggcttgccggactttctcagccacttcttccccttcgccggccgcgtcgtcgccaacccgttctccggcctccccgagatccactgcaacaaccaaggcgcggagcttgtcgtcggcgaggtcggcgtggcgctcgctagcctggactacggcacgatgggcgcgtcgttgcggaagatccagctcccgcacggcaaggacgtgccgctgtcggtgcagatgatgaaaaacaccaaatcaacacgaaaggaagttggatatggatttgatttggactcaaaatcgggtgaaattaaccccataaatacaaggatttcatgggactgctacaacaagaaatcgaacaagattgatcaattggttagtactcgcacattaatatccaggaccttggaagtttcaactttttga

SEQ ID NO: 54737 - DNA, 669 bp, Oryza sativa
  Clone ID: PAT_MRT4530_56812C.1
atgaagctctccactgtcctgtgttgttaccttcttctccttggtctctttgctccagaaatcatatcagatagccctcctcttcaggatgtatgccctatggcaccccagggtgagaggaaactcttcatgaatggtttcttctgcaagagcccaagcaccataatggcctctgatttcaagacattgctgctcaaccatgccggggacctggacaacatggtccggtcatcggcgaacatcatcaccgccaccgagttccctggcctgaacacccttggcatttcaatggcgcggaccgacatcgcggtcagcggggcggtgcttccccattcccacccaagagcttcagagatgatgtttgttcacagtggaagtgtggtggcaggcttctttgacaccaaggggaagctgtttcagaagacccttgctgagggggatgtcttcatcttccccagaggtctggtccatttcatcatgaactatggttttggccttgcgacaactttttcggtactcaacagtcagaaccctggtgttgttgggatcacccatgcgatgtttgcgccagattcagaggtagctgaagggctgatggccaggatgttgagtttcagagatatgggaatggatgacagtagtagtgttgattcaccatggttttactga

SEQ ID NO: 54738 - DNA, 869 bp, Oryza sativa
  Clone ID: PAT_MRT4530_56813C.1
gaccagccagggtacacaaacgacaattgttgacatacagatccacgtcttacaaaaaatataaaagattacaaatgcagtagaaaaagataaaacgaactaaacttggaagcttgacttcagcagtggggcaactccactccacaggcatccttgacggcagcgatgaaacaaacctttctgaagtagctccaactgggaagaacttcaactctggtaaccaatcactgtccaacgctacaccatgttgcaataggcccaaccaaccacctgaactacaccatagccaaaggtgtacatcagatcaagcagttacccactcccgcttgtggcggctaggcacggctcggctcggcacaaagccggccggccggccatggcgatgtagcggcggcgcacgcgggagaggagagaaaaagggaggagaggggagcctcaccggtgagcatggcgaccggagcggaggatgaaaggcggcggtgacccggcgacgaggaggggcgaacgggtggcgacgacacctatagaaaaggaggagagggattagggatggagaggacgacctggcggccaccattgacggccgggggcggagaggaatggatagctcaccggttcgagagggagatggggttccggcaacgcgaggcggtggccgagatgacccacgcggcggtgaagctagcggtggcggcggcttggcgcggcggtggctctagtggcgacggcgcgctgccggaggcggcggtaggcggtggcgctagcggtaagcggcgtgggcgcgataggaggcacgagagagagcgacaagcgcggaaaaagggagaggggactcgttgttaagcaggttttaagaattaaaacacaaa

SEQ ID NO: 54739 - DNA, 765 bp, Oryza sativa
  Clone ID: PAT_MRT4530_56814C.1
atggcgtcctcatcggcggcggcgccgccgctggcggaggaggacatgaagctgatgcgcatagggaggacgatcttccgatcccaggatttctccgggacgtgccggagggactcctactgcatccggtgcggcgtcgccttctgctcccactgctgccgctaccaccaccgccacgccgccgtctcgcgctggtacgacccgctgctccgcgtcgacctccacggcggcggccggccggtgctccccacgcggacggcggacgggcggcacgcgctcccgcgcggggtcgccgcatgcatggccgcccaggactacacgtcccggctgccccgggacgccttctgcctcccctgcggcgcctcgttccgcgccgacctctgcccccaccacggcgcgcacgccgacgcggccaccggcgagcccctcgccgacgccgtgctgcgcggcatcgaggagcacggcggcggcggccggcactgcgtgcgctgcacggggtccgagtggtgggcggacctcatgggcgtcgtgctcggcgaccccgtgctgaccggcgtcgacgaggagggggcgtactacgagctgctcccggtgctgaaggcgacggagagcaagtgcctccgctgcggcgacgacatggaggggaaactccggattgggttctactgctcgctcgactgcttccgggaggaccagcggaccatcgaggagaggaggcagcggagggtggcaatgcatgccgcgcgccactccggcaacaactga

SEQ ID NO: 54740 - DNA, 416 bp, Oryza sativa
  unsure (1)..(416): unsure at all n locations
  Clone ID: PAT_MRT4530_56815C.1
ggcaggaaggcaagtcagtttgaccgaagagaagaggggtggggcccaattgtcagtgacgcctggttccatttcttcctcctttgttgttggattccagttccaggcgaggcgagcggcaaatccaaatcggcacacgagcgagactgcgagtgcgagcgcgagcgcgagcgcgagcngtntcgattggagttggagaccatctcgccgccgccgccgccgccgcctcttcttactgctgcttgtagatggcgcggagcaattgggaggcagacaagatgctggatgtgtacatctacgactacctggtgaagcgcaacatgcacaacaccgctaaggccttcatgaccgagggcaaggtcgccaccgatcccgtggccatcgatgctcctggaggcttcctcttcgaatggtgg

SEQ ID NO: 54741 - DNA, 1340 bp, Oryza sativa
  Clone ID: PAT_MRT4530_56816C.1
ttcctgtccttagtcctgctcaagaaacaagagggggagaagttgaccttctatgatgggccattcaaagcatctgcaattgccgattttgtatctgcaaacaagcttccgttggtcaacaccctcacacaggaaactgctccttccatttttgacaatccaatcaagaagcagattttactatttgttgttgcaaacgaatcgtcgaaatttctgcccatctttaaggaagcatcaaaatcattcaaggggaagcttttgtttgtctttgtggagcgtgacaatgaggaagtaggtgaaccagttgccaactactttggtattactggacaagagaccacagttcttgcttacactgggaatgaagatgctaggaattttttccttgatggtgaaatatcggtagagaatattaagagatttgctgaggatttcttagaggaaaagctcacaccgttctacaagtctgaacctgtacctgaatctaatgaaggagatgtcaaaattgttgttggaaaaaacctagatcagattgttttggatgaatcaaaagatgcccttttggagatatatgcaccatggcgtggccattctcggcaactggagcctacctacaacaagctaggaaagcatctccgtggcattgactcccttgtaatagctaaaatggatggcactgccaatgagcatccacgtgcaaagcctgatggattcccaacgatcctcttttatccagcaggaaagaaaagttttgagcctattacttttgagggggaccgtacggtggtggagatgtacaagtttatcaagaagcacgctagcatccctttcaaactgaagcggccggattcgtcagcaacgaaaacagagaaggatcagagcacagcttcaactaatttgaggggggagaggagttccggtacaaatttcaaggatgagttgtagtcttgtagagcggcattggtgcaacctttgaacaaggcaacgacgctctctagaaaaggctgtttctttttatgtatgcgagggcctgaggggcagcagaaaggaatccaaagttggtttctactttctatagagagtattccggtaaggagttagcttggacgatgtgcatgttgagatgaacgaattgaatcgaatcgaatggaataaaagcaaacgaaacggcttcgataaaaaaaaaaaaaaaaaaaaaaacaacttcgatatttgttgattgtactggactactggttgtcccatatcagggcataatctcagtaaaaaggccaaacgatcgatttgagatggtccaaaaaaaaaaaaaaaaaaaaaaaaaaaaaaggggggcctcgtgc

SEQ ID NO: 54742 - DNA, 1651 bp, Oryza sativa
  Clone ID: PAT_MRT4530_56817C.1
tatgtgtacttttgttcgctttaaggggccgaggggaaggtgcgctgatgggccaagcccacaagcacgggagagagggggaggagtggggcggctgactgggcgccggcttgacccggtcaagcggggccgacggctgaggtggcgccaacgtggacgtcatgtcggatagggaagggagaggaggccgggcggctcatcggacggcccacggcgcgcggagggatccggcgaacggcggcgagccggaaggggcggctagcactggcggcaggaggaggagaaggggaactcattccacggctcggatcaggaagaggacgcgcgacgacggccggcggcggcagccaatctcgccggcacgccgacgtggccgcgcgcgagaagagcgaagggtgcgcgggctcgggcttagccgaaccggtatggtgttgcgacgcgcacgcggtgacgcgggacccgatggtcaccggcggcgcacgcacggcggcgttatgcggcggcggaagcggcgacacggcgcggagacaaaggagaaggccgacggccttgggacagccagggggaggtcaaggggatccccgggagcgtggcggcgagaggaatcgacgcgagaggagccgacgacggtggattgtggcggcggcaatcaccggagagcaaaaggggaaaacacgacgagacgacgagggttcgattcaaagggatgggagcatctccggggttcatggaatccgtttccggcgtcggattggacggagcggcaccgagattggctggcgacgagaggcggcctccgggacagagcatggcggccggcgagctagtgcgcggcgcaagggcgacgagcggcggttcggcggtgttccacggagatcaaggaggacgacaacgagaggaaattaggtggagggctcaccgatggcgacggacggcggtggcgggctatgtcgagcagcggcgggcgcgatgcggtgagagggggagggagaagaagggtggcgtcttcagtgctatttcgggtaaggacggggaagaagcagacggcaagctcaccgacgagagaggagcagcgttggcgacgcggagggagccgtggcgaggtggtcgcgacggcggggcgggggcgagcagctggcggccggcatcaatggcgtgggtgtttcgagcgaggcgaagacgaaacaagaggggagggcgcgggctttataggcgaggaggagaggtcggtttggaggagggaaaccgacattggtggtcaagggagctcggctggtgttcacgggcggcagcggcgattgaaacgcgagcgcgggctggcagcgtggagcggtcaaggtgggggcggcgagctggcgtggtcaaggtggtggcaggcggtgacgccgatggtggtcgggcaaaaggaaaaaggtggagaagaaagggagctctgctccttgctatttcgggataaaggaaagggagagggagcgaggccgagggctctgcctccctaccttggacgcatgcgcacaggcggggctgggcgacgcgcggtcacgggcaccgaaaattgaatggcggcagcgggaaaaatcggcgatggcggcagcgctggcgtgggagagagagagatcgaatgagagagagagagagaaacatagagaga

SEQ ID NO: 54743 - DNA, 1616 bp, Oryza sativa
  Clone ID: PAT_MRT4530_56818C.1
gtggacttttgttcgctttaaggggccgaggggaaggtgcgctgatgggccaagcccacaagcacgggagagagggggaggagtggggcggctgactgggcgccggcttgacccggtcaagcggggtcgacggctgaggtggcgccaacgtggacgtcacgtcggatggggaagggagaggaggccgggcggctcatcggacggcccacggcgcgcggcgggatccggcgaacggcggcgagccggaaggggcggctagcactggcggcaggagaaggagaaggggaaatcattcaacggctcggatcaggaagaggacgtgcgacgacggccggcggcggcggccaatctcgccggcacgccgacgtggccgtgcgcgagaagagcgaaggttgcgcgggctcgggcttagccgaaccggtatggtgttgcgacgcgcacgcggtgacgcgggacctgatggtcaccggcggcgcacgcacggcgacgttatgcggcggcggaagcggcgacacggcgcggagacaaaggagaaggccgacggccttggggcagccagggggaggtcaaggggatccccgggagcgtggcggcgagaggaatcgacgctagaggagccgacgacggtggattgcggcggcggcaatcaccggagagcaaaaggggaaaacacgacgagacgacgagggttcgattcaaagggatgggagcatctccggggttcaaggaatccatttccggcgtcggattggacggagcggcaccgagattggctggcgacgagaggcggcctccgggacagagcatggcggccggcgagctagcgcgcggcggaggggagggaggccgatggccggggaggcacggtggaagtggccggtcgcggcgcacggccgagcgcggcaaaacggaggaatggaacgcggtgggctatgtcgagcagcggcgggcgcgatgcggcgagagggaggggagaagaagggtggcgtcttcagtactatttcgggtaaggacggggaagaagcagacggcaagctcaccgacgagagaggagcagcgttggcgacgcggagggagccgtggagaggtggtcgcgacggcggggcgggggcgagcagctggcggccggcatcaatgtcgcgggtgtttcgagcgaggcgaagacgaaacaagaggggagggcacgggctttataggcgaggaggagaggtcggtttggaggagggaaaccgacattggttgtcaagggagctcggctggtgttcacgggcggcagcggtgattgaaacgcgagcgcgggctggcagcgtggagcggtcaaggtgggggcggcgagctggcgtggtcaaggtggtggcaggcggtgacgccgatggtggtcgggcaaaaggaaaaaggtggagaagaaagggagctctgctccttgctatttcgggataaaggaaagggagagggagcgaggccgagggctctgcctccctcccttggacgcatgcgcacaggcggggctgggcgacgcgcggtcacgggtggcgtcagggctgacgcggcggcgaccgagcggttggcctcgagcgagcgcgcgcgcgcgggaacgagcggcacggccgaaaatc

SEQ ID NO: 54744 - DNA, 724 bp, Oryza sativa
  Clone ID: PAT_MRT4530_56819C.1
atctcggtctcgtttcgatttgaaagctcccgagatgaaatcaggtggcgcttagagccctcatccgtgggttttccagttggatattgggttacgctcgcctccaaattctcttctatctttaaattcttggggtttgctgcattttgtctgtttggatcttgtgcgattgatttgggagatggtttggttgtggtgcagtgattataaaatcattcctcgtcctgatgggagatctgcgtgatcgactcctatacacccatagaatctgagcaccaaaaaccattcctttttttttttcaatcaatcatctgctttctattttggaatccagttttctgtgttatgtgaatatccgatccttgcgcggtttaaactccattggtgtattctatctctaatctacaaacctttcttttttatggaaataggaatcttcgaaccttgcgcgatttaaaccccgttggtgtattcgaattcaaatctacggacttcccccttgacggaaatttgaatctgcccaaactcgccccttaaaggaaatctgaatctgcccaaactcgccccttagtaaaaacatttgtatttacggcctgcaatgttaaatctcccacccactatgtaaaattacaattttgtaagttaaatccagtttccaaaagaattttatttaaaacaaaaaaaaaaaaaaaaaaaaaaaaaaaaaaaaaaaaaaaaaaaaaaa

SEQ ID NO: 54745 - DNA, 316 bp, Oryza sativa
  unsure (1)..(316): unsure at all n locations
  Clone ID: PAT_MRT4530_5681C.1
aggtgctgatgagttgcacacttgaagttggtgtatgctattcaaagaactctaatgagtcctgcacgggaagtgaactggtcattctgaaagaggaaatctgttccatctagacgctgaggccattagtaggttgtgatctagctatgtgcacaacacatgacacaagcagtgaggacctgattggaaagagaataaaagtttggtggccgttggataagaaattntatgaaggtgttgtggaatcttttgattcatcaaaaagaagacacacggtgctatatgatgatggagatgttgaagtgcttaacctagc

SEQ ID NO: 54746 - DNA, 443 bp, Oryza sativa
  Clone ID: PAT_MRT4530_56820C.1
tgttattcacggatgactgctcaaatgcatgctggggtggttacagctgctttatttaattgcgtcaatcgggacgagagcagctcatgggactggtcgatacgggcttgctgtatgcacagacagcgctgttcactctcaaagtccggttggtccaaccggttgcgcagttgctgtcccatagatgtttgctccaaaagcttcagataatttagagagcaaaagctgacgatgcaatctgggccaaggagatggctcccacctgcctgatcttggtagtgaaaacccggtgaactgaggattgcttatcacagacatcctatcttaagacattaagactcctgctacttcgtctccaagggctcgtatgaaaagacttaagggaagccattccctttacatcatgcatactatttaggatttcactccccatacaacaagct

SEQ ID NO: 54747 - DNA, 2144 bp, Oryza sativa
  Clone ID: PAT_MRT4530_56821C.1
gcacgagggtcaagttatgcgagctttgccgtgttgggtgtcctcacctcgaaattgttgggccggtgacatacatgtggcgtccatttttaagggagggtggtgaattggagactgaagatgtagatttgtccaattctcaaattatatctgatgaaagaaattctttacggcgccaattatggatatggatccacccttctgctctcagtgaagggcttgaaacattaagagccgcttgtcatcaacagatgcaagaatctggtgacacaatcagttgttgctcactggaggggaaaatggcaagattagaagtcatgggaagcaatgctatgcaatctcttaagagtatattgaagccagttagcaatccaagtatatccaccaagctagttaacaaaaataatgtgactacatcaactgatcctctgtattgctctactggctctcatcttttgaaaagatctgtttttgataatgctgacattcttcagtctggtgctatactatccatgataatccatgaccccagagataattcagtcgagggaacagattcttctaaaacagtttccctggaccagaataaccaactcatggaggaataccaagttccaaatgctgatgagacaccatcagggattgggaatattttgtcatcgatatggctgaacccaggaaatcacgatttggccctttcagactgtagagaattgtgggattccagccttaagataaatcctcctgtggatgagaaaattctttgtatggagaaacaccacagacgtatgaagtttttctgccttgattctggaaatgatcaaggacaaacaagtcaagagaaggattccattggtcgatcctgtcctgttattcttctgaaacatgcaaaaggcagtctgatctctgtagggtggtctgttattctacctttgagttgggtaaaacctttctggttttatcttgtatctcatggtgcacatgctattggcttaagagagagacggtggatagcctcaaagctcaagatgccatgcttcccttatgattatccagacagcaaagcctattcattatttatggctgaagaggctgctgttctcgataaagctaccaactgccgcccttcttccatgagacctccaagggttcctgtaccacctttatggcattgtgtcattgctagttttcgtaaaggagatggcatactgagcaatcttgaagatgacttaaagagcgtcgctacagtattatctgaaagtatcccggtaaattccaactctggtgatgcagaatcatcaccaacaagtgctcctacatccttccaactacttgtgccaagaaccatccaagtgttgagacagtatgtgaaaaaaattgatgagaagtatttgaattcatctgacatggaagcagttactggcaagtccagtctagtttctggtgataatgtgaaaacgggatgctctataaacagattatgtcttgtaagggtgctgattagagcatttaaggaaggttcttttgaagagggtgctgttgtttgtgccccactcccatcagatctttcagcctggaaccggaagaccagatcagaagaggaggaagaagaatgtctagaaaaatgggaactccagctccctcaatcccatgtaagttcttatttctcttggctggatcctagcaccagcaatctccagctgccaaacggcgattctacacgaaaggcattcagatggccgataggcttcgtcacgacgggttttgtccatggaagtagtgggcaagatgctgttgcagttgccttctgcgaagcaaagcttctcgcggtgttgaggcggcagcaatggaggacacatgaaagtctgaagcgcaaagacatctgtgtccttgtaaggaatgcaagatcagcggcataccgacgagcactcgcaacaattgtcctggagcagcaagaggatgaccttaagtttctctagtctgtaaaccttaagctgcttatttatcaatgttgtaaattttttgttcagaatcttttacagctgtctgattcatgttcgaggagtgagaagcacagggtggcaacttccactccccagtaaaatgtgaatccttttttatcccttcaaaaaaaaaaaaaaaaa

SEQ ID NO: 54748 - DNA, 370 bp, Oryza sativa
  Clone ID: PAT_MRT4530_56822C.1
ccatcaccaggacagatccatcaggattatcatttattagaaacctggaaaattaccccttcttttctgccaaaaagagcaaaaccccattttttcaaatccaggatggggaccattgttttcaacatgacacccgatggaaaatgaggttcaagcaaacacaaattcaaactcaaaccccccccttttccgaccaaaataataatatgcccggaagcaaagttcccgttcaggctcctccaaaaattcggggacccgggtaagtaaaattaaaaaatcaatgggtaaattcatcagggccggggaaaacaaaattttcgggcaacacctcaaggaaatatgaccccatccagggctgcaacttattaac

SEQ ID NO: 54749 - DNA, 2864 bp, Oryza sativa
  Clone ID: PAT_MRT4530_56823C.1
atggccggcgttcccccgccgccgcggcagctcgacgtgcggcgcttcgcggcggctcgagccggcgagctccgttccctccacgaatccgtatccgcccgcctcgccggccgcttgacgcagccccgctccgcgcgccgccgcaccacgggccaccttccctccaacaagcgccgccgccgccgaagccgggatgccgaggcggccgacggtacggaggaggaggagggaaggccctcgaggagggtgaggcggcggcgggagctcgcgggcaacaccgcggaggggttctccgccgccggcgacggcgcgcggcggctgcgcacgcacctgtggcacgccaagaggttctccatggagaggcggtggggattcgtcttgcccatcggtgcccatgggagaggaaggggttcaagaactgttctgaagtggctcaaaaatggaacagttgttcatgatgctagctacttcactccagttgagctagatggtccagaggactccctgttatcgattgtcagaatggttctgcatccatctcctcaagataaaactcctggcttgaagcatctgcatggtcaagttatgcgaggtgtttgctatgagaatgctatgctttgccgtgttgggtgtcctcacctcgaaattgttgggccggtgacatacatgtggcgtccatttttaagggagggtggtgaattggagactgaagatgtagatttgtccaattctcaaattatatctgatgaaagaaattctttacggcgccaattatggatatggatccacccttctgctctcagtgaagggcttgaaacattaagagccgcttgtcatcaacagatgcaagaatctggtgacacaatcagttgttgctcactggaggggaaaatggcaagattagaagtcatgggaagcaatgctatgcaatctcttaagagtatattgaagccagttagcaatccaagtatatccaccaagctagttaataaaaataatgtgactacatcaactgatcctctgtattgctctactggctctcatcttttgaaaagatctgtttttgataatgctgacattcttcagtctggtgctatactatccatgatagtccatgaccccagagataattcagtcgagggaacagattcttctaaaacagtttccctggaccagaataaccaactcatggaggaataccaagttccaaatgctgatgagacaccatcagggattgggaatattttgtcatcgatatggctgaacccaggaaatcacgatttggccctttcagactgtagagaattgtgggattccagccttaagataaatcctcctgtggatgagaaaattctttgtatggagaaacaccacagacgtatgaagtttttctgccttgattctggaaatgatcaaggacaaacaagtcaagagaaggattccattggtcgatcctgtcctgttattcttctgaaacatgcaaaaggcagtctgatctctgtagggtggtctgttattctacctttgagttgggtaaaacctttctggttttatcttgtatctcatggtgcacatgctattggcttaagagagagacggtggatagcctcaaagctcaagatgccatgcttcccttatgattatccagacagcaaagcctattcattatttatggctgaagaggctgctgttctcgataaagctaccaactgccgcccttcttccatgagacctccaagggttcctgtaccacctttatggcattgtgtcattgctagttttcgtaaaggagatggcatactgagcaatcttgaagatgacttaaagagcgtcgctacagtattatctgaaagtatcccagtaaattccaactctggtgatgcagaatcatcaccaacaagtgctcctacatccttccaactacttgtgccaagaaccatccaagtgttgagacagtatgtgaaaaaaattgatgagaagtatttgaattcatctgacatggaagcagttactggcaagtccagtctagtttctggtgataatgtgaaaacgggatgctctataaacagattatgtcttgtaagggtgctgattagagcatttaaggaaggttcttttgaagagggtgctgttgtttgtgccccactcccatcagatctttcagcctggaaccggaagaccagttttgtatcccactgcattcttctgtatgagatgagtgctgggaaatatcaattcaagaagctcatccctgttcacacatctaacagatcagaagaggaggaagaagaatgtctagaaaaatgggaactccagctccctcaatcccatgtaagttcttatttctcttggctggatcctagcaccagcaatctccagctgccaaacggcgattctacacgaaaggcattcagatggccgataggcttcgtcacgacgggttttgtccatggaagtagtgggcaagatgctgttgcagttgccttctgcgaagcaaagcttctcgcggtgttgaggcggcagcaatggaggacacatgaaagtctgaagcgcaaagacatctgtgtccttattttcaaacaccacccccctaccccaaacatgtcttcaaggatcccgacgagggcgaacctcaccctcgccgccctcctcatcctcctcaccgtcgccgccaccaccgtgcccctcgcatcggcgaagtgcaccgtgaagaacaaacccgaaggcaaggtggagaaacccggtggcacggacgcgggcttgggcttggcggcggcccacatttcaccggagaagaatgccgggttcaccagcggcttaaaccaccgatgaggtcctgtcttcgctcgtggcgccgccgtcat

SEQ ID NO: 54750 - DNA, 217 bp, Oryza sativa
  Clone ID: PAT_MRT4530_56824C.1
ctgcaggaattcggcacgaggcccgggcgccggctcaggactagtacttctttgcgtgcaagattgatgctagttcacctcgtatgggcttgctcggtttgcagattgggggttaactagaccccatgcactacgtgaattagtggtgcggttatttgttttggaggaggatattcctgacacaatcatcaatcctacctgttttgttatgctggaa

SEQ ID NO: 54751 - DNA, 355 bp, Oryza sativa
  unsure (1)..(355): unsure at all n locations
  Clone ID: PAT_MRT4530_56825C.1
gtcacagttgtacaggtgtagatagtcttgttatttttacaaacttgcaaactagataatgatatcctaatcgtaattgttttttttttttttttttatattgtttttttttttttttttttttttgcaaaaggggggaaaaaagacaaaccccctcatttttttactagttaaaaaggtgggaagggtgttttttttgggnnnnngngnttttgtgccttttgtaccgggactgtatcttattgggctgcatgaattggggaaagacaggggtgaagcctggctgcctagccctggcggaaaagtcgccgccgtctgtaatggggggtgggtggaagagaaccctgagctgtga

SEQ ID NO: 54752 - DNA, 320 bp, Oryza sativa
  unsure (1)..(320): unsure at all n locations
  Clone ID: PAT_MRT4530_56826C.1
ccccgccacgacccacgctccatnctacctcatanaacattctttctcccctaatggtttcaattgcattaaatttctttccttcaccacctatgtgggtcatttattgatggtcgagtactcatttcctttcctatcgaaaccattgttctaatcatcttttgctgagaattggccaaactatctattacgtacagtcatgtgagtttatcatacgccctttgcattttgtaccagactttgaataactcacttactcatgcatgctacatcggtatgaaggttctaaacaactcctcccacaccactaagagcatgcc

SEQ ID NO: 54753 - DNA, 418 bp, Oryza sativa
  Clone ID: PAT_MRT4530_56827C.1
tgtagtttctgaaattttctacctgataaggtgcggaaattttgtagtagtaggggatatcttattagcttctgaaatttcgtagttcagcacaacacctagctgataggctaaacagtcctctgaatttttttaagaatacttctttgaatggctgaaagatggatggagaatcttcattgagagagatgtttttcagagctctgaatgtcattttgtccaagtgaagccattttaaaattttcattttggttggctggacagtttgatactctgttggcatcgaagctctgaaatattgtgaaagttgtggggtttggtgaggtcgaaagataacagctttggtgtaatttacaagcgcatacaaaaaacttactaacaactgcattaaggctgcgttctttcacgggagataggg

SEQ ID NO: 54754 - DNA, 234 bp, Oryza sativa
  Clone ID: PAT_MRT4530_56828C.1
atggcgaggaccgggactatactcagggaggagcagaggtctagcacggtcaagaggccatgtgacaagggaggccaggccgagcaggcccaagagaagacgacggcccacggcatcggcaccatgcgcggacacgcggcgacaagcaattcggcgcgcgcaggcacggggtccacgctgttttgcacggctcggaggcaggagccgtacgcgtgggacccacgtgcgatttag

SEQ ID NO: 54755 - DNA, 165 bp, Oryza sativa
  Clone ID: PAT_MRT4530_56829C.1
ctcgaccttacatccatacgagcccggcgcggagtagcgagaagagaagggggggagggcgcagcaatagccccaaagaagctgtacaggacgacgctcgcgtggcacgtgacgaggagccacccggagctggaggaggcacgaccccagtacgagaccgagccg

SEQ ID NO: 54756 - DNA, 135 bp, Oryza sativa
  Clone ID: PAT_MRT4530_5682C.1
ctcccacggctagagcggagctagagcctcgcctgaccggtgagaaccgccttcacactattgcgagtgccactggcgtacctgcttttcacggcgtcgccttcttacgagcacaacgaagcggagcacactgag

SEQ ID NO: 54757 - DNA, 446 bp, Oryza sativa
  Clone ID: PAT_MRT4530_56830C.1
tttcgctatccagtcctacatctaccagaacaccattatcgcgcttaccaagcccgtcacggggggggttcatctgcggcgccagggggcactgctccggctgcatgaatctcgccttcactgtctccgcgtcggccgtcaccacccccaccccgactgcgtctttgtacccgccgtacaccgttacgcccgccacgcacttatctgaccctggcatggacacgccctcgttgacgccggacgcgaccactacgccgactactacgactactaagtctacggtcagcaccgtcggggccagcggcagctgaggcccgttcggtgattggcctgcttgtctgggccgtctgcctttccatgatgggctatgctaggcaagaggcaaggcttctcatcttcattcatttcggctattatttcttcccgacgtttaaactttccttatt

SEQ ID NO: 54758 - DNA, 315 bp, Oryza sativa
  Clone ID: PAT_MRT4530_56831C.1
aagacaaaaaacttgggcgggggtgaaaatcattaatgcaatttcccttacgcaacattggattacctaaattcgatacttctactaccgaagactggggttaaacatggaacaccacaggttgcaatgattgcgacaaaagttttaactaccccctagatcggacgcttgatagccaatccacactgataactgtaaatatgcatacgaaggatgtgcaatcgtatcttatgccaccaccagaagcagatcagtacttaaagtcatcgacgcaagggctataactaagtcgctagacaaacacagcatcatcct

SEQ ID NO: 54759 - DNA, 133 bp, Oryza sativa
  Clone ID: PAT_MRT4530_56832C.1
gaccggccagatgtgccggtcagaccgacactcggcgtacggtcagaccggccctgaggcgtcggtcggaccgctgtcgggccggcggtcagaccggccgtatggctgcggtcagaccggccgactgcgatga

SEQ ID NO: 54760 - DNA, 1641 bp, Oryza sativa
  Clone ID: PAT_MRT4530_56833C.1
atggatatggagatgggtaaattgcttcatcgcccatggaaatggagcttaaactcgccgctactgctgctgctcatcgtccccgtgatgatccacgtacagctgaagctacgtcgtcgtcgcaagaacgccgccgccggcacgaggctgccgccggggccatggcggctccccgtcatcggcagcctgcaccacctcgccatgaacccgaaggcggtgcaccgcgcgctggccgacctcgcgcggcggtgcggcggcggcggcggcgtcatgtacctccgcctcggcgagctccccgtcgtggtggcctcgtcgcgggacgccgcccgggaggtcctgaggacgcacgacgccgcgttcgccacccgcgccatgagcgtcacggtgagggactccatcggcgacacggtggggatactcttctcgccgtacggcgagcggtggcgccgcctccgcgggatctgcagcctcgagctcctcaacgcgaggcgggtgcgctcgttccgccccatccgggaggagcaggtcgcccgcctcgttggcgccatcgccgccgccgccgccgctcccggcggcgatcagccgccgccggtgaacgtgagctggcagatcgccggggcgcttaccgacctgacgctgcgcgccatcatgggggagtgcggcttccgatggcgggaggagttcctggagacgctgggcgaggcgcagaggaaggcgagcaggttcggcgtcgccgacctgttcccgtcgtcgaggctcctccgcgccgtcgggagcacggcggtgcgcgacgtgagggcgttgaacgccaagctgttcgagctggtggaccgcgccatcgagcagcaccgggaggcggcggcgacgactgcggctggcggcgaccacgacgacggcggcgacgacgacgcgcgtgacgacaacgagtgcttgctgaatactctcatgagaatccagaaggaaggtggtggcactctctccatgtcaacagtcaaagccgttattcttgacatgtttgcaggtggaagcgaaacaacatcaacaatacttgaatgggccatgtcagagcttgtgaagaatcctcaagtgatgcagaaggcgcaagcacagatacgacttgctttgcaaggaagatctagaataacagaagatgacttgataaatttaagttacccaaagaatataatcaaggaaacactaagactgcatcctgtagcacccctacttatgccaaaagagtgtcaagagtcatgcaaaatattaggatataacattccaaaagggtcaatcatgttggtgaatgtatgggccatcggtagagaccacagatattgggatgatgcggaagtatttttgccaaagcgttttgaggaaatcacagttgattttggaggcacaaactatgaattcataccatttgggggaggacggagaatatgtccaggcataacatttgcacatgccacactcgagttggccctcactgctctcctataccattttgattggcatcttcctcctagtgttacaccagatgggttggacatggaagaggaattcgggatgaacgttcgtagaaaaagggatcttcatctacatccagtaattcatgttggagtagaaaaaggtataatgagctag

SEQ ID NO: 54761 - DNA, 2652 bp, Oryza sativa
  Clone ID: PAT_MRT4530_56834C.1
atggggcccctcctccggtcgtcgccgccaccgcgccacctgcgcgcccgcggcagcgagaggccggccacgcacgcacgcacgtcgaagcgcgccgcccgccgccgatggggcccctcctccggtcgtcgccgccaccgcgccacctgcgcctcctcctccgccgcctcctctccaccgccgccggtcggccctcccgcctcctcccgctccccgcctcctcctccgcccgcctcctcgtcaggcccagggttgcggttgcggctgctgcggcgggtgctcctctgcggcggaatggggtcgcggtgagggctttcatggcatccacggcggcttccgaggcgatgcaggagaagcgggtggccggggagtacaccgctgcgaacgtccaggtcttagaagcattggatggagttcgcacaaggcctggtatgtacattggaagcacaggatcacgagggttgcatcatctggttcatgaaatattggataatgccgtggatgaagctcaagcaggctacgccactaaggttgatgtaatccttcatggcgacaattcagttagtgtaacagacaatggtcatcttgcgtggaaaccgtcttaacgttaatgcacgctggtggcaaatttggaggttcaaagagtggctacactgtttctggagggctgcatggtgttggcctatcagttgttaatgctttgtcagaggcactagaagttactgtttggcgtgatggaaaagaataccgacaaaattactcacgtggaaaagctatcacgatgctaactagtaggacattgtctgatgaatcaagttctcgtcaaggcacacggatcagattttggcctgataaacatatttttaccaccacaatggactttgacttcaatacgatagctggtcgcatccgggaacttgcctttctaaatcctgagctgacaatagcattgacaaaggaagaagatgacttacaggttcaacacaatgaatactgttatgctggtggtctggttgagtatgttaaatggttgaatactgacaagaaatcccttcatgatccaatcgcattcagaaaagaaatggatggaataacagtggatgtttcccttcaatggtgctctgattcatactctgatacggtgctaggatatgctaacagtatccgtactattgatggtggtactcatattgatgggctgaagacttcattgacaagaacaatcaataacttcgcaaagaagtcgaagactcttaaggataaagatattagcttgagtggggagcatgtaagagagggaatgacctgcattattgcagtgaaggtccctaatccagagtttgaagggcaaacaaagacgaggttgggaaatccagaagtccgaagaatagttgaacaatctgttcaagaaaatttaactgagtacttagagttacatccagatgttttagattcgattctgtcaaagtcccttaatgctctcaaggctgcattggcagctaagagagctagagagttagtgaggacaaaaagtgtattgaaatcttcttcacttcctgggaaattagctgactgtgcatctagtgatcctgaagaatctgaaatcttcatagttgaaggtgattcagctgggggtagtgcaaaacaaggacgtgataggaaatttcaggctattttgcctctaagaggcaaaattcttaacattgaaaggagagacgaggcagccttgtacaaaaacgaagagatccaaaatctaattgtcgctcttggattaggagtaaagggcgaggattttaacaaggaagctcttcgatatcataagatagtcatactcactgatgctgatgtagatggtgcacatatccggactcttctccttactttcttctttagatatcagaaagcactattcgatgaaggttgcatttatgttggtgtgcctcctctttacaaggttgaacgtgggaaacaagcgcactactgctatgatgatgctgaccttaaggagctagttaacaccttcccaacaaatgcttcttatcatatccaaaggtttaaaggtcttggtgagatgatgccggcacaattatgggagacaacaatggaccctgagaggaggatgttgaagcagctaaaggttgaagatgctgctgaggccaacgttgtgttctcatctcttatgggtacccgggttgatgtcaggaagcaactgatccagaatgctgcaagcatggtcaacctagaacaccttgatatttgagcacattcggcaatgctgacagtcgtgtatgttacaggagattatccactgtttcaatcccctcccacaggaaccaagcgtagcaaacttgaattccttgccaacattgttttggtgctaatttagcagtaaatgtaggctagggaagaaaccagaaatgatttcatggggtttaattccttgccaggggagctgtcaactcccctactacattacacaattactgcctaattaactggtatatctgggagacagttcggttgtggtcacgttgtaagttggaactcgttatgacattgggggtaatcttcccttgctaggggaagacgtaatcccctgacaggcggacacttacaaagagtaatcccctgctagtagtaagtattactagt

SEQ ID NO: 54762 - DNA, 297 bp, Oryza sativa
  Clone ID: PAT_MRT4530_56835C.1
tcctttggggtactggctagaaggcacgggaactgattgaagccatcctgatcaaacaagtgttgaaatgggaggtaccagcggaactatgaatgaatgcatcaatacaacaccttctgtggatccaaaatgcgacagctatgccgcaacacacaccttgagctacaactatgcaggctgtgcacgaatgatgcaatggcactgcacccaagaagcctacagatcttgtgccaagatgtcatgcaccttttccagcatgcttgtatccacattgttgtcaaaccctgcaatccatgc

SEQ ID NO: 54763 - DNA, 126 bp, Oryza sativa
  Clone ID: PAT_MRT4530_56836C.1
tcgtaagactctaccaagccgagctcgcgcgcgggagcttccacttcttcttcctctttgcatcgcggcggatatggggcccatctgcgattgaaaggtcaggaatgaacggcctcgatgaccaag

SEQ ID NO: 54764 - DNA, 1356 bp, Oryza sativa
  Clone ID: PAT_MRT4530_56837C.1
atggcgagatggttgtccctacggtgcttgactgggccatcagggaaatgggtcatgctcggggtcgatattgacgaatgcaaggaaccagatcgttgttctactggcagcagatgccatgacacagagggcggttattactgcaaatgccgttttccacgtagaggggatggtaaaattaatggcaagggatgccaccttcccaaagatatagtcgtgacccttgcgacggtgtgcattgtgatttttcttgtgttctttgtgtgctggtatgagagacggaagagaagaaggcacttcaacaacaatggtggccggctgctcagtggtatggaaatcaagcacttctcgaagaaagacctagacaagatgacaaagaataggacgacgatgctcggagagggttacttcggcaaggtctacatgggaacccacaagaaccagctggttgccgtcaagtactccaagggaaagcgcaagctggcacagatgacgcatggcaaagacatcaagtgcatgaacaagaaaatgttccaaaacgccttttgttggtccaaagttccatcctcgccggaagaagattcgtcgtcacgagtgtccggcccggagttagtggacgagctaagggtccagtcactgatccagcacgaaaacgtggtcaccctccttgggtgctgcatggagacggaggaacccacgttgatccttgagtttatccctaacgggagcctcgagaaaaagctccacaaagataagcaacaccctctctcgctgtcgcaacgccttgacatcgccatcggctccgcggaggctctctcctacatacattcatcgtctgaccaccaaagcattgttcatggagatgtcaagccagccaacatcctccttgatgacaaactgatccctaaggtctctgactttgggtcagctgagctcacattgaaaatcaagctcgtgtgtggtgacctggactatatcgatcccgtgttcctgcagacccgcaatttcacggtgaagagcgatgtctatagctatggggtagttctcctagagctcatcacccggaaaagggccaagtacgacgatgggagaagcctcccagtagaatttgtgaaacactacaaagacaacaacgaaaggaggaagatgtatgatcaggatatgttgtcgtctatggatgcactactgcagccttactgcacggagtgccttgacaggattgctgccattgcggtccgatgtctcaaaaacaaggtggagaagagaccaaccatggcggagcgggcggggtgcccgagcaagtgcggcgaggtggacatccccttccccttcggcgtcggcgtcggctgcgcctga

SEQ ID NO: 54765 - DNA, 281 bp, Oryza sativa
  Clone ID: PAT_MRT4530_56838C.1
aggtcaggtcagagtccacatgggtatactaccaaccggcaaattgcagtgcattaccagaacaataatcatccccaggcatataacacgcagcggcaaacaacagttcatcaccagaaccagaacaatcaacaggtgtatgctgcagggaggcaaacaggagacggaaacaagaaatgaatcaagcaggaacatcaacaatgcgctcaactttagctgcaaatttgaccatcacagaacatcggaacatgcatgtaacacgtcgacgaaaccgtgcgctc

SEQ ID NO: 54766 - DNA, 372 bp, Oryza sativa
  Clone ID: PAT_MRT4530_56839C.1
atggccggatctggcgcagcagcgcggcccggcggtggtgcgcggctgggggcggcgacggtggcccggcggcgtgatgcggctgggggcggcggcggcggcccgatggctgggagcggcacctggcaaggcggcggcggctccggcggcgccccgcccggatccggcgtccccgaggtcggatccgactcccggatggctagggtcgttatggccggcgtcaccgacgatgggaagacggcgcgtgcggaaggacggcgcatgcgcgacgggaggatgccggcgtcgaggtcgatgcgtgcggcgccgtgcagcgggccgacgcggcagtggctggcgccagcgatgcttgccgccggacctcgtggatga

SEQ ID NO: 54767 - DNA, 249 bp, Oryza sativa
  Clone ID: PAT_MRT4530_5683C.1
atggtgatccctgaatcaatgacagtagtggtgcaagtggcggtatggttcggggtgcatgaccagttagagctatggtttgattcaaatgaaaaacatgcagaaatgtgtgaggatgaaagtattgatgtgtgttcttcctgccctacacgggcggtgagggtggtttatgaacccgattatgttggtggtggcggcagtggccaagggaggcaactggtgggctccccagaggtgacggggcgctga

SEQ ID NO: 54768 - DNA, 417 bp, Oryza sativa
  Clone ID: PAT_MRT4530_56840C.1
atggagggatcaattgggagaagagaggaccaaataagcattcaaaatttcagagatgtgaaggttaaaatactacaagggcttatacatgaggaggaagtcgaggcagcgggcgtgctcggggaaggtggtcggttgcgggcatgctcggtgacggcggccgatgtggcgacgggcttggggatggcgagggatggtgtggaggaggtcggtggaggacgacggccggcttggggacagtgcggaggaggtcggtggaggacggcgagctcgggcacggcggaggacgtcgatgcggcggcgccaaggacggcgggtgtcggcgtggaggaggtcgacggcggccgacgctggctcggggacggcgccaggctcctagacagcggcggcaggctcctagagagtggcaggacttag

SEQ ID NO: 54769 - DNA, 2075 bp, Oryza sativa
  Clone ID: PAT_MRT4530_56841C.1
cggaattcccggctcgacccacgcgtccgaccacctcctccccttcccacatccaggctcctcctcttggtggtccagatagagccgaacagtcatgacagaagtcctatcaagacctcttgaacaccgtctaagctctccaaccttagatggtcactatgaagagaagaggaaatccaatgttgaatactcagaggatgagaagaaagccaaaatcatatcgctgaagaagaaggcaatgagtgcttcacaaaagttaaggcattcaatgaagaaggggaggaggagtagcaaggtcatatccatctcaattgcggatgaacgtgatcctgaggaggtgcaggctgtagatgccttccgtcagctccttgtacttgaagagttgctaccatctcaccatgatgactaccacatgatgctaaggtttttgaaggcaagaaagtttgatgtggagaaggcaaagcaaatgtgggttgatatgctgcagtggagaaaggaattcgctgcagataccattcttgaggattttgaatttgaagaagctgacaaggtggcagaatgctatcctcaaggttaccatggggttgataaggaaggaaggcctgtctacattgaacgtcttgggcagatcaatgtcaataggctaatgcaggttaccacaatggatcgttttatcaagaaccatgtcagggagtttgagaagaactttgctgttaagttcccagcttgctcaattgctgccaagtgccacattgatcaaagcacaacaattcttgatgtgcaaggggtggggatgaaacaattcagcaaagctgcaagagacctcattggtcagcttcaaaagattgatggtgataactaccctgagacattgtgtcgaatgttcatcattaatgctgggccaggattccgacttctttggagcacagtgaagagtttccttgacccaaagaccacagcaaagattcatgtgttgggcaacaagtaccagagcaagcttcttgaggtgatcgatgctagtgagctgccggagttttttggtggaacttgccaatgtgaaggtggttgcatgaaggctgacaagggcccctggaaggatgctgaaatattgaagatggttcaaagcggggctgggtggtgtggaaatcttagtttgaatcatctggatgctgaggagaaaatgatgatttgtgaagatgacaccatgcacaccaagaggcaggagtctttcaaatatgaagggtgcactttgtcacgaaaaatatcctgtgcccgaattgaacatccttcattatcgcctgtttgcgaggaacttcctcctacgatacttcctaccctaggatcagcttattcttgtgatgttccaatggtagagaaggccatagatgccatttgccagagcaagggattgccagatgagaatgtcacagtaaccaaagcgattgtaaatgcctctaatggatccaatcctccactctatgggggtatcatggctcttgtcatgagcattgcaacaatgctccgtgtcagccgcaacatgccaaagaaggtacttggtgctacccttggggcacaaagtacatccaaaatccaagcacaacaactatccgagatatcagtggaggctgtgtcagtagctgaatatgtttcttctacaaagcgtttgtccgatattgaggagaaggtcattgcgattctcaccaagcctgcagaaatgccagctgataaagaggagatgctaaagactgccgtcagccgtgttagtgcattggaggaggaacttgcagcgaccaagaaggccttgcaggagactcttgagcggcaagaggagatcatggcatacattgagaagaaaaagaagaagaaaagcaagcgcttgtttcgttggtaatatgcgaagaacaaataccatgggtttgatcaagaggtgatgttttcatcgttggcaaaagacgattccatgtgtaacatataatgttcatttattatttttcctgtgttgctacaattgatcgatctgagcttctctgccttaatataaatttttgcacattgtgggtgcggtattgatgctt

SEQ ID NO: 54770 - DNA, 1894 bp, Oryza sativa
  unsure (1)..(1894): unsure at all n locations
  Clone ID: PAT_MRT4530_56842C.1
atgacagaagtcctatcaagacctcttgaacaccgtctaagctctccaaccttagatggtcactatgaagagaagaggaaatccaatgttgaatactcagaggatgagaagaaagccaaaatcatatcgctgaagaagaaggcaatgagtgcttcacaaaagttaaggcattcaatgaagaaggggaggaggagtagcaaggtcatatccatctcaattgcggatgaacgtgatcctgaggaggtgcaggctgtagatgccttccgtcagctccttgtacttgaagagttgctaccatctcaccatgatgactaccacatgatgctaaggtttttgaaggcaagaaagtttgatgtggagaaggcaaagcaaatgtgggttgatatgctgcagtggagaaaggaattcgctgcagataccattcttgaggattttgaatttgaagaagctgacaaggtggcagaatgctatcctcaaggttaccatggggttgataaggaaggaaggcctgtctacattgaacgtcttgggcagatcaatgtcaataggctaatgcaggttaccacaatggatcgttttatcaagaaccatgtcagggagtttgagaagaactttgctgttaagttcccagcttgctcaattgctgccaagtgccacattgatcaaagcacaacaattcttgatgtgcaaggggtggggatgaaacaattcagcaaagctgcaagagacctcattggtcagcttcaaaagattgatggtgataactaccctgagacattgtgtcgaatgttcatcattaatgctgggccaggattccgacttctttggagcacagtgaagagtttccttgacccaaagaccacagcaaagattcatgtgttgggcaacaagtaccagagcaagcttcttgaggtgatcgatgctagtgagctgccggagttttttggtggaacttgccaatgtgaaggtggttgcatgaaggctgacaagggcccctggaaggatgctgaaatattgaagatggttcaaagcggggctgggtggtgtggaaatcttagtttgaatcatctggatgctgaggagaaaatgatgatttgtgaagatgacaccatgcacaccaagaccctaggatcagcttattcttgtgatgttccaatggtagagaaggccatagatgccatttgccagagcaagggattgccagatgagaatgtcacagtaaccaaagcgattgtaaatgcctctaatggatccaatcctccactctatgggggtatcatggctcttgtcatgagcattgcaacaatgctccgtgttagccgcaacatgccaaagaaggtacttggtgctacccttggggcacaaagtacatccaaaatccaagcacaacaactatccgagatatcagtggaggctgtgtcagtagctgaatatgtttcttctacaaagcgtttgtccgatattgaggagaaggtcattgcgattctcaccaagcctgcagaaatgccagctgataaagaggagatgctaaagactgccgtcagccgtgttagtgcattggaggaggaacttgcagcgaccaagaaggccttgcaggagactcttgagcggcaagaggagatcatggcatacattgagaagaaaaagaagaagaaaagcaagcgcttgtttcgttggtaatatgcgaagaacaaataccatgggtttgatcaagagattcggagattccggggagtaacgagccatatcccgaggaggatagtgactaccctcagcagcaaggagaggattccgattatgagttatgcttcttatgtggtcattgctctgccgagggcggcgagggcaatgagtgatctcttgcagcttggctcttgcccggttggnttgccct

SEQ ID NO: 54771 - DNA, 1873 bp, Oryza sativa
  Clone ID: PAT_MRT4530_56843C.1
atgacagaagtcctgtcgagaccgctcgaacaccgtctaagctctgcaaccttagacggtcactatgaagagaagaggaaatccaatgttgaatactcagaggatgagaagaaagccaaaatcatgtcactgaagaagaaggcaatgagttcttcacaaaaattaaggcattcaatgaagaaggggaggaggagtagcaaggtcatgtccatctcaattgccgatgaacgtgatcctgaagaggtgcaggctgtagatgccttccgtcagctccttatacttgaagagttgctaccatctcagcatgatgattaccacatgatgctaaggtttttgaaggcaagaaagtttgatgttgagaaggcaaagcaaatgtgggctgacatgttgcggtggagaaaggaatttggtgcagataccattcttgaggattttgaatttgaagaagctggcaaggtggcagaatgctatcctcaaggttatcatggggttgataaggaaggaaggcctgtctacattgaacgacttggacagatcgatgtcaataggctaatgcaggtcaccacaatggatcgttttatcaagaaccatgttagggagtttgagaagaactttgctgttaagttcccagcttgctcaattgctaccaagtgccacattgatcagagcacaacaattcttgatgtgcaaggggtggggatgaaacaattcagcaaagctgcaagagaccttattggtcagcttcaaaagattgatggtgataactaccctgaggtgttgggcaacaagtaccagagcaagcttcttgaggtgattgatgctagtgagctgccggagttttttggtggaacttgccaatgtgaaggtggttgtatgaaggctgacaagggcccctggaaggatgatgaagtcatgaagatggttcaaagcggggttgggtggtgtggaaatctcaatttgaatcatctagaggctgaggagaaaatgatgatttgtgaagatgacaccatgtacaccaagaagcaggagtctttcaaagatgaagggcgcactttgtcaagaaaaatatctcgtgcccgaattgaacatcctacactgtcgcctgtttgtgaggaacttcctcctatgatgcttcctaccccaggatcaccttattcttgtgatgttccaatggtagagaaggccatagatgccatttgccagagtaagggatcacgagatgagaatgtcgcaataaccaaagccattgtaaatgcctctaacggatccaaccctccactctttgggggtgtcatggctcttgtcatgagcattgcaacaatgctccgtgttagccgcaacatgccaaagaaggtacttggtgctacccttggggcacaaagtacatccaaaatccaagcacaacagctatccaagatatcaatggaggctgtgtcagcagctgaatatgcttcttctacaaagcgcctatctgatatcgaggagaaggtcattgcgattctcaccaagcctgcagaaatgccagctgataaggaggagatgctaaagactgccgtcagccgtgttagtgcattggaggaggagcttgccgcgaccaagaaggccttgcaggagactcttgagcgacaagaggagatcatggcatacattgagaagaaaaagaagaagaaaagcaagcgtttgtttcgttggtaatatgcgaagaacaaataccatgggtttgatcaagaggtgatgttttcatcgctggcaaaagacgattccatgtgtaacatataatgttcatttattatttttcctgtgttgctacaattgatcgatctgagcttctctgccttaatataaatttttgcacattgtgggtgcggtattg

SEQ ID NO: 54772 - DNA, 264 bp, Oryza sativa
  Clone ID: PAT_MRT4530_56844C.1
atggagaaagccagaaaggtggtgttgtccatggcggcggcggctctgatgatcctcggtgagggtggtgggggtcgttgtgtttcaaggggaggggagcgtggtggtggccgtggttgggcatggagcggccggacaccgtgcaggccgacggcggctgaacagagcaggaaggcgatggggcagtgctggagagttctgacagctatctcggcggggaaggtgagggaagaacacgtagaagaggctggcaccttcaattga

SEQ ID NO: 54773 - DNA, 237 bp, Oryza sativa
  Clone ID: PAT_MRT4530_56845C.1
tcaatcggctaaccctgtctgactcgaactctgccgatcctggtcgtagccgatttggactccagccgattcttgctctgtttctgaaacaatcttgatcttggattccgcttcaatctcgtcttctctttctccggcgatcccctcggtgcacacggcgatttcaaggcgatcttctcctggccaagcttccgctcgcggcgatgtcgacttccgccagcccgtctgccgcgccat

SEQ ID NO: 54774 - DNA, 252 bp, Oryza sativa
  Clone ID: PAT_MRT4530_56846C.1
ccctcatccagcaacaccgtccctctccaccgctcccccaccaccacgggccggcggtggccgcgggcaccctttttttctacacctcctctctcgccacaatcctctctctcgcctcctctccgtctcttcaaatcctaagcggggcagctactccctccccggcgtggcggagtgtcctccctcccggcgtggggggggtgcccctccccttccgacgtggagccacggggtgtactccccctcccgggc

SEQ ID NO: 54775 - DNA, 552 bp, Oryza sativa
  Clone ID: PAT_MRT4530_56847C.1
aaggaaattacataaaatatcctatttaatagatacaattgcctatccaggactcagtccaagtgtggcaatccatgcgaagcacattaattctatccgatgacgtagagttgtattgtcgggatcggctcaatcggctaaccctgtctgactcgaactctgccgatcctggtcgtagccgatttggactccagccgattcttgctctgtttctgaaacaatcttgatcttggattccgcttcaatctaatctttatctccgatacttagattaccaaatttgcaaacctcgtcttctctttctccggcgatcccctcggtgcacacggcgatttcaaggcgatcttctcctggccaagcttccgctcgcggcgatgtcgacttccgccagcccgtctgccgcgccatcggccgagtacgcagaggtacgtgctcactggctagatcctcttttttcgcaatagattgtttcttccttgcctcaccttgttttcttcttctctatccttgtttacatctgtagcacttgtccaatctagtcgcgattccaag

SEQ ID NO: 54776 - DNA, 444 bp, Oryza sativa
  Clone ID: PAT_MRT4530_56848C.1
ctggggttgtttattttcaatgaccataaagagaagccggctaaaatgattttattaaagtccaggcatggggaatttggaagcgaacgcgtgaactttacttctcaaagctgcaatatctgccttaatagcttcgtcgccttcaataaatttcacgaagtcttcgaggctctttccagacttctcttgagccttgattgtgattttaactgcttcatccaaaaacgccgcaacttgtttgaaatcttcttccttgagtcctctgctggtaagagcaggcgatccgagccgaattccacttggacttgccgcagatttatctccaacaatactgttcttgttgactgtgatctctgccttctcgcaaagcttctcgacctttgagccagtaacattgagaggtctcaagttccacaacaacaagtggttgtcagttcctccagt

SEQ ID NO: 54777 - DNA, 157 bp, Oryza sativa
  unsure (1)..(157): unsure at all n locations
  Clone ID: PAT_MRT4530_56849C.1
gacgccccatgcattcgnacgattgtttggagccgtcgcccttgtttttttttttgcaagctggaatgagtagaaaagcttcttgccatattatccaccaggaggacatgtgtaatgatgaacaatcattgaacttgactaggctatatgtccaaag

SEQ ID NO: 54778 - DNA, 303 bp, Oryza sativa
  Clone ID: PAT_MRT4530_5684C.1
atggaggttaggttgcaccattggagcgacgaggactgcataaagatcctagcccaatgcaagaaagcggttccgctccaagaagagagagggaaagtgataatcatcgacatagtagtcggttctgattcagggccaatgctggaatcccaactccttatggatgtggccgtgatgttggtgaccaaaagccgacagcgggacgagaatgattggcgagatctcttcatgaaagtaggcttcagggactacaagattgtgaagaaattgggacctcggtgtgtcattgaggtctatccgtag

SEQ ID NO: 54779 - DNA, 2724 bp, Oryza sativa
  Clone ID: PAT_MRT4530_56850C.1
atggaaggttacaacactttggggtatgagataaagttggatgggagacaaaccatagtcgctacatcaccttccatgaatgcacgtgatgtaagtactttggtgcaacaagtgctaagttctcaaatggagaaagtggaacaaaagcagtgccacaatttatttcagacaagactaaaagagccactggagatcgctggcggcaaggggaaaactccggtgactaaaccggcggccatctccaattttcaaaagaatggtcatctcttggcccaatgtaatgggccgtttcgttgccgtaactgtaaggcttcgggacatgcagcccgtttttgcaataaaaaatcaggggaatctgttgatagccagcccaagaaaaagtctacttccacccagcgcattaatgcatttgccaccgtcccaaactctagggataatggcaggggtaatggtaattttgtttggcaaccgaaaaagatttcgccggctatcttgcaacctcctcatcttctccaatatgcaaccgaggctacaattctttccccccaaagctctctaccaatggccaacctcaaccctaatccccaccgtttcctccggcaaggtcacattgtgcatttgggaggcaacgtgcaagttcctagagtcgacatcaccatccctcataggccagagcgccgccatgaagacttctaccttgccttggttcacccgcaagtttcggaacaagactgggatcactatcacctcctgattcttgaccatatcttggatgagcgtcttttcgaggttagaaacagctaccgccatgcttttgtagtaggcatgtttcaactccgctctgctatgcatagagatgaatttgtccatagtgagccatttgtgtatgatggggttgacacgatcacatttgtaaagcatgatcaagggccgaattggagagcttctcagtacaacagggacggatggttcctctttctggacttcccgttggattttattgattgggatcatctcaaccttgccacagcctcttttggccagcactcttattggcttgaaagagatcagatgaaggggagggtgctcattagagctaaatttaaagacaatgactctgtgccgaggaaaatcgtcctgcatgatccagtgggaatgggtggtggtggcgaatcttggacaatttcagtttttcttttggaaggggacttcatcaatatgccgcccgatgaagatttgcctccagctggcccacagccaaatcctgctgctgatgatgatgaggatcctgatggtggccaaatttggcaaatgggaatgggtcatccccaagcaggtgcaggcgactgggatgatttagtccagcaacagaatgcagcaaatgagcaggtggaagatgcttggggccaagaccaccctatgggccagattatggaagttaaccctgatggcctaattgaatcggctgctgctagccctgggaaggaaaatggatggaaaacccttctttacaatccctacaggaggcagagtgcaagacttcaactaaacaaagaagggtcagaactgaaggtggatcctagaatgggaattggtaagccaagggtaaatctgcaagaaagcttaaagagttggcagaattggcttttcttgggagatttcaacttctatagatctgtgcaagagagaaataaagatgggycagatacgaatgacatttttatctttaatgacatcattagctctatagaagttgaaatccctcttaaaggacgaaatttcacctggagcaacatgcaacataaccctcttcttgaaagactggactgggtgtttacttctggactgggtgtttacttcggcttcatggaaattgacagtctcatctccattttaccagctaacaaagcacctggaccagatggttttaatggctatttcatgaaaaagtattggcacatcatagctcaagattattacagactagtagctcatttctatgctggatgtgttgatttggagatcctaaatagctcttttataacccgggttccaaagaaaagctccccagagactgtcaatgacttcaggcctatttcactcatgggaataagcctgaaaatcctaacaaagttaatggctgataagcttcaaggggtgatcctcaaactgtgtcagcagtctaagagggaaattgttctcctgaagttagattttggaaaagcctttgataccattgagcactctgcaattctctcagttctgcatcatataggtttccaccaaaatggattgagtgggtacaaaagctaccccaatctttttgcagtgaccatgtataaaactgatttagtgaaagccccccagacccatgatttggttgtggaaaaaacaaaatgtgtcatgaagataaaagtttttgcctggctcctattttgtgacagactcaacacaagagatatgctggatagaagacattgtgccaaagaagatgatgacctcacatgtgtattgtgtaatgcagatcacagagaaacaaggttgcatcttttcttctcctaccctttcaacatcaggtgttggcagcatttgggaattgagtgggatcataatttggagttcttccaaatgattgccctagcaagactaaagtttgctcagaggggcttcttggagattttctttctagcagcttggcacatatggaagcaaggaatggtttaa

SEQ ID NO: 54780 - DNA, 588 bp, Oryza sativa
  Clone ID: PAT_MRT4530_56851C.1
atgtcaaataaattacgcgcacacacaccctacccctatgagaacctccgaaagactaggccggcatatcttgagattgacgaagtcaccacaggcgcctcgctgtcgatggctgggcgggggcctcggggcaaagcggcgcgagggcccgaggggcatgacgtggcatcccgaggccccccggccgcttctgcgattcgcgaggtgcgggggtacggccacgcggcaggatgggaagcgattttacttacattgaagcatcaagaccccatagcaaatctggcatacaaacgctttgatcaacaagattgcaacggactttgcttggtcattgctgcagaaattatacttttgaaatttggaaagcaagaatccaacttcaggcgagcccacattgaaggcatagtaccagaagaaatggcctgcaagctacagtacttcaattgctcgttcggcccctccagtttcttccccggctggtactcctttgatacttctccagcaaaggattttttcatcaaggcgtttgatgtttccaagggccgttttggattgaagccaaaacgtatccctaccaaaattttggat

SEQ ID NO: 54781 - DNA, 252 bp, Oryza sativa
  Clone ID: PAT_MRT4530_56852C.1
atgacgagggaggtgtcagtggtctgtggcggcggagcacggctgctgacgacggtggtgtcccctttcgaccccgggacggagcgggtgggtggcggagcaggcgagctccggcgacggcggcggctgacggcgggagcgctaggcgggcagatgaatagggcggcagcgcgaagccgaaggggcgccagcctcgtcgtcatcttcttccggtgcacagcgatgcgaagccggtggggcggggcggggtag

SEQ ID NO: 54782 - DNA, 747 bp, Oryza sativa
  Clone ID: PAT_MRT4530_56853C.1
ctcaaggttgggattcctatgggcaaaatttttattataaatcccaagggtgaagttgcggtgaatcgtcgagtagatacaaaatcatacacatccctccatgctcttgtcaatgggatgttccctccgatatcaacgtcatctgagcaggaggactacaatacttggaattactggaaaatgccgttacctgctgttgatatttgaggtatagccgcagtgcacgctatgctgtacaaggtctctggcacgcagcagcggccatgagaaatggcttccatgttgaacaaaagcaccctgagaccaatcgctggttggtgtcatgtggatgctcctgacataaattcttgcgaggctgacactgtacataggatcataatagaaaaacttacaacctgtatgaccaatgagtcggcagaagcagtgttaattagttccttgttactcaattagtcaatctgttgttgtccaacatgagctgcaagcctgcaactgaatatgtgtaatatactgacttgagtgactgaatggaggggaaatctgtgtaggatgttgccctgcaactcacgtcacttctcataagatttcagttctctttttttttaactatgtagttgtgtttacattgtataatttgtacaagttagcagtttaataatgcatttgcaaatgtgcctcgttataattttccctaatatctggtgaaaaaaaaaaaaaaaaaaaaaaaaaaaaaataaagggcggccg

SEQ ID NO: 54783 - DNA, 253 bp, Oryza sativa
  unsure (1)..(253): unsure at all n locations
  Clone ID: PAT_MRT4530_56854C.1
gggccccctttttttcttttttttcgtttccaaactttaaagaagtttctggcgaaagttacaaaaatactacacacaagggaagggcaacgaccccactctgacctgacctgacctcctcctttcgcgcgctgaaaaatggcgctggcgcaaaaaaacgctgggaaacggtcgcccgcccgggcgcgcccggaaacntaagnaaaatagtgcgtgctaatgctnaaaaaccggaccccannnaccannaaaa

SEQ ID NO: 54784 - DNA, 684 bp, Oryza sativa
  Clone ID: PAT_MRT4530_56855C.1
atcgcatttccaaccagccagatggcaaccttgtgatgtatccgattggagcgatagatcctaatagtgcatactggaatactggtacttatgcacaaaactttcttctcactcttacactggatcccaatggcacactatggttgttcaaccggaaatagtccatatagaatggtgttgtttctgactaatcagtcattaagtgcctccccagaatcagagagctactaccatctgacattggatgctgatggcatactgcgactctactcgcatgtgttcttcaagcaaggaggagcgcccaaaacaaaggttgaatggttggtgccaccgagcaatgatcgctgcagtgttaaaggtgtttgtggtccaaatagcttctgccaagtaactagtagtggagaaaccagatgttcctgccttccagggtttgaattcttaagtgctaaccaaagcactcaaggttgccggagggcgcagactgccatttttgaggtagacacgtgctccacaacatcatgaaactgaatttgatgaggagagcattggcatctgaccatactctttccatgatctagagttgtcaacaaatggctatgctgaagagctaggaatgggtgcatatggcacagtgttcaaaggtgttctaacaaatagcctcgtgccgaattcctgcagcccggg

SEQ ID NO: 54785 - DNA, 519 bp, Oryza sativa
  unsure (1)..(519): unsure at all n locations
  Clone ID: PAT_MRT4530_56856C.1
tcgccggcttccccgcctccgccgccgccgcgggccaaatganttcgccaacgaaccgtccnaangtngcgctgtncctgcacacctccgggnaccacganccgggncaanggcgtnccgctcaccaccgcaacctgggngcgtccgtccaaaaaatccgcgccgtgttaccgcctcactnaggcggangcnacgtgatcgtgctcccgctcttccacgttcacgggntcggntgnggctcctcgnctcctnggcgttccgggcntcggtgaaactcccgggggnnggggccttctcggcgtccacttctgggcgaaatgcncggngcccgggcnancttngtaaaacgcgggtgccnaacnatccaccanatnatcctccaacgggcgnncctcnaaaccngaagcggaattacccggcncttncggttcatccncaaatnnaacgcgttcctnggcnnccggcgantcatggataaacttgaagccgccttccggggccccgggttgtggaaggctt

SEQ ID NO: 54786 - DNA, 1167 bp, Oryza sativa
  Clone ID: PAT_MRT4530_56857C.1
cggacttttgggcgctcatctccatcttcctcctccctgcctcgctcctgtgcttcttctcttcatcaacaagagagctatccctggatctgtgtgtgtatatatatagagagagagggactgatctgggtgtagcgagctaggtagcctagctagcatggggaggtccccatgctgcgagaaggcgcacacgaacaagggagcctggacgaaggaggaggaccagcggctcatcgcctacatcaaggccaacggcgagggatgctggaggtcgctccccaaggccgcagggttgctgcggtgcgggaaaagctgccggctgcgatggatcaactacctgagaccggacctcaagcgaggtaatttcaccgaggaggaggacgagttcatcatcaagctccatgagcttctaggcaacaagtggtcactgatcgccgggaggctgccggggaggacggacaacgagatcaagaactactggaacacgcacatcaagcgcaagctcctcgcccgcggcgtcgacccgcagacgcaccgcccgctcaatgccgccgccgaccaccaccagcagcagcagctccaggcgccacggcggttcgccgccgcgccagccggccaccaccaccaccaccctgaccatttcgccgtcctctccaactcgccggaggcctgcagccacagcagcgacgacgagcccagctccgccacgccgccgccgccgccgcgtcacctcggcatcgacctcaacctttccatcagcctagctccttaccagccgcaggatcagaccagcgagccgatgaagcaggaggaggacgacgaagcgtcagcgacggcgaacggcgccggcaatgcagcgatgacgacgacggcgacgacggcggcggtgtgcctgtgcttgaaccgcctcgggctccacggcggcaaggtgtgcaactgcggacgcgggggcgccccctccatgcaggccagcacacacatgtttagattcatcacgccgctaggaggaagccccccccccagtagtagcccaccaatgacataattaattaagttgagggaggagatatatataccctacttaattcgcaattaaaacccagccccacatgcttagctctttgtaatattcatcaggaaaggtgatctctttctcttttttttttt

SEQ ID NO: 54787 - DNA, 681 bp, Oryza sativa
  Clone ID: PAT_MRT4530_56858C.1
aagatcaactaaggcgagtacgacaaatgttgacaaggctccacccagtgccaacaaaaatacttgatttgatgaaattgaggattggtccgatgaatgatctagaactaacacgtaacagtgtttccagttatctctagaaatataaagcgtatcttcttaaacaagaacaaaaagaccaacaattacctgttgatgacaataccaatactagttcaatcaaaagtcaacgaggatctgcatctcttcaacagcaaattatgaattacggtgaaaatgatagcatggacaatcaatcaataattctatcacaaacccgctacaatgaacatagtaacaagcaaccaaagttgttgacagccaattatcatgggcctagaaacatgcatcatcatcacaaaaacaccaacaacatgcaaccttccaatgtacgacttgatcaaagcaaagggattcaatatgtcctttaacaaggaagaggtcattgaagccacatatcagaaccaactaacaacacgtcgagtttcagctagtcatgctattgcaaaagcacaagcaagccagagagtaacaatgacgaaagatatgcaccccatatctcaactacaccaacaagattatgaaacaacacctgatgattcttctaataatacaaatagcatatatgaaaaatgtcagcta

SEQ ID NO: 54788 - DNA, 256 bp, Oryza sativa
  Clone ID: PAT_MRT4530_56859C.1
tacagctgcagctcccacgccgccggcgacgacgacctcctcctcctcctcctcttcttggcggaaggaagccattggtgaccccggccaggtgctggcctgtggttccggccggcgccggcgccaatgggaaattgccagccgccgaagttgccgccgttgtgaaccaacacccgggcgggcaggtgggaacgggtctactggccggccaccgccggggacgtcatgcgcagcaacccaagccactacgtcgccc

SEQ ID NO: 54789 - DNA, 457 bp, Oryza sativa
  Clone ID: PAT_MRT4530_5685C.1
agttctcataaaaactttccttgtctaccatcctttaataaagggaaaaaaaaggtcgcctgcttccattttagtttccccaagaaattgtagtttgttgctgttttgcatatgtaaacactttttaaacattttggggataactgaatgcatgcactaacagtacaaggtagtgggtagcacggacggactatcattctattatcttgtcacaaaaacactaccatcagtgtaaagaacagaaaacagaggtgtaacaaatactaatactactcatgattataagttctgatcggggctatcggttacctcgcaagtacgatcaaggcattctgtatgcagataaggtgctcacaccatgggtggaactcaaatatccaaatcgtcatctgggtcttcatcggaatcaggttgctcatcatcctcgtgccgaattcggcacgaggcctcgtgccgt

SEQ ID NO: 54790 - DNA, 313 bp, Oryza sativa
  Clone ID: PAT_MRT4530_56860C.1
atgaacacaactcaaactttcctaaagataaaatagcaaacaagtccacatggcggactcttacgatatctctaattcaaaccaacattaatatcctaattaataggtacaattgtcttaaatgagatttatctttatgcggcaatgacgattatctcaatcgaggcccaaaccaagcccaagtcgagttgtattggctacttgccatatcggctcaatcaaactccgactctgtttccagccaatacactccctagccgatacttttattcctctcttgatttgttttgatttgatgaaaaatttctatgaa

SEQ ID NO: 54791 - DNA, 231 bp, Oryza sativa
  Clone ID: PAT_MRT4530_56861C.1
agtatctgagtacacaccgcaagtcctccacagaagggatcccccctgcgtccccagcaatcagtagttcatttcgggtggccactcggagtggagcgacgcagtacctgacgcgatgaaccaggggcccaaacccgtgcacgtgtctgttctcagtacgcgagggcgcttgcagaacacgtggcctcaagacgtgggcggcataccaggagaacgtgaagcggtcagcag

SEQ ID NO: 54792 - DNA, 1139 bp, Oryza sativa
  Clone ID: PAT_MRT4530_56862C.1
gtcggattccggttggaccaaagggtccggatccccgggccgcacgcatccgcaccagatcatcatatcatgcgcaccgcctccaccgcgacacgccgtgtgagcgcgggagcacctctcccgacgagccttcccttctcctcctcgccttcgcgtcagcccggcatggggttcccggtctgctgctactccgagctgctgctccccaagcagctgctccacctcctcctgctgctcggctacatccgccgtttcctcctctgggcgttccacgccgtcggcctcggggacctgctggatctcggggacgagcagcaggcggtgctgcaggaccacgcgcgcgagcaccgcgcgccggcgcaggcgctgccgccacagcagcagcaccgccgcgccgagttccggacggtgccggcgatggtcatcgaggaggttctgccggtggtgcggttcgacgagctggtggccgcggccccggcggtttgcggcggcggggactgcgcggtgtgcctcagcggcatcggcggcggcgacgaggtgcgcaggctcagcaattgccgccacgtgttccaccggggctgcctggaccgctggatggagcacgacgaccagcgcacctgcccgctctgccgcgcgccgctcatccccgacgagatggccagcgcgctctgggccgccgccggcgtgcccgacgcctccgacttcgacttctcctacttcggcgcgcccctcacgccgatgcccacgccgactctgctacggccgcacgagctgctgctcactggccttggcggctaccagtaaccagtgaaccgccgctgttggttcacggagttggcaatatccacctactgcacagcagggcaccggcgacccggaatgcgcagtttttacaacgactgaattggtcgtcgtgttcggggaagaccaagaacaggaggcgccttcaactgtacataggcaaaaatgagtaaagcaaaccccccaaaaaaggctagatgattagtagatttttatttttgtttttgtttttgtacagaagattccatcttccaggtttgagaagtagtgaatctttgtgctgattaaatttgttcagtttggcgttttggatgcaacaatctgtggcattttggacc

SEQ ID NO: 54793 - DNA, 530 bp, Oryza sativa
  Clone ID: PAT_MRT4530_56863C.1
gttttcttttggaacctactgccataacttggaagtcctatccgtggagtccaagcatgttaatgaaaacaaaggaataatctctgttgcaaaggatgccaatatttggaatccttaaagatggtatggcttggtgtcggcgacgaagctttagaagctattggttcatcttgctctgcattagaaaatctgtcacttgacaaccttaataagtgctcagacaggtaataggtccaattattaaatctactgttgcatttttacagggatggaagtatcggtgtctcatttctcttagaaatttgatatagcttatactgatactgcattgtgatgcttatagacttgaagagtagaaatgctgaaccatttgttaacaattggtttatattttttttatattgatttgaacacatgctctttttttaatttagtagtgagccacctgagtataagttctaaataaatgcttctgtaattgacatcatggtgtattttaaatattctgcaccgatagtgacagttattga

SEQ ID NO: 54794 - DNA, 336 bp, Oryza sativa
  Clone ID: PAT_MRT4530_56864C.1
atggggacgaaggagaggaggcggcggaggggcacgggagggaagctattgtgccaccttcatgccgtgtggggccgcggcaaggctgaccgggacggtttccacgtcgcgcatgctctgaatgcacaagtggggcggcggggagggaggagaggaggcggtggcgaggatggtggaggcaagggcggggatgaggtggtggcagagtggcgcgagggggaaggcggtgatgaggctagagtaggcgaggaaggggataaggaggcgaaggaggggcgcgagaagggagacgacggcggggagggaggagaggaggcaaggacggggatgaagtga

SEQ ID NO: 54795 - DNA, 702 bp, Oryza sativa
  unsure (1)..(702): unsure at all n locations
  Clone ID: PAT_MRT4530_56865C.1
cttggttcctctattttggccgcccttttttttttttttttttgatgcaaacacaacaggtaaaggacagataattgatgaagagccaaaagccagtaaaccatttaatgacaatattaaaggaagatgtgtgttccaagaacacgttcaccattcttaaaccagcacaaggcaccattcatatcaagtttagctaaagatactgataaaagtcacagctaatacaaaaagagcaagatttacataaatgctgtcatttctggaaatgaggattgagtaacccagagatttcaagaaatccaacacgatcacgccctccaaatatcttcttcagtttctcgtcacacacaattatcttcttgttgttcggatcctggaggttgttgcccttgatgtgcgcccagatgatcttgagcgcctccgtcctgggcagttcctccgcgccgccgacgaactcccgcagctcggcggagatgggcttcggcttcatgatcccgctcgccgggctcttcttcttcccggacgactctcccattaattggccttgcgctcantggcccgctttccagtcgggaaacctgtcgtngccagtgcattcacaggaatcggcacacagcagcggggnagaggcggtaggcngtatggcggccgccagggggtggtaatatcntacaccagcatgnagacggggccacacgctgc

SEQ ID NO: 54796 - DNA, 534 bp, Oryza sativa
  Clone ID: PAT_MRT4530_56866C.1
atgcaattatccagaacaattgtggctcacagcttagctcatcggtaccggagcagcggagtcaatggaacaaccggaggacagcaagaacggctgattcagctccacccaatcaatgcaacgccgcagcgctggggtaacacccaaaatcccgcgacggcggaggcagcagccggaccctccacgaagccagcccagccatcgccatggccgccgccgccgccggagaagagaccaagaaaccctcaccaccaccaccaacaagatcgacgaaaccccccgtcacccagatcgaagaagccaatcaagaaaacaaaccccaagcacagcgagagctccaggaaagcgaaggggagagagggggaaaaaatcctcctcctcctcgtccgggtgggtgggatcgcggcgcaggctgctgctgctgctgctgtcgtctacgcttgcttggtagtagtagctactgctgctagtgcggcaaagcggctgacgctgcgggagagagagcgagtgggaggagaggagaggaggatgggt

SEQ ID NO: 54797 - DNA, 510 bp, Oryza sativa
  Clone ID: PAT_MRT4530_56867C.1
gttaaacatttttttctgaacgactcgcacgagaaggtgcgaagttccattgatagagcaggaaaaaattacaagattacaaccctggagggtcgtaaccaggaaaaaggaaaaaatataccacgacccacacaccgacatcgccaacacacaagcccaggataagactagcaccagaccggccgctgctctgccactcaccacctgcgaatccacggctgacgcaccgatgctccaccaccacacaagctctgccgacatgtgggacccctgcaccggcatcccccgctggccagccttcgtgcgccgaagaccacaccacacccaccggcagctcctcctcacacctaggtcgcctcctccactgccggccacgcctctcgtgccaagccggcctcctccaccaagacgcgcctctcgcgccaacccggcctcccccatcggccgcgcctcttgaacgcgctgatgacgcctagagggggggtgaataggctgtccctaaaaacataa

SEQ ID NO: 54798 - DNA, 552 bp, Oryza sativa
  Clone ID: PAT_MRT4530_56868C.1
cacgaggcctggagttgtggatataggcaaagtgatattcttttaagaaaatcaaagacatggtgtgtatcacagtgagtcgaattgtccaattttcttttctaactcatgttgtgaatggagacatgcatcttagtggaaatccagagctatcatgcaggttatgaatccctcattcaagttgtttgtgatagaagtactaaatacttcacctttttatttcaggcgctataagctgcagaggttccatctcaccatgtattgttaaaagtcagtgtttccaatgtaattgttgggcatacaaattgcaggatggttgcagcagagcaataaagcaattttcaaactaaataataaggtaatcaaccttttctgaacctccgtggacgtgcttactgcactactcaacattgaattagcacggatgtgacagagacaacgagggcagattatatgccatcctttcttgatatttctaacaataatatttcattgaatcatcgaaaattttctcactaactcaaaattgatcattcagaacattgggcatta

SEQ ID NO: 54799 - DNA, 300 bp, Oryza sativa
  Clone ID: PAT_MRT4530_56869C.1
atgggagcgggttaccacaagagcccaagccctagcttcaagggaaaaagaaaaaatataccaccacccacacaccggcagcgtcaacacacacgacaggagaaggttagcaccggaccggccgccgctaagcgtgaccggccgccgctagaccaacaaaggaacacatacgagatcgccctacagcaaggggttgccaaaacaacgtcttcaagaagagaagcgacggaaaaccgccgccgccgtccgtcagggctcaaaggagccaagactgggcttacgcccggcaaccgcccttga

SEQ ID NO: 54800 - DNA, 327 bp, Oryza sativa
  Clone ID: PAT_MRT4530_5686C.1
tctgattgtatatctgtaatgcttagggaggagcagaggtcttgtgcggtcggaataccatgtgaaaaggtgactagagtcaatattcttggaggtcatcttcggtcaacggtggggattgggactagactcagggaggagttgaggtccagacgttcaagaataccaggtgatgaagttggatacgagatggcacacggtggatggacaccacgtgggagagatcttcgcagcaggcttcacgaggtgtgcgtgcaagcgtcggtgttcgcgaaggagattggaagaaattggagaggagtatatgatgctacatttcgagtatga

SEQ ID NO: 54801 - DNA, 369 bp, Oryza sativa
  Clone ID: PAT_MRT4530_56870C.1
atggagatcaatggcgtgcatcccaccagtcaagcggatggcgtagagcaatccatcattattgtcatagtagaattagcagtcgtgaggggttgtcgatggcggatcgccgttcgggagggtgtcgtggtcgtcggggagcgggatgcggtagaggttgccggtggagggtgggtggccacgccgcagcagatcaggtcggggatctccagagagctgaagacggtgacgagcaagtccgccggcagatcagaccagtcgctgccacggcagtctgccacggcgttcgcccgagatttctccgttcatggattcccacccgctcttaatcccgctcttaatctatcaatcaatctacaggacatataa

SEQ ID NO: 54802 - DNA, 4197 bp, Oryza sativa
  Clone ID: PAT_MRT4530_56871C.1
atgcccccggcgctcccgtccccgctctccttcgcgccgcgcctcgcgcgggcgctcgctgccgcggacgccgcgctccgggaccgtttgcttgctgggctcgcggccttcgccgagtcccccgcgcggctccgccagctgctcctcccgacctccgcggcgcactcccccagcctcgcgcgggcgctcctctccgtccccgcgctgcagccgggtctcctcggtctcctcctcgacaagctgcccgagcacttcgacaacgtgctcgacggaatgcccctgcacgatgacgttgggaggctcatcgtcgcgcagttccggtggctcgatttcctcgtcgacgctgacgcctttgttgccaagcttatggaggttttgtcggtggcgccaccgcggctgaagaaggagatcattgggtcgctaccggagatcataggcgaccagtgccatgccaccgtggttgcggcgctggagaagctgctgcaggaggattcggaggtcgtggtttctgcgcttgacgctttgtctgaccttaatttgagcgagcagttacaggagcaggctgtgacggttgcaatctcttgcatccggacagttcatgcggaccaaatgccgcacctgctcaggttcttattgttgtcggccacgccgttcaatgcggggagaattatatcgcagatccgcaagcagctgaagtttgtcagtacggtggatccacgggctgctcggggtaagaagctgaaagggaaggcatcggccaacggtactgatggggcaatccttgatgccttgagatcgggcctccgttttaagaatatgctttgtgaagctttcttgaaagagctaaaatcagtagataacccgagggatcacaaggtgattgatgtgtggctcatcatgctcatctatggtaatggtggtgctctacagaaaagtgctgagaaaatattgaaatccaaaatcttacaattgtgtatacgagagacactgtttgatcaatgcattcgtgggaatactgaattggtaaaggaccatttcgtgtcatacctctcagtgagtgatttcctattggcttgcaaggaagagaaagcaagagaatttgcagcctatttgttcacagcattgtttgaagaattcagtgatacattttccaggcaagagctcataggttcgttgatcgctcatataggttctggggttagcctcgaagtttcgtctgctctggatattatgatttctctgacctcagataagcctgaggaattgatccctctatcttcacatattactggcatattggattacctggagagttttcatgaagataatctccgaaaggtttacgagatcttctgtcatttggcactggctgcgggtttcaatactggttcagggggctcttctgttgctaatgaacttctaatggttgtgagaaagcaggttagtaatccagatatgaagtataggagaatgggaataattggggctttaaggatagtttcgactattgcagatgtgaatgcttctatgaactgctcatcatctcagcaaccaaattatgatgaagccctggaacttctgaaaatggctgttaactcctgcaagtttgtgatgttgccattgattcttctttatgacgaattagctgttttattggagaacagtagtcttcactccgcaattgttgaatgggtcggggaacatgtcgcagaatttgacaccgtttttcttgctgatcttgacgatggcgagctgtcaaaaaaatatgtatgtgatggcatagaaggggaattatggatgaacctggatggaaatatctccccagtgtttcagacctgtttgcagattctcccttcccaattttcacttctaactattattgaacgtcttggaaatcaaggctcacttggtggaataaatgctgtacttggctgtcctttgcatcttccctctacaaagctcaatgctttcagcacacaagttgcaactagggttgataatgtttcacaaagggcaaggaatgagacagctgtcaaacttctgatgcgtctgagaaatctaatattacttgagggcttgttgaatgcttatctcaaaattcatcctttatctctgcctgatctgcgctatgttggagatcatgggtcaactagcaccagcaagttcaacctcccaaaaaacatgggagaccaaaacatggagggtaatgtttccaacaaaagacaaaaaggccataaggacaaagcatcatcagagaaatcaaattctgacgagaaatttaagcaacctacgatactggatgctttcaaaagagcaggcgtaactattagtcaagaaacaaacagagattctcaaccatcgccaagtggaatgatgtcaagggttacggaacatgagacaaataatccttgcaaatttgggattgtagatctaatggctgcaccagctcagctggatatgcaaagattcaaattcagaactctacatgcaacttgtctatccttgctaaactactcagagcctcaggatacaacagtttcatacaatgaatctgagatgcctctatatgtttatttgctccgtgaacttcagaacaaactagacaatctatatccttcaagcaagccatttttcagttcttctcaagggaaatctacccaagcttattgccaaaagagcatggaagaatttctcaacaaaatccagccactattctcaagtgtaagaaagcatctagatggagcagtttccatgatcaaagatggatctgacagctgcccagacaattggaattcacattcagcttcagcaggaaacccagacataccttatgtggtggtcttgaagtcttcagtagcaacctcagtatttaaggaggttctcggctgctataggaagttacttggcattccagatctattgaatcaagcaaatatatcagttctgaaggaactactgcagaccttccagccaagtgaaaatttcgatgaagtccttgctgagtttcgtccatctcttgtccctagcaatcttgattacctttactgtggggcatacacaatgtttgcggctattttggatattgttttaaattccgttatcatgctgtttgaaaaatctggggaacaaaatgggaagaacttgcacatgggatgctcaaaagagataattccttttttacgaaaacacctggggctatcagctcgtaagctgctaacctctgatctccctagtgaagatgctgaaaatggatggcagagtaaaggtgatctcatacagaagatattacaaatatacctcaagaatagtgactccacttcagatctgcttgatgagctggcttgctcagtgttgcctaaggttccttcattcaagactggaagcacccaagatatgtcacatggttttccaacattgtgcgcttccactatcctctcctggtatcgtgtggtacacgaagagaatactggaaatttaaacaagatgatcaagcaagccttgaagactaaagcacaatcagaaagagcagtggaaacttcactggaagaaattcagaaatcagtacttgtgtttgtttctctaataaacatgtgcaagactcacgaaaaggttgttatgcatgcaatggcagttaaacatgggggaagatttgtcgatacatttctgaaagccttcaacttcttggagacacatttcggtcaacataatgatattatacttcagatgataaaatcacttcagaaagctacaaaaacaatccaaaccatatgtgcagaggctaagggccacaagcgaacaatgatcacaagcaagatacctgttgcgaagagatccctggagcgtttcgtattccaagtgaaggcgctcctacacaactgctctaccgaggagactttctggatgggtacatacatactctgcacccccaatttctgttcctggcaacgtcgagagatatacatagatggtcgccattgttgctctaatttgctaaaccgttgtatgacaggcaatctgaggcataaggacttacagggtcaattggtgagctcccaggtctacggcagcgtcgatgacagcccgaacgatgagcaagaacagatggagactgatcctgaaaccccagctgacgaaaacgccaacgccatggacgaagatgcggcagaagacagcaacgaggcaccattggaggaatag

SEQ ID NO: 54803 - DNA, 921 bp, Oryza sativa
  Clone ID: PAT_MRT4530_56872C.1
atggctcacctcgacccaaacagcggtagtggtgccactgtcgccgctgccagccacagccacgtcgtcgtcgatatgcctcaactggacgcgagcagccatagcaccgccagctacgacgacaaaagcggccacgtcgtcatagacatcgaatccgaaggcagatcaggtaccaccggctccgacattatcttgtcctgcgtggtgtgcacggagccgctcgagtgggtggcggtcgggccctgcggccaccgcgccgtctgctccatgtgcgtggcccgcgtccgcgccggcccggacgccgacaaacggtcctgcatctgccggacgcgctgctacaccgtggccgtcaccaaggcggcgacggccgctgacaccctacacgccttcccaaagacggtgccggtgacctcccgagactggcggatcggtaaattctggtactacgctgccatgtcggcctacttcgacgacaggaaccactacaaggagacgaagcgcgcggtccgcgatttccttgaaaagcagcgggcggcgccgtctccgccgccgccgtgcccggacgacgatgtcactgatgaaaacttggaagcgcagccgccggcgccgcaccacccacgtgtatcgtggtgtggaatcctgtttgttttagttgcctttgcatttgtctgtggacccccagcgctccgcgccggtgtgcaccgggtagaaacctgcgccacggccgcgacgaggacgcatcaggacgaagtgctacgcatcagcaaggctcctaagtcgcagccaagtgctacgcatcaggacggctccttgccaattgccatggagaaactggacggagaggacagagaggaggaggaagaagaagaagaagaagaaaagaagcaagcagcaagcattagcgtaatgttgacacactag

SEQ ID NO: 54804 - DNA, 1948 bp, Oryza sativa
  Clone ID: PAT_MRT4530_56873C.1
cccgggctgcagctgccggcccctcggccctggctctggctgtcgctcgcccgcacgccggcccagcccttgcttctcctccgccgccgggtaccggtggctgccccccccccgctctcccgccgccggccctcccgcctcctggcactcacactcccacgcgcacacagcaaagcaaaccaaagcaaagcttcgtttccgctgccccccacaggccactggacgaggaagagcacgcagcttcgcctctaccggcggcgcatggcataggcatccccaagaatgagagcttgggcctccactacaagagagagagacagacccaccaccatcaacaacatcaggaggagaagtagatagatgggcaactgcgggacgcgagaggagaatgccgtcgtcgcggcgcacgcccaagttcagcagctccatttgttacaacatcctgtcaagaatgctgttgcagagaggaagcatacccgcatctcatcagatatgagtgatccttcaacacctaggaaaattgaagatgccaagaacatctccatatacaacgatgtgattgatttcacattgtttgaactcgagaccatcacaaagagcttccgtgctgactacgttcttggtgaaggagggtttgggactgtttacaagggctacatagatgagaatgtcagggttggtctgaagtcactacctgttgcagtcaaggtgctcaacaaagatggacatcaaggacacagagaatggcttactgaggttaggttccttgggcagctaagacatccaaatttagtcaagttgattgggtattgctgcgaagatgaccacaggctgcttgtgtacgagttcatgtttcgaggaagtctagaaaaccacttattccgaaggacagctactccactatcctgggctactaggatgtcggttgcattaggggctgccaaagggttagcttgcctccacaatgctgaaaggccaattatctacagggatttcaagacatcaaatattctgctggactcagattatactgctaaactctctgactttggtctggcaaaagctggcccagaaggcgatcaaacccatgtatcaactcgggtgatgggaacatatggttatgctgcccctgaatacgtgatgactggtcacttgactgctagaagtgatgtctacagctttggtgttgtccttcttgaactcttgactgggcgtaagtccatcgacaagtcacggcccagtagggagcacagcttggttgactgggccctcccgaaactgaacgacaagaggaggcttctccaaatcattgacccaaaactggagggacagtattcagttagagctgcccacaaagcctgcagcctagcatactactgcttgagccaaaacccaaaggcgaggcctcttatgagcgacgtcgttgagactcttgaaccattgcagggcagtggtggaagtgatggagctgttcaatctgttcttggcagtggccttccgagctacagagtaaaccgcagactaacgacgaacagcgtccactgtagggcgattccgaaccccaagtgctcccctgctgtcccagcatgcagggtgagatgagagtgtgctgtttcagttgctcctggaataggttcagttgtacattgcaagtctaaaccgtggatggtgcgtgagtgtgcacacctgcgctgtgtgcttttgggttttttcttctttttttttttggctttctccccagttttcaacctgtaaatttgctctgcatggtggtgcttgtaaggccctctaattttcacagtggtcttatgtgttgttgactgtgtttgctctgccaaaaccggcaaggtttaaccccagaaatgaaaggctgaactaagagtggttggatggttgctatgctaaaaaaaaaaaaaaaaaaaaaaaaaaaaaaaaaaaaaaaaaaaaa

SEQ ID NO: 54805 - DNA, 898 bp, Oryza sativa
  Clone ID: PAT_MRT4530_56874C.1
gctcctcttcctcctcctccagttaacggttaaggcgttggtgttggtgcctcctctccaccaccgtccatcccactcccacgcgcacacagcaaagcaaaccaaagcaaagcttcgtttccgctgccccccacaggccactggacgaggaagagcacgcagcttcgcctctaccggcggcgcatggcataggcttctcttaagaatgagagcttgggcctccactacaagagagagaggcagacccacgtcacgcgtccgaaacaacatcaggaggaggagatagatgggcaactgcgggacgcgagaggagaatgccgtcgtcgcggcgcacgcccaagttcagcagctccatttgttacaacatcctgtcaagaatgctgttgcagagaggaagcacacccgcatctcatcagatatgagtgatccttcaacacctaggaaaattgaagatgccaagaacatctccatatacaacgatgtgattgacttcacattgtttgaactcgagaccatcacaaagagcttccgtgctgactacgttcttggtgaaggagggtttgggactgtttacaagggctacatagatgagaatgtcagggttggtctgaagtcactacctgttgcagtcaaggtgctcaacaaagatggacatcaaggacacagagaatggcttgtgagttgccaacttgttcaatattcactatggttgctgatgtccgttatgtacatggatacgcggaacattaacaattactcgtacaagaacatgatatatcttaattatgtaaattatggaaaaatatttgttgatgctaactatgtatttcacaacaaatcaacaatggcacatgcagcatttagttatactcaagttaacaagtacgctagcaaataa

SEQ ID NO: 54806 - DNA, 213 bp, Oryza sativa
  Clone ID: PAT_MRT4530_56875C.1
atatcggaggcatccaagccaagaagagggagagcaccaaggacacgcggactaggcagaaagcccgagccgaccggccttactcgatccatatactatccgggacgagtgtctatgggacgatctcttcgctcctccacctcctcctcacaggttcttggagtagcttgccactttcaccagcacagattcatgtctgatctcgacattgag

SEQ ID NO: 54807 - DNA, 246 bp, Oryza sativa
  Clone ID: PAT_MRT4530_56876C.1
atgacactggatggttttgttgatgattttgtggatgattttgtgatgatctaccagagaattggtacagctgatagcatgactgtacttaacgagggggccgagtcgaaggtcggtgctggtgttgagaggccatgccattgccgggcatcgagggctcagattggagcattgagcatggcagcggctgaggatggaggatggagagggtgtagcgcacaaggtgcctccagcccttcaccgtga

SEQ ID NO: 54808 - DNA, 632 bp, Oryza sativa
  Clone ID: PAT_MRT4530_56877C.1
gagagagagagagagaactagtctcgagttttttttttttttttttgaactgaagatggccagattgttctgaaattttctgaaatctcaactgatccctggcaaatttgcacggacagttttttttttttttcagcaaaacgcccacactgatcgcattacattgcaagcaacccacctacagtagccagtacaattgtacatacacacgctgtaaagcttcagctgcagtggcacacgtcactcttgccacgtcacgcggcattcttcttcttcttctttcctaacttagctagacaagcctctcctgacaatctcactcggccactctcctcttttttcccggccgccggcgacccccgcggggggggcccgggccgggagcgcgagcgccccggcggagccggcaggcaaccaaaacccgatgtgccggccccgatcgcgctaaaactaaaaaagaaaaagaaagcaaagccaactactagccaggcaaacagatgaactcagcatccaaaaaaattttaattaaaaaataattaaaaacccaagcctagtagttaattttggccccaagtttgatgggggtgtaaagtttttttatggcgactcggaagaggcgttgggggagacgg

SEQ ID NO: 54809 - DNA, 234 bp, Oryza sativa
  Clone ID: PAT_MRT4530_56878C.1
atggtcgtggtcgtggtcgtggaggaatcggcgtcgccattggtaattcggggcctgtttggcacagctccagctccagctccacccctcctggagctggagctcagccaaacagtttcagctccaccagaactaggagtggagttaggtggagctctctcacaaaatgcccttggtattgctgcagagttggacggggctcaaaattccatggacgaaaatacccctcgctaa

SEQ ID NO: 54810 - DNA, 438 bp, Oryza sativa
  Clone ID: PAT_MRT4530_56879C.1
atggctggttttgatctgaatcagcctatcaattgggatgaaattgacgatttagagggagttgtaccttatttgaactatgatttcgtttgggatcccggcaacgaagatggagaaggttctggagaagagcgcagcgacggagatgacgacgccggcggcggagcggacgccggcgacggagcggaggccgtggatgcagctgaaaccacaggtataaatatcaggaagagaaggcactaccctcctgatatgaaacgaagcatatatgctttgtgtttagagagatcaactaatggcatcataaaggagggagtgaccaaatctgttgctaacgacatgcgggtggggaaactgtggagagttgtccaacgtgtatggcggccgcaaaaaaacttccctttaacgctaatgcactggtggagaaaccctttgtag

SEQ ID NO: 54811 - DNA, 198 bp, Oryza sativa
  Clone ID: PAT_MRT4530_5687C.1
gaaggccggcaaggccctgcacacgcgacgggcggagatcagggtgcagttccggcgggtgccggggaacctgtacgggcggcggaggcggagcgtgggcggcggcgggacgaccgcgacgagggagctggagaaggcgacgaacgagctggtgctgcgggtgcagcccgacgaggcgatctacctcaagatcaacag

SEQ ID NO: 54812 - DNA, 390 bp, Oryza sativa
  Clone ID: PAT_MRT4530_56880C.1
attcggaaaacactactataccactgcggtaaataatcatgatagaggtgacggggttcacacttatggtcgtcgatggttcttaaaattccatgctctacatgtctttatatctattatgtcaaaccattctatctaaaggctataactgctcgaataaaatactgcaatctcaaattgaatgcactctttattcttgagttctctactgtattctaaatagtgcaacatacttaattgaaattgtcctaacagacttttacctagatttcaataacatcatgcttatattaaggccactgagtcaaaaggaaataaagtctctattaaatttctgtatggaaaatgttttaaaagcctttaaatcacttctcctgtaagtgccatcat

SEQ ID NO: 54813 - DNA, 285 bp, Oryza sativa
  unsure (1)..(285): unsure at all n locations
  Clone ID: PAT_MRT4530_56881C.1
aaaaactctagtttttgaccgctgcatatcataatcgaggagtaatttaagcaatcccagacttagcaaccaactcaagcttgagttatccatggttttgtcatcctagactagtttgctttggttgattaatggaccattaaccctgtttgggaataataaaataccataatcggttacgctgacggctaatttgctcatcncttccaccagattatgtgaaacattcagcatgatgttactccggtaattatacaaaacccgccgctctaaaaaaaaaacgat

SEQ ID NO: 54814 - DNA, 310 bp, Oryza sativa
  unsure (1)..(310): unsure at all n locations
  Clone ID: PAT_MRT4530_56882C.1
catcgttccggacataatggnaggntcagtcttccaaccgcattatcgctgctattatgccctgaacgaggggcagccccttgagagcccgcgtgactccacgcggcgacctagatagtgcgcagctatgtcgttttgagcacctcaccgcccttgaggctacacaccaccagagatctgaagctggattcactgattactactacattgaggcaaaaaatcacttccactgcgcctcagtgaccgcgacgggcttacccgcccagaggacttttttaccttcaccaatgtatgctaatggtcacgagct

SEQ ID NO: 54815 - DNA, 632 bp, Oryza sativa
  Clone ID: PAT_MRT4530_56883C.1
atggatcatgaaggaaatgatgcatataacaatttcttctcctcctcctccgtgctgccattgccatggcaagctcgtcgacaggagcaggtgccacatctacagaaatggacggccattaattataacttgaagcttcgtgcatcgatcgatcgtgtaaagagagacctgttggacttaaatgtgttctttcaactcaacataatccaatttgagccaacaaaatcaacagaggtaacagccggctggcggcaacgttccgttcataaaaggcatgaggcgacggagctcttgccgactgccttccggctacacggcttcttcgccgactccgacggctacttcgccgtatcaccatggaagtctcgtccaatcgacgccacccttctccgccgccggccggccggccaacgccctcgctgcagcctcgccgtacgtcgccgtcactgtagtctcaactcaccaagctacagactacagtggttctctgccatgaactgaacataaccccaattgtgtatcgtcatggggctgcagctagcaatggcatcgccaatctgttgttaaaagatgagaagtacgacgagtatgaattatgcgtactacttcagagtgcagaaaatgtgtacgca

SEQ ID NO: 54816 - DNA, 357 bp, Oryza sativa
  unsure (1)..(357): unsure at all n locations
  Clone ID: PAT_MRT4530_56884C.1
cgggtcgncccacgcgtccgcgatctcctaccgaagcaatagtagccggcgggtgcgtcgatcgatccgtgcactggcggccctgaagatgaacaggatggccgtggcggcgctgttcctcgccgccgnggtggtggcgggcggcgctggcgctagcgcccacgtcggggttggggctggggctggggccgacgccggcgtcggggccggcgtcggggctggcgctgncgccgcccttggggttggcgccggccccgccggcgccgccggggctggagccggacctggccttgcngccgccgcccacgcagccgggtctctcaccggccccgctcgcggcgccgccggcctcccccc

SEQ ID NO: 54817 - DNA, 152 bp, Oryza sativa
  Clone ID: PAT_MRT4530_56885C.1
cccacgcgatacgaccacgcgtccgggcggtggtgtgcgattgccagtagggtgcgtgccgacgtccacggatgcttcccagtggattactgacctctcatggtgacgctagatcgcaaagctcattgggtcagtacggcagatttgagaca

SEQ ID NO: 54818 - DNA, 2889 bp, Oryza sativa
  Clone ID: PAT_MRT4530_56886C.1
atggcgggcgaagagcccgcacgagccgaagcaggagcggagctacaagaaggtgaaggtggcgaggagcaagcagtggccaaactagctcggactcaagcagcaccttcgaccatccaagtcctgatactcaagcttcgactcaggcgatggcctccatcatcccaagcacaactcaggcggttgccgagaccttgcttcaatgaaacaactaaatccccaaaccttgctgtccccgattcaatcgaaaaaccatgcaagcggcggcggcaggggcttacgcgacaggcggcggcgcgcggcagggaggagcggcggcttgggccagcgggcggtggagtcgggcgcggcggccctgaggagcagcggctccgtcgacgcggcggtgcggcggccctgtggagcggcggttccgtcggcgcggcggccccgcgggttgcaagcgcagggaggcacggcggccggcggccccgtgaccgaggagcggcggaaaggagcggcgcggctctgtcggcgcgacggcgcggcggctccgtcgggagagaatgagagaaacattcaccttctcaactcagttcctggctagaagtcaccccatcactggagccatagctccatctcgaccgtccggtttccagtcttgcaggtattagctgcaatgattgttgcaagaacgatccaagtgcttcttcaatcccagagtctagcgacattacacttgctgcacaggttgactcttttgctgataggtgtaagctccttgatattctgataacaaacaaggcagctgcaaaggctatattcatcaaaatggacccagatcaagtggagattccctttaaagtgcttcaggagagagtccctggtaaaaagaagtattccttaagggttatcaaaccttcgtcctcaaagaagatatgcagaagcgttaacagttatccccttgtctgtctgaagagggagatggcagataatgatcatgtgcattgcataatgcttacgctaaatcaccgaaacattctctcaatgaaagccctatccagggacaaggttgagagcaatggcccctcatccttagcagcatttgtagagccttacactggactgttatcatcactttgttttaaacatgattgctggggtgacagaataaaccacattccttcaccattactccagtccttattaaggcaagtcattgaggggcttgacttcttgaggaagaacaaactgtatcatggtaatctcaattgggattcgattttgtatcttcaaccgtctaccgttaagcttgctaacttcagaaaacaagagacaatgagcttggaggaagcccagtgggccgattggttgtgccttattaaaatgcttgaagaaattttagaaagagctgctgaaataagctcaaagcttgctcaatgtgatagatatttctgcggacatgttgaatctttgactgctctattgaaaaccctggataagactgcattgccggcaattaaagaaattgttcttgggcatcctcttttttgggatttgatgacgagggtaaacttctttgcaaaggatatatcacttaggttgaatgatgacacttttatgtcaagagtgagagcttcaaaaatccgtaagcttccttggaatgaaggaacaactcaagactttaaaggtctcctgtttgaaatggaaacctatcgtaaagatgaaggaattccagcatatgacttcagaagcttaaaagattatgtacgctgtgtctgtggtgcttatgctcactggaataaaataaagctaaatgttgacgacattgttcggcaaaaccatcctaccatatgcagtgatatctggcatcttcttggaagttcagacatgtcgcatgctgattctaagaagccagttgaagagattaaattaatatctgatgtcgttagagattcaccacacaagattttcatcgctggaattcctagagtgatttcatctaagatgctcagggatatagttagttcatttggtcaattggctgcttaccgctttctttttaatgaagaccttggtggagcatgcgcatttcttgagtacattgatcactccattacatcaaaggcatgtgctggccttaacggcatgaagcttggtggatgcgtaataactgctgttggcgtgttaactgatcatcctgggcaggctggcaatgaagcttgcccatttcatggaattcctgccaatcccaaacctcttcttgcagtaccaacacaagtcctgcagctaaaaaatgtgtttgaccaggaggaatactcgctgctttcaaaatatgaggtagatgcagtattggaagatgtacgtgtgaagtgtgcaaggtatggagctgtgaaatccataaatgtcgtagagtatcctgctggcagtgacaacaccaaggcacctgcagtagatgctagagacaacgctttggcttctaacaacactgcactcgaagctggctgtatacttgtagagttcttgtgcaaggaggcttcattcatggctgctcattcactccatggccggccttttggcagcaggattgtctctgcgggatatgctccatatgatctcttatctctaccggaggttgaaagcacttaaagattctgatgtactccacttttttcaagggaaaaattctgatgtactgatggagctaaagcttgcgtattccccaacacgaagtaccttgtagctttggtctgttggatgcataagcgtgaaactagttttcaatcagaattgatacaagggaacaagggaacaagtacttgttccttgggatgaaatattggatacacgtgatcagtaaccattttatctgaaaaaaaaaaaaaaaaaaaaaaaaaaaaaaaaaaaaaa

SEQ ID NO: 54819 - DNA, 1884 bp, Oryza sativa
  Clone ID: PAT_MRT4530_56887C.1
accaaccttgcggcttagctagggttagctagcacaccacgcagcttcagctcaggcgtcgagaggaaggaggaggagggggtcagcctcgctcggttccggcggccatggcggtggcggcgcccggccagctcaacctcgacgagtccccctcgtggggctcccgcagcgtcgactgcttcgagaagctcgagcagatcggcgagggcacctacgggcaagtttacatggccaaggagacggagacgaacgagatcgtcgcgctcaagaagatccgcatggacaacgagcgcgaaggcttccccatcacggccatacgcgagatcaagattttgaagaagctccaccaccagaacgttatccagctcaaggagatcgtcacctctccagtcgagggtaacaagtacaaggggagcatctacatggtcttcgagtacatggatcatgatcttactgggcttgcagataggcctgggatgcggttcactgtgcctcagattaagtgttacatgaggcagctacttacaggcctgcactattgccatgttaatcaagtgctgcatagagatattaaaggatctaacctcttgatagacaatgagggtaacttgaagcttgctgattttggccttgcaagatcattctcaagtgaccacaatggaaacttaacaaaccgtgtgatcactttgtggtatggtccagccgttgacatgtggtcagtgggttgtatttttgctgagcttctcaatggaaagccaatattgacaggaaagaatgagccagagcaactgtctaaaatttttgagctttgtggtacgcccgacgagttaatctggccgggtgtcacaaagaatgccttggtacaacaatttcaagcctcaccgacgagtgaagagacgggtcaacgagtcctttaagcaatttgatgggcaggcgctggatctcatagaaaagatgttaaccttcgatccatcatggtggtgacatggacaagatgcacttgacgcggagtattgctggcctgatcccttacgttgtgatccaaagagcttaagtatgaggcgtctcatgagttccaaactaaacgccaacagcagaggcaagcagaggaagccgcaaagcgccagaaattgcagcatcctccaccacattcccgtttgcctccaatccagaacccaggccaaccacatccccaaatcaggcctggccagcctatgcataatgcacatgcacctgtggcagctggcccaagtcatcactatgcaaagccgcgaggacctggaggccctaataggtacccacaaggcgggaaccaaggaggctacaatccgaaccgcggtggacagggaggaggctatgggagtggcccatatccacagcaaggacgaggtcctcccccttatcctggtggtggcatgggcggagccggtggtccgaggggtggtggtggcagtggctatggtgttggcggaccaaattatcaacagggtggaccttatggtgcatctggtccaggtcgaggcccgaactataatcaaggtggttctcgcaatcaacaacagtatggaaactggcaatagcacggcggtatcatgagcagcaaatgcccttccggtaggactctgtatgttgaaagaacctctgatgttgtatttgagatatactttttgcatggtgtattcagatccaggcatctctcggaagtatgatgtttatgactagctgtatagtatggcactgatgtgattcccaatgtttgatgtactagtattattattactgcaagaatgtggaaagataaaagatccgttttgattaaagaatgataagagatacacaaattgagcaaaaaaaaaaaaaaaaagccgaattcctgcagcccgg

SEQ ID NO: 54820 - DNA, 381 bp, Oryza sativa
  Clone ID: PAT_MRT4530_56888C.1
atgggacagatcgtgctcgcgttaactacgctcgccgaccgaagcgccatcatcatgtctccaggcgaaacgaaccggctcgtcccgattcgcacgctactcgaagaccggccccacctgtcaccaggcctaaggagtggcgtcacacccgagcgcttccctcgaggggggcgatcgctctggcataacgccgggggctcctgtcggtgacatggggccgttggtatcgtgactagaggcttgggtagccgcggtcacccacgtggctctgaccccctcgggggggtcgggcccgagggtgacgtggccacccctccctctgtctccccgaggggacgggccgctcccgtttgggccccggggggggggcgccccgacccc

SEQ ID NO: 54821 - DNA, 308 bp, Oryza sativa
  Clone ID: PAT_MRT4530_56889C.1
ggctaggagggccgaagcacaggcctcattttccatttggaataagttaacttttggtctcttaaattttcgacgaatccgaattccgtcgttgaaccggaaaaccagatacggctgtcaaaaccggtacaatatagatcccatggtaagacaacagttttagctgacgtggcacctacatggctgatttaactcggtctttatcccacgtggaattgacgtgacgcttacgtggcaattttatctagaaaaaaataaaaaccatgggcccacacatcagttacagtaaaataataaaaattaaaaat

SEQ ID NO: 54822 - DNA, 1671 bp, Oryza sativa
  Clone ID: PAT_MRT4530_5688C.1
ggaaaggacacagccgaaagtttctgaaaaaaaaaaaaaactatgagcaacagtaggggagttgttgagtagtgcgatgcgatgcggtgggaggtggccccacgcgtccggcgagatcgatgggttcttcgtcttccacctccctcgtctccctcctcctcccctgcctcctctccttgctcctcatccgcctctccacccacctcaaccctgacccgaccgccgccgcgccccgcttcaagaggacccctcccttccccctccgcttccgccatgacggcgccttcaagatcctccaggtggcggacatgcacttcggcaacggcgccgccacgcggtgccgggacgtggcgccggaggtgggcggcgcgcgctgctccgacctcaacaccacgcggttcctgcggcgggtcatcgaggccgagaggcccgacctcatcgccttcaccggagacaatatatttgggggcagtgcatctgatgcagctgagtcactactcaaagcaattagccctgcaatcgagtataaagtaccatgggctgccattttaggaaatcatgaccaggagtccactatgaccagagaggaactgatggtgttcatgtccctgatggattactcggtatctcaagtaaaccctcctggttctttggtacatgggtttggcaactatcatgtcagcatacatgggccgtttggttctgagtttgtcaatactagtttacttaacctttacttcctggatagtggtgatcgtgaagtggtcaatggagtaaaaacctatggatggatcaaagaatctcaacttgcttggcttcgtgctacctcacaggagcttcagcaaaacttgcatgctcctgcatttgcattctttcacatcccaattccagaagtcagagggctgtggtatacaggtttcaagggccagtatcaggaaggggtggcttgctcaactgtaaactccggtgttcttggcaccctaacctccatgggagatgtgaaagctgtctttcttggccatgaccatcttaatgatttttgtggcgaccttaatgggatatggttctgttatggtggtggctttggttatcatgcctatggaagacctcattggccaagaagagctcgggtaattcatactgaactcaagaaagggcagaaatcattggtggaagtcgagtcgatccacacctggaagctgttagatgatgaaaaactaactaaaattgatgagcaggttctttggagacacagcagcatatgattatgaccactatgtataatgtatgtgcatctgtgaacacaacatgttgtaacattctgcatgtagtacaaccccttcattcttgtaggcgagtagattgattattggcaactgattttgccatgcacatgtttcacatttggtgatattgtatgatgttcgatttttgttgtataccacaaagctaatgacgtatcggcccatgagttctaccaaatggccacttttttctcccattttcatgaagttgtatatgaataaaccttgtgttttactatattcatccctgaaaatgtgtatatatttcgtcgtttattccccacaaaaaaaaaaaaaaaaaaaaaaaaactcgagactagttctctctctctctctccctcgtgccgatcctgcagcccggggatcc

SEQ ID NO: 54823 - DNA, 369 bp, Oryza sativa
  Clone ID: PAT_MRT4530_56890C.1
atggatccggcggtggcggcgcaacctcgcgtcgatccggcgtcggcggcccgtctcggcgtggatccgatggcggcgcgacgacggcgtcgatctggcgtcggcggcccgtccccgcgcggatccgccgcctctacctccctctgttgtcgccgtcgatttccccgccctcctctgcggcgcgacgacggcttcgatccgccggcggcggcgcgacctcgtgtcgatccggcgtctgcggcccgtccctgcgcggatccggcgctgacgacgatggacgacggtgggagcggcggattggccgacgacggcgacgaatccggcggcgcggaggccggctggattgggcagcagtgggctagggcctag

SEQ ID NO: 54824 - DNA, 169 bp, Oryza sativa
  Clone ID: PAT_MRT4530_56891C.1
tttgtatgctccttatttggaatttgatcccttctatgacgtagcagattgaattgcattaatggacgcatagaagaggtgcatggcgatcgaatagctgtcgattacgggatctcgaatatggatgggggatacgcgaatagagtgatacgccatttgcaggactaca

SEQ ID NO: 54825 - DNA, 306 bp, Oryza sativa
  Clone ID: PAT_MRT4530_56892C.1
atgactggtggcaacgatgacctcgaccacggcggtggcaacaacgacgacctcgaccaccacagcgacgatgtggcactgggctcggcggtgacagattgggtggcgctgaggaggatgaagtttcatgcaccggatgaatcaggttcgctgacttcgcatgacccatccatcaggtgtttgttggagatcttgcatttggtgttgctcgctttgtatacatgcgtggttcttttattagctactggatggcatgagaggtacagggtttcttataacttatttaggcttctcaaagggaaatag

SEQ ID NO: 54826 - DNA, 282 bp, Oryza sativa
  Clone ID: PAT_MRT4530_56893C.1
ctattctcttttctccccactttttttttttccccccacaaggggaggctttgttagaaccggaggctccatctcatggcaagcttacataaccaaaaacttttctccccaacctcgaaaaatttcttggaaacgttaattttccacaaaggcttccttcaccaaaaacaaccacaccccccccccatccaaaggcgatggcaaaaaaaaaaccccaaaattaaagcccccccttggggggccattttgtgccccccccacgtgtatcacccaaacataccc

SEQ ID NO: 54827 - DNA, 669 bp, Oryza sativa
  Clone ID: PAT_MRT4530_56894C.1
tcaactactaaagcaacttgacaaatgtgtcaggtatctgagagcttcaatccagatcaactgtgcgtggtcgggcctccagtccttaataggattgttagcccagaacaacaaaagcataataacaaactgtatcctagcacaaatgttgtttgctttcccatttcttttcagctccgctgctaaaacactcatcctgtagcatacatatccgagaacaaaatccacgcaaaggccaggcgccagtttgtggaactgacaaatacgaatcacgagaactaataaacctgacgttatgcccgcgtggaagcagcgacagcggaagacgttgccattagtggccttaatttcctgaaaggcagtcaggatgggccggagaggttcttcgaccagggcgttccatatagcctccagttcctcctggccatgtcccgtcggctcgattagatcgtcaggagtcagtggcgtcgtccaccacttggactcgggaggagcacaacacaagcgcaagcgcaagcttcttccttggctgccattgggtaaactgagggcgcgccgctttccttccctgctcccggagaagcagaggggggcgccattggcccctctccgcatagtagttgtgaagctgcgagtggcgccactcttgaaggactgtgttgaggacat

SEQ ID NO: 54828 - DNA, 276 bp, Oryza sativa
  unsure (1)..(276): unsure at all n locations
  Clone ID: PAT_MRT4530_56895C.1
caaaagagcagcgtcgnntctccncctcctccctaacccntacgcttccagaaccttntcgaagctcccgctccccccncncttccgctccaatggcgaaggaaccgatgcgcgtgctcgtnaccggcgccgcaggacaaattggatatgctcttgtccccatgattgntaggggtgtgatgttgggtgctgaccagccctgttattntacacatgnttgacattncaccagctactgaatctctntaatgggccttaagatngagctggtttatg

SEQ ID NO: 54829 - DNA, 681 bp, Oryza sativa
  Clone ID: PAT_MRT4530_56896C.1
atggcgtcggcgacgtcgacgacgcccgacctgtcgctgcacatcagcctgccgagcggtggcgcggcggtggggacgacggcgccgccggggctggggaacggcggtgcggttggtggtgccggcggcggcaaggcggcgggtggtggtgacccgtggcggaggctggatggctccacagcgtcgacggagctgtcgctgtcgacgccgcagcagcagcaggagggcagtacatcggcggccgatgtgctgccgtggcggctgcggcagccgacggcggcggcggcgtccgtgccggtgacactgccgacgataccgatggatggttcggcggcggcggcgcgcgcgccgatccgtggggtgcctgtgtatagcggcggcggcggcggtggccacccgttcctcggaggcggcggcggcgaccaccggcacaaccggctctacaacccctaccactccacggcatggccctcgtcgtcgctgtgctcgacgtcgccggcgccggctcctcctcccccaccagcagctctcgacccgacgacgtcgtcgctgctgtcgccgtccgcgtaccaccggatgctctcccagcacggggcgcctccacggcgtgctcgccgacaccctccgcggatacgccggcgccgctgcggtggcgggctccatcggctacggtccgcggcc

SEQ ID NO: 54830 - DNA, 661 bp, Oryza sativa
  unsure (1)..(661): unsure at all n locations
  Clone ID: PAT_MRT4530_56897C.1
tttttttttttnttttttntntntttttttttttttttttagtcaaactcaatactgaacagagtgagtaatcagcaaatttcaaaagtttgaacgaaccgaaaacatctatggagagtaattactccattataagtactataattaagttccctcaaaagataagtactacaattatataaatacgaaccactccgataatttatagctagttggagtaatcacagctaagcaatggattgcttggacatgatgctgtcttccacgaacgccctgatttcaccgacgagcttccggatgtcgccggcgaactccgggaagaagtagaaggcgtgtatggcctccgggaactccaccacccgcaccgcttccccttccgccgcagcatgccggcgtacctccggtcccagtcttgcagcgggtcgaggcccccgacgaccaccatcgccggcgggaacgcttcttgcagctcgggctccggccccgcgtcgccggtgacgtgcgccgccgggtggttccggtcggccccctccggcaagaacgccctccaccaccggtccgaccgccggatgttcaccaccggggccacgccctccagcgcgcgctctgccttggtccgctcctcggccgactaagccagctccaggagtatcacaccggc

SEQ ID NO: 54831 - DNA, 153 bp, Oryza sativa
  Clone ID: PAT_MRT4530_56898C.1
atggcaactgcgtccttcgacatctgcgcgaaggttgggctcggaatttcgacaggatactcacagcgaaatcaatactctgctatggcaaatgctgtagctgctgataaacgtgccatgtattccatctcgttcttgcaagcagtttcttag

SEQ ID NO: 54832 - DNA, 322 bp, Oryza sativa
  Clone ID: PAT_MRT4530_56899C.1
atgcagctcaacccgaaagcaagaactcgtcgaaataaaactaaagcaaaaaggactctatccatttgcggcaatcaccttgaagcacctcaatccaacccaacatcacatatcaagttgtattgctaggatcggctacatcggcttacctaatccgactcagactcagccgatcttatcgtagccgatctggactccagccgatccctgctctgtttcagaactcgatctccacctccgacttcgcttcaatctaatcttctttcccaatgccgatattaccaaatttgcctgtctcgtttgctttttttttcttcttttc

SEQ ID NO: 54833 - DNA, 213 bp, Oryza sativa
  Clone ID: PAT_MRT4530_5689C.1
agccttgagaagtttcgaaataccagcaaagattgtgttgcttgcctgaaccatggactccagagctcatggtgcatcggctgacagcctgcacattgaccctgaagaagcggaccaagataaagaccaaatctcaaagagtgattcatgggcaaagcgtctagtcacgtgaactcagctatgatgtctgctgggacaccattatcgcgatga

SEQ ID NO: 54834 - DNA, 2621 bp, Oryza sativa
  Clone ID: PAT_MRT4530_568C.1
tttttttttttttttggggtaatgagataatccattaatcaggaaacgataaaccgaggatatgtattgctcccaagtagaagcaactagtatgtagatcagcaatacagtatactccagggtgacagaaaacagaataacatcagggttcaggaagaaataaaagatacaggttactagaatatactagtataatcacaaaagacagcgagtgcacctacgactagcaagcatggtctgctccagatctgcacggcactgacagaaccatggacgatgggatgagagtctgtcgcctcccgatctcagacattgtcttcaggtttaggagaattggcacgagcactggaagcaccaatggctacctggtcagctcgagaatctgcttgcacattgtcagcactacgactggcaggatcggtaagagcttctgccaacctgggcgaggtaggatgggaagatgatgagactgacgaaggctcaggaaatggtggaatggaaatgttcaattgctcagacagatactttaggttagaagtgaagtattttttaactgcagcgaagtagtttagcaaaagcttcttatcttcatgaagagcctgtgccatctccttgcgttctttcagtaacttttgccgtattagcaacatctcctcaatatgtttatgctgatccacggcatctagatccaaccgattaattttgcaaggatgtgcaagatctatccagttgcctgttcttgttgtttccaacttataattaacactgggagtgtccatgtaaccattgtttgcagattctctattcatgaagatgacttgtgcatcaggtgaaactctcggatgttctgttataaaagcctgctcattactacaagtgacgccagaagaaggataaacagatagcactcgcagtactcttgctttgtttagaacaaactccataaagtgcatctcattacagaggcaagcaaccttcttcattcgcacaacacgaagtttcgcaaacatatcataggttggctgagcattcaagaactcatcattcgcatcaatatcctgagcatcattgctttgtcccttgaaacaagtaatggcataatgaatttgcaagtgatcatttaacattaccacaacatcaagttcttcaagaacaggagcacttctaagtagacagaacataaataaaatgtgggacattttacagaaattaacactaatgactaagctcctaagattctcaaacaagaacggtagctgctccagcacatcaacttcagttgacaacatatagtggcacatgaactctagcttggtcacatgagccatccccgtcaagaacttggcgtagttggggccgcacagaatcccttgctccagtcgtggaagctcctccactcggccaccataaggaaacgcagcaaccattataagcttccggagattgggcgcacgaatcacccactcctcgtcagggtagtcgccgacaagaaacacacttacaagctccacctcctccagcaatggcgacgcggaaatcaaggcagccaacatatttcccatgtgctccgggagggtaacttcatggaggcgtagcttcttcaggttcgggaatccctcaaaccccatgcgtgcgggcgggaggcggcagctgtcgaggtcgaggcaggcgagctcgcggcaggagaagaggcaggaatggagctggaagttgtaggtcgggaaccacagctccagggcctggacgccgttgcgggagaggtggaggagccagtcgtggagggcgtcgacgaaccaggaggggtcacgcgcgacgaggcggaaggcgcggacgggggcggcggcggagcgccggaggaggaccgcgtcgacgtcggacgccgcgacgccggggctgcgggtcaggtcgaggtggagagcgactcccagcggcgccgccacgcgcgggagagcgacgaggtgcggaccacctcgtagatgtggaggcggccgaggatgttgtcgaggacctctacggggagcgcacccagaccgtccggcggcggcggctccggctccgccgctgcgagccgccgctcccggttgggcggcgaggcggccattgctcgcttggaaaccttctctcttggcacaatcggcggcaggggcggcgattccgggtggtagttggagcggacggccggtgctccacccgagcgccttgtccacacccagcgccctctccaccgcctcgccgtccgcatcccgatgctgctcgtctcgcggcgccccttcccccgacgacatcgtcagcaccgacccggtgtctttcgccttggaccgcctcggcatccgcgtcccgacgctgctcgtctcgctgtggatcgagacgatgctgacacgagcgacgcctagggaggactgccccaccccgctgccgaagccgggacgcggaagcggactggacacgctgccgcccacctcctcgccgtcgccgtcgttccccacctccgccgctatcgaccaccgccgtctccacagccgccgctggccaaggtgaagagagaggccgggggagagagatatataagggagagagagagggagggaggaggaagaagggaaggagagggtggttgacat

SEQ ID NO: 54835 - DNA, 708 bp, Oryza sativa
  Clone ID: PAT_MRT4530_56900C.1
gcacgaggtaacacgccacggaacggaagcttccgcctccgattccaccaccaccaccaccgccgagcacgaggagggggaaggtttgggccgggcggcggcgggggttggagatcgaggagagtcgcgtcgcgtagctgatccgagccgcctcgtgcccaggaggcgcggtggaacggaagggccgcacgcctggtgcgacggatctactagcccggccgccttcctccttgccgccgcggcgatctgcggccagttcgcgacaggactagctggtgatacccaaacatccaaggatgataagaaagcccagtcgaaaggtcatactgggcggacagttttgatcgtcctcctaggaattggggcagtcgtcctgttgtcatttttccttttcaagtattggcagaagaagaaaagagaggaacagcatgcacgtcttctaaagctgtttgaagaggatgatgacattgaggttgagcttggtcttagagattgaaggtcttcattgtacagcaagagtatcttggctgacaaggttttcctggctggtcctcacagcattttcatgttattgtaaagaatttgttgtatttaaactcaacaggcctccttagaaagatctactgattcaatgtaaagtgtgagtggcaaccacgttgaatgaaaacatgggctttagctttgaggattgaaagtgacatcaatgtg

SEQ ID NO: 54836 - DNA, 164 bp, Oryza sativa
  Clone ID: PAT_MRT4530_56901C.1
ggtatgcgaacaaaactttcgaactctttttggtctccttgttttctatttcatttcattccgatagatagcaacaagcagtttaaacaccataaccaaagcgtactcaattcatggtaacatgacgctcgacggacaccttaacactggatggattgatagag

SEQ ID NO: 54837 - DNA, 269 bp, Oryza sativa
  Clone ID: PAT_MRT4530_56902C.1
ctttgggatgaacatctttgacttaatagcctggaggaaggcaaatgccacagcactttatcattattggcaagagcaaaatgctgatctattgctctggaggacagggacacttcctgcaggccttttgacgttctatggcctgatggaacccctagatcgcagatggcatgtcttggggctaggatatgatgttgacatagatgatcgtttgattgagagtgccgctgtcgtgcactaacaatgggaatatgaaaccatggctgaag

SEQ ID NO: 54838 - DNA, 501 bp, Oryza sativa
  Clone ID: PAT_MRT4530_56903C.1
ctggccacgcacaaggtgcataagagccaaagatgggagatgctagaatggacctggtgaagggaatctgtgatgctggaaataacccacagaaagtgcttgaacaagtgtggtgaaaggatggggagtgctggctctgtgatgggtgctgggtgactgaccatgggtgttagctgatgtgggtggaaagttgaataacaaaaaaaaggtggtgcttggttgatcgttgacgctctgcggccacgaatgctgcctgacccccgacatgaaactgctgatcttggatgtgtgcaccacagtgctgtgtggtgaccgtggtggttgaatggctgatgtgcgtggtgaaatgggtgttgggtaacaccatggtggctgactggctgatggattggagcacccctgacctgactgtgtgccaaaatgctgggtgcatggaactggtttggttgcgctaacacccacccttgcatggcagcttgccaaaaaaaaaaaaaaaaaaaa

SEQ ID NO: 54839 - DNA, 1443 bp, Oryza sativa
  Clone ID: PAT_MRT4530_56904C.1
atgtcggactacaacaacaacagtaacaagtcgacaagcacagccgtgaactacacggtgtggatcgactacgacggcatcgggcacaagatttctgcgtacatggccaacgacgggcaactgaaaccatcaaaggccatctttgccgggcacctcaccatgagcaaccgtgtccccaacaaggcgtacatcggtttctttgcctccggctccgatggcgagacatacggcttgttgagctggaacatcaccgtggacagagtcccggactcgggcatcgctgcgagcaagagcaaaaacaaaccattcgagaccggattcacgacagtgatcgtggtcttctcattcttctctgtttctctgattgtgatccttgtgtttcagagcaagaagaactccgatgcaaagcagcttttagatgaggtgctgagccaactcgccaggaagcttaagtactcggagataaggaacgcgactggtaacttcactgacgcgaggagactcggacgaggttcgttcggagtcgtctacatggggacgctcacaactcagagaaatgggcggacgcaagaacagcggcagcagcaagtagctgtgaagaagttcgatcgggacgaaaaccagcagcgtcgtttcaccgattttcttgtggagattcaagttataatccggttgaagcacaacaatatcgtgcaacttattggttggtgcttggagaaacgagcgcttttgctggtgtacgagtacaagcacaacggtagcctcgacaatcacctgttcggcaaccacagccgccagcagcaggtgctaccatggccgacacgctacagcatcgtcagggacgtcgccgcgggactccactacatccaccacgagctagaggacatcaagtccagcaacatcctgctcgaccaagaattccgtgcctgcctcggagacttcggccttgcccgcgtcatctccggtggcaggagctccgcttcaatggagctcgccggcaccaggggtttcatagcgccggagtacgcgcagaatcgggtggcgacgcggcggaccgacgtgtacgcgtttggagccctcgtccttgagatcgtcaccggtaggaaggcactcgatcactcccggcccagtgactcagtgctgatcgctaactgggtacgggatgaattccacaataacggcaagctgctggaagccgtggacggcagcctcaccacggaggaaggtctccagtacgatgccgacgacgcagaacggctacttctccttggcttatcgtgcaccagccacagcgcttcagaccggccaagcatggagatggtcgtgcagatcgttgccaagcccgtgccgcggccggtcgtcgttgtgcctcgtgtggagccggcgttcgtggggagctcatcggccgagatcgatgatgcctcaagcctaggtcgccgttga

SEQ ID NO: 54840 - DNA, 3504 bp, Oryza sativa
  Clone ID: PAT_MRT4530_56905C.1
atggcaaaagcaccgggccctgtgtacctcctcttcctgctgctcgcgctgccttgctgcctcatcccgcaccgcggcgcggcccagcccgcggcgaacgaggcgcggctgctcctccagatcaagcgcgcgtggggcgacccggccgtgctcgcgggatggaacgacacggccgcgcccgcggctcactgctcctggccctacgtcacatgcgacaccgccgggcgcgtcacgaacctctccctcgccaacaccaacgtgtccggccccgtgtcggacgccgtcggcggcctctccagcctcgtgcacctcgacctctacaacaacaacatcaacggtacgttcccgacgagcgtgtaccgctgcgtttctctccggtacctcaacctgtctcagaactacctcggcggggagctccccgccgacatcggcgtcggcctcggggagaacctgacaactctagtcctcagcggcaactacttcactggcaccatccccaagtcgttgtcccgattgcagaagctggagtggctgatgctggacaacaacaacctcaccggcacaatcccgggagagctcggcgacctgacgagccttacgacgctgacgatctcgacgaacaagctcggaccgggtcagctgccggagtcgttcaagaacctgactaagctgacaaccctctgggcgagaaagtgtcagctcgtcggcgacatgccagcctatgtggccgacatgccggacttggtgacgctcgacctggcggtcaacaacttgacaggaagcattcctccggggatctggagcctgaagaagctgcagtgcctgtttctatttgcgaacaagctcaccggcgacatcgtcgtcgccgatggtgctttcgccgcagtgaatttggttttcatcgacctgtccgcgaatcccaagctgggtggaccgattcctcaagactttggtctcttgcagaagcttgaagtcatccacctgtactttaacaacttctccggtgagataccggcgagcatcggtcggttgccggcattgaaggaaatacacctattcaataatagtctcaccggcgttctaccaccggagcttgggcagaagtcaccggatttgtgggatcttgaggttgatttcaacaagttcaccggcccgattcctgaggggctgtgtgacggcggcaagctcaacatattcaccgcagcgaacaacctcttgaacggctccatcccggagaggctcgccggctgcaccacgctccagaccctgtttctccccaacaacaagctgtccggcgatgtgccagaggcgctatggacggcgacaaagctccaattcgtgcagctgcagaataatggcctcaccgggactctgccttccaccatgtacagcaacctttcgagcttaaccgtggagaacaaccaatttcgtggtagcatccccgcggcggcggctgctcttcagaagttcatcgccgggaacaacaatttttccggggagatcccggagagtctcggcaacggcatgccggtgctgcagacactaaacctgtctggtaaccagctctccggcgggatcccgaagagcgtttccaagcttaaagtcttgactcagcttgatttgagcaagaaccagctctccggcgagataccggccgagctgggcgccatgccggtgctcaacgcacttgacctgtcgtcgaacaggctctccggcggcataccgtcgtctcttgccagtctgaatctcaactcgctcaacctctcgtccaaccagctcagcggccaggtgccggccaagttcgccataggtgcctacgcccgcagcttccttgacaaccccaccctctgtacctcaggcctgggctccagctacctcgccggcgtgcggtcctgcaacgccggatcgccaggcagcgcttcctccggtggcgtctcgccagggctccgcgccggtctcctcgtagccggggccgcgctcctcctcgtcatcgtggcgttggccttcttcgccgtccgcgacatcaggagaagaaggaagcgcgtggcgcagcgcgaggactggaagatcacgcctttccagaccgatctgggcttcagcgaggcggccatactccggggtctaacggaggagaacctcgtcggccgcggcggctcggggagcgtgtaccgcgtcgcctacaccaaccggtacaccggcggcgacggcgccgtggccgtgaagaagatacggacgggcgccgcgaaggtggaggagaagctggagcgcgagttcgagtcggaggcgcgcatcctcggcaacgtccggcacaacaacatcgtcaggctgctctgctgcgtctccggcgacgaggccaagctcctggtgtacgactacatggacaacggcagcctggacgggtggctccacgggcgccgcgccatcaacgacgggcgccccgtggtggccgctgtggcgagggcgcggtccgcgcggggcggcgcgcccgctttggactggccgacgaggctcagggtggccgtcggcgccgcgcaggggctgtactacatgcaccacgagtgcaccccgcccatcgtccaccgcgacgtcaagacgagcaacatcctgctcgactccgagttccgggctaaggtcgccgactttgggctggccaggatgctggcgcaggccggcacgcccgacaccgtgtccgccgttgcaggctcgttcggctacatggctcccgagtgtggttacacgagaaaggttgatgagaaggtggacgtgtacagctttggggtggtgctcctggagcttaccacgggcaaggcggccaacgacggcggcgagcacggttccctggcggactgggcgcggcaccactatcaatcgggagagagcatccccgacgctacggatcagtgcatcaggtacgcgggttactccgacgagatcgaggtggtgttcaggctaggcgtgatgtgcacgggggccacgcccgcgtcacggccaaccatgaaggacgtgctgcagatcctggtcaaatgctccgagcagacgcaccagaaatgcaaggcggagagcgggcaggaggagtacgaagtggcgccgctgttgctgccgcaacgaggcagccgccggaaacagcccgcgaaggccaaaggagcagacgacgacgctgacgagaggagcgatttcgattccattgtctgaagaaaggagcagagcactgccgcacctttacctactaggaaacactgatgtgagcagggaatggttagtctatgagccagcactgcactgcatgaatataaacgccatattagacagtactagaaaagatgatcatactctattaccttaccttgatggtacacttcttagtactattttgttagctgctcgcggctgatcagatcatttgagctttgataccagtgtgtaagagtacatacatagttcaaactgacatacgaaaagtgaaattatgtcaaaaaaaaaaaaaaaaaaaaaaaaaaaaaaaaa

SEQ ID NO: 54841 - DNA, 1485 bp, Oryza sativa
  Clone ID: PAT_MRT4530_56906C.1
atgaagttctgttcaaaggaccgcagcggagtggagcagccgcgacacgaagttccttaccttagctggatctcgctggtgccacctaaacggctcgtcaccccgggaactcgcagcccatcacaactactcatactaggagcaatggccactaggaggactgaaacgaagacttctatacaacaggagcaggttactatttttggagcaacctctctagcagaaactaacaatcttattcagaaggaaaagacccggcataaactatcaataaaaggtaggggtgcgcaattaggaaaaaacaaaaatagaaagggttgggccataagatcctctgcgaggaaagacgctaatgtccggaaggaaaatgcagatgacaccaacaagctcttggagtttttcagcgagtgcatgttgcaaaacccaaaattttactgggatgctcagctcgacgaagatggggttctgaaaaacttgttttggagtcacgcaagtagccaagctgagtttgctgattttggtgatgcggcaactttcgacacaacttacaaaaccaataaatatgaaatgccacttgcaatgtttgtggatcaagatcctgctatggcgatcatggttgggaggatgttggatgtcatcattgacaggaaggagaaggaggcggctgagacaagtgcgagctcgttggtagcagatgtcgacgcggggttttttacatgcgagtgtaaacaatgggagcatacagggatgttttgcacacatttgcaccttgcattcgttcacgtgcaactagagaagattcccgttgcatatatcctaaagaggtatacaaagaaagccaagagtgacatgcccttcgacaggcgggatcgtgactccactagtccagatggggtggaagaaaactacagatcaaacatgatgataattgaagcttttggagtggtgaaagcagcatgcaaatcaaaggtggcgtacgacatagcaatggctgttttgaaaggattgcgtagtcagtcgaggacataccaggtgacactccagtcgccgaagtctcataccaaaggaagcatgggagtaccagacgaggaagtaacacttggagccaagggaaagaagctatgcacaagggaatgcggttggtgccatctcagggatggtcactacgcgaatacatgcccgaaaaatccggtgaattttgacaagattaggaaggttgcaaatagggagaggggaaagagaggcaggccacgaggatcaggaagggggagagggtgtggtgtgactacgtgcggcgcagcaaggggtaatggagcaagaataacaaggaggaatggtggcagtgaccacacactgcgaagatgcctggaagacgagtgggagtcgatgggcaacgacgccaggaacgatgagctcgacaaaacagatggtgatgatgtcgatcccgatgaaacatttggttgggaaaaaaatgagttgtattga

SEQ ID NO: 54842 - DNA, 401 bp, Oryza sativa
  Clone ID: PAT_MRT4530_56907C.1
ggcgaattcgagctcggtacccgcattgcttaaggctctacatcctcattggtctcatgctgctctcaaatcagcaattgtcaccacaggacgaatatgacacgccgatattagcagaagcgcttcctcggaaagttgctgaccctttcgattatggaggagggaacataaatcctattggagctgctgatcctggcctaatttatgacatcgatccaaaggattacaacaaattcttcgcttacctaaggcatccaataaacgtacgacgagcagtcactaatgtcggggaggtggatgcgggaggctacacattcggcagcctaacttggtacaatgagcaccacactgcaagaatcccaattgctgtccggatcacaattcaagacttctacgctgat

SEQ ID NO: 54843 - DNA, 170 bp, Oryza sativa
  Clone ID: PAT_MRT4530_56908C.1
tgacggaagggatccgcccctcccgatggcggcattgccggatccaccgccctcgagctccgctatcagtgcccgccatcgtcatcacccctcccagggctgaaggtgctggatctgcctcgccatcatcgcccccactcccggccgctctcgcgctgctcccgtcctag

SEQ ID NO: 54844 - DNA, 443 bp, Oryza sativa
  Clone ID: PAT_MRT4530_56909C.1
tagttggcgcccttcctttttttttgttggtttttttttttctgattgttttttttttttttttgggaaacgaataaaattttttttggtaaaacatgatattattgttcattttttaaggggacaccacaccgacttggacatcatgtcggagcacttaacccattttccccaacccaaagacaaacagacttgctgggcacaaatccattcaaccacagataacccctggttagctacgggcccccacttcaattgtgggggacgaagttgggggggaccgcccaggctgtgttgttgccaggggctgctagggggccgccggagtcgccgagggggccctcgccacggatgacagcgtggacgaaaaagccggccacggggaacagggggaggggggcgttctcaaactgccttaccttgagctccccgaacgccccggg

SEQ ID NO: 54845 - DNA, 245 bp, Oryza sativa
  Clone ID: PAT_MRT4530_5690C.1
ccgaaaaggttatcatttcccaacagcaacagaactacgcaggagggagcgacacaaaccgatacaaggcacgaaaaaccagactaggagaagcctccgagaccccatgagctaaagcgaacgacgaaagcagaccaaaagtcgtggaagcaaacacaccagcaaaagataggaatccagacaccacaggacgcagactataacaagccaccaaaagcaccacgcaccccccacaagagaccacc

SEQ ID NO: 54846 - DNA, 323 bp, Oryza sativa
  Clone ID: PAT_MRT4530_56910C.1
tgttttctgtagctattggacctcaagaggtggggatactttgggggtttcgggtgtcgctccctttattagacaggctgttatatctcaagtttaggcgctgaaaatgtcaggtcttagtttaggtgctgctagacacctagtgttcagagaaaccagcttgaaaggaaaagctgaaaaaaaaataagttggcttcaatgcacccctggatgtcactgtggctaagttaccatgtccaaatgtgtggtgccgtttaaagcacacctgtttttattactcttttgttagtgagggaatgctgcctgattgactatgcacacgt

SEQ ID NO: 54847 - DNA, 450 bp, Oryza sativa
  unsure (1)..(450): unsure at all n locations
  Clone ID: PAT_MRT4530_56911C.1
tcggcaactccttcgcgtcggtatcatcacgatgatctactcgttgatggtggtccattaccatgcttctnctacgccgctcacatggagaagagccggagcaacgagcgacgtaggtaactagcccggcagggccggttgatcgatacatacaggttagcttactataattcatcgatatcgagatctcgattattgcacggggttgaccctgaccgtgctaactcagcggcgagcatgagaggatctgacccgatctgtccccgagctgtggatatggatggatcgatagatatttacactctctcatgtgatgttttcgcagctggacggaatgcaggcggagctggacctgatgaacgatgacatccaccggctgctgtggatgctgacccatgtgaccaccagctaccacgcgctggagatgcatgctcgcgacgctcatgcaga

SEQ ID NO: 54848 - DNA, 502 bp, Oryza sativa
  Clone ID: PAT_MRT4530_56912C.1
gttgggggggggtttttttttttttttttttttttttttttttttttttttttttttttttttttttttttttttttttttttttatttttccccccgggcgaagaacatgggttattttttttttttttaaaaaaaaagctttttttttgggttgccgggggggcattataatcctattcatttttcgtcctagttttacaaacacacatacctttacggcctggttttttttgccggaaaggaaaggaaaggaaaccgtttttgcccccctgtgcctattcttgaaggcggggcagggccccattacccttgggggcccaccaccttttgcttttttttattccccaccccgcccgctttggaaaaaaatccacgggctcccacttttggaattttctgcaacgggtcttattttttttcttctccggacaaacccggggagccttgtctaaaaaataacgggctgggagataacaacctttcccgccttaaacggggtg

SEQ ID NO: 54849 - DNA, 634 bp, Oryza sativa
  unsure (1)..(634): unsure at all n locations
  Clone ID: PAT_MRT4530_56913C.1
cccacgcgtccggngcctaacaagttgctcagaaccggttcgtgtcgtcgtgaaaaggaagatttttatccttaacccaaataccaaatacatagaaaaccaatgcatctataatgttgtctttgcttttagttgatgtgacacctacatgattcctttaactagtattcatcctacgtgacgcttatgtaatagtttgataaaaagataaaaaccgtagagcccacatgttagctacatcagcaaaataataaaaaaatggtgggcccattgtgggacccacatttcaaccagcttcccacccttcttcaccatctccgccatgccctccaggtgccactccacgcactagctcagccacctcctccgccatcgccaacatgcgcaccagctagcccagcgatgtcaccaacggcttccccttgagccgcgcgtcgacatggcgcaacaactcgcccgcggtgctgtagagctctgggtcgacttttcatttttagtagaaagatatttatgaaaagttgtatactttaatttgtgcatgttacatatgcatagccatacccctattgtaaaatttgatgtacactgctattttgatcggttatttttttagaagtatttgatttacaatact

SEQ ID NO: 54850 - DNA, 499 bp, Oryza sativa
  unsure (1)..(499): unsure at all n locations
  Clone ID: PAT_MRT4530_56914C.1
acagctggacgtaagacgatcacggtgtggtacgaggngatgtccttctcgaagcccagcacacatcctgctccagcctttgntacccgtacgtcgcagctgaggcagatagtcatgtatcagacgcaatcagctccagggcaggcagcatgcctcaggcatcgatgtgtccacaccgctgccagggacaacaacggatgatcgacttcgctctcctgtcagactcttgatcgttttgcattcaggagtaatcttcgcatgtgtgctgagtgagcctgcttgatatgttccctggtatcgtactggtccgaatcgtgctcctggagagacattagttagatcttagtagtctgaaatttttgagctcacgggtaattatttagcattgtgtgctttgttgataagtgtctagatccaattgaggngttatggtgatgttaattcagatttccactggtttgttactaaatcnataggaagcatgaaagataaaaaaaaa

SEQ ID NO: 54851 - DNA, 1749 bp, Oryza sativa
  Clone ID: PAT_MRT4530_56915C.1
gcacgtcactccactcctccactcatacaccaccacactgcacacacacccaacaaagatgaagcttaccatgaagctttccatcgccctggcctgcttcctcttcttcctcgcggcggcgaccaccgcctccgcgcagtgcacgttcgagatcctcgtcaagaccgacggccggaggaacgccggcaccgacgcccgcgtctcgctgcaggtgcgcgccgccagcgggccgacgctgacgatcaccaacctggagtcgtggggccagatggccgccggccacgactacttcgagaaggggaacctcgaccggttcaggggcgccggcgcctgcatgccgtcggagccctgcaacatggtgctcacctccgacgggtccggcaacaagcccgggtggtacgtgagctacgtgatggtgacgcagctcgggcaggggagcctcccgtcgatgacgcaccggtgggcggtggatcagtggctggccattgacgaggcaccgcacatgctcaccgccgagcggaggggctgcggcattggcgcagcggcgccatgatcatcgaggtagctgcctatagctccatcgaccagtgttgtctctgcgtgcatcagcatgctagtaacttaaattaataataagttccaggtctaagccctgtactatgtgtggggcacagtgtctgctttgccaatgtaacgtgatcataataagtcaattcaattcagagagtgaattgcagtttgaaaaaaaaaacaaaaaaaaaaaaaaaacaaaaaaaaaaaaaaactttcattaacaaaggagttgaaagttttgatgttgataattgcctcgaagaaatgttacgtgagcagaggactctagttacaaaggaaaagattatgagagatttacccggttggttacagatcaggagacttctctgtacatattgtaaaccgaagtacacaagattatcagctgtgctggaacttatgaagctcaagacaagtaatggatggacagatacaagttttactaagctacttgacatgctaagtgacatgcttccagaggggaacatgctagcaaagtcaacttatgaagcaaagaagccaacacttggtaacctttcaggtcaaagtaacagaggagcagatgcatgctcggagtgcttggaagacactcacagtttatggttgaaaagttcacgcaagacggtatatatgggccactgtcgttttcttcctcagtaccatccttataggaatatgatggaggcatttaacggtcaaagagaaataggcgtcaaacctagacatttcactggaaggcagttaattaaaaccccttctgattactcatcgtgtggccataattgggtgttgatggatgatttgaaattgaaaggattggagcccgtggtaaaagatggcccatatgcagtcgacatgctcgagcaggcaacaccatgcattcttaaagttgaagtgattccatcatttgctgtggaggcagccaagtggaaggcataccctccgctgaatacagaaacaattcaccatgctcaagtacgtgatgggtatgcgagagtgtcggtggaccgggaagcaagaggatcctttgtccagtggcccaaaaagcatatcatcattgagatagttcctcatccatcagataaggcacctaaagtacctgctctaccaagttgtcctccaattgccgctcgggatgacttgtcatgggatttgggcattgacttggacaaataa

SEQ ID NO: 54852 - DNA, 132 bp, Oryza sativa
  Clone ID: PAT_MRT4530_56916C.1
ggacacgccgaggcgctcctggaggtggtccacgaggcccctggcctcctccagggtgagccccgcgatggcgtccccgaggtacgggtccatgaagtcggcgaacaggaagtccagcttcacctccttgcc

SEQ ID NO: 54853 - DNA, 172 bp, Oryza sativa
  Clone ID: PAT_MRT4530_56917C.1
agacagtttagcttgctcggagctgagagagatccttcggtctcgatttaatttacggagaccattacataagcaatggaagctctactctccggcgctgatgaatctgcaagagccaatggccgttgcggaactattagggatgctgatgattatcttgtaagtcctcaga

SEQ ID NO: 54854 - DNA, 552 bp, Oryza sativa
  unsure (1)..(552): unsure at all n locations
  Clone ID: PAT_MRT4530_56918C.1
ggctcaggaggtacttaatccttaagcaaatacaatcaatcatnaacatagcaggaccccctatncgcaaaacaacaacaaaaagctgccaaaatgggtgcagtaatgtcaagcatcggcaactgccttcgtggcattgtcaacgccatcggctccatgatccaagccatcatttcgggcatcgtcagcatcttcaacgtcctcatcaactgcatcacctgtggttacgcaaggcgcagcggtggcggtcgtcgccgaaccaggacccataggacaactcgcgtataataggacccatctgccgccgaaggagtagaggcaggtgggtgattcttccaacccaaggagttggagcatagggagttggctgcgatgtgtgttggcgttggacttttgtaatactacgactacgattaccccccttttgttttctttattcgctgcatttactcgccaacacgtctcaacccagcatgcaagcacgacattacgatttgcaagaaggtagttgaacagatacccatttcgtctttgaaaaaaaaaaaaaaaaaa

SEQ ID NO: 54855 - DNA, 200 bp, Oryza sativa
  Clone ID: PAT_MRT4530_56919C.1
caaaatagcactgcatgggtacacattcattcactgtgttgaaaggctagcagctgcctcgctatctgttggcatgggaggaggccaacggcctgctggtaaccaggaatttcctcgtgtgcactatcgtgttgccaggacgattgatgcttctactttgacaacactacgagatttggcacccacaaagcttgctgctg

SEQ ID NO: 54856 - DNA, 851 bp, Oryza sativa
  Clone ID: PAT_MRT4530_5691C.1
atgcaatgaaccctttgaactgtccattcccccgggctccacgaggcgccgcgtgggcttgccgcatggcccaagtgcgcccttctcgtggcgcgggtgtgctggcccgcgggacttagggcgaggtcccgctggcatatttctgtcttgcattaagcccatatcttgttgctggagtgctggcccattagaattagatggaataccctcaggtatagatcggcgtaattgcacaggccacttcttgacttcatgaccaccaaatgagtaaattgctttttgccattcctggatttcaagttcaaggaaacctccaatacgggttattattacatctctcggtcttgtattgctagactcaggtgcagatgacattatttggcaaccgtgctgcagaatttggatgaaaaggctttggagaactttcgtgtcttggcgactactaataccaccaaaaggaaatattaaactgtccaacaactctcccttagaatctgtccagatacatactaaccatcgccagtcctcagtccagccataacagcaatgaagacttgcagcattgtcgttatcagatccttccagtaaagcacttgcacttgcccccctgccggagcccccccccccggcctcgagctgtaaattccactgccactagcatcaacaccagattttgaagattccattccactactgtaatcgacagatccaggctctgctagtatgaaaagtggctcaaaggcatacttcctgtcatcttgaacacacacatctgggatctctacttgggtccatgaatcctccagcacgaccaggccatgagttgtcccatgttactgtgaccctcgtgc

SEQ ID NO: 54857 - DNA, 377 bp, Oryza sativa
  Clone ID: PAT_MRT4530_56920C.1
gggctgcaggaattcggcacgagggttaaggcatgcaccggccagagtcaagacaaaagtgtaaagttaaaataaagcaatgagatgaaacagccttaggtttgggaagggggccccagggtttgtgctcatccccatgactcgttctgtagcactcatgggagctcatcaagttcaataaatgtatcacttgatttatcttttctgactttttttccctctcatttgtgcaggtgaacagaaaaaaacactgtccatcatgagttgcagagaaatacacagatcaatggccttacatacatacatgcacacatgatctttgcttctaacctattgcaagttaataacatggaagtgtgtatgtatgtggtgatgag

SEQ ID NO: 54858 - DNA, 855 bp, Oryza sativa
  Clone ID: PAT_MRT4530_56921C.1
atgactcatcaaatactcgtcctcatccaagacgagctgggatgcttgggcttggccggcgggaataattttgaagggcaaatctctccagacatatgtaaccttcaattcttgaggataattgacttctcacacaacaaactgtcgggctcagtactagcatgtatcggcagcatcctctttaataacgttgaagatggagatgatcgaattttcttgaaccgttttagactagcagatatcgagatgcatgattctgacttgtcgactacttactatgacctaggcttcgctttctctactaaatggtatcagtatgcatacggtttcaatttcgtcaccatgatgtctggcattgacctatctgcaaacatgctggacggagagattccatggcagctaggaaatctgagccatatcaagtccctcaatctatcctacaatttcttcactggccaaatcccagctacatttgccaacatgaaggagattgaaagcctagacctatcccacaacaacctgagtggaccgataccatggcagttaactcagttatcaacattgggagcgttctctgtggcttacaacaacttatcgggatgcataccgaactatggtcagctggcctcgttcagcatggaacgttatgtaggcaacaacaacctttacaatacatcacagggaagcaggtgctctcctagtggtcatgtgtcaaaggaagaagatgtggaggagaggtacgacgatccagtcctctacattgtcagtgctgcctcgttcgtgttggcgttctgtgccaccgttgcattctcattttgccattcatacgggcgatctgtaatactcaaaatgtag

SEQ ID NO: 54859 - DNA, 478 bp, Oryza sativa
  Clone ID: PAT_MRT4530_56922C.1
gcacgaggctcccgcacggcgcaccccgcgcttgacgcgcgcgccacgccacgccacgccggggcaccgcagcagcagcgcgaataacgaaaccccaccggcgccgtacgtacgtcaaacaccaaccatccatccccgtctcctcctccatataatcgcaagccgccgacgccgccaccaacgcgagatcgagttagcccggctcctcgtctgccttcccgtgtcgcctcgccgcgcgccgccgcgcgccccgtgtgtacgtacgttacgtactgagcttcctcgtgccgtgcaatactactatgacggttcgctcggagacgggcggtgcggccaccaccaccaccgtcgtcgccgccgccgtcgacgcgccgcccccgtggcggctgcggaggcagcgctccgtccctggacgccgtcgtcgccaccttcgccccctgcgtcggcatcggcgtcggcggtcaccacgcgccaagaa

SEQ ID NO: 54860 - DNA, 2854 bp, Oryza sativa
  Clone ID: PAT_MRT4530_56923C.1
taatggagaggctagtctgtcatgcatgtgccaccgggaaattgatcacaagaccatccgtatggaaaatgaaggatgaaatccctgcattcttagcacgaatacagtgggcatatgtggccctatacagcacctataaaggccgtttagatacttcatggtgctcattgatgcttcctcaaaatggtcgcacgtgtgcttgctatcaaaacgaaaccatgactttgcaaaattgatctagcagatcatccaaattaagaataattttcttgatcatcatgtgcagtccattcaaatggacaatgctgcgaatttatttcaaaagcatttcatgaatatttcatggcaatgggaatcaaagcagagcactcgatatgtcacgtccatacgcaaaatggacttgcagaagcgttgattaaaagaattaaattcatcaccaagccactcttgcaaggttgtaaattgccaagcacgtgttggggacatgcagccctacacgtggtaattcttattaatttcagattcatcgccctacaccatccattcaaaaatgaaactggtgcaaggggtcacaccgaaattgtcccatctgttcaaatttggatgcctagtctatatacctatcctaccacctcaacgaacaagcaatggggtccactcggaaagattgggatatacgttggttatgagactgcatatataactaagtatttggaacccatgacgggcgacacgcatacagtccatttagctgactgcatcttcgatgaggatcatttcccctttttatggggaggaaatcaacccttggatgagaaaatttggaaatcacatggccagacatggggatccatgcgcatgatccacgcaccaatgaagcaaatggagaggtactaaaaataattgatttgcaaagtttagtgaatcaactgcctaaccatttttgtaatttgaatagcgtaaccaagtcgcatgtgcatgcacgcaatgcaccggagagattgaaataccaaaggaaattggtaaccctcatccagtctggaggcctcagaacaaaaggacaagaactccagtctctcgatcctcaagtatcaagaaacccaccgagagagttgtcagtgacaatgtgtgtgcacacatagaacctagcaaactaaaggaactttcccctgtaacagagaacaacaggaagcaagtggaagcttcagaagaagtagctcatgaagaaatggccataaacacatcgggagaatcatttgatagagcaacagcaaatgtagatatctactttgctaagaaaatagcctctgtcgtgaatctcgactgcgagcccatatcactcacagaatgcaagaaaaggttcatatacgggcataaatggttatttgttcgaaagaaaaaatcagaataacgagttagtgagatataaagcaatgctagtagctcaaggtttcacccaacggccaacagttgattacaaagaaacctattctccggtcatgagcagaattacctttagatgcgtaatctctatggtagtaaatttgaatttggaaatgaaatttatggatgttgtaattacctatctctatggaacttggacacggacattcacatgaaggtattaggagatttccatgtcccaaaccaagacagagcaagcaggaatctgtatagtgtgcaactcaagaagtcactatacatattaaaacagtcaggaagattgtggtataatcggcttagctatttcttaagcaaaaagggctacaacaacaatgaagattgcccttatgtctttatacggagatcctaggatggaatttgcataatatttgtatatgtcgatgatctaaacatcattgggacactcaaggatattgaagaagcaagctcatatctgaaatctgaatttgaaatgaaatacttgggcaaaactaagtattgcttaagcttgtaacttgagcatacccccgaaggggtcttagtgcatcagtcaatctacacacagaaagtgttagaatgatttggctttgaaaagacatatccttctaaaacccctatggtcggaaggtcactccaagtagaccaagatccgtatagaccaagagaagaagggaaggaagtccttggattagaatatccgtacttgagtgcaataggagtgctcatgtaccttgcaaattgcacaagaccggatatagcatttgtcgtcaacttacatgcaaggtacaacacagagcccaccaagaggcattggaagggcatcaaggacatcctccattatcttcaagaaagtaaggacatgaaattgttctacagaaagaaccaggacctcaccttggtaggatatgcagatgctgggtacctatcgaacccacacacagccaagttgcaaactagttatgttttcctatatggaggaacaaaaatttcctagaaatcgtcaaagcaaaatctagtagcaacttcgatgaaccacttgaaaatcatcgcactatacgaaacctctcatgaatatgcatggtttcgtcgaatgattcaccacatttagcaatcatgtgaattgaacaccatccagactcctataattatctatgaagataatgcagcatgtgtcgcacaaggacaaatgggttacgtgaaaagcaatctcaccaagcatatataccccaagttttttttatgctcatgaactgcataagacgaacgaaattaaagtattgcatacaagtcatgtgaaaatatcgtagatttattcactaagtcattaccaacatccccttttgaaaggtgcatctgagggatcgggatgttgaaacttagagaaatgtaaaattcaggaggagaatttcac

SEQ ID NO: 54861 - DNA, 3966 bp, Oryza sativa
  Clone ID: PAT_MRT4530_56924C.1
atggcggtgatcgagtacgtggtggcggagctgagggacgaggcggcgggggccggggcgcacgtggcggcgctggcggcgctctgcgacgtgctggcggtcgccgccgaccacctcttcgacgccctccccatcgccgagttcgtcgcccgcctcccgcgcctcctcgcctccggcgagggagacgtgccgctcttcgccgcgcgtgccatcgccgaggtatgcgagggcgtccggccctgggcgaccagcttcgccaggtacggcgccatcgaggcgctccgtgacaagctcctcgccatcgactgcatcgagctcgccgaagagtgccttcgcgctctgggcgtcatatccatggagtgccccaaggagtgcctcagccacggcgtgccagccgccgtgctgcagttcttcgacttcttctcgatgcacaagcagaagctggtgctcaagatcgtcgccaacgtcttgggcgacttcagcgcgaaggatgcggccaaggccatggaggccgcgcccgttctgtgcaacctcctgcaatccactgacaagacgatactcgactccgccgtttcttgcttggttttggtctctgatggtgcttgcgacagtgcccaacacatggaaaagctttacgagcttaatgcagtccaagcgacgatgaggttgatggagaacgacgggtggaagagcctcagcgatgagactttatctggcatccttggtcttctcaaagacctagcttctctctcagcaagggctgtaaagtctctttttgagttaaacatttgtgatttgctcaagcagatgataacatactacacctcgtcgcacagtgatcacaataaggtgcagacgcttgtagagctcatttattatcttatgccacctcttgaaatgtgtgaccatcgtaccgaactaatcattgcaaagaagaatgtcatcacagaacaaagtggatacatccaacagcttgctagcatccttacttttataatacaggttgcgaaatctgctgcactatcatcaatttgctacagttgtgttgttgtcatcagaaacattgttgaattaagcacaccttcttccttggtggaggtacagaagacagtaaacctgtcaagcttacttgctggctggttggcccggaagaaccgccatatcatattccaaacgctcaacgtttcgaagacccttctgagaaaagaccagaaattcttctttgagaccttcatcagggagggtctaaagcatgcaattgatgcaatactaacacaggaaaaaggaaagagccgcttgccagaaagttgcctttgttttgatttagacttggagacctcgacagatgatgcatgcaggattaataatggtgctatcctgaaactagcggaggagataaagaaaaacttcttggtaaaggttgccaagtctcctcacaagtttgggtgtgcttttaaaagcataaaggaatttttttctcgtttgaattgtcatgccacggcacccccagctaaagatcaggatctctgcaagcagttgtctgatttttcaaggcaattattatcggatgaactgccaagtacttctacttttgagtttgtgcagagtggatctatcaaacatttggcaggttatctttccaatgggacatactttaattcaaatctcaggaattgccaggacttgataggggagcttaaggaggtgaaaatccggctgcagaagttcacgcacttggctctcagcgtggacaatgaaagctcggtgaagccacttgagattttggtggagaaactgatagatgcgttgcatgtgtggtatgacagtttccctgtaatcctggctgatgaacagtgcacacgtgagagcaccatgattcctctgagggattcaggaactgaggaaccaatgtcactatatataaaattttcgagatcagccagggaggaggagttggaggattatggtggagttctccctgttgatctttcttcgacacctgaatccattgaagaggtcctgttgcctgagatctgtaaaagaactggcaatgaaacttcatacaaggaaaacactcaagaagcaaatgggagcagaaaatctgttgggctcagaaatggtgacgggcacaagttctcaagattgaaattctcttacaaaggaacacaactccagtcatctacaccactttttgagtcaatcctccgctcaatgcatgaaggagaaaccgatctccagattgacccatctttttgggataaagaacacaagatagtatacagaagaagaaacaaaagcaagaaaatatcttcccatagttcctacaatattcagttgtgccgtgtgcatgaaaaacttgaaatgtcattgcttaaggacccctttttctccaccatactcactggcaagcttcctggtgatctggatgaatctgatccatcatataacttcctgttcatgctgaaagtcctcgaagggctcaaccgtttttcatatcatctatcaatggatgataagttatgcaaatttgctgaaggctgcctccaagagtttgatgaccttaaggtggcaatttgtccaattccacgggatcagttcgtgagcagtctactgacaaataagttagagcagcaaatgcaagatagcttgtttggggatggcttgataccctcgtggtgtatctatttggttgaaacttgcccgttcttgttgtcattcgaagctcgatggaagtatttctgcctgacggcacatcactcattcatgacagatgaggctagcagttcaacagaaactaagaagtacagcgtaacacggagcaaaatccttgaagatgcttcatcgatgttgaacaaacatggatcagacaccaaattcattgaggtggaatttgatggagaggttgggaccggtcgaggcccaaccttcgaattctataccacagttagtcatgaactacagagagtgggtcttggaatgtggagaggagacgacaccagccaagaatgcgaagctggttttgtccatgccccttttggtctctttccacagccatggtcctcagcaaacacttcatctcaagggatcagtttgtccaatgtggtacaaaaattcaagcttcttgggcatcttgtagcaagagcagttttggatggaagggttctggatattcctctctcgaaagcattttacaagatcatgcttgagcaggaccttgatatttatgacattccatcatttgatcccaagttgggcaagactgttatggagtttcaagcacttgttaaaaggaagaagttcctggaggaaagggcatccaatccagcagctgatttgtcctataaaaacgtgcgattggaggatttatgtcttgactttacccttcctggaaatccggaatatgaacttgtccctggaggttcagagaagatggtgacacttgacaatttggaggagtatgtgtcttcaattgttgatgcaaccttgaaaagtgggatatccaatcaaatagaagctttcaaggctggaattaacaaggtttttgctcttaagactcttcggttgttcagtgaggatgagatggagcgtatactatgtggcgaacaagattcttgggcttcgaacaaacttgaggatcacatcaattttgattatggatatgatgcgaacagtgcatcagtaattagtttcctggagatcttgcgggagtttggaagagaggaccagcgggcgttcttgcattttacgactggagctcctcagctcccacttggtggcctagcttcgctcgatcctaagctcaccgtagtgcgaaagcaatgtgatggcaaagtagacaacgaattaccgagtgtcaatacttgccggcatttcttcaagcttccaccgtactcctctaaggagattatgagacagaagctcaaatatgctatcaaggagggtttaggctccttccaattatcatga

SEQ ID NO: 54862 - DNA, 360 bp, Oryza sativa
  Clone ID: PAT_MRT4530_56925C.1
atggtcggaaggtcactccaagtagaccaagatccgtatagaccaagagaagaagggaaggaagtcattggattagaatatccgtacttgagtgcaataggagtgctcatgtaccttgcaaattgcacaagaccggatatagcatttgtcgtcaacttacatgcaaggtacaacacagagcccaccaagaggcattggaagggcatcaaggacatcctccattatcttcaagaaagtaaggacatgaaattgttctacagaaagaaccaggacctcaccttggatcaaggctgtgaatgtagaagaaaagaaaatattagcaaaccaacattagcagtctgtggtcatgccaaaaatgaa

SEQ ID NO: 54863 - DNA, 399 bp, Oryza sativa
  Clone ID: PAT_MRT4530_56926C.1
caaactaaaggaactttcccctgtaacagagaacaacaggaagcaagtggaagcttcagaagaagtagctcatgaagaaatggccataaacacatcgggagaatcatttgatagagcaacagcaaatgtagatatctactttgctaagaaaatagcctctgtcgtgaatctcgactgcgagcccatatcactcacagaatgcaagaaaaggtcggattgggacgaatggaagaaagcaatcacaatcgagttaatttctctaaacaaaagagaggtatttgaccctgtaagccgtatccctcctcatatacgggcataaatggttatttgttcgaaagaaaaaatcagaataacgagttagtgagatataaagaaaaccttaaaaaagggatttatgac

SEQ ID NO: 54864 - DNA, 851 bp, Oryza sativa
  Clone ID: PAT_MRT4530_56927C.1
atggccaacgcgaacatggtgtgggcggagctccccaaggaatgcctcgccggcatcctccgctacctcccttgcctccctgacaaagccatgtgctccggtgtctgcacacaggggcgcagtgtcgcttctgcgcacctgacgcctatgcaaccgtggctgttcatgccgttcgccaccgtgatctccttcttctgcgtcacctgcgagcgcacccaccaccaccagagcccccgcctgccggacaatgcccgcagcgcgcgcttctgcggcaccttcctcgagtgctgggtcgccgacgccgagatcccgtatgatgagcctctgccgtggaatcgtttccccgctctgctcaacctccgcaccggggagcgcgtcctcctcccgagacacctccgcaccaacaaccctggttccaccgccatcaaccgcatccaaaccttcgtcctctccgattccccatcccagacttaccggtactgggtcgccgccatagtgtccggcaaacccaacctcatgttctggagcaacaacatgaacgaatgggcgccgccgatgctgaagtgggactcggggttcaagatttggcagaagatgctacccaaggacccgatcgaggacgtgaaatacttctatggcggcccgctcggaggggggttctatgttctcaacaataaggaggacctgctggtgtacacgcccaaggccgacgacgaacacggcgagctcacgatgtcgtccgtgaagaagttcgaggtccggaggaatccccgatcgaccatgccggggccaggggaggtgctcggccgctacctcgtggaatcccaaggggatctggccatggtcgtcag

SEQ ID NO: 54865 - DNA, 202 bp, Oryza sativa
  Clone ID: PAT_MRT4530_56928C.1
catggtgaaggtcgagatggccggcgagcggcgcaaggtggccaatggtggcaccaacggtggaggaaggcatgcaatggggcggcggaggggacatggtgacggtgctgccgccgccgtcaccgtcgtcactcggcttcttcccgccgccgatttccaccgctacctccgcctccgtcagatccgctcgctcacccactga

SEQ ID NO: 54866 - DNA, 1270 bp, Oryza sativa
  Clone ID: PAT_MRT4530_56929C.1
cagctgcaggccggccggtgtgcgtgtgtgacagtaggagagagagctagcgagagagagcaaggaatcggaattgatttcatgcactgatcgatccatccatcatgcagatgctgcatggatgagaagagctagcagctaagctttgctgaagaaaattcttcagaggtttgtgttgatttgctggtctgctagagatcgatctagagagagagagaggaagggaagactgaagagagatctcgagcgggagatcgagatggggcgaggcaaggtggtgcttcagcggatcgagaacaagatcagccggcaggtgacgttcgccaagcggcggaacggcctgctcaagaaggcctacgagctctccatcctctgcgacgccgaggtcgccctcgtcctcttctcccacgccggccgcctctaccagttctcctcctcatccaacatgcttaagacgcttgagagataccagaggtacatttatgcttcgcaagatgctgccgcaccaactagcgatgagatgcagaaaattaaccatcagaacaactatcaggaatatgtgaacttgaaggcacatgttgagattctgcaacaatcacaaaggaaccttctaggtgaggatttagctccactggctacaaatgaacttgagcagcttgagagtcaagtagtcagaaccttgaagcaaatcagatcaagaaagactcaggtactacttgatgaactctgcgacctaaagagaaaggaacaaatgctacaagatgcaaacagggtcctgaaaaggaagcttgacgagatcgacgtagaggcagctcccccacagcctccatggaacggaaactgcagcaatggccatggcggcggcggcggcgtgttttccagtgagcctccccaaccagagcacttcttccaggccctcgggcttcatgccgtggacgtgaaccagccgccggcgccgccaccgggcggttatcctcctgagtggatggcctagctagctagctagctaccgtttcagcttcagttaatcagggtcaagtatcagctgagtttggccatatgtatggattctatatgttgcttcagaagttcctctctccttcctcttcaatttgttgctaattaagtgcttgccaaacttttctcagtgtaatgtactactactatgtatagttttgtcttgtatgaacagtttgtgagtactgtcaaaaaaaaaaaaaaaaaaaaaaaaaaaaaaaaaaaactcgagactagttctctctctctctcc

SEQ ID NO: 54867 - DNA, 350 bp, Oryza sativa
  unsure (1)..(350): unsure at all n locations
  Clone ID: PAT_MRT4530_5692C.1
gctgcttattataccacaacattaagcagttgtaaaganggcacaaagngaaggactgngcttacattgcattcangnaccaatcctatnctntatggnaagccacatngcaggnangngtttcatcttncgngctntccnaaatgntgttntngccaaatgcatatagacatntcangcgnngtggctnagaggctcaagcataacanaggtgntgagttcggtnnatttcatnncaatccaatacangggcttnccangtacgttnataatnnggcagattnctcttnggtnggttttgcgggtttaangnantntnccnatntaattnnatnnntnncnaaggcnct

SEQ ID NO: 54868 - DNA, 1485 bp, Oryza sativa
  Clone ID: PAT_MRT4530_56930C.1
atggcaaagaagaagaacccaattgtctttatggatgtttcgataggtgatgaacctgatgaaagaatggtttttgagctgtttgcagatgttgctccccggacagctgagaacttcagagcattgtgcacaggtgagatgggaattggacaaacatctaagaagccattatactataagggatcactcttccaccgtgtaatcaaggggttcatggcacaaggtggtgacttctcaaatggcgatggatctggtggagaaagtatatatggtggaacattcgaagatgaaaactttgtcctacgccatgatgaacgtggtctcctgtcaatggcaaatgctggacctaacaccaatgggtcacagttcttcataaccttcaaacataattctcgtcttgacagaaagagcactgtttttggtaagcttattcttggaaatgatgtgctgaagagaatcgaatatgttgatgtgcatggtgctggttccacacctgttgttccagtaagaatagtggactgtggagagctcgttgatggtaaatgtcttggatccatcacggttgaaaacgataaaaagagatctgtgaaatcaaagttatccaaggatgaatcttctgatgaggaaaataatgaaggaaaacgcaagagacaccacaagaaatcttcgaggaggagaaggaagaagaagagatattcttcttcagaatcggagagctcatctgagtcggagtctgagttgtctgactctgatagtgagtctgatacttgctccagtgactcatctgatctcagcagctcaagtgatgatagacgaaggcgcagaaagagacactccaagaaggataaacacaagcgtggaaaaagaaagcgtgatcgtaggcgtgagagaaagcgcagaaagcgtgacaggaagtcaaagcaaaagtcaaaaagaatgttagagagtgatagtgaaaccggaaatgtgagtgacagcagcttggaggatgataaaagtaagcggcaccatcgtggacggaagtctaaggcctcatcccaagtttcaggtgaaaatcacacagcattagctgctttgaaggatgccgcttcaactcaacaaaagagtgcaacgccaaggagtctagctcaagaagacaaatctccaaaggagaatggagatacccgtacaaatggagcaggagtcctgttaaagctcgaactagaagcatcagcaggagctcagctaggtctttgcagcgcaggagtcgaagtaggagtctggaaagatctcctgtacgtaaaagtgtcagccgaagccctccaactatggacaagggaagaagcattagccgaacctctggaagattaccattgcgaaggagtattagccggagcccagataggccttataggaggattccaagcagaagtcctcgaaagaacactcgaagaagcatcagcagaagcccagttagactatctaaaaggagtatcagccctgtaa

SEQ ID NO: 54869 - DNA, 839 bp, Oryza sativa
  Clone ID: PAT_MRT4530_56931C.1
atgatgaaccgccgccgccagcgccccacctcgccggcgccgccgctggacaacgacgacctcctctccgagatcctcctccgcctcccgccgcagccgtcctccctccctcgcgcctccctcgtctgcaagcgctggcgccgcctcgtctccgaccacggcttcctccgccgcttccgcgcccgccaccattttagtctcgatctatggaagaacaagaccaactgtgatgatgctactggatgggtgcttgagagaaccattcaactggacaagctcctttctgtcgaaccagggcctcgtatcacatcaccatgtcttggctttgttgaggaacataatatgttgtttgtgagcactcgtattggtgccttcctggtccatctggagtaatccctcgtctgcaagcgcccccgccccctcgtcgccgaccgcggcttcccccgccgctgccgcgccccccaccaacggttgccccgcctcaacgatggatgatcatgcatcatctctggtgaactggtgtgttaaagatggctatctatctttcccaagtattagcaagtcagatattatatatgtcagtcctagcatgtgttatgtggcccacctgtgccgaatatatcttggctcgttatttagtaacaaatgttagcatgttcaggtgctatatggacaccttcgtctgtagatcggtatggtacggtgacactttgggcttgtgagtccttccagtctttgggctcagtgactcgtgcattagtatggtaacctttgcccttgctgctgtgaacctgtgtgacactatgctcttgctctctatctgaacaatcacttcactt

SEQ ID NO: 54870 - DNA, 366 bp, Oryza sativa
  unsure (1)..(366): unsure at all n locations
  Clone ID: PAT_MRT4530_56932C.1
tgccatggtgttgttattagtatcattgttgaggatcaaaatttgttatatgtattggtaatatggttttgttattagtataattgttcgtgaggntcaaaatttgttatatgtattggtaaaagncccctcaatgttatagtttcacatgtggtgtaatctgggtggtgttgcaataaggttaggggtcctatgttttcttctttttcattcggagattaggggatcccacgtgtgttgatcacatgatcccttcaaaagtcctgtgtcttgtaattctccaactatgttattgaataaagtnccgtggtnccaaaaaaaaaaaaaaaaaaaaaaaaaaaaaaaaaaaaaaaaaaaaaaaaaaaa

SEQ ID NO: 54871 - DNA, 745 bp, Oryza sativa
  unsure (1)..(745): unsure at all n locations
  Clone ID: PAT_MRT4530_56933C.1
ggttctcacctcctccccccttgacagtggaattcccaaaaccaccgctaactcccacctctcgcccacacctccctgatccgatcccttcccccctacaaccctagccgaattccgcctccgccgcgatccgctcgtcccgcgctccaattccgtccttcatccgctctttgttttttttgcgattgtttttttgggtgcgattggtttggtgatccgcgtgttagggttcgggagtcgccggggcgggggtttgggtggtggattggaccggtaggtggccgggagggttggcccttgtggtttcggggtttggtttcacccgccgcatgtggagaatcggaggacctgngagaggttagggttagggttatggggagcacgggggagcccgaccggaagcggcggctcagtagctccgtcgcgcccggcggcggggcccctgtttctcctgccaagcggctggcggttgcacccacctccgaagataagaagctcgattttactgtactcaaatacaaaaaccaaaagctctcagagcaactagaagcccacaagtttgagtatcgtgctcttgaaaataaattcgctgggctaaaagagaagcagaggactcataatgagacactttccttggtcaacagttcttgggaacaacttgtggcagacctgaagtcaagatctttttgcaaaagtggatctcctaattccagccctggttcagggcacaacaatgtacaaaagg

SEQ ID NO: 54872 - DNA, 978 bp, Oryza sativa
  Clone ID: PAT_MRT4530_56934C.1
atggagcaagaacggcgtgaggcgaagagtcgtacgagtgccttgccaggccagaggcgtctcaggcgaagggtgcaaggcgaagactatttaccgaaggaagacgacttcgccatggcaagttcgcccctacgagggccgaggaagcctttccggcctatcaagcctaggggctatagggctggcgatcgccagacggcccatcaggggcccatgagcccctataacattatgtacccctgtaaatgtccctttcgtaaggttgtcattttgacaacaacggtcttgccaagtgtcactttgttgccaaggatattgttcattcatcccacaactgtgatgttccacatgaaccgtacgagcccccagctcattgtcttccccgaggatggattattcgtgagccttcttactgagagcggtaacactaaggatgatcttggactcccaactgagacaatctcctggggcagatcaagactggatttggttaaggcaaggaaggaggaggagatctacgcgctgaaggacattggcaccaaggtacatgttgcaaatatacttatcactggcaaatatgctgaggacctatatgtgatttctgcaaacaataagctccgatggagggaggaccatggaaatgatgaggaagatggcggcaacaggaggggattcctcggcgacctactccacccgttatcgcgctgggagaggcgacgaccggcatctagcgagcagccggcggccatggccgtagcacgcttgtgggccgagcgactgaggacggaggctggattagcgatgccgttggatgcagaagaaacgatggatctggcatctacgtccctctgattggtatcaataattgatttggaacggtggaaaccataaactgaagcttgaggttatcattggggcaattcgggtgcaaggagttttcctctaaaatttccctaggccctgtttagtttgccaccc

SEQ ID NO: 54873 - DNA, 528 bp, Oryza sativa
  Clone ID: PAT_MRT4530_56935C.1
atgggtacatcgttattaagaaccgcccctgcaaggtggtggaggtttctacctcgaagactagtaagcacggtcatgccaagtgtcactttgttgccaaggatattgttccttcatcccacaactgtgatgttccacatgaaccgtacaaattaccagctgattgacatatcagaggatggattattcgtgagccttcttactgagagcggtaacactaaggatgatcttggactcccaacttatgacaatctcctgggccagatcaagactggatttggtgaaggcaaggatgttgttgtgactgtcatgtccgccatggggaggagcagatctgacttcaccgacaaaggtctaataccagtgtttgaggacaggacttcaccgacaaaggagatagaaataagcatcctactaatggctttaagggtggatagggtacatgttgcaaatatacttatcactgccaaatatgctgaggacctatatgtgatttctgcaaacaatagtgctccgatgaaagattga

SEQ ID NO: 54874 - DNA, 302 bp, Oryza sativa
  unsure (1)..(302): unsure at all n locations
  Clone ID: PAT_MRT4530_56937C.1
gggcacctcggcgaaacggaagcgccggaatnggcccgcccgccggcgananggacgtantagggcgcccngggcgaanccgacggcgactcgttgntgaacgggttgccgatcggcgtctgaccccgttgncgtagtggacgatcgccctgtacaanaanggcagcaacccctccatggcttcttcttcttcttcttcttcttcttcttcttcttcttcttcttcttnccaagnnaaaanaatggagctaancnaancaanaagaagnanaaaaaaaaaaaaaaaaaaaaaaaaaaaaaaa

SEQ ID NO: 54875 - DNA, 745 bp, Oryza sativa
  Clone ID: PAT_MRT4530_56938C.1
tcgccccccacgagagcgacacccctacatccccctcctccctcgcacacccgtcaccacatccacactaacccgacccaacccccgccgcgccgcacccgttaaaggagcccaccccccctcgcccccgcaccctcgctctgaccgcgcaccccacttacgcgatcccgcgcgaccaccgacgctcaccccaccccctctcgccagatacatcacgcaccactgcgaccaccactacctcccgccaaaataaaaccacctctcgtccaggcacaccacgaggcccatgctgcaaaacaccctacaaaaacacccccccacccagcccccacccccctcacccaccccccccctcccgacaagcctccgccccccccaaccaaactaaccaaacaacacaccacaacaacgccccccgccaaccccagtccccccccaccaagacgccaccgcccacacaccccccgcagcagcgactacaccgccagcctccagagaaaagcaaaacccacacgacgtaatcgtagcacctcgccgcgaaaacacgccacacacaaccacacatcgaacaggccatacccgaccaacaacccggcccaaaacggccccggcgcccccgccccccacacgtacgccgcgcgcaggacgcaccgccgaggcccacgccttccctgcgacggcgccccacggtgccgggcaggtggccgacggccggttaggccgcgcccggcggcaacgagcggcc

SEQ ID NO: 54876 - DNA, 1532 bp, Oryza sativa
  Clone ID: PAT_MRT4530_56939C.1
gccctcgccctcccgcctgccccctcagctctcgccgggccgcgcccgcgcgtgagcggactacagtgtcagcttgctagctcacaggcgtcgctggccgccgcccgccgcgcgcgcgatcggtggcgaggcggagatgctgcgggcggcgaagtacctgctgggttcccctggcgccaacggcttcggctccaagtccaccgccgaggacgtctgccccgacctcggctgcatcaccgccatcatcacaggcgcgacgtccgggataggggcggagacggcgcgggtgctggcgaagcgcggggcgcgggtggtgatcccggcgaggaacgtgaaggcagcggaggacatgcgggcgcgcatccgcggcgagtgcccgggcgccgacgtcctcgttctgccgctcgacctcagctcgctcgcctccgtccgcgccttcgccgaccgcttcctctccctcggcctcccgctccacctcctcatcaacaatgccggcaagttctcgcatgggcagctcgctctgtcggaggacggcgtcgagatgacgttcgccaccaactacctaggccatttcctgctgacgaagctgctgctggggaggatggcggagacggcggcggcgaccggcgtgcagggccgcatcgtcaacgtgtcgtccagcgtgcacagctggttcgccggcgactgggcggagtacctcgacctcgtcacccgccggaagatagcttacgacgcgacgcaagcgtacgcggtgtccaagctcgccaacgtgctgcacaccaaggaactcgccgtgcgcctcaaggagatgggcgccaatgtgacggtgaactgcgtgcacccgggcatcgtcaggacgcggctcaaccgtgaccgcgacggcctcgtcacagatctggtgttcctgctgctgtccaagctgctgaaaaccatccctcaggctgcggcgaccacgtgctacgtggcggcccacccgaggctggccggcgtgtccggccgctacttcgccgactgcaacgaggccctgccgtcgccggccgccaccaaccgccacgaggccgagcggctgtggcaaatctccgagtccatgctgctctgcacgaacagacacagcaaagatgcctccgctccctgacacagctgactggctaatctttaccgtattttactactacccatcctaaaatataataacttttatctataaatttgaacaattaaaaatacttatattttaggatggaggaagtagtgcatcactgtcttttctcttgttccacattacatatatacagcttcatgcaatatgtaacctgcaaatattatagtagtatgagcaccagtgtataaatatatagtagtatatctgtagcattatagcagtagcagccaattatattagtgattgtatttccgagatatataatactagtatacagtacgctgtaatttgacaactgagtaactagactattgaaaagtgagatattgctactctggtgtcgatatgtgtgcttttggctttgctgttc

SEQ ID NO: 54877 - DNA, 189 bp, Oryza sativa
  Clone ID: PAT_MRT4530_5693C.1
atggcgacaggtgggaggtggtgcacggtgccaacggcgacaaatgagggggtggtgatgagggttggtcggacggccgtggcaagaagggtggaggcggccagcagcctcgccacaccaattgcggggtcgacagcggcagccaacgacatcgacgagggatggattgcccggtgcggcggctcttga

SEQ ID NO: 54878 - DNA, 429 bp, Oryza sativa
  Clone ID: PAT_MRT4530_56940C.1
agctgatgccaaattactcattagcttccccacattgtggtctcagcgaacacaacaaacactggggcaccacaagtcatggcaatcaataccatggccccggagcatcctgcatgccgttccatttcattttttatctacctaccccaactttcttccatcaagacgagagttgacaccacttgacgatctcacgctgctaccaccaggacagccattgctcctgccactgccgcttgtgaccatctacacggacccgcggaatccggcgatgccgccgagatgtcgtagtagccgctgttaactccgttgttgtcgtaaccgccgctgacattgccgccaccacctccggggaatctccaaccggagttgccggcgccaccgaacgtggagttgtcgcgcgggagcttgtaggagagctcgtacacc

SEQ ID NO: 54879 - DNA, 430 bp, Oryza sativa
  Clone ID: PAT_MRT4530_56941C.1
ggaacaactccgtacgtgtaacctatgtcacgcccagaaattcccgaatagaattccaagcagaatgtgcattaaaatccccgtccaggaccggccggggcatcctcgacggcacgaacgaagccttctcctcggagaaaccaccatctgacgcgtactcaaactctggggttggggaaaaatagagcaagactgagtactacccactgtactcagcaagtcataccggaacggaggtatgatgcaggatattaccaaaggatagctagagagtcaaggagggggcggcgccgacatgcgggccccattagtcggtgggagtcaactgcgagcggctatggaaaggctcaccggcgcacggcggacggcggcctccgatggcggaattcgacggaggcggggtggacgaggtggatctcggccacgtgaa

SEQ ID NO: 54880 - DNA, 200 bp, Oryza sativa
  unsure (1)..(200): unsure at all n locations
  Clone ID: PAT_MRT4530_56942C.1
ntttcttttcttttttctcctcnttataattctcatttattcatacccacagccgatgactattccaaatatatattacaagacacacacgntgntgtgtgacactttatttatcacaactatatatatctgatggtacacactaccaagaaccgcaatgaccagtatgcaactttgcatggagagctgcagtacctaag

SEQ ID NO: 54881 - DNA, 297 bp, Oryza sativa
  Clone ID: PAT_MRT4530_56943C.1
atggcagttggtgggcagtggcatcgtcggctgccgttggcggaggaggacatggcggcggcgtcggggcgggtgctggctgcgtggtggcggagggtgacggcgcaacggcggtctgcgaaggcggtgtcggtggcagcgacgacggcggccgtgattgtggaggcggtggtgatgtcggcggcggggatggagttggggatgagcggctgtggtggtggtgaccgtgtctgcggtcatcagaggcgtgacggtctcggacggctagccgagggcgtgggagatggcgacatctga

SEQ ID NO: 54882 - DNA, 333 bp, Oryza sativa
  Clone ID: PAT_MRT4530_56944C.1
atggatatattggaaatgctcggcttcatgcttccccaggccaggcggcggcagcacggcctcgcactcccgtcggcgacgcccctcacccgcttggatctagaggcggtgcctctcactcgcctggatccggcggtgggtggtggcgatgcggccgggagtggcggtgggctcgagagctggtcgcggcggaggtgggctcaggagtggcggaggcgggctcaggagcggtggcggagcggaggcgagggaacggctgggagcggcagcgggcggcgtgcatgcttggaaggcggtgatggcgacagcgccgacaaggagggcggcagctag

SEQ ID NO: 54883 - DNA, 907 bp, Oryza sativa
  Clone ID: PAT_MRT4530_56945C.1
ctaggggaggggcggctggcggcgggggctgaaggtgacggcggcggcgtctggtgttggacgcgtcgacgctcgtgctgacggtgtcgacggcgaggtcctccagatctgcgggtgccggtggttgcagcgcggccggtggcagcggcggcggtggatgccgacggcagctggcgacagcggcggcggggactgcggtggcgggcggcagctggcgccagcggcaacggctatggcggttcgggcgcgtcggcgctcgtcctggcggtgtcggcagcgaggtcctccagatctgggggtgctggcggttgcgatgcggctggtggcagcggcgacggcggctggcaacagcggcggcggtgattgcggtggcagacggcggctagcgacaccgacggcggctatggcgacaacgctgatggcggctgtcagcgacgcgacgcccgtggacggcgcggcggctgtggcagacacggctctagcggtgactggcggatgcggcagtgattgcggcgttggcatcgaccggcaatggcagttggtgggcagtggcatcgtcggctgccgttggcggaggaggacatggcggcggcgtcggggcgggtgctggctgcgtggtggcggagggtgacggcgcaacggcggtctgcgaaggcggtgtcggtggcagcgacgacggcggccgtgattgtggaggcggtggtgatgtcggcggcggggatggagttggggatgaggagaggatggcgacagtgaggtggctgggtgttcggcaacagcggctgtggtggtggtgaccgtgtctgcggtcatcagaggcgtgacggtctcggacggctagccgagggcgtgggagatggcgacatctgaccggtgtggcatcttttggtgaaggggtcggagactg

SEQ ID NO: 54884 - DNA, 125 bp, Oryza sativa
  Clone ID: PAT_MRT4530_56946C.1
atggatggattgtcagactcccacgcagggcatgtgacggagacggagcggcgggctgttcgttttctcacatacggatgttaccactatatcatgcggaggccatcaaaaggagtaaacaacac

SEQ ID NO: 54885 - DNA, 456 bp, Oryza sativa
  Clone ID: PAT_MRT4530_56947C.1
ctttgttcacgggattttgcatgcttatccgatggggactggggacctggctggcttgcctgatacgaagagggagtggaaccatgtacatcggaacgcattcgcggagcagagtctgtgaagcatacctagatacctgaacatgctgagaagccagctgcttgactcagacgccaacggacgcatgacgtggcccgacacctattagtagtatgcctactacaacttcacgcgaaccatcctaggacagatttgtgcatttgcctactgcagacgagagagctgcacaggatgaagggactgcttctcgatcgtggagtgcgactatctggctcgagcgtgggacgagatcactgactacagcatctttcgcgatgacttgagcagactgtattcttctgcgatggtaagtttggatgctctattagtgcacttatagtatcaaactcctggagc

SEQ ID NO: 54886 - DNA, 416 bp, Oryza sativa
  Clone ID: PAT_MRT4530_56948C.1
ctgacccgtacggagtactggtactacgaggacctgaccgggcaatgggttgagcaggatcatcatgaagcagacaggagagatgaccgaggaaaatacaaccatggctctggaggtgttaatgtcaaccacaatgaacaacgcgttagccaaaatctaagacctgggaagaatacgaccatcccaacagagactaatattcttcagaatgtttgtggaggatcaactatccctaaactgctacatcatgcaagaggtgagcactctacaactccagcttcgacttcggaatatgtccacgacacacatgacgaagacctacaccaagcccatgcagatcatgacatgcgctattatagtgtaccatctactgctcgatttatacaacgggcactaacacagcatcatgcacacca

SEQ ID NO: 54887 - DNA, 336 bp, Oryza sativa
  Clone ID: PAT_MRT4530_56949C.1
atggcggagaagacggcggccgacggcgagctgtactactccaacggtagaagatcgaaggatgtgctgcggatgggcgtggcggtggcggagaggcagctgtccgacaacgacctgcttgatgagctcctttcgacggcgaacgcagcgagctgcgacctggtggtccaggcgtcggcgacggcgctgccatcctctcccgcatcagctccagcccaccgccgccgccagccgaagctaggtcgtgcagccctagctttcctgccgccgcgcgccaccggccgaagggaagaaggggagagagagagaagggagaggaggaagaaggatgactga

SEQ ID NO: 54888 - DNA, 1497 bp, Oryza sativa
  Clone ID: PAT_MRT4530_5694C.1
atggaggcgaaatacatccctctccaatgccacacatcccggagccaatggagatcgagatggttgtacctcgagctcaaagaactcgacccgattcttgttgtgcctgaggtccaaccggagcgttctgaggactggacctcgaaacctccattaacaccctctctccaagcctttgtcaatgccgtgaatctttctgttgacatcgtgacgcagcgggtcaaggaggtcttgatcactgctgcctccacggttgacgagccaccggtcccgctctgcgacaagtcggcagccgagaaggttgccaccatcaatgacacgggcagtctggctcctccaaagaggaggacgttaaagctgcccgccggcaagaaagcatcggcgatctccgtgcaaagcgggagagaggaggtgacgagtggatcccccgccgctatcatccctcgtgtggaggtggctcctgttgtcgctaagtccgcgggatctgctactgctcctgtgaccgcgccgccgcccaaaatagccacttggtctgacatggtggccgaatgccaccgcctcctcgagaacagttctcgggcggtggtggcccagatggatcgtgtggtggcccgcgcgacggcggcggacggaagggtggcccagctggaggcacaactcgagtcttctatcccggcgcaccccgacgagacgtcgctgacatcggcattgtcggagctggcaggcgagatggatgccatcccgccgcggcacatagcccacgctgcggaggagatctccaacggaatccacatgggggcatgtcacgtcctcttttgtgtgaagctagctctccatggcgtcgacctcaaggagatcttgttgaagggtgtggctaatgccacgggggaggacatgatgtccaatcctgaggacatccagcaaggcggatgtcctgatgtcgcgatgatcgacctaccttcctcaagcgacatgcctgcccctgacattgttaaggatggggaggtgggtacgacctctggtccgcctagcacagactacatcactttctttgtcttcagcgcgttgtcgcgcaccttggtccacgacatcatcccacacaccggtgaccattacttggtgctccttagtgctgacccttggtgccaaagggacgtcaaaaccatatgggagacgctagatttggccaaagagccagacctagaaactcttgtcacctccacagtgccattgccctgccggcaggtcaccacatccactgagctatcacagctatctcgctggggagttgtcggatctagccgtggacactggacctggcaagtatggggcagatctagccaccaccattctcgccagcgtcaagatcctgtgatcgcctctggcctagcccattggaaacttgagttgatagaaccatccaagctcctcgtctactctcctcatgatcaggagaaccaagaaaacactaggaaaaccactcagagcaagggatag

SEQ ID NO: 54889 - DNA, 217 bp, Oryza sativa
  Clone ID: PAT_MRT4530_56950C.1
tgtttactgcccttgctatggctgtgcacttaggagatattatactttggggccgacattgcgtgcacaagactgcgatacatgacgacctacggtagaggttgggagggtggaaccagaaagggcatttgcttacttgcaagatgatatgaacggtgcagaaagatatgtgcagggcctttgcaagtggtttattgagcattgccggggagaccgg

SEQ ID NO: 54890 - DNA, 574 bp, Oryza sativa
  Clone ID: PAT_MRT4530_56951C.1
gggctgcaggaatcggcacgagggagagagagagagaactagtctcgagttttttttttttttttttggagtgacactctcatctcacttctatcattgtatcaacagtacagatctaactctttagaacatgaaaaaactttaaatttaaccagaaatacaatgatttttccttattagttcaatccagcacctcaaacaacttccattataatctgacagaaagataaaaacaacataagatcatccggagaatgtagagtgtcccactcatatgaaggaagcaacttccacagatattcgatactacaattggtaagcctcctgccgctgccagctcttcaaacagccctcttctataatgatattacgtaagattcaatagagttccatctaaactgtgcctatataatgcaactaacaaaaggggtaatggaggggtctactcaaattctttggtactttgggttccacaaatcaaattacatgtgtcaagcaaaaatacacaatgcactagcatactttagttcctctcttgccagcaacatgctaaaaaaatcctttaatagatata

SEQ ID NO: 54891 - DNA, 447 bp, Oryza sativa
  Clone ID: PAT_MRT4530_56952C.1
atggccgctgtcgaggttggaaatggcgtgggtagacaggggcacagggcacggcgttgcaatagaggtcaggggcgagacggccgagcagatgtggtgctccaatccaatcattacgccggccaccacgccgtcatcaactccgctccgtcgcagcccggcgtggacgcgccgcctctgccgagcccctcgcgatcaaggtcaatgacacgatgtgaacctttgagtgtgttgatgccactaccagtgcctagagagaagtctaaggccaaggctaagacaaagaccaaagctaaagccaagatagctcctaggaagaacacaaacgatagcgctgctactgcgcctttggcacaagtcaaacaaaaaggcaactccattcctgtgtctccggatagtccagccatgagtacaaggagcaaaagaaaatctcttaattttaattag

SEQ ID NO: 54892 - DNA, 168 bp, Oryza sativa
  Clone ID: PAT_MRT4530_56953C.1
atggtggtttccaacgttggttcacttgtaactgtcattgagagcctatggggagccgccatgtggaagatggcggttagaggtgccaaggctggggcacagctactgggggtgcaggagggggccaacacccccctatccgacccccctccctgctatactgactag

SEQ ID NO: 54893 - DNA, 362 bp, Oryza sativa
  Clone ID: PAT_MRT4530_56954C.1
accaagggcaagaattactggttcacataaaacacaagaaatctgaaaacacactttaaaggaacatttccggaaaatccttttttgcgacttccggtagtaggaagcttcactggaaaaggaaaaaacaagggttgcactttaactaggactatgcaacacacaatcttttttgccttaaagtttggttccatggcttacttggccatcaagacctttacaaacttctaaaagtttatttgaccatcaccattaacattagtcttacgggatattttatccaccctcttgttagttagtttctcgccaagatttgtatcacatgggggagcttcactcgcggagaagaaagcccttttggt

SEQ ID NO: 54894 - DNA, 654 bp, Oryza sativa
  Clone ID: PAT_MRT4530_56955C.1
atgggccggccggcccaagaaggcggcccaacgcgcgcgcgcgggcggggaggggagagagagagccggtgggccgggtccaacccgcgtggtcccgggtgggacccgcttgtcggcgactcagctcacccctcacggctcgcggtggaccgcgcgcgcgaggggcggagggaagcggcggaccggggtctgcttgacccggtcgcggccgaggtggcgccgacgtggcgcctacgtggctaccacgcgggccggcgggaggtagacgacgacgccggccggaacggacaacggacggcggtggcgattggtggagcgaaccacggcgatacatgcgaaagcgagcacaccggggggttgcatgggacgaggggagatgagccaacggctcggattcgccggagggagctcgacgggggcggattgcggcggcggcaaccggcggcgagggaagggggaaacggcgacgaggtcatgaggggccgattcccggcggtgagagcatctacgcggctacgggaatccgttgctagcgtcggattgggcggagctacgccgagcgaggccggcgacgagcgggcgctacggagcacgggcgacgacggcggcgagcacacagcgagcggcggcaacggtcggggcggcgccagctag

SEQ ID NO: 54895 - DNA, 855 bp, Oryza sativa
  Clone ID: PAT_MRT4530_56956C.1
ctgaccagtgaccactatggttcactaaagtaacaggtgaactctcttgaagaccttccacaaaatttagtcacttaggtacaacaagctgagggccatcaagcttcctatcttgaagcagccacagcttaagctttcaagttgtattactgtccattgatttcctggtgaaaagcaaaaggcatccttccccttcgcttctcttgtctcttgcaaacaaaatggaaagatcaaaagaaaaggcactaggagaatatagaaaaaaaatgatggaatattcttattttaaatccaacgcactgaacattgtttacaacgtaccaatctggaatattttacatacagaagttccaaaggtgaaactgctgttaaccaataaaagccaacatgccacaccttacgatgcaggcagattagactgcttttatgatcaatctggttggagttaatcctgcaacaaaatttctatgatgggccaggtacctatcaacttaaaccagcaccatgcctgctcagagtgtatctgacctcatagattcagaatgatgcatgacagtcaggatcaatagagcccaaacaagttgctaatagctcagccaaaaagaccacggttgccaatgttcccttgtagttctttcaatcgttgctcttctagaggatcaggactcttcaaataccgtttggtacgcctgtctaattcatttagagcagggaatgtctgtgcatgaacaatccttgaattttaggtacgaggaacttccaccgggaaccactcatgctggaaagcagcatctgtgataaccgggttctcaagatcgtatgttagaagattatttaacagatcaaaactggttt

SEQ ID NO: 54896 - DNA, 317 bp, Oryza sativa
  Clone ID: PAT_MRT4530_56957C.1
aatggtaccaccggagctgtgtactttcacaaattgtataaatcattcacagtaggcctgcaaatccatttcccaacaggtctacattttttttttacagttgacttgctgagggtccagcggcgaggtgaaattggcaggattcaatgaatcatccattacaacagactccaagttgcctttaactatggatccatatacggaggattttgtgctggtgacaacacgttctctgatcttggaaattttgcctagcacaaatgaagtcgttcccgccttggtttattttcttatgcacaaatgaagtcggtcccggt

SEQ ID NO: 54897 - DNA, 858 bp, Oryza sativa
  Clone ID: PAT_MRT4530_56958C.1
atgtctcttggcatcatggctcccccgaaacggtccttaagtgcaagagcgggaaaccgtacacccgggcgcggcctgagagaaaggggcggctcggccgagcttaatgggccggccggcccaagaaggcggcccaaggcgcgcgcgggcggggaggggagagagagagccggtgggccgggtccatcccgcgtggtcctgggtgggacccgcttgtcggtgactcggctcaccgtgagcgaggtgcacgcggggtgtgctagggtttgggaagggagatgcggcgcatgcgcgcggttcgcggaggacgcggtgcggcaggcccacgcgcagcctcacggctcgcggtggaccgcgcgcgcgagggggcggagggaagcggcggaccggggtctgcttgacccggtcgcagccgaggtggcgccgacgtggcgcctacgtggctgccacgcggaccgtcgggaggtagacgatgacgccggccggaacagacggcgaacgacagcggcgagcggcggagcgaaccatggcgatataggcgaaggcgagcacaccgggatgtcgcacaggacgaggggagacgagccaacagctcggattcgccgggggatgctcgacggcggcggattgcggcggcggcaaccggcggtgggagaagggggaaacagtgatgaggtcatgaggggccgattcccggcggcgagagcatctacacggctacgggaatccgttgctagtgtcgaattgggcggagctacgtcgagcgaggccggtgacgagcgggtgctacggagcacgggcggcgatggcggcgagcacacagcgggcggcggcaacggtcggggcggcgccagctag

SEQ ID NO: 54898 - DNA, 363 bp, Oryza sativa
  Clone ID: PAT_MRT4530_56959C.1
atggatggaatatttgagagtgatatcatatatggattattagaactctataaccttgaaagttatgtggaaaatagtgaccggaaacaacaccctagtgaaagatacaagggtcaggtccggaaaggtttagccagcagagtgtacgacagagaatccttctcgataaatcatcccaactcaagatatcaactaagcagcccgttcaaccagttgacaccgaagtcagggcagaacagaacagtcatgcagatggaaaggtcaatcaagagtctgtatgttcggaaactgaatgagagtcacttttgtggaacttcctgtcaacaactgatcagtgttatgttccaagccctcttggaatga

SEQ ID NO: 54899 - DNA, 825 bp, Oryza sativa
  Clone ID: PAT_MRT4530_5695C.1
atggaatccatgagcattgaggaggagtacatcagcacgctgcacacgcgatccaacgcgcggttcttctcgaggagcaagcagcagctgtccggggtggagatggaggcggcggcggcggcggagcagcaggacgccgtcgtcgtccccgcggagttgcagcggatgatgcaccggaggacgtcgtcggagatcgagctagcgatggcgggctacttcgacgccagcgacgaggcgtcggagatctgcaggcagctgctggcgaacatcaagaacgcgcagagcaactacctgtccatggacagcttcctcgccaccatcgtctccgacagcgtcgccgccgcggcgacgacggcgccgctcgcagccgtgcggagcaacccgttcagcgacgcggcgacgcggagcagcttccggcggatccacgacaggtactcgtccatcctccgcgccatcaagcgcagccacgggaaggtggcgaggaagctgaaggagcagctcgacacggcggccaaggggacgtacgtgctggggcgcgacctcgacacggtgagccacctggtggcgcggctctccgacggcatcgagcgggagaacgccatggcgaggcggtgcgcggagagggtggccgccgacaacgtcggcgccgccgccgccgccggcgggaggttcttcccggtgcaggagatggcgaacgagctgaggagaagctgctcgagctcgaggaagctcgcggaggagctggaggagcacgtgtgcctatgcctcgccaccatccatagggctcgacttctcgtcatcaaagagatctccaagcaagcatga

SEQ ID NO: 54900 - DNA, 750 bp, Oryza sativa
  Clone ID: PAT_MRT4530_56960C.1
atgggccggccggcccaagaaggcggcccaaggcgctcatgcgggcggggaggagagagagccggtgggccgggtccatcccgcgtggtcccgggtgggacccgcttgtcggcgactcggctcaccatgagcgaggtgcacgcggggcgtgctagggtttggggagggaggcgcggcgcatgcgcgcggttcgcggaggacgcggtgcggcgggcccacgcgcagcctcacggctcaccgcggaccatgcgcatagggggaaaacggagggagcggctggccgggtcagccaatccagtcgcggccgaggtggcgccgacgtggcgcctacgtggctgccacgcggcccggcgggaggtagacaacgactccggccggaacggacggcggacgacggcggcgagcggcggagcgatccatggcgatacaggcgaaggcgagcacaccgggatgttgcacaggacgagggcagacgagccaacggctcggattcgccggagggagctcgacggcggcggattgcggcggcggcaaccggcggcgagggaagggggaaacggcgatgaggtcacgaggggccgattcccggcggtgagtgcatctacgcggctacgggaatccgttgctagcgtcggattgggcggagctacgccgagcgaggccggcgacgagcgggcgctacggagcacgggcggcgacggcggcgagcacacagcgagcggcggcaacggtcggggcggcgccagctag

SEQ ID NO: 54901 - DNA, 1442 bp, Oryza sativa
  Clone ID: PAT_MRT4530_56961C.1
atggccgccgccggcgaccataggggcgcgggggcgccgcctcccgccgctgcgccggcgtggccgccttcggtcgcaccgtgcggctgccgcgtggggcccggccgtcagccgcccgcgccctcggacgctgcagtttcgggagatccgctcttcgtggaagttgaagccgacgcctcacggctcgcggtggaccgcgcgcacaagggagggggaaacggagggtgcggctggccgggtcagctgatccggtcgcggccgaggtggcgccgacgtggcagccacgcgggccggcgggaggtagacgacgatgtcggccggaacggacggcggacggcggtggcgattggcggaccgagccacggcgatacaggcgaaagcgagcacacgggggggttgcccgggacgaggggagacgagccaacggctcggattcaccggagggagctcgacggtggcggattgcgacggcagcaaccagcggcgagggaagggggaaacggcgacgaggtcacgaggggccgattcccggcggtgagagcatctacgcggctacgggaatccgttgctagcgtcggattgggcggagctacgccgagcgaggccggcgacgagcgggcgctacggagcacgggcggcgacggcggcgagcacacagcgagcggcggcaacggtcggggcggcaccaggtagctacggggaggctactcgtgctactacccgagtctaaggggaggagatggaacgagaagggagaacggagggaggcactaccgtgcggggcgcgcaccggctcctccggcacacgcgacggcggcggtcggcgagagagacagagggacggcaatggcgcgggcgaaaaacggggaagattgggaggggaaaaggaagggagggcgcctgggtttatagggcggcaatgtcggtttggaaaccgaccttgggcggtcaaggcgcgtgctggcgctcggcgctcgcggccaaaatggcgacagaggcggatgacgccggcggggaagagaaaaggaaaaggaagggagaaaagaaggagggagagagggcgatgaggaggagccttgcctcctttccttggaagcacgcgcggggagaggcggggccgagtcgataacgacgacgatgacggcgggggcggtttggaacggagtggcgacatgggcggcagacgcggacaggcgcggcagaggctgacggcggcggcgaccaggcggtcggccaccacggcgcgcgcgcgcgggaagcaacggccggcgcggcgatttgggcggcgtcggcgggaacggcagcgagagcggagagggagggctcggcgcggctcacgggcagagcggggagagagagagagagagagagagagagagatagggagggagggagagatgggccgagaggaattcggcccatcgaacctgagggaggcaaaa

SEQ ID NO: 54902 - DNA, 521 bp, Oryza sativa
  Clone ID: PAT_MRT4530_56962C.1
cgggaagaccctggactgggcaagaccatttaccttgagtttgatttcgtcacggacactgatggacaacgtgaagtcgaaagtatcccagacaaggaggcaatgcccccccggaccagcagctgtctgatctttgctgggtaacaagtctgtggaggatgccagcaccacttgcgggattacaaacatccaagaaggagtccaacaactccacctggtgctcaagcactccgtgtgtgccccaagtaagtcctcaacccactggagcttgctgctggttttagggcttcacaagtcatgcctattggtctgtcacaccaatggagctatggttgtctggtcatgggtcccttgttcagtgtcaccagctttcattgtgtactatttacctgtaaggtgtatccttaagtctgtttgatggtgtctgaaacgttttcctgtggtagaccaccatggaagaactataaggaataagggatccctaatcatggtgtccaaaaaataaaaaaaaaaaaaaaaaa

SEQ ID NO: 54903 - DNA, 4524 bp, Oryza sativa
  Clone ID: PAT_MRT4530_56963C.1
cttgtaaatgagacagacttacatgtaatactagctcagtacctactactgtaaagcaatagtcctccatgtttacaagcattgatataggaaagtacaaaagggggagagaaaaacacaaagtacacatagcgaacaatgcactacacaacagttttttttaaaatgatacatgcgtgtgcttcctctttcgtacatagaatcagctgccacccccatagcaatgcagacaggcctcggatggccattcgaacaggcaatgccggctgaattatagaggctcttcgaggccacgttagaacaaaataacgacaacgaataatcaaaccaatgaacagatatcgatatatcccaaaactcatatcggcaaggcatgggaagacaagttagagagaagcacgattacaaaaagagacccaaatatcactcaagcgggtcatgcaagcatcatatatgattaaaattttaaagcatattcttgtccaagttaatgtggtcttgcatcaggggaggatttgcgcagttgagcaaccctcaccctattgcagcacaagctgctaaaactatgcagagcaagctaaaacagtagaagtcttgcctttcaagttgtgtgatcccatctaaaactaatcagattaaagtagttttgtgagtaacccgctccactagtagtttaaagttcgcagtaccatttcaggtgtccatgtactagttttcaaagtttacaggtaatgtcaagagggaaaaagttgtagggagaaaactaaaatgttgttcatgaagataatgtcatttaagagaaggcgttacacctcaaccatcccaaagaaatggacgagcggtccccacaatcagtcagaagtatgatgtatattaatagacaggataggataagtagactgaccagtgaccactatggttcactaaagtaacaggtgaactctcttgaagaccttccacaaaatttagtcacttaggtacaacaagctgagggccatcaagcttcctatcttgaagcagccacagcttaagctttcaagtggtattactgtccattgatttcctggtgaaaagcaaaaggcatccttccccttcgcttctcttgtctcttgcaaacaaaatggaaagatcaaaagaaaaggcactaggagaatatataaaaaaaatgatggaatattcttattttaaatccaacgcactgaacattgtttacaacgtaccaatctggaatattttacatacagaagttccaaaggtgaaactgctgttaaccaataaaagccaacatgccacaccttacgatgcaggcagattagactgcttttatgatcaatctggttggagttaatcctgcaacaaaatttctatgatgggccaggtacctatcaacttaaaccagcaccatgcctgctaaagaacactatcagttgctggtagacaccaagatgcgtgatacttcatgtccatggcacatctcacctcagagtgtatctgacctcatagattcagaatgatgcatgacagtcaggatcaatagagcccaaacaagttgctaatagctcagccaaaaagaccacggttgccaatgttcccttgtagttctttcaatcgttgctcttctagaggatcaggactcttcaaataccgtttggtacgcctgtctaattcatttagagcagggaatgttggcatgaaatcctttgatttaggtagaggaacttcacggaaccactcatgctgcaaagcagcatctgctgataaccgcttctcaggatcgtatgttagaagattatttaacagatcaaaacctgcttcagacagaattggacgaccagaaaaagatgcagctgggaacttatctcttaatcggttgtacggttgtttgacaaaattgacttttacacccggcaatttggcatagccaggccatatcttctcgttaggtgtgccaagtgttctaaatatcttatctagctgttcaaactcagttttcccattaaataatggttctttggccaaaagctctgccattatgcagcccacagaccacatatcaatggcggtagaatattccttcgttcctaataatagttctggcgccctgtaccacaaagtcacaaccaattgagtgtaaggttttagcgggcttccatattgacgagatagtccaaaatcacatattttcaactcaccacggttattcagcaaaagatttgaggtcttcagatccctatgaagtacccaattatcatgaagatacttcacaccctccaacagctggagcatcaggcatttgacctcactttggctatatggctgcttcattgcctccatgacacctttaagatcatgttccatgtactccatcaccataaaaatactatctaggctactaccaaccactacttccttaacatcaacaattgagggatggtgaaaagacaaaaggatgtttatctccctaagagatgttaatgggaaaccttctctctccttctccatcttgaccttcttcaacgcaacaatctcaccagtcttcttatcccttgccctgtatacaacaccataggtgccttcattaatcttgttgagcctctcaaattcatcaacacttctgcaaccttgaagcatatttatacatctgtgcggtggcttcactggttctggtgtttcagaccggcgcacttcatactctgagtccatacctgactgatgatttgcaatatcactgttaccatcatcatctctgtcaacgtccatataatcatctttatcaacttccaaatcctcattctcatcagcacccaacctccctgaatcagacgaccttgacatggtcctccctccagagatatcactggccacaacctcaccaagttctgggctaagagccttcttcctctgccccaactcagcagagtctgcaggcgatgcacttttcttcttcctgtgtggtgccccctcttcctcgtcatcattagcaccagcccaccttgaagttgatatgttcctcattgttgagtactcttcttcctcctccatcactctactctccgcatgctcctgtaactgctcaggactctcggaagcaacagcaggctccacatccatcggcgacttctccacagccaacctctcagggatgtgatcctgcggaggcagagggggagggggagggagaggaagctcggtaggcacagagtccaccgccttcttgcccttcgccacatcagaatgcattggctttgggctatccctatcccatattatcggtgagaatttccttttcttgctaggtgatgaggccgatgcagccaccaccgattcaccatccctactagaacttgatacaccattctccctcgctctatgcggcctcccaccagagtcatctgacgcactaccgctcagaacttcgccaggctcgcgatccccgagcctcgctgagaggcgactcctgggaggcggagagcggcggtggccgtacccgttcgacaactccctgccgcccctgctgcgaccgccgtcacggcgccggtcagcttcgcagcgggggtcggagtcgccgcgttggtgtcggccgctcgggtggtggtggtgaaaaaaattcggcgcgattcggacctgggagggctggggtttggatctgacctcgaatcgagcggccgggtgggatccggccgggccgtggcggcggcggcggcggcggagggaggaagcgaggcgggtcgggaggggagcggcggcggcggagcgaggtagggagaggaagagatgggaacggaagcgaaatacgccgcctttgaatcgctcgtgccggctcctccgacacgcgcgacggcgaacggcgacagcgaacaaagcacgggaggcggcgacaatggagtggaggcgaatgggagaggaaaggaaaggggggaaggttgggtttatatgggcgacaatgtcggtttgggagaggggaaccgacttttgacggtcaagccagcgagctggcgctccggctagcggccaaatcggcgacagggaggaggggaatgacgccggcggaggaagggaaaaaggaaaaagggaggaagaaagggggcttgcctccttgccgctttggggaaaaggaggagggagagagggcgacgcggcagagggggggagctctgcctccgtcccttggaggcacgcgcggggagaggcggggccgagtcgatgacgacggcgatgacggcggggcggtttggagtggagcggcgacacgggcggcagacgcggggcaggcgcggcaggcgctgacggcggcggcgactggccggtcggccaccacggcgcgcgcgtgcgcgggcggcgcggcgatttgggcggcatcggcgggaacggccacgagagtggagagggagagctcgacgcggctcacgggcagagcggggagagagagagagagagagagccgaggagggagggggagatgggccgagaggagttcggcccatcgaactcgagggaggctaaatagacttttgcggagggatt

SEQ ID NO: 54904 - DNA, 543 bp, Oryza sativa
  Clone ID: PAT_MRT4530_56964C.1
ctatagggaaactggtaccctcagtaccggtccggaattcccgggtcgacccacgcgtccgcggacgcgtggcgacgcgtgggatcggcaactacgcatccagcttcaggtggtgggactgggttttcgacacctgaggctggcgatgagcccgcaaggaagaggagagagaaaaagcttgcggccctcaaggctaagaaggcccacgtaattggcacattctgttgccgaaacttcctactggacggtctagtcgtggtattgtgttaccagagcgcttagtaaccaccccgacctgctgtgccccttcccaactttctttcttttctttctggtaaaaggaaaaagcggtaatcgtccccatttctgatttataggtgaatagacttggaagaactggctaggtcgtggtgctcggagaggtttgttatttgttattttcacagtacatattgggtggcgtcttaagcgccttgctcaccggccaagtatgtttttgtaataataccctgatattatgaccttgaaaaaaaaaaaaaaaaa

SEQ ID NO: 54905 - DNA, 1512 bp, Oryza sativa
  Clone ID: PAT_MRT4530_56965C.1
atggatgaaggagggatgaacggtgcgaagcgcggtaccttggagtatgcaagggaagacaatcacggtgaagatgagaatgaaagagtggacaatcagggtgatgtaatggacgaagacaatgtggagttgactgctgatggaggtggatatgacagtggcgaatcagatggtttggatcagatgctacgtgatggggagacaacctacgacaatgacagacaatacgagaagttcgagaccatggtggaggattcaaaaaccccgctttatccaggatgcaaagagcagcacaccaagttgcacgtcatactctcgttgctgcagatgaaagcaagtaatggttggagtgacaagagcttcacggagcttctacagctgattggagacctacttccagcgggacatatactaccagaaacaacataccaagcgaagaagcgcaagtatatcatgatgccacttctaatccaagggcctaagcaacctggcaacgatatcgacgtctacttcaggccattagtggatgatcttaagttactatggcatcgggggtttggggaggggaggcgcggcgcatgcgcgcggttcgcggaggacgcggtgcggcgggcccacgcgcagcctcacggctcgcggtggaccgcgcgcgcgagggggcggagggaagcggtggaccggggtctgcttgacccggtcgcggccgaggtggcgccgacgcggcgcctacgtggctgccacgcgggctggcgagaggaagacgaatgggagcaatggccatggcaatggcggcaatggcgcggtggagcgagggcgaatgggagaggaaaggaaagggggggaaacttgggtttatatgggcgacaatgtcggtttgggagaggggaaccgactttggacggtcaagccagcgagctggcgctccggctagcggccaaatcggcgacagggaggaggggaatgacgccggcggaggaagagaaagaaagaaaaaggaaggaagaaatggggcttgcctccttgccgctttggggaaaaggaggaggaagagagggcgacgcggcagagggaggaggagctctgcctccgtcccttggaggcacgcgcggggagaggcggggccgagtcgatgacgacggcgatgacggcggggcggtttggagtggagcggcgacacgggcagcagacgctgggcaggcgcggcaggcgctgacggcggcggcgactggccggtcggccaccacggcgcgcgcgcgcgggcggcgcggcgatttgggcggcatcggcgggaacagccgcgagagtggagagggagagctcgacgcggctcacgggcagagcggggagagagagagagaaagagagagagagagccggggagggagggggagatgggccgagaggagttcggcccatcgaactcgagggaggctaaatagacttttgcggagggatttgatttgggaaggatttggattcgggattgaactcggcaatagatcggggatttga

SEQ ID NO: 54906 - DNA, 1585 bp, Oryza sativa
  Clone ID: PAT_MRT4530_56966C.1
atgggccggccggcccaagaaggcgtcccaaagcgccgcgcgggcggggaggagagagagagagagccggtgggccgggtccatcccgcgtggtcccgggtgggacccgcttgtcggcgactcagctcaccgtgagcgaggtgcacgcggggcgtgctagggtttggggagggaggcgcggcgcatgcgcgcagttcgcggaggacgcggtgcggcggcccacgcgcagcctcacggctcaccgcggaccatgcgcacggggggggggggggaacggagggagcggctggccgggtcagccgatctggtcgcggccgaggtggcgccgacgtggcgcctacgtggttgccacgcgggccggctggaggaagacgaaggcgtcggccggaacggacggcggacggcggcggcaagcggcggagcgaaccacgacgatacaggcgaaagcaagcacaccgggaggttgcacgggacgaggggagacgagtcaatggctcggatttgccggggaatgctcgacggcggtggattgcggcggcggcaaccggcggcgagagaagggggaaacggcaagggcgcaacgggagaccgattcgggcgagctagagcatctatgcgactccggggatccgttgctagcgtcggattgggcggagctatgccgagcgaggccggcgacgagcgggtgctacggagcacgggcggcgacggcggcgagcacacaacgagcggcggcaacggtcgggagggcgcgcccggagtccccttccgcttcctaacgcgcgccggctccttcggcacacgtgacggcggcggtcggcgatcggcgagacagaggggacggcaatggcgtggtggagcgagggcgaatgggagaggaaaggaaagggggggaaagcttgggtttatatgggcgacaatgtcggtttgggagaggggaaccgactttggacggtcaagccagcgagttggcgctccggctagcagccaaatcggcgacagggaggaggagaatgacgccggcggaggaagaaaaaggaaaaggaaggaagaaaggggacttgccccttgccactttgggaaaaggaggaggggatgggggcgacgcggcagagggaggaggagctctgcctccgtcccttggaggctagcgcgcggagtggcgggggccgggtcgatgatgacggcgatgacggcggggcggtttggagcggagcgacaacacgggcggcaggcgcgggcaggcgcggcaggcgttggcggcggcggcgactggccggtcggccaccacgataggtcgttaggtacttgcatgatggtgagggttttgggggcggcttcggatgcaagggattgggttacttctagcacggttggtgttactacagctattaggctaccttaccgttaccgcacccaactactacggtcggtaactggcggtcgaccgtcgctgggatatgatgcatctggatctggacggcagcaggttgtgtaccggcaaagtgccaaaccattaaagtttgcaccattaattgggggcaacacagctcacaacctaaccatatgccacgagccggtgtaa

SEQ ID NO: 54907 - DNA, 495 bp, Oryza sativa
  Clone ID: PAT_MRT4530_56967C.1
atggcgatgatgatggagatcaccggcctcctcctcctcaaccggcgtgcgtcgtcgagcctctcttgctgtcgcgccctccttgcagcaccaaacaggagcattaggacggcctccacagcgtcgtcggacgagggaggagatggcggcgggggagaggctggaggggaggtcggaggtggatacagtgaatctccagtcaccggagtagcgggagagggtcctcacctcggtgcccatgaagtagcgggattgagaggaggcgcacagcggtggccctcttcactgctggtctcccatcttgtcgccggcgatgaagccgaggcactccttgccggctgcgacggcgagcctccttcccgtggcggcggtaggcatgggaggaggaaggaggggcgtggcagcaataggcggaggaagggagggcacgggcagggatgtgcggatggtggagagatagaagggaaaaagatggtggggcccacagatagctag

SEQ ID NO: 54908 - DNA, 285 bp, Oryza sativa
  Clone ID: PAT_MRT4530_56968C.1
agcagtacaaatgctactactactgccctgagtcaggagagctgatgggtaagatatgcaagcacagtgtatcagaacagcgagggtcatgaatatcactacatcactcgaatagcgacaccatctatgctgcagttgcagattatgaactggacatgggcaacgtatatacacgatggctacttcatgtcaaagctcacagtaggccactgatcatcagtgagtgacagtctatcataggatattgatttgtgcggacatgcagctcctgcgcagaaacaccct

SEQ ID NO: 54909 - DNA, 984 bp, Oryza sativa
  Clone ID: PAT_MRT4530_56969C.1
atggatacgaaatctagtggcggcaaatgcagcaacaacacacaacaacaacaacaacaacaacaagaagcggccatgcaggcaagagttggtgttgtgacgtgcgtggccgtgctgaatgtgttctatccaccctccggccccaccgcacgcctaagattgttccaagtctcggtggccccgacccttctaggaggaaaaaggccgtcgctgacgtcatcaaagaggtcggcgccgacaggagggccccatgagtcagcggcgcaagaggagcggcccacggtggactcggtccaccgtggcacaggcgcgggcgcaccacgtggacggccatgtggcggccacggtggacaggcggcaaaggcaggcgggagccggctcgccgaccggccggccgggaagcggcggcgtgcggcccgatggtcaccggcggcttccaccggcacggcggcatgtgcgagagagcggcgggaaaggggagggggagtagcacacggcggaaggaggtggccgtcggcgagatggcaacgggaggcggcgacggcggagctcggggcggacgaagacgacgatgctccggtgacgggcggcgctcgggaagaggcggacgagcagcagctgcatcctaggatgggaggggaggtgttagggaggacggggcggcgacatggcctgccggagcggaaaggaagggaggaagggctcaccggcacacgggaaaacggacgtccagtgagtttccggcgatgggaagaggtggccgaggttctcctcgtccttgtggagcagagggaggtgacggcgtgggtcggcatggaccgaagcggcgttgcgacgcggctggaggtggcaatggcgacggagagaggtggtgcacgtggcggcggcgttccggaggtggaatgggaaaatggagtaggggtcagggtggagatcgacacggcgatgccgatggtggtgtcgacgcggcttggtggtggctag

SEQ ID NO: 54910 - DNA, 257 bp, Oryza sativa
  Clone ID: PAT_MRT4530_5696C.1
tcggtctcgatcgtgggcacgaaaggctattccccgggggtctttgtaacagtgtgacggttatccaacaacatatcgatgaaaatgatgaaattggttaccattaaggactactttttgctttggcgttgactcgttttgataggacacacctgtgtccagaagaggattaagaaaccaccttaccgtcaccacatgggaggatgtcctcaacaccaagggacgattccgctgatgctattactacctacatattt

SEQ ID NO: 54911 - DNA, 1107 bp, Oryza sativa
  Clone ID: PAT_MRT4530_56970C.1
atggggtgcatgctcccctcgccgcagcgcgcgtgcccgggcgccccgccgccgtcgctgccgccggcggaggacctcctcttcgagatcctcctccgcctcccgcccgaccccgactgcctccaccgcgccgcgctcgtctgcaggcgctggggccgcctcatccacggcccggccttcctcccccgcttacgcgcattccaccgaacacctcccgtgctcggcttctaccacaactcccgctccctcggcccctccttcgtcgccctcgccgcgcccgcggggccctcgctcgtgttcggcgacggcgactggagcctcctgggatgccgccacggccgcgtgctcctccgcagcgggcccggctggctccagctcctcgtctgggaccccgtcactggccaccgcagctccgtccgcctcggccgcctcgcgggccacgtccgggcctgcaacgccgcggttcttggcgaccaggacacccgccgacacggctccttccgcgtcgccttcgtgttcaccggcgagggccgcgcgtccgcctgcctctattcgtcggagaccgccgcgtggggcaggctgatcaccgcggggacagcgcgctgcggcgacgtgggcaagaagcccagcgcgctcgccggggacgcgctctactgggcgctcgacgacggccgacggcgacatcctcgagctcgacatgggcaaggagaccctcgccgtggtcgagccgccgccgcccgacgctctggctctctgtgggcgcgggaggctggcggcgccgatggcgtcgcaagcaccagcagctgggtgcttctcaagagcattgacctcgacgtgttcgctccaatgccattgccatgcgcaggtgggcgggtgattctggtgccgcctgtccggctgctcggggttgacgaaggtggcatctctgcgttcatatggacaattgaggggatcttcatgctccatcttgaagatgagatgctgatgaagaaggtggctgcttccagagtggtggactttgtttatccctattcaagcgtctatgttgcaggtggaggtggtgaaggtgaagatgctggtgcagttcatggaagtggacggctgtag

SEQ ID NO: 54912 - DNA, 2064 bp, Oryza sativa
  Clone ID: PAT_MRT4530_56971C.1
atggccattttgaccgttctaccgctggtcttggtgatgctgctgcttccgttggctgcaattgcatccggcgacccaccatggcagcactactgcggaagcagcggcaactacacggccgggagcaaataccaggccaacctgcaggccctcgccgcgaccctcccgtcgaccgcgtcgtcttcctcccccgcactcttcgccaaggacgccgccggcggcggcgacgccgagcccgacagggtgttcgccctgaccctctgcagaggcgacaccgcctccgccaacgcctcgtcgtcgtcgtgcgccgactgcgcctcccgcgccttccgcgacgcgcagagcgtgtgcccctacagcaaggaggtggccgtctactacgacccctgcctcctctacttctccggcgacgacttcctctcctctccggccaacccggcccaggtgaggctctacgacgtcgatcgctccacccggcgtggcggcggcggcgccgacttcgtcaccctcgtgagggcgctcctgagctacacgatgcagtgggccgtgccgtacaattccacgggcggcggggccgccgccgtgaggtggtacaccacggtgcggatggacgtcgtcacgccgccgctgttctcgctgatgcagtgcacgccggacatgtccggcggcgactgccggcagtgcctgcaggacctcgtcggcaacaccaccttcaacggctcggtctccggcgtgcgcaacatcggcgcccgttgcggttacaggtacgacacgtacaagttctacggcggggagcccaagctgaagatcgggtcactgtcggagatcaactcaacggcgccatcgagcccaccgccgcctccgccggtgacggagacacgttccgggagaaagaaggtgttgacagttgctttgcttgtgccactgatagcactttgccctgtcgtcatattctgttttgcatggataaggagattaagaaaccacaaatcaatgttgcgaaaaaaggatacaatggccagagaagaagtattaaagctttggagactagaagaaagcgattcagagtttatgctatttgatttctctcagatagaagatgctactagcaacttctcggaagataagaaacttggagaaggaggttttggctccgtatacaagggccaattgcccaatgggcttgaggtagcagttaagcgacttgctgcacattcaagtcaaggcctggttgagttcaaaaatgaaattcaacttattgcaaagctacaacataccaatttagtaaaccttcgaggatgttgcattcaaggagaagagaacttactaatatatgaatacatgccaaacaagagtttagacttcttcatctttgatctgaaaagagcagcattgctcaactggaaaacacgcctgaacataatagaaggaataacacaagggcttttgtatctccacaaacactcccggttatgcatcatacatagagacttaaaagcaagcaatattctactagaccgtgacatgaatcctaaaatctctgactttgggttagctaagatatttgactcaaatgatgtccaaagaaatacaaaaagggtggtgggcacttatgggtatatggctcctgagtatgcatctgagggttgcttctcgctgaaatcggatgtctttagctttggagttctggttcttgagattattagtgggaaaagaaacgctgggtttcaccaatatggggacttcttcaacctccttggctatgcatggcagctatggaaggatggaagttggcatgaacttgtagatccatcattagtaagtgaaggtcaaatgatggaaataaagaaatgtatgaaagttgcacttttatgtgttcaagagaatgcggttgatcgtcccaccatgtccgcagttgttaagatgctttcaagcgagttgaaaattctacctgagcccaaacaaccagcattctttaatgtaagggtgaaacatggagagctgtctaatactgcacctagtagcataaacgatgtaaccataacaattgtgaacggcaggtaa

SEQ ID NO: 54913 - DNA, 1408 bp, Oryza sativa
  Clone ID: PAT_MRT4530_56972C.1
gatacgcgtgagaagccgcatatggagaaggggggcgccgagtcgtcgatcgcctgcgctcgctgcggcaagccggcgtcgcttcaatgccccaagtgcgcgcagctgaagcttctgcgggagggcgctgctttctgcacacaggattgcttcaaggaagcatggagctctcataagtctgtccacataaagctagatgcattgacactacaacagactccagagggttggcaatattgtttgaaaaaagggcggacacgcacatcgcagcttcctcgttttgattggacaggtccattgagaccatatccaatatcaaagatgtgtgtggtaccagataaaattgagaagcctgattgggcgcttgatggaacccccaagattgaaccagatagcgatttgcagaaaagagtagagatcaagacccctgagcaaattgaaaggatgagagaaacatgccgaatcgcaagagaagttttagatgcagctgctcgcataatcaaaccaggaattacaacagatgaaattgatagagtggttcatgaggagacagttgctagaggcttaaaggaatatgatatgctcacattgttgtctgctggaattccaggaaacttgaagatggtgacattgtaaatgtcgacgtaactgtgtattacaaaggagttcatggtgatttgaacgagacatattttgttggaaatgttgatgaagcttccaagcagcttgtccgttgtacctatgagtgcttggataaagctattgcaatagtgaaacctggagttcggtttcgagaggttggggagataataaatagacatgcatctatgtcaggtttatctgtggttaagtcttactgtggtcatggcataggagaattgttccactgtgccccaaatattcctcattacacaggagtttggcatgaccgtctatggcctgatgagtggacagcagtgactgcagatggtaaacggagtgctcaatttgagcacacccttttggtgacagaaacaggagttgaagttttgacagcgcgattaccgtcatcacctgatgtctttccatggttgaagccgtgacgccattgctccaggcattatgcacaaactagcaagtgatacgaatacaatgtggtcaatgggacaacacaatttttcaatttactctttttatcattcagttgcccaactctccgaagcagatattgtcccagtgataatacctgttagttctgacgacttgctgcaaccactgttcacctagcaagttgtttctggctgtgttaagtattttgattgatttgttcgagtgacatgaatcataatttgaactggaaatgggatttatccaagaacaaaattgtcgaaaaaaaaaaaaaagactagttctctctctctctctctcc

SEQ ID NO: 54914 - DNA, 498 bp, Oryza sativa
  Clone ID: PAT_MRT4530_56973C.1
gggacccaacaaaaaaggaaaagggccattactttaaccaatctggttttttttttttggcaggcacacaggccgggttttaaaaaaaaaaaaccagttaaaattaaaccatataacggaaaaaaaggggggcccttaaggggaaaaaaacccccaaaaagggggaataacccaaaaaaaataatgggtccaaaaaagagggggccaacgggaggggaaaaaaaagggggggagggggggcataaccttggggcaaccccggccaaaaaaggggggaaaaccaggcggggggaacctccccgtttcccccgggctgttgggaactgggtgggggggggggccctggctgatcttgacttaggggggggggcaaacggggggccaaagggggaaaaaaaccaggcccgaggccaaaataatgggggccataaaaggaaaaacctaaggccaaacccaacccccaagggttcggcaggcagtaaagaaaaaaggcaaaat

SEQ ID NO: 54915 - DNA, 1659 bp, Oryza sativa
  Clone ID: PAT_MRT4530_56974C.1
tttttttttttttttttttttttttggagacggaccatttcatctttggagatgatccttactttttcctaaacaagtttggaagcgctatattgtagctatccagcacaatctataaaagagtacatatttggagacattgttaggcgaaaaagaacacctccagatgctacattatattctcacactaacactccaagctgactaagtgaagtagaagggcacttctggataccattactggctgttaacatcttctaaaaagatctgggcacaactctaagtctctaaattacttcctttctacacagatcatacagtacaaaaacaaggaaatcattcttcagtatctcatctgaagcaggccagcttaacctcattcatcgtcagtttcgaaggattcattccagcagctttcatctgatacaccaccctggtggcctctctgtacattccaccgcgagcatatgccatggccatggcgttccagcacactgcgtcgggtttgccatcaatagcctcaaatgccctggctgcatctgcaagctgcccttccttcgcgtacatatgaagcaaccctgacccgacgaactggttcatgtccaggccacgcttgatggcatcagcatgcacctgctggccatagcatcctttgttcttcgcctctgcacagaccgcaaggatgcttgacagagagaagctgctcctggcaatgcccgaggaagccatgcccctgaagacatcaatggcatcgtcaagaatgccgtcacgatggtatgcggtgatcaagctggtccaggccgcctcaggaactggttcttggcatgagaacctcatcatctcaagcacatgccgtgcgctgctgagctgcccactgtcgcagtacagctgtaatagcgagctaccaacatcgccacagactccatttttcttgacaacaaaagcatgtacctgctcaccgaactgaagctcgttcacccgagcacacgaacgcagcaccgccacaatggcatgggtgtagtgatcaccggtgatcccccgcacttggtgacacatctgcacgaatagctgtaacgcgtcatgatggaagcaaccatcggagtaggccgagaccatggtcgcccaggtgatgccattcttgactggcatttcatcgaacacctggcgcgcagccccgatgtccccgcacgccgcgtatgcaagcaccagccggttggcgaggggcaaagggaggccagagacggcgaattttccggcgatgtgcgcgtggacggaggcgacctcggcggcgtcggcgcagtctctgaggagggagacgtagacgtcctcgtcgggcgggaggcggagcgcgtccagcaggcggagcacgtcgccggcgccggacgagcacagagaagccgtcgcgcccgtcgccggcttcctccttatgtccccatcgtcgtcgctggaggtggtgggtacggggagactgggacgcgggtgcaggggcggcggcggtggtggtttggtgggtttccgcagggccggcagcggcagcgctcccctggcggtggtggcgttagcggcgagaagacggcggcggcggcggcggggagagaggcgcggagcagccgcggtggcggtggcggcgaacggcttggcgacggagaaacgcgccat

SEQ ID NO: 54916 - DNA, 353 bp, Oryza sativa
  Clone ID: PAT_MRT4530_56975C.1
atggaacaccatcaggtgttcagcacacagcttgtccgtcgaagccaagttaccagaagctctgtacgcttgtaggtgtctgttctcggagaagatatagagttgtttcgggaataagcccgtccgtcctggacaaatatgagcttcccaggaggtttgtttcgtgtttgtgaatagctttgacatatgtgttggttgttctttcatcggacatatatgaaatgaatgagtacctctcgataccgggctggaccgggtagtggtgagtgtctgcctccggtgtaccggcctgtaccatttgggagacgtttaccataatagccacctggatatttattaaaaaaaaaaaaaaa

SEQ ID NO: 54917 - DNA, 1791 bp, Oryza sativa
  Clone ID: PAT_MRT4530_56976C.1
atggaaaccctcacgaacgaggccggtgaagtcaccaggtactcgaagagggaggatgccaccaaagaactaacagaagcagtagaggaaggagataaagacgcaattgaaaaattcagcaagagaactgtgaaggtcacgaagcagcacaatgaagaatgtaaacgactattaagacttatgggggttcctgttgtagaggtttatgcagttgcatcagaagatatggactctcttacttttggagctccacggtttcttcgtcatttgatggatccaagttccaagaaaattccagttatggaatttgaagtcgcgaaagttttggaggagcttgaactcactatggaccaattcattgacttgtgcatcctatctggatgtgactattgtgatagcattaaaggtattggaggtcaaacagctctgaaacttattcgtcaacatgggtccatagaaagcattctggaaaacataaataaagacagatatcagattcctgaggactggccttatcaagaagctcgacgcttgttcaaggaacccaatgttacattggatattcctgagctgaaatggaatgctcccgatgaggaagccatagagaagattaaatttgccaagaacaaatcttcccaaggaagcgatctcccggacgatgtgctccgcgaaatcttgcgccgcgtcaactcccgcgccgcgctgggcaagcgctgggccggcctcgcgcgcgagctgcccagcctcgatctgagggtcgccgacatcctgccgcgcgactactacctagagcttcgccggcgcgacgaggccaagaggtcgttctgggtgtacgactacggcaagaagtacgacgccgtcatcagacggtacgagcgccgcgccatgcgcgccatggccgcctgcatgaaggagctctcgccgtcgacgccgcgccggagcgtccacaggctcgcggtggagttcatcgacaccaacagctcgaaccacatcaaccgcctgatcaccacggccgtcgacgcgtggggcgtcgagcacctcgacgtcgcccgcgttctcctgacgtcttcgtcgtcggcgcagttggattacccggcctacaggttccccgacggccggatcatcgaccacccccacggctcccggcttaggacgcttgaactaccaaaatgccggcctcgggatctccgaggctttaaccccctaaccaccctgggtcttggcggggccgccattaacgtgacggatctcgcgctgcgtctcacggggcctcagatgtgggtcgtcccggagagccctttcctggagatgcccagcctgaggaggctgctggtcgccgacgtgccgccgcgctgggacgcgacgtggatccgcgccgtcgtcgaggcggcggcgccgtcgcttgagcgcctccacgtccacttctcccaacactatcgccaagacgacgacgacccggcggcggatcgtcggagattggagatagtgtgggagaatgagccgtcaagaacacagcattgtgacaatctggaggagcttgtggtcattggtttccagagcaagaaagagaggcaggttcagtttgtgaggtacgtcatggaggaagcatccatggcgttgcgccgtgttgtgctgatcaagcatggacacgtcgaggatagaggcccaggtgaatgggagatggtgagccagaaatgtacttggagcgatgaggagaagctcgccgtgaaggagcagatcatggagggggtttgctgttcgatggaccaagttgaattggtcctagaataa

SEQ ID NO: 54918 - DNA, 755 bp, Oryza sativa
  Clone ID: PAT_MRT4530_56977C.1
cccacgcgtccgtagcccgcgacctctctctctgtgtctccgccgccgccgcctccgccgctcgccgcatccgtcggaggcgagatgggcatcaagattgtagttggaaggacggggatggaaaccctcacgaacgaggccggtgaagtcaccagtcatttgcaaggtatgttcaaccggacaataaggttgctggaggcaggaatcaagccagtatatgtttttgacggcaagcctcctgatctgaagaaacaagagctcgcaaaaaggtactcgaagagggaggatgccaccaaagaactaacagaggcagtagaggaaggagataaagacgcaattgaaaaattcagcaagagaactgtgaaggtcacgaagcagcacaatgaagaatgtaaacgactattaagacttatgggggttcctgttgtagaggcgccatgtgaagcagaagcagaatgtgctgcactttgcataaatgatatggtttatgcagttgcatcagaagatatggactctcttacttttggagctccacggtttcttcgtcatttgatggatccaagttccaagaaaattccagttatggaatttgaagtcgcgaaagttttggaggagcttgaactcactatggaccaattcattgacttgtgcatcctatctggatgtgactatggtgatagcattaaaggtattggaggtcaaacagctctgaaacttattcgtcaacatgggtccatagaaagcattctggaaaa

SEQ ID NO: 54919 - DNA, 2425 bp, Oryza sativa
  Clone ID: PAT_MRT4530_56978C.1
gccgggcggagcggcgccacgcccgcgacctctctctctgtgtctccgccgccgccgcctccgccgctcgccgcatccgtcggaggcgagatgggcatcaagggtttgacgaagcttttggcggacaatgcgcccaaggcgatgaaggagcagaagttcgagagctacttcggccggcgcattgccgtcgacgccagcatgagcatctaccagttcctcattgtagttggaaggacggggatggaaaccctcacgaacgaggccggtgaagtcaccagtcatttgcaaggtatgttcaaccggacaataaggttgctggaggcaggaatcaagccagtatatgtttttgacggcaagcctcctgatctgaagaaacaagagctcgcaaaaaggtactcgaagagggaggatgccaccaaagaactaacagaggcagtagaggaaggagataaagacgcaattgaaaaattcagcaagagaactgtgaaggtcacgaagcagcacaatgaagaatgtaaacgactattaagacttatgggggttcctgttgtagaggcgccatgtgaagcagaagcagaatgtgctgcactttgcataaatgatatggtttatgcagttgcatcagaagatatggactctcttacttttggagctccacggtttcttcgtcatttgatggatccaagttccaagaatccagtatggaaagtcgcaattccagttatggaatttgaagtcgcgaaagttttggaggagcttgaactcactatggaccaattcattgacttgtgcatcctatctggatgtgactattgtgatagcattaaaggtattggaggtcaaacagctctgaaacttattcgtcaacatgggtccatagaaagcattctggaaaacataaataaagacagatatcagattcctgaggactggccttatcaagaagctcgacgcttgttcaaggaacccaatgttacattggatattcctgagctgaaatggaatgctcccgatgaggaagccatagagaagattaaatttgccaagaacaaatcttcccaaggaagcgatctcccggacgatgtgctccgcgaaatcttgcgccgcgtcaactcccgcgccgcgctgggcaagcgctgggccggcctcgcgcgcgagctgcccagcctcgatctgagggtcgccgacatcctgccgcgcgactactacctagagcttcgccggcgcgacgaggccaagaggtcgttctgggtgtacgactacggcaagaagtacgacgccgtcatcagacggtacgagcgccgcgccatgcgcgccatggccgcctgcatgaaggagctctcgccgtcgacgccgcgccggagcgtccacaggctcgcggtggagttcatcgacaccaacagctcgaaccacatcaaccgcctgatcaccacggccgtcgacgcgtggggcgtcgagcacctcgacgtcgccgccgttctcctgacgtcgtcgtcgtcggcgcagctggatcacccggcctacaggttccccgacggccgcatcagcgacgacccccacggctcccggctaaggacgctcgagctcaccagatgccggcctccggatctccgaggcttcgacgcgctcaccacgctggtcctgcgcggcttgccccgcacgacgcgggcggccgtctacgagcgcgccgtggcgagctgcccgtcgctccgagccctccacctcgtctcctgccgatgccgctactccaaggtcgtgatcgacgcgccattgccggacctccgggagctcgtcgtcgtcggcggcggcgacatgagcgagaggatcaagcgcgacgccgcgctgtccgcgctcggctacctctgcagggccgccattaacgtgacggatctcgcgctgcgtctcacggggcctcagatgtgggtcgtcccggagagccctttcctggagatgcccagcctgaggaggctgctggtcgccgacgtgccgccgcgctgggacgcgacgtggatccgcgccgtcgtcgaggcggcggcgccgtcgcttgagcgcctccacgtccacttctcccaacactatcgccaagacgacgacgacccggcggcggatcgtcggagattggagatagtgtgggagaatgagccgtcaagaacacagcattgtgacaatctggaggagcttgtggtcattggtttccagagcaagaaagagaggcaggttcagtttgtgaggtacgtcatggaggaagcatccatggcgttgcgccgtgttgtgctgatcaagcatggacacgtcgaggatagaggcccaggtgaatgggagatggtgagccagaaatgtacttggagcgatgaggagaagctcgccgtgaaggagcagatcatggagggggtttgctgttcgatggaccaagttgaattggtcc

SEQ ID NO: 54920 - DNA, 470 bp, Oryza sativa
  Clone ID: PAT_MRT4530_56979C.1
tcgcagaaaatcctaggatgggaatgagtgggtgaaattacccccacaaaaaccaactctgcaactctttaccttttttagtttgcctttgttctttgcggtgtttcgttttcacatccctggaaattttcagagcaaagacaacgtttgttgcaagaggaaagagggtggattggtcaggtttggttgcagcttggattttttcttaagaaacaaaaggcaggattgcagcttaattgatctggagggagaggaaagacaaagatttttgtaattggaaatatatcgccgtgtcagcggaatgcttcttgtggatgtgagtacgggataatttatgttccaaaaggaattaaatggtccataagcaggaaggcaataacagtgaacagatgagcaccactcctgcccctccgggcgaaaccagtagacagattccatctagagatgatgccaaacatgagaaggaagcg

SEQ ID NO: 54921 - DNA, 337 bp, Oryza sativa
  unsure (1)..(337): unsure at all n locations
  Clone ID: PAT_MRT4530_5697C.1
tcctaagttnggaaaagcccgggaaacccctccagcccntgggtccaggctccntgggatgngtaggactgtattatctgaagctatgccatctttgttttttttatgatatgcttcctaggcaacgtattcatcataaaggtttttttttttttaaaaaaaggggggggggggggctagttactgttggatggtaattagtttttatcttcctattgaattttgtgcaactattagtcacatgcttgtgatacattgtatacatcctgttcaagaggcagatcatttgcaaggcgaataaaatgtttttgtgtctagtaaaaaaaaaaaaaaaaaa

SEQ ID NO: 54922 - DNA, 539 bp, Oryza sativa
  Clone ID: PAT_MRT4530_56980C.1
gggggaaaaaaaagggaaaactttggttaggggaatgggggggggtgggccaaaaaaaaaaaaaagaccccagcccacaaattaaagggaagggaaagaaaaaaaattttgtttatggaaaccactatcgttttaaaaaaaacccggggttagaaacaacccccccaaaaaggggggggacccccgtttacccggaccctttttttgggggaagggggaccccaaaaacattttgccgcccaaaacggggggggggctttaaattcgaaagcgggggcttttcgggggcgggggctaaaaaacccaaaaaaaaagggggcccaaggggggcccccaaaaagccgaaggccgcattttggccccattagggtttaagggcaaaaaaaattgccgacggtaaacaggggggtgcaaaaaagccctgggcccaacccctccaaatttttgtctaaaggaaaaaaattggggcataccccaaataaaacttcaaaaattcatccttggaattttaaaccatggacactaagtttttaaaattt

SEQ ID NO: 54923 - DNA, 162 bp, Oryza sativa
  Clone ID: PAT_MRT4530_56981C.1
atgtggccgtgcggggaggtaaccctcgcctgcaacgaggggttgtgtgcggtgcacccattcaaatacgccctaattgatgaaggtggaggcgcggggaaggagcaactacaagtggtcactagcggaggcggccatgtggtcgccggcagagatggctga

SEQ ID NO: 54924 - DNA, 393 bp, Oryza sativa
  Clone ID: PAT_MRT4530_56982C.1
gtcgaatcagagctcatagaggtcttactatgtcttctaagtaagacaagatcgatctcttcgacatggagctcgcctgcctgactgatcaggtagccgatgtggactcttggagcatccgtgatcgtgctgcatacatgctactgatggacgctgtttccaagcactctggccgattgtgccagcactacattgttctgcggtgcgcgcacatcaggggcccactggactacaagacgcaggcctcggatgacatggtgtacacgtgctaccctgaggtcaacacacctgcggtgcacaatcatttgtcacaaggaaatccttctccctcatgctcagaacactgaggactgcgatcatgatgaacgatggtaagtgtgctgaaccaaccat

SEQ ID NO: 54925 - DNA, 246 bp, Oryza sativa
  Clone ID: PAT_MRT4530_56983C.1
gcggaccggccggattccggtcgccacgcgccgcagatgagcacatacatggtacttcacatctgtttttctcttgccggcttgcggcggcaacgggacgggaaaccacttccgtttcccaaggacgggccaaagaatacgacacgccccgcaaacatggactgtgcgacacatgagatcttccggctatgatctaccgcactgtacgtgcacgacaggtgagcagtgcgccgcgctgcaagagtg

SEQ ID NO: 54926 - DNA, 228 bp, Oryza sativa
  Clone ID: PAT_MRT4530_56984C.1
ttcgtcctattgagtcttgctcgctggcacagcttgtggttatcattaaactgggttttggtttgtattaccggaggcatatatattctttctgattattaatttacacgatggctgtcttcttgactatcaaagttgtctactgtatgaacatatatcagaaagaaaaattacatattgttgacatcaaccaattcacagtccatattgtagactacaaaaagggat

SEQ ID NO: 54927 - DNA, 350 bp, Oryza sativa
  Clone ID: PAT_MRT4530_56985C.1
aggagatcagggtgcaggtcgaggacacgatgtacctcgtcatccgcaccgagcttgatgaccgtagagatgccacggaagatgcggctgtcgccgaaggagctccccgaggaaatttcggctgacggcaatggcggacgcctacgggatatcggccgaagacacccaccgcgtgctcagggtaaccgtacccaggctgcatacgcgggctcgccccgtggtcaacctctccaccggcggcgccggtggcgctggaccgtgctgcgacctcaatgaccgagcagactgattagcgattcgatatcgctctggaagcttactaaattacttagttaagctgcactgtgagc

SEQ ID NO: 54928 - DNA, 1209 bp, Oryza sativa
  Clone ID: PAT_MRT4530_56986C.1
atgccgggggcgggagggaagaagaagtcgccgtgggcgtcgggggagaggcggccgcacttcttcaaggtgctcgtcggcgacttcaagcagcgcctgaaaatcccgccaaacttctgcaagcacatcccctgggaggagtcgaggaaggccaagggcctgaaggaggcgtccatggcggccaccctggaggggcccagcggccggacgtggctggtcgtcatccgccggacggccgagggcaccttcttcacctccggctggcccaagttcgtgcaggaccaggcgctgcgcgaactcgagttcgtcgtgttccgctacgacggcaacacgcgcttcaccgcgatggtgttcgacaggacggcgtgcgagcgggaggacctgatgggaggcggcggcggcgaccggccgcgcaagaaacggggtcgccctaggacggccgccgcctcgcgtgatgccgcgcggcccaagaaggattcggttgggaaggagatggtgacgtaccgcgcgtcgcctagtggtggccagccgttgcaaatcgtggactccagttggacaccggaaccaggatcaacggcggtcaagaacgaggaagacgccgacgagctcccagtgtgcgagctccccgcatcgtcggcgtctccgccgaggcacgtgcccgagggggctctggacgccgacggcggcgcggcgaggcgtggcgcggcgaagacgcggagcctccaggacgacctggccctcgccagcatcccgccgtccatccggcgctacaaggggtacgtgtcccgccgccgcgccgtcgccaccgccgagcggcagcgcgccacggagatcgcccacgcgttccggtccccgctcccctactgcgtcatccgcatgagcaccatgcacgtctactactccttcatgatgaggtttccgacggggttctcgaggcagcacctgccgcgggagaggacggacgtggtgctgcgagacccgggggggaaggtgtggtcggtgctgtacatcccgaacacgcgggaccggctgtcgcgcgggtggtgcgcgttcgcgcgcgggaactgcctcgaggaaggcgactactgcgtgttcgagctcgtcgccgcggccgagttccgggtccacatcttccgggtggtcgagccggccgtgccagcggtcaggctccggagagtcaccgtcacctgtggccgcggccccacgtag

SEQ ID NO: 54929 - DNA, 330 bp, Oryza sativa
  Clone ID: PAT_MRT4530_56987C.1
agatcaaagaggactgcacattgtgaccgtgtgtacaagaaacggagaaacacgcttaagtatctgtactttttgatcatgcgcatggcggcatggcgatatatttctaacctttctttgcacgaagcaactagcccggagctaacaaagcatctcaacaaacaaacatggcagggacggcctggctcagcggcgccggctcttggcgctggcgccgccgcgcgggcgcgcctgatgatgcttgtccttgccgaagaggttgcagaagccgcaggcggcgacgcgcggggagggcggcttcaatcccgggtgcacgtgccccttcttgta

SEQ ID NO: 54930 - DNA, 282 bp, Oryza sativa
  Clone ID: PAT_MRT4530_56988C.1
atgccagccaaccctgtgctagatatatcgccggaccaccgcagccatggtcgtcgccgccgagcttggcctgttcgtggagcctccatctcgatcaagccctgcagcctttgccatcttcggcatcccgagcctcactggtgcttccgcaacccgcacatggtgtttgtctcgtactgcgatacaatgcgatctcctggtgttatgtacgtacgcggaagaaggaagaagaggctggatagacagttggggaggaggaagcaccaatccattagggcgtga

SEQ ID NO: 54931 - DNA, 356 bp, Oryza sativa
  Clone ID: PAT_MRT4530_56989C.1
gaggaaaaatttaggaatcaaatgagagattgactcaaaaggaaatttctcaagaagtttgagctcttgctggaagagcattttcaacagcctttccaaatttgactttccaaatggctatttgggcaaatttccatttaatttaggaaggcaaacttttggttactccaacaacattttcatttattatttccattacaagggaatgacaaatggggcccctatttaaaccttaaaaaacctttttccattctggttttttatcccacccatgggcatactacatgtcccttgttcctccagaactacttccccttccccactggggcacctacctcggtggggggacggggcct

SEQ ID NO: 54932 - DNA, 1050 bp, Oryza sativa
  Clone ID: PAT_MRT4530_5698C.1
atggccgccgcggcagcagcaagaatctcctcgacggcgtcgcagctgcggctgtcatggctcatggtgatgctcatgctagtggcgtcgaataataatgctgctgctgctccaccggcagcggcagcggggcagctgcggacggggtactaccgggagacgtgcccgcacgcagaggagatggtgttccgggagacggcgaggatcatccgtgcgtcccccgacctcgccgccgcgctgctccgcctccactaccacgactgcttcgtccagggctgcgacgcctccgtcctcctcgactccacccgcgccaacgccgccgagagggactccgaccccaacaagtccctccgtggcttcgactccgtcgcccgcgtcaaggccaagctcgaggccgcctgccctgccaccgtctcctgcgccgacctcctcgccctcatggcccgcgacgccgtcgtcctcgccaagggcccctactggcacgtcccgctcggccgcagggacggccgctcctccaccgccgccagctgcggcggtcagcttcccccgctctgcggcaacgtctcccgcatggtggactccttcgccgccaagggcctcgacgtcaaggacctcgtcgtgctctccgccgcccacaccctcgggaaggcgcactgcccaaacttcgccgaccgcctctacggccccggcgccgacccgccgctcaagctcgacggcgcgtacgccgacaggctgcggaagcagtgcaaggagggcgccccgccgtacgacgggaacgtgacggcggagatggaccccgggagcttcacgaggttcgacagcagctacttccggcaggtggtgaggaggcgggcgctgctccggtcggacgcctgcctcatggaccaccccttcaccagcgcctacatccgcctcgccgccaccggcaggtacgacggccacttcttccaggatttcgctcactccatggtgaagatgggcgccatcggcgtgctcacgggagaccagggcgagatccgcctcaagtgcaacgtcgtcaactcaacctag

SEQ ID NO: 54933 - DNA, 359 bp, Oryza sativa
  Clone ID: PAT_MRT4530_56990C.1
attctaaacgctctgaaagcactatatttgatatagtcattctgaaagagctgcacaaggcacatgacttggatacgggctcttggacagactccatcccacggttgacatgcgtgcactcatgaatgcagatggccgtacgaactgtgtggctgctggagcatacaagcgtcaaactctccgagtattcacaagccctagctatgagactggcgatgacgattgctgaatctctaagcccaaccttcttggtgctgcccattttctcactgccggccagcgcaggggaacaggatgcctcattgcttttagcatcctaggctggtatgaactgacactgctctatgtcctggatagca

SEQ ID NO: 54934 - DNA, 206 bp, Oryza sativa
  Clone ID: PAT_MRT4530_56991C.1
gagtaaatttaatcttgggctatttttttttacctgtgttgtaacttggaccagtgaaaaagtaaacttttcactttggacgggtatgtttacacaaagtttcaatttagactctcttcttctttctccagctccctttcttcctctctttctttgtacagctcaaggtctctttctcgatcaggtgtagtgcatgaaaggcaaga

SEQ ID NO: 54935 - DNA, 397 bp, Oryza sativa
  Clone ID: PAT_MRT4530_56992C.1
tcctttctcttgtagaagcccgggaggtacacacggtctgacgacgaccgtacaggttgcgccatcgccgaacacaagtacaccggtcgcacaagacttctgccgagccgcgtttgattcttgatagttgcataatcggtgaagaagtggattaggtgctaacaattctctgatcaaggtttagtcttagtctttgagtgatgcagggttcacgattgcttcttctaggatgagaacttaatggggtatacccctagtcggtgtgctttgattgggtagtcaagcttccgctgttctctaataagtctatttgccggtcggccatgtaattattaagttgttgtaagtcttaagtttctttcatcttagttgtgtttgctaaaaaaaaaaaaaaaaa

SEQ ID NO: 54936 - DNA, 2925 bp, Oryza sativa
  Clone ID: PAT_MRT4530_56993C.1
atggagcaggtgcggcggaagagtagcctgaggtcgcatggctcaggcaagtcctcgccgcgggtgggatcgggggtgttcgatgagcggtccggactggcggccgatcgtgacggcggcgaggaaggggaggtggtcgtgaggatcgacggggaggggccttgccgcgagccgttcgcgttccccggccaggatggcggtggggcggggaatgtgagcccgaacaccgactccacggcgagcacgccgcggggggcgagcaggacgtggtccagctggaccaactcgccgcgatccccgcccaaggtgaggcgggacgggagcgttgagttttggaagaatgatggcggcggggacgggggcagcgatgggggtggaggcagaggcggtggcggtggcggtggcggtggccggcgcgcctgcgaggcgttcagcttcaagaaccgggcgccgccgcggccttcgtcgtcgcaggcgtcgtccccttcgctatcgccgcagccggcacacgctgcgggtgcggtagacggcggcgaggatccgcccacgcgtctcatcgggaacttccttcggaaacagaaggcgtccggcgccgagctgtcgctggacctcgacatggaggagctcgggaggccgtcgcaactgcatgcgcagccatccttctcaaactccctggaacgcgaggcgcgagtctccttccaaccgaaaaggcgtgtcgcctcgtcctctgactccgactccgacaccggaggtagccgtaggcgcggcggcgacgacggcgaggttgttcgctgcacgtccagttccactgcagcgggacacttgatgcgagccaaaacgcgatcccggctgatggacccgccgccgcagccccagccggcgtccgcggtccctcccgtcggcgacgaggagaggagatcctctgtcttgcggacgcctacgaagtccggccagttcatctcgggcctcatgaccggcaagtccgggcaaatcgccaagtcgggcccgttggaagaggaggaggaggacccattcatggacgaggacatccccgacgaattcaagcgcgggaagctggacgccatcactatccttcagtggctcagcttggtgctcatcatcgcggcattggcgtgcagtctcaccatcaaggccctgtccgggaagaaggtctgggggctgcacctctggaagtgggagctcctcgtgttcgtgctcatctgcggccgccttgtctccggctgggtcatccggatcgccgtgttctgcgtcgagcgcaacttcttgctgcgcaagcgcgtgctctacttcgtgtacggcgtgcgcagcgccgtgcagaacgcgctctggctcggcctggtactctcctcttggcacttcatgttcgacaagaacgtccagcgggagacgaactcgcctgtgctgccctacgtgcagaagatactgttctgcttcctcgtcgccacgctcatccgcctcgtcaagacgctgctgctcaaggtgctggcatcctccttccatgtcaacacatactttgaccggattcaggaggcattgttcaaccagtttgtcatcgagacgctctccgggccgcccctagttgacgaaaaccaattccttgctgagatgcatgagcttcaacgcgcaggagcaaccatcccagctgagctccgttccactgtaccaaccaagaatctttcagggcaaaggagtattcggatgtccggggtgattcctaagggagaagggagcaagcagctgtcaaaagagaaaggagagcaccagattgaggaggggatcaccattgacaagcttcataaactcaaccagaaaaatatctcagcttggaacatgaaaaggttgatgaggattgttcggtttgggacgctcacgacaatggatgagcagatacagcaggcaacgggtgagggggatgagtcagcgacacagattcgtagtgaatatgaagccaagattgctgccaagaagatctttcacaatgtggcgaagcctggctccaagtatatatacttgtcagatttgctgcgtttcatgaggcaggaagaagccatcaaaacaatggatcttttcgaaggagcacaggagcacagcagggttagcaagagatctctaaagaactgggtggtgaatgcatttagagagcgcaaagcccttgccctaacacttaatgatacaaagactgcagtgaacaagctcaaccagatggttaatgttgttgttgggataattgtgtttgccctctggctacttattctgggtatagcaacaacacatttctttgtcttcctcagttcacaagttcttgtggcagtttttgtatttgggaatactttgaagacaatttttgaggcaattgtgttcttgttcgtgatgcatccttatgatgttggtgatcgctgcgaaatagaagattgtcaggtggttgttgaggaaatgaatataatgacaacagtgtttctccgatatgataacctgaagatctattatccaaacagtgtacttgccacaaaaccgattatgaattactacaggagtcctgatatgggagaaggaattgacttctccgttcatgttgccaccccagtggagaaattagcccttatgaaggaaagattattacgttacatcgacaacaagaaggaccattggtatcctggtgcaatgattgtcctccgtgatgtggatgacaccaacaagctgaaagtgtccatatggctccggcacacactcaactggcaggacatggggatgaggttcgtaaggagggagctggtgctccaagagatgatcaaagttctcaaggacctcgacatagaatacaggatgctgccactcgacgtgaacgtgcgaaacgcgccccctatccagtccacgaggatgccaacgacatggaactattcctga

SEQ ID NO: 54937 - DNA, 887 bp, Oryza sativa
  unsure (1)..(887): unsure at all n locations
  Clone ID: PAT_MRT4530_56994C.1
cgggctgcaggaatcggcacgaggcatgtgggtcgggctcgcctgctccggccgaggcgcttctggagttataaatcactggtggcattttgcagtagcagcaatctgaatgaatattgcaaatccaagacttgatgaccacttttgctgatcagacaagaagaacggccaagaaacattgtttggactacgccccatggcagattggcagatggagaatttacgcatatgcgggtcctgcaatttctgcataaattataatgatgcctgagctgtgtggctgcagatgctcccagctgcaatctctttanttaattacctaaatgacctgtgctttcagatgtaccagacacctcctccaacactgaagtagagctatcagctcatcgcccctcttttaccaccggttctgttcgcgtcggcttggggggcggtccccctccgcggtggcacaggtgctgggagatacagcatagtcatctgagcaactccggctctttgccggtttgcgcccgtcaagatcttcgaggacgacatgcatcttgccatctctgtttgcttcacatcttccacatgttcagcatggatggtcactgggctccatggcctgagcttgtcaagttacacagaaagtatgggattttgttgttcatcgatgatgttagtgtttttatctcccctgaaatacatttttttcctgggctattggtaatcaagttatgttgcaattttccttttcaaggcacacagaaaacttgtttgtggtaacgatggtggtggtttttaacacttttcagcacggcttcattctcactacaaatagaaaaatggcttgatgtcgagtaagagttgataatagattacttttctagaccctttgaactaat

SEQ ID NO: 54938 - DNA, 136 bp, Oryza sativa
  Clone ID: PAT_MRT4530_56995C.1
cccacgcgtccggcgccccacccgaagtccgtctcgtacgccatgtaccggtgcgacgacctctacctcgtgaacgacctcaccggcggggtcgtaggcttgcactggtcgagcacacttcttctagtggtccaac

SEQ ID NO: 54939 - DNA, 1658 bp, Oryza sativa
  Clone ID: PAT_MRT4530_56996C.1
ttagccaagaggctcggcggccttcacaccaaagagactaggtctggtcatcctcaacggtttgacggtaggggtgagcatcctcgggtgttgggcgtcgaaacgggcgtaggggatctctgtggtggcaatgggctgtgggcgtaagcatcgatcaggtgctccaaacactagaccctcttgtggaagccgggacataattggggaacgatgcaaattctttatgttttgtgtgatgaagagcgcttgccttactgccgacaaccttcaacgcaggggctggcatcttgccccaatttgccacctctgctcaaacggcggcgagtcatgccaccacatctttagtagctgctccttcactcaggaggtctggggccttgtcagaggtcgccttggtcaccttcaaacaacaccgtctgttgatctctcctggtggtgtgatgctcgatacaacatggacacgatgtcagataatacaagccacaacattttgtcccaggtcaatggaagttctcaaatagtcataacagacagcaaggtccaaaaacttgggagttcagcaaactatgtgaaatattataagggtactgttaagtttggtaaaggacttagaatacaaaccaaagcatctgtgcttgcatttacctcatgtgatggagaagctgcagatgccttgtatgtgcgacttgttgcagttaatagcccattcacagtcaaaccattgtcatatggcagaggtattcgaaggtacagggaatacaccttcttagctgttccaccgccaagttgtttgctgtctaactacactgatggattcaatgataaaactgtcagtatgaagagattcactgaagaattcatcaagataactggggatattgttcgagcaattatcacccttcattgccaaggttactggtgttctggtttgaaagggaaacacatatgcatctacaaaatggagaagtgtactgatgcaaagatttggagtttttgctttgcagggggaaatgaggcaaaaaagtctgaagattgggtagaccttggcaaattgcttgagcttgcagcgaaaagaaatgattcgtacactgctgagattgaagatctgtgtaagaagttaaagaacaaaactctgagagggatgaaagttcttaaacacagtgcattgttgaatgtacgagaaaaatttgagaacataattgccctcaatttattcatcttggtacatgtaaaaagtcaaccacaggttccatctggagatcctgaaaaggacaagatcattagcgaactggtgaaattcatgaatgctagtttacaatgggcgaaggctatgcctcactggataactcaaagttctaattatcaagcaccaaccacagaaactggtttatctttcattgatggactaagagacctatttgagcatgaaaacgagtatattccagaaaaggttaaacaatcccaatcgaaaatccaattagttggtcgggatccagatctggaatgtcagcttcgtttaaatttggaaaagatttttctccaagctcaaaattttgttcttgaactggatattgaatattgagagcgcattgcagtgcaaggaggctaagcagtcacggttatggcgagcttgatgttttggctagggactaatgcaa

SEQ ID NO: 54940 - DNA, 6891 bp, Oryza sativa
  Clone ID: PAT_MRT4530_56997C.1
atggaggagcggcgcgcgacgtcgccgtcgcggcacagcttttgtcgcgacgcccttggccgccgcgggggggaatctgggggcggcctcgtatatatataccgtagcccgctgaggtcaccgctccaacgccacggcctcaaccgggagtggagactggagaggtggaggtggaggtggaggtgggaagctgccacttggcgccagcgcgccgctgcccacgctcggatcggaggaccaagtggcttatcagcagcctatgcactagctaagctaggttaccgcaatgtaactttgtttgagaaatgccatactgtttcagggatgtgtgagtccattgacattgaagaggaactagggtctgatttcgaagagatggatacacacaaactctccctgattgacagccaaacaggaaatattcgagatcttgaagtagctgaggactatgtatccatggtatctctgacgctaaaattacaggatgaagcaaataagtcaggccgagctggacttcatgctctcagtggattggcatccgacccgacccatgaatttttgaagcaaaatggaataaattcaatgccaaaatctgtagcatatggttacaccgcttcgggctatggttttgttcaagacatgccctatgctttcattcaggagtttactagaacctctatggctggtaaaatccggcgtttcaagcatggttacatgagcatgtgggagagattaagtaaatcattaccatttgaagttttttgtgacacgcaagttctgaatgtcaagcgcaacagttgtggtgcaaatgtaaccatcaagaacaacaatggtgaaaaacaagttttggagttcgacaaaattatactatcaggtgctgttgctttcaagaacagcaaaacatatcgatcctctagtcttactgatggagaaagtgaagtggtggaactaaacaatcttgaaagagaactattcagtaaagtacagactatcgactactatactactgttgttaagatcaatggattcgagcacataccaaagggattttactactttggagaattcatggaggatccaacaacaataggacaccctgtggcaatgcaaagattctttgctgacacaaacattttcttgttttggtcttatggaaattcagcagacatcaagggttcatttgtggctaaatgtgtgactgatgtcgtgagttctatgggaggcaatgttcagaaagtaattttgcaacggcggttcaagtatttccctcatgtcagcagtaaagacatgaaagatggattctatgagaggttggagtcccagttacaaggttttcagaacacttactatgttggaggtttgctagcatttgagcttaccgaaagaaacgcttcgtactccatcatggctgtttgtaagcactttgccattgatggtgagggagaactgactccttatgtcaagagattattccctttgtcccataatagaaatccatcacctcctagagatcttggtgagcttgaaggtgttgaatttcctgaccttccctcccttgatggatatttgcaatactggggaactcataaagtcactgagaagaatgttatctatacttggatcaatgaagaaggaaagctcatgaatcgaagaacctaccaggagcttcatgggaatgcatcttacattgcacaaaaacttttaacaagcacaaaacctgttatcaagcctggtgatagagttctgcttattcacctccctggtttggagtttattgatgcattctttgggtgtattagagcaggagttataccagtccctgtattgccccctgatccaatgcaaagtggtggacaagctcttcttaaagtcgagaacatctctaagatgtgcaatgctgtggctattctatccacctcttcgtaccatgctgctgtacgagcaggttatatcaagaacattgtcactttagcaaagagagttcagaaatgctcagcacagtggcctgacatcccatggattcataccgactcatggataaagaactaccggcgaagctcagacagcttcaactcagacactgttttatttaccaaaccccagccaagtgacttgtgctttctacagttcacttcaggttccactggtgatgccaagggggtgatgataactcatgaaggacttatccacaacgtgaagactatgaaaaagcgttatagaagtacttcaaaaactgtccttgtcagttggcttccacagtatcatgacatgggtcttataggaggtcttttcactgctcttgtaagtggaggaacttctgttctattttcaccaatgatatttatcagaaacccccttctgtggttgcaaacgatcaatgactaccatggaacccatagtgcaggtccaaattttgcatttgaactcgtgataagaaggcttgaggctgagaagaacaaagtatatgacctctcatcaatggtcttcctcatgattgcggcagagccagtaaggcaaaaaactgtcagaaggttcatagagttaactcaaccttttggcctttctgaaggtgtcctcgcacctggatatggtctggctgagaactgtgtctatgttacctgtgccttcggtgaatgcaagccagttttcatagactggcaaggaagagtatgttgtgggtatgttgagcaagatgatacagacactctcatcagaattgttgatcctgactctctaactgagcaccaagaagatggtgttgaaggtgagatatggattagcagtcctagttctggagtaggttattggggcaattcggaaatgagccagagaacttttttcaatcagcttaagaaccaccccaacaagaagttcacaagaaccggtgatttgggacggaccatcgatggtaacctttttattacaggaaggatcaaagatctcatcattgtcgctggtagaaatatttattctgcggatgtagagaagactgtggaaagttcttctgaggtcctccgaccaggctgttgtgctgtggtcggtatcccagaggaagttctggctcagaaaggcatctcaattccagattcttctgatcaggttggacttgttgtgattgcagaggttagagaggtggtacgagcagcccagaagctctcagattttcttggtgttcctgttggggccattgacatctttacagcaagctgcatttcggagcttgcaagcttcttggagaatttggtgcataagtcacaaacacagttggcaccttggcccaaaagcaaagtgaaaaactccaaggtgattatcgagtttctgacaaagattgtatcagatcaaacagggattccaaaggataaaatttctccgatggatagcctaccttcatatggttttgattcaattgcggtggtccaagcagcacagaaactctccgattttctcggtgtacctgttggagccattgacatatttacagctggttgcatttctgagctagctaccttcttggagaatttggcgcataagtcacagtcacagttggcacctggtgcatcttgctatattgaggatgagactcaagtggatcccatggatgccattagtccagaattcagtgttttgggtacgggcatcctgcaactgctggctcttacttatgtctgttttgtgctgctactcccagcatatcttgctagttcgacatacatgagcattttctctacagtcagtctggtcagatcaccattgctgagctatcttagttctttggttatggcacctattgtgtggatcttttatatctcgctcacttctttatcactgtctatcttggggaagtccttcctacagccaaattatgttctgatccctgatgtttcaatatggtcagttgactttgtgaaatggtgggcactaaacaaagcacaagcattagctgcaaagatgctagctgtgcatctaaagggcacaattttcttaaattattggttcaagatgcaaggagctcggattggttcatctgttgtcatcgacacagtagacataaccgatccatccctgttgacggttgcagatggtgcagttcttgcagaaggcgctcttgttcagggccatgaagtctgtaatgaagtgctgagttttaggcctatctggattggctgtgaggcttcgattggtccttatgcggtgcttcagaagggaactgttgtggaagatggagctgttgttccaccattgcagaagactggggctgggaaatcaacacgtcggactagcagaacttctgtaagcataaagaaagaagcagccaaagcaaacatgatacttgaacacctcgttagcatctacgcagttggcatcctgggtgctctgtccggtgcaatcgtctacacactatacactcacttgtccggcaaagcggcttcgcctctgcatttctcctttgcatgcattgctggtgcgttccactggttaccagctgccatcactgcctatgctgttattgtccaggagacacccacaagtgcactgtcatttgctctcttcactgccttcgccgacctgagctatggtgtcatcctcagtattctcaccagtataaccagcagagcccttgctgcaaagcctggaaccaagcagaatggcattgcgagtttgatccaccggcgcataaccatctctgctcatgtcaggtttgccaagatgctatctggaacagaagccttctgcgtgtacctgaggcttctcggagcaaagattggcaggcattgctctatccgagccatcaatccggtggcgaatcctgagctgatcagcgtcggtgatggcgtccatctaggtgacttctgcaatattgttccagggttctactccaaggggggattcaccagtgcagagattaaggtccaggagaacaccgtggttggcagtggcagcttgctcctccctggctgtgtcctccaggagaatgtcatcctcggcgcgctctccgtcgcgccggagaacgctgttctccggcgtggcggcgtctacgtcgggtcacagtctccggccatggtgaagaacaccttgcttgacgaggatgaacggatcgaagagatggatcaggcatacaagaagattgttggcaacctcgcggcgaacttggccatcaccaccatgaacgtcaagtcgaggtacttccaccgcatcggcgtgagcggccgcggcgtcctgaggatgtacgaggagataccgtcgtttccccggcacaagatcttcgcctccggcaagtccttcccggtgatcgtccgccacagcaacagcctgagcgccgacgacgacgcgaggctcgacgcccgcggcgccgcggtgcggatcctctcggacaacgacggcgaggcgcctctcctcgacctcacactcaagagcggcaaggcgttctacgcgcgcaccatcgccgacttcgccacctggctggtctgcggcctgccggcgagggaggagcaggtcaagcgctcgccgcacatccgcgacgccgtctggggctctctccggagcaccgactcgtacaccgtgctccactactactccaacatatgccggctgctgcggttcgacgacggcagggagatgtacgccaagttcaagctccgtcctgctgatccagacgtccccgaggactccggcaaggtggtgccgaggggcatcctgccgccggagaccggcgcgatccccagggacgaggatgacacgcgccctctgctcttcctcgccgacgacttccgccggagagtgggctcaccggacggggtgcgctacgtgttccagctgcagctcagggaggtgcccaccgacgccgccgcccgcgacgtcgccctcgactgcacccggccgtgggacgaggccgagttcccttacatcgacgtcggcgaggtcagcatcggccgcaacctcccgacggaggagacggagaagctcgagttcaacccgttcctccggtgccccgaggtggacgtcatcccggcgacgtcgtgcgcgcagagcgcgtccatcgaccacggccgctcgctggtctacgagatatgccagcgcctgcggaacggcgagccgctgcccgcgtcgtggcgagctttcctggagcagtcggacaccaagatcgacctgtcaggatgcccggtcgctgccgccgcgacacccacaaggtctaacgccggcgacgccacgaaggtgacgctggccaggacgtggtaccaggcgctctgggccacgctgtgccagccgctgctgcaaacgctggtgccgtactctgtcctgggcctcgtcatcttcctcccgctcaggggcctcctcgccgtcgccgcggccacccgcttcccgctctactggctcctcccggcgttctgggccgcgtcgggcgtcgccgccatggccacgtgcgcggcggcgaagtgggcgctggtcggcagcagggtcgacggcgacacggtgcacatctggtcgccggccgtgttcctggacacggtctggcaggccgtgcgcgccgccacggcggagtacttcgccgagctgacgcccgggtcggcgccgttcgcggcgtggatgcgggtgatgggcgcctccgtgtcccccggcgacggcgtgtacgtggactccatgggcgcgctgctgaacccggagatggtgcgcctggagcgcggcgccgccgtcgggcgggacgcgctgctgttcggccacgtgtacgagggcgaggccgggaaggtgaagttcggcgccgtgtccgtcggggaggacgggttcgtcggcagccgcgccgtggccatgcccagcgtcacggtggacgacggcggctgcctcgccgcgctcgggctggccatgaagggggagacggtgaagcacagcatgtaa

SEQ ID NO: 54941 - DNA, 1371 bp, Oryza sativa
  Clone ID: PAT_MRT4530_56998C.1
atggcggctggcggcggggaaggtgatggcggcgggggtgatgatggcgtcggggatggcgagctgcgtctgttattgggggccgtcgacggcggggatggaggtggcggcgaggctggcgacggcgggccggatccaggcacgccggaggcggatccggccccccgtgggtggatccggccccccatatgggcggatctggcgcgggagctccacgtgcttggcggctggtggctggtggcggtcgcggcagctggtggcggtcccgacggctggtggcggcgtcggggctgtcgcggcggcggctttggctggcgacgtcgacagaggacatggcggctgcgtcagggtggttgctggcagcggctgcgttggcggtggcggcggttcgcgatggcggtggctggcgtcggcggctgctgttttgcggaggcggaggctggcgtcggtggcagcggtgacgtcggctgtagccgtgaaggtggtggcaacgtcggaggatgcgggtcgctggcaacagcaagtggaggcggggaaggagtcgggtgcgagcccaccaaaactatcaaggccgaaaccgaagcccacaatgatgaagggctcccggattcaccggtcgatcgcgtcgcgcgatccctcggcgaggccctgatcggcggcaggagcagagccatgatcgacgacgacgaggaggcagcgctatggtcgcgacgaaacacgccagtggagcaccccatccgccgcgcgtacgaccgcgtcgccgccgccctcagggagaagcgatccaacgagcggctcgcccgggagtgcctggaccactacaacgccctgcacccgggcgacgagcacgacctcgcacccggcggcgacgtgacgctgtcccgctcgcactgcagcaccggcgcctggacgcacggcaacttcgtggctcgccgccgccggcggcaatggcgccgctgcctcgccttcgtcctccccgccacgcggacgctcttcttcttcgagcacatgtccggcgacgactacctcggcgtcatcacgtgcatcccgatgccggacgagccggtcggcggcttcctcgccagaatccctgtcatccgccggtgggcgacccctcgccggagcggcaggtgggactgcgtctgcaagacgtgccgccgcggcctccgcgtgacgcaccactggctgaagaggaaggtgatcggcgagttcccgtgcgggcacatggtggcggagagcgtctgcaagatgtgctaccactactccgacgtcgtccatccgagcccgggcaagttcgcgcgcgggtacctggagcacgaagacgaatttggccactacggccgtaatggcttgagggattatccatgttaa

SEQ ID NO: 54942 - DNA, 383 bp, Oryza sativa
  Clone ID: PAT_MRT4530_56999C.1
ggtcttggatttgatcgggcacatggctctcgtcaacgctaagccctgatcccatttgataacaccagatgccctagtaatgtaggaagagaaggctcaacttgatggccccttctgtatctcggaattatattaagcacaccgaaccaaacccttgccgacatgaagatacatgctgtgttgtgataatccgagcttattttttgcctgtttgaattttgttattttgttgtgcgacacatggactcccatgagttggggtgaatgaacaagtagtaacacactgcttgcacacaaacaacagacctgatttcctacacttggtatggtgcattaacgtacaccatggaatggatcgatatctccaaaaaaaaaaaaaaaaa

SEQ ID NO: 54943 - DNA, 1395 bp, Oryza sativa
  Clone ID: PAT_MRT4530_5699C.1
ttatcatattctatggcacaaaaaggatataatcttgggcacgggcaccgatgctccacggaaaccaacaagacctcctatgaagaaacggtttaatgataaggtggaagaacattagccacctagggccactgaaggcccagaaaaataaaaggaggtgcaaattgcaccgaaaaatgaaccagtggtgcaagaaccgggatgtgccacaagaagatgtgcaatttctgtcatcagttggagtagacatcgaagtcgtatcgggtttggaatgggacgatgcagaaccagacgtctatgaggacccaaatcttgcaaaagatgtcatggaccaaaccccggttgataacaaggaaaccgaccgagaagtctgaagtgcctagagtgctcaaaagcctcaactccaagtctaaggatgatcaaaaggagaagtggagggtaaccgacttcagtgggagtaaaaaacgtgccaaggaaagaaaaggccggattatgcaattgatgagggtccatgggagatgacatggttacataaatggtacatcgacaccagcattgaaggcctaactaatttaacaattcgatcaccacctgatgctgtcgccagcaaaggtttcttctggctaaatttcgctgatctgcatgccatcaatcgtcgggaaaagatggatgtaaactttctcggtgcatggtgcctgatacaatatatggatgctgcgaaggcaaagcaatctatcggatatctggatccaacaaggatctgtcaaaaacagcataccatgacgctatcaccaaattccaagcagctcaaggacaagacgcctaaagagatagcggaatataagaatggcttgtacaagcagaagctgattactgtcgcatagtacattggacgagacttcttacactttcaaaataaaagagtcatcctagccacgtacaactttaacgatcattacatatgtttcattatctaaccgaagtacggcaccgtgacatcttggacccccttgattatcatcacaagacgaacaaacaatttctaacaatcttacaatatgcgtacaactgctacaagaagaagggtgttgatcaaattcaaacaaagcagaagctgctatgtcacaagcaacctagaggcactatcctatacgggtgttacgcatgcgaattcctcacggttaatgggaggtacaaggttaacgtagaggatttgcctagaatagaacatcgaacaagctttgacgatacatgcattacaaatgtgcagcgggacctctgccacttcatccaccgcgagtgatgtcatatcaaagtttcagagtacccgcacgatccttcgcctctcgcgccgtccttgttccatagtcttcgccatggggggggcttctcccc

SEQ ID NO: 54944 - DNA, 476 bp, Oryza sativa
  Clone ID: PAT_MRT4530_569C.1
gggctgcgccccgcgctgcttgccgcgtgctgttcgatctgaacctgccggcctcgtccccgtcggctgctgccgccgccgaagtcgacgagatggattggtgttgcgacacgctgctccacctctagcctgcacatcaccaaacaatggcagcaatcgccggcgaactctagcctacgacgacgacgacgacgaccaaccagcaagcaacaagaattggaaatttgttactgggttgctgcgctccaatccaaccatcaccattgttgctgctgctactgcgaagaagctctaccatctcctccatagacacggataattttctttttattttcgttttcctccatctctttttcaccactcaagatttcgtttccgccgcctctcttgtgcatctctgtatccaaaggggatgctgctgctttcagctgtaccaatagctagaaaatggtagagaagatgataaaatttggttc

SEQ ID NO: 54945 - DNA, 246 bp, Oryza sativa
  Clone ID: PAT_MRT4530_56C.1
atggaaaaattcagcgttgtgtgcaatgaagggcgtagcaaagaatttaaggaggatcctgccaccaacaacaagcattgtgtagacatttgcatcattttaaacaagcaacttcttgggcctctgagggagaaaaaaaatcccactatggaaaaattcagcgttgtgtgcaatgaagggcgtagcaaagaatttaaggaggatcctgccaccaacaagaagtgtgtagacagctgcatcggctaa

SEQ ID NO: 54946 - DNA, 576 bp, Oryza sativa
  Clone ID: PAT_MRT4530_57000C.1
atgcctgctggaaatgtgaagaaaagtcacaactacttcctccgtttcacaatgccatggcaaaggaaggagtggtgcgccacaaggagccagtccacctctgctccacctcctccgccattgcgaggagaccgttcatcgcggccccgtggtctggccgatgcccctgaggtcctgcttgctgtggagcatgtgggtgatgatggcagtagcgatagagtatcccatgaccgccacactgccggaggccgcggcgatggttgtgcgatcgtcgacagagcccacagctgcggtggtggtggccccgcctagacatgtgcccatgcagaaatcgtggaggcggaagtggaagctagcactctcaacagaatcggcgtgggagaagaggaacagcgctgcgatggcgaggtcgttgcacgggatgaacaatagcgtggcatcccggaacacccaacgtatcgacgaccactccgctgacccttgccggaacagcaccgccacccacctcccgatccaacagcggcataggaagaggcgctggagcaggacggagcggatagggaggaggagcgacat

SEQ ID NO: 54947 - DNA, 705 bp, Oryza sativa
  Clone ID: PAT_MRT4530_57001C.1
cctgccgccaccctcgccttagctcgccgccgcctgtagcgccgcctccgcgatcaaccgtgcgccgccgatgccgccgcgagttcagccaagcaccgccgtcgctctggtcgtcgtcgtcgctcgggcaggacaccgtcgggatcaccaggtcgtcgccgtcctcgtccacccctccgtcatcgccgaggatcgccggaagaccgttgtcgtcatcaagccgaccgtcgccgccgcttcttcctcgtcgccgtcgtcgtccggtcgctgtccgccgccgttcgtgcctcggtaaggatcgccgcatcgcccgcaacgtgtagatgccctctgtttgcgctgccgcgccgtcgttagccggcgagcatccgtgtccgagccgccgccggtgatgatgtcaccgctgacgtcagcgctgacgctagccgtggaccggcggtagatcgataagatctcagccgttcgtttccgtagaccgccgccgtgcacctggtccaccgtgaacccgagccgatgcggggacggccgccaccgctggattcttgcgttgacgtccaccaccgttggatccgtgtaggcactgccgccgcccaccggatcccacgccctccaccgcctccacatggaggaggccggcacgctcttggtggtgcgctcgtcggcgttcccggtgtccagagcgccaccatcgtcccactttgtcat

SEQ ID NO: 54948 - DNA, 364 bp, Oryza sativa
  Clone ID: PAT_MRT4530_57002C.1
atgattaaaacatagacgtcgaatacaacaacagtgacgattattttggcattggctctccttgctatcggtgcatgcactgcctctgcgcggttcgatcctctcagcccaagttctagccaatatcaactaccgacccttctgctactacaggaacaagtgctcagcccatgcagtgagctcgtaaggcaacagtataccatagtgacgaacctcttctggctaccagctacgtaccaatagataaacaaccaactcatacagcagcagagatgccgacagctcatgctggtagcacaacaatctcactaccaggccattactattcgtcaagcgattgtgcaacacctacaactgcagcaat

SEQ ID NO: 54949 - DNA, 257 bp, Oryza sativa
  unsure (1)..(257): unsure at all n locations
  Clone ID: PAT_MRT4530_57003C.1
gttantgattgtttttttattaaagggcatataataatagcgattgcttaccatattttgcatccgcttgttgctcgggcgcatgtcaccaacattggatccccagccacgcccgcgcagagagactggcgtttactggggcgcatgtagcacatgtctggcatttgtattgacattttcattgtgtgatgttgaccgcgtccagaagaaataacttgctgcatgctctgtatcatatggcaattggtgccgcatgg

SEQ ID NO: 54950 - DNA, 806 bp, Oryza sativa
  Clone ID: PAT_MRT4530_57004C.1
atggaggagtgcaagggcggtggcatgtcgccgtcctcctccatggatagcagcacccacccggcgctgtccacgacgtcgtcggcggcgacggcgaggcgggacctcagcaccgatctccggctagggcttagcctctcgacgtcgtcgtcgtcctccctcctgcaggccgccgccgccgccgccgctgctgatgatagcatcccttctactccaaggaacagccaagtgcacgccgattggccgccgatcaagccgttcctcaggagcgccttgcagaaggcgtcggccgctggcggcggcggcgctcgccgacggcgaacgctgttcgtgaaggtgtacatggagggcgtcccgatcggccggaagctcgacctgctcttgctggatgggtatgacagcctcctcatcaagctctgccacatgttcaagacgcccatcacctatgctgatgttatggagtgccatcaacaagttcctggccagaaggctgcccatgtcctcacctatgaagaccaggacggggactggatgatggttggggacgtcccatgggaactcttcctgagcagcgtaaagaagctcaggattgcaaggatggataaatgctaaaacagttgcatttgaatttctctttgtttcttcttttttttttcccattggagggagggcccttattatatgtaggttagttgaaaaagatttttgctgaagctgagattatacttactagcagtgtacattatagtaaagaagtgtagcattatcagctacctaccgtatagcagaactgattattatttttc

SEQ ID NO: 54951 - DNA, 1831 bp, Oryza sativa
  Clone ID: PAT_MRT4530_57005C.1
cacaccaccaccccccacccctcttctctctctctctctctctctctctccacatccccatcgtctctcaccgcgttgctgctgctgctgccgcctcggccaccgcgcgcccgcccgcgcgtcgcacgcagcttcttcctcttcttcttcttccccaccctctccacccgatgcggcggtcggcgccgcgctgctgctgctgatgcgggcggtggtgaagaggcgacgagggggagagcgcgggcgctgctgcggctattggagatccggggcttcgtgcgattagtggggtcgtgtgaccccacgggacccaaagtggatccatttcgacggggatggaatctgggagtgagttctatgcgggcgaaggtctccagatcgaccccaagtggctcatcgacccaaagcttctctttgttgggccacggattggcgaaggtgcacatgcaaaggtctacgaggggaagtacaagaaccaaaatgttgccatcaagattgtgcacaagggggacacccctgaggagatggtcaagagggaggggaggttcttgagagaggtgactatgctgtcaagggtgcagcacaagaaccttgtcaagtttatcggggcttgccttgagcctgtcatggtggtggtaactgagctactagtggggggctctttgcgcaagtacttggttggccttcggcctaggagcctggagcctcgtgtagctgttggatttgcgttggatattgctcgagccatggaatgtttgcatgcgcacgcgatcattcatcgtgatcttaaacctgagaacttgctgttgaccgcagaccagagaacagtcaagcttgttgaccttggtttagcaagagaagagacattaacagagatgatgactgcagagacaggaacataccgttggatggctccagaggtttctgttactgcagttcatatttgtcaatataattcttttttgtcaatatttgctaatcctgaaatatatccacagttgtacagcacagtgacattgaggcatggagaaaagaagcattacaatcataaagtagacgtttatagctttgcaattgtgttatgggaactccttcacaatagactgccctttgagggcatgtctaacctgcaagctgcttatgctgctgctttcaagaacattagacctagtgcagataatttgcctgaggagctatcagaaatcctaacaacctgctggaaggaagaacccaatgagagaccgaacttcacgcagatcgtacaaatgcttctgcattacctttccaccctttcgccaccagaacctctggctccgcctcggacgttcagttcagagaatgcaatcttgcctcctgaatctcctgggacaagctccctaatggcttctcgaggcgacctcggcgacacaccgaagggcaagatggaagacaagccaagggggttctttttctgcttcagccagtgctattagcacagaacaaaggaaactcccctggaggatgcaaatatgaagagaacattacctcctgatgcacagcggctcggatcacggcccggcggcgagtcccggtgcccatagcccatacccaaagaatggcagaagttcttgtagaactgttgtttctgctagtcagtccacccctctcttcttctgacatgtttaacataccggcaggataaatcgagtaagcttttgactcctgctatcagtgatgaaaatagttctgtcgtatattttcggtggacaagttattcaatgtctaaactgcgcccgctcatcgtatagtaataatccgcattcatcagtttcccaaaaaaaaaaaaaaaaaa

SEQ ID NO: 54952 - DNA, 329 bp, Oryza sativa
  Clone ID: PAT_MRT4530_57006C.1
aagtataggtattattatgcggggatattaggatgagtttgaactttgaagtgcagggataggcgtggtgtggttggatgaataaaatgaaaatggaattaattaatagtcgtcgtcgtagccgccggcggcgtagtcgccgtctctgttgagatcggacttcaaattcttcgccacgccctcctagaacttgtcctccaggtagctcgagccgtcggccagcgccagcccttccagtacgcccgacgtcgtgcccactctcagctctgttccgattcagatatagctctttttcttcgggtgatccacaaccacaggggccgcacctg

SEQ ID NO: 54953 - DNA, 173 bp, Oryza sativa
  Clone ID: PAT_MRT4530_57007C.1
tttgggatgtatttagatgcatttaactagcattttttttcttggcctgcctcatgccaatgtcatatagatacgatggaattcttgatcaagtaattgtctatttattttccaatccaaataatacatagcaatgctcatcttctaaaaaaaaactgaaaaaaaaaaccaag

SEQ ID NO: 54954 - DNA, 446 bp, Oryza sativa
  Clone ID: PAT_MRT4530_57008C.1
aaatatgcgaccttcactctattacgggacaagcctggtaccgccctggcaggtaccggtgccggaattgcccgggtcgacacacacgcgtgccgatccagtggggatgtgccggattgccaagatgcgtgaccggtgagtgcaatgtgtgctgcctgtagaaatggatgtagtggttagtctggtgatgagaatgagtggatataagtgaagccacgaagggaacaaggcttgtggtccgattcccccccaggaacattgggtttgaacagggattaaatgtgcattgttgctgtgtgacctgcatggaagtgaggacctgtgtggtgatggtgctgatgtgcagttgatttgttgtttgaggaaccacatggtgctattcagttataatttacatatcgtctttacaatgtaaccattattccccccttcaaaaaaaaaaaaaa

SEQ ID NO: 54955 - DNA, 2016 bp, Oryza sativa
  Clone ID: PAT_MRT4530_57009C.1
gctggaagaaaggtagaggaaaggctgtgaccttccaccaatttggtcatggtcaccctcctcctcgccttccgcctctccactctcttcctcctcctcgccgccggcgccatcgccgtcgatcccgatggcgccgccgcgcccgataccgccgccgcgcccgataccgaggcggcggcgctcctccggctcaaggcgtcgctgatcgacccgacgaacgcgctagaggcgtggtcgccgtcgtcgccgtcgccgccgtgcgatgaaacacaccggtggccaagggtgcagtgctacaatggcgtcctcatcggcctccgcctcgcccgcctcaacctctccggcgacttcgacttcgcggcgctgtcgcggctaccggggttgcactccatcaacctcatccgcaacaacttctccggcccgctgccggcgagcctcgccgccgtgcgcagcctccgcgcgctgtacctgtcccggaacgcgttctccggcccggtccccggcgacgtgttcgccgccatgagctggctcaagaagctctacctcgacaggaacgacttctccggcgagctcccggccggcgccatcgccggcgcgccgcgcctccaggagctccacctcgaccacaaccggatcgaggggcgcgtcccgtccaagctcccggccacgctccggctgttcaacgtgtcgcacaaccgcctcaccggcgtgctcccggaggccgtcgccgcgcggttcaacgagtcggcgttcgccgggaaccccggcctgtgcggcgcgcctgggagcggcgccggcgcgtgcgccgcggcggcgccgggccccgcgcacaccgcgatgccgccgatgtcggccgccgactacttcgccgtccaggaggagaccagcgtgttcgtggtcatgggtatcatcatgctcgtcgtcctcctcgtcgccggcgccatgctggtgaccatggagcagggcggctccggcgccgcgggcggcgccggcggcgtcggcggcgtcggcggcgcacggaaacaggtggcggagttcgtcctgatgagcaacgccgccggcgagttcgggctgccggagctgatgaaggcgagcgccgaggtgctcgggaacggcacgctggggtcggcgtacaaggccgccatgcgcaacggcgtgacggtggcggtgaagcggatgcgcgacatgaaccgcgtcggccgcgccgagttcgaggagcacatccggatgctcggcgagctccgccaccccaacgtcctctcccccgtcggctaccattaccgcaaggaagaaaagctcatcgtctccgagttcatgccacgtggcagcctcctctacgtcctccacggtgaccagagcccggacagggtggtgctggattggccggcgaggatgaggatcgccgtcggcgtggtgcgcggcttgtcgtacctccacgagaagctgggcatcccggcgatgaggctggtgagcatgactggcgccgacttcgacgcgccgccgccgccgccgccgcacggcaacctcaagtccggcaacatcctgctcgacgcccacctggagccccgcatcgtggactacggcttcttcccgctcgtcaacacgtcgcaggcgccgcacgccatgttcgcgttccggtcgcccgaggccgcctccgccgccgccgccggcgccggcgccgctgcccagcgcgccgccctgtcggcgaggtccgacgtgtactgcctcggcatcgtgctcctcgagctcgtcacggggaagttcccgtcgcagtacctcctcacggcgcgcggcggcaccgacgtcgtgcagtgggcggcgtcggcggtggccggcggcaccgagcaggaggtcgtcgaccccgtcgtcgccgccggcgccggccctgccgccgtgcggctgctgcgggtcggggtgcggtgcaccatcccggagccggagagccggccgagcatggcggacgtcgcgaggatggtcgagcaggtcgccggcggcggcggcggcggcgcgtcgtga

SEQ ID NO: 54956 - DNA, 1182 bp, Oryza sativa
  Clone ID: PAT_MRT4530_5700C.1
atggacgcggcggcgctaggggcggccgccggggcgccgaacccggcggcgcccgtaggaggggaccagcagccacggacggagcggctcagcgccggggtgcagcagcagctgaacctggaggggatgcgggcgcgcgccgtgggcctgtacaaggccatctcccgcatcctcgaggacttcgacgccatcgcccgcgccaaccccaacgcctccgccaagtggcaggatgtgcttcggcaattctcgatggcgagcatggagctcttcaatatcgtggaggacttcaagaacgtgtccaagcccttaacagagctggaagctgaagcctctagaaatagggacccattgttatctggaacagcaagtctctcgaggactggtactatgcagacgtgcaacatcacgatgggctacaaggaacgcctaattttgaaaatgtatctactcctccaatgccatatgcaaactcccggtctaggagcccgtcagggggcaaatcttggtcctacattggacaaggcacaggctgcaaagatacaggagcaggaaggcctacttagagcagcggtaaattatggtgaaggtgtgtaccccaaaaatacctcaacatttgtacctaatgttgtcaacgcccagggaaatccaatgcaggtgtctggaggacagttacttggcagacctgctccatcacctggagctacaggaacgcctaattttgaaaatgtatctactcctccaatgccatatgcaaactcccctaggtcagggaccaatatgatgaacaccccttcaccccagcagcatttgacggcacaacaacataggcaaaaactgatgcaaacatctcagcaacagcagctacatgctcaacagcaactaagaccatcggctgctgggatgctagcacagagcgcaattcctcagctacaagatctgcagggccaatcccaacaaaaattacaggtccctggccaacagcagatgcagtacaatcaagccttgtcacaacagtatcagaataggcagatgcaagctgggcgcatgcaacctggcatgtcccagagtcaactgaaccaaggaaatcagctaagaagtcatattagccagttcactggagctgcaaacagtgcaatgtttactgctgcacaggcatcttcgaactcacagatggttagatag

SEQ ID NO: 54957 - DNA, 114 bp, Oryza sativa
  Clone ID: PAT_MRT4530_57010C.1
atggcagggaatggttttgcacattccatggctgctggtgatcagagtgaagcgatgatcgctctgttcggaaatataacatccattctgatggaagtcatcctcttcccataa

SEQ ID NO: 54958 - DNA, 237 bp, Oryza sativa
  Clone ID: PAT_MRT4530_57011C.1
atgtcgagaaccagacttatgcatgaatgggccacgaactcagaattgacacgacaaactgggccaaaattcacaagtctacgaagaggaacaacagagaggctgctagctgaaattgggctggatcgggccggccccaggttcggccgaaccaaggggttcggccaaaccctccttagcgccatccgatccagggcttcacctggacggtgtggattagcccccaatgacagttga

SEQ ID NO: 54959 - DNA, 1671 bp, Oryza sativa
  Clone ID: PAT_MRT4530_57012C.1
atggcatttgaagtaggttacgaggttgcccccgagtattgccagattccctatgaccccaatgaggagaagtgtcgtgttcgcgtgacgttgactagtgatcgtgaagaccttccgtcgataaagtttgaagctgggggaagaaagtacagccatgcttgtcaggaagcagccttggtggccattggagagctacgtcatcgctttgatgaggagttagagtcatcagctttccagtatcacccacacaagcctcatggtcaagactatggaacttacaactgtcccgaaggtgaaggtagtgccactgtgatgcacgccgtgtatatgcttagcgccatggatgcagtaggcgtggagcgggagaaagcagctcatgatagggaaaactggaaccgtggcaggatttgtaagttggagagcaaggtgtaccgtctgcagaaggaactagctgagcttaagggagaagcaccaccgccagcacccaagctacgcctcaccgcaaggaagagaacccgtccaccacctcgtctccagttagcttcgaagactggtgtggtgggagacgctgtgcctgatcatgctaaacctgtcatccatgtcttaagtgatgaggaagaagaggaagacctagaagaaagagagccagctactccagaggaggaagatccatctcttcattctgacgcaaggcgagacatgttgcttacatcaatggtgggatgtaactacatgagtttagttcttttgcttgtcagagactcgttatgccccagaagatgtcgcactgatgaagaacatcaggagaagtttttagagggattgaatgatgagttgtcttatgcattgatggctatggattactgggatttccagcagttgatggacaaggcgattcgccaagaagacaagtataataggatggaacagaaaaagcgtagggctgctcatttcaaggcacaacagggtagtagccagaggccgcacattgctttgggacctcaagctgcaccatacccacagggaggatcctcttcagttgctcgccctcaacgccagttctacaacaacaacactggtaatcgcagcaacgataatcgtaatatggtcactcgtcctgtagcagctccaactcagaatcatcctgtcaggaaggaacagggaagcaagccaggggtgtgcttcaattgtggtgatccaggacattatgctgataagtgtcccaagcctcggcgtgtgaagaatgctcctgttcagaacaactccaatgctccagcaccgaaggctcgtgttaatcatgttgcagccgcagaagcccagaatacacctgatgtggttttggaatccaatgatcttgatgttatcttagggatggactggctaacccatcacataggagttatagattgtgctaaccgtaatgtgactttaacaagtagcaatgggcaaacagtgtctttctttgtgtcatcccctaaatctcacggtttgacattaaatcaagttgctttgcaagagatcccaatagtacgagactatccagatgtgttccctgaggatttgccaggtatgccacctaagagagacatagagttctggatagacttagtacctggaaccaaccctatccataagagaccatacagaatggcagctaatgagttagcagag

SEQ ID NO: 54960 - DNA, 3447 bp, Oryza sativa
  Clone ID: PAT_MRT4530_57013C.1
aaggtgggttgtgagcacatggttttgatggtcgtgctcatgacaaataaggactggttcacgagctactgttgtgaaacattaaccgtgccaaccacaagtcaacgtgggcaacggctttactttttgtatagcatggttcattacggggtgccaaactgagaagcggcgagaagtccatgggggtcgctggggagtccatgccttgttttataagggggtgattatgatccaggaacggtgcgctgtggtggattgtgttgtgcagagggtattgtcacagttcctttccgagatgccgccccatccgccgaaaaacttgatcgatgtgctaggattcgtcagggagctgagaatgatggcatttgaagtaggttacgaggttgcccccgagtatcgccagattccccatgaccccaatgaggagaagtgtcgtgttcgcgtgacgttggctagtgatcatgaagaccttccgtcgataaagtttgaagctgggggaagaaagtacagccatgcttgtcaggaagcagccttggtggccattggagagctacgtcatcgctttgatgaggagttagagtcatcagctttccagtatcatccacacaagcctcatggtcaagactatggaacttacaactgtcttgaaggcgaaggtagcgccactctgacgcatgctgtgtatatgcttagcgccatggatgcagtaggcgtggagcgggagaaagcagctcatgatagggaaaactggaaccgtggcaggatttgcaagttggagagcaaggtgtaccgtctgcagaaggaactagctgagcttaagggagaagcaccaccgccagcacccaagcttcgcctcaccgcaaggaagagaacccgtccaccacctcgtctccagttagcttcgaagactcgtgtggtgggagacgctgtgcctgatcatgctgaacctgtcatccatgtcttaagtgatgaggaagaagaggaagacccagaagaaagagagccagctactccagaggaggaagatccatctcttcgttccgacgcaaggcggaagccaaatggtaaaccgatcagttggttgatgctgcttcagggcacaaaattttgagttttatggatggcaatgccggttacaatcaaaggtcttatcggatggcttgtcatggatcgattcaagtacctccttataagcttgtttatgggcatgaagcagttttaccaagggaaattagaatcggcttgggaaggacagacttacaggatacattgacagccgatgaatattacaatctcatggccgatgagagggaggacttggttcaatcaatgttgagagcacttgcaaaggttaccagggacaaggaaagagttgctcagcattataacaagaaagttgtgcttaagtctttttctgagggcgagcatgcttggaaattaattttgccgatcggaactccgtcgtctccaatttcttcttcatctaaagcttgctcgatggatgggtctagggcaggcaagtcatcagctagcttgggtttctttgttttggttttcttcttcagagctagagccgatggatcaacagccgttgccgactcagcaagcacaaccgaggcaacagacggttcagccgactcagcagcagaacttacagcatgcgttggcaagattgagaacacctgacaatcggccagggcaacatagtgtgaactaagttgttcccgaacacttggtccatcacgtataggccgatcaatcagttgtgcctcagattatccctgaacatttggtgtataacattcagccgaatttccagaattatcaaggaggaaatttgaattatcaataacaacctccgtcacctcatgttcagtattagcagacaggatcgcctcaacctcactacgctcctcagtttaatcagtttgagccaatacagcaacaaacgcaaggagtacctcagcaaacatcatgggctgatatgattgcagatgtgataagggagcagtttgggctcaaaccaaaagacactggaaatttgtatcggcatccttatcctgagttgtttgaaagggtttcattgcctaaccaatagaaggtacgggatttctcaaagttctcagggcaggacaatgtttcaacttatgaacatgtcagccgattctaacttatctccagaattcagaatcaagttgatagagcttttaaaagaatacagagattgctttgcttgggaatattatgagatgccaggactcagccgatcaattgttgaacatcggcttcctattaaacctgggattagaccataccagcagccaccaaggaggtgcaaagccgacatgcttgaggctgtcaaggctgaggttacatgtttatatgatgctggttttattcgtccatgccgatatgcttagtgggtttccaatatagttccagtgatgaagaaaaatggcaaagtcagggtaagcgttgatttttgagatcttaacaaggctactctgaaggatgaatacccaatgccggtagccgaacagttggttgatgctgcttcagggcacaaaattttgagttttatggatggcaatgcaggttacaatcaaatctttatggcagaagaagacattcataagacagctttcagatgtcctggtgcaatcggcttgcttgagtgggttgtgatgactttcggcttaaagagtgctggagttacatatcagagagccatgaattacattttccatgacttgatcggctggttgtttgaagtttatattgatgacgtggttgtcaagtcaaaggagatagataaccacatagccgatttgaggaaggatttcgagaggactagaaaatatggcttgaacatgaacccaacaaagtgtgcttttggtgtgtcggctggccaaattttaggatttcttgttcatgagtgggggattgaggtaactcaaaggagtgttaatgcgattcagaagattcaaccttcagaggacaagaagaagttgtaggagttgatcggcaaaataaattttgtcagaagatttatttctaatttatcaggaaagttagaaccctttacacctttgttaaggttgaaggccgatcaactcttggatgcagaaacaaggtattctactgtggaaaagttctgcttgtgtttgtatttctgttgcactaagttaaggaattatctattgtccagtgaatgcactgtgatatgtaaagccgatgtagtcaaatacatgttgtcggctccaattttgaaaggaagggttggaaagtggatttttgctttaacagaatttgatcttcggtatgagtcgccaaaggcagttaaaggacaagctatagccgatttcattgtggatcatcgtgatgactcaatcggctcggttgatattgtaccttggacattgttctttgatgggtcagtatgcactc

SEQ ID NO: 54961 - DNA, 561 bp, Oryza sativa
  Clone ID: PAT_MRT4530_57014C.1
atggcagcagcccagagaaatggcgtcaatgttcctcgagacgctgtgcgcgtggccgccgatcgacctgtgcagctgccgcgcgagcagggttcaggcttgaactggaacggtttcaggctaagcaggaaacactcaatgaagcagccaccaatagcagcatcgtggcaggcgctccactcggccgattcgtgccaaaccaacacgccacctcctcaaatctccctcaacacgcacaccgcagcggtagagaacaccagaacgacgggatggacggacgaggcgagaatctcgccgtcgcctccacgtacggcgagaacccgcgggccagtgcccgcacctcctctcccactcctcggagaaggcgaggacggtggtggtggtggtggcggaggtgtaggaggagaaagggaggtgggcgctggacagccagcgatatatatgatgaggacatcaacaccatcgatacatccacgtctccacaagtacaatttcatgatcctatttcctgcgctcgtgcacgttaactcaactatcaggaacaaatatcctcgtggttag

SEQ ID NO: 54962 - DNA, 119 bp, Oryza sativa
  Clone ID: PAT_MRT4530_57015C.1
cttatacactcgatgtgacactcaaatgttcgcttctacatgggcacactgtgcggcatagccacaacttccgtgtatgtcccaagactcacatagcttagtttccaccgactacatac

SEQ ID NO: 54963 - DNA, 1752 bp, Oryza sativa
  Clone ID: PAT_MRT4530_57016C.1
atggcgctcctcttccgcatctcgctcctcctcctcctcgtcccactcatccccaccgccgccgcgtcccaccaccactcgccggcgggaggaggaggagcggcggtgccgcttcacccgcgccgccaccaccgctccgtcgcgaacacggccacggcgctgttctaccccgccccttccatgcaccagaaccacatcgaggcggaggagggccagttgctgcacgtgctcgccgaccccttcgccgccgcgcccgccgctgccgaggctccgtccggggagaccgccatcgccgcggtgggagcggcggcggaggaggcgacccctacgctgatcgacgactccccgcagcaagcagcggccgcatcaccaccaccaccaccaccacctcctcctcctcctcctcctctcttcgccaagccggatctggactccacggcgccaccgcagccgaaggaggagggcgtggacgggtacgggtcgacgacggcgacggcgacggtgacagcggctccgccactcgacgaacctgctgcagccacggccacgaccacgaccacgaccacgacgacgcttccgctcccgaggtacagccacgtagcgagccctcctccgcctccagtccacgccggggtcgcgggcttgggcgacgagcagcgcctggagcagctggcgagggtgctctcctcgctggggtacaacgagatggcctcggcggcgctgctcctcgccaactcggcgttgctcgcggcgtggccagggtcgatcaccgtcttcgcggctcccgacgtcttcctccgcgcctcttgccccatgtgctcgcgccgccatgtcctactggagcacatcgccctgggctacttcccctacaccgagctcgccgccgcctccaccgccaagctcccctcggcttccccgggcttgtgcctcaacctcgcctccgaccacgggccgttcgccatccaccacgtcaggctctacgtcgacggcgtcgaggtctcgcacccggagctctacaacgacgggcgctacgtcgtgcacggcctccacggcttcctgccgccgctctcccacggctcgtgctcccacggctcgaatcatcgccaccactaccactaccagtaccaccaccaccaccaccacatcatcgccagttcggccgcgtcgtccgccgcgaccgccgcctccgtggtgcgcatcatgatccgggaggccatcgcccgcctccgcgacagcggctacggcttcgtggcgctggccatgcgcgtcaagttcgccgagctcgagaggttggcgaacatgacggtgttcgcgctcgacgaccaggcaatcttcgtcggcggaggccacgactacgtctcggcggtccgcttccacgtcgtccccgggcaccgcctcacccacgccgacctccagcgcctccacccgggcacgatgctccccacgctggccggcgagggccagaacctcgtcgtcacccagggcgcgtccggctccggctccggccccagagacgtgcgcatcaactacatccccatcaaggaccccgacgtggtgatcaactcgcgcatcgccttgcacggcgtctacgtgacgttcccgcgcctccacctcgccaacctcgccgccgcggtcgccctcgcctcctccaaccagatcaacgcaacctgcggcgtcttcggcgactgcgcctccgccgcggcgacctctaccactgttccggctgctcaccgctacggcgaagggcagtga

SEQ ID NO: 54964 - DNA, 1594 bp, Oryza sativa
  Clone ID: PAT_MRT4530_57017C.1
gcccttgtcacactgtatttatctgcgacgctaccgttcgtccgcaagccggctgtcgacgagatgtccccgcgcagcctcgcacacctgcagtgcctcctcacgctcgggctccatcgccgacgagtggcggctgggacgggctactcgacccgctcgaccagaacctccgccgcgaggtcctccgctacggcgacttcgtgcaggccgcatacacagcgttccattccatgctgtcggcggcggcggcgtcgcagcacatctcgggtgggcgcaccggacgctcgtgctccccgacctccggccgccgcgccgcgcgagcagcctgggtggcgttgcacgacggaacacctgcgatgcgagggcgaggcgctccggcgaggaactccggcgagatgcacacggcgcggttgccgtgaagccggaccctgcccgccatcttcgccagcgccggcggcacctcgccctccagcaggttgccgtccagccccaggtaggtgacgttgcgcagcgactcccccagcgacgccgggatcgtgcccgtgaggccggcgtcggagaggcccacggcggagatgcccttcaggccggcgaacatgtcggccggcacgcgcccgccgaggcgacggttgccgctgaggtacatctccctgatcgccgtcatgccgcggagcgcggccggcacgccgccggtgagccggttgttggagaggtcgagcagctcgagcgacgcgagcccgccgagctctcccgggatcgggccggccagcgtgttggaggagaggtcgagcttgacgagctgcgtgaggccgccgattgcgcgggggatgccgccggcgaggaggttggagctcaggtcgaggatcttgacgttggcgagtccctggacgagcgcgctcgggatgcggccggcgaagcggctgccggagaggacgagctgctcgaggcgcgggaagggcgtggacgggaggtcgccggacaggccggaggaggctacgacgaggcggcggaggagcgggaggctggcggcggagatggcgaggcggccggtgagcgcggggttgttgacgagcacgaggtcctggagcgtgggagggagccgccacgggagcggcgggagaggccgcgcgtcgtcgtcgccgacgaagcagccgtagacgaagaggctgcggaggcgcgggaaggaggcggcgaggaggccggaggtgaggagcgtggcggcggagggcgccgcgcagctcggattggcggagaagtcggagacgtagccgagcgagatgccgacgacgtgggacgcgttcccgccgtcgtcgtcgtcgcacgacacgccgtgcgggccggcgaggcagaggtcgtcggggaagctggcgcgccaggggaagcccgggttgactgcctcgagcaccgcgtacacgccctcctgctccgccgccggcagacgcggctcgctctccgccgccgccgccgccgcggcgagaacggccacaacgaggaggcgaccaagaatcattctcatggcaaaatggacacgttctttgtttgtttctcgtggtggtttaaaggccaggccggcgccggcaagctggaccaccat

SEQ ID NO: 54965 - DNA, 1210 bp, Oryza sativa
  Clone ID: PAT_MRT4530_57018C.1
tgcatggtgcgaaatccggccgacgacgacgacgggacgtcacgcgccgcaggcgaagctgcacggtccaccaccaccagatatgccgccgcccaccgcccttctccccggccgctccgccgccccgcgccctcctcctcctcctcctccgccgccgcagcttgcgtccgccgcgagactctctaggaggcccctcttcaatgccgccaccgccgtcgtcgtccggtccaggagcaaggacgaggccagcttcaccgaccgcatcctcgactacatcgaagggggtccaaagttgaggcggtggtatggagcgcccgatttgcttcccaaggatgggagtgctgaggatggggaggatgagccttcagaaatagatatcgaggagcctcgagatgctgtgctagtcaccaatggcgatagcgagattggacagatggtgatattatcattaatcctgaaaagggccagaataaaagcattagtgaaggacaggcgatccactgaagaagcatttggaacttacgtggagtgcatggttggtaatatggaagataagtccttcacaaagaaagcactaaggggtgttcgtgctataatttgtccagctgatcttagattcaatcaccaaccatatgagatcttgataagaatgcagctctctgtctacagaggtagcggtggtctccaagctattatgaacagcaaactgcggaaacttgctgagagggatgaagaagtggttcttgcatctgggatcccatccacgataatcaggactggctcgatgcaaagcactcctggtggtgatagaggtttcgattttacagagggtgcagcagccaagggaagaatgagcaaagaagatgctgctacaatctgtgtggaggccctggactccattccccagacaacactcatttttgaggaagcgtatggtgacgaaaaggttactgactggaaggcatggtttgctgagcggacgaaaacggtgacaagttaagtatgattgaaatgcagtaatttttttgttgggaaagaaaagaattcggtatttcccccacgaaattgtgtggccaagcaggtgcggttaattttaagcccaatttgggtgtgggttttttaggttgcaattttaacttttaaaatggtgtatggacaagacccccctctcaaaacctgtgaatattatgtaaatcgcacacggtcgatc

SEQ ID NO: 54966 - DNA, 513 bp, Oryza sativa
  Clone ID: PAT_MRT4530_57019C.1
atggggagggcggcggcggccggcgacggggatagtctgaagacggcgtggccggagttggtggggtgggtggagctgaacgcggcgttccagatcaaccgcgacaggccggacgtccacgtggccttctacatggtgggcacccagttgccgacggaccacgacgacctccgcgtcatcatcgtctccgacgccggcaccgtcgtcagtgttgaaccaggaggggggacgaccgcccaggtactcattgctcacagagacatgccggccgccggcggcgatcctcaggtggcggcggcggagcagctgcggcggctgaagtcgtcgtggccggagttggtggggtggccggagttctacgcggcgctgaagatcatcgacgagaggccggacgtgacggtgtacatgttccgcgacggcgacgacctgccgccgccggagcacgaccccgcccgcgtcgccatcttcgtcgacggcgacatccgcgtctcccggactcccgtcgtcggctag

SEQ ID NO: 54967 - DNA, 483 bp, Oryza sativa
  Clone ID: PAT_MRT4530_5701C.1
ggagcccgtcagggggcaaatcttggtcctacattggacaaggcacaggctgcaaagatacaggagcaggaaggcctacttagagcagcggtaaattatggtgaaggattgcgtgtaccgggagaccaaaggcagatgtattcatctcttcctagccatttagtggacgtacttccttttggagatggggcacataattttggtgataattctggtgtgtaccccaaaaatacctcaacatttgtacctaatgttgtcaacgcccagggaaatccaatgcagcaggtgtctggaggacagttacttggcagacctgctccatcacctggagctacaggaacgcctaattttgaaaatgtatctactcctccaatgccatatgcaaactcccctaggtcagggaccaatatgatgaacaccccttcaccccagcagcatttgacggcacaacaacataggcaaaaactgatgcaaacatctcag

SEQ ID NO: 54968 - DNA, 375 bp, Oryza sativa
  Clone ID: PAT_MRT4530_57020C.1
atggccggcgacctccaccaccctcccagtctccggcaccacgccgccatcctcctccgccaccgtggtccacgcagctattctcctccactgccgcaggtcacaccgctgtcctccttcatcgccgcgggggagaggcggcgacgccggctcctctcccctgctgcgccagccaaggaggaggatcgcttggcgcgagccggctcgcacgccgctgcggcttgcggtgggagaagcgcgtcatggcaccggcacaccgcggtggtggaggggagcgcaaggaatgtggaggccaccagcgccggtggccattgcgtgagtagtagccaccagagcttgctacagttgtggcggagtggcgaaatgaggagatag

SEQ ID NO: 54969 - DNA, 245 bp, Oryza sativa
  Clone ID: PAT_MRT4530_57021C.1
ccaatcttactgatgatgtcattcttaggggttcctaccccaataattgggtggacagtggtcgattgccttctaatgaaccgaagtaccttaattaaaagttggagttgatgggcaccaagaagttttgaatttttttggtggaggttttgggtaaacttttacttggttggtgcaccagaaaatttaaaagctggcttcttggtgagcttggattggcagcctgttgactttttttaaggcaa

SEQ ID NO: 54970 - DNA, 431 bp, Oryza sativa
  Clone ID: PAT_MRT4530_57022C.1
tttttcttggtttttttttttttttattattttttttttttttttttgtgtttttttttttttctttttgggggaggccggctcaccctaggggaaaacggattatgcgccggcactgggattcccccctcggccataaaaaaaaagccccccttaaacaataaggcgtcccttttttaaagcccgcgcttttaaacccgcggaaccatgcccccaacaaggggcacccctccggagcctaaaagggcctgatcctgaacttccgaactttccctcttttccgggggggcggccataaacttaaaaaatttctcccttttttttaaaactatctaaaatttagcctttgggggggggcgaaccttggatttaaggtttattccccccgggaaggtcccaaatttttttacaacaaaaaacccggttttttt

SEQ ID NO: 54971 - DNA, 1783 bp, Oryza sativa
  Clone ID: PAT_MRT4530_57023C.1
cagccccaattggagcattcttatttttccggatcaccatggaatcgaatcgttgctcctttcttggtctcttctgtttatcatgggatcaagcgagtacttatatattattgtaaggttaattacatggagattcttcaagccccagttggatggaacatgtggcatttctccgatgccacaaatcttttgagcaaaagttccagtgaacaggtctaaaattgaagtaaaccaaagcagataattgtacagtatccagcattgatcagtactaatttgctggagaaaatcactgatgaatcatcattatcgatcacgggatgccatatcaagaagctttgatccagttcatcttgggcaggatcctgtcgagatggaacagatgcttcctcacccggtacacatgcatcgtgtacattgccgccgcgcaggtcacgagaaagaaggacagcacgatcagctcgccgaaatccctggggtcggagacgatgatgcccatgacgtaggtgagcaggtcgaacatggactgcagcgagttctgcacgccgccgacgacgcaccggtcgctctccgggacgccgtcctgcatcagctgcatcacggctaggtcgaacatccacagccccagccgcgacgccgccacgccgcccatcagcatccacgccgacgccaatggcgcggcgccgccggcccagacggaggcgacgcagacgaggaggcagcaccactgcgcccagatggaccagaggcccgcgcggagcgtggacacgcgggcgtgcgccgccgggtacacccacgtcgcggcgatgccgacggcggcgctgacgccgcgggcgaggctgatcacgtatgccgggatcccctcccagtccagcgtcgccgtcatcagcgtcccgaagctcagcacggtgaagtagaggaacgcgagcgccacgccggggagcaccacctcctgccgcgcgtacaccgcccacgactcccagcacggcagcatcgtcatccacagccgctccaccttctgcggctgcgccgccgccgctgcctcgtcatcgtcggcgcgccgtcttgagatctggctggtctcgctgagcgccgggaagccggcgtagacggagacgaagagccagtactggacccacacggcggcgaggttccacgccgccagcgccgccgcggaggcctccatggacacgaagctgatgaagaacccggacagcaccggcgccagcagcttgcagctcaggtcgatccgccggatcaccgagttgatccccgtcagcaccgccgccggttgcccgccggcgatcaccaccacccattctctctcgatcagtatggtgccagcgagggtggagagcgcggcgagcgcgccggagacgttggtgacgacgacgagcgccacgaacgccgggaaccccgcggcggcgagccgggcgccgtagacgagcagcgccgtgacggagacgccggcggcgacgaaagacgcgccctgcagcagcagccacagcctgagcacctgcaggtatgcgagcctgtcgacgacggcgccgacgatggggcccagcgccgccacggcggaggcctccacgacgccgtacaccgccgtgagcaacagcgagcccggccagattcggatcatgtagagccccaccgagaactcccacatcctcgcgccccacctcgccaggaagtgccccacgtagagccgccggagaagcgccgcgtcgtccaccccgccgccgccgtcgaggagcggcgccgcgaggtggccatcactcgccat

SEQ ID NO: 54972 - DNA, 360 bp, Oryza sativa
  Clone ID: PAT_MRT4530_57024C.1
aaaccaaaccggaaaatcccggcgaaaaccaccttttaaggggccctggccggaaaacccctttttccccaccaaaggggtggggggacaacacaacccattggggggcccaactttggggcccgacaaccacccaaaggtcccccggaacaggggccccgggtaaaaaaaaaaaggcccccttcactttttgggggtgccgaaaaggcaggtttccccgcccacctttttggcaaggcagggggggtggaaaaaaccccccggggcccagggcccccgcttttccggaaggttgttcaggaaggaaccccacttggcgatgggcccccggggggaccccccccccaggggcaagttgcc

SEQ ID NO: 54973 - DNA, 879 bp, Oryza sativa
  unsure (1)..(879): unsure at all n locations
  Clone ID: PAT_MRT4530_57025C.1
ccacgaggccgcgtgcccatttcggcgcccagctctcgatttctaaagacatcgccatgatgaagcttgcgcatttgttcggctcttcttcttcgtcttcctcctccaagaaggagaacaaggtgagcagcaagaagaggaggagcggcgccaagagctgctccttcggctccaccacgtcctcgtcgtcgttggcggcgtcatcatccgatgattccgccgccaccacgccgagatccgtgttgccgacgtcggcggcggcgtcctcctccggcaccaagaagccggcggcggcggccgtgacgcgggaggacctggaggtggccctgcggaggatcgtgtcgagcaaggaggagctggccgcgatgctcgccgaggcggattacgccggggagctcgtgctggaggagatcgcggccgcagcggcggacgagggcgagctgaaggagacgttcgcggtgttcgacgccgacggggacgggaggatctccgccgaggagctccgcgccgtgctcgcctcgctcggcgacgagctctgctccgtcgacgactgccgccgcatgatcggcggcgtggacaccgacggcgacgggttcgtctgtttcgacgagttcgcccgcatgatgatgtgtggccgcgcgtgattatatataggttattaggttttgatcgatgtacgtgatgcatgttaatcgatcgtctcctgtatctacgtgtcgttcgtttgctgttcatcgtctcactgatttcttttgttctctttgtacgtagtacgnagtttcacagaagaaatgaacagaacggtcagttaggttgtttgtttgcaaaaaaaaaaaaaaaaaaaaaaaaaaaaaaaaaaaaaaaaaaaaaaaaaaaaaa

SEQ ID NO: 54974 - DNA, 289 bp, Oryza sativa
  Clone ID: PAT_MRT4530_57026C.1
acggcccgtcctttttttttttttttttttttttggaattttcacaacagccaaggaagaaatgaatcctacccgatataggtaaggcgtaccactgccggaacacagatcatgtaagctattgacagcttacaagtactagatacagttctaaaaaaaactgcctctggactacacaggaggggtacagaaggaggccaaactacccgcttatgtaatatgaagctcaggtgcccacaacatatggaccaaaaggggggggcctgcagggaccatgccaccaaggggg

SEQ ID NO: 54975 - DNA, 588 bp, Oryza sativa
  Clone ID: PAT_MRT4530_57027C.1
atgatgaagcttgcacatttgttcggctcttcttcttcttcgtcttcgtcttcctccaagaagaggaggaagaagaggaggagcggcgccaagagctgctccttcggctccaccacgtcttcgtcgtcgtcgtcgttggcggcgtcatcatccgatgattccgccgccaccacgccgagatccgtgttgccggcgtcggcggcggcgtcctcctccggcaccaaaaagccggcggcggtggccgtgacgcgggaggacctggaggtggccctgcggaggatcgtgtcgagcaaggaggagctggccgcgatgctcgccgaggcggagtgcgccggggagctcgtgctggaggagatcgcggccgcggcggcggacgagggcgagctgaaggagacgttcgcggtgttcgacgccgacggggacgggaggatctccgccgaggagctccgcgccgtgctcgcgtcgctcggcgacgagctctgctccgtcgacgactgccgccgcatgatcggcggcgtggacaccgacggcgacgggttcgtctgcttcgacgagttcgcccgcatgatgatgtatggctgcgcgtga

SEQ ID NO: 54976 - DNA, 1641 bp, Oryza sativa
  Clone ID: PAT_MRT4530_57028C.1
atgggagggcatgtgctggacaggaggccgggagggcggcacacgctcaccccgatgggcagcggcatgtacccctccgatggcctccagaacgcagcctgcatccatgcctacctcgccatcgcctacaccggcgccgaccaggtcgacgaccccgtcaacaccatcgtcacccaccccaagtgctacgacgtcaaggacgatggccccgacctctaccgccccggcatcaatgtcgccttcggtggccctggtggatacgactgtgatcacaattacacacagaggaggtggaaaaagccaattgattcagcaagaactcgtctggagggcagaataagggatcataaactggacaagctgatgattcaactgaagaacctgaggctagctttggatttgcatgagttcatatctcagcagaggaatggctacgcatctctccaactcctctccaggtggagacatgaagtcgggctaaacattgagattggggctttccttaagaaatatccccacatcttcgacatttatgtgcacccaataaagaataaccaatgctgtaaggtcactccaaagatggctgatttgattgcagaagaagatgctgccatctgggaaaatgagcctgctattgttaaacggctgaagaaactcctcatgctgtcgacagatggaactctgaatatgcatgcactgtggctcataagaagagaacttggggatgaaaatttagctgtagccgatgttgaagaatggagagtgaaggaatatacagaaaaatggttagctgaatctgagacaaaatattcttttcctataaactttccaaccggctttaagattgagaaaggttttagggaaaagcttggtaactggcagaggcttccctacaccaaggcttatgagaataatgaattgcatccaatccataatgttgagcagctcgagaaacatattgttggcattcttcacgaacttttaagcttgacagtggaaaagatgataccacttgagaggttctcccatttcagaagaccttttgatatggaggtaaacctgagggaacttattcttaagcaccctggcattttctacatctcaaccaaaggaagcacacaaactgtcctccttagagagagttacagtaagggatgcttggttgatcctaaccctgtctacaatattacatgcaaaggaaattacaaccctacccctatctctgtagctaccctgaggtggctgacaagtgggcctgccaacggtctgggagtccattcgccgggcgccccgtcctcggcccccgtgtcggcccgcggctctggcctcggagccatgtcaagagctctggagcccttgagctggctcatgggcctctggggcccccgaaccggcgccggggcctccggtggcccatggctgggctccgggatcctccgggccttccggttagcttcaaacttcccggagccaactgccctcttcgggctcggccggcttcctaggccatcggaatgggtcctccctacggagacgggctccgcagggtgctggcggcgggcctccgggcggaggccctggccccgccccagccaccagggagtgaatggcgcaagatcgcaatccttcccccaacaataa

SEQ ID NO: 54977 - DNA, 429 bp, Oryza sativa
  Clone ID: PAT_MRT4530_57029C.1
atgcactaccatgcgggacggggcgcagtgacgaggggccgacggcgcgggagtgatctctccggcctcaggccggggaagaggaaggagagggcgcagcaggcgctgacggcggcggcgactggccggtcggccaccacggcgcgcgcgcgcgggcggcgcggcgatttgggcggcatcggcgggaagcggcggcgaaggcggagggcgctcagctcggcgtggctcacgcgcacgcgcgccacgacggaacgggcgctacaactgatcaacggcaagctcgactacttgccctcccaacacaagacgtctggtagtggtactggtccgtccaagaccattgcgacggcctcctcttactacacaccgaccacgccggtgggcagcggccgcgaaagaagacatcgaacacaagtacgccgtgtttga

SEQ ID NO: 54978 - DNA, 1703 bp, Oryza sativa
  Clone ID: PAT_MRT4530_5702C.1
tgggtgatcattcatcctattaaaaaataaattatgcttcaagtgtctttgttgataatacaagtaatagcaaaaatagatacttaaatatttttaataagacaaatactgtgcgagatccttgactccagctagacgccgttgatgagaacacaactagctcggatataactatgactaccttatgtattaatcaatcaaagcatcaacttcaaacagaactagccgctgatctagaaggaattttagggcccatgagtacttgttggtaagcttatggagtcaaaattcttaccgagctattaggaatgtgcaaaacaaaccgcggattagacttctcggcgaggtcatccgggttttgacacggttgataaccagaggaggcatggtgctacgattgcgggacttaagagcgtgttcgttcagaagccgtatcgagttgtgtcacgactctactaaatcgacagtttatcaatacctatcaaaagatcgggacctaataacctcatcagccgtccagctcgcggccgtcgagcgtggcgaggacgaccaccgtgccgcccagcgcgtcggccagcgtgacccgggcctccgccaccaggtcgttgccgtcgcggcggtacacgtcgtgcggcttctcgtcgacgacgaacaccaggtcggcggggagctggctccactgctggttccccttccccgggaacgtgatcttggtccccttcttccaccccggcttcacctcgatcgacagaatctccgactccgttttcattctcccgctagcatcgacgacgttgcgggagatcttcatgttcttggtgacgccgacgtagagctcctccagggtgcacgccagcttgctctccaccggcggcggctggggcgacgccgccgcgccaccgccgccgtggtcacgggcgaacccgcctcttccaaagtacgcgccgccgccaccggcgtcccaggccgcctgctgcttggcgcgcgccgtggtgccggcgcccgtgttgcagtacgtgaacggcgtgctcccgaagaactcggcgaagatgtcgtcagcgccgccgccgccgccgccgggctgcggcggcgcgccaccggccctgagcccctcctccccgtactggtcgtacagcgccctcttcccggcgtcgctgagcacgttgtaggcttcggtgatgtctttgaacttggcctcggcgtccttcttgccggtgtggttcttgtcggggtgccaccgcatggcgaggcggcggtaggcgcggcggatgtcgtcgtcggtggcgctccggtcgacatggaggatctcgtagtagtccatcgatctcataatcctgggcagcaacagcacttcttcttcttcctccccggcagatccggcaatggtgaagatgcatgacaagaaccaaccatccttcgatcgatcgatcgatcgatgcctctctctctctctctctctagatttctagatacacatgggtttgatcgaatcggatcggatcaatggcggataaaatggattgatggatcaccagaggaaatgggagatgaaccagagcaacgctcccgtgagaaatgtgcagaggaagaggaggctcctgagcttgaaagtgcacaacatttgatcggtgagattagaggataccgaggttgaagaaggtaattaattaggtggtgattggttaattgcaccggacgcgtgg

SEQ ID NO: 54979 - DNA, 231 bp, Oryza sativa
  Clone ID: PAT_MRT4530_57030C.1
atggctgcggatctggccacccccatcatcacagcggcggatccggccacccccgtcgtcacggcagcggatccggccttccccgtcgacgcggcggacggatccagctccaagctcgcggagaagaggcgacggcagcccgcggcggcggtggtgacggcgatggaggacggagagggagaaggagagaacgcgggggaggagaggaggagactaaggtggaggtggtag

SEQ ID NO: 54980 - DNA, 309 bp, Oryza sativa
  Clone ID: PAT_MRT4530_57031C.1
atgggggagcgggattcaacagctaccggcgaagggtggccggaggaagagagacaacacagagaggaacagagaaaggaggagggcaccaaggaagaagaaaaggtggttgtaggggcggcgtctgcagatgccggcgacggggagagccgcgcctcctccgcttcgcaccgccccacgacaccaccgccgcaggcgcactgcccagatccggtgacggcggtgccagatctgccgccgcctggccgggatccctcgccgtcgccactcctggccgccggcgaaaatctccacctcccctacgcctga

SEQ ID NO: 54981 - DNA, 363 bp, Oryza sativa
  Clone ID: PAT_MRT4530_57032C.1
cgaagggcgactgctttgtgtatggtaagcctgtgcattggaccaaggattgtcctgatcgcaaggacaagaagtctgcaaacatggttgttagcgagggcggaggaacatcggggtacggtaaatccttacctacagttctctgtgtttgtcactcttctgattggtgggttgatactggtgctaatattcatgtgtgtgctgacttttccctgttttcctcttatcaggtcgggagagtgttgacggtcgttattggcaacggcgccctcccccaccgcaagcggcggtggtggagatggagatggtgggtgaatcgcagggggagccactccggtcggtcaccagctccacccgtcctcc

SEQ ID NO: 54982 - DNA, 3265 bp, Oryza sativa
  unsure (1)..(3265): unsure at all n locations
  Clone ID: PAT_MRT4530_57033C.1
gcagctgctgctgcaccaacaacaacgacaagaagaagaagaagacttggagtcggagcagcagcggaaccagtggttggtgatccggctgtacgaggccatcaacgcccgagaccacatccggcgagcacgcccttcctngcgccggacctcgagtggtggtaccatagcccaccccgcagccaccacatggcgcgcgggtgcgggcggccggcgtggggtgggagggggactgcttcagctttcgcttcgctgccgctgcgggcgctgctctccgagtcccagcgggaggtggagatgggggaggacttgctggtcacctgctactacatcgactgcggcatgaacgcctacgccatatcacctgcgcagctatattccaacaccccttcagattttgatttcaaacttgaaagtctagcccaaggattccaatccctatttgactttgcacaacatcttgccgcaaatgttgacattgtcttcccggtgatccatggcaaatttggtgaagatggtggtattcaggagcttttggagaaagcaaatgttccatttgttgggacaccctctaaaaattgcctccttgcttttgacaagtataatgcatcgcttgagctcaatgcacaaggctttttaacagtaccaaactttcttgtagagaaggacaaattagctaagtcgaaactggaggaatggtttcaaagcatcaatttggataaagaaaatggcaaagtagtggtcaaacctacaagtgctggatcgagtattggtgtagttgttgcttatggtgctaatgatgcagctgagaaagccgagggaataatttcagagggaattgacgacaaggttatcatagaagtttttcttgaagggggcactgagtttacagccattgttgttgatgttgggacagctaataacagtgagcctgttgttctccttcccacggaagttgagcttcaatcctccagtaatattgatattcaggaggatacaatatttaactaccgtcggaaataccttccaactcgacaggttgcttatcatacacctccacgatttccgtcagaggtgattgattgcatcagacaaggagtgtctattttatttcgttgtcttggcctgcgtgatttcgcgaggatagatggttggtttttacctactcccgttacctctctaccttcagctgaaaatactggtaaatttggaaataccaaatacggtgcagtcctcaaatacggtgctgtccttatgactgacattaatttgatgactgggatggagcaaaccagctttttattccaacaatcttctaaggttggattctctcactctcgaatccttcgtacagttgttcagcatgcttgctcgcggtatccgtctcttgtaccatgcagtaatgcatggactgctttgtccagaaaaatacaagcagcaaaacaagcagaagcaatccaaaaaggtacatccaaaaaaaaggtctttgtgatctttggtggtgacacttctgagcggcaagtctctcttatgagtggcacaaatgtctggcttaatttgcaaggttttgatgatcttgacgtgacaccttgtttgcttacatctggaaatggttattcttccttccacaaccaaaatatgaatggaatttcacgtgatgtatggacattgccatattcgttagtgctacgacataccattgaagaagttaatgccgcgtgtattgaggcaattgatccagaacggatggaattaacatcccgtttacgtgaccaagtaatgaatgaacttggacagtcattaagcaaatatgattggtttgcgggctttgacattgccgataagcaacctatcaaatactctcttcaacaatggatcaatcatgttaaggaagctcaagccgtagtatttatagcagtgcatggtggtattggagaagatggtactattcaatcgctgttgggatctgcaggagttccttacacagggcctggacaaatagcttctaggacatgcatggacaaagttgcaacttcacttgccgttagccatctggctagctatggagttcacaccataccaaaggatctgagagcaacagaagagatacccaagtcgtcttctgacgatatctggaatgacctgaaagcaaaactacaaactgaaaccgtttgtgtgaaacctgctcgtgatggatgctcaactggtgtggcaagattgtgttgtccgaaggacttggaggtatatgcaaacgcattggagggaaaattacagcgcatgcctgctaactgtttatctagggcacatggtgtcattgagatgccagtctctcctccagagtcactgatatttgaaccttttattgaaaccgatgaaattatcatttcaaccaaatcagtggatgatagcacccgacatctggtatggaagggggaaaataaatggcttgaagtgactgttggtgtagttggcaaacgtggagaaatgctgtcactaaatccaagtatcacagtcaaagaaagtggtgacattttatctcttgaggagaaatttcaaggtggaactggaatcaacttgacaccacctccttcaacaattatgagcgaggaagccctgcagaagtgcaaaagttgtatcgaaactttggcaaacactctcggattggaaggcttttcaagaatagacgcatttgttaatgtccagaatggggagatactgctgatagaggtaaacactgttcctgggatgactccatccactgtactgattcaccaggcactgacggagaaaccacccatctatccccacaagtttttccggacgcttcttgatctggcgtttgcaagggcgaactagctaaggtactactgtaactatgtttgtgatgtattttcatttcagtgcaaataaggtgactaccatgcatgtatcgatctgtattactgtatgcaatatgcaactgccgatgtgacgtgatcagtactgtaccgtgttgaaggattaatttttttttaaacctaaaaaaaaaaaaaggtcaccctcctcatgcacaaccgctgcctcgcgcagttccgccgccccgacctcccggccctcatcctcgccctctaattcatcatcttattgtgattaccatcaatcagctttaaccaatcccctccattctgctgttccatacgtcgatcacacctagtacgcgtaattacagtattatttgcaattagtatataataagaaatgtgggcccctttacttaacttttact

SEQ ID NO: 54983 - DNA, 138 bp, Oryza sativa
  Clone ID: PAT_MRT4530_57034C.1
atggcgacgctcctgctgccaccaatctgcgagcagccagtcgccatggcccggagacggaagggccgggaggagctcgtctacgcccgtcattttcccaactactccctccatccaaataaacaaacttatgattag

SEQ ID NO: 54984 - DNA, 878 bp, Oryza sativa
  Clone ID: PAT_MRT4530_57035C.1
ttatttttgaaaaggaaaaagggattattgcgtcagcggcgcgggttcacggtggaccgggtgcacggcgacggtctacgaaaacgaacggccgagatctaatcgattcaaaacgaacggccgagatcgatctaatccatcgcggtccacgggaaacggcgtcgatgacgtcagctgtgacgtcaccactggcggcggctcaacctcacacgctcgctggcgaacgacggcgcggcagcgcaaacggagggcacctacgggttgcgggcgacgcgacgaatcttaccgaggcatgaacggcggtggcggcgataatcggctcgacgacgacggcggtgctccggcgatcctcagcagaaacggagaggtggacgagaacggcgacggcttggcgatcacgacggcggccttcccgagcgatgacgacgaccggagcgacggcggtgcacggcaggacaaacggcggcgcaagagctcacgcggaggcagcgctacagacggcggcgggctaaggcgagggtggcgataggggctagagggcggcgacgaaggcccacggcggccggcgacgggaaggaaagattagggttcggaggggaaaaacgaatccgattcaagatcgaattcggtgatttccaaaggagaatagacgatgcttccaaaagagaaaagatagaggagatcgagaagatcgtttcccctcaatcaattcgaccggagatggaaaggcgcggtgggccccacctgtcagcgggagggagcgcgcgcgagcggcggctcggctgcgggctgagttgggccggggagagagaaagggcggttttgggccgactttcggcccaaagccaaaaggtggaatttaaaaacctttttcaatt

SEQ ID NO: 54985 - DNA, 526 bp, Oryza sativa
  Clone ID: PAT_MRT4530_57036C.1
ccgcggggagccggctcgtggggcggtggctcccccgcggatggccgggtgctgtgcgagatcccgtcctgggcccgtctgcttgggcggtggccgcgcgcatgggggacccctgcagtctgcgaccccgtccactgccccgctgccaggtggctggacttcctcctggggtcccccgcctgtccgtacctgagatgcatacctctctggtctgctgtccagatgttccccgcctggtcacacttgacatctcctgctctgcccgtcggttatgtcaacgtcgtcgaccactgttccgttttcagctgactggagtactattatgagacaatgtcctaagagtaactgagatataaacctctatggtttgcataccatataaacttctactggtcacacgatagaagatatgcacttgctgttgattatgtaaatgttatatactgaagtactattttgagcacttgctgttgatcatgtaaatgttatatactgaagtactattttgagatattttttatagagt

SEQ ID NO: 54986 - DNA, 122 bp, Oryza sativa
  Clone ID: PAT_MRT4530_57037C.1
ccagaccagtgcttaacatatgaaacctttccttgtcccattacacaaatatatcatatcccagttcggtaatccttaatgcactggctcctgcataaacaaaacattctaagggctactgg

SEQ ID NO: 54987 - DNA, 626 bp, Oryza sativa
  Clone ID: PAT_MRT4530_57038C.1
cttgtgtttttttttttttttttttttttttttttttttgttttttttttttaaccatgtaaaaaacttcacttttttatccttaaattctgaaattttaggttggggctaggcatggaaacaaagcaaggcccctttttaaggggaccaccgagtcatggggggaaaaatctaggcattccacttgaggattacggactaaaaatccctctttaactaagcaatgggatcatccttatcgcctataaaataacacccctaggcaaattcatcttagcgggtacgttgcctgaaggggctgcatcaggaactgaccaaagggtccatgacaaagggatgagggcatctcgatgtttgacatgtctatgcccggaacttcctttgctatctcctttggcggaaaaggaatgctcaagccgccatccaaaaaaaaggaattggacactggattttgggcatggttgctaaccatgtccctaatttgggaaacaacctgggctgatacactgggggtcccatattggccatcccagtacatcgaacatagacaatatatctgcctaacactaaacgccggacaaaaatttttcttaatcggcaaaaaagcccttttgcttttctgggca

SEQ ID NO: 54988 - DNA, 120 bp, Oryza sativa
  Clone ID: PAT_MRT4530_57039C.1
atgcatgtacgtgtgctgtacatgtgtgatggcggcaagcggcagtgcctcggctgggatgtgcacgtgttcgggcggtctgaccggcggcaggtgggcggttcgaccagcggcgactag

SEQ ID NO: 54989 - DNA, 2348 bp, Oryza sativa
  Clone ID: PAT_MRT4530_5703C.1
atggggttgcccaacctagacagctgtcacgcatccaggaccttcggccgctcatccaacggtgaagctcagagaacaaatcaacaatgtgcagtcaggtggcttggttctgagaagaatttggggggaggaaacacggctaatgccgaatatgttcgggttctcgaggagccggatgaggatcggaagctattatttttggcaatcaatcaaggaccttcacctgatttagttcatggccatttgcacattattcttggtttaatgttatcgaaagggcactcaacagatcctttggacagctctaagagtccttcagggcttgtgaagcacctcagcctgcctaatggggatgaccaaattacaacgtcagtgagtggccgtgtagatgatctcgccttccgttgctcatctgacacatatgatctcgacgaccgcgctttggttagctcacggaactgggctgtcctttctacagagggcagtagaccatcaccgcgttttgcgcatgcagcagcccttgtagggagcaaaatggtagtgtttggtggcgattctggtgatcaattgttggatgatacaaagatattgaatttagagaagcttacatgggactctgtagctcctaaggtccaatgggggaacagtgttattcttgttggcggtaaaactgaacctgcatccgatcgtttagcagtgtggactttcaatatggaaacagaggtttggtcacttatggaagccaagggtgatatccctgcagctcggagtggccacacggtgaccagagcaggtgctacattgatactttttggtggtgaggacacaaaaggaaagaaacgacacgaccttcacatgttcgacctgaagtcatcaacatggctacctttgaactataaaggctctggaccttctccaagatccaatcatgtagctgcactatatgaagataggatccttctgatttttggaggccactcaaaatccaagaccctgaatgatctgttttctttggattttgagacaatggtatggtcaagagtgaaaatccatggtcctcatccaacacctcgagccggttgcagtggagttctatgtggaactaagtggtacattgctggcggtggaagcaagaaaaaacggcatgcagaaacctgggcttttgatgttgtagaatataagtggtcggtatgtgtagtaccccctagttcctcgattgctacaaagaaagatttcagtatggttcctttgtaccacagggacaaaattgttcttgttgcttttggaggaaacagaaaggagccatccgacaaggttgaaatattggtggtactgcaaaatgaacattcttttagcaggcggtctgcaccagatgtagatcctttactatatgaatactctccgagcaccaaggagcttgccagccatcttaacaactgtgctcctttgtattccaatagttctgttgcaaggcacagtctcgcttctacggtagaacacccacctagaagggaattactctctgagccattgttacagaatccaaatttgggcgcttcactccacaggcagttccatcaatcagaagcgtgcagtttagcccaaaaactgcagaaaccgatcgacgatgacaagtacgatgacactgatgattgttcttcatgtcaagcaagcactccaaaagagtatcgaagcaagagaactggaactgatgctcagattaacatggccagaattttatccagcaaggaagaaaatctggagaccacgggatcaagtgcaagaaggatagcaagatgctcttcagacattagtcatctatacaatacaaaaatagtagacttgatcaaaagaagctctgcacttgaagaccagcttgcgactgccttggtgagcaaagaacaggcggagaagaatttatcgtcggtcatcaacagcagggagcagctggaaaggaggcttgccaataaggaaaaagaagctgagatgctgaaggagaagatagcaggcttagagttggcacaagaggagtcaaacaacctctcgaacaccgttcatgccgataatgaactccattcgacccgccgagttttagcgggagaacagtcgagggcattccagctccaggactcgttgcttgcattgatgtaaggaagagcgggaacgccaaagaaccctcctgtttaatccatagtaagcaacaaagagcaaagtgtgtttagttcatatgtttacatctctggaataatagtggttgtgtgtttgtaacatcgtcttgtacatcaatttgttacaggagtggagtgtatatgtaataacagggttcggttaaccattctgttacatgg

SEQ ID NO: 54990 - DNA, 1083 bp, Oryza sativa
  Clone ID: PAT_MRT4530_57040C.1
atggctcggcagcccgcgctcgtcgtcgtcgtcgtcgcagctgtcgcgctcgccggcggcggctcgctcggcttcgagttccatgaggccaccgtcgacgccatccagctcggcttcagcaacggcagcctcacctccacggcgctcgtccgcttctacctcgaccgcatcgcccgcctcaacacgctcctccacgccgtcatcgaggtcaaccccgacgcgctcgcccaggcggcgcgcgccgacgccgagcgcgccaccggccaccgttgcggcccgctccacggcgtgcccgtcctcctcaaggacatcatcgcgacgcgcgaccggctcaacacgacggccgggtcgctgtcgctgctcggcgcggtcgccaggcgcgacgccggcgtggtggcccggctgcggcgcgccggcgccgtcgtgctcggcaaggccaacctccccgagtgggccaacttccgcagctcgccgggtctccgcggctggagcgcacgcggcggccaatcccggaatccatacgtgctctcggccgatccgtgcgggtcgagcaccggtccggcgatcgccgcggcggcgaacatggcggcggtgacggtggggacggagacgacggcgtcgatcctgtgcccagcggcggcgaactcggtggtggggattaagccgacggttgggttgacaagccggtcaggtgttatcccgttcacaactaggcaggacaccgtcggaccgttatgtcgaacagtggcagatgctgtccatgtgttggatgctattgtgggttatgatgctcttgatgccaaagccacaaaagcagcatcgaagtatatccctgctggtggatatgtgcaattcttgagaattgatgggttgaagggtaagaggattggcataccagacggtttttttgatttcccaaatggaactgtcaggaagatggtgtacaagcaacacctcaacacaatgaggaagactacctctacggtcatctctactacgaccactgttatccccatcagagataattttaagaaccgtgagttctactctggtagaaaaaaatattatactaatatactgtaa

SEQ ID NO: 54991 - DNA, 1964 bp, Oryza sativa
  unsure (1)..(1964): unsure at all n locations
  Clone ID: PAT_MRT4530_57041C.1
atggcgcgggccgccccctcgctctctgccgcggcctcgacggctgcctcctcctcgacgactcctgccaagaagaaggttctcttgcccatcgccatgggcacggaggagatggaggcagtcatccttgccggtgtactccgccgagccggcgccgacgtgacgctggcatccgtggaggacggcctcgaggtggaggcctcgcgtggctcccacatcgttgctgacaagcgcattgccgcttgtgcagaccaggtgttcgacctcgtggctctcccgggtggaatgcctggttcagtgcggttgagagacagtgtgatccttcagaggatcacagttagacaggctgaggaaaaaagattgtatggtgctatatgtgctgcaccagctgttgttctcatgccgtggggcctccacaagagaaaaaaggtgtctggagagctaacaacaagccgtggaccagggacagcatttcagtttgctttatcatttgtagagcagttgtttgggccttgtaaagctgaagatatggacaacactttgttgacaaaggttgacgataatcttgaaagaagtattgaagtcaacgaaattgagtggtcttctgatcacaatcctcatgttctcattccaattgcaaatggttcagaagagatggagataataatgttgacggatgttttacggcgagcaaatgtaaatgtggtgttggcatcagttgaaaaatcaacaagtattgtcgggtcccaaaggatgaggattgttgctgataaatgcatttcagatgcttctgccttagaatatgatctaattatccttcctggaggacctgccggagctgagagactgcacaagtccagtgttcttaagaaattactcaaggaacaaaagcaaacaggcaggatgtatgaagcagggtttactccaggtgacattctaggactaaaaactcttggcatcttatattctctggcatggaagataactgccattgaaattgttgatcaggataaaacagtgacagctcatccttccatagtcaatcagctcacgtgtgaagttattgatcgatcaaaggttgtgattgatggaaatttgattaccgggatggggcttgggacggtcattgatttttcgctggctattattaaaaaattctttggccatggacgagccaaaggcgtggcaaatggcatggtttttgagtatcccaagagctgaaacacctaaaatatatctggcactctgtaatacgcagacgtgagacatttagttgtgctacaagtatattgcagtagctacgcttgagacaaaggtcaccggtgctcttcgtcttgctgttttatgggccttcaactcttcttgagacaacaacatattcctctgttgcgtcattggacatctggacggaaatcattccactatatttgttgggatggaccatttacattgagaagattcggtggaggtcaattcatctcgatatgatctgttggcacattgcgacacaggttgattactaactggatctaaatattgcaactgatcaagtgatgataaccttctgcttgacggatgcgcttttagaagaaacccatcatgttcagtggggcttccaaggacctgaagccctttcgatgttgctcttatgcccagctatccaatctgatagtagagacttccagcctgcgacaaaccaatttagcttcaaaattcagatcttttttcagcaattttgttgcctgaattctgaagttaactggcaatgtagtacaatggattccctcaatttgctcgatagttgatcagataatttgctcgatagttgatccaatatttgttgcaanaaacatgctcacatagngtatccacttccttttttgcccngttaaaaaaaaaaaaaaaaaaaaaaaaaaaaaaaaaaaaaaaaaaaaaaaaaaaaaaaaaaaaaaaaaaaaaaaaaa

SEQ ID NO: 54992 - DNA, 185 bp, Oryza sativa
  unsure (1)..(185): unsure at all n locations
  Clone ID: PAT_MRT4530_57042C.1
tttttagtatagagagctncaagancattacttgacagcaattggactacacanttgaatatattgttcaattggagagatcgacagagactatgcacacataactgacttcccaaggaggtctctactcttcaggctccaagggagtattgctcttgcagagtnctctaggggagctaggcggt

SEQ ID NO: 54993 - DNA, 2466 bp, Oryza sativa
  Clone ID: PAT_MRT4530_57043C.1
tcaatttctaagtgctagcgacgcaaagcagacgataatgaatattgcgcaaggcaagccaggtgataaactcgaatgtgcaaaaggagtgtcaaactagacttcgggttgtaagaccaaaggccctctgaggagcctcgtggcaatacgtaataacgtgagtaccactcttttttattgattttttttaatgcaacattattgcattaatgcaatgagaccatcgaataatggaatcgatacaccgatttatcagtacacccattctcacacaataatttagagacaattccggagttctggaaacatggtaatttcgcttccaccagacaaaacgcaggacacgataagagctatacacaacgggctctcagattataggcctccaaagaggctataagggtcatccgtgctgtgcaccgcagcaaggactgcagcaaagcacatcttgatgcaaaatatgttgacggcatccgcttctggccacctccaccagacccagaacagcctctatgaaattcctgatgaatccatttgaatgggaaacgattcactaactttgtaagactgttgagtgtaaggagttcccttttgacatgaccaccaaggaacttccatttgttgcacccgctatggcactgatgtagtaattattctcccattgctccataatccaatccttatgaagaaatattggtgagagttcataaacttgggatgtgaacccagttcccgcgtccataataagggcccaaagattggctgaagatgccactgagctaatgaacaatccatcatcatttcccttctctatgtgttgatgaagtctggcatctgctacattgtaatggtatctttgtttcatgggtctcctagcattatagactgatatccactgatttgctgggcttccaagtcgaactttcttctttggttgttcatcttcttcaagatttacaagcaaccttccacgtttttgtccagcctttagagcaccatcgattctaataggcctcaaatgctggggctcaatcaattcatcaaaaagggaaataagctttgcgtagtttggttcttcatcaaatctcatgtttgtcacgctctccaggaaaagtttaaaaggagggggacagaaacagcacaaaaggtctggagaggtagccattttcttcttgcaaacaagaaaactcttgttctcaccctggtagccttgccaaggtaaccttcctctgagaagaaatattaatgtatatgctaatgattccagatcatcccttctgctaccagtacggcctaaatgggcatggacactagcatatcttattgtacccctaaatatgtctggcctttgatcataatcaacatgctgtccatttggcgtttccttccatttagatgctaagccaagatcaatcaaaaaaagtttcttctcatcaggtgatccaggttggccaagtagaaaattttctggtttaacatctccatgaacgaacccctttgcatgaagtttctcaaggatagaaattgcctctacagcgatgcaagcaaccatacttggggtcatcgtctgcccaacagaattccaaacatcccaaagactaggtcctagtatgtccattaccagaacataatagtccccctgccggcctttgtagtgaacccagggtataccataacatccattcagagcactataaacttgccactcatatggagggccataattgcaacccttactgttgcggtgctcgaatttcaaagctacctcgatagcatcagctccagtgcgatcagttccaccagaaacccttctgccaacataaacctgtccaaaaccacctttccccaacttccgctctaccttgtattgcggagaatggcctacttgaaccttatccggaactggagatgcattcccatcatcttcgcctccaccaatcttctcagcactcccaccatccatcttcacaaccttattagcaagttcctcgatatgatgggggcctccagcagcgactccgccaatagcagctcctggaagaacctcacaaggttggtccgggtccaaatcaatcaccggaacacctcgccctcttcctcctgcccttcctcttcctgttgctctacctccacccctcccaccccttcctctaccacgtcttcctgccaccgtcggtgccaccactaccaagttctcagctgggtcctgtgctgcaaggtcctcaaccttctttgccttcaaccgagcttgccggactccactacgcaactctggcatcctttctccccatgcacttcctgccgcccacgaatctcggggagagagaccgtgcggcgtgtggcggcggcggcgaggcggaggaggaggaggggaaggatgggagagagagagagagaggttggtgtctggtctcgcggaggcgcacacacacacaccgcccgctgaggcccgaaccgagagacgct

SEQ ID NO: 54994 - DNA, 147 bp, Oryza sativa
  Clone ID: PAT_MRT4530_57044C.1
atggggtgctttacgatggacatgcttccagtctacggcgatgaaggcagtaggcctgaggaacggctgaccaccgtgctggcctaccatggagacctcttgggaggcctgtctctcagcattcagttcgacctgcggtacagttag

SEQ ID NO: 54995 - DNA, 183 bp, Oryza sativa
  Clone ID: PAT_MRT4530_57045C.1
atggccgtcattaccttcttcaccgacctcaacatcctctcataccttccccgccactgtccaattcttccccccaacgatctggaaaatgttgacctccacacccccggcctctcccgcgacgcatgcaggaagatggcggcaacagctccatacggcgatgggacaacgaatcagatctag

SEQ ID NO: 54996 - DNA, 455 bp, Oryza sativa
  Clone ID: PAT_MRT4530_57046C.1
gtgctttgtataaccaggttattgccttctatttcaagatgctggaatgttggtacatgtatttgctgtagcagcagtaaaaaaatgctggaatacaagatgccttgttacatgtgcgtgaagtgtgaacaatcatgacaacaagaaaacacttatttcactataaaaaaggtcacagggaaattgagtcactgttcaggtatgtaggaacaaaagggcacgtgctagatttatattgagaaacaccatttcttgtgaacagagttctacatgatcagactctccagtgccaccctgttatttaggtacaagattattttggaacagagaacaaactatatttacttattagtattatgtgcacttgttgcgtatgaatatatctaagccctcaacgcgaggaatacagtttgaggagactggcgacatacacaaacctttattggtactgatgt

SEQ ID NO: 54997 - DNA, 330 bp, Oryza sativa
  Clone ID: PAT_MRT4530_57047C.1
atggccagctccaccgccgcgccaccgatgctgccttgccgactgcgattggggtgttgctctccctgccatccccgccagtgccgacggcgggcgcgggctccagcggagggctgcacggtggcggcaggtgcgatcgacggcggcaagcgcgggctccggtggagggctggtcgatggcggcaggcgcggttgacggcagcgggcgtgggctccagcggagggctgcgcggtggcgacgaggaggcggcggccaggagcggcgccaccggctccccgtgcatgcgcgtcagccggatcctcgccgtcgctgccggagtccttccgtga

SEQ ID NO: 54998 - DNA, 360 bp, Oryza sativa
  Clone ID: PAT_MRT4530_57048C.1
ataatagccccgatagcataagccatcaagatgggttaccgcttgcgaagcgaactcgtcgaaaaaactaaagatacaatttccttaatcgagctctctctctaattggcaatgacagttattctaatctaggcccagactgagcccaagtcatactatatcgactgtatcgaccatcggctacatcaaccttgatcaactcacactttatttcctgccgatatggtgtccagccgatgtgcagtctgactccaaattcaactcgattccacatcaaaactactttgatcttcttccttcttctctgaatctgatgcgaaattccgttgttaacacccgctggttgtttcatggagtggt

SEQ ID NO: 54999 - DNA, 1050 bp, Oryza sativa
  Clone ID: PAT_MRT4530_57049C.1
atggctcaaggtcaacttgacgccgagagcgtcgtccctaccgccaccggagtccggaggcgaggaagacgtttttggctgtttcgtttccgatcatgtttcctcgatcggtttcgccgccgtatatgtctttcgttaggatgtactgccaacatcctcgcgtcgcttccgacgagggaaggatggtggacggcgttcgtcctctaccacggctgctggatgacgcagcaggccgccacgagcgtgtcgctgcctcgctggtgcacgcccagttcgcgcggcgccccgacgatgtgctcctcgccacctacccaaagtgcggcaccacctggctcaaggtgctctccttcgccatcgccaaccgccgccgccgccggcgaccaccccttgctcacccaaagcccgcatgaccttgtgccgttcatcgaggtgcccttccaccacctccaccctctcgccgccctcgacgcgctcccctccccgaggctgctctccacccacatgccgccccagctgcttccccggcgcgtcgccgagctcggctgccgcatcgtctacctatgccgggagcccaaggacgtcgtcgtctccctgtggcactacatgaacaagggccttcgagctgtttgtcgatggcttctccctgtacggcagtacgggccgatctgggatcactgcctaggctactggaagaagagcatggaggaacccgacatggtgctcttcctcaagtacgacgacatgatggccgacccagccggccacgtcaagaagctcgccgagttcctccgagccccgttcaccgacgaggaggtcggcgccggcgtcgtcgaggaggttgtgaggctgtgcagcttcgagaagctgagccgcctacccgtgaactcctccggggtggttgatcggagcagtggacggccgatggagaactcggtgtttttcagaaaaggtgaagtcggggactggaagaactacttgactgaagagatggccaagaagttggatgccgttattgaggagaagctgaaaggatctggtctcaccttctga

SEQ ID NO: 55000 - DNA, 4041 bp, Oryza sativa
  Clone ID: PAT_MRT4530_5704C.1
atggctgatgcatcttcctccctactcaatctcttcgtgggcagatctgtggcaacagttcgtcgccaatttccaaggaacatacaagcgccacgcgatcgaagacgacttacacgcgttaacatagaactctggggaatcattgagggaatacgttcgcgctttaataagtgcagaaacaccatttccgagattaccgacgcttctgtaattcgtgccttcaagtccagtgtcagagatcgctacactacccaggagttggcaataagacgcatcacaactactcgaagattattcgagatcgttgagcggtgtgcccacgtggatgacgcgctaagacgcaagaacgacaagccgaagaccgggggagagaagaaaccagccgcagacgcatttgagtcaaacaagaagaaaaatcgcaagaacgggaaaaggaaagctcaagcggaagtcctcgcagctaagtacgcgaaccctcccaagcgcccaaacccacagggcagcgatacaaagaaatcatggtgccccatacacaaagcggacagacattctctggaggattgccttgttttcaaaaagtcgctcgagaagcacatggcatttgaaaagggcaagcgggtacgtgttgtcgagaagaacgaggagacacctcctcatgaatcggactctgcgtacccgaactccgacctccacatctcacacatcttcgacggctccacaacgtactcctccaagcgagaatacaagaaagtggaacgtgaagtctgttcgacgtggcgggtggctgcacccaagatgaagtggtctgagcagagaatagagttctcggaggaggaccaccccaacacctctgttatcccaggtcgatatccgatcgtggtcgagcccactattcggaacgtcaaggtagcacgagttctcatcgacggtggcagctcaatcccacaaagtgagttgacaccaactgatcaacccttccatggaattactccccaatcatcatccagacctttgggcaagatcacattgcccgtgaccttcggccaagccaacaacttccgaacagagcagatcacctttgatgtcgctgaatttaatacagcttataacgccatcatcgggagaactgcacttgcgaagttcatggccgcatcccactacgcatatcaagtgctcaagatgccgggaccgaagggaacaatcactattcaggggaatgcaaagctggcggtgcagtgcgacaagcggagcctcgacatggtcgagcaaacgcccaccccacctgccatgtctgagccacccaagaaaccgtccgacatgccgggggtccccagggaggtgattgagcacaaactaatggtgcgacccgatgccaagccagtaaagcaaagactgcggagatttgcaccagatcgaaaacaagccatacgagaagagctcgacaaacttctcaaagctggcttcatcagagaagtacttcatccagagtggctagccaacccagtcatggtgcggaaggccaacggaaaatggagaatgtgcgtcgacttcacagacctcaacaaggcgtgccccaaggatcactttcctctccctcgaatagaccagttggtggattcaacagccggatgcgagcttttaagcttcctcgacgcttactctggctaccaccaaatcagtatggcgaaagaggacgaggagaaaacaacgttcatcacgccgttcgggcgcacggtccagggcgcacttagcaaccagcttggcaacaatgtcgaggcttacgtcgatgacatcgttgtcaaaaccaagacgagcgactcattgattgatcacctgcgggaaacgttcgacaacctccgacgatatcgccttatgctcaactcagagaagtgcacattcggagtaccgtcggccaagctactcggattcctcgtttctggcagagggatagaggcaaatcccgagaagatcaaagcaatcgagaacatgaagtcgcccacaagactcaaggaggtgcagaagctaaccggatgcatggcagcattaagcagattcgtcgctaggatgggagaacgaggacagcctttcttcgccttgttgaagaaacaagacaaatttatatggacacaggaagccggagaggcatttattgcactcaagcgctacctatcaaacccccctgtactcgttgctccccaacctaatgaagaattattcctttatattgtcgccacgccatattccgttagcactatcattgtcgtcgagagagagaaagtactcgccgacttcgtggccgattggaccatgccagataataagccagacaaccaaggcgacaatgagacatggacaatggcgttcgatggcgcactcaacagccaaggagcaggggcaggatttatcttaacatctccctccggagatcaattcaagcatgcaatccacctcaacttcagggcaaccaataacactgcagaatacgaaggactactcgccgggatacgagctgcagccgcacttggggccaagcgactaatcgtcaaagggaactctaagctagtcgcaaaccaggtgtacaaagactacaaatgctccaaccccgagttatccaagtatctctcagaagtcaggaagctagagaggaggttcgatgggatcgaggtccggcacgtctaccgcaaggacaacgtcgagccagacgatctagcacgacgcgcatccagacgagagccgctcgagcccggcacctttctcgacgtcctgacgaagccatcggtgaaggaagtaagcggtgaagttggcccgaacacccccgacatcagctcggaggtcactgaggtagaacgcgccgttgttgacatcgaaactacagacgactggcgcagcccattaatcaaattcatcagcagcgaggagttgcccgaggacgatacagaggctgagaaaataatccgcaaagcaaagatctactgtatggtcggcaacgacttatacaaaaaagcgccaaacaggatatttctcaaatgcgtctctaccgacgatggcagacaacttctcctcgacatacatgaaggcatatgcgggtcacacgccgccggtcggacattggtcagcaaagcctttcaacaagggtttttctggccaaccgcccttaaagatgcatacgacatggtccagcgatgtgaagcctgtcaattccacagcaagcacacaaagctacctgcacaagcgctccagacaatccctctgacttggttgttctcatgctgggggctagacatacttgggccattcccacgaggacacggcggctacagatttctatttgtagcgattgacaagttcaccaagtggatcgaagcagtacccaccggggagatcaaggccgataacgccatcaacgccgatttccaggactactgcatcagcttgggagtcaaaatatgcttcgcctcggtctctcatcctcaaagcaatggacaagtcgaaagggcgaacggcatagtactacaaaggataaaaacccgcgtctacgacagactcatgtcacacgacaaaaaatgggttgaagaactcccatcagtactatgggccgtacgcactacaccgacaacgtccaataaggaaacacccttcttcctcgtgtacggttctgaagccatgctccctggcgagttacggcatcaaagcacacgagtacagaagcattccgacgagagccaggagaatcagcgagagatcgatgtaaaccttctcgagaagcatcgtgagcgagttgccatccaagcagctagctatcaacaggccctccgccgttatcatgagaaacgaatccgagtatgcatactttcgatcggcgactacgtcctcagacaagttcaaacccaagcggggcgaaacaaactctcaccaaaatgggaaggaccgtacgcgatcacacaagtcttgcggccaggcgcattcaaaatggccgacggcgacggtcgcgaactagcaaattcgtggaacattgaccaactacgtaaattctatgtatga

SEQ ID NO: 55001 - DNA, 476 bp, Oryza sativa
  Clone ID: PAT_MRT4530_57050C.1
agctcgcgttcggtggttctgtgcgtgctgaagcggaccgtgggctccatgggcaaccagcacaaatcttgctgcgcgggcgagaaatgcgcggcagcaattacctattgtacctacgacactaccacaatgcctagacatcggtgagggtacaatgcgcaggtcggggagcgagcagaatcagtgactacaaattctcgacagactgctgacagcagataatccccgaccacaatgggtgtaccaggtgccgagggctcgatcacatgatgtatataatgtacagatagctcaacgccagcgaagtcgctcacgcaatgatcgatggagctgcctgatgccaaagacgggactctatacgaccaatgcagagcctgccgtggttctagaacgtggacatacccgacgggccttgtagaggatgctactggatggactattctatgacaccaagaacctgtcactaagctactata

SEQ ID NO: 55002 - DNA, 756 bp, Oryza sativa
  Clone ID: PAT_MRT4530_57051C.1
ggcgattgggaccctcgaggccggccgggctctttcttctctccaaacacaaatcgtcgccgcatcccctcaactccggcgatccccttggcggcggcggcggcttccccaatcaccccactccacctgaactacaggatggcgtccgccggcccggggctcgaatcgctcgtcgaccagatcatatccgtcatcacaaacgatggccgcaacattgtggggacactcagaggattcgatcaagccaccaacatcatcctcgatgagtcccatgagagggtctattctaccagggagggagtgcaacagcttgttcttgggttgtacatcataaggggcgacaacatcagcgtggtgggggaggtggatgaagaactggatgcgaggctggatctatcgaatctgagagcgcacccgctgaagcccgtgatccactaatggaaacgaatgaatgatgtactactactagtagtaagctaaacctaaatgtagtgttgtcccagaagttgtgaagaagtgggtgctagtgttgccgatgagtgaacttctttaacgtacgcgaggaagtccagcaagcggatgagcgagcatgaagaagaatgttatggttttatgtggtggtggatgggtgatgcatgtttgttgaacacgaacacagacacagtgactcagtgagtgaagatttggtttccattgtaaaaaaaaaaaaaaaaaaaaacaatgtacctgaatgaggaagccagcaaaaaaaaaaaa

SEQ ID NO: 55003 - DNA, 426 bp, Oryza sativa
  Clone ID: PAT_MRT4530_57052C.1
atggcgtccgccggcccggggctcgaatcgctcgtcgaccagatcatatccgtcatcacaaacgatggccgcaacattgtggggacactcagaggattcgatcaagccaccaacatcatcctcgatgagtcccatgagagggtctattctaccaggtatgtccttgttaattgtgaccttctccctggtttgctgtcaaatgctctcattggttcactagtgcagaattctgcaatcagcaataagtttctctcatggtgcttgaaagttagttgccaacatgagggagtgcaacagcttgttcttgggttgtacatcataaggggcgacaacatcagcgtggtgggggaggtggatgaagaactggatgcgaggctggatctatcgaatctgagagcgcacccgctgaagcccgtgatccactaa

SEQ ID NO: 55004 - DNA, 384 bp, Oryza sativa
  Clone ID: PAT_MRT4530_57053C.1
atggcaaccgccatcggatccgtgagggagaggccatcaccgtcgtcgtcgatgcagtcagccgcccaccattgttgccgtcaagatcacgttgcacccgaggcccacgatagtgaaccctccgtcgcccactatcgtcgttgtttagaccctggtgcaccaaaggccaacgatggtggatctgcaagggagagggcgcctgctgccggatctgtgaaggagagggttgttaagaggtttgtctgccctttgactcacaagcttgactgcctggttaagccaatgatgaagaaccaaaaagaggataaatctgaaaagaaggggacaaagaagaaagccgacaagggtgctaacaaacttggtgctgctcaagctgcatcttga

SEQ ID NO: 55005 - DNA, 186 bp, Oryza sativa
  Clone ID: PAT_MRT4530_57054C.1
atgtcgacgatcagacttatgtatgaatgggccaagaactcagaattgacactaattgggccgaaattcacaagtctacgaagtgaagcaatggaggaggccgccaaccaaaacttgagcttgttgggccggcccctggttcggccgaacgaggggattcggctgaacctcccgtggcgccgatga

SEQ ID NO: 55006 - DNA, 321 bp, Oryza sativa
  Clone ID: PAT_MRT4530_57055C.1
ataaatctaaaaggcatcatgattaataagtttcacaactgttattttaattacacccgttgaggccctaacaacatgacggttttagaaaaggtaaacgtctgtaagacgtactactatataaatacatgcccaacgacaaaaaatttctatcattactagtggaggcaaacccagattttcagaataatgttgcaaaacgcccactttaaggattaaaattttcttacaggctttctgatttgatattcatgaccgctgtcccaagaaccaaataaaggtcgtaatgaatcgtttacaccattatggattcgacactaa

SEQ ID NO: 55007 - DNA, 5512 bp, Oryza sativa
  Clone ID: PAT_MRT4530_57056C.1
ccggccgatggggtttgaccgataaatacaaattcgaattcgatcccccacccctcccctcctcgaatctagggtttcacctcccctcccctccgctccgctcgccggagccccaccatggaccccggccgaggcggacgccggagggccggcttcgagcgcgcctgccgcctgcccaacaccgtccactccgagatcgcctccgcgctcccgctccccacgctcccgctcaacctcggcgccggcctcctcgacgacgacgaccccctcgccgaccccgaccgccccgacatgatcatgcaggccgccaacatcgcccgcatcctcgccgacaccgacgtctcccacctgggcttcacggaggcggacaacgtcgagacggaccccagccagtgctcctggctctggagggaggtgctcaagcataaccccgacgccttcaccatcaaaccccgccctctcccgccttcccaagatccccttgaaggccaagaaaatcaaaatcaggagcatgagaagcattttgcgcatgttgcgccaaactttaatagcatgcgaaaggaccatggatttcctcgggatgaccctatcccacatagcgagcatcttaataatgatctaacacaagatccagttgcttcaaagaagccaaaagttaggaagaaagaaatccataattctgcttcaagttctgaccctagcattcctaatagtcaagaagttatcgccaacttctgtgagatggtagaagatttctgtggaagagtagaaattcctgatgatgcagatggtgatgagtggctatcaattccactgaatgatgctaaagttcttgtaaatgaaatcacatttgttcggtcaaaaaagattttgcatgagattccgatggatacacttacaaggctattacatgtgatagaccgtcagatccggtgttctcaaggtttatcaatagacgtgaaggaaaatgctgatgctgcagatgctgaacccttggttttctctgctttggagtccattcatgcagcattagctataatgacccaccatgacatgccaaagcagctgtatcgagaagaacttattgagagaattcttgatttctcacgacatcagatcattgattgtatggctgcaagtaacccaacctttcgagctctttacaaaccagctgaaaaagtcacaaatgatggggatgaggatgaagaagtcatgggaaatggaccagctaacaaaaggaggcgtactgctaatttaagcatgagaaaatcttctacaaacaaaacttaccatctagcagatgaagaacataagcaaatccagatgataacagcattgttagttcacctggttcagttcagtgcaaatgttcctgatggtttaaagggaacggtgaactggagcactattgttgatgcatcgatagacgctagttatccaatcaaatgctatgaagcagcaacggaggcttgctgccttttttggaccaatgtgcttcaacgtttcactgctgctaaatctcaggatatgtcggaagccaaagggattatagataatcttgtgcaggacttgctaactatactaaatttgcctgagtatccagctgctgccccagtacttgaggttctctgtgtgttgctgcttcaaaatgctggattgaaatcaaaggacacctctgctcgctgttttgctattgatcttcttggtggtattgcatcaaggttgaaacgtgattcggttatctgtagcaaggagaagctttggatattgcaagaactcactgatactgaaagtgatggctcgaaaatcttaaagaataaatgctgtatttgtcttggtggaagagattgtgtgggtgctgttagtcaggaaaacctacagtgtgattatgcctgtccattatgcttttgcaaacggcagctcagtgtgttacagtcatattatgagttgcaaaataaagagaatggcaaaagaaatgctgcctctcatcggaagaaatccactgtacctgatgaggtgacagctgtggatattgttcaacaaatacttttgacttatatccaggaaggtggtccacaagatgatggaaatttgtttacacgatggttctatctctgcatgtggtacaaagatgatccacattctcaagagaagatcatctactatcttgccagactgaaaactaaagacattctgcgggattctggcaatggtttggtattatccagagattgggctaagaaaatttgtttggcacttggccagaagaactcattttctagagggttcgataaaatcctttccctccttttggctagcttgagagaaaattctcctgtaataagagcaaaggccttgcgtgcagtcagcagtatagtcgaagctgatcctgaggtgttgggtgacaaacgtgtccagtctgctgttgaaggaaggttttgtgactcagctatttctgtccgtgaagctgcgcttgagcttgtgggtagacacattgcttcacatcctgatgtcggcctgaagtatattgagaaagtggctgagcggataaaggacacaggagtaagtgttcgcaaacgtgcgatcaaaatcatccgcgatctgtgtgcttcaaatccaaacacggacactactcgtgcctttgtggagataatttctcgtgttaatgacgaggagtctagtgtacagctattagttactgttacttggcaaattgtctttcatgttaaaaaatcaaaaccataccgcctctttgagttagatagggatcttgtatgcaaaacattttatgagctatggtttgaagaaccaactgggagtcataagcacttggttgctgatggtagttcagttcctatggagattgcagtaaagaccgaacaaattgttgacatgttgagaaagatgcccaatcacctacccctcattaccattgtaaagcgcaacttggctcttgatttccttccacagtcagctaaggccacaggcattaactcatcatttatggcatctctaagaaagcgttgtgagttgatatgtaagcgcttgttggaaagaatactgcaggtggaagagggagctgctagtgagactgaagtccatgcacttccttatgttcttgccttgcaagcattttgcattgttgatcccaccctctgcactcctgcaactcaaccttttcagtttgttgaaacacttcaaccataccttaagaagcagcttgttagccaattgtactgtggagatatttatgttctgggtgttaatgttgacaataaatcaacagcccagttgcttgaaagtataatttttgtaattgatgctgttcttccactcatatggaagccaccacaatctgtggtaatagagctagagcaggatctgaagcagatgattgttcgacactcctttttgacagttgtgcatgcctgtatcaagtgcctttgcgcccttagcaaagcagcagatagagggccaaggttattggaataccttgtaaacattttttacaagcatctgtcgggttctaactcttctaattctgatagtcagcttttgggccgatcattgttttgtcttggactgctccttaggtatggttctcaactcatggcagcatccgaaaatcaacttgatttcccaaagattatcagcttgctgaagaaggaatatcttctcaaggatgatttcagcttgaaggttcgaggtttgcaggctttgggatacatacttattgcaaagcctgattttatgctacgtaaagatatctcaaccctaatagagtcatcattgtcttctgttgttgattatagattaaagattcaaggattgcagaacctttttgagtatctacgtgatgcggaaagccagctcaatgcagagagtactggcaagcctacacccaatgcaacaaacggtggaagtgaagtgcctgttgctgcaggtgctggagatactaacatatgcggtggtattatccaattatattggaattctattcttgaaagatgcttggatataaatgatcaagtccgtcaaactgcactaaagattgttgaaattgttctccgccagggtttggttcaccccattacttgtgttccacaccttatagcactagaaactgacccactggaggggaactcaaagttggctcatcatctgctaatgaatatgaatgaaaagtacccttcattttttgaaagccggttaggtgatggcctgcagatgtcatttcgatttttcgagtccacaatcagcaatcatgatatggtggccacaaacatgaaatctaatccaattgcgtttgttaaacctgggatatctcgaatataccgcctcatccgtgcaaaccggaattccaggaacaaatttgtacactcaatagtccgtaaatttgagggtgataaccgcagttaccccacaattagctttctcatgtactgtgctgaagttcttgcgtctctcccattcacaagccctgatgagccactttacttgatatatgatataaatcgggttattcaattaagagctggagcagttgaggcaaatttgaaaaattggacttccatgtatcagcagcaagaaatggtgggtatgccaagagacactggtgatgttatgcatgagcctgggggatgctctgaccaaaatttggttgatgtctctcaaatgatgcttggcaatacatgcagcacgccagttgttaacatggccaaacttcaggaggattgccatggcgcgatagccctgcagctccttctcaagctgaagagacatctgaaaactgtctatagtttaaccgatgcccggtgtcaggcattttctttgaaggatccaccaaaatctggcgaaacaatctccaagcagaatatcccattgaacattagtaataccaacaccagtttgccgagctgcccgcaggatgcagcacgtgtataccaggatttcaagacagtgctgcgagaagacaccgtggactacgggatgtacaccgtttcggcccagaaaaaacgtccgactccaagaagctcgtcgagagtaagaagaccggcggctgttacaagaggccgtggtggtggtggtggtggtggtgatgaggacaccgatgacgaagattggactggtggtggagcaagagtgctggacttcagcgctcagggtgggcgagtaacaaggcagagggtccaagtctgactggctgctgactgactgttgttggtgcttcttgtgtacattgtaggaaattttataggtaacaggggaggtttaggtcgtcttaggggccattgttagtacatagaagcagaaaaaaggaaaggaagatatctagcttttacttagatgccattaatttggagcactccttttcttttgcttgctgttgcccaatttagatgttgtaattgctctcgggctctggcaatactccaacaaacaggttgtgctcctttctaattcaatggaaaagaaatgctttcttttgcttcccaaaaaaaaaaaaaaaaaa

SEQ ID NO: 55008 - DNA, 322 bp, Oryza sativa
  Clone ID: PAT_MRT4530_57057C.1
aagaattgggaaaaacgtcacataaatacatcattaaactgaaaactgaattacacaggggggacgttaagcagtaaaatagtatacccatcttggcgacatgctgagagcgacaaacacacagatgcactgatagtagagtgcgtgaaaccagggcatccctgattgcgttgcatgaaaggaggatgcgcagcgcgcggcttggggcttaagatccgggtgttgaatgggatcgacatgatgatcacctggtggtagatggtagccagggcagggccaacgatgggaccaacccattacaaccaatgggcattgcaggtat

SEQ ID NO: 55009 - DNA, 1689 bp, Oryza sativa
  Clone ID: PAT_MRT4530_57058C.1
atgtcaaggaaagatagcccctatgcctttattattgttccatacacttgtcttcagaagcaggcagcaagaacagctgcaaccatgagtggaggttcaggcttccctggcttccacaaacacggctacgatcgcgactacgcgcgaccgctgttccgtgtgtcgtcgttctccgacaatggcggtggcgaggagcaggagcactatacgccatcgccgccacgagggagaagcatgagccgcacgacgtccacggcaccacgcctctcgccatcggtgagcaagctcagcatgaagaagctgcagcaagttgtgaacgagaagtccctggaggatgaagagatggagctgatgaaggagaagtacaccaagctgcttcttggagaggacatgtctgggagtgggaagggtgtctgcacggctgtggccatctccaatgccatcaccaatctatatgcaactgtgtttggaacctgccacaggttgcagccactgcctcctgagaagaaggcgatgtggaacagggagatggactgcctcctctccatctgcgaatacattgttgaattctcaccaaaagtccaggccatgccagatggaagcactcatgatgtgatggcaacctcaccaagatcagacatactaatgaaccttccagcacttgaaaaactggaaactatgctcctggaaatattggatagctttgagaagacagatttctggtacatagatcagagaaagcagtccttcagtgacagcatgaagtttcagcgcagcgaggacaagtggtggctccctgaaccatgtgtcccagagtcaggcctgtctgatcggatgcaccgtgagctgcaacaaaagagggaccaagcaagccaaatccacaagatggccatggagatcaacagcggcatcctctctgaaatgcaggttccactgtcatacatagaaacactgccaaagagtgggaaggttggcgtgggtgatgccatataccggtacatgtctgcaggggatcagttctcaccagaccacctcctcaacttcctcaacttgagctcagaacatgaggcacttgagattgcagaccgtgttgaggctgcgatgtacgtatggcggagaaaagcaagcatgacccatgtggtgtcaaaatgggaaaatgttactgagctgaatgctgatggggacaagaatctgatccttgcaagtagggctaggagtttgttgttgtgcttgaagcagaggtttccaggcttgtcacagactaccctggacacaagcaagattcagtacaacaaggacattgggcaggcaatacttgaaagctactcgagggtgctggaaagtttagcctacaatattgtctcatggatagatgatgttctcattgcagatgggaatgccaggaaagggcataacatcagaatgcagaagcaggagttcagcaagctttctcctcaacagtactgaacatgatgaactaacatagaaaatgagtttatccttttgtaatataggattctctgtgattggactccttacttcactgcagtggcgtgtggaattttagttttggatatgcaacagtgtgttcactgcagtggcgtgtgcaatgctagtttttttatatgaggcagtgtgtgtaattggatttatgactgcttcatcatatatgcagattttatgtggatg

SEQ ID NO: 55010 - DNA, 305 bp, Oryza sativa
  Clone ID: PAT_MRT4530_57059C.1
tcgcgcacgcccatgtcctgattgcagaccagagctccggatggcctctacctgtttccgctccgccgcctccatggaatcctctgcctggcgctgggcggcctccctctcaattccatcctgcgcgcggagcgtcgcccctaccatctgcaggctgtcggtggagctcagatgcaccgcgcggttgtcactgctgcctctgcacatagcactggcggccgtaaggcttacatccccgtttagcacagcgtctctgagacttatcgcgctctttaaaggtactctatgccgtacctaatacggac

SEQ ID NO: 55011 - DNA, 1473 bp, Oryza sativa
  Clone ID: PAT_MRT4530_5705C.1
atgaagagaatagtgggaagtgaaccaaatgtaaagaaagtgaatccgagttgcttgttcgtgagagctattcccagttatgaaccaagtgatatgttcgaagataatctacagaggttagaagtaaatgacaagcatgatatgctcatgatgacaagcatggcgggcccgcccgccaccctcgctgacgggtggggcccacctgtcatcgccttcctcccgccgctcccgccgctcgcccgtgccctagcgccgccgccgccgcggattccgccgcatcccgccgtccccgcgcaccataatgaggggggaatcattccccgcgattccctctcccgattcccccactttcccctctctctctccctcggattcgtccgattttgtgcccgcgatcctcgccggcgcaatcaatggcggccgagatctccgcgccggtttccatctcctccggccgctttccctctctcccgacgctatttaattgttccccgtgcctctctcctccgtttccgccgttcgccgctcgctctcaccgtcggaatcgcgctcgcgccgctttcctctctctccgccgtcgccgacgagttccggttcgccgccgccgtcgctccggacttcctcccctctcggcgtcgcctccttcggcttcgccgcgtcgtcgtcgaccccgtccgctcctccgtttcgctcgccgaccgtcggagcgccgtcgtcctcgtcgtcccgaaccgcgccgccgccttcctccgtttcggccgccgttcccgtcgtcgccgtcgaccgggggcaaatgaaggctacacgagctgcggcccggtagtcgagatgtcgtggcagagggttggtgcgctgctgcttggggctcagtcctgcctgcctgtcccgggggttccggccgtaggcaggattggaatcgagcccgcgccgtcgcactctctctccgccgtcgccgccgagctccggtccgccgccgtcgtcgccccggaccatctcccgccccggcgccgcctccttcggcttcgccgcatcctcgccgacctcgtccacccctccgcttcgctcgccgaccgccggaacgccgtcgaccccgtcgacccgagccgcgccgccgccttcctccgctccggccgccgttttcgtcgtcgccgtcgactcggggtgagccgtggaccgccgtttcgtttccccctttccctcccctctctcggccgctgctccgccgtgccggtggtcgccggcggcgaccatcggggcgagggcgctgcctcccgccggccgcgccgccgtggctgccttcgggcgcaccgagcggctgccgcgtggggcccggccgtcagccgcccgcgccctcgggtgcggctgacgcgtggggcccgcggcgccgacgctgcagcttcggaggatccgctcttcgtggaagttgaagccggcatttgggaaagcgagcaaggcaagacacatcatccttga

SEQ ID NO: 55012 - DNA, 510 bp, Oryza sativa
  Clone ID: PAT_MRT4530_57060C.1
aagtgagttcagaccaagatacaccgacacctctggcaactacatctgttagaaggcaaggttgaatcacagcctcccgtccatgcatggcgatgcttgccaccagctgccccaagagttgcgggaacctgagcatccactacccatttggcatcggagcaggctgcttctggcaggctggcagcccgacttcaatcttacctgcgaccactgctggagatagaggcattagagaaagaggcattagctactggttggtaacccttttagttctagttgtgtaagcggtacacacatctaagactcaaaaatgggtattctttagtcctgattatacaacctaggactaaaaactatcctttaatagcgattggtgttattaactggtactaaagatgattttttatatttttttactaattgttgtttgttgtacatatatgtatgtatgtactcctccgtttcatattataaaactttttagcattttccacaaaaaaaaaaaaaaaa

SEQ ID NO: 55013 - DNA, 759 bp, Oryza sativa
  Clone ID: PAT_MRT4530_57061C.1
ttggggaaacctcccatacctcacgaggttaggaaaaaaatcctcgttgtggagcctcatcacctctgtgcctcttcctctcgcgggaactccctccatattaatatgtaggaataagttcatttgaggtcttcgagccacgtggcacttacgtagcaattttatccggaaatataataaaaccgcggggctcacatgtcagtcacacacaaaataataaaaatggtggcggctaaggtcgtcgtcaccgacggcagtgacttgccggtgttgtacaactggatggactacgcaccgacgttgtgatttcgcccgccgctggccacgactttgcatgtcgccgctgctatctcgccatcgctgccaagcaaccgtcgctttctaccgtctcaagccgctgtcgtcgtgtcctccttggcgacttccaccggaatcgccactcgccgctacggaccaccgctgctatcccactcgaatgcgacggtggccgccgtcttctcgcttccccaacggcccccgcccccgctctctctcaggtcatctactcctttaaattaagttaaaacagttgatgataaaaaacataacactgaacaaaggaattgtccatcaataaggagacagacacaggaacatatttctggtgatctaggtcaagttggaatttcataatgctgcgtagaatttcttattcataaactgaaacagaagggaaaaaaaatggcaaactccgtcaggttttcatctgatgaactagtg

SEQ ID NO: 55014 - DNA, 291 bp, Oryza sativa
  unsure (1)..(291): unsure at all n locations
  Clone ID: PAT_MRT4530_57062C.1
cgccgcgngacgagacgaaacggtaaagaatccggcagcagcaagcaggagagcgcgactcgncgtccccgctccgctccacacgcattgcccgctcgcccgcccgcccgcccgtaagcgcgacggnctggagcnatngggcggcgcgggggcgcggcggtngcggcggcgtncgggcggtngtgcctngtgatcctngccgtggcctccgcgctcggcgtntccgggccggccttctanttgcgctacaagaagggcttcgctncttcttcttcttcttctcggtcttcg

SEQ ID NO: 55015 - DNA, 239 bp, Oryza sativa
  Clone ID: PAT_MRT4530_57063C.1
gcttctcttgttaccagaccgcccgcagcaagcagcgcatcttcgaccgcggcatcgagttcgaccaggtcgaccgcgagcgaggctgggatgaccagatcctgtttaatgggttggtgttctacgcggggtacctggcgatgccgagcgtgaggcggatgccggtgtggaggacggacggcgccttggtgacggcgctggtgcacacgggccccgtcgagttctctactactggttca

SEQ ID NO: 55016 - DNA, 267 bp, Oryza sativa
  Clone ID: PAT_MRT4530_57064C.1
tcttgctggttaacccttttggggaggggggttctgcccttggtgaccccacagggtatagtggagtaaattagtggtactgatgatgcaaagaatgatctaaagcacctaagatccaccttgggatcctgtttcctggagattggctgcatggtattggagcttacatgcatgccaatgttaacaagagaagatgatatttacactgtatgcagctatgcagtaagccagtaacttttgtggtgccaaaaaaaaaaaaaaaaaaaa

SEQ ID NO: 55017 - DNA, 1678 bp, Oryza sativa
  Clone ID: PAT_MRT4530_57065C.1
atggccgatccctaccgcgcttacgcccctccctcctctctcggccgagatccgcagggtgattttcctaggcatcctccatccgagggctcttattatgcttcaagaatggctgctctccatggaacatcagatatacttagacatgatgtaccattacagccaagagcttatggtttggatggtgcagcaggagcaagtcatcctgctttggctggtcttggtggactggctgctggaactacagctcgggggcctagtccactggaagacccagctttaagtagtgatagggcctatgttctatgctttgtggagttcagtgatgcaaaatgtgcaataactgctatggaggctctccaagaataccgcttcgacgagaggaaacccgacgccgctgttcttaatatcaagtttgcaagcccggcatcccccccatcccaccctcccggcgagcagcgagcagcgagcgccgcgcggcgcgcccgatgggggagccggggaagctggcgcttccctcgcgcgagtcacccatcggcaaactcctgacgcagtgcgggacgttcaaggcccgcgatctgctcgtcaacacggacgccctccgcatcgtgtttcaaaacgaggtcggggaggtcgtccctacatgtctcttaaagaatgctgcggataggtcatctgcacgaatcttattaaatcatccattcctgagcaggtatgacgacctgagtttagatcttgcttcgtacttcacaaccgatggatctccgcttgccaccttcaatacaagcaaccgatatgatgacagatagtctgatgcaacactgcggactcagagcggtacgttcaaggaccgctatctgctcgtcaataaaatcgaccaccgcatcgtctcgcagcacgtgttaggggaagtccttcctataaacctttggatcgtattctgttcagtgatgatgatctataagcaatcaaatttatcggtaaaggtagtagtggaatcgtgcagttggttcgccacaaatggactggccagttttttgctctgaaggtgctaaaaggactgatgtacttacatcatgagaagcacatcatacaccgagatctgaagccgtcaaatatattaataaatcatatgggtgaagtaaaaatatccgactttggtgttagtgccatcattgctagttcctcggcacaacgagatacatttactgggacatataactacatggcgccagaaagaatcagtgggcaaaaacatggttatatgagtgatatctggagcttgggcctcgttatgctagaattggccactggtgaatttccatatcctcctcgtgaaagcttttatgaactccttgaagctgttgtcgaccacccaccaccttctgctccatcagaccagttttcagaggaattctgttcattcgtctctgcatgcatgtatacgtgcaaagcccaaaatatatctttggagccagtgcatgccagcaatttcgtgctctcaccagcaggccagcaggaaacggattctgaatacggaaaacgtttctatggggccatgcccatacctcactttggaatgcgcagggattggcccatccaatcacacagaaaaccaaacattggaactgttccagggaacaaatgcccccttactgccttggtatgcagattgtag

SEQ ID NO: 55018 - DNA, 1905 bp, Oryza sativa
  Clone ID: PAT_MRT4530_57066C.1
tcttcaaaatgagtggtgataggagaactagctaactaggatcatcttcttcattatacagttccaaagatgatcaccacctacatggcgatctagagtctagacacaccatttcatgtacaaacaaagctgggatccatggctgaactagtagggtacgcctccagcgcgaggggactgatcaagatgatcatggccaccgtgcagacggcgaagcggaacaagaagcagtgccgggagctggaggagcgcgtcaggatggtctccgccgtgctgagccgccaccgccgccatgagctgcagccgagcacgacggagacgacgatggcggcgcggctgccgccgggggcgagggaggcggcggacgggctcgacggcgtgctccgggaggcgcacgagctcgccgtcgcgttcagccagagcggcggcggcggcggcaagaagacggtgcggcggcgcctcgtctgctgggcgcggcgggtggtcggcgcccggcgggacgccgagaggctcgccagcgtcctgagcaggatcgacttctacctctcgctctaccccgccattgcccacgcagacacggcgtgtcgcgtggaccggctgctgtggacgaccaccgtgaatgtcgtcgtctccgccgccgtcgccttcgccgggtttgttgttgtctccatctccatggtttcgcccgagcatgaccagaatataggaccaagcataatgaaggcggttgaagagatcggaggaggtagcactacgaacaacgcagcctatgcacatggggatcgtggatatgccgcgccagggaaaagccgggcaatagagtatggccttgagctactgaagaaaggggttatttggagggttggcaatggtcaacagatcagaatttggcgtgatccctggatgcctagatgccattctcggaggcccataacgccgaaaggtacctgtagagttaagtgggtctcagagctaattggtatggatggcagatggaacgaacaaatggtaaaccaaattttctggcctattgatgctgagatgattctgaaaattcagctaccgacgagggaagcagaggatttcctagcttggcatccggatagactgggcatcttctcggtaagatcggcttacaagctgggcctttcgcttgcaaatgtggatagcagttctagctcgtctgagattgagaccaagaaagaagatgttgcgcatgccctgtgtcgctgcccccaagctaagagactatgggatgttatggaagttgcagggaagaaagcgaaggatattgtcggaagttatacaggtgcaagctggattttggatcagctacagttagtaccaggggaggagcaaccgaagttcctgatggtactttggcgtacctggcatgttcgtaatgagattacacatggtaaacgtccaccccccattgaagcttccaaaagattccttgaaagctatctctcgtcattactggaggttaagcaacatccccgagcggatttatcgaaagggaagcatgtaattcagtatggacagcagcagaaaataaacctcctaaaaggaccaatatcagctccctgtcgctgggataagccacctcagggatggatgaaactcaatgtggatgggtcctttgttcctaacactgggaaagggggcattggcgcgatactaaggaatagtctgggagaggcagaactactggcatgtaaagagggcctcaacatggcccttcaatggaccttcttaccaatcatgctggaaacagattgcctagaagcaaagaacttgctttgctcctccaatagtgagagatcggaagttgcttttatcgtcagtgacatcaaggaactgatgtctgggaatagggaggttgtcgtcaagaagattcaatga

SEQ ID NO: 55019 - DNA, 1319 bp, Oryza sativa
  unsure (1)..(1319): unsure at all n locations
  Clone ID: PAT_MRT4530_57067C.1
cggacgcgtgggctcaccctcccggcgagcagcgagcgggaggccttcgtcaccgtcgtcgtcgtcgtcgtcgtngtcgcccgatggggaagccggggaagctagcgctgccctcgcacgagtcaaccatcggcaaattcctgacgcagagcgggacgttcaaggacggcgatctgctcgtcaacaaggacggcctccgcatcgtctcgcagagcgaggaaggggaggaacctttagatcataatcagttgagtctagatgatctagacgcaatcaaagttatcggtaaaggtagtagtggaatcgtgcagttggttcgccacaaatggactggccagttttttgctctgaaggtaatacaactcaatatccaggagaatatacgcagacagattgcgcaggaattgaaaatcagcttgtcaacacagtgccaatatgttgttgcatgctgtcagtgtttttacgttaatggtgtcatttcaattgttttggagtatatggacagtggctctctctcagatttcctgaagacagtgctaaaaggactgatgtacttacatcatgagaagcacatcatacaccgagatctgaagccgtcaaatatattaataaatcatatgggtgaagtaaaaatatccgactttggtgttagtgccatcattgctagttcctcggcacaacgagatacatttactgggacatataactacatggcgccagaaagaatcagtgggcaaaaacatggttatatgagtgatatctggagcttgggcctcgttatgctagaattggccactggtgaatttccatatcctcctcgtgaaagcttttatgaactccttgaagctgttgtcgaccacccaccaccttctgctccatcagaccagttttcagaggaattctgttcattcgtctctgcatgtatccaaaagaatgcttcggataggtcatctgcacaaatcttattaaatcatccattcctgagcatgtatgacgacctgaatatagatcttgcttcgtacttcacaaccgatggatctccgcttgccaccttcaatacaagcaaccgatatgatgacagatagtctgatgcaacactgcgtcatcatctagctcgaaggatgatcctttggctgtccatctgtagaatctaccatctacctaactggccccaaatgtttcgtgtattttttgggagaaaactttgccctgtgtactgagctgggattgatgtctttgatatgtaaatttcgcgtaatttcatatgtagaacaattctaggatcattgggcattgaagttttgtttgggccgtgcacc

SEQ ID NO: 55020 - DNA, 477 bp, Oryza sativa
  Clone ID: PAT_MRT4530_57068C.1
atggaaacgataagtactactcgaattgtatccatattggtttccctagttctacttggagaaggggacacctacgggtataaatacaaggccccctagaaggagaggggacacagaacaatagatcaagacacaagatcaacatacaagccaacatatgacaagacaagacgccggatatcgacttcaaaaataagcatggctagtcccctacggtgtcttcggatactgtcaggaaagacatagcattgtctctgatctcgccgggcacggattcgaggaggaagactaccctattgtcgactagtgatgatacttcaagccgccaagtcgacaacagttagataggctaccccaaatattgtactgtctcgcatatattctagtaccaacaatccccatactgtccaaataccgtagtcgcgacatcaaacgtcgacacatattccccatgcccattcatgtacatgaattttc

SEQ ID NO: 55021 - DNA, 560 bp, Oryza sativa
  Clone ID: PAT_MRT4530_57069C.1
gctcgagtcaaccatcggcaaattcctgacgcagagcgggacgttcaaggacggcgatctgctcgtcaacaaggacggcctccgcatcgtctcgcagagcgaggaaggggaggcccctcctatagaacctttagatcataatcagttgagtctagatgatctagacgcaatcaaagttatcggtaaaggtagtagtggaatcgtgcagttggttcgccacaaatggactggccagttttttgctctgaaggtaatacaactcaatatccaggagaatatacgcagacagattgcgcaggaattgaaaatcagcttgtcaacacagtgccaatatgttgttgcatgctgtcagtgtttttacgttaatggtgtcatttcaattgctttggagtatatggacagtggctctctctcagatttcctgaagacagttaaaaccattccagagccctaccttgctgcaatctgtaagcaggtgctaaaaggactgatgtacttacatcatgagaagcacattatacaccgagatctgaagccgtcaaatatattaataaatcata

SEQ ID NO: 55022 - DNA, 345 bp, Oryza sativa
  Clone ID: PAT_MRT4530_5706C.1
tctatcgtttcggtctctatcgcctacagaggcaatactggccaggataggaagcgatcgatccgtacaatggcggccctgaagatgaacaggatgtccgtggcggatatgttcctcgccgacgtggaggtggctgatggccgtgtccctagcgcccacgttggggtaggagatggggctgtggccgacaccgacggcgatggagacgttggtgctggcgctgacgccggccatggtgttggcgacggcgccggcgcggccggacgagttctagttgtagctgagataggagccgacggcaacgacgacgggtctgtaaccggcagcgctgaaggcgtcgttggc

SEQ ID NO: 55023 - DNA, 1537 bp, Oryza sativa
  Clone ID: PAT_MRT4530_57070C.1
gcacgaggcgctcgtgccaaaagttgcgtttctctcctaaccagaccggtcactaacatcatcgatggccggacgagcgctcccagctctcgtctccgtcgtcgtcttcttcatctcagttcgtgatgccgcgtccaagtcgttcgtcatcaccaacaactgcgagtacactgtgtggccggggatcctgtccagcgccggctcggccgggatggacagcaccggctacgtgcttgcgccgaggcagtcgtggactatgtctgtgccgacagggtggtcgggccggctctggggccgcacactctgctccaccgacgacgctgggaagttcacctgcgtgaccggggactgcggctccggccggcaggactgcgccggcggaggcgcggcccctcccgcgacgctggccgagttcacgatggacggtagcggcgggatggacttctacgacgtcagcctggtcgacggttacaacctgcccatgctcgtggcgccgcagggtgcagcggcgggcggcaactgcgagccgacagggtgcttggtggacctgaacggcgcgtgcccggctgacctacgcgtggcgccggcgtcggcgtcgggcggcgtggcttgcaggagcgcgtgcgaggcgttcgggtcggcgcagtactggtgcagcggcgagtacggcaatcccaacacctgccggccgtcggcgtactcgcagttcttcaagaacgcgtgcccgaggtcctacagctacgcctacgacgatgccacttccaccttcacctgccccggcagcgacaccgcctacaccatcaccttctgccccagcacgacgggtgtgaagtcggccgggcagagctcggctgggctgcccctgatgaacgacaccatggtgtacctcgcaggcgaccaggccaactgcggctgcgccgctgcaccaccttgtcgtcctcctcgtcgccgctttgtccctggcgctcgccaccatgcactgaacccaagaggaacgagataacccacgcgcgatcgatccgtcgttcgcgacgagatcgtgtgacgcgataaggacgcagagacgaaatggacgcaccacctgctggccggggcccaggaacagtgagattcgctcatggctggtgctgattgaattcgctggtgctgatgcgtgcacgggctctgaggcaagctaggatgctgtactagctttactcttagttacgagaggagtgaaaaattaattgaaatagtagtagatacctatagttagattgttcggttagtaggaatacacacgtatattgtgtgaggtattattttctttctatagattctcactatttatttgtacgattgaggacgatgatatttaattatcattacttcatcaattagatgtggaatactcgtattattgaaattttggaatagctaggatgggtgaagtcacacatggagattggtattaacgtgtaaatttgtttggtgctccatggtgcccgggctccatgattcaattgagtatttactctaaaaaaaaaaaaaaaaaaaa

SEQ ID NO: 55024 - DNA, 600 bp, Oryza sativa
  Clone ID: PAT_MRT4530_57071C.1
atggcgatacagtcagaaaaaaatcgatggggcccacttgtcagcgctttttttctatccttctctgccccttgctctctcggtgaacagaggaggcagctggcgggcgcgaaggcggctgcggacggcgggggggcgctgcttccgccgcatcccagtgagcacccatccgccatgcacaaccctcctcgtctcacgccaccgcctcctcgtctcgtgacgacgacgcccgacaactccggctctcttctggagttccccgctcccgccttcgtttcccgcgccggcgccgaccgaccacctgccttcgtttccccgcaccggggttttcacctgcacagcaactctgcgctcgccgtgcttcatgtgagggcgcgtatgcaccacgtccagcccaagggtttcgtggaccgaatgcgtcaccgcgcgcacgcgcgcttggctggttcaccagcccagccgagtggccgctgctgttctttcctctgggctgaggcggcccgtgggttccgtcctccagtcgccaaagatgaaggaaaacacaaaataggagaagaaaaggacagagaaaaactacatcatgggattgttaggcgctaa

SEQ ID NO: 55025 - DNA, 1687 bp, Oryza sativa
  Clone ID: PAT_MRT4530_57072C.1
ctacatcttcaacagccttgatacacccaagtagtacagaaacatcaagtgaacagccaactcataacggtacggccagcacaagccattcagcaggacctcagccatcttccgcaccatatgcctctttgttaatggcttcagtgctgtttcaggtactaacccagactcataagtaaagttcttctgatctatgtctcctgttagttctggttctaattattgcaagtttgctgatgatgatgcatgtacttcctccgcccgcttgagctcctgctgctcacgccagatgaggacggcggcgagcaggaggacggcggcgccggcgagccggccggggacgaaggcgtcgtatatgacgacgaggcggcggaagacgccgtacatgaggacggagacggcgacgcagcaggagacggccaacttgagcgagatgtcgtcgtcggcgtccgtggcctcgtacagctcccctcgcgcttgctgctcctccttgtccggcggcgacgtcggcttccggcgaggccactccgccgctctggcccgcctgcgctcacacgcatcaatcacggcgagtacggaggtctccactagtatcactaggccccaagccaagagagtcagcatcaaacccttggttccgcggtagacgatggcaagcgcgaacatgaacaaggtgccgaagaggccgaacagctcgaacgggacgttctcgttggaccaccaggtgtctcccgcgacccgatgggtctcggagatagcccccgcggtcacgctcacgtcgctgtcgttcatccccgccgcctgcagcctcggcaaccactccagtggcatctttccggccgcgaacgccgcatcgatctcggcgtcgatgttgttgttgcggctgatgctcatgacggcgactagggccattgctacgtagaacacgcccacagccaagagcgtcaccatcaagcccatggtttcccggaagacgacgacggcgaccaggcacaggaacagtacgcccatgacgccgagcgcgatgaacgccattttctgcgtcgaagaccaggtggttcgcaggatgatcaggtgggtgttggcgatggacgccgcgatcacgttcacgtcgttcccgttcagccccgacgccagcagcagccgccgccactccggcggcattgctccggccgcgaacgccgcctcgatctcgccgtcgacgacgttgctgctgctggtggtgctcatcctgccgccgccgaatcgccgatggatcaatgctccttttgtccgtacagtttccgttgcgaacttgtatctgtgttttgttcgatcgatgtcgatcgccaagcggtacgtgctgcgcctgttcatctcgctcaagtacgtgacggcgaacgtggtggaccgccagagcgggcgcgtcgtggtgaccgcgtcctctgtggagaagcccctccgggacgggctcgagtgcggccgcacctgcaacgccaaggccgccgctgccgtcggggaggtgctcgccatgcgcctcaaggtggacggcctggcacgtgagcccatacacgctgacgccaccaaggaggtggagaagaaggggttcaagaaccgcaccaaggtctgggccatcctcaacgcgctgcgcgaacacggcgtcaacctccgccttgacgacgacggcgatcataggccacacgtctga

SEQ ID NO: 55026 - DNA, 363 bp, Oryza sativa
  Clone ID: PAT_MRT4530_57073C.1
atgcggcgagcaccggtgcggggaaacgaaggcaggtggtcggtcggcgccggcgcgggaaacgaaggcgggagcggggaactccagaagagagccggagttgtcgggcgtcgtcgtcacgagacgaggaggcggtggcgtgagacgaggagggttgtgcatggcggatgggtgctcactgggatgcggcggaagcagcgcccccctgctcagctcgcggggatggagatcggtacagcctgctcatcccgccgttggcctcagctcctcacccgccgtccgcagccgccttcgcgcccgccagctgcctcctctgttcaccgagagagcaaggggcagagaaggatagaaaaaaagcgctga

SEQ ID NO: 55027 - DNA, 399 bp, Oryza sativa
  Clone ID: PAT_MRT4530_57074C.1
cggtgtggagtccggttaggttacatgcgatctctctagttcggttacacgttatggagaacgtctaggcgtcttgaatcacattttctattatttctatataaaccgagccaccttcttctagcatcacacacgaaaacaatctagggtttgcctcctcctccgaaatgtgccatcactcgtagtccactctatccagctagacagcatgcactcgcgatcacgagagcaggtctccagaaactttgccttcgacgtcctacatcgggagaagatgctaataaggttttcggaaagcactttgcaggactggtcactggtcttccacaacggctcatcttcctctatgtttaagggctacacgtagacaacaaaaccctgcacctcgcgttgttcttg

SEQ ID NO: 55028 - DNA, 336 bp, Oryza sativa
  Clone ID: PAT_MRT4530_57075C.1
gctctaattatgtgcagctcttgacaagctgttaaattaccaaaggaatattcattcttgattaaatgttaatgacttatcaattctatatcatctctacttttagcaacaccatcactaactgataaaatatgtattaggtctatgggctgttaagaacatagcaaaatataaatgttgagttgcaaaacacattccagataaagggaacacccattgttcaaggtagtcatgcatttgagattatcttttacctacgcaatgggcaagcttcaatcttacctcctcaagttccacttcttccatgccattgttacttaaccaagaagataagca

SEQ ID NO: 55029 - DNA, 237 bp, Oryza sativa
  Clone ID: PAT_MRT4530_57076C.1
atgggaggcaagaagaaatccggctctggtttctggtcgtcggcgtcttggttcgcgtgcttgggcgcctcaaaggcggcggccgcgggctccggctcgggcggccacgccggtcatgggaggcaagaagaggaaatccggctccagtttgtggttggccgtggcgtcttggttcgcgcgattgggctcaaaggtggtggcgagctctggctccgccggtggccgcgcagggtatga

SEQ ID NO: 55030 - DNA, 336 bp, Oryza sativa
  Clone ID: PAT_MRT4530_57077C.1
atggagaggtttaggagcgcgtgggggccgtcgtcggtcggctctgtcggcacggcctcgaacgcgcggacgagaggccctccttctcgaagggccgcacgcccgccgctgaggagagggccgccggagctcgcgggacgccgggcatggagggaactcgccggcaccgggcttggagggagtgagggatgccggactaggagggggctgctccccgtcggcgagctggaggatgagcgaggagccgaggaggaagatgaagggaaggggatagaagctgacttgtgggtcccacactgctttttgggttgcaagccacggtggtacgccacgtag

SEQ ID NO: 55031 - DNA, 705 bp, Oryza sativa
  Clone ID: PAT_MRT4530_57078C.1
ggccttctcctgtagaggttgtgggcatattaaagaatgaagatgattctgcaagggccacatccttcagcaacgtcaactatggctcacctcaaccagtaattctggaaatgcaatcagatgatacactcaatgactctggaggtcttcgcgcagatgacatcaccagcagtgtacctgtacaacttgtgccagtattgaaagatgctactgagttctcacaagccaggatggaaggcacgagccaagatttcactgcacaagatacagtagcaaatgaagagcctggacagttgtctgggatgggggctagaggataattctgaagaacgacagaaacagccatcgaccactaacctcagtgagcaatcaagagttgccattcagaagaacagtaacgatgacgatgatgatgacgaggatgaatggttggaagaggaggagactggtggtgcaggggacacgatgattccaatagcagatgatgaagacgtgtcttttagtgatctggaggaagatgatgccacagcgtgacaacgttagctggtttggatactctagcttcctgcatctgatgttctggttccatgacacggcaaaatacaatgggcttggctgagttttcgactacatgctgctgttgcaaaatttacctcctctcttctctgtacgaagtgaatgcaaatatcagctttgcaacttgct

SEQ ID NO: 55032 - DNA, 261 bp, Oryza sativa
  Clone ID: PAT_MRT4530_57079C.1
atgattgcggagaagaaggagaaggagaagggctcggagaagaaagccgcggcgccggagaagcaagccaaggcaccaccggccgcacccataccttcgatgcccgctccagcactagcgctcatgtcgccagagcgccctcatggggctactcgccatagattcgaggacctgtcagtgccggtgccgggtcgccaccgccaaggaacccccgaccccgacctcacgccgttgcgggcggatctggcggcccctcactag

SEQ ID NO: 55033 - DNA, 4888 bp, Oryza sativa
  unsure (1)..(4888): unsure at all n locations
  Clone ID: PAT_MRT4530_5707C.1
agatcgaggaggccgtttgagcaaagaccgaggccatgataaccgccacaaccgccgcgatcacgacgatcacgaacggcgggggctgggcgatactggtcgaggacgtcgccataatgacgacgatgatggagatcggcactgagacacaacaggcgacgacaacaggattctcgagaacccgaccgacgtcctcgtaatcgtgcgccggaaccaagcgacccatcgtcatcatcgtcatcctcctcatcctcatcatcagatagacatccacgaaggacatacgatcgccgacaacccaccgtgcccagcgctgggtgtagagctttcggtcgttcacttcgagatgtccgatggcctgaaagattccgactaggaacaatagagaaatatgatgggagtaccgatcctgaagaattccttcaggtttactctacggtactctacgctgctggagcggacggcaacgtgttggcgaattacttgccaaccgcattgaaaggctctgcacgttcatggctgatgcatctcctcccctactcgatctcttcgtgggcagacctgtggcagcagttcgtagccaacttcgaaggaacttacaagcgccacgcgatcgaagacgacctacatgcattgacacagaacccgagtgaatccttgagggattatgttcggcgctttaacgagtgcagaaacacaatccccggtatcaccgatgcttctgtaattcgcgctttcaagtccggtatcagagatcgctatactactcaggagttggcaacgaggcacgtcacgactactaggagattattagaaattgtcgatcgatgcgctcatgcggacgacgcactgagacacaagaacgacaaaccgaagaccagaggagagaagaaaccagccaaggacgcacctaagtcaagcaagaagaagaatcacaagagtaggaaaaggaaagctcaatcggaagttctcgcaacagaatacgcggaccctcccaagcgcccagacccacaaggcagcgacgcgaagaaaatatggtgccctatacacatgtcagacagacactctctagaagattgcctcgtcttcaaaaagtcgctcgcaaaacacatggcattggtaaaaggcaagcgagtacttgtggttgagaaggacgctgaggcggttactcaggaatcagactcagcatatccagactccgatctccatgtctcgcacatcttcggaggttccacggcggcaatatccgatcgtggtcgaacccactattcgtaatatcaaggtcgcacgagttctgatcgacggcggcagctcaatcaaccttctcttcgccagcaccttggacgcgattaggatcccacgaagcgagttgacacctaccaatcaacccttccatgaaatcactcctcagtcatcgtccaaaccattgggcaaaattacgttgcctgtgactttcagccaagcaaacaacttccgaacggaacagatcacctttgatgtcgctgaattcgatacagcatacagtgccatcattgggagaactgcactcgcaaagttcatggccgcatctcactatgcgtatcaagtactcaagatgtcgggaccgaagggaacaatcactattcaagggaatgctaagctggcagtgcaatgcgacaagtagagcctcgacatggtcaagcacacgcctagcccacctgccacagctgaaccacccaagaaagtgagcaaaacaaacaagacgccgaaaccggacggcacaatcaagatcgttccactctccagtaccaaccccgacaagatcgaactcgcgctcatcaccttcctccgcgacaatgctgacgtgttctcttggcagccgtccgacatgctgggggtacccagggaggtgattgagcacaaactcatggtgcgacccgatgccaagccagtaaagcaaaaactgcggagatttgcaccagatcgaaaacaagccatacgagaagaactcgacaagcttctcaaagccggtttcatcagagaggtactccatccagagtggctagccaacccagtcatggtgcggaaggccaacgggaaatggagaatgtgtgtcgatttcaccgatctcatcaaggcgtgtcccaaggatcacttccctcttcctcgaatagatcaattggtggactcaatagccggttgtgagttgttgagctttctcgacgcttgctctggctaccaccaaatcagcatggcgaaagaggacgaggagaagacaacaatcatcacgccgttcggggtattctgctacgttaagatgccattcggactaataaccgcaggaaacactttccagcacatggtccagggcgcacttagcgaccaactcagaaacaatgtcgaggcctacgtcgacaacattgttgtcaagaccaagacaagtgactcattgattgacgatctgcgggaaacgtataacaacctccgacgatatcgcctcatgctcaatccagagaagtgcacgttcggagtaccatcgggcaagctactcggcttcctcgtctctggtagaggaatagaagcaaatcccgagaagatcaaggcaatcaagaacatgaagtcgcctacaagactcaaggaagtacagaagttaaccggatgcatggtggcactacgtaggttcgtcgctaggatgggagggtgaggacaacctttcttcgctctgctgaaaaagcaagacaaattttgatggacacaggaagccgaagaggcattcattgcactcaagtgctacctatcaaatccacctgtacttgttgccccccaacctaatgaagaattatttctctatattgccgccacgccatatttcgttagcactgtcattgttgtcgagagagagaaggtgcaacgaccagtctactatgtcagcgaagctctccacgacgcaaagacaagatatccatagatccaaaaactgctttgcgcggtaatcatgacatcaaganagctatgccactactttcaagcccacagggtcacagttgtatcctccttccctctcggtgaagtagtgagaaacaaagacgttgtcggccgcattgcgaaatgggtagtcgagctaagccagtttgannnnnnnnnnnnnnnnnnnnnnnnnnncaagtcccaggtacttgccgacttcgtagccgattggactatgcctgataacaggtcagacaaccaaatcgacaacgaaacgtggacaatggcgttcgacggcgcactcaacagccaaggagcaggggcaggattcatcttgacatcacctttgggagatcaattcaagcatgcaattcacctcaactttagggcgaccaataacatagccgagtacgaaggactactcgccaggataagagctgcagctgcactcgactgatcgtgaaaggggattctgaactagtcgcgaaccaggtgcataaagattacaagtgctctagccccgagttatccaggtatctcgcagaagttaggaagttgaagaaaaggttcgataggatcgaggtccgacatgtataccgcaaagacaacatcgaaccagatgatctagcacagcatgcatccagacgagagccattcgaacctggcacctttctggacgtcctgaccaggccatcagtgaaagaggcaagcggcgaagatagcccggtcgcccccaacatcagctcgggggctacagaggcagagcacgccattgccgatctcgagaccacggacgactggcgcaccccactcattaaattcatagatagcgaagagttgcccgaggacgacgcagaagccgagaaaatatcccgtaaagcaaaagtctactgtatgatcggcaacgatctatacaagaaggcaccaaacagggtactcctaaaatgcgtctcgtccgacgatggcagacacctcctcctcgacatacatgaagggatctgtgggtcacatgccgccggtcggacattagtcagaaaagctttccgacaagggtttttctggccaaccgccctcaaagacgcctgtgacatgtaaacacacaaagctgccagcgcaagcactctagactatccctctcacttgaccgttctcgtgctgggggctagatatactcgggccattcccacgaggacagggtagctacaggttcctattcgtggtgatcgacaaattcaccaagtggattgaagcgacacccacgggggaaatcaaggccgacaacaccatcaaattcatcaaaggaatattctgcagattcggattgccccaccgtatcataacagacaacggctcctagttcatcagtgccgatttccaggattactgcatcaggctgggagtcaagatatgctatgcctcggtttctcaccctcagagcaatgaacaagtcgagagagcaaacggcatagtactacaaggaatccaagacctactatgggccgtgcgtaccacaccgacaacatccaacaaggagacacccttcttcctcgtgtacggctcagaggcgatgctccccaccgagctacaacatcaaagtacacgagtacagaagtattccgatgaggatcaagaggagcagcgatacgatgatgtgaatctactcgaggaacatcgcgaacgagttgccgttcgagcagccagctaccaacaggcccttcgccgttaccatgagaagcgcatccgagcacgcacgctttcgatcggcgactacgtcctccgacgggttcaaagccaagcagggggaaacaagctctcacccaaatgggaaggaccgtacacgatcacacaagttctgcggccgggcgcattcaaaattgcagacggcgatagtcgcgagttggcaaattcctagaacattgatcaattacgtaaattctatgta

SEQ ID NO: 55034 - DNA, 1167 bp, Oryza sativa
  Clone ID: PAT_MRT4530_57080C.1
tcattggtttctcaggagtgtcctcaagctgttcagcccctcagccgaaatgctgcgcgccaccctaccgggtcggctcactctgacctggggaggagcctccaggtggaaggagaccaacaccgcggttaagttgtcggtggcgcctcgctttattgcctcctcaacgatctccctgcagcaggacttcacatcgttgtgttcttggaggcgcctccgtgcaaagtccaccacgttttggtttgagaagacgtcccagatcccgtcgctgccaattatcaagaactcgtcgtcctttgtcagtgtgatcatctttagctctggttcagcactaagtggacctcctggattgccagcttctttcatgccctcaagatgccagtcaccgagtgctctagtgactcctaacaaaccgttgaggtaaccatcgtcgacatagccaccaagtgattctacacgcagtttttcgctgaggctgcaaggcctgtggtccactgacatttcaattgcagtgccgcaccgtgaaagaaccgccctacaatctccagcatttgcaatcagaagagtccttccgaaaatcattgctgtaagtgctgttgtgccagaagacagtgttgtctttgcaaactgattatctgcatgaacaaaggatcttcttactactttctcaagctcaagaggaaaatcagcatcttccacaatgatccttggtaaattatcacgaacaaaatgggcagcatcttttccaccatgcccatcaaagaccccataaaaggaaatagcttcattatccaccgattgataaccaaagttcttagctaggtcagtaatacacacatgggtatcttccatgtattgacgacctccaatatccgaccaatccccagatcgaatatttgggacaaaattaccagacttattttgcttgaaatcagcagctgtagtgttctcacaaactctttccatcaggccaccaaacttcgcagctaacaaatgcagaaaacttaactcctccacacacacgatcagtctaggcacaatcagtactagccgaggcgaggggagttcgtcggggctcttgctcttgctcttcccggcgtcggcggcggcggcggcgggctccccaaaatccagcctctccgcgccctccgactcctccacgcacat

SEQ ID NO: 55035 - DNA, 1437 bp, Oryza sativa
  Clone ID: PAT_MRT4530_57081C.1
atggacggtcaggatcgtgttgtcaccatcatcggacgcaacctgtgggaaacaggaaacgacgccggcggcgagatgtctcctccgccaccgccgccgcctccccgcgtggtgatctgcgtgggagacgtccacggctacatctccaagctggagagcctgtgggcgaacctccagtccgcgctcccgcccgacgccttcgccaccgcgctcgtcgtcttcctcggcgactactgcgaccgcgggcccagcacccgcgaggtcatcgacttcctcctcgcgctcccgtcccgccaccccgcgcagcgccacgccttcctctgcggcaaccacgacctcgccttcgccgccttcgtcggggcgctgccgccgccgcccgacggcaccccgttctcgtccacctggggggagtacatccagaacgaggagaacgaggggtggtaccgtggccccggccacgaggggatgcattgccaggggaggagatggggcgggatcatgaaggagaagaggaatcccaagagggggtcatcgtacatgggctccatctacgacgcgcgccctaccttcgagtcctacggcgttgctcatggatccccagatcttgtgaaggctgtacctgaggagcacaaaaaatttctgcgcgaattggtttggatccatgaggaggaaaatgtacccattgatactaacgaaggacagattatttgtaagcttattgcggttcatgctggcctggagaggtcgattgatttgaatgaacagtttagaattttgagaactaaagatacaaagatatcaaaggttgcaatgctaagcgggaggcaggacgtttggaacataccaaagcttatttacaaattgcaactgaggcgactattgtacaggaacaggaggaaagtaggaaacgccactaaaatcaaggatctggctggcaagcagaccatcgttgtaagtggacaccatgggaagctccacattgatggcctccgattcgtcatcgatgaaggtggcggatatgcagacagacctatagctgctattgtgtttccttcgaaggaattgatcaggagcacagaaggaacttcatcccagaatcgatccagatatcatcaggagtagtgccctgatacagccctgcaggtaattccttactgaggccctcacgtcagctactggatgactgataagtgctctatacaacatctgaaggaatttgaattctgaaacacacctagcgtgcttagatctaaaacaagaaatctcacatgtaaattatctgccgtttcctttctacggctgtaccactatataccttgagaccgcaagtccgcaactacgaagataactcattttccccttccttgttgccatgaacagaacagattatatgattctcctgccttttctgttgagaggaaaaaaaaaaaaaaaaaa

SEQ ID NO: 55036 - DNA, 350 bp, Oryza sativa
  unsure (1)..(350): unsure at all n locations
  Clone ID: PAT_MRT4530_57082C.1
gtgtgccttaactcttgttactctgntctcgctctagcatnctagaaacagcaanctcctgcaccgaacaaaatgccttaaaatttttngttntcccngccgggctcctgncagcatgntaaatcttnaaaagttggancaatcaacnggggtttccgggcccgcnatccnggggcgccaaactttcccttggcgggtggctgggcacnggggccgccggcnnacaagctccggcccnnnncgnacgttcatccgcccatccaaacgaacacccggganggcgntnnaaancaaggcgttcnccaaccctcccnccaaagttacgaantcccttttntttcntgcaatcc

SEQ ID NO: 55037 - DNA, 1033 bp, Oryza sativa
  Clone ID: PAT_MRT4530_57083C.1
gcccctcgctcaatctcccatttcccctctaattctacttacttaagctagctaataattagcccaagaaaaatcccctctctcctcctctcctctcacttatcaagagaaaatcattttgggatctgaaaaacaaagatagatatgcaagatagctagctagcaagttatagtcaagttttgcttgatttctactcgatcgattcgatctctagctaggtgaaggatcatggcgtcgtcgtcgacgacgaacacgtcggacggcgccgggaagccggcgtcgtcgtcgtcgtcggcgtgcccgagaggccactggcggcccggggaagacgagaagctccggcagctggtggagaagtacggccctcagaactggaactccatcgccgagaagctggagggcagatcagggaagagctgtcgtctccggtggttcaaccagctggacccgcggatcaacaagcggcccttcacggaggaggaggaggagcggctgctggcggcgcaccgccaccacggcaacaagtgggccctcatcgcccgccacttccccggccgcaccgacaacgccgtcaagaaccactggcacgtcgtccgcgcccgccgctcccgcgagcgctcccgcctcctcgcccgcgccgccgccgccgccgcccacccgccgccgttctcctcctacgccagccagctcgacttcagcggcggcggtgcgtcatcaggcgcgcgcaatagctcgctatgcttcggcttcggcatgatcaacaggtcgtcgtcgtcttcttcttctccggcggcggcgccgttcttgatcaagtcgtttaacggtacgagctatggtacgctgctgccggcgacgacgtccatggcggcggcggcgcagcctgtgtccaccatcaccttctcctccactcccatgagagagacgctggaactgatggatgccggcggccatgagaaccacggcgacgtcgacggcggcggcgacaagcggaagggcgtgccgtacttcgacttcctcggcgtcggcgtgtag

SEQ ID NO: 55038 - DNA, 701 bp, Oryza sativa
  Clone ID: PAT_MRT4530_57084C.1
tcacaatagtgatgccgagttgatgcagtcgttgtcatcgtagatgacgtgatcgatgccgtcatcggtgatgcggtcgttgccgtcgtagaggacacggtcgatgtcactgatgaagcatactgcaaatgtatctgttagaggacgcgcatgtgtccatacttgtggacgatgcggcgacgacgtgttaatgaagaccaccggtaatgtagtgtcggcgaagacaaatgtatggctggtgtagaggaggtagcagccgcggcttacgtcgcatgtgcttctcctctcaattgagtagatggatgcagtagtagatggttccttcctgggcgtcctggtgctgccgtcgctgctgtccgctatcctttgcttcaaccggaagcaacatggttgcctggcttcaggcggggccttgcgccgccctccgcctgacacgggggacatccctgtcatttcctcataaatgcgtgaagacggtggactcaccatgcgtaggcggcgtactcggcagtgtgctgacgggacggggcatacctgcccccactccgccgcattaaatgcggcgtgggacgattggggcaccctgcacctcccgctctccccgccacatggtggccgggcgagggcctcggggtggcgcacgctgagggcccgagggtcgtgatgtggcacctcgaggcccttggccgcgtcagcgctac

SEQ ID NO: 55039 - DNA, 593 bp, Oryza sativa
  Clone ID: PAT_MRT4530_57085C.1
aagcccttggtatgggcatcaaccgaggctcaggatatggggatggtgatgatcagctcaccacatgcaccaagctggcgttagaccacattgacatcgacctggagaatgtccaaggcttcgacagcaacgccttcaccatgaagctgttcgacgacaacgacgatttgatctacttccacgtcgtgtttaccggcgagacgccgggacggcgcggcggcggcggcaagcgttactccttcgccgagatcgtcggaaaagacaagccggaggaggtcagaatgtggaaagagatggacgaagaaagtgaaaattgcaccgtggagaactgcatcttctgcaccgggatgtggcaccctctgtcgggtggcttctgtggatacaagaggaagaagaagaaccggagataggctcttctgcaattatcagccactgaagctgcatgtctcgtcgtctcatctttcttctaactttgttttctagaaataaattgggtaccaattaagtttagttgttatcgatgagttgtcgctttgatagatcgcgacgtagctggctgccgtgcttgcttgcattgcttagtatacatatgt

SEQ ID NO: 55040 - DNA, 449 bp, Oryza sativa
  unsure (1)..(449): unsure at all n locations
  Clone ID: PAT_MRT4530_57086C.1
ancnnnttnccaagagtggaaagcttatggaatcccttcatgatttaaggtgaaaaaagaaacagattatcaccagcctcggctctagtattaacaaaatgaaagttactgcattgccgaagctggtgccaaagaaaatgaagacattctggttccccagcgtaccaatgagctataagcacactgttaaactcgttcagtctagcctcaagagtgattaatgtacaggatatctcatctcttcacacccgagctttgtattttgaatccacaacagtgcccttatgaatggcaaacatgcttaccataggcgtaaatttatgggggctatacgagccagtgatcttctccgttagctcggctaagaactttctgacctcctgagctagctccatgattgaatcatcttaatggcatatgatgaacaatgcctttctcattgagaacaa

SEQ ID NO: 55041 - DNA, 123 bp, Oryza sativa
  Clone ID: PAT_MRT4530_57087C.1
gattgcatacaaccttaatcctttgaatgtgaaagaaacagggaataggataaaaccaaacacgccaaatagacaacaagctagacacaactgaagttgaaaggtactaccaggaccaagccc

SEQ ID NO: 55042 - DNA, 573 bp, Oryza sativa
  Clone ID: PAT_MRT4530_57088C.1
atggacggcgacgctggcatgataccgacctcgtcctccgccgagacgtcaccctcttcctccgatgtcgacaccgagtccacggggtcgtcgttctttcgggaccggagcacgacgctggggacgctcatgggcgtttccttcgacgacgacgaggagcagcagcagcagcagggggaggcggcgcgggacggaggggaggagagtgagaggccccgcgccgccgcggcagaggaggaggaggacgggcggcggtggcgcaggaggtggaggcgtaggcgctggcgcggcgccggcggcagctggtggcgcctttgcagggacgacgccggcggcacgacgtcgctgggccacttcttgcacatggagaggcagctcgcgggcaccgggctgctctccggcgacggcgtggaggagaggaagtcgtcgacgccgctgttcgacaacgggagagcgctgcctgcgcgggaggagagggccaagtggcagctgcggaggtcggcgcaggcgacgtcgtcgtcgctagtgaggctgccggtgctgctcaccgccatctgcagcggcggagcctga

SEQ ID NO: 55043 - DNA, 280 bp, Oryza sativa
  unsure (1)..(280): unsure at all n locations
  Clone ID: PAT_MRT4530_57089C.1
gaaatatatagggccggagcttccatatattgcattcacatatgcctcacccaacaacatatagtcgtagcagataccactcttacatcaagtcanagagagggggggtgaaacaaaaactaaatcanagcaccgcctgtaaaatcaaaagactatgaacaaacttggaacacaccaaacaaggtgggagacatcatctaatcagagatgaacaattaaacaaggctatatattacgattactgcttagtttccaccaaactcctcgcaaccctggggct

SEQ ID NO: 55044 - DNA, 258 bp, Oryza sativa
  Clone ID: PAT_MRT4530_5708C.1
atggcctggagtgagcatggccaaaggccagagctaggatcttccgatgttatagtaagggtgaaaacggggcggtatttctcgtcgcccgtccggccacattatttcgggacaaattcgggtacccgagacttttcagggacatcggatccgagtacgggtctttttggcggatataggattgggttcgggaacgtagtatctgacggatacgaattatccgtctatgcccctgtggtcctgaatgatgcctactga

SEQ ID NO: 55045 - DNA, 501 bp, Oryza sativa
  Clone ID: PAT_MRT4530_57090C.1
atgaccgccgccgccgccgccggcggcggcggacgcggggacctctccgccgcggtgtctgacgaagccaatgcgtggtccgtgcgcttcaagaatgctgccgtcgatgacggcggcgacgacgacgacgatgttgatgatgatggtgaggaggagggtggcgaggaggggaagggccccggcggcggcgagacggagaaggactcgtgcgtcgagaaggagaggcctcgtcgttcccgtggtgaggaggtttctgaagatgattatgttcaggctggaggagggctggaaagaaggaaaaggaaagcaaccgtgacacctcagaaggtgcagacttccaaagttgggatcaagaacaaaaaggttcaagctcagtatctgagtgacttggctaaggaagctgaacggctctctcaagagaatgagaatctgaggtgggaactcaaattcaagaccaaggatcttgagcatgcagtgcaaacggttgagtggaagaactag

SEQ ID NO: 55046 - DNA, 1941 bp, Oryza sativa
  Clone ID: PAT_MRT4530_57091C.1
atggcgatccctggttcgttctgtcacccaactgcgctgcaagtcttcgtttctgtccagtttgtgtttgcagttcttgtcccacatgcagctggacggcatcatcggcatggctgcgctccgttctcatgcggccatctcagcgacgtgtcgcccccgttccgccggcgaggtgacccgccggagtgcggcgttgcgtcctacgagctgacctgcaccgacgacaagccggctacgattcagatcgacaacgggacataccttgtgatggacatcaagtacaaggattctaccttctgggtcatcgacgccaacatctcggattcacgtaacaattgccctcttcctcgctggaatcgcgatttcggttactacgaccaaatgttatacgagcggcatggagaagactcccgccgccgcagcatccaagctgaactgatgccaccttatcagagcactacagctacttttgtgacatgttcgcaggaaatactgaagagcaatggcaagtacaggcctgttgcttgcatgagcaccaacagctccttcgtctacgtgctaactggcatgaactctgattctattgggagtctcgagccttcctgtgggtacctggccatgactcctctgggtgccggcgaccgcccactggtgctagagaatgcaagctacgccgatgttgtcaaactaatgagaggtggatttgccattcggtttccatacacaagtcgtttttatgtctactcctccaaaatcaaacagtgcatagcacagtcattccattgtccaactgatcgtgggtgtaataccactggccatgtggactttgaagtggattgctggttcattttggtgcccctggtgatattaaccttcttagcacgcaattactggaagataaggataacaactgatgcagtagagaagttcctccggatgcaattaatgaatggtccaacaaggtatgcctacactgacctcattgcaatcacaggtcacttcagggagaagctcggccaaggaggttatggctctgtatacaaaggtgttctccttccaggcaatgctcacgtggctgtgaaggtgctaggaaactctaactgcaatggcgaagagtttatcagtgaggtctccaccatcggtaggatccaccacatcaatgtagttcatcttgttggtttttgttcagaggaaataaggagggcgcttgtctatgagtacatgccacggggatcgttggacaagtacattttctcatctgaaagaagtttctcatgggataagctcaatgaaattgctttgggcattgctagggggatcaactaccttcatcagggttgcgatatgcagatactccactttgacatcaagccacacaatatccttcttgatgtcaactttgttccaaaggttgctgatttcggccttgccaaattgtgccccagggaccaaagttttgtgccgctcagtgctttacggggaacaataggttatattgctcctgaaatgatatctcgaagcttcggaatcatatcgagcaaatccgatgtctatagctttggaatgttgctactggagatggctggaggaagaagaaactcagacatgtatgcagagaactcaaatcagacctacttcccatcttgggtgtatgaccaactaactgagcagcaagtaggtgttggtgagatacctgctggtactgttgctaacatgcatgagcttgagaggaagctgtgcataatcgggctgcattgcatccagatgaaatctcacgatcggccgacgatgagcgaggtcatagagatgcttgaaggtggcgttgttggcctgcagatgcctccaagaccattcttctgtgatgatgaacccgtgtcacttgcggtgaattctcaccaattctcctccgagctaagtgaaatcttagaggaggatgagtga

SEQ ID NO: 55047 - DNA, 2304 bp, Oryza sativa
  Clone ID: PAT_MRT4530_57092C.1
atgggaggggttgtcgagcagatcgtggtgagcgccctaacgggggcgatgagccctcttctcagaaaactcaccaacctcatagagaagaagtacatggaggtcaagggcgtgaggaagaagctggaacagctcacgaaggagctaatgaccatcggcatcgcgctggagaagtacgcggccatggacagtccagacgtgcaggtgaaggcctggatggcggagatgcgcgagttggcctacgacatggaggatagcatagatctcttcacctaccgtatcgaccatgagccagctgacacaaccaatggagtcaagagggttctccacaagaccctccgcaaggtgaagaagtttcatcatcgccacaagtttgctaaggaaatcgaggaacttcatgttcttgtaaatgaagcgtacgaacggcaaaagaggtataggattgaagagggcacttctagcaaattgtgtagggagattgatcctcggctacctgccctttatgtggagaaggaaaaactcgtgggcatccagggtccaatgaaggaaatcatcaattggtttggtagtgaggaagtggagccaatagggcagcgtaagattgtctctattgttggacaaggaggtttaggaaagactactctcgctaaccaggtgtatcagaaaattaaaggtcaattctctttttcagcttttgtgtctgtatcgcaaaagcccaacatggataaccttctaagggagttgctttctcaaattaagagcaatgaaccaacggaatcatatagtgatcaacaacttatcgacaaactaagaacatgtctgaaagatgaacggtaccttattgtgattgatgacatttggaaaaggtcagcatggaaaacaatacaatgtgcttttcctataaacaagcacgcaagtagaataatcacaacaacgcggatcaaaagtgtagctcaatcttgctgcggcgcttcagatgagggctttgtctaccagatgaaacctcttaacaaaagtgactctgaaaatttatttctcacaaggacttttggtgctgaaaaaaaatgccccagtcagctggaagggattatcagtgatatactttataaatgtgatggtttgcctttagccattattactatagctagcttgttagctgataaaccaagaacaagggaagaatgggagagagttctgaattatattgtttctactagtgagaaggataatgacctggaggtaatgaacaagatactgtttatgagttacaatgatctaccacatcatatgaaaagttgtttactgcacctcggtttatttcacctaagatacttggggctccgttggtcaagaattgactgcctacctgtccaaattgggaagctagagtatctgcaaacactcgatttacgccatacttcattattagtgatgcctgaaagtattgttcagctcaaacggttgatgcgtcttgttggacatcatctcatattaccggatgggttcggtaacatggaatctcttcaagaattagggtttttaggttgttgtagaagctccacaaatttattaaaatttcagaaagatctacaacttttgagaaatttgagggtgctcaaagtaaggttcttgtctgaaggggaaacaggaaaagaagcaatgataccatccctttgcaagcttggaggaaacaacctccgggaagtctatattaccagctgcaatggaagtggagattgtttcgcagattcttggtgtccttcgccgtgtttcctggaaaagtttgtttacaagagtagttgcaatatacattacttttccaggtttccgaagtggattcatcccacactctctagatgtctcacctacttggatatcgacgttaaacaaatggaacgagaacatgtacgtattcttgaagatttgcctgctcttattgtcctacacctagacataggggaagctctcgtgtatggaatcaggatcagccatggtgcattccaatgtttggcacgcctacgtttctgcaacagatctggacctggtttggtattcaaaggaggcatgccaaagctcgaatggcttagcgttgaattcggtgcagagagggcacaatcaacatatggcagtttagaggttggcatccggcacatcacatctctcaaacatatcgacttttctatcctggtgctcactgacgatatggagtggaaaatcaaatcatctataaatagccaagtcaagatgcttccacaacgtcctgaggtcaatatcaaaacagtactccttccatctataaaataa

SEQ ID NO: 55048 - DNA, 2762 bp, Oryza sativa
  Clone ID: PAT_MRT4530_57093C.1
atatgcataacggcgtactaaatgaacattaagaataggcagaacaatatttacatatggtttgagcaccacactcaagttctcaagccttacatttcaggtcgctatctgagcacacagacagaggcagacaaccactgagcacatagtaaactcaacctacggacacataaactagaaaccagttaatcctcaaccaatatagagttttacaataagaaaacacagcatccaccctgaagaaaatgtacattcaatactgcagaatatagaaaacagtgccagagtttgcctcttggcaaaacttcacacatcaagaaaggaggaaaaaaagaaggcacagttttgtccattcaaaagctgaaaaatcggtggaaacacattttacaacaccaaacatgaaactactccccgaatagaacacatcgaacgaatcacaagcacaaccctgacaaatccaacatggtgatgagatgataaatggcattgaaaaattcagcctcgttctcaataggataaatacagtggcaccagatttgtcacttttgaaagccattcttgcaaggctttctgtaagctggctccgtccagttcacaactttgtttcagtttactcgtacagaagacaagcaggtggttccattgtttctactaacataagcaacaccaacaatcgtcctgaatggcaaggaaacctggttctcagcttttctcatacttggttatcgttcttccattcagtttcatcatctgcctctcctgttgcatcattctcagcatcactttcactggctgtttcccactcagagtcatctgcctcttgaccaaaagcatcactagcttctccctcgcaatggattcccccatgtttcaaagctgcttccctgaataaccaagctgtgcgcatctgcttcttcaccaaacgctcagcataatcaggaactttattttgctttaatgacaggtcaggatcattcgactgagagcattcatttataaagagaattgcatccaacaggctctctttcgctaaaccaagcatatcgtatgcttgagcccttctccacaagctttttgcgtggcgattcaaaggactatgaaggcacaatgcacgggtagcatcacttatggcagccaatggctgctgcaggagtagataacactgagctcgattactataaagcaccactctttctttcttagacttcattggacacagcgcaagtgcttcagagtactttgctgcagctcctgctatgttccgttatcccattcttggagcactgtgacaatggtgtcaccaagttttttataatcaccgagcattgagatatttgctaaatctatcagtgttgaggcaactctatctattaccttatgacatgtatttgaatcctgcaccaaccaaagtaaacaatcaacagccatgtattgccagtcatctgaagaacgggcaatgttgcagagagcttcaacaacactaggaatattagcaacatggcctcggccaagcttgctctggcagatagttcttagcaaaccaacaccagcaggtgagttctcatttacgagtccaccccacattccaggtaacttgactagaaaatcagccttgcaaatatcatggagaaattcagacttaaatgcgaagcagttaatgagttgcaaagaccagcactgaagttggcttgcccattcctcagctttgcgagattccatttccacaccacccatgcctcgtgtgagaaggtcacagtggtagccaatccttcggtccacagactggtaaaaatgagaatacacaatctctagagaacttgaagcaagttgaatagcaagttcaagtacttctccatggtcagcaactgcaggaaatgtactgggatatgtagccaaatgccccaaagctctaacagcaaccctttgctctacccaagttagcctgcctcgtaagagttcaaccaatggaggtattacaccagcacgaacagcacgttccgcaaactcctccatattcattgtgtaggatccaattatatgtgctgcataatatgggatgtaaatattctgatcatgagaaagccaacgcctgtttttcagtcccttccatataagagctgacatgcattcaaatatccccaagttgatgaattcagggtcatttggatgtgccatcgcagtattccaaagaccactaatagggagaacttgaccatcatcatcttgagaaggaagttccctaaagaacttcagtacacttgctcttcgtttactagggtttgcctctttcataacacagaagaaacatccaggataagggcaatcagattgtatcttctccatcgtgagagacaaatgattttactgacttcttttattcagatcctcaaaatcatactccaatcccgaagcttttggcgagcacccccagcaaaccaaatcgaggagggggagggagggagaaaaggggcactggatctgacgagccagcgagccctcgttgccaccggcccgtcgaggccgctgcgcgcggcggatctggccttgcccctgccggcctgcctgccgcctcgccgcttccctgcttccccggcgctgcctcgcacagcccaaaccctagattttcttggcggccagccgacggaaaggagggagcccgtgccgacgccccgcgacggaggatgggggcggcgacgagcagcggcgcacagctccaaaccccagctttttttcggtgggaggaaatgaggaagaggaggaat

SEQ ID NO: 55049 - DNA, 726 bp, Oryza sativa
  Clone ID: PAT_MRT4530_57094C.1
tgcatttcattaactgcttcgcatttaagtctgaatttctccatgatatttgcaaggctgattttctagtcaagttacctggaatgtggggtggactcgtaaatgagaactcacctgctggtgttggtttgctaagaactatctgccagagcaagcttggccgaggccatgttgctaatattcctagtgttgttgaagctctctgcaacattgcccgttcttcagatgactggcaatacatggctgttgattgtttactttggttggtgcaggattcaaatacatgtcataaggtaatagatagagttgcctcaacactgatagatttagcaaatatctcaatgctcggtgattataaaaaacttggtgacaccattgtcacagtgctccaagaatgtatgcaacaatatgcaaattcacggaattcaattagtactcacaccaaagaacaaattgatgaactcttgagttccaagcagagttttaaattggagaagaatatgccaaaggaggatcttcatataaaacaagcagcagcattggttgttaagttggaaggcaattcacttttctcttcagggaacatagcaagagctgcagcaaagtactctgaagcacttgcgctgtgtccaatgaagtctaagaaagaaagagtggtgctttatagtaatcgagctcagtgttatctactcctgcaacagccattggctgccataagtgatgcta

SEQ ID NO: 55050 - DNA, 1116 bp, Oryza sativa
  Clone ID: PAT_MRT4530_57095C.1
atggggaagggccgggcaccgtgctgcgccaaggtggggctgaacaaggggtcgtggacgccggaggaggacatgaggctcgtcgcctacattcagaagtacggccacgccaactggcgcgccctgcccaagcaagcaggtttgctccggtgcgggaagagctgccgactccggtggatcaactacctccggccggacctcaagcgcggcaacttcaccgccgaggaggaggagaccatcatcaagcttcacggccttctcggcaacaagtggtcgaagatcgcgtcgtgcctgccggggaggacggacaacgagatcaagaacgtctggaacacgcacctcaagaagcgggtgtcgccggagcagaagaagggtgggggcaagagcaagaagaagacgacctgcaccgacgtgctcgtcccgtccccatcgccgtcgtcgtccaccaccaccacgaccaactgctccagcggcgactcagccggcgagcagagcaacacgagcaaggaggaggaggaggagacggacaagatcgagatccccatgctcgagctcgacccctgctgcttcgacttcgacatgctggttgaccccgttgtcccggacacgtactgccccgcggtgtcggcgtcggcgtcggcgtcggcgccgacgtcgccgtgctcgtccacgtccccgtcgtgcgcccgtgcaggcgtggacccgctgctcgacctgcccgaaatcgtggacctcgggccggagctatggagcatcatggacggcggcgccggcgacgggtgcaccgaagcgccgccgccggcgtggagcaatgcggcggcggcggcggcggccaatgcaacagtggccaccacgaccagcctggaggaggaggaggggaaggagtggtggttggaggacttggagaaggagctcgggctgtgggggcccacggacgactaccactgccacccgggcccacaaggtcagcccggtcgcgcgggcccaccaccctccgccgttgtggaggacccagtgtcgtgctacttccaagcgggccccacggcagccgccacgtggcagggacacgagccctcggctgtcatcacgagtaaccccatggattactacgtgtaa

SEQ ID NO: 55051 - DNA, 219 bp, Oryza sativa
  Clone ID: PAT_MRT4530_57096C.1
ggaataaacagaaggccaaggaactgaatataatataccgatagatgagtacagccaacacagttgacatggcatgctccttactgatggcaccactgaccaccgatagcctgaaggtcaacagattgatgacaaccagagatactctcgctgaaccgaacacactgtaacgctcgaattcacctgatcccggtctatccgccttaacgaccatcgaaa

SEQ ID NO: 55052 - DNA, 163 bp, Oryza sativa
  Clone ID: PAT_MRT4530_57097C.1
atgtcgctccgggccatcggttaccttctcacccgaagccggagggggttctcgccacgcgggatcccccgtgcgcaggcggagtcctcgctggccacggcttcattggttggattggcggccacaattctgtgtttcaagcaaaacactgacaagtcaggag

SEQ ID NO: 55053 - DNA, 1526 bp, Oryza sativa
  Clone ID: PAT_MRT4530_57098C.1
aaggcggagatcgattcgagaacagagcaagaatcggctggagttcggatcagctacgattggattggctaaatccaagtcagactgggttaagtgatatagccgattccggcaatacgacttggtgtacgacatcgggttgaattgatgtgtttcaagataattgccatgcatggatagagtcctagccgatcggctatcgtttataggtttaaccgcggtttatttgtctctatttcttgttgattgcaggatcaaatcaactggcacgctaacacacccgaaggcgagctttggacctgcactggagttaagcagatctcccaggcctcgtgtttttcgtcaacacgcttttggcacgcccggtgggacagattaggagtcagataagcaattttcttcatggccgagaaactaccgccatcaccgtcctcggctagcccaggatttgttaaagaaaaaatccaaaagttatgtttcacggacgttgatgaagggaacattgtgaccatcaatccagaaaagttcacacctgacagctgaggagtatctccaggagcaagttgagtatgaagacttctagatgttttgtgcctagccccaagcctcgccttcctcactgcctcgctgacattcgtcgtcgcatctggatcgcgaaagtaggtccacccacgagcagccatagtgttgagttcatcgatgtatctctcccagtcaatggcagaacaatggcaatgcatacgcttgaactcttcatcagtaaagtctgcatatccgttagggccataagggatcgtccttggctctagtgcgttaaccttgtctgcccacagggtggcctccttgaatacttcgtagcggcgagccttctcctcctcagtgctgtatgaacggccatactccttcatcaagtcatggaacctggccttcatggtcgcctcatcgaccttcacctcctgcttcttaatggcttcttggtagtctctcgcctccttagcaaatgcctcatcgtccgggagagtcttcccatgttcgacgtaattgagatagctagaccacaggatcttgccatctttgtccacgaaccctgcctcgattgctgcttccttgctcaggtaaggctccttgccggcgtcctgggcagctggtaacttcttcgtgacttcctccttatcctcctccctagctcctgacttgtcagtgttttgcttgaaacacagaattgtggccgccaatccaaccaatgaagccgtggctacaacaacagagccaccaccaacggcgaaacccatctgtatcgcgtaacgagatgagagacatatgagctgcgagtgaacaaaagaaaagattttcgatttgagaaccgggtgagatgagagacgaacggagtggaaagagtgagctgctggcctccccgcccgagtgaggatacccagcgaggactccgcctgcgcacgggggatcccgcgtggcgagaaccccctccggcttcgggtgagaaggtaaccgatggcccggagcgacat

SEQ ID NO: 55054 - DNA, 273 bp, Oryza sativa
  Clone ID: PAT_MRT4530_57099C.1
atgacacgttaccgtgcgccgacatgccaccacgacatgccagaaaggaactgcgacatgacccttcgcataaccctccctagccaagcgcaccacactataggtttcgccctacccttaaaaccaaggcgggccccaaccatcaatgacacgggtggctgtgtccaccgtggagcggcggtgcgcccagaaggggaggggctcatcgggacggtggcgaccggcgcggggaagatgacgacaacgatggtgacggcggcgacggttcagtga

SEQ ID NO: 55055 - DNA, 1769 bp, Oryza sativa
  Clone ID: PAT_MRT4530_5709C.1
gcccctcaacctccgctccgtttccccaaaacaccgccggagcacgatctctgtcacgtcctgataaattcatcccgaaataaaaatcattttcacctccccaccgtcgccctccctctcccgtgccgctggacgcctccagccgccggtgccgcctcgaccgtgcgccggccggccgcgccgtcgcctcctccagcgtcgccgctacctcctccaccccggcctaccctccgtttcgcgcggtgaccgccggaggcgcgttcccgccgtcgcccttccctttcctccgcgccggccgcctccagccgcctgtgccgcctcgcccgagcgccggccggtcgcgccgtcgcctcctccagcaccgcagccgcctcctcttcgccggcctaccctctgtttcccgcggagacctccggaagtgcctccccgccggcaaccgtggtgttgccgccacgatttcgcctccggccgcctctgccgcgtccccggtgcgccggccgacctgctggctgccatcgtcgtttccttgtcaccgttcgtcctcgccgatcgacgtcccatcggttgcccggctcgtcgtctcgcggcgccgcctccgtcatcgtcatcgtagcggcgtgttccacgtcgtcctcgtccccgtgcagctgctgctggctgtccctcgtcgccccctcgccggccccggtcgtcgtcgtcctcgtcctctcgtcgttcccgatcgtcgtggcgttcgtccctccgtcgagccgttctcgtccgtcgtccgcgttcgtcaagcgagccgctgcagccccgtcatcgtcttcgtcctcggctccgcgtcgtcaagcctcgtgccggccacgtctcgcccgtgtaccggtgtcggtaatcgttcacgtgtgcgggtggtgaccgtgtagtgtccgtgttagtgtgcccgctcggtagccgcgtggtttccacgtgtgcaggccgtgtggtgtttagtggagtccgtttgtcggccactcgcctcggttgacacacggggtctgcttccgtcgacccggggaccgcctctgtgtactcggttttgtttttatgtattgttattgcttctttataggcttgtagctttgcttgtgtgcttcgcgtagcttctgtcgttccggaggttcccgaagcgtggttcgcggtcgtcgccgaaggttcggaagtccgttctctctctcttcccctttcaaaacccctaaaacctgttttcggtggggtttgggtgcatgccagttgtgggaagtagcaccccggccactataaggattaagctcgggcctctgttgcaaagcactaccgtacttccacatgtctagtgggtaaggcttagtttgtggctcagtctggttataaacaaaagtacacggattggagatggatgaagtcgggggtcgatggacattctccagggcaaatgaaggctacacgagctgcggcccggtagtcgagatgtcatggcagagggttggtgccctgctgctaggggctcagtcctgcctgcctgtcccgggggttccggccgtaggcgggattgggtcggtactcttgtctatggctaggatgggttggaaactatgtcacgtcttccgcctgtataccgtggtggtatgtggcacgtggttacacgtgaggaagatgtgtcttgtggcacttgtgggtgtgtcttgttgagtacggtggttgtactcagtcttgttcaatttttcccaaacccagaagaggagcccctggaggatgaaggctttggtgtc

SEQ ID NO: 55056 - DNA, 216 bp, Oryza sativa
  Clone ID: PAT_MRT4530_570C.1
atggccgacggccatggagactacggatgcgacaaaacgtgctgcaacgtaccagagaggttggaatcaaggatggaggcggcggccggtcttgaggaaagaaagagctcgatctctttaacgacgatgcttcagctcgattccttcggtggtcttgctcctaggtacttggaaaaaatcacggcgcagtggctcagcctgagatggcttggatag

SEQ ID NO: 55057 - DNA, 242 bp, Oryza sativa
  unsure (1)..(242): unsure at all n locations
  Clone ID: PAT_MRT4530_57100C.1
ccttttgggganctttgganttgtgctttttgtctcgggnggaaaaccgctctggaggtcgaanagancgtnattttccncccgttnaagatcncgaancatttncgttnnanatgatntnattnancagggaggggaggggnaaananacacantgggnctcaaaanttgttntcncgcttggggnatatatccatttccanccaaaaaaaaaaaaaaaaaaaaaaaaaaaaaaaaaaaaa

SEQ ID NO: 55058 - DNA, 352 bp, Oryza sativa
  Clone ID: PAT_MRT4530_57101C.1
cccctccttcccgccgaaacgcgacgccgccaccgccgctcgccgccgccgtcgccgtcggcggcgctctccctccctccccctctcccccccgcacgcgcggccatggcggccgggaagagctcgtcggcctccaaggaggaccagtacgcggcgctgcgggagctgtaccggccgcacatcgactcgttcgactactttttcgacgaggggctcgacaagatgcttcagtccatccgccccgtggagatcaccgtccccaactcccccaccaccctcagaatatccttggagaaaggtcatctgttcccaccaaaaagggatggtcggttggatgcaccgctctaccccc

SEQ ID NO: 55059 - DNA, 632 bp, Oryza sativa
  unsure (1)..(632): unsure at all n locations
  Clone ID: PAT_MRT4530_57102C.1
tttttttttttttttttgagcaaaacttctgatatattcacatctttgcaacctgatgcatttcaaatggctcatgcattacaagaagtgatttgagcacatttggttccaggccaagaaaattattgcacaatatcattatttacttcctctacaccgatcaatccttgcaacattaggaagaagcaaaagaaaaccttttttttgtttcaatcaacacagctataaaatatatcaaaactatagatcatatttgggtgttataagatctataacctccatgcctatttggtggtcaatggacatttctccctccctcctatgtgcttcagatagtaacctcccctagcttataacagggagttgttctccccaatatttacatatctaccatacaaagaatttatctccccccagttccctctctacatgccatcaatggcgatcgttaccgccaccggtagcccttccctgccccctcgccgaccttggcgaatgccttggctgcaactgctgtaagacganatgataggagcgacccgctatcatgtttcacattgtgccacaatcgcntcaatggctcggcttggagcacttttctcggcccngtcctcaaatcttactcggtcggt

SEQ ID NO: 55060 - DNA, 437 bp, Oryza sativa
  Clone ID: PAT_MRT4530_57103C.1
atgaaaaaggcacattctcatgctgttttccctttaaaaaaaagttgcggctatacagtttgatggtgggttaccattaaccagctgctatcgcggcaatcgcgacgctcagtaaccgtgtaaaaccagataatttcataatcaccggtagggctgaaaacggtacggaaactttccggattccggacctattttcgaaaacggaatttgtcggtcggaattttttcggaatttttgggaaacggaaacgaattcggaaatattttctcggaaacggaatcgaaaatgataagggcaatttccgtcggaactcggaatcgcagttaatcgccggcggcgacagatcgagaaataacaacacagccaccgggcactagctgaataaaggttgtggcactagtagtggtactatggaagaacacacaggtggcgctggc

SEQ ID NO: 55061 - DNA, 7974 bp, Oryza sativa
  Clone ID: PAT_MRT4530_57104C.1
atgcttgaagtccggacccttttgaaggagttcgttgtagctgagatcaagggagacatccaggctgcgcaaaagctgcgcacaaaagcggccaacaggtgttcaagtactgcatccctgcgcgcctctactccgacttttgctccaaagccaccctccccaactgtgcaacatatggaagtggggttgcttgaagctttggaagccgtctctgacaacctacatcgacacatatcccatgctcgacacatggatagtccacatcctctgcgcaactacaggaggaagtaccacaaggtgcagcgtctacatcaactggttagttcgcgcatcgcccagagttctgtcccggaggaagattggtctcttgacacatccatcctcatcggcaaggtgtgcaaatatccgagcatcttggaaccaccctatgacttgttccctgatgaatgggcacatgagccaaccaagatcaaggagaaagtcaggcgcgccatcatgaaggagtattggaagcggcgttatggggagcacattctccttcccggaccaacgatctccttcgactacaacacatacgccccttgccagcagagcacatgggagccatgcctccacttgtccgcggtaggaggatcgtccgactacaacaacaacaggttcgttgtcctgagacctgaggcacctgctccaagaagtgaagacttacgacaagaacttcacgagttgcaagaccggatggctcaactgggaaggcggctacaagaccatgaggcaccatcaacacatgctgggggcagatcaagacgataccaaccaagctatcgtcctcaacataatagccgcacattggctcctcggcatacacccctgccagcccaagtgacgaggcaaaggcagacggcgccaccaccacgctggaaccggtggttaagacgccaagatcatcacgcatcttcacgccctgctcaagaatggcgagttcgaggggctcccccaattcaggcgccgcctcacgttccatcttctccaagacgaggagtccaaataccaagacttcaacatgcacctaccgagaaccaacgcaagcgggagcggcgtcgcaacaaccgttacgccctctaccgagagctcgaagacttggagctgaaacacacccaagttcgtgttcatccagatggagaagttcgtcaagaagatgagaggattacgttccgcatctcccccaacttggagagagacgcaagatatagctaccttatagctcgcttgaccccaagaccacgaagggtgagacctgtggttgatgaaaagagggagacgacggctatccaacctcgccccgtaaccatcttgcaacgatccaagggtcaagcacaagtttccccaagtacatcatcaccaaagaaccagtttgagcggaatgaatctactccaatggagggagtcgagcaggcaccaatagaacatgttgacatggcgccgcgtcaagttgatgccatccttgagaaagatccatcccccgttcctcccttcggagttaagcaaaagatgggaagcgagaaccgggaagaaacacaagagaatattgtcatgtgcggcgcattagtcgcacactccgagattgagtctagtgctgtgtgggttcctccacctgtcacgcaagaactcacttacccttctgatgaggagattgtaccaaacccaagggaaagggatcttcgtccaaaggagatcaaaatctccagtcaagctgcctaccctcatcgctacgtcgacatcacaacgcatcttccccaagaccaaagtgatctagcacaagttgcaagtcgacctggtgctaatactcgtgtgaagtccatcgcaatcagaagtgttgaagaagttatatctcaggcaagggaagagcaggaagatcacattaaggatggagaacttaccgaaccagaatcatcatcatcatcagcatcctccttggagatgaaccttaatcctcttcattacaatgatctcaacctgtccataccttcggatggagaacgttatccggctaactttgatagtgcaccggcccatatggtagtagatggagaaccgaagcaagatgttgtggtactcccggggcaggacattaacccacctccgaggaacaacgcgagtacatcaagagtaccaccagcaagcctagaagaacaaatacaagagcaaagacaagtggtagatcagttaacggcgaaacttgaccgcttcatcgacatcatgacgacatctacttcaaacccaccacgtgttgacatggctccggccattatagatccgcaaattgaagaattggacgccattgcacaacatccaacacaaacccatgacgcccgacgttctacatcaactcccaccacattgaaagactatcatgacatagttgaagacctggtgaacaggcggttgaagcaaatctccatcgagcaaacacccagaccaatggagagtgagctcgaaaagccatatgaagcctggcatgatttagttgctttcccggcaaggtggcacccacccaagtttcgtcagtttgacagaacaggcgatgcaagggaacatcttgcgtacttcgaagctgcatgtggcgacactgccaataactcttctctcctcctccgccaattctctggatctttgactggccccgcctttcactggtacagtcgcctccctacgggatctataaggagttgggcaagtatgaaggaggtgctcaagaagcactttgttgccatgaagaaggacttctctattgttgaactatcacaagttcgacaacggcgagacgaagccatcgatgactatgtcatccgcttccggaatagcttcgtgcggctcgcaagggagatgcaccttgaagacgcaattgaaattgcgcttagctctgctgtggcagcaacgaagctcgagtttgaaaattcaccacaaataatggaactgtacaagaatgcaagcgcctttgatcccgccaagcactttagtgcaacgaagcctagcggcggtgggagcaaacccaaggccccagctgaagcgaacgtcgcgagggtcttctccaccgcacctcaaggtcaagtgcccatgctcggggcaaagaatgagcaagctagaggtaggcaacgcccctctattcaagatctcctcaagaagcagtacatcttccgccgggagttggtgaaagacatgttcaaccagttaaaggagcatcgtgccttgaacctgccagaaccatggagacccgaccaagtaaccatggtcgacaatccattatactgtccttatcacaggtatgtcggctacgccattgaggattgcgtcgccttcaaagaatggctccaaagggcggtcaacgagaaaagaatcaatctcgatgcagacgccatcaacccggattaccgtgctgtcaatatggtatccgtcgaacccgggtcgcgggaacaagaaggagccgacatatgggtaccactcaaccaagttgagcaccaaattgcaagaatgatgttaacgacgactccggcagctcatagggaggtcacccatgacaccaacaagaagatgtggaatacggtgcgacgaaggcctcaatttacaggccctccacctcgtcacccacagatgaagccacaaccccgtactgccccaacaacaagaagatggccagacccaagtcggcgacgcctaccgccttgcttcgtccccttctcgaagggagatgaatcctttcctcgccagggtcgtgagctacctactttggtgcagtttctgcccaagaattgggggcaagcatcaccaataagcacgaaggaagccgaagaggtcgccggctctaccccaactccggacgtggtttcgtgtaacgtcgctccgtgcaacgtcgtgctcacctacaacgacactacgggcgctagctctgatgacgtgttcaccacaagggagcaagaaacgctccatgccaagtcagatcagacgagagtagaagaagcccacatgaatctgcgagggggcaaaaccttgccagacccacataaggccaagccatcaaaggtagataagcctatcaaggaagcatctcctccaggagaagctccagaaacaaaggctaggagcaaggagaaacccgatattgactataatgtccttgcacatctcaagcggatcccagcactgttgagtgtttatgatgctcttatactggtaccagatctacgtgaagccctgataaaggcgttgcaaactcctgaagtctacgaagtcgacatggctaaacaccggctcttcaacaaccctttgtttgtgaatgaaatcacattcgctgatgaagataacatcattgaagggagcgatcacaaccgtcccctctacatcgaaggaaatatcggtcctgcgcatcttcgacgaattctaatcgatcccggatccgctgtgaacattctacctgtccgtagtctaactcgggctggtttcacaacaaaagacttggagccaactgacatggttatctgcggctttgacaaccaaggcaagtcaacactaggcgccataacagttaagatccagatgtccacattcagcttcaaggtgcacttctttgtgatcgaagccaacacttcatactctgctctcttgggacgaccgtggattcacaagtaccgtgttgtgccctctactcttcaccaatgcctgaagttccttgatggcaaaggggcacaacaacgcatcgtcggcaactcctcctcgtacactatccaagaatcgtaccatgctgacgccaagtactactttcctgtcgaagaaaacatgcaacagctcgggcgaacggcaccagcggctgatgttctaatccagcccggcaccgcaatgaccccggaggcaaggcggacaccaaacaaggaagccacgcctacgcgatcaggagtggtcaagaagagagtagcagaaatagaggaagccaaagcgggtgttcaatcgatatgtgaggactggtgggcacaagcagaagactttatcaagagaaaatgtaaagagcaaccaaagtacgggctcggttacatcaacacagatgagaccgatgacgaagatgaagcacttgatgatcacacattccattgctgcactgcaagtgtcactacaatagctgacgctcaactaccacaacacccgttccaggtagcagcagctgaagtcgaagaagaactcgacaccatgcaagcacctcaacaactcgaggatggcggtcagccaactattgatgagttggtagagatgaatcttggaaccgaggatgatccacgcccaatattcgttagcgccatgctaacagaagaagagcgagaggactatcgaagcttcttgatggaataccgggattgcttcacctggacatacaaagaaatgccaggacttgaccctcgtgtcgccacccataagctggcgattgaccctcaatttcggccagtaaagcagccgcctaggcgcttgaggccggaattccaggaccaagtcattgcagaagtcgatagactcattaacgtgggttttatcaaggagatacaatatcctcgttggctagccaacatcattccagttgagaagaagaatggacaagttcgagtctgtgtagactttcgcgacttgaaccgtgcctgtccaaaagatgacttccctttgctaaacacggagttggtggtcgcttcaacaacagggtatggtgcactatccttcatggatggatcatcaggctataagcaaatcaagatggatccccttgatgcttccgacacagcgtttagaacccccaaggggaatttctattacactgttatgcctttcgggttgaagaacgcaggtgccacttaccagcgtgccatgcagttcatcctcgacgacttaatccaccattcagttgagtgctatgttgacgacatggtggtcaagacccatgatcctaaacgtcaccaagaagacctacgcgtcgtctttgagcgactgcgccgacaccaactcaagatgaatccccttaagtgcgccttcgccgtacaatcgggtgtcttcctcggcttcgtcgttcgtcatcgagggagattgggaaagtgggctctactcatgatggaatatgatattaccttcgtactgcagaaagcaatcaagggccaagccttggcggaattccttgctgcacatccggttccggatgattccccactcgtcaccgacttgccagacgaggaaattttcagcgtcgagcttggaacaccgtgggagctttacttcgatggagcctcacgaggagatgaagagtgttccaacaatgaggcagaatacgaggccctcattctcggccttcttttggcactctctatgaaggtacattccttaagagcccatggagattctcagcttgttgttagacaaattaacaatatttacgaagtccgtaaaccaaaactggtgccatattacacagtggcccggaaacttatggacaagttcgagcacgttgaagtcgtacatgtgccacgaagtagaaatgcaccagttgacgctctagcaaaactagctgcagcgctggtctttcaaggggatgatcccgcacgaattgttgttgaagaaaggtggctttttccagctgtcctagaactcatccccgaagaggttgaaaccaacaccatcaccacagatgctgttgacgaagaagattggcgtcaacccttttttgactacttcaagcatggcagcctacccaaagatgcagtcgagaggcgccagctacagcgacgactcccctcgtacatctacaagaacaaaccaccagttccactctacccgacagtcccttcttggccattcgacgcttggagaatcgatgtcatcggcctcatcaacccgccttcctcaagagggcaccatttcattctcgctgccacagactacttttccaagtgggcagaggccgtaccactccgagaagtgaagagcagcaatgtcatcaacttcctcgagcgacacatcatctaccgctttggcgtaccacatcgtattacctctgacaacgccaaagctttcaagtcccagaagatctacaaattcatggagaagtacaagattaaatggaactactccaccggttattacccccaagcaaatgggatggccgaggccttcaacaagaccctcggcaagatcctcaagaagacgatccagctaccatctgtacgagtggcaatccacgatgaacttactcgagatgagcaggttcgccttcgattccaagagctcgacgccgtagaagaggagcgcttgggcgccctacaaaaattggagctgtatcgccagaacatggtgagagcttatgacaagctcgtcaagcaacgggtctttgggaaaggcgagctcgtactcgttctaaggcgccccatcgtcatcacgcacaagacgaagggaaagtttgagccgaaatgggaagggccgtacatcatcgagcaagtgtatgatggaggtgcctatcaactgattgatcatcaagggtcgcggccaatgccgccaatcaatgggagacccatggagatatcaagccccagggaagactataggagaagagcaagaaagggctacctacctcaacacaagttgtggcctagtgtgcagccacttgccattcctgtgaggattttcgcttcacatctctcagagacaacacttcgctctccaaggcaacacacgtccttttctggcaagtcggaatcgcagctgccattcggtcacatccggattaataaaggacactttcgggagcagtccggcgcaccaccacggttggtgcttagctgcacacctttcaatttggcggatcggcatcgcattcatcaggcaatcacgtccaaatcgataaaactatcttcgggagcggggtggcgcaccaacgctgttagcgtcaagccgtga

SEQ ID NO: 55062 - DNA, 2171 bp, Oryza sativa
  Clone ID: PAT_MRT4530_57105C.1
gttctccctctcctcctcccacctcagccgccgcttaccggcggcgccgcctgctaatctgccggcgtgagcaccggcggagatgtgttactgctacccaacctataacgcagctctcccgcgcagtgcctctgtctctagctagggttttcctcttgggggagacgacctactatggtaaggtggggagctgaagccggcgacctggtgctgtccggaggaagctggagctcgtcgccgtcggatggacgccgatgaggccgcggggagtagcaggaggatggatctgaacctctaccttggcctcccacgcgccccgcgcccgcgccgctccgacctcggctccgacctcgccctcagcaccccgatgccctcctccccgtccttctccgcagcctccgtcgacgcgccgccgccaccgcccgagctgtcgcatcccccgtactccccctctcacgccgacctttcccctccgctgcaggaggtctactccctgtacaaccccgacgacccgcctgcttccgagacgcacctgccgccgtatgcgccgcctccggctccggtggtctcggagctccctgacgacctcgagtttggcctccaccccccgccgccgctggtgcgtgccagcgaactgctaggttgggaggaccggccgtcttcgtcgacggcatcgtcctctttcctccctgacaccgcagcccgttactggcggcttctcgagcagactggaagcagatggctccgtgcgaggcggtttaggtcggaccttccgccactcagttctgaagcttacccagctgggcgtgatgctgccgcagtcccagtgctgcagcatgaaccgatgaatgatactgttgaacataataaggtagctgccgatggcgcggaagtaggcgcctccgaggaatcggaggagcagggcaggagcgctgccacatttgagtgtaatatatgcttcgatatggccagcgagccggtggtcacctcttgtggccatctcttctgctggccttgcttgtaccaatggctcaatgtttattccaatcacaaggaatgcccagtctgcaaaggcgaggtgactgaggcgaatattactccgatctatgggagagggaattcatgtttggatgccgagaaggctgtggaaggtgggaaacaaacaggtcctactatcccaccaagaccacatggaaatcggctcgaaagcttcaggcagcagtttcaccatttgcgaccgatctcaagaaggcttggtgaggctcatgggttattgtcatcatggaggcgccttctggaccaacagattatgaatactgcgagtaggtttgaaggtccgcctgaatcagctgtgcaggaaatggttgacactgctcacgctcagcacaccagtcgcctaagtagattggcgtcaaggatgagagcaagacggttgctgagagaagcagacaaccctaaccctcccgatggcggatccacttcccctgacagtggtttgatcagaaacaatgcatcggatccatccagaaatggtccgagctcattattaccagatggaattgactggttgcgtggacttacccttcttgggtatgaagacacggaaagatttgcatctgccatgagtgattttagaaggataactggaccaagccaatatggtgcatcggcttcatcatcgaatcctccaaatctcgagtcaacatttgacagaactcatgttgttgcagcaccttctgcagaccaagcatctaactcaagcactgctgcagtgatacagggggatgctggtatctctgagagtgcaggagaaccaagtaacgcggggtcatcaagatccctgaggaggagagggaggagcagtgccctgggttctttggatgctgatggcgggggcctccaacggaacaagaggcgaaggataaactgaacattctgtgttgtggtgttgatctaaactctgcatgccatgctcgctgattttcaactattgcatttcatttcttcgggtgatgtctcctgtgttgtagtgtaacattttttcttctcttttcattttcccccgtaggttgcactgaaatgtttatctgtttagttctcatgtagcctgtacctgtttaatttatggaaagttagttgatcaagaaacctcgtgccgatcctgcagcccg

SEQ ID NO: 55063 - DNA, 207 bp, Oryza sativa
  Clone ID: PAT_MRT4530_57106C.1
atggcagaagtagccgatgtgggaacgaagcagtccatcaatggtgacaaaaacgccagtcggcgccagtggaaccaagccagtgcggcgaaggccagccggtcggcgaagacgtggacgcccatgaacggtggtgtgaccgaccaaccgtataggcggggacaccagtcggcggcgacgaaggccagccggtcggcgaagtcgtag

SEQ ID NO: 55064 - DNA, 180 bp, Oryza sativa
  Clone ID: PAT_MRT4530_57107C.1
cgcaccattaccgtcaacaaggcccagaagcacggctactgaggcggatgcggaggcggatacggacagcgctacggaggcggtggctactgtggaggctgcggctacggtggaggctacggtggtggctacggccagagctacgaacaatgctacggaggcggctactgctacggcagc

SEQ ID NO: 55065 - DNA, 352 bp, Oryza sativa
  Clone ID: PAT_MRT4530_57108C.1
tcttttactcgcatctggcgctctttgtggggggctatttaagaagccttgggggcaaaaataccgtataaagatcaagagaggaagctctttctcatccaagatattcaggttgttgcgattcacaattggcaataccatccagcaatccaaacacatggtatggtctgagaagcgatgattggtatcacacaggaacttctaactgagctctacaggatccgaagccccgttctacctctaccacgctcaactggacatctacggtcagagcactctggggatactgattattcaccgagactttccccactaccatgacagctgaccattaatgacatatacctgtggc

SEQ ID NO: 55066 - DNA, 273 bp, Oryza sativa
  unsure (1)..(273): unsure at all n locations
  Clone ID: PAT_MRT4530_57109C.1
gtaccattacatgatgattaacatataaatctgtanctacagggaatgagtgtaatagagcagaagaggaaggatnatacaaaactccaattctcatggatgggaatgggatcaggtggccttgcagaactctcctcccaaatcttcacacgcctgctggggggaacaccttgtttggctcttcttangataggtagtccctgtcaacttcctctcccgccgcacgagaaacagcaacaacagcctatgatgaaagcttggcctctgggtaca

SEQ ID NO: 55067 - DNA, 489 bp, Oryza sativa
  Clone ID: PAT_MRT4530_5710C.1
atggcggccgggactcccgcgcccgtttccccctcctccggccaccccttccctctcttaaccctatataaaccctccccgtgcctccctccaccgtttccgccgctcgccaatctctctccccgccggaatcgagctcgcgccgtcgctctctctccgccgtcgccgccgagctccggtccgccgccgttgtcgccccggaccacctcccacctcggcgccgcctcctttggcttcgccgcatcctcgccgacctcgtccacctctccgtttcggtcgccgaccaccggagcgccgtcgaccccgtccacccgagccgcgccgccgccttcctccgctccggtcgccgttcccgtcgtcgccgtcgacccggggggcgcgggcgcgccgcctcccgtcggctgtgccggcgtggccgccttcgggagcgccccgcggctgccgtgtggggcccggctgtcagccgcccgcgcccttaggtgcggctga

SEQ ID NO: 55068 - DNA, 219 bp, Oryza sativa
  Clone ID: PAT_MRT4530_57110C.1
atggctgacacactgatgctccaccaccaatcaacctctgctgacatgtgggacccctgcaccagcgccctctgccggctggccttcgtacgccaaaaaccatgccacacccacctgcagctcctccactcaccaagggaagctttggatgctagtttccggccactgatgattaaactagttaatcatgcaatcatgcatagggcaatcactgcctaa

SEQ ID NO: 55069 - DNA, 1160 bp, Oryza sativa
  Clone ID: PAT_MRT4530_57111C.1
atggcgatcccggtcatcgacttctccaagctcgacggcgatgagagcgaggccaccctggcggagctcgctgcggggtttgaggagtgggggttcttccagctggtgaacactggcatccctgatgatctgctggaaagggtgaagaaggtgtgcagtgacatctacaagctgcgcgaggatgggttcaaagaatccaaccccgcagtgaaggctctcgcccgcctggtagaccaggaaggcgagggcctcgcaatgaagaaaatcgaggacatggactgggaggacgtcttcaccctccaggacgacctgccctggccctccaaccctccatccttcaaggagacgatgatggagtacaggagggagctgaagaagctggcagagaagctgctgggagtgatggaggagcttcttggtctggaggaagggcacatcaggaaggccttcaccaacgacggcgacttcgagcccttctacggcaccaaggtgagccactacccgccgtgcccgcggccggagctcgtcgacggcctccgcgcccacaccgacgccggcggcctcatcctcctcttccaggacgaccgcttcggcggcctccagatgatccccaaccgcggcggcgacggccggtggatcgacgtccagcccgtcgagaacgccatcgtcgtcaacaccggggaccagatcgaggtgcttagcaatggccgcttcaagagcgcatggcacagaatcctggccacccgggacggcaatcgccggagcatcgcctccttctacaacccggcgcgcatggccaacattgctccggcgatccccgccgccgccgccgactacccgagcttcaagttcggcgactacatggaggtgtacgtgaagcagaagttccaggccaaggagcccaggttcgcagccctggcgaacaagtgattcaaattgatgggatgaaattgagctttgcagcaatttgaagtctgaacctgctgcaaagctctttcagccttaagctacatatacagttcgaataagcgtgtgattacaatacggatttgtaaaatggataggttgtctaagtatgtgctttgcaaaacaaatgtgttaattacaagtgtctttgcagctatcacaaccatgtaatcattccaatttgtatggtggcc

SEQ ID NO: 55070 - DNA, 582 bp, Oryza sativa
  Clone ID: PAT_MRT4530_57112C.1
cctactcttctcctcccctgcacataccactcgtttcctccacaaagagggagggaacaagggaagggtgtcgcccgcccaccaccccgatatgcctacgccggtccggtcctccgtgcctgcgaaatctaccaacgctaactcagcaagatgggtagccggcgggaggatgacggataaggaacgggaggagcaggacaagctcgctcggacgcgccgatgctggcgagtacgcgcatgggcacacgattgctacaccagcgcatgagctgcagggacatcacgaaagtacctcatccggactgcgcgcatgactgattgatgataggacttaatgaacaacacacatcgttctcttgacataagactagctgtgatggctgtgaaccgctactttctataagcatacatgcaccatgaattgcgaatgtatgcttatttacgcgatcaaggacgttggcgtgaccaacgtttttggcagtatcatacaggatcatgagccatgaacctggatggtgtaaccaatgcaaatgcttcaggtaggatattctgtgatcttcatctacactgatgctgatttgt

SEQ ID NO: 55071 - DNA, 201 bp, Oryza sativa
  Clone ID: PAT_MRT4530_57113C.1
atgccggcggtttgcgtggttgccaacgacgcctgctcctgcaccgtcgctgccatcgcaaggccctccccagccgctggcctcctcctctcccgcctcgtcccagcctgctctcgcgccaccgacgtgctctccccctcgggcggtggggagcaactgggttgggcgacaggggaggagcggcgcgcggggaacaactag

SEQ ID NO: 55072 - DNA, 467 bp, Oryza sativa
  Clone ID: PAT_MRT4530_57114C.1
ggttagctggtcatcacagtacacttgtgttcaaaaacttcctacaacgatttctgtacacatgattgctgaagcttaagaatagtccgaaagacctcaaggacacgagatggattttcctccgttcatcagaaacccgaatttttcagtgttgacggcgttctgacgctgggacatggggataagtacactaatcaacacaggaatagctgagaagaaggttcagggggccacaaacaacagcaaactctctctatccaatgcgatttcttgtgagctgtgacatgccgagccaagcacgagacggtcagttcaggctcggcccaggtctgtcgtgtgaggccggctctgtgtcagatactacttgtgaaactgaaggctcgcatctgctgttgatcatgggattcttgggcatggctatctgtgaactgtatttggttagcattgagacaacctgattcatggta

SEQ ID NO: 55073 - DNA, 375 bp, Oryza sativa
  Clone ID: PAT_MRT4530_57115C.1
atgagcccggagtgggtgagtgcgtgctcccggtggagcgggctgcggatctctcccggcagcatcgtgcgcaacggggtgcgcggcgaattcacccgcaacgctgcggcgcgcagcggtaggcgaggtggccgtgctggaagggaccccggcacagggtcgttcgccatgatccgccgtgatctgtctgagcgtgagattaatgtgcgaccacggatgcccgaagaagttgggcgggggtgtaatcattttctccgggaagaagttggcgcaggccttggcctcgtggatgtcgaagtcgcagtggtcgcagcggtagccggcgccggtgacgacgcgatcgagtcccgcagatgcggcagacgtggctgctga

SEQ ID NO: 55074 - DNA, 771 bp, Oryza sativa
  Clone ID: PAT_MRT4530_57116C.1
atgaaccatcaggagcgcatgagcggcaggcacagggaccagtgggagcaacctcccgcggcgcaggatggcggcgatgacgagcaaatccacccgccgcgaggaggcggccggctcgagcacatcgaggaggcgcaagggggcttccatccccctccgccggcgtcgcctctccctcccccagtgggtggcttcaatgctgtcgcggccggtagcggggccctcgcgcagagactgcaccgggaggcctcaaagccgccgcgactagtggcgacggcggcgcctcgcgcagcaatggcagttggtggcatcgaggccagtggcgacgatgctgccctggtgacagtgcgcaagggagaggcggttgtggaaagggagctggcggtgactactggtcagcgagggaagctcaggaggccgaagcaacgctgtccagtcacaggttctcctttggttgaacatggcaaggaggccgacgggtggcgggacggaggaggcctaggccagttctcatgggatgaacggtgggatgaagcgagctggtggggtgttgcggttgttcaaaattctttgaaagcctcactcattggatcaccgagcgggatcgagttggcggctcggccgcctcgggcggtgccacccggcatggatcaggcgctggggaccctcccttgtgcggatccgtcgtcggtgacgacggaggacagagggggtggcggatgcggcgctagcgacgactgtaggaggcaggggtggctgatccggcgctag

SEQ ID NO: 55075 - DNA, 1735 bp, Oryza sativa
  Clone ID: PAT_MRT4530_57117C.1
actggcggcgacgtcgtccgccccgccggctttccgcgactccacttcacaggctatgccgggctccctcgacttcgacgtgactgcgtgggccgacgccttcgacctccacctccgtcgcctgccaccgacgacgccacggacaaccctgctgccggccgacttcctccaccgacggtgcgtcgacatccgccgggctctgcaaccgacctccgccttcgttgcctgccaccgacgacaccacggataaccccgttgccggccgacttcctccaccgacggtccgtcgacctctaccgggctctgcgaccgataggatcttgcctcttgctgttcgccggggcgccaaggacggtgctctccaccggcatgggcggctccagtgggtagtccaggtgcctcatgcaattttggcttgatcacccgtttatgcgcccggctacgacacactgctgctatcgtcttcgagcacgtgtactacgccatcaatcttctggttgccactacgttgttccctcgggccgcagtgccgctgcccatggtccccgtccactggctgttgcaacgctgagaggcccttctcagcgtggcctcaccgtcgatttagttcttgccgttgcatcgatatggagctgcagctgtgttgtcctctcggaccgcagtttcgccgctttcgtcttctttctcaccgttcgcgcatcgacaacctcatcatccgcactggtcatcgtcagccactcgggctacctctacatggctaccgacgttgctgtccaggccgttggtcctgctacttcaccatcttcttcatccagcatgtctcattgccagcatcgccgtatcttcctcgactacacttcgctcttctccggcaactgcgggtgctacttcggcaattctgcctctacgccgttctcgcttgtccctgggtctggcaaacccggcgtgacgtctcgtacttcacggttcgactacatcggctcttcggcgtcatattcctccacgatcatcgtgattgtatcaccgtcttcatctccagcacgtcctcgcgcaccattggtccatgatgccctcccgtgcgtttacaaccactctacagcgccccatgcgcgccccacggctcggctacctcgacatcatcggcttccctacttcggctacatcgaccacggctagtctacgcacggcttcatcgaccacggctctctcggctcctttgctttatctacatcgactatggcataaagggctatcatcgtgttgagtattcttgctggttttttcttcagtccaagtgtccgcgctgctcatgcatggactgcggggggatgttcgagtatatgtactcctacatataccggcccccagaggctcaatacaatcaatccacgttacgcagtattctcctctctctatactatccaacagtgaggaacaatggcgatggtcacgtggactgcgagacagccaaggcctctgacttgtggggccctcaaccacgaccgccgcgccgagctcctcaacctcgaccgcctcgcaatgcgctccactaccgcgatcgccgtggtgagctttgctaccctgacagccttggcgaactctgcctccgcctcgattcccaccggttcgccttcctaggcgcactccttgacactgccgccacggcgagctcctcaaccccaatctccgcggtgcactttgcctctacctctgcctctgcctctgtctcctcgtt

SEQ ID NO: 55076 - DNA, 459 bp, Oryza sativa
  Clone ID: PAT_MRT4530_57118C.1
atggcagtgggtggcttcaatgctgtcgcggccggtagcggggccctcgcgcagagactgcaccgggaggcttcaaagccgcccgatgctgccctggtgacagtgcgcaagggagaggcggtagtggaaagggagctggcggtgactactggtcagcgagggaagctcaggaggccgaagcaacgctgtccagtcacaggttctcctttggttgaacatggcaaggaggccgacgggccgacggaggggcgctgttctttgaaagcctcactcattggatcaccgagcgggatcaagttggcggctcggccgcctcgggcggtgccaccccgcatggatcaggcactggggaccctcccttgtgcggatccgtcgtcggtgacgacggaggacagagggggtggcggatgcggcgccagcgacgactgcaggaggcaggggtggctgatccggcgctag

SEQ ID NO: 55077 - DNA, 2002 bp, Oryza sativa
  Clone ID: PAT_MRT4530_57119C.1
atggtgagggtgccgttcgtgaccgcggtcaccacggtgttcagctacggcgtcatcttcggcttcggccacctccgcgattggttccgcgccctcctccgctccctcttctccggccactcgccggcggcagccggtaccaacctcaagggttacgcgccaatttgcggaggacaggaggatttctattaccgacgattcgttcgtcgcgttcaggactgcttttggcgaccaatagccagcaagccggacgcatggttcgatgtggttgagcgctactcaaatgacagcaacaagacactcccgcgctgtaccacgctcttcagctacggcctcctcttcgccttcggccagctccgcgacttcttccgcagatcctcgacgctggcaaatccaggtgccttaacttaggttcctacaattaccttggctttgctgcggcagatgaatactgcactcctcgtgttattgagtcactaaagaaatactctgctagtacttgcagtgtccgagtcgatggaggcaacactaagctgcatgtggaacttgaagaactggttgcaagatttgttggcaagcctgcagctattctcttcggcatgggttatgtgacgaactctgcgatcattcctgccttgattgggaagggaggcctcataatcagtgattcattgaaccataattctatagtgaatggagctaggggttcaggagctagtgttcaagttttccaacataacaatcctgcacacttggaagaggtattgagagagcagattgcaggaggccagcctcgtacacacaggccgtggaagaagattattgtgattgttgagggaatatatagcatggagggggagctatgcaaactccctgaggttatagctgtctgcaagaaatataaggcttacacatatttagacgaggcacacagtattggagctgttggtaaaaccgggagaggtgtttgtgagctactaggtgtggatccagctgatgtcgatattatgatgggaacatttactaaatcatttggatcatgcggaggttacattgcagcatcaaaagagattattgatcatctgaagcacatatgccctgcccatatctatgcaacatccatgtcacctccagctgttcagcaggtcatttctgcaataaaagttatccttggtgaagatggatctaacagaggggccaagaagcttgctcagattcgagagaacagcaatttcttccgttcagagcttcagaaaatgggttttgaagttcttggagacaatgactcgccggtcatgcctatcatgctttacaatcctgctaaaatacctgcattctcaagagagtgcctgaggcaacacgttgctgttgttactgttgcatttcctgctacaccactactgcttgccagagctaggatatgtatctcagcttcccactcaagggaagatcttattaaaggattggaggttatcagcaaagttggtgacctcgtgggaatcaaatacttcccagtggaacatgaaaagactgcatctgttgagaaactgaagaagcttcaatgaacacctacaaccagaagaaatatactgggtgatctaggcagtgtgccatgcctcggttcggctcatgtgcctcggacccttttgattttcctttgtttctgaagtggcttagatctgtacagcttgtattatcatccatcatagtccaaaacacaacacaatgatagacactgttttgtcgagttcagaggaagcaaaagtttcgctgttacagctctgaatcttgcgagtaaagtgtctgaaatcatgtagagactcttcctcttttgattttagcttcctttgtagatgcaacgtcagttgcatcgattgtgtgtgaagtaagcttcactcatagtgtgaggtctggttgctgtgatcaagtgattaagcgaaaaaatgttgttaaaaaaaaaaaaaaaaaaaaaaaaaaaaaaaaaaaaaaaaaaaaaacaaaa

SEQ ID NO: 55078 - DNA, 6162 bp, Oryza sativa
  Clone ID: PAT_MRT4530_5711C.1
tacatagaatttacgtaattgatcaatgttccaggaattagccaactcacgaccatcgccgtttgcaattttgaatgcgcctggccgcagaacttgtgtgatcgtgtacggtccttcctatttgggtgagagcttgttccgccctgcttgactttgaacccgtcggaggacgtagtcgccgatcgaaagtgtgcgtgctcagatgcgtttctcgtggtagcggcgaagggcctgttggtagctggctgctcgaacggcgactcgttcgcgatgttcctcgagtagattcacatcgtcgtttcgctgctcctcctgattctcattggagtacttctgtgctcgtgcgctttgatatcgtagctcggtggggagcatggcctctgagccgtacacgttgttggtgtggtacgcacggcccatagtagggtcttgattccctgtagtactatgttgtttgccctcttgacttgtccgttgctctgagggtgagaaaccgaggcgaagcagatcttgactcccagcctgatgcagtaatcctggaaatcggcattgatgaactgggagccgttgtccgttataatatggtggggcaatccgaatctgcagaatatccctttgatgaatttgattgcgttgtcggccttgatttcccctgtaggtgtcgcttcaatccacttagtgaatttgtcaatcgccacgaataggaacctgtagccgctctgtcgaatcatgtcgacttcacaccgctgaaccatgtcgcaggcgtctttgagggcggttggctagaagaacccctgtcgaaaagcttttccaactaatgtccgaccggcggtatgtgacctacagatcccttcgtgtatgtcgaggaggagatgtctgccgttgtccgacgagacacattttaggagtaccccgtttggtgcgttcttgtacagatcgttacctattatacagtagacttttgctttacgggatattttctcggcttctgcatcgtcctcgggcaactcttcgctgtgtatgaatttgatgagtggggtgcgccagtcgtctgtggtctcgatatcggcaacggcgcgctctatctatgtagcccccgagctgttgttgagggagatcgggctatcttcgtcgcttgcgtctttcactaatggccttgtcaggacgtccagaaaggtgccaggttcgagtggctctcgtctggatgcacgccgtgctagatcatctggttcgatgttgtccttgcggtatacatgtcggacctcgatcccatcgaaccttttttccagcttcttgacttctgcgagatacttggataactcggggctagagcacttgtaatctttatgcaccttgttcacgactagttcagaatcccctttcatgatcagttgcctgactccgagtgcagctgcagctcttatcccggcgagtagtccttcgtactcggctgtgttattagtcgccctgaagttgaggtgaattgcatgcttgaattgatctcccaaaggtgatgtcaagatgaatgctgcccctactccttggctgttgtgtgcaccgtcgaacgccattgtccacgtttcgttgtcgatttggttgtctgacttattatcaggcatagtccaatcggctacgaagtcggcaagtacctgggacttgatggctgttcgtggcacaaagcggacatcaaattggcttagctcgactacccatttcgcaatgcggccgacaacgtctttgtttctcactacttcaccgagagggaaggaggatagaactatgaccctatgggcttaaaagtagtggcgtagctttcttgatgtcattattaccgcgtagagcagtttttggatctgtgaatatcttgtctttgcgtcgtggagagcttcgctgacatagtagactggtcgttgcaccttctctctcttgacaacaatgacagtgctaacggaatatggcgtggtggcaatatatagaaataattcttcattaggttagggggcaacaagtacaggtggatttgataggtagcgcttgagtgcaatgaatgcctcttcggcttcctgtgtccatacaaatttgtcttgcttcttcagcagggcaaagaaaggtggtcctcgctctctcatcctagcgacgaacctgcttagtgccaccatgcatccggttagcttctgtacttccttgagtcttgtaggcgacttcatgttctcgattgccttgatcttctcgagatttgcttctatttctctgccagagacgaggaaactgagcagcttgcccgatggtactccgaacgtgcacttctctggattgagcatgaggcggtatcgtcggaggttgtcgaacatttcccgcagattgtcaatcaatgagtcggttgtcttggtcttgacaacaatgtcgtcgacgtaggcctcgacattgtttccgagttggtcactgagtacgccctggaccgtgcgctggaaagtgtttcctgcggttattagtccgaacggcatcttaacgtagcagaataccccgaacggcgtgatgaatgctgtcttctcctcgtcctctttcgccatgctgatttggtggtagccggagtacgcgtcaagaaagctcaacaactcacaaccggctgttgagtccatcggttggtctattcgaggaagagggaagtgatccttgggacacgccttgttgaggtcggtgaaatcgacacacattctccatttcccgttggccttccgcaccatgactgggttggctagccactctagatggagtacctctctgatgaaaccagctttgagaagcttgtcgagctcttcttgtatggcttgttttcgatctggtgcaaatctccgcagtttttgctttactggcttggcatcaagtcgcaccatgagtttgtgctcaatcacctccctgggtacccccggcatgtcggatggctgccaagcgaacacgtcagcattgtcgcggaggaaggtgatgagcgcgagttcggtcttgtcggggttggcactggagagtggaacaatcttgattgcgccgtccgatttcggcgtcttgtttgttttgctcactttcttgggtggctcagctgtggcgggtgggctgggcgtgtgctcgaccatgtcgaggctccgcttgtcgcattgcactgccagcttagcattcccttgaatagtgattgttcccttcagtcccggcatcttaagcacttgatatgcgtagtgagatgcggccatgaacttcgggagtgcagttctcccaatgatagcattgtatgttgtatcgaattcagcgacatcaatggtgatctgctctgttcggaagttatttgcttggccgaaagtcacaggcaacataattttgcccaatggtttggacgatgactgaggagtgattccatgaaagggttgatcggtgggtgtcaactcgcttcttgggatccccaccgcgtccaaggtgctggcgaagagaaggttgattgagctgccgccgtcgatcagaacttgcgcaaccttgatattccgaatagtgggttcgaccacgatcggatatcgccgccgtggaacctccaaagatgtacgagacatggagatcagagtctgggtatgctgagtccgattcctgagcagttgcctcagcgtccttctcgaccacgcgtactcgcttgcctttttccaatgccatgtgttttgcgagcgactttttgaagacgaggcaatcttctagagagtgtatgtccgacttgtgtatagggcaccatgttttctttgtgtcgctgccttatgggtctgggcgcttgggagggtccgcgtattctgttgcgagaacttccgcttgagctttccttttcccactcttgcgatttttcttcttgcttgactcaggtgcgtccttggctggtttcttatctcctccggtcttcggtttgtcgttcttgtgcctcagtgcgtcgtccgcatgagcacatcgatcgacaatttcgaataatctccgagtagtcgtgatacgcctcgttgccaactcctgggtagtatagcaatctctcacaccggacttgaaggcgcggattacagaagcgtcggtgatttcggggattgtatttctgcactcattaaagcgccgaacataatccctcaaggattcattcgggttctgtgtcaacgcatgtaagttgtcttcgatcgcgtggcgcttgtaagttccttggaagttggcgacgaacttctaccacaggtctgcccacgaagaaatcgagtagggagagatgcatcagccatgaacgcgtggagcctttcaatgcggttggcaagtaattcgccaacacgttgtcgtcctctccggcagcgtagagtaccgtggagtaaacctgaaggaattcttgtgggtcagtactcccatcgtacttctctattgctcctggtcagaatctctcaggccatcggacatcacgtagcgaacggctgaaagctctacacccagcgctgggggtggtgggttgtcggtgatcgtacgtccttcgtggatgtctatctgatgatgaggatgaggaagatgacgacgatgatgatgggtcacttgattccggtgtacgattacgaggacatcggccgggttatcgagaatcctgttgtcgtctcccgttgttgtctcagcgccgatctccatcgtcgtcgtcattatggcgacgtcctcgaccagtatcgcccagcacccgcggttcgcgatcgtcgtgatcgtggcggttgtggcggttatcaccgttatcgtgacgccgtgaagagacgcgatgtcgggaacggttcttgttgtctcatgcgcgtcgcgcctctcggcggccatttaggtgatcgcggagatcgccggtgccacgaggtggaggggtggctcgatgaggcgattcccgctgttcagggttttcaccattagcaccgccagttggtggctgttctaggtgcgctgcagcagcagcctcttcgaacgcgttgctgaggttggtcactgattcccgtaaccgttctgtccatcgtgcgagatcgtcgttcagaacgggatcgtaaggggtttccctcagtattgcgttgacggccctgatgtgctgggctggtgtagtcacttgattctccgcttccgcattagtgcgcgctgatgtgccggtctcatcgatagccaatacctcgcgcggcgtacttgttgatgatgagccatagtcttcgagcaggtgcaagactgatggttcgtggggatcgatgtcgattaccccaaggaatcgatctgaaatcaacgtcgctccttgttccttgtcctcatccttgagggggatctgtgactgctggaccttaggaggtgacgtcttcatggcgctgagaaagaccttgcaggttgagaggtcgtgattctttatcttgtgaataggacaatagacatcacgggttgaagaagtacgctgaattccacgctctttgtaggcacgaatttcagtgtggacgttgagaaaaacccagcaggcttgcaaggtgtgttttctggttttgtggataggacaccaggaccttgacctcggaagtcatcctcgtcggctcgtgattcttgtcggaaagacaaggtttggccgcactaggatccttctcgggctcggatgtcgtcgacgttccgttctccgcttcagcgggaggatccttcgacatggagtcatcctgggttgtagctattgtgttctcgcttccgatcattgatggaccagccgagatcggcaccgtggtgtaaaccgggaagacgatttcgttgacttgaatccacaccagcattgttgaagtaggaactccttggttgaggttggtgttgacgctgttgtcgacgaagctggttgtcatagtagtagaatcttgaacaccaagtccccctacctggcacgccactgtcgacgggggatacccgtagactggatatagagggtattggggtacgctagtacgaagatttcgtaggctgtggtggttgtcttggctatgagattcaatgccttaggtcctcccggggggtcccttttatatcgcaagtcgactggtctccaagtaggactcggagacatcggacccggcacggtacaatgatgacccagttctgtctaagtatgactccttccatccgtgaactcca

SEQ ID NO: 55079 - DNA, 654 bp, Oryza sativa
  Clone ID: PAT_MRT4530_57120C.1
atgcggggtggcaccgcccgaggcggccgagccgccaacttgatcccgctcggtgatccaatgagtgaggctttcaaagaactacaacctttcaaggcagcatcgctgaatccgaccgttgcacgaggtctccagccgtgccggcaccaccacaaccttcaggcatcggtgccccagcctcccaatggctgtgcctactcaccactggccttgatgccacccactgccattgctgcgcgaggcgccgccgtcgccactagtcgcggcggctttgaggcctcccggtgcagtctctgcgcgagggccccgctaccggccgcgacagcattgaagccacccactgccgtcactcatggcctcttcaccatgctgacaattgtcgctggcctcgacagtctccaactgccacgggttgttccgaccagatccgacgcgataacgctagatccacacgtggggtgcccggatccggccacaccggcaccggatccactgctctccgtgcgccgagtcaccatcctcatgctaaggcaggtcgccactggggacaggcctcaccaccaccctcccggctggccgcttggttctccagcagcgcactccggcggcggcgatgggagggacaggaaggaagcgaggcagcaatggggctag

SEQ ID NO: 55080 - DNA, 1174 bp, Oryza sativa
  unsure (1)..(1174): unsure at all n locations
  Clone ID: PAT_MRT4530_57121C.1
aaaaaattcaccagaatatcaattgcatcagatttatcttttaatgtcatgttatccactaatttgtcaagtaggttctccctaaacagggacttgagtccacagggcatccattttgcagacaatatcatcattcgcaaaaaacatgaacataagtttgaatacatctctatcaagtaataatgctcagtaaaaacttgtaacaaataggagtaccaacaagtaggttcagacctcagtaacagcccattaatctcattataatgtaggcccccncaagtaggttctccctgactaacagggacttggagaaacgtacatctcacattttgggcactgcatcataggtcacattctattaccatctaaaatatcttctcttacatacaagactatggctacaaaagcgagttacaattcaaaaaatcatgagctacttaatagtagacttcagtttaaaaagcccatataactcattacaatgtaggaccccaagtaggttcaaacctgaaaaacaggcccttgaagctacctacatctcacacattgggcaactcttcatagtctactaatgaaacaaaaaaaatacaacagatggcaactcaaatattgcttgaacaagcttgcactataattaagaatactgtaaagagggctttcaaatttatctcatacaattcatatagcgtgataacctcagaaaaagcaatcaaaaccgtactaaattacgcaccaaacaaaagcattgaacatgattgccgagattgtcttaaaccacgtttctcagcaaacagagacttaaaaaataataattaatgtggtgagacattttagaagcataaccaccagattactgttatctcccacgttaaactcaccagaaatcgatttttgcctccatgactgggcaaccatgagaaagaacaatctcaaggagccaaaggtgaggagaggcacgcacatggcaaatactacctcaagatttccattcgatttttgcacatcctctatagctataataataaacaaattaatcaagagtcttacccatcatgaatcggtcttctctggcgaattagaggacggcggagaagacccagatgccgcgggaggagcatcgtgtagcaacaaccaccggggccgtgatgatggtggtggtgatggtggtgcttct

SEQ ID NO: 55081 - DNA, 1515 bp, Oryza sativa
  Clone ID: PAT_MRT4530_57122C.1
atggtgaggctgccctacgtgaccgcgctgaccacgctcttcagctacggcctcctcttcgccttcggccagctccgcgacttcttccgcaggatcctcgacgctggcaaatccagcaatctcaagggctacgcgccgatttgccttgggctggaggatttctacacgcgccgcctctatctccgcatccaggaagtaggtattagtgaaccatataggttgatcactcctgcaatggactgttttggccggccaattgctagcgcaccagatgcttggtttgacgtggttgagcgttactcaaatgacagtaacaagacactgcatcgtaccacaaaaacatctaagtgccttaacttaggttcctacaactaccttggctttgccgcggcagatgaatactgcacccctcgtgttattgagtcactgaagaaatactctgctagtacttgcagtgtccgagtcgatgggggcaacactaagctgcatgtggaacttgaagagctggttgcaagatttgttggcaagcctgcagctattctttttggcatgggttatgtgacgaactctgcaatcattcctgccttggttgggaagggaggactcataattagtgactcattgaaccataactctatagtgaatggggctaggggttcaggagctactgttcgggtttttcaacataacaatcctgcacacttggaagaggtattgagagagcagattgcaggaggccagcctcgtacacacaggccgtggaagaagattattgtgattgttgagggaatatatagcatggagggggagctatgcaaactccctgaggttatagctgtctgcaagaaatataaggcttacacatatttagacgaggcacacagtattggagctgttggtaaaaccgggagaggtgtttgtgagctactaggtgtggatccagctgatgtcgatattatgatgggaacatttactaaatcatttggatcatgcggaggttacattgcagcatcaaaagagattattgatcatctgaagcacatatgccctgcccatatctatgcaacatccatgtcacctccagctgttcagcaggtcatttctgcaataaaagttatccttggtgaagatggatctaacagaggggccaagaagcttgctcagattcgagagaacagcaatttcttccgttcagagcttcagaaaatgggttttgaagttcttggagacaatgactcgccggtcatgcctatcatgctttacaatcctgctaaaatacctgcgttctcaagagagtgcctgaggcaacacgttgctgttgttactgttgcatttcctgctacaccactactgcttgccagagctaggatatgtatctcagcttcccactcaagggaagatcttattaaaggattggaggttatcagcaaagttggtgacctcgtgggaatcaaatacttcccagtggaacatgaaaagactgcatctgttgagaaactgaagaagcttcaatga

SEQ ID NO: 55082 - DNA, 249 bp, Oryza sativa
  Clone ID: PAT_MRT4530_57123C.1
atgaaccatcaggagcgcatgagcggcaggcacagggaccagtgggagcaacctcccgcggcgcaggatggcggcgatgacgagcaaatccacccgccggtcaactgctccatccgtcgctggctatcagccgaggaggcggccggctcgagcacatcgaggaggcgcaagggggcttccatccccctccgccggcgtcgcctctccctcccccaggtggtgcatgtccaggcggagcagtccacgtaa

SEQ ID NO: 55083 - DNA, 351 bp, Oryza sativa
  Clone ID: PAT_MRT4530_57124C.1
atgcccaagccgcacgacgacacagcactagctgctgcagcaaagcaaaaccacacccacgacgacgcggcggcgcagctagtgctaagtcgtcgtgcggcttgggcattgcgcctgcccgaacacatcgccttcatgggcgcctctccctcaagccactgccccggcgcctccgccgttgtcgccgaaacctttttccgctccccaccgccggggttgccctcagtctgcgccaccgcgctgccgaggggagttgttgatctgaactgtcgccggtggggcggcttcattcattatgagtcgccgccgaggggcgccatagataagctccgtcaccggtcctcgatctga

SEQ ID NO: 55084 - DNA, 457 bp, Oryza sativa
  Clone ID: PAT_MRT4530_57125C.1
ctagatccaactctcccgccgccggatctggccggagagtgcggggcgacacaggcgacggcaggaggaggctgggggcggtggcagtagctcggcctgcccaggagcgaggcgacgcggggtggctgggagccggggtgcggcggcggcgtggccgacctggagcgctggaggcttggtggcaccggcccagggcggccgcggctcgatgggggcgtggctaccggagcggcttggtggtgcggctgcgagcccccatggcgcggccaggcaaccggggtgccattgtggtgccctaagcgccaggcaacgggggcgccggagccggagcggcagtagcgtcaccggcatcgatgcaagcccagatggcaatgcaaaaggagctggcgacggtgggtcgtcttcctcattgtcggtcagcaccctcgcccttcctgaatattcttggttggattga

SEQ ID NO: 55085 - DNA, 330 bp, Oryza sativa
  unsure (1)..(330): unsure at all n locations
  Clone ID: PAT_MRT4530_57126C.1
cattatatacgaagcatagtcataaactcctacaaagttgaatatcattctcggattagctctccttggtattgttgcatgcaacgcttctgcacggtttgaagctcttagccaaagctttncccgatgcttactacacctcgtcttctctgctacagcaacaaaggcttaacctatgcagggggttccttaggcatcatcataacttatttgcatccccttattggcatccaggtacgtatctatagatagacatctaaaccatgcaatatcattgtatggcaccaactcaagctggtggtgcgacaatctcactaccatgcctattta

SEQ ID NO: 55086 - DNA, 377 bp, Oryza sativa
  Clone ID: PAT_MRT4530_57127C.1
tgatgcagacatcactccttcagatatacacaacaatcctccaccggtcatttaagagtcgataataagagctcgcgcacgacaattgaatttagaggtgagctcgttcctatgttcttcattgtatgaatttgagaatagattgctacctaatgattatattgtgattaagaacaatgtagataacaaggaaacacttagagaaggacttagtcatggaggatcaacaaggacgtccaagtcaaggtggaggcccaaaccaagtgacttcgagtgcaattcagagtccaggaccagtccgcactaaaacgggtgcccaggtcgcatacgtgctcagattggggcgttctttatatggatggaaagctaagaagata

SEQ ID NO: 55087 - DNA, 312 bp, Oryza sativa
  unsure (1)..(312): unsure at all n locations
  Clone ID: PAT_MRT4530_57128C.1
cctgggggctgcacnaattcggcacgagccgatgtgcggcgggtgcaatcatcttacnantacatccccngccgcgcccgcccggttgtgcgcctcccnacttctggcccgacgccgacgaaatccgaccccccacaccccccncttcccgaaaaaaancncccgccgccgcgaagaaagggagcgggaaagaaaccaccttcccccgcgggatnatngcagccggcccgnngtggggggaaataatgtcggcggaaaattccntccaccccccntgtaaaagggggggttggggcggtctttgtttccggn

SEQ ID NO: 55088 - DNA, 591 bp, Oryza sativa
  Clone ID: PAT_MRT4530_57129C.1
atggcgcatcgcacccaagcaagaaggcagcaggtgcaggtccgcacagccggcaacggtgtgtgcgattgggtgggtgaggcgagcatggcgggcagccgggaggctgcggcggggaggaaggcggcagtcgcaggcgtcctgagctctgctgccccctccaccgcccaaagggttggcgaagcgtggcgctgcgccaagaggaaggcggcggttgcgggcatcccaagctccgccgctccctccaccgccccaagcgccggtgactgtgagtgcccccttcgccgtcctaagctctgccgcccctgcactgcctcaagcgccagcagagcgcggcgctgcaccgagagagaggcggcggccgcagcagccgttgcgggcgtcccgagctccgccgccccctccaccgccccaagcgccggcgactgtgagtggcccctttgccgtcccgagctctgctgccccctccaccaccttaagcgccggcggagcgcggcgttgcaccaagagagaggcggcggccgcagcagcggctgcgggcgtcccgagctccgccgctccatccaccgccccaagcgccagcgactgtga

SEQ ID NO: 55089 - DNA, 291 bp, Oryza sativa
  Clone ID: PAT_MRT4530_5712C.1
atggcggcgcggcggagcaagaaccgaggcaggagatcgatcgatcgcatcgcaccttctcaggcgcagcgaaagcaaagcggcgacacacggagagaagaagcgatccttcccgtccctcgagaagagaactccctctccctggcgatcgagtccaagaacccaaaaggcaaagaaaaggaggagaaaaagacctcgccttttaatttgcaacccaaatcacacaaagcggagcagcagaacaagccaaatgtagatggcgttactagcgcattcatcagcaagctgtga

SEQ ID NO: 55090 - DNA, 192 bp, Oryza sativa
  Clone ID: PAT_MRT4530_57130C.1
atgaccgacgtgactggtctgataccggtcatgtcgtcagcagacagccacgattccacgtcgcacctgctcccggcgaaagtggagacgacgtcggtgtcaagcacgtcgactaaccgcgccgtcaagaatcacgggcctcaccctagggagactgaattgggagaggtggacccccagaggcttttctag

SEQ ID NO: 55091 - DNA, 556 bp, Oryza sativa
  Clone ID: PAT_MRT4530_57131C.1
tttgcggaaatctttacttgtattgtgggctcttttgtccttggcttttagtctgcagtttggttttacattacagtacactggtctatgtgtgtataacagcaatgtctatgtctgtcacatgaaggctcaatcagaggatattgatactgagatcgctgctgctggtaatgtttctgagaccattaatacagtcattggttctattagtgttgccgaaattacttttaatgttggaactactcctaccttcactggtaatgctaccttcggtattcaccaaactcatactgatcattacattgactatgctggttctcttactcctttctatactgaagctagttctactttgtactgttttggtggtgctggtaatatcgtagatggtcaaggtacctgggctggtgcttctggtgcatattccttcagtggttgtgtatacagcgctagtcttgctgcctcttatattgcaacctctcgtatttttgtacctgttaccccacctcccccacctgcagtttatttctaaaagaataaaatcgaacttagttgt

SEQ ID NO: 55092 - DNA, 1381 bp, Oryza sativa
  Clone ID: PAT_MRT4530_57132C.1
gtggagtaaataaaacgcgggcggtgatgcgctgagccagatggccgcctccgcctccgccgccgcaacgctccccaccactctcctgctccgccgcctcctcctcctctccccgcgccgccaccctaccacccccgccccccgccgattccgctcctgctgctgctcctcttcctcctcctcccccgccgccgcgccggctcacccccacccgcccgccggagggagaagactgagaggcgagctgcgcagcagagccatgtcaagttccacgaattcgacggttttggcggaatcggtagcgactgggagctcagtggatgttgagcttctaccctttgtgaatgacaaacatggtggtgtgatcgttgagatgacggccccgatggatccccaattgttttcagcttccttgaaagcatcattgtcaaaatggagggaacagggaataagaggtgtctggataaaattgcccatcagccttgccaaccttattcaatatgcagtggaggaagggttctggtaccaccatgcagaggaaacttacttaatgcttgcatactggcttccagctacaacacatacattacctgtaaatgctactcaccgtgtgggtgttggagcatttgtaatgaatgacaaaagagaggtattggctgtccaagaaaagagtggtgtacttcgaggcctaggtgtatggaaatttccaactggagttgttgaaccaggagaagatataaacttaggagctgtaagagaagtaaaagaagagactgggattgatacagaatttgttgaagttcttgccttcaggcagagccacaaagctttttttgataaatcggatctgttttttgtttgcatattacggccactttcctttgatattaccaagcaagattcagaaatcgaggcagctcagtggatgcctgtggaggaatttgctgctcaaccatttgtccagaaacatgagctagtgaagtacattcttgaagtgggtttggcgaaggttgacaaggactatgcaggattttcgccaatcctcataaaatccgcattcacggacaaaaaatcgttcttttacatgaacaggagggacctggacaaggcctcagaatccagtagtacacagaaaaagactgaaaaacctttgttcatggaaaaactgtagctttcatactggatctttttttccatcactggtagcttctacacctgattttgaccgaatgttgccgctccaccagtcctgtaattcagaaaaaggagcagcagttcagaaatacagctgaatttgttgtacctatgaatttgtattgaatatttataggcttacaaataatgaaaaacatttgttggacacttggacttccaaaaaaaa

SEQ ID NO: 55093 - DNA, 1203 bp, Oryza sativa
  Clone ID: PAT_MRT4530_57133C.1
atgacgagagcaagccgagcgtcgctgctactgttttgcttcggcgggggagatgatgattacgagtgccgggcgtgctacggggtctccgtggcgtgcgtgtcgctgctcctgttctgcgtgctcgcggcgtcggtcagcgtcaccaaggcctgcgccgtggcggggctcgccgtgctgctgttcggcgtgatcgggtggttcgtgccgctgtgcggcgcggggggcccgcccgcgcgcgccggcgccgccgcggggggcggggggcggggagcgggcgccgcgggggtgacgcggtgcgcgtgccggctcgtcggcgcggcgctgatcgccacgctgccggcgttcgtgttcgagggccccgcggagggcggcgccggcggaggcggcgggagcaagcacggcggcagcgtgctgtgcgcggtgtgcctggaggacgtggcgcgcggcgagacgccgcgaatacctcgggccagaaaccttaaaaccggccgcgccgcggggccgacgccgacgccgagagcgcgcacccggcgcgccacgaccgggctgcagatgtttaacggcgaacggcgcccggcggcgagccagcgcggcggggatggtgggtacctcgcgtgctactccgtcgtcatggtctgcgcgtcgctgctgctgctgtcggtgctcgccgccacggtgagcatcgccaaggcgtgcgtgttcgccgcggcggccgcggtgctgttctgcgccgtcggctgcgtctcgcggtggtgcggggatgccggcggggctccggcggcgctgccgacgacagcagcggcggcggaggaggcgcgggcgagggcgcccgcggcggcggcgtgcgcgacgtgcgggctcgtcggcgcggcgatcgacgcgctcccggcgttcgcgtacgcgcgccctgcggccgacgacggcggcggcggcggaagcaagtcggggaggtgcgcgctgtgctcggtgtgcctggaggacgtccaggccggcgagatggtgcggcagctgccggcgtgcaggcacctgttccacgtgggctgcatcgacatgtggctgcactcgcactccacgtgcccgctctgccggtgcaacgtctcgccgccggcgaccatcgtggtgaaagccacagccacgtcgacggccaccgccgcggcggcggcgcagcagctaccggctgacacgttgccgccggtgtga

SEQ ID NO: 55094 - DNA, 1398 bp, Oryza sativa
  Clone ID: PAT_MRT4530_57134C.1
atgacgagagcaagccgagcgtcgctgctactgttttgcttcggcgggggagatgatgattacgagtgccgggcgtgctacggggtctccgtggcgtgcgtgtcgctgctcctgttctgcgtgctcgcggcgtcggtcagcgtcaccaaggcctgcgccgtggcggggctcgccgtgctgctgttcggcgtgatcgggtggttcgtgccgctgtgcggcgcggggggcccgcccgcgcgcgccggcgccgccgcggggggcggggggcggggagcgggcgccgcgggggtgacgcggtgcgcgtgccggctcgtcggcgcggcgctgatcgccacgctgccggcgttcgtgttcgagggccccgcggagggcggcgccggcggaggcggcgggagcaagcacggcggcagcgtgctgtgcgcggtgtgcctggaggacgtggcgcgcggcgagacggtgcggcggctgccggcgtgcggccacctcttccacagggactgcgtcgacatgtggctgcactcgcacaccacctgcccgctctgccgctgcgaggtcttgccgcggaaaccggcggcgaaacctgccccgccgccgccggcgcaagccgccgaatcgacgtcggcgtatgcagatcccgatgcgttgccgccgccgcgaatacctcgggccagaaaccttaaaaccggccgcgccgcggggccgacgccgacgccgagagcgcgcacccggcgcgccacgaccgggctgcagatgtttaacggcgaacggcgcccggcggcgagccagcgcggcggggatggtgggtacctcgcgtgctactccgtcgtcatggtctgcgcgtcgctgctgctgctgtcggtgctcgccgccacggtgagcatcgccaaggcgtgcgtgttcgccgcggcggccgcggtgctgttctgcgccgtcggctgcgtctcgcggtggtgcggggatgccggcggggctccggcggcgctgccgacgacagcagcggcggcggaggaggcgcgggcgagggcgcccgcggcggcggcgtgcgcgacgtgcgggctcgtcggcgcggcgatcgacgcgctcccggcgttcgcgtacgcgcgccctgcggccgacgacggcggcggcggcggaagcaagtcggggaggtgcgcgctgtgctcggtgtgcctggaggacgtccaggccggcgagatggtgcggcagctgccggcgtgcaggcacctgttccacgtgggctgcatcgacatgtggctgcactcgcactccacgtgcccgctctgccggtgcaacgtctcgccgccggcgaccatcgtggtgaaagccacagccacgtcgacggccaccgccgcggcggcggcgcagcagctaccggctgacacgttgccgccggtgtga

SEQ ID NO: 55095 - DNA, 1083 bp, Oryza sativa
  Clone ID: PAT_MRT4530_57135C.1
atggctgctcggtcgtcgtcgtcgccggcgaagacgacgacgacgctggctttgctgttggtggtcgcggcggcggccgctgctgtggcggcggaggcggcggccgtggcggcggacgcggcgcggggcgtccggcaagtgaaccggcggggcccgtacctgggcgtggtggtgcccaacgggttcgagatggagccgctcctccgctcgccggccttctcgccggccaagaagctgccatacctcgacgtcgcaggaaggagatttcgcttcggatcgataggagagaagaaggtgatcatcgtcatgacaggcctcggcatgctcaactccggcgtgaccacccagctcctcctcaccctcttcgacgtcgagggcatcgtccacttcggcatcgccggcaacgccgaccccgacctccacatcggcgacgtcaccgtcccccgctactgggcgcacaccggactctggaactggcagcggtacggcgatgggccggagaaggagctcgcgctggagtccaatggcgactacacgaggaagtacggggcgctcaacttctccgactacggcgtcgccggcggcggcggcggcaacctgctgaacggcgtgtggtaccagccggaggaggtgttcccggcggacggcacgccggagtctcgccgccacgagttctgggtccccgtcgacggccggtactaccagctcgcccagaagctggaggcgatgccgctggagcgctgcgtcaaccgcaccgggacggcgacgtcgccggcgacgtgcctggcgcgggcgccggcggtggcgcgcgtggagcgcgggtgcagcgccagcgtgttcgtggacaacgcggcgtacaggcagttcctgcggtccaggctgggcgtgacgccgatcgacatggagtcggccgccgtcgcgctggtggcggcgcagcagggggcgccgttcatcgccatacggtcgctctccgacctcgccggcggcggctccgcggagtccaacgaggccggcgtgttcgcggcgctggcggcgcagaacgcggtggccgtcgccgtcaagttcatatcgctcttaagctaa

SEQ ID NO: 55096 - DNA, 495 bp, Oryza sativa
  Clone ID: PAT_MRT4530_57136C.1
atgcccctcgagaaattgatgttgcctgtgaagctgccatggcagtttgtggggggaaggttggctgagagggctgtagatttgttggagctgcaaattgagaagcctgtgaagggatgtaggatggatgagatgcttgtgaatgaggaaatgtggaggcagcctgaggatagggtgcccctgcttgaggtgcttgagaagcaaatgaagtgggaggtgcttgagaagcaaatgaagcgggagcagcatgagtttgtggaccagcagctgcaggctgaggtgcctgggaggagacataagatgggactgcctgttcagggtgcacagatgggtttgcaggtggtacctctgaatgtgatgaggtgggcacaaaaatatcttgctgcccgggtgcagcattcgatccaaaagagaggtcgccaagagtgtctccaaaaccaaagcttgctgctgaagcaggctggaaaggatttgcatctgcagcaggttcagtag

SEQ ID NO: 55097 - DNA, 3715 bp, Oryza sativa
  Clone ID: PAT_MRT4530_57137C.1
aaaactgaaaagatagagctgcctcgaaattaagatcctacccggacacaacagattatgaagaaaccaataacttaagttcctaccaggacaaaacaggttacgaagaaactaataactgaagtacagttacagggagctaagcaactcgtcacctctatatagacaggactcagctcagcttggtcactgccaagcatcaatcaaaactaatgcaactagcagtagcatagaggcggttaagatattgaactcgctgaaaatacttcgcatgcccacatcagtttctctctgagatcatgcaaattatccattctggtaacatatgcaccttacagaataacaagctacacaaattagggagaaatgttccatgcaaaattacttggacactggcactcaagttagaaatcttgcaagtcatctatggcgctaggcacagagggcacaactcataaacaacatgcatggttcataacttgattcccagtagccaaaatttttttttttttttagcttgaacaaaatggtacagcctttttattgtcaagccagcaagaacgctgaaacaatcacaatgtttactgaaaaaaaaacatcctatagagaattatacagctacattgatgattatagtattaaggctttgcatccaacacaacacagtagttgtagcattgcccccgttcacatgtcatatatttagtagatacaatatccaacatggataggaaaagaatagtgatgaaaaattataacccccccccacccaaaacaaaagaaaccatacataaagaaaatccaggtgaccaaaatccaaacgcctcctaaactgtttctcaacccctcactgagtatcgcattgtacagtataatctcacctgtacccaccatatggttgctgccctccgtatccggtacccattggattatatccactacctggacccattcccataggaggccgcatgttcattcccataccctggttcatccccatgcccatgttcattcccattggttgttggttcatccccattcccatggcctgttggttcatccccattcccatggcctgttggttcatccccattcccatacccatttgttggttcattcccattcccatgcccattggccggttcattcccattccaccaccgtaaccggaaccagcagcgcccatacccatgccaatgcccctgcttgcacccattgggttggctggaggtgccatggcactcgcacctgcccgaccgatgccggagccagttcccatggctttgcccatagtgatcgtagataccacaggagcttgagagactttcttttcttgccttttctccttgcgattgattgaatcgaagtcaactccaatatcagcgtgcggattagcctttggtccagagatgtccagattgactaaacctcggctcaatgtatcagcccaaactgtagatttggactcaaatttcttcactggctcagactgactaacttgcaaggctgaaaggattgtttcagggggagctgatgaacttgattgtaatggaaagttcacaccagaaggcattgaattcggcactgcaagaggctgagatgcccctcgagaaattgatgttgcctgtgaagctgccatggcagtttgtggggggaaggttggctgagagggctgtagatttgttggagctgcaaattgagaagcctgtgaagggatgtaggatggtgctccattctgtgaaggagccccagacatgccattaatgccagtccctggaactggttgcataaaatagtttgattggcctgatggtacaggttgaggcatttgtaaaggagcaaatggtgtggcaacattctgagggattgtagatggattagtggctgcaggatgagatgcttgtgaatgaggaaatgtggaggcagcctgaggatagggtgcccctgcttgaggtgcttgagaagcaaatgaagtgggaggtgcttgagaagcaaatgaagcgggagcagcatgagtttgtggaccagcagctgcaggctgaggtgcctgggaggagacataagatgggactgcctgttcagggtgcacagatgggtttgcaggtggtacctctgaatgtgatgaggtgggcacaaaaatatcttgctgcccgggtgcagcattcgatccaaaagagaggtcgccaagagtgtctccaaaaccaaagcttgctgctgaagcaggctggaaaggatttgcatctgcagcaggttcagtagcatggaaagaaccagcaggtgcagcatttgtctgagaaactgcaggagtttcttcatgaacagccttgaaaggcgtaggatccccaaaaggattagttgcatcaaaggcctcattgaatccagtagaagccggtggcatgcccataaaactgttactctcaaatcctggatttgctgatggctcaacatttgggctggcagttggctgaggcacagataccaaagccaacgaattaataggatctggtccgaataaatccatttccaagctattcacggcttgtgaggggttcactggaggtgaggtatctggtactgatccacgaggatcaaactcgtcaaacccattaacttcaggatgagtaggtggtggtgcaggtacgtcttccacagtattatcatgtacaccattcacctgacctgggggtacacttgttcttggaggtgaagacacctttgctgcagcaactggcacaggcacagtccctccatttcgtccatcatgattattatcctgtgtatctcttgtgacatcttcatagtttggcggtggtgaagcaatctgctggttagaaggcttccgctccatgggcctctcatcctgagtaggtccgtcagcattgctttgccggccacgggatgaataagcttcatcatccccatatgaatccctatctcgtccatagctcctgcgacctgatccttctgcatattcatggttgctatgacttcctttgtactcatcttctctatctctgctgtagcgctgctcattagaatccctagaataacgatctccttcccgattgggagtagttccagcaacaccatatctgtcatcatccctatatccatactctctttctcccccgtagccatttctgttatcatacctactgccatagcttccttcatagcggtcattgtcatagccacctgggctcctgtgtgttccactggtggcgaatgcactccggtatttgtccctggtagcaagtgctttctgcctaacttcctgtatcctctctttgtcattaactaaactaacaaggctctgggatttccgccgtacattgctaccttgatctctcccactcgaatcgatatactggaaatcagctagtgtcgatatctgataagaatgttcccttatgtcatcaataactcgctctgtaccatgagcaaccaagtaatccaggacaatcaatcccttataaacatgccgccaatttttaccagtgtcattgatcctcttccacacaacattcatgaccatctggtactcatggtaattttgtgttgcttgggcgatttctgccaagagtgatccatgtgggccccatggctcgttgcttgtggcatcaagaatcttttgttctataccaggcaccttgaggaccttcttgttcacctctctttttaggtcccggactgtttgatcgaatactttcttcat

SEQ ID NO: 55098 - DNA, 271 bp, Oryza sativa
  Clone ID: PAT_MRT4530_57138C.1
ttgatgtggactagggttcccgatcttccgaaaggttctgataaccaacgatttgggcagagtcacgtcacaaatcgatcaggcttcttgaacgaacacgttcttgagccccgttgttaccacgtctcctctagttataacccgtgttgaaacgcggatgcggcccaaatacggtgacgcagcaccaggacagattctggacgtcaacttgtttgctcaattcccgttgactcaaaaagaatttggacgtggaaccaaaaccattagaaag

SEQ ID NO: 55099 - DNA, 178 bp, Oryza sativa
  Clone ID: PAT_MRT4530_57139C.1
ggccagaatctaagcaacgaatgcaacttctagtgtattgagtaaagtcaatggatcgcccgtgttcaagaacacagtatatacgaggtatccaactccaattactcgggtcagatctcgcaaggccctcgacgcctgatagtaactgattatcccgcatgtcattctgtgagcccat

SEQ ID NO: 55100 - DNA, 314 bp, Oryza sativa
  Clone ID: PAT_MRT4530_5713C.1
gggagatatggcggcgagcaatgggaacgccggggccggggcgtgcgcgctcgggcttgtgcttcttgccgtgggcgccgatgcccaaggcgggggcgggggggaatgcctgccccaactgaacaagctggtggcgtgccgcgcgtacgcggtgccccgcgccggtgaccccagcgccgattgcttggatgcgctcaactccatcttccaagggtgcgccctgatgcgccttagcatcatgaacaggctgccttccatatgccaccttaggcagatcaactgctcttgctaagacgagacgagagttaaccccg

SEQ ID NO: 55101 - DNA, 1089 bp, Oryza sativa
  Clone ID: PAT_MRT4530_57140C.1
ggagagacctagtctcgagtttttttttttatcttaggatagaacagaggaaccagtcagttagttggtaacgaatttgaatttttttttgaaaatgccaaatcatgagatagataactcaggagacttttttttaggagatatacttaaaaactaatcataaccagctcacagagcattcgataactgaatcatttcttcatctcatcacaggcaaatagagaacagcaacattgcttctagaagatagttcactggtttcagaacacaagtaccaaaattttaaaagtgcaaacagatattatcaaagtctgcaagggttggattccacagtaacgtaacatcaaagcacataggcttaacgataacggcgaagagagacagtctggttgcgcttccaggtagccctgcgggacggcctggccttgtggtgagtgtgacccttgccgcgcagaccacggtacttcttgccagcagaggtgagaccacggagctcacggtgcttgtgcacaggcttgcagagccagttgatccttgggtcattgcggatagcactgtgagcaacatccacaaggatgatctcaaagtacttgtaggtggagtcctcgttcacccagtaggagttgagcaccctgagtccgcccaacttgcgcccagctctctcctcagcaactgacctcttgttcctctggaacttgagctgggtgataccctggtgcttgggcttgccgtagacaatacccttgggcactggcctcttcctgccaccacgcctcacacggacacggtaaaccacataaccctgcttggccttgtagccgaggcggcgggccttgtcggggcgggtggggcgggtgaggcggacgatggccggctgctgcctgtactcccagcaccgcacgcgctgcacgaacctcatcacgtccgactgcttcctcctccatagctccgacacgtacttgtacgcacccatggcggcggcggcggcggcggcgagcggcgagaggcggcggcggggaggtggagcgggagaggagactagggttcccggccggtaaaaatatatgacaccgttgactttccggccgg

SEQ ID NO: 55102 - DNA, 330 bp, Oryza sativa
  Clone ID: PAT_MRT4530_57141C.1
atgcgggatgggagcggctgccccagcgtgccgacctggccatgcaattccatcgggagatgttgcaccgacaccgccgccgctgcctgctgctactgctgctgttgccggttgaagttgatcatgtcgtcgcggacgcgtagctcctccgcctgcttcgccatctctaggactcaagctgttgcagcgatggcgaatgcgagagggagagagcccctggtcttcaccacgctgtccgcaccggcgccgagctgcaccggcgccgccgaacgcagggaatgcttcgtggtgctggtggatagccgacagcgtgtccgactgcggcggtga

SEQ ID NO: 55103 - DNA, 1224 bp, Oryza sativa
  Clone ID: PAT_MRT4530_57142C.1
ctacgcgaagcacacaagcaaagctacaagcaagcgaacgactaccgacaccggtacacgggtactggggtcgacaaccgcacaacgggtacggggcgacaccgaaaggatgaggacggggcagcgagaggagagatccataccaccacgcgacgaggcgagggaacgacaacgacgaacgggcgcggcgtagacgaacggcgagggaacgacttcggcggcgatccttggacgaaggcgagacacggccggcacaaggcttgatgacgcggagccgaggacgaagacgacaacggggctgccacggctcgcttgatggacgcggacgacggacgagaacggcttgacggagggacgaacaccacgacgatgaggacgacgaccgggaccggcgaggaggcaacgagggcagccggcggcagcggaggagtcgtcgacgaggacgaacggagacgacgataacgaacaccggcggggttcagatggaggggaggcgaggtcgagggcgacccgtgccgagggaggagacggcagcgccggctgacgcacgggcacggcggaaggggctgccgaaggaactccggcgaggcggagggcgagaccggcgcgggcgacgacgttccggcgaaattcgagcgatgccgtggcctggccggggaagaggatggcgctgctgtgccgggagaggcagcgacgatggaagacgacgctctggcaaagcgacacaggcggctggaggtggtacagtggcggcaacgccactgtacaccagcgaggaagcgtctccgttggtccccgtgcgaaacggagggcaggccggcgtagaggggacacctgcgaggccgaggaaggtggtggcgacgtcagccgccgcacgggagaggcggcacaggcggctggagggtagccggcgccgaggaaagagaaggaggaggcggggagaggtggtgcggccacgggggagctcgggaaggggctaaaacgagggaacggagcgagggggttccattttataggcaaagggaaggagccggccacgggaggagcggggaacggcggcggaaaactcggccggcggccatggaaggtggccggggttggcgcgtccgttcctcggtttgaatcgcgtggattttggggaggattggcactagggtttgcacgggagagagaaaggaaggaggccgggcgggaggacgacgacgacccggggatgggacccat

SEQ ID NO: 55104 - DNA, 661 bp, Oryza sativa
  Clone ID: PAT_MRT4530_57143C.1
gagggacgttcgaccacagatcgtcgttgcttgcgcatccgacggcaacaaccatttcagtcctgtctcttgcctcaggccccgcaagcgcgatgtccctgcctgctctctggcccagccgttcatcggggcagcgacgccgcgccagccgctggggagctcaggctgccgcacgctgaagccggcggggaggtcggactggaacgcggtgctaccgctgtccgccggcgaggtcgagggcgatggctccgcccagcagctgctgttgtcggaaccgtcgtcggagagcttcccgccggccgcattgtgtgacggcctgagctctccggcggccggcgtggcaccgctgtccctatcaatgaatgggccggagagcaggcagagacattgcgctgtggggcctgagacaagggacgggactgaaacggttgttgccgtcggatgcacaaggaacggcgatccatggtcgaacgtccctctgacgtagaataaagtacgtcagaggatccggttccagttcatttatattgtactggtgctgcactacagtactaccaacactaaagtactccctcctccatcccaaaatgtttgacaccgttgacttttttaaaaatgtttgaccgttcgtcttatttgaaaaatttaagtaattattaat

SEQ ID NO: 55105 - DNA, 458 bp, Oryza sativa
  unsure (1)..(458): unsure at all n locations
  Clone ID: PAT_MRT4530_57144C.1
aagggcacgttgggggaaagggggatggccaacccgatcagtgggtgtgggtatgttgtgttagtgtatcggtgagtcntangaagtgagggtgtgtntatccaacgtgtgntgtggtctggtcaccgtgtgtaggggggtctgtgtggtaggggggtgtggtgtgttataccggtcgtgtgtggtgtggtgtgtaggtgtggggtggtgtacaaaggaagtagcgtgggcgtcagtgtccaccgtcggcaggtgtgtcccagaggtcccgtgtgtgtgtgtggtgtgtgtgtggtgtgtcagcaggtccaagtagtccaagtgtgtaagtgtgggtgtcagtcagcgtggttagtagagtggtgtcnntaagnaggtatactctctgaaatgataagtagtttacatcgtcatacgagtnnttttgttcttctgcctaaaaaaaaaaaaaaaaaaaa

SEQ ID NO: 55106 - DNA, 417 bp, Oryza sativa
  Clone ID: PAT_MRT4530_57145C.1
atggtgccaatcgaacgcgagttcgggacagcgagatcaaacaaggaggaggaggaggaggaggaggagatcgacgaacgggcgcggcgagaagagcgtataccaccgattcgcggcgaaggtcgcgccgtccaggagccgccagggaatcggaggggtcgccgccggcgcggcaagcctccgccgccgcgcgcaccgccgttgctggcctccgccgcgagaacaaatggcgaaaccgatgctgagttgggccggaacggcattccaggctgcgtgcggggaatgggccggaacgggatctcgagttactacgtgcggcccatattggttgggggcgaacaggattctgacttgtggcccataataattgggccggaaggggatttcgattacttgcggcccaataacgggattggc

SEQ ID NO: 55107 - DNA, 1290 bp, Oryza sativa
  unsure (1)..(1290): unsure at all n locations
  Clone ID: PAT_MRT4530_57146C.1
tttttnttttttttttttttttttttttttttttttttttttttttggcacaaccaaagaactgatgcaatgaatatacatgagaaggtttacatagttcataacagaatgtttgatacgctcttgctaagaattaaactcgcagatgtacagaagacgtcaggttttcgcacgcacaatgctcactgtttcaactttcaacaaggatgttcgcaagtcccggaagaacaccatactactattacacagatgagataaaaataaagggaacagctcgtggacacgtcgaaactcatccatccatcaccggaagacgtggaaaatagatccatggcacagtccggtctcacttttttagaacattgtaaagataagccgcaataccaagaataacacagagcaggacgatatcaatgcagaagttgcgactagatctcagctgaagaacggtctcttttagtctgacgttggtattcttcaaatctgtgttggctctatccaccttctcgtccatttcatccatcaagggaacttgcctatccagttcctcattcatatcagatgccatgtttttcagagtttccagcccttcaccgataatatccaaaccttcatcctgtttcattttgcgcatctcatattcccgacgaaactgatttgattcttctgttcccttaaagtactcatcatcaaagttgccatcagaagtgtcaaacttaatggctccaccagtacgggatcctgaggcgccccaagtcccatttttctttgcacttgaactaccatctggtattgattgtattctatcgggtaaggcagcaaccagatcactacgggtcgcgagttcctcttttgtgagccctttgaccttcttcagcgcgaggcgctgcagcttgggcaggtcctcctcgacgagcttggccttggttcgccggatctccgcgttgagcgcgaccaccgtggcgcggttcttctcctgcttcgccgcctccgctttctcgacgcattcgttgatgtcggcgtcgatggagccgtagaggcgggcgaaggggtcctcgccggcgacgttggcgccgttgagcctctcgacgtcgtacttgtcgtacttcttgcagatggagtccacccgcgtgaggatgtcgatcacgctcatcttcgcgcgcccccgatcccgatcccgatcacgatccctccgcccgcccgcgagcgagatcgaggcgaggattcgggaggaagcaagcaaccgcgacgctgcccttcctttctccgcccgagcaaaccggacgcggg

SEQ ID NO: 55108 - DNA, 206 bp, Oryza sativa
  Clone ID: PAT_MRT4530_57147C.1
atgcggccgcgattccgatcgatccatcagctgggcgtcgccgtcgccgtagaattggaaggctccacggcgctcgagtcaaggcgcacgcccgggcatgggcggcagcgcgctgatgacaaaccaaaccacggatgcatgcgccgatccgacgagatgcactgcacgtatgcacgcaccgtggctgcgtcggccgacaggtcgcg

SEQ ID NO: 55109 - DNA, 318 bp, Oryza sativa
  Clone ID: PAT_MRT4530_57148C.1
atgcggcttccctgttccgactgtgtgttcctatctctgtcccctgccaggcggggcaattgggtaggcaaggcaattccagtgcttgccattgccatcgatgggcaatatgcgtgtgcaggacgactgcttaccggtgaagttataggagaggtgaagttcctgagcagggggaggccgcacggcctccagcacggtgcccgagaggtggttgtgcgcgacatcgagctactccaccttctacatcccgggcacctccggtgggagcgggccagcgagggagttgaagctgacgttgaagaatgtgacctcccatag

SEQ ID NO: 55110 - DNA, 408 bp, Oryza sativa
  Clone ID: PAT_MRT4530_57149C.1
atggcgacgcgacggcacgcacggggctcggggcggcgacgtgacgcgcgcggcggcactgggctcaaggcgcggcggcggctcctggcttggcgacggcacgcggccgggcgggggcgcggggcgcgaggcggcaggcacgcgacacggcgacgggacggcggcgatgggacggtcatgcggcgtcaggcggcgatggcaacggcgcgcggcagcaggcggcgacagcggcgacgcgacggcgcggcgcggagctcggcgcggcgcggcacggggctcggcgtgacggcgacggcgatgcgatgacgacgcggcgcggggcgcgaggcggcggagcgacggaccagcggcgcgtgggcgcggggctcggaacttccggagttcaagaacaggaacttccgggtactg

SEQ ID NO: 55111 - DNA, 360 bp, Oryza sativa
  unsure (1)..(360): unsure at all n locations
  Clone ID: PAT_MRT4530_5714C.1
ctctcgctcagatccgagcgaggcgagaaatccatgaaaaatcgagggtaatctccgctcggtggcttcaaaaacttcgaatccttccccaatttcatcggctccgcagtttttttctcgaggtttttcggatctaaagcgcggctttgtcggcgcttgtaagccacgagagagagagattcttgtgccttcgagctcactccatccggccccaagaaagctcccctcctcccacccaccgccaccactgaggaggagagaaccctaactataacccctaatcctgccactaatcccagttcatggcctcctccctcacgtcccgtaggcnttacccgaagaaggaggacttgggcaacg

SEQ ID NO: 55112 - DNA, 2793 bp, Oryza sativa
  Clone ID: PAT_MRT4530_57150C.1
atggggaagccgcccgttgtgccacatggggaggtggccctctgcgccttcgtggagtcctcctgccacgccctcaccgttggaagccatctatcactccctctccatggaggcctcccgccaagcccacaccgtgaggaggccacccaccactccctcgccatgggaggcctcccgccatgccactgtgaggtggggcagtacaggatccagcccctcccgactgccggtggggaggggcagtgttggatccggccatcccgagcaccggtgggaaggggatgggacggagaggtgcagccaccgacaaggccagcaaagagcaatggccatgaggaggaagaattcacaattgaactgcatcatggtgggtttttttgtggagttggcagtagcagaatttatttggatgagaaggtggactggtttgatcattgcgacactgacacatggtcttccttatggcttgatgattttattgagcaactaggatatgataattctaagaggaaggttaaggtttattggttattgcctgggaaaacatttagtgatgggctaaggagaataaattcggatgcaagcactaacagcatggttgcattagtaccaaggttcagatcattgcttttgtacacggatcatcaggatattgtggaatcgattaattgggatgatgtagctctttcagccccaactactttacctattgtggctagtcccaggagagtcgcaatgagtcagaaggtttgtgatgatcaagttgcaaaaggtgataaaattgatgatgaggatgacagtgaattagatccagactttattgatagtgattatgaggctgacaagggggatgatgatgtttttgacaattgtgttgaccaaactgaaaatgctgaggctagcaagctagtagttgagcttcctgcatgtgatccagatgatgaaggtttgctgctaccagagtcatctgatgaagattatgggggcatcaagttgaaatttaagaactttgtggctgatgtggacatggagtcacctatctttaaggttgggatgttgtttaatgatgctattgaagttaggcaggcaataaaacaatatagtgtgaaaaatagagttgcaatcagatttgcaagaaacaccaagaaacgaatagaggccaaatgttctgaagaatgcccatggatgttaaatgcctctgaggacagcaggacaaaatgttttatgataaaacaatatgtggatggtcacaaatgtcaaaaagagtgggagttgaattatgtactgctagatatcttgcaaatagtaggcattgaccccaatgactacatctatcctatagccatggcaattgtggaagtggagagtagagctagttggggttggttcttgaatactttgaaagaagatctccttattgacaacacggcaccgtatactattatgacagatagacaaaagggattggtgccagctgtgagggataaatttccagattcagaacaaagattttgtgttaggcatctataccaaaacttccatgttttgcataaaggggagactctaaagaaccaattgtgggcaattgcaaggtccagttcaataccggaatgggaatccaacatggaaaagatgaagtatcttagtactgatgcttatggatacttggaggaaataccaccaaatcagtggtgcagagaattctttagtgattttcccaagtgtgatattttgctgaacaacaattctgaggtattcaacaagtatattcttgaacctagagagcttccaatgttgtccatgcttgagaagattaggagccagatcatgaataggatacataataagcaggaggagtgcgtaaagaagtggtcgggaaatatatgcccaaaaataaagaaaaaggttgagaaaaatgcagaaatagcaaatacatgctatgtcttgcctgctggtaaaggggtgttccaagttactgagaaagaacaccaatatattgttgacatcatagcaaaacattgtgaatgtaggagatggcaactaacagggataccatgcaaccatgcaatttcttgcttgaggagtgagaggatcaagcctaaagacgtggtgtccttttgttactcaacagagaaatttatggaagcatatggatttaatataatgcctgttagagacaaaactgcttgggcgaagatgaatggagtgaaggtcaacccaccggtttatgaaaagaaagtcggaaggcctagtagatgtagaagaaagcagcctcaagagcttgaaggaggaacaaaaatattcaaacatggtgtgcaactacactgtagctattgccaaggagttaatcacaataagaagggatgcaagaagaggaaggaagatataaaaagtggaaagcagcaggccagtgctccttctctacagcctgttcaagaagatgttatgcctttgcaggtcatgcctgatattctgaatagtcagactagtattctaactagtcagccaaactacaaccagttagacaataccatattgtcttccttgattagagagaacacaatcaacagctcgtctagagttgcccctggtccattgccggaatcaaattttattgccacaaacagaagggctggagtggagccaccaatgacgaccgcaaccaaagagggcagggcaacaattaggaagaggatggcagagccaaggaagaaaaatgcaccacctaataagaaatcgataccaaataatgaagcagaaccgaagaaaaggaaggagacaaagaaaaaatga

SEQ ID NO: 55113 - DNA, 2825 bp, Oryza sativa
  Clone ID: PAT_MRT4530_57151C.1
ttgccctcctctcctcttcttgggcagaaaatcgagcagcgctaagattattgacattgatttgtctaactgagtattactaaagttgcacttcctgctgatggcaatcagcttcaattttagtcaggaagactgctggtggcaattgacgcattgacatcaccaggagatttaaaacatcatcacgcctattccgggtccgggatagatgttatctcttctgcatcttcctgtgaatcagtctcctctgatgcatctgcaagcgcctcaagcatgttcaaaacatcattagtatcgtccaaatagtacttagccttgcttggcttctggccgactgtgcacgcatataatgatgtttggggatcaactatgctccttctcatgatatcagcaattccttcaaacatatcctcgtctgatctatcatcgcctatgcagagaacaaaatctgcctgtctcttgttctctgtcagcgttgataggatcttctcagcaacaaatcctttgctgacaccctgcggtttcacttccacaatctgttggccactctttacacagacaggctcattagcaagaacactttccaaatgatctagcatctctttagcttgtgaagatccaaaaccagggtcagcatcttggtggtgccagaccaaagcactctctttggtttcaatatatgatccatcggttgcttctgtatacaggttcataactggcttggccatctgcatccatccaaattctgagcactggttattcaattgccattgctcatctctggtccacctcataaagtagccatgttcggcagcaatgccaagatcctggcaaggggaaaaccatttctcaaggctatcccttcctcgtccactaacaataaaaacaacattcttcttatcgtcacaaagagcattcatgattttaacaacactttcatttggagtcctgttgattgtagtttgtggtactagcgttccatcgtagtctagcagtataaccctgctcttagaattcttgtaatcagtaacgatagaatccacagtaagctttttgaagttgcggtcaagagcaactactctaaatccaaatcctagtccaataccccagcacctcctcctaaaatggtccctgcagcttctctccaaatcatgaatatagctcttggaccaataggcaacatcatgtgagctgacatatctgtaatgcttctcatgccgcagttgcttctcgttctctgataaagcaatcgactcgttcattgcctctgctgttgtatcaatgttccaagggtttacccgaattgctccactaagtgatggtgagcaaccaatgaattcggacacaactaacatactctttctccttggcccatcatccccagaaccatccaaatctggaaatccctgtctacagacaatatactcatatggtgtgaggttcatcccatccctcactgcagttacaacgacacactctgccacggtataataagccatcctctccacacttgaaagggctctattgataatcaccacaggaacatatcctggccgtgaaaattgtgcatttatcctcctgcaactctcatcaatctcagcctgtatctcttcaaggtccttcccaccaccaccccttgggtttgcaatctgcaccaacactgccttgcgctgccattttgggtgtgtcctcagcatctgctcaaacgcaagaactttcagattaatccccttaaatatgtccatatcatccacaccgagcatgacagtcttcccatcaaactgcttccggagttcggcgacacgccactcaagatcaggcagccggatctgcgtctgcagctgcgtcatgttaatcccaacaggcatgatctttatcccaacagtgcggccaaagtaatcgagaccgatatatcccctcttcgactggtactcgatccccagcatccggctgcagcaggacaggaaatgccgcgcgtaatcaaaggtgtggaacccaatcagatcgcagtttagcagtgatttgaggatctcgtcgcgaacagggagggaacggtagagttccgacgaagggaacgggctgtgcaggaagaaaccgatgcggagcctgttgaaccgacggcgaaggaaggacgggagggcgaggaggtggtaatcgtggatccagatgtagtcatcctcggggttgaggacctcgatgacgcgctgggagaagagcttgttggcgaggacgtatgcctcccactgggagcgatcgaagcggccgccatggtcggaggtgaaggggagcatgtagtggaagagcggccacagcgtctgcttgcagaagccatggtagaatctgtccaagacgtccttggggaggaaagccgggacgcagcggaaccggtcgaggagcgcctgcgcgacgtcgtcctgctcggcggacggcacgtcggcgcggagggagccgacgtagaggacctccatgtcatcggggaggccgtcgcggaggtggaggaggagggagtcctcgtcccagcagaagctccacccgcgcccgtcggggcggcgctcgcagcgcacggggagggtgttggcgacgacgatgaggcggtcgctggcgagcgacgagggcacgtcggaggtgacgctcccggcccgctcctcgtcgagctccgccagcgtcccgggcgtcgtcatcgtccgctgcatccgcctcgcccgcggcggccggcccccggccccgttgccgccgccgccccctccccctccgccaccatagtccagggcggagaggttgccgttggcgagatcgaccaggttggtgtaggatcgcgagaacat

SEQ ID NO: 55114 - DNA, 348 bp, Oryza sativa
  Clone ID: PAT_MRT4530_57152C.1
atgctttgccttgatctggactacgatgatgaagtgcttgccaccttagtttcatgcttgctcaacagttctccgaacctcaaggatctcaaaatccataatcatctgtctagtgtcatcctcttcatcgatgcactctctgaaagcaacccttgtgcgggcctttgtcatttcctggtgatgaacgcgaggatccttcaaaaagtgagcattgagtacctccgctcggatgtcaagcctgaacatgcagccaagcttgaagcaatccgaagcgatctccatctctggccgagggcttcttcgaatgtgcagctggagttgtgtcctcttgatcactacccctgctac

SEQ ID NO: 55115 - DNA, 492 bp, Oryza sativa
  Clone ID: PAT_MRT4530_57153C.1
atgttccccttcgccatcatgctcgcctccacctccgacataaccaccttcatgccgccgccgccgttcgccggcgatccaaccggaggcctccgccggccgccgctgacaacgacgacaacgagtagtaggcgcgaacaaatcggccgccatcaacaccatctcgacagtcgaccccctcttatccgccgatctcccctcccaagtcccacctgcgccgaagtcgccgccgccgcctcttcctccggcgcccgaggccgagcctaccacgcgctggcacgccgttcagtctgctgtcctcccctcttcctcgtcgctatatggggagaggagctcagcgtcagcgacgagctccgacgacgacgctgcctctcctctcaagctcagcggcggcgcagatcctcgccagatagggcgacgagctcggttgcaaagggcgtggtgctgaggaccgcgctacggccgccgccgccgttggacgccgtgatgtag

SEQ ID NO: 55116 - DNA, 214 bp, Oryza sativa
  Clone ID: PAT_MRT4530_57154C.1
aaaaaaaagggtgggatagcatgacccattggggcactgggggaccctgggaatatccctttaacctccccccacaaaagacccttttcccataatcccagatcttgggctcacatattttaccccctgaacaacaaaggggggaaaaacattttatttaaaagcctttgttcccacttcccaaatgggacatattctgcaggggaaccccgca

SEQ ID NO: 55117 - DNA, 261 bp, Oryza sativa
  Clone ID: PAT_MRT4530_57155C.1
atggcgaggtttgatggctacgcgtctatgaattttgaaaccatatggtgtattgtcaacagggcgcgccagcgcactccggtggctttggcttcgcgcgagcgaggagaggtgcagcggtgtacactgtacagtgcgctacaggttaacgcagcagaagtgcaggcgaggcagggcagcggtaacacccttgccgtgatgaggaggagttcagggaggatctacggctcatacgtacggtcgtggtacatcgtgaggtga

SEQ ID NO: 55118 - DNA, 1450 bp, Oryza sativa
  Clone ID: PAT_MRT4530_57156C.1
atggaggggggcggcgggggcgggtcgctgccgccgttcctgagcaagacgtacgagatggtggacgacccgtcgacggacgcggtggtggggtggacgcccgccggcaccagcttcgtcgtcgccaaccagcccgagttctgccgggatctgctccccaagtacttcaagcacaacaacttctccagcttcgtgcgacagctcaacacctatgattttaagacagtacttgtgaataaccaaggtcaactcttgttctaccaagaaaattcaagtagcttattgcaatgttattgtcttctccatccggttgaagttgtacaaaaatgtttgataatgggctttaggaaagtagatccagaacaatgggaatttgcaaatgaggatttcataaaaggacagcggcaccggttgaaaaatatacatagacgcaaacctatattcagccattcatcacacagtcagggtgctggaccattaacagataatgaaaggaaagactatgaggaagaaatcgagaggctcaaatccgataatgcagcactgtcctcagagcttcaaaataatacgttgaagaaacttaatatggagaaacgaatgcaggctttggaagagaagctatttgttgtggaagatcagcagaggagtctgatatcatacgtcagagagattgtaaaggcaccaggatttctttctagctttgtacagcaacaagatcatcacaggaagaagaggagactgccaataccaatctccttccatgaggatgcaaatactcaggagaaccagatcatgccttgtgacttgaccaactcaccagctcagacattttacagagaatcatttgacaagatggaatcatcctttgaactcattagaaaatttccttcgagaagcaagtgaagaatttggtaatgatatttcatatgatgatggtgtcccaggcccttcttcaactgttgttctcacagagctccattcacctggtgaaagtgatccccgtgtttcatcacctccaacaaggatgcgtacttcgtcagctggtgcaggagattcgcactcctctcgtgatgtagcagagtctaccagctgtgcagaaagtcctcctattcctcaaatgcattctcgtgtagatacacgagcgaaggtttctgaaatagatgttaattcagaacctgctgttacagaaactggtccatcaagagatcaacctgctgaagagcctcctgctgtcacacctggtgcaaacgatggcttctggcagcagtttcttaccgagcagcctggatcatcagatgcacatcaggaggctcaatcagaacggcgagatggaggaaacaaggtggatgagatgaaatcaggagatcgacaacatctttggtggggcaaaaggaacgttgagcagataacagaaaaacttggacttctcacctcaacggagaaaacctga

SEQ ID NO: 55119 - DNA, 521 bp, Oryza sativa
  Clone ID: PAT_MRT4530_57157C.1
atgggggaggaagaggttgggcgacgggagctcgttgggcggaggaacagcggggagtcgccgggcggaggaggaccggtggcgcggtgctcaccgagcggaggaggcgcggcacgggcggtcggggcggaggagccgcggcatcggcggcggggtcgcggggggaggagccacggcaccggtggcggggtcatgggcggggagcggcgcgggcggtcggtcgctgagcggaggagccacggcatcggcggtggggtcgcggtgcagaggagccgcggcaccgtcgacagggtcgcgggcggtcgcggcgtggaggagttgagaagcggtggggacggccaggcggcgttggtccttcgagcggtgggggcggccgggcggcgtcggtccgaggagcggccgggcggagaggaggcgcggtcggaggagcagcggggcgacgcggtcagaggagcggcggcgcgggtggacactccggtgctctccccctccagatccaccacctctccgcctctactccg

SEQ ID NO: 55120 - DNA, 1240 bp, Oryza sativa
  Clone ID: PAT_MRT4530_57158C.1
gcaaggattgggaggagtactaatgcaagaaggaaaggtcgtggcttatgcatcgcgacaactgcgaccacacgaggaaaactaccctacccatgacctggaactagcagctgtggttcatgcgctaaagatttggagacactatttgattggaaaccattgtgatatctacactgaccacaagagcctgaagtatatcttcacccagtcagatctcaacttaaggcaatggcggtggttagaattaatcaaggattatgatctagagatagaggaagcccagaaggacaacggagagatccaggaggtgaaggagcgcatagccgctggtcgtgcgagagaattctcaatggatgagaaggaaacactgtggtataaaaagagaatctacgtacccgaacagggtggactaaggggattgattctgaaggaggctcataaatcagcatattcattgcaccccgaaagtacgaagatgtaccaggatctaaaggaagggtactggtggcccaatatgaagagagatgtggccgagtacgtaacgctctgtgacgtatgccagaaggtgaaggctgagcaccagagaccagcaggcacacagtttacctcgcatttctgggggaaagtacatgaagccctaggaagttaccttgcgtttagcacagcttatcacccacaaacagatggccagacagagagaacaaaccaggtcttggaagacatgttgagagcttgtgctctggattttagcaaagactgggagagatgtctgccctacgccgaattctcttacaacaacagctttcaagcaagcctaaagatgtcacccaatgaggcattgtttggtccacgatgtcgaactccactgatgtggtccgagactggagaacgggcagtatttggacctgacattatccaagaagccgaggaaaaggttcgcctgattcgtgaccgtctaaaagtagcacagtcacgacaaaagagttacgccgacacccgaagaagaaacctggaatttaaggagggagattacgtttatctaaaggtttctccgatgagggaaacgaaaaggtttaaggtaaacgggaaactagcaccaagatatgtgggacctttccaaatcatcgctagacgaggagaagttgcctaccagttacagctacccaaaaatatcgccgatgtgcacccagttttccatgtgtctcaattaaagaaatgcttacgagtgccggaagaataa

SEQ ID NO: 55121 - DNA, 147 bp, Oryza sativa
  Clone ID: PAT_MRT4530_57159C.1
atggggctcatggctggtgtggactcggagtggtcatacagcatggcacatgcgctggcactggatgcacggacgtacgttacaagtggtatcagagccgactctcatggttacacgggcgcgtgtgtcgcagttgcgcaggcatag

SEQ ID NO: 55122 - DNA, 995 bp, Oryza sativa
  Clone ID: PAT_MRT4530_5715C.1
gcccgccaccctcgctgacggggggggcccaccggtcatccccttcctccagctgctcccgccgcctcgcccgtgccctagcgccgccgccgccgcgaatcccgccgcctcccgcagtccccgcgcgcaataaagagagggaaatcactccccgtgattccctccctctttccccccacttttccctctctctctccctcggattcgttcggaaagtttccccctaacttcgccggcgcatcaatggcggccggaccttccgtggccgattccccctcatccggccgttctctccccctcccaacactatataaacactccccgtgcctccctccaccgtttccgccactcgccgctctctgtccccttcggaatcgagctcgcgccgtcgttctctctctctgccgtcgccgccgagctccggtccgccgccgtcgttgccccggaccctctcccgtttcggcgtcgccttcttcgggttcaccgcaacctcgccgacctcgtccacccctccgtttcgcccgccgaccgccggaactccgccgtcctcgtcgacccgagccgcgccgccgccttcctccgctccggtcgccgttcccgtcgtcgccgtcgacccggggtgagccgtggaccgccgtttcacttcccccttccctcccctctctcgggcgctgctccgccgctccggtggtcgccggcggcgaccatcggggcgcgggtgcgccgcctcccgtcggctgtgccggcgtggccgccttcgggcgcgccccgcggctgccatgtggggcccggccgtcagccgcccgcgccctcgggtgcggctgacgcgtgggacccacggcgccggccggcgtaagccgcgtgcacccggtccaccgtggaccgtgaggctgccgcgtgggccccactcccgtggacccggtccgcgcgcccctcccctcggctgacgcaataaatccgattttaaattaaaatttaaatgaagaaattcataa

SEQ ID NO: 55123 - DNA, 4483 bp, Oryza sativa
  Clone ID: PAT_MRT4530_57160C.1
atgggcgtaccccgctcagagggatacgtcattgagctacaccggctgatgaggcgtctgcgataccccagatttccgatctaccgagtgagacaatgtggatctgtttgggaggctcgggtcgaggttcacacgctagttccttcggagttagactacagcttcccgacacgccaccgtcgcgacttgccggagaccgcgatgcaggatgcagcacgggaggccttcctccgacttagctctatccaccgagctgagttggcgagtactgagtttgctcaccacccgtttcgagaggagagcaactccgtctgcacagttcaggacacaccttgctgctacaacccgatagtgacccgactgtcacgatgggctgaggtagtagacgacttttacgaggaggctctgttagagatcgacgaccagcagaggcgtgtgggagagttagagaccgaggtgactgacctcacagcgcagcagcttcagttggaggaggagcaccaggcttggggcagtgagatagactcactgaaggcacagctccagccgggttccagtttggagactccgatccaggtcgactccgagacagaggggaccgacaccgagccagagaccgagccagacatcactgacccttcagaggatgagactcttgttcctcgcatcaccttcctcggaggacctcgcaccctcagcactgcccgcaagagcacacgacctccgggcaagaagcccaagccagatccagaggccactacttccgagccgtggggactcagggtcattgagaagaagctaactcttgttcgagtacgggaggccgataaagtgatctttgaggcaaaccaattggaaggaccagccggagactggtgggacacatacaaagaagcccgagaagaagatgctggagaaccaaactgggaggaatttaccacagccttccgtgacaacttcgtgcctgccgcggtgatgcggatgaagaagaatgagttcaggagactacggcaagggaataccacagtacaagagtacctgaaccgtttcactcagctggcgcgctacgcgactggagatcttgccgacgaggaggaaaagatcgacaaattcattgaaggcttgaatgacgagttgcgcgggcccatgattggacaagaccacgatagtttccagagtttaatcaataaggtcgttaggctggaaaacgaccggaaggtcgtggagcacaatcgcaaaaggaggcttgccatgaaccgcccgcctcagcccgtaccctagcgtcataaagggacaacctcctcagtatggagaccaacagtggtgacaaccaatcgtcctaccgcatccagcaatttccacaggctgattaccatccagaaccgagctcctgcaccgaatcaagccgccactggatcagtaagactaggaagttgtttcaactgtggagagtatgggcattttgctaataaatgtcctcatccaaacaagacacccatttgcaccggagctaatgcaacggctattcacgggactgctacccctgctgctggacgaggtctattcgggactccgcagactaacaggaccactaccggatttggacgcgggcaagtgaaccatgttcgagctgaagaggcccaggaagaccaaggcgtactgatgggtatgttttctatcaactccactccagttaaagttctcttcgattcaggagcatcgcattcatttatatctttgaaagtaagtcaacaacacaatttgaccagagttaaattaagacaaccaatgttagtacattcacctgggggtgagatagcagtggatacagcttgcattgatgtacccatccgccttagggatgtggtatttccctccaatcttatggtgctgatgccccaaactcttgatgtcatattgggtatggattggttaacaaagcataggggagtaatcgactgtagacgtagagaagttaccctgaccacaccctggggatcggatatgagagcaaccatggatcaagatcctagactaaccgaacgtgccggaggcatatttaccatgctaccccaaaaaggaattcccgtagtgcagcgatttcctgatgtgttcccagaagatttacctggaatgccaccagatcgtgacatagagttccttattgacctgatacccggaactgcccccatatccaagagaccatatcggatgccggtcaatgagttggaggaacttaaaaagcaaattagagagttgcaagaaaagggatttgtacgccccagttcgtcaccttggggagccccagtgctattcgtcaagaagaaagatggtagcatgaggatgtgtgtagactaccgttcactgaacgaagtaactatcaaaaacaagtatccactaccacggattgatgatctttttgatcaactcaaaggagccaaggtgttctctaagattgaccttcgatcaggataccatcaattgaagattaggaccggggatatacctaagaccgcgttctcaacgcgttatggattgtatgaattcacagtgttgtcgtttggattaaccaacgccccgggcatattttatgaatcttatgaataaagtgttcatggattacctggacaaatttgtggtagtattcatcgatgatattttaatctactccagagatgaggaagaacatgcggaacacttgcgattggtactcgagaaacttcggaagcataaattatatgcaaagtttagtaaatgtgagttctggttaaaagaagtcgcttttctaggccacgtaatctcagccggtggagtagcagtggatcctgctaaagtggaggccgttacggaatggaaagcacccaaatctgtgactgaaattcggagttttctaggcttggccggatactaccgaaggtttactgaaggattatctaagatagcccgaccaatgagacaactactcaagaaggaaaagaagtttgtatggtcagaacagtgtcaggaaagctttgagcagctcaaagaaaagctgacctcggcacctattctagttcttcccgacatcaggaaagactttgttatatattgtgatgcgtcaaggcaaggactaggaggagtactgatgcaggacggaaaggttgttgcctatgcgtcgcgaaaactgcgaccacacgaggaaaattaccctacccatgacctagaactcgcagctgtggttcatgcgctaaagatttggagacattatctaattggaaaccattgcgatatctacactgaccacaagagtctgaagtatattttcacccagtcagatctcaacttgaggcaaaggcgatggttggaattaatcaaggattatgacttggaggttcactatcacctcggcaaggcaaacgtggtggccgacgctttgagtcggaagagccattgcaatcatctgaggacggaaggaatggctcctgagcttaaggaggaaatagcccaactaaacctacatatagaagctcacgaatcagcatattcattgcaccccggaagtacgaagatgtaccaagatctgaaggacggttactggtggcccaacatgaagagagatgtggcagaatacgtagcactctgtgacgtgtgccagaaggtgaaggctgagtaccagagaccggcagaccgactcaccaagacagcgagattcattcccgttaagacaaattatagcagtgccaagctagtcgagttatacatgaccaggatagtgtgtcttcatggtatacctaagaggattatatctgatcgaggcacacagtttacctcgcatttctgggagaaagtacatgaagccctaggaagttaccttgcgtttagcacagcttatcacccacaaacagatggccagacagagagaacaaaccaggtcttggaggacatgctgagagcttgtgcattggattttagcaaagactgggagagatgtttgccctacaccgaattctcctacaacaacagtttccaagcaaacctaaagatgtcgccaaatgaggcattatttggtcgacgatgtcgcaccccgctaatgtggtccgagactggagaacgggcggtatttggacctgacattatccaagaagccgaagaaaaggttcgcttgatccgtgaccgtttaaaggtggcacaatcacgacaaaagagttacaccgacacccgaagaagaaacctagaatttaaggaaggagattacgtctatctaaaggtttctccgatgagagctccaccgttctcccctctcctcactccatctccccctcctctgcctcttccccttctccacgcgccgccgtcgtcgtgccgccgcgtcgctgcctttgagccgccgcgccgccgccctcgtgctgtcgtgccgccgcattcgtgccaccgcgccaccgcctcagtgtgccgcgccgtgcgccgtcgtcgccgccgccgccgtcggtgagctgctgccccc

SEQ ID NO: 55124 - DNA, 4542 bp, Oryza sativa
  Clone ID: PAT_MRT4530_57161C.1
atgctggctactgagtcagcaccttacttggtggacccgacagtgacacagccacctgccccggagattgtgcacactccactgatctctacaccttctccgcagctgggtttcagtttagagactccgatccaggtcgactccaagacagaggggaccgacactgagccagagatcgagccagacatcactgatctttcagaggatgagacccctgttctccgcatcaccttcctcggaggccctcgcaccctcagcactgcccgcaagagcacccgacccccgggcaagaagcccaagccagatccagaggccactacttccgagccatggggactcagagttatggccactcaaacccaacttctgcaagccattgtaaacaaccaaggcaaccgcggaggatcaagctttggagagtttatgaggaccaagccacccacattcgccacagctgaagaacctatggatgccgaggattggttaaggattattgagaagaagctgacccttgttcgagtacgtaaagccgataaagtgatcttcacagcgaaccaactggaaggaccagccggagactggtgggacacatacaaagaagcccgagaagaggatgctggagaaccaaactgggaggagttcactacggccttccgtgacaacttcgtgcctgctgccgtgatgcgaatgaagaagaatgagttcaggaggctacaacaagggaataccactatacaagagtacctgaaccgtttcactcaactggcgcgttacgcaactggagacctagccgacgaggaggaaaagatcgataagtttatcgaaggcctgaacgacgagttgcgtgggcccatgattggacaggaccatgatagtttccagcgtctaatcaataaggtcgttaggctggaaaacgaccggaaggttgtggagcacaatcacaaaaggagacttgccatgaaccgcccgcctcaggtcgcaccccagcgtcctaaaggggcagcctcctcagtatggaaaccaacagtggtgacaaccaatcgtcctgccgcatccagtaatttccacaggacggttaccattcagaacagagctcctgctccacatcaggccgctactggatcagtgaggccaggaagctatttcaactgtggagagtacgggcatttcgccaacaaatgtcctcatccaaacaagacacccattcgcaccagagctaatgtaatggctattcacgggactactacccctgctgctggacgaggtctattcaggactccgcagactaacaggaccgctaccggatttggccgcgggcaagttaaccacgttcgagctgaagaggcacaggaagaccagggcgtactgatgggtacgttttctatccacttcactccagttaaagttctcttcgatttaggagcatcgcattcatttatatctttgaaagcaagccaacgacacaatttgaccagagttaaactaaggcaaccaatgttagtacattcacctgggggtgaaatagccgtggatacagcttgcattgatgtacctattcgccttagggatgtggtatttccctctaaccttatggtcttggtaccacagacccttgatgttatattaggtatggattggttaacaaagaataggggagtaatcgactgtagacgtagagaagttaccctgaccacaccctggggatcgggtatgagagccaccatggatcaagatcctagactaaccgaacgtgccggaggcatatttaccatgctacccatgaaaggaatgcctatagtgcaacaatttcccgatgtgtttccagaagatttacctgggatgccaccagatcgtgacatagagtttattattgacctgatacccggaactgcccccatatccaagagaccatatcggatgccagtcaatgagttggaggagcttaaaaagcaaatcagagagttgcaagaaaagggatttgtacgtcccagttcatcaccttggggagccccagtgttatttgttaagaagaaggatggtagcatgagaatgtgtgtggactaccgctcactgaacgaagtaactatcaagaacaagtatccactaccacggattgatgaccttttcgatcaacttaaaggagctaaggtgttctctaagattgaccttcgatcaggataccaccaattgaaaattaggaccggggatatacctaagaccgcgttttcaacacgctatggattgtataagttcacagtaatgtcgtttgggttaaccaacgccccggcatactttatgaatcttatgaacaaagtgttcatggattacttggacaaatttatggtagtattcatcgatgatatcctgatctactccaaagacgaggaggagcatgcggagcacttacgattggtactcgagaaacttcggaagcataaattatatgcaaagtttagtaaatgtgagttctggttaaaagaagtcgcttttctaggccacgtaatctcagccggtggagtagcagtggatcctactaaagttgaggccgttacggaatggaaggcacccaaatctgtgactgaaattcggagttttctaggtttggctggatactatcgaaggttcattgaaggattctctatgatagctcgaccaatgacacaactactcaagaaggaaaagaagtttgtgtggtcagaacagtgccaggaaagctttgagcagctcaaagaaaagctgacctcagcgcctattttagttcttcccgacatcaggaaagactttgttatatattgtgatgcatcaaggcaaggactaggaggagtactgatgcaggacggaaaggttgtggcctatgcatcgcgacaattgcgaccacatgaggaaaactaccctacccatgacctagaactcgcagctgtggttcatgcgctaaagatttggagacactatttgattggaaaccattgcgatatctacactgaccacaagagtctgaagtatatttttacccagtcagacctcaacttgaggcaaaggcgatggctggaattaatcaaggattatgacttagaggttcactatcaccccggcaagacaaacgttgtggccgacgctttgagtcagaagagccattgcaatcatctgaggacggaaggaatggctcctgagcttaaggaggaaatagcccaactaaacctacatataataccttatgggcagataaacaccttggacatccaacctcttatgagaacccaaatagaagaggcccagaaggacaacgaggaaatccgagaggtgaaggaatgtctagctgcaggatttgcaaaggaattttcaactgacgagaaggatgtcctatggtataaaaagaggatttatgtacccgaacagggtggacagagaggattaatcctaatggaagctcacgaatcggcatattcattgcaccccggaagtaccaagatgtaccaggatctgaaggaaggatactggtggcccaatataaagagagatgtggccgagtacgtagcgctctgtgatgtatgccagaaggtgaaggctgagcaccagagaccggcaggtttgttgcaaccccttaggattcccgaatggaaatggaatgagataggtatggattttattgttggattgcccaagaccacaacaggatatgattccatttgggtgatcgtggatcgactcaccaagacggcgagattcattcccgttaagacaaattatagcagtgctaagctagccgagttatacatgaccaggatagagaaagtacatgaagccctaggaagttaccttgcgtttagcacagcttatcacccacaaacagatggccagacagagagaacaaaccaggtcttggatgacatgttgagagcttgtgctctggattttagcaaagactgggagagatgtttgtcctacgccgaattctcctacaacaacagctttcaagcaagcctaaagatgtcacccaatgaggcattgtttggtcgacgatgtcgaactccactaatgtggtccgagactggagaacgggcagtatttggacttgacattatccaagaagccgaggaaaagagttacgccgacacccgaagaagaaacctggaatttaaggagggagattatgtttatctaaaggtttctccgttgaggggaacaaaaaggtttaaggtcaaaggaaaactagcaccaagatatgtggaacctttccaaatcaacgctagacgaggagaagttgcctaccagttacagctacccgaaaatatcgccgatgtgcacccagtcttccatgtgtctgaattaaagaagtgcttacgagtgctagaggaacaagctacgttggaagaaattcatattagcaatgatctcacgtatccagaacacccagtccggatattggatgaagctgaaaagaggactagaatgaaagtgtggcgtatgtacaaagtacaatggagtaatcacactaaggatgaagccacttgggaaagcgaagagttcttgaagacggaatag

SEQ ID NO: 55125 - DNA, 615 bp, Oryza sativa
  Clone ID: PAT_MRT4530_57162C.1
atgaggcgtctgcgataccccagatttccgatctaccgagtgagacagtgtggatctgtttgggaggctcgggtcgaggttcacacacgagttccttcagagtcagactaccgcttcccgacccgccaccgtcgcgacttaccggagactgcgatgcaggatgcagcccgggaggcattcctccgacttagctctatccaccgagctgagttggcgagtactgagtttgctcaccacctgtttcgagaggagagcaactccgtctgcacagttcaggacacaccttgctgctacaacccgatagtgacccgactgtcacgatgggctgaggcagtagacgacttttacgaggaggctctgttggagatcgacgaccagcagaggcgtgtgggagagttagagactgaggtgactgacctcacagtgcagcagcttcagctggaagaggagcaccaggctatgaactcgtgtgtaccagactacttgatccagggaaatagtactgtttacacgattgattcctgttataaaaacgagggtccacactatccaacaacatgttcacaaccatgtgtctacattattaatttggtatctctataccatgatccatga

SEQ ID NO: 55126 - DNA, 675 bp, Oryza sativa
  Clone ID: PAT_MRT4530_57163C.1
atggcgacggggtcgcacgttctcaccgtcgacggctactccggcaccaagggattcgccgtcggctctggagtagccgtcaacgagcacgtcaagttcggcacgttcgtcgccggcggccatagctggtacatcaagtaccttcccaacatcaccgccgtcgtcaccgagtgggtctccgtcttcgtctgcctcaacggcaagtctgacgcggcgaagaagaaggacaccgccgtgaccatgaaggcgcggtgcaagctgaccttgctcgacggccgtgacgggaaggcaccattgctgccgccgcgctcaccaagagcagcgagctccagaccttctcctccggcaagggcatcgctgcaactgctccaccctcgccctcccaccgttgccgctgtcttcattgcggtggtgatggcgccgcttttgctcgccgccttggggtgtatgaacccggcgactagccttgacacggtctggaaccgcgcagcctcgtgcaccatcaggagcagcaccgcgacaacatccctggtgcgctgctgcaccgcgccgttggtgaggtcggccggcgtgcgtgcggcgagcgcgttcacggcctgcgtcttctgctacgggccgagcgtgacgccggtgagcctgtctgtgtcgccgaggtcgccgtacgagccgacgtag

SEQ ID NO: 55127 - DNA, 527 bp, Oryza sativa
  Clone ID: PAT_MRT4530_57164C.1
aaccgggactaacaagcacttctccaccagtgtatggtgattctgtacaggaataacttgccatggcgacgtcagttaatttgcttggtaccatcacaaaattgctgccggtgctggaaaatacaattgcaaagagcatcaactgccacctaccctttcgaattactatagcatttagttgtaaaaaacatcatctactaattaacaaagatgccacatcatcatccactaacaatcatcatatttaaacatcatgcaaacatgctatatctttatagtttttataatttaagaacttttcaaatacaaacatgttaaattatcatccaacataatttacataatgtttcaatgtatatctctattatgttttagatatcctatatatttatatagttaattctcacttcgttagtgcttaaatgattaatctatggtccaaattatctttctccttttttcctctaattaaatcatatcacatcaattgtttttagcctttaaatgattaatctacggtctaaact

SEQ ID NO: 55128 - DNA, 297 bp, Oryza sativa
  Clone ID: PAT_MRT4530_57165C.1
atgacgccgatgacgtgctgttcgggcagctcgcggcggagcacgcgacgaggcggcggcgtgcttggacgcgatgacatgggcgggccacggcgaggtgacgaggtcaacgaggcgggtggcgtgggaggctgggagcgcgacgcgaagaagtcgagcccgccgccgccgccgcgcaccgcgccgacgcggagagcgtcgccggcggcaccgtgggcgatgcaccgccgccgccgccccgccgtggctgagccgtcccggctcgggccggctgccgtcgccttctgctcaaaataa

SEQ ID NO: 55129 - DNA, 1834 bp, Oryza sativa
  Clone ID: PAT_MRT4530_57166C.1
atggggatcgtggagacgtggatgcgggagaagcccatccgcaccttcctcgcccagctctccacccgccgggcggcggcgggggccgcggccctgctcgcttcctcctccgccgccgcggcgtccgccgacggcgagcccggcgaccggagcatcccgcagctctcctccatcgccaactccgtcgtctcccgctgctccagaatgggatttatattactgaagagaaaagatgaagctcaaagtgagataagcttttgtgctgtttgctttggtgtaacaaaatctctagaggctgctttggaagagtcaatttgttactctgagagaatagatgcagcacgtgcaactatagatcaagtaaaggtggaaggtgtggatgcaaatcttgccctcatgcaggagttacttttcccattcactcaagtagtcaaactcacttactcattgaccaagtgggaagatcctctgaaatcatttctgttcttagcttttaccctgtatgttattcaaaggggatttattgcttacatgttgccctcattttttttggcatttgctgttgttatgctctggcataagtacaatggaagggagcaattattgggagtgcttgaaacaactgaaatggtcgcagtggcatttcttgctgccgctgcagtactcggcggtttgacttctccgtccgcacctactctagcctttgttcagtggtacgaggcgccgcgcgagcctgccggaatggccgcggcgtcgtctccggcggcggccatcacctgccgagcggcggtggcgtgggcgcccggtcaggcgctggtgatggaggaggtggaggtggcgccgccggaggccatggagatccgcgtcaaggtcgtctccacctccatctgccgcagtgacgtcacccagtggcaatccacggctcaaaccgatctgttccccagaattttcgggcacgaagcatccggtgtggttgagagtgttggtgaaggtgtgaccgagttcgaagtgggagaccatgtgctcaccgtcttcatcggagagtgcatgagctgcaagcactgcgtttcagggaagagcaacatgtgccagaagctcggcctggagaggaggggtgtcatgcacagcgatcagaagacccgcttctcgctcagggggaaacctgtgtaccattactgtgcagtgtcaagcttcagcgagtacacggttgtgcactccggttgcgcggtgaaggtcggcccaaccgtgccgatggacaggatatgcctgctgagctgtggtgtatctgcagggcttggtgcagcctggaaggttgctgatatctcgaaggggtcgagtgtggttatatttggccttggaactgtagggctttctgttgctcaaggtgctaagctgcgcggggcttctataattatcggtgttgatactaatcctgaaaagcaagaaaaggggaaagcttttggtgtcacagattttattaatccagaagaattgaatgaacctgttcagcaggtggtgaagcggctgaccaatggaggtgcagattactcttttgagtgcgtgggtgatacaggagtagtgtcgactgcactgcaatcatgttctgatggttgggggctgactgtaactcttggtgtgccaaaagcaaagccagaggtttctgctcattatgcactacttctgtctggaagaacattgaaggggtctttgtttggaggatggagacctaaatctgatctacctttgttagtggacaagtatgcaaacaaggaaatccaagtcgatgaccttgttacacatgatttgtccactaacaaaggtagatcagatttag

SEQ ID NO: 55130 - DNA, 2210 bp, Oryza sativa
  Clone ID: PAT_MRT4530_57167C.1
atgccccacccctccgccgccgcgatgctcccctcgccttcctccctcctccgcctcctccgccgcccacaccctcgcctcctccccccgccgcccccgctcctcacccgcttcctctcctcttcctcccccggcgacgccgccggatgggcctcctacgacccgctgaccgacagcctcgccccaccggcggcagccgccgccgcgtccgactcggaggcccccgcggagggcgaggcttggggcgtgttcgacgccgtgaccggccgcatcgtcatgaaggagcacccgccctactcccagccgccgccgcccggccccgacgaggagaggtccaaggtggggaggaggaggagcgctggggtgaaggacgaggcgaggtggtcgtcggtggccgccgtggggaaggcccgcggcaaggcggggaaggagagggcctcgtacgtgtgcggcaactgcggggagggcttctcgcagtggtggggcacgtgccgccactgcgaggcgatggggaccctgaccaagtacgtcccgggctctgatcctggtgcctccgtggggtcacaccatgccttccggtcgtggattccgcagaagagcaaggagatggtgccccagagccttcagcaagtgaccaagggagttgatcagtccgagtggcgaataccgctgtccgggaacttcggaatggagattgctcgagtgcttgggggtggggttgttcctgggtccttgattctagtaggtggggatccaggtgtaggaaaaagttcattgatattacagcttgcttctatcatgtccgagaatattggtgctggggagtcttctgctatcgtatatgtgtctggcgaggagagcattgagcaaattggaaacagggctgatcggatgagtatcaagtctagaaatttgtacttgtattctagtacagatatcgaggatatcttggacaaaatccaaccattatctcctagggcactcattattgattcaattcagacagtttatctaagaggatttgctggaagtgctgggaatatgactcaggtgaaggaatgcacctctgcgctgttaagatttgcaaaattgacaaatattcctgttatcttgattggacatgttacaaaaactggtgatattgctggtccccgtttgttagagcacattgtagatgttgttttatatatggaggttgaaaagcctaatagaaagtttggtgcttgtatttcagggagagagatgcttatctcatcggttgttgcgatcagtgaaaaatcgtttcggttcaacagacgaggatatggtctacaacctgttctgaatccaaccgagatgttcttaactgaacatgatttggattctgaaatactagctggacttgctgtggctgttgttttggatggatccaggacatttgctattgaagttcaggcattgtgtgtttcaggttctcctcgcaatggagaagttgttggtataccgagaaatagggctgatattataatctcagttcttatgaagcaagcaggtctaaaacttcaggataatgctgtttttctaaatgttgtcagtggtttcatgttgacagaaactgcaggagatctggcaatagcagcttcaatttgcagcagtttcttagaatatcctataccaaatgatattgcgtttatcggagaggttggccttggtggtgaacttagaactgtgccaagaatggacaagcgggtgctagctattgcgaagttgggatacaagaaatgcgtcgttcccaaaacctcagagaagctgctcagaccgctgaaccttgaacttgagattttgccctgcagcaacctgaaagaggtcataaacaccgtatttaggccacaaggatgatgctacactctgcttactacttacagttgctgaccgtaggtatttagatctagtgtgcctgggtcattggccagatgctatgacgattgagagagatgatgtaactatttatactcattaacgggtttcaatgttccagccatttttgcgccagaatacggtccctttcataggaatcgtattggctatccgtgctggaatcctgaaccctttacctctaccttaagtatgtaagatgtcttctatacactagtctgaaaatgaaatttgcttgcaaaaaaaaaaaaaaaaaaaaaaaaaaaaaaaactcgagactagttctctctctctcc

SEQ ID NO: 55131 - DNA, 222 bp, Oryza sativa
  Clone ID: PAT_MRT4530_57168C.1
atgactgttgctcctcgccaccttgcccgctcccacgccatcatgccatcctgctcgccgtcgcggcttgccacgctggatgttgatccgcctcccctggcggcagatctagcctccccggggccagatcggggcggagcgatggtggacttcatggcgacggtggcaggagaaggtgatggatgcggcgatgatggcgaaagccctcggggaagaggctga

SEQ ID NO: 55132 - DNA, 709 bp, Oryza sativa
  Clone ID: PAT_MRT4530_57169C.1
gtgcaggcattggagaaccaaaagggtcctgctcctacactagcaagtcaacctacaatgcttatttcctgggatcccatcaagtttgctccatggaagcgaatatggactagttgggttcctttatgctgcaaaattttcatttggttggctattaacagcagatgttggacttcagatcaacttgcttttaatcagggtctaccacatcctgctgcctgccctttatatgatcaaagcggcgaaactgttcaccatatccttgtatctcgtgttttctctggccatgtttggactttactactctctaaagttggggctggctggtcctgcacctgaactgtcggcagcccattttccaggatggtggtggcaaagttatcgggattatcctagcagcttgggtgatttggaagcacggcaacgactgtgttttcagtggtgccacaacaaacgttttggtgcttttaaagacagcggaaaatgatagtagtagcctgtgcctacatgtgtttctttgtaggttgtttaccccggatggctagtccttcctttttcgtttgtggttatgcatcacctttaagtgatgagtatgtgaggtgtgttcttagtggtggatcagttttgatccctccttttgtatttggtttattttcttaatgaaatgaagtacagtcctgcgtttccgaggaaaaaaaaaaaaaaaaaa

SEQ ID NO: 55133 - DNA, 1023 bp, Oryza sativa
  Clone ID: PAT_MRT4530_5716C.1
atggcaaacaaacatgacctaaatatcaagtttcgtattgccaagattttcattaacgacaaaaggaaagatgcaacatttgcatcctctccactgtctccggatactgtcaggagagacgaaagcgctatctctgatctcgtcgggcacagattcgaggaggaagactaccctgttgtcgactacgagtcggaacttcagacctccatgccgaggcccagccaggccgccccgccgccctcctctcccggggtcgccgacaggtggggcccacctgtcgggtccttcccccacctcccgccgctcccgccgcgccgccgcgcccgcaaccgccgccgcgcccacgtctccgcctccttcgggccacgacgaccacgcccgcacgtgcgccgcgttccccgcgcccactcccctctctctccagctcgcgcccgcgcccgagatggccgctcgccgccgcaccgcgccgtcgccgccgtcgggttcgcgtggccgagatccaccccgtccacccctccttcgtcgaggttcgccgccggagcgcctttcccatcgtgcgacgatgagggtcgccatgtcatcccggtcgccgtccgccgcgtgtcgacctccctccgtcgcccctcgtcgccggacgccgccgtcccctccggtgaggactccctcccctttctttttcttccccaattccccgtgcgtcgccgccgcccgcgctcgccgtcgccttcggtcgttgccgccgtccgctgccgccgctttcgcgtcgcttttgcgccgtcgcctccgccgccggatgccgtcgccggcaacgcgacgcgcgcgtgccgccgccggatgccgtcgccggcaacgcgacgcgcgcgtgccgccgccgttagccctggccggccggtcggctttgatgccgagccgagcccggcggccgcctctatcgccgcccgtccgatcggccccgagggcgatctgggccgtcggttccgtggaccggcggtggaccacccgcgtggtcccggtccacggtga

SEQ ID NO: 55134 - DNA, 423 bp, Oryza sativa
  Clone ID: PAT_MRT4530_57170C.1
atggggctggccgtggtggtggccgtggcggtggcgatggtggctaacggtggcggctggcgacggtggtggctatggcagtggcgatggcggctgtcgacggtggtacctatggcggcgatggttgaaggccatcatccggctgtcgggaatcgcgggcaaaagccttgccgagccatttggccagctgacaacggcgacgccgtttggcgtcgttcccctccttggagacgttgttttagcatacccctctcctttccctaccatattctccgggtgaaaaccttgcttcggttccgaacgagcggtggcggcgatccacgtcgcatcctccttgggggcactgttttggagaaacctcttcgtgcaaggttattatcaatggtctatgcattggcttcgaacttcagtgctaggctttga

SEQ ID NO: 55135 - DNA, 186 bp, Oryza sativa
  Clone ID: PAT_MRT4530_57171C.1
atgcaggatgctgacgcggctgctgtgctgatcctgttcacttgcctctgcagctttgcactgatccacatcgatgataatactactcctatttggtcatttggtgtgcaagtgcagcaacaacttggcgtttcacaaaaaggttttgatgaggcgaatttggatgacatgaatccaaaagcataa

SEQ ID NO: 55136 - DNA, 189 bp, Oryza sativa
  Clone ID: PAT_MRT4530_57172C.1
atggtggctgacggtggcggctggcgacggtggtggctgtggcagtggcggtggcggctgtcgacgatggtacctatggcggcgatggttgaaggccatcatccggccgacggaaatgaggagtccgggtgcgggcgcgccgtcgacggcgggaacaattgtgggcggtggccttggccgaatcgttga

SEQ ID NO: 55137 - DNA, 600 bp, Oryza sativa
  Clone ID: PAT_MRT4530_57173C.1
atgcatagaccaatgacaatatccttgcacgaagaggtttcttcaaagcggtgcccccaaggaggatacgacgtgaatcaccgccaccgctcgttcggaaccaaagcaaggttttcacccggagaatatggtagggaaacgaaaggggtatgcaaaaacaacgcgtccaaggaggggaacgatgccaaacggcgtcgccgttgtcagccggtcaaatggctcggcaaggctttcgcccgcgattccctgtccaaacccacaccaccaatccgcacaagaaggatcgtcgtcggtcaacaacattgtcccttcaacgattcggccaaggccaccgcccacaattgttcccgccgtcgacggcgcgcccgcacccggactcctcatttcctgccgccagaccccttccccgcctccacataccgccgccgccgccgatgtaccgtcggccggatgatggccttcaaccatcgccgccataggtaccatcgtcgacagccgccaccgccactgccacagccaccaccgtcgccagccgccaccgtcagccaccatcgccaccgccaccgccacggacacccccgtctagccaccaccgtctag

SEQ ID NO: 55138 - DNA, 735 bp, Oryza sativa
  Clone ID: PAT_MRT4530_57174C.1
atgatagggaaaggaaaggggtatgctaaaacaacgcctataaggatgggaacgacgccaaacggcgttgccgttgtcagccagccaaatggctcggcaaagctttcgcccgcgattctttgtccaaacccacaccaccaatccgcacaagaaggatcgtcgtcggtcaacagcattgtcccttcagcgattcggccaaggccaccgcccacagttgttctcgccgtcgacggcgcgcccgcaaccggactcctccttccctgccgccagaccccttccccgcctccacatactgccgccgccgccgacgaaccaggtccagaaggcttaggaaaaattgctgagggacgccgaacagacccttaccggtgtcctgcggtcctggcccaacaaaagttccgcatcagcccaaccagcagaggcacactgatgtcctgtgatgggccttcttccggcccaggagaaggggacggacgaagaagaagggccacgggccctgtcaaaagccgcatcccatccgagcgcgtcgcggcgccgaccccgcaccgcagggcgtgttgcgtcgcggtcgcggccgcggcagcatgtactaaaccggacgggaacggaaagggcatcccatttgcgttcgcgccgcgcgcgcagcgccattactccacgagccccgcatatcacgaggagctcgccgcgcctggctggcttttttttggccccatggcatggagccgtgcttga

SEQ ID NO: 55139 - DNA, 315 bp, Oryza sativa
  Clone ID: PAT_MRT4530_57175C.1
atggggattgggggttgggcggagcatagagagctagatgtgggtctatccatccggagaccttcagcaccctaccttatcatccatggtgaaaaaattgaagggggaactcaggggggtatccatgtgtacggtgggtatagtcccccctgcatccaggttgaatccgcctctgccaagtgccaacgcggctcgattggctcctccgtctacttcatctgccgctgccgccaccgcctcccctcatctgccgctgccaccgcccctagtagcaccctggactcgttcttttcgtgtgaccttctccaccgataa

SEQ ID NO: 55140 - DNA, 294 bp, Oryza sativa
  Clone ID: PAT_MRT4530_57176C.1
atcgtcgcggttctccacgctccactgcggtggactgcgccgtatgtagcgccggggagttccacagtccaccccggcccgcgctcgcgttctgtggagtttctacacgagctctgtcggctacggattttgaggcaggtaggcaggcagtgccgtcgatctttggatgactccgcgaggagcgtcccttggaagtacattacttgcctcacccggtttgatcccgattagttcctttgtcatgatctcttatatccttaatgttcaagttactgatgtgaagaattgctatct

SEQ ID NO: 55141 - DNA, 1260 bp, Oryza sativa
  Clone ID: PAT_MRT4530_57177C.1
atgatttgccaacccgtggcggtggcgtcgttggaagcttcggtggaggcaacgttggacgccatcagcggagatcaatggcgggcgcggctgcagccgttcaccatcttccgcgtccccgcctacgtccgcgacggcaaccgcaccgcgtacgagccgcgcctggtatccatcggcccctaccaccacggcggcgccgcgctccgcgccatggaggaccacaagtggcgctacctccacgacctgctatcccgccgcgctggcgacggcgccgctgccgtggtcaccgcgtccgccttggtcgcggaaatgcggaccctcgagccccgggcgcgcgcgtgctacagcgagcgccccgtgggcatggactcctccgacgacttcgtccggatgctcctcctcgacggcttcttcatcctcgagttcttcttcaagtggcacaccaaggaggccgactcgctctgcgacgtcggctggggcctcacgctcgtcgccgccgacctgctcttgatggagaaccagatcccgttcttcgtcctcgagaggctctacgaagccgtcgccggcatgcagcccgacaaggagtccctcttcaacctcctcatcgagtacatcagcgacgaggagcccatcaggcggccgtccggtgactgggacgtccaccacctcctccacctgtactacgagtgcttcgttcccaagcggccacggccgcggctgcccgagtcggcccggaaggcaccggcggcgccgacgcggacgattctgcgtgccagcgaactgcgggaggcgggtgtcaccctcgtgcggcggagcgcggcgcgggacagagagatcgacgacatgaagcgaccgctcctcgtcaacctcatggcgttcgagcagacgcaggcgggcgaggagccgcgcctcctcaccagctacgtggcgctgatgggccagctcatcgtgacggcgcgcgacgtcgagctgctccgccggcgcggcgtcctggagagcctgctggccgacgacgaggaggcggcccggttcttcagccgcctcggcgagggcgccgccatggacttcagccgccaggctttcgccgggctgtacgaggacgtgcgcgggtactgtggctcgtggtggcaccgcaacagggcggcgctccggcgtgactacttcggcagcccgtggtcggccatctccgtcgtagtcgcggcgatcgtcgtcttcctcgccgccacgcagacttacttcaccgtgtttcccgccaaataa

SEQ ID NO: 55142 - DNA, 987 bp, Oryza sativa
  Clone ID: PAT_MRT4530_57178C.1
atggagaactccgccgccgacgccgccgccgctgcgggtggtgccgacgtgatctacatctcctccgacgatgaggacgaagaaatccgcatcctctccgccgatccttacagtcccgaggagatccaaatacaggaggtcatcctcctctcgctcgactactcccgtgccgccgccgccgacgccgacaccgcccagtcctccgcctcctcctctcgcccctccgccgccgcctccaccttcggtgaaccctcctccctccccgaccgtaagggcaagagcaagctattatcggaagatggcccgagcgaatcgacgacgacgaggcggtggcggaagcgcggcttcacgtgcatcatctgcatggacaaggtccaggcctcggaggagttcctcgtcaacgtctgctcccacgccttctgcaagagctgcatcgggggctacgtcgccgccaaggtctccgacaacgtggccgcgatcgggtgccccgaccccgggtgcgaggaggggtccgtcgagatcggccagtgcagggacatcgtcccgccggagctgttcggccggtggagcgtctcgctgtgggagtcctcgatgggggagacgacgaagtgctactgcccgttcaaggattgctcggcgatgctgatcaacgacaacggcgacggcggcgacgcggaggagatcgcggagacggagtgcccccactgccaccggatgttctgcgcgagctgccgcgtgccttggcatgatgggatcgactgcaaggagttcaggaagctgggcaacgacgagaagggtaaggaggatctgatgttgaagaagctggctgggaagaagaaatggcagaggtgtcctcagtgtaggatgtacgtggagaaatcagcgggatgcacgttcatgaggtgcaggtgtggatttttcttctgctacaactgcgcagctcccatgaccaaattagtgcattactgcaagaaatgcaaccgttga

SEQ ID NO: 55143 - DNA, 165 bp, Oryza sativa
  Clone ID: PAT_MRT4530_57179C.1
atgaatgagggtgtgaagaggtccatggctgatcgaagtggtgcagatctgaagccggtagagattgatgcggtgcgactggtgatctccaaggccggtgaagatggaggtggtagccatcaagctctaaggccgttgccccctcctcgtcatcgtccaaagtga

SEQ ID NO: 55144 - DNA, 946 bp, Oryza sativa
  Clone ID: PAT_MRT4530_5717C.1
aaagtcttcttttggctttgggccgaaagtcggcccaaaacctctcttctctctcctcgggccagtccggcccagtccggcggagccgcgcgcgccctcgctgtcgctgacaggtggggcccgcttgtcagtcgtcgtctaccttcggccgcctccgcccgaaaccctagtttcgcgctgccgctcgtttcccttccaaatccggccgttcctttccttcttcggccgaatcaatagaggggaaacattctccgggatctcctctaccttttctcctttggaatctttggctaaatcgctttggaaagcgttggattcgagttcgtctcggattcgttcttcccgatctttccttctgttcgccgtcgcgtcgccgtcctcgtccgccccttcgttgccgccgaagaccgccggagcgtcatcgccgccgtcgacccgaaggttcccgccgcttcctccttgtcgccgtcgccgtccgttggtcttccgccgccgttttggtcgccggtgagttcgccgtgccgcccgcttcgtcttggtgccctccgtttgcgtcctagcgccgccgttcgccggcgagcgtgcgccgcccgggccgttcaagccgccgagccgccgccgccgtcggtgacgtcattgccgacgtcatcgggaccgttcgtcgtgagccgccgtggacccgatcgatctcggccgtccatcttggattggtttgatctcggccgtccgttcgcgtgaaccgccgcccgtgcgcccggtccaccaaaccctagcccgctgacgcaataaatccccttttccttgcaatcattcatcagaggaagagttcttcaatgaggctgatggtgtggaggattaggtgtagccttggtcaagctgcctgtggagtggagccgtttgcgccgtttatttattttccgctgcttagatctttattgattgagag

SEQ ID NO: 55145 - DNA, 3879 bp, Oryza sativa
  Clone ID: PAT_MRT4530_57180C.1
atggctgaatacgagaaaccccgctacgtgactaaaatggcggccaaggtcttggatcaggacagcaaacttgatttgctcctgaagaagatggaggacgcagagtgcaagcaggaggagagcgagaagcgtcgtgagcaatctacagagaagagtcgtgcggagttcttggtgctcaaggttgtagttgaatctcgttttccagagatggagaagcgcgtggatctgcttcaagattctgttctggagctgcaggagcaggtggataaaattcaagcgctggttaagtcgcctgatggtatgaaatcacccccctcctcgtccccttcttctccaaccactgataattctgtttcgcttgggggttccatgggaattagtggtcatgttccgccgatgagctgtcctcagttcaatggagatagtcctcagatgtggaagagcaattgtgaggagtattttgaaatttatggagttcatcctcgcaattgggttcgggtggctggattgaattttactgggaacgctgcattttggttacagtccataaggtccacgttggttgggcttagctggcaagcgttcacagatttggtatgtctccgttttactaaagctaggcaggaagtacttattcgtcagtggttccatctcattcaggattcctctgtgtctgactatgtggtgaagtttgatggtataatgcaccaactcttggcctataaaagtgccttaccattgaactattttgtcactaagtttgtggaaggtctgaaacctgttatccgctctagtgtgctgatgcaaaaacctcaggatttagactctgcttgttctctagccttattacaggaagagattttggaaggggatcaatctagtcagtataagaggcctgaactgtctgtcacctatcgacacactaatcgactgtcttcccaggctgccacatctattcctgtcactacagttgctgcagctgatgataagaagtccattgtgactcctgtcagacctagggatgataaattggctgcactcaaagcttatagaagggctaaggggctttgctttacttgtggtgagcgatggggtaaagatcacaaatgtgctcctgccatacagttacatgttgtacaagaattactagaggttttgcaagttgatgactctttgtctgacagtttggaggatgactctcctcaaactgctccaactcttatggctatctcccaacaggctatctctagtactgaatctccagtttctttcaggatcaggggatgggttcagggtgtggaagtccttatgttaattgactctggtagttctcattccttcgtggacagtgctctttctcagcagttacaaggggttcaaaccaaccactgtttgggtattcctggtgaacaacttcaaggcatgctgaagatgggatataatcctgctcaaaaagatgaaatagagaggcaggtcaaagagatgttgcttgctggggtgattcagcctagttccagtgttttctcttcacctgcactattggttaagaaaaaagatggtacatggcgtttgtgcatcgattacagggtcatgtcttttggcctcacgggtgcacctgccacatttcagggggctatgaatgccactttagcttctgttttaagtttgcacttgtctttttttgatgatatccttatttatagtcctgatctgacttcccatcttgatcatcttagacaagttttgacacttctctctgaacagcagtggaaagttaagatgtccaaatgttcttttgcacagacacaactttcttattttggtcacatcatttctgataaaggggttaccactgatcagtctaaagtggaagaagttgttaattggaaagtacctacaactcttaagaagttgagaggttttttgggtcttgctggctattatcaaaaatttgtcaggaattttggtattatcagccgacctctcactctcttgctcaaaaaggatgttccctttgtttggtcatctgaagcagatcaggcctttcaatccttaaaaatggcattagtatcagcaccagtattggcccttcctgacttttctcaaccttttatagtggagacaaatgcttgtgatgttggcattggagctgttctttcccagcaaggccaccctattgcttacattagcaaagcattgagtttgaaaaatagaggcctctctacctatgaaaaggaatacctcgccattttattggcagttgaccattggcgctcttatctccagcaggctaaattcattattttgacagaccatcacagccttatgcacttgaatgagcagaggatacacacaccttggaagtattctgaggactcctctaaactgaatgctgtctacagttgtacccctgtttggctccaagaagtaagtgatggctacctttcagacccttactctgctcagttattgtctgatctggccctctgccctactgccagaccattgttttctctgtgtagtggcattatcaagtataagggccgtgtttggcttggcaatcatctggccttgcagcacaagatcattgatgccttgcacagtagtcctatgggaggtcattcgggttttccagtaacttacagaaggatcaaggctttgtttgcttggcctaagatgaaacaagggattaaggacgctattgctggttgttctgtctgtttgcagtccaaacctgatcgctctcggtatcctggccttttgcaaccactccctgttccggatggtgcttggcaagttctaacaatggactttattgaaggattgcctaagtctggcaggtataactctatattggttgtggtggataagttttctaaatattctcattttgttcctttgtgtcatccttttactgcctttgatgtggtccaagcttttatgagcaatatctataagttacatggtttgcctcaattcatcatctctgatcgtgataagatatttatgagtcaattttgggaacaattgttttctcggtctggtactaagctgcacttaagtacttcttatcaccctcaaactgatgggcagaccaaaagggttaaccagtgcttggagatttatttgcgcagttttgttcatgccatgccatctaagtggagtttgtggttgtacttggctgaattctggttcaatacttcataccattcagccttgcttaaatctccttttgaggtgttgtatggatatccacctgggcattttggcatcagagaggatgcctgttcgatttctgatctcaacacctggttgtccgaacgaaaaatgatgactcagttgctgcaacaacaccttaaccgagctcagcaacagatgaagtcctatgctgataaaaagagaaatttcagggaatttgcagttggcgattgggtatatctgaagttgcagccttatattcaatcttcagttgcacgcagggcaaatcacaagctatgctttaagtacttcggtccattccaagtgctgaatcgagttggtaaggttgcttatcacttaaatcttccggatcacagtgctatacatcctgtgttccatgtctctcagctcaagccagctattggattcaagcatgctatacaaccccgcttgcctaccctatctcttcatcaagttcctgtgtctattctggaatcccaccaagttaaaaaaggtaattcttcttcgacccaagtgctggttcagtggtctgatgcggtggctggtgaggagacctgggaagatttagttgagctgaagcaacgttttcctggggcattggcttggggacaaggccaatctcaaggggaggggattgtcagcgtcccagatttactatag

SEQ ID NO: 55146 - DNA, 329 bp, Oryza sativa
  Clone ID: PAT_MRT4530_57181C.1
atggagtgccagctagaaattaaactgccgtacgtcttgttctgcacttcccctattgttgttacggctgatggcatgcagctcaatgtttcacaggctgagcactgccaaactgcgacgcctcaccttgtctccggcgtggacgtcctcttctacattatcgaacaagacttctacttcgccggcgagatcccatttttctgtcttgcaggatttgcagatggaggagtcgttggagagcgctaccaaagcttggtgcggtcctattccttctccaagacgatctcctccaagaacgttgggatcggttatctcatctgcgctgcaag

SEQ ID NO: 55147 - DNA, 918 bp, Oryza sativa
  Clone ID: PAT_MRT4530_57182C.1
tttcaggatcaggggatgggttcagggtgtggaagtccttatgttaattgactctggtagttctcattccttcgtggacagtgctctttctcagcagtacaaggggtacaacagctacctaacactgtatcagtgaaggttgcagatggtggtcttttgtcttgctctcagtttatacctcattgtgaatggtgcactcaaggttatgttttccacactgaattcaaatttcttccccttggtacttatgatgtcattttgggtatggattggctgatgcaactgggtccaatgagtgtggattggactgctaaatggatgtctttctagagggctggttgtcaagtgcaattgttgggtattcaggttcaaaccaaccactgtttgggtattcctggtgaacaacttcaaggcatgctgaagatggggtctgttatgcatgtcttacaattgcaggaaattttgtctgtcacagaagtgcctcttcctcctgatattggccagcttttgcaggaatttcagtctatctttgaggagccctagggactgcgtcctaaacgagcttgtgaccatcagatccctctcctgcccaattctaaaccagttttcattcggccttacagatataatcctgctcaaaaagatgaaatagagaggcaggtcaaagagatgttgcttgctggggtgattcagcctagttccagtgttttctcttcacctgcactattggttaagaaaaaagatggtacatggcgtttgtgcatcgattacaggtaattaaatgctatcacagttaaatggaagtttcctatgcctgtcattgatgaattgcttgatgaactctcaggagcccgtttcttttctaagttggaccttcgagctgggtatcatcagattcgtttggtggagggtgaggag

SEQ ID NO: 55148 - DNA, 495 bp, Oryza sativa
  Clone ID: PAT_MRT4530_57183C.1
cctcccttctttgacttcccctttcctcctccgtgcgcacgctctcctgattcatacagcatttcgtcggggatgacgtcgacggcgtactcccggccgtcgaagctgccgggcggcggcaacggcagcgaccgcaggctgccgccgcggctgatgaggggcctcaccaccaagatcgagcccaagaagctcttcgcaatctactcccctgtgttcgccagcacagccaacacatccgctctgatgcagaactcgccgccatcctcgccggagacgggacccattccgccccaagaaactgcagctggcgccggaaacaatgacagcactgtggaccccgtcgatctccctgaggacaagtcgctggtggaggcgcagcctcaagaacccgggttcccctcggcggaatctcaggagcctgtgttgccggcggcgctctcgaagaaggaggatgatgccgaaagggcggcggcggcggcggcctctgagataaag

SEQ ID NO: 55149 - DNA, 2227 bp, Oryza sativa
  Clone ID: PAT_MRT4530_57184C.1
ttggggttttcgaacatctttggtgtgtaatgcctatgcaaattgttacaaacccaaaatggacaacccaaccaattaccaatatgcgaaaagcttccaccgcctcgccaacaactgatggttctcctccggttaagatcatcatcatctctttcaagcagcagtacaatatactagtatccgttcttgttcctcgtcgtgtcgtctcgtcccggcatatacattgatgtgtgccatgagctgcctgcgattattgggatagacgagttactgctgcagcctgtcgagcgcctgcagcaggattggccggaacctggtgaggttgacctcgacgtcctgcttcatgatagtcgcggcgagtgtctgccatccctgtgcgtggagcgccttggggtccttgaacaccatgtgatctcgcgagtagttgtgcttcaggctcgtctcctcctcgccgacgtagtactccacgtaccggagctgcatgtccctcgccggctgcccgtaaaagttggtcgccatccagtccatgttcccccacggcacgatctgcaccaccacggcctccgccgggaggaagatctggttcgtcagcccggcgccgtgcacggccagcagcacgtccgccgagttcaccagcgccgcgaacgcgggcacgtcagcaccggcctccgccaccgtcacgttgaaaccaagctccgtcgcggccgcggccacctcctcgaggttcagcagcttgcgcgtgccggcgcgggagatgatcagcatccgcggccgcatcccgggctcctcgcccagcaccgacgggcggtcgcgccggagctccagagcgtcgcggaggaagcggttgtagtccaccatggtgtagttgcgcgggttgcgggtcgggtgcggggagatgatgaggtcgcggtcgcggtacagaccgaggtacccctgcgggaagcagtgcacgccggcgtcctcgtcgaagttgatgacgtcgtagttggacagcttgcggagcagcggcgtgtacttctgcacccaccacggcttgtagttggtgatgaggatctggacctcgcccttgaggtgcgccgtcgtcaggaatagcgggatcatggcatcggtcatgtcgtggaagaagttgtccgtgtacccggccacggagaacaccacggcggggacggcgtgctgcttcgtgcacttgggggccgccgcctcggagggcacggacttgatagtcacctccaccacgcccgggaggaggaaatcgtccttgcgggcgtagggccggagccgcttctcgccgttctcgtcgaagccgccggcgcccgacgggttcacgacgtaaatggtcttctgcttggggctgacgcggacgtcgccgtacagctcgcaaaccgacggccgcgcgtacgggaagccctcgtccacgccgttctcgtcgcactttatcttggtatcaccacccgccgccacgccgttcttcttctcggattgctttatctccgaggccgccgccgccgccgccctctccgcatcatcctccttcctcgagagcgccgccggcaagccaggctcctgagattccgccgaggggaagccgggttcttgaggctgcgcctccaccagcgacttgtcctcagggagatcgacggggtccacagtgctgtcattgtttccggcgccagctgcagtttcttggggcggaatgggtcccgtctccggcgaggatggcggcgagttctgcatcagagcggatgtgttggctgtgctggcgaacacaggggagtagattgcgaagagcttggcaagggagacgtaggtgaggagcgcgaggcagcagccggcgaggaggccgacgccgagcttcttgggctcgatcttggtggtgaggcccctcatcagccgcggcggcagcctgcggtcgctgccgttgccgccgcccggcagcttcgacggccgggagtacgccgtcgacgtcatccccgacgaaatgctgtatgaatcaggagagcgtgcgcacggaggaggaaaggggaagtcaaagaagggaggaaggggagaaggggggaggaggtcgagttgctaagcctgaggcatttgtagcagcaaggttgggaattgatttttcttttcttttttgttttccctctctctctctcttcctttttctttgttttttaagatgtgacgattgagtatttgttgcgtatttgggtttagagagatcggtgaggatggg

SEQ ID NO: 55150 - DNA, 317 bp, Oryza sativa
  unsure (1)..(317): unsure at all n locations
  Clone ID: PAT_MRT4530_57185C.1
cacgtgtgaatgcagatccnatgcncgcangccngcagcggtcggaccggcagtacctcggcggtcggaccggcagtacctcggcggctttggtggcaaggaaggggagcgtgtgtatcgtggattccggttgttcacagcgcatgccccgtgataaaaattggttctcctccctcgaagggtaccgagctcgaattcgccctatagtgagtcgtattacaattcactggccgtcgttttacaacgtcgtgactgggaaaaccctggcgttacccaacttaatcgccttgcagcacatccccctttcgccagctggc

SEQ ID NO: 55151 - DNA, 798 bp, Oryza sativa
  Clone ID: PAT_MRT4530_57186C.1
ttttttttttttttttttattactttggggtgggtttttttaaaatatttttttttttttttttttaccgcaaatatttctcttcatttctcccattcgtatttacatggtcgaaaataggtataggtactagttacaaggtaattaagtacagtagcgttaacggacacacacttctcctaatcatccttattaaaatcctaaaagaattcaagtttttcgtcctatctaattacaacaccattattaatgccatgaaaaaaaaaagaagctaaaagcatcagatgatttgaacctaataggagagaaaaagaaaaaaaaaaggaaaacagcttgatcgctactgcgttgttgattcagagccagagtgcaccggcctccttcagaatgggcacgagctcgccggagatgtgcacggccatgagccggtcgagcccgccgaggagcctcccgccgacgaacaccgccggcagcgcgacgccgccgccgccggcgaccaccccggcgagctcggcctcgccggcgacctcgtcccccgccgggttgaccccgagcccctgcagcagccgcttcacgacgccctcaggcagcacccgctccgacccaccaccaccaccgggcactccgccaccgccctcctcacctcctcctcctctccacgcggcggcggcggcggcggcgccgccgtcgccggccggctcgccgccggccaagcccggttcgcgttgccccggatcgcctggtacattttctttttccctttttttttctcttctctgcgtgcgaaatgcctcgtgc

SEQ ID NO: 55152 - DNA, 327 bp, Oryza sativa
  Clone ID: PAT_MRT4530_57187C.1
atgccgcatcccgggcagaggccattcgcgctgacggcaggtggatcggagctcaccttcgccggagccagcgacttctctggcggcgcctgcggcggcggcgacggggcggtgaggtggggaaggaggaggaggaggatgggcgggaggggggactggccggaggattcgctggagggtggggtggaggcgccgggcgcgggagagcatcttgccgcgccgccgccgccgccgccgctacgtgaccggcggtcaggtgctcgacatgagaggacgcgcaccagctgttcgacgaaaggccgagcccgcgatagagcagacaactag

SEQ ID NO: 55153 - DNA, 2125 bp, Oryza sativa
  unsure (1)..(2125): unsure at all n locations
  Clone ID: PAT_MRT4530_57188C.1
cttcgcttcgcttccaaatcgcccgcaatttcncccccaaaaacctcccctccccccaccaccaccattaataaacccctcctcctcctcctcttctccggccggggcctcgccatctcaccgccaccgcctcctcactcactcacttcctgccacgtcattcgcgccatcgatcgcgtcgtcgcctcagctgcctagaggaagaggaggagtagagctcgtcgtctccgccgccgcagctggtgctcgctgttgatttatgtcgcctgctctaccccccttctccatggttctgagctccagtcgccgccaacggtttcttcctgctcccttctcatcctcctccttcaaaattggtatacgaggggcgcaagaacacagcaaaatcccttcacgatctccagatttggatttggggtgaaatactttggctttcttcatttagactggtgacaattgaagatagcccccaaattgccttaagatttggtttggcttgagtggatcaagtacagaatccgaacttttgcaacctgacattcttctagttcacaaagtcggccagatttgagatttctctcggacatctctgtacacacaggagctctcttttgctccagttttaaacagaagttggacaaaggctctgtttctggttttttgagtttctgcgataagcttagagagcagacaacaaacttttgtcctgattcatctaaactcttacctgactgcaatcaaggccaattgtaatccaataatctctgatcttgttctggttgcacgttgagatgatggtgccctcttcacggaaagtccgtgttttctgctctgatcctgatgccactgactcctctgatgaagatgaccagaataagaaggaaaggagattttcaagggaaatactaattccaatggaaaactccaaggcatccaaacctgttaagacccttgttcaatgtggcacaaagactgtaaaggattccgagaaggaaccgacgagcaaatacaggggtgtgcgccggcgggcgtggggcaaatgggctgcagaaatacgtgaccctgtgcgaaaatcaaggaaatggattggcacatttaacagtgaggaggaggccgctgcggcatatcttgcacaatcaaaccagttccatgaagagttgatggccttgaaaatccaatcttctgtatcagagcaggaagatttgtcaagctctgttactatatcctgcgtgtcctcatctcagtcatgtgaccagaagattcaggcaaagccacaagaacacaagagagtgtcagtggtggttaaccgtgagaccgttgagcagaagtttaaggcacagccacaagctcagaagattaaggcacagccagaagtgcagaagagagtgtcagtgaagattagccatgagactgaggatgagcacttgctgaacttgccgtccacgcctaaaggcaaagagatttcgatgggcgctgttcttggcaggatagatgagattcctgtgagcaactgtgtgggccatattgatgaatttccacctgatgatttcactaggcttgcagatgcgttcccagttagtgattttatcggcatggcagatgtgccactgggcgatgattacattggccttgcagacatcagccacctgccgctgcctatcacagatctgaagttcgacctcaatgcagaactcaactgggacgggttcgactttgcttcattggaacaagaactcaactgtctttgatggcttgaatcctgttctatgtgaaaacctcttgttgattgaattgagtgcaggaggtagattcaggtatccatctttcacattgctggcaggccgagtgtatgatctggagattttcatctccaattttgccggaaaattgtacagtccccctacagcaaacaaatgagtaccgcagtatttatgtatatgttcaccaatctcaaaaatgttaatgagattgtggtgacagaccgtccttgatctcagtttggttgtgtatttgttggacgccattattatatttgttaattttgatattgttcttgtgataaagaagttatgtacaaatgtaaatataggcctgataaaatccagttattgtaaataaccttact

SEQ ID NO: 55154 - DNA, 360 bp, Oryza sativa
  unsure (1)..(360): unsure at all n locations
  Clone ID: PAT_MRT4530_57189C.1
cntagnaacatgncgagttcagggatnnttagnantgtnaagaggcatnggtgatgnananntnaagnagtgggtggtgtntgatnnaganacnanacnntntgggtgttgattngnagtgcgaattnttgattnttcngtntgatggtttgtggganaanttgnagaannagnagtnacttnagantgnnagncngntttanatnagnaanganaaagcttctggnatganttnttgcacnacgnctnttgcaaactncgnttactagtnnctntantgaggatatcacnattctgatnatanacttgcacnaagtntnaagataatnnnaanttgtgnngttngtagtgatacantgn

SEQ ID NO: 55155 - DNA, 1005 bp, Oryza sativa
  Clone ID: PAT_MRT4530_5718C.1
ccttttccgaatgggccgccggcccattctctcctttcttccccctcctccctgctgggccggccgcaggccgaggcccagccaggccgccccgccgccctcctctcccggggtcgccgacaggtggggcccacctgtcgggtccttccccaacctccgccgccggacgcgccgccgcgcctgcaaccgccgccacgcccacgtctccgcctccttcgggccacgtcgaccacgcccgcgcgtgcgccgcgttccccacgcccactcccctctctcacccgctcgcgcccgcgcccgagatggccgggattcgattttcgaatcccgcctctctctcttcccccacttcccacgttggccggcgaagtcccgcctctcccggccacgtccggccctcccctcccctatttaagcttctccgtcgctccctctcgctttttccccatttcgccgaactccctcgtgcgccccatcgctcccgcgccgtgcaaccacccgccgccgccgtctccgctactccggccgccgttagccgccgctaggctcgccgccgcaccgcgccgtcgctgccgtcgggttcgcgtggccgagatccaccccgtccacccctccttcgtcgagggcgtcccggtcgccgtccgccgcatgtcgacctccctccgtcgctcctcgtcggcggacgccgccgtcccctccggtgaggactccctcccctttccttttcttccccaattccccgtgcgtcgccgccgctcgcgctcgccgtcgccttcagtcgttgccgccgtccactgccgccgctttcgcatcgcttttgcgccgtcgcctccgccgccggatgccgtcgccggcaacacgacgcgcgcgtgccgccgccactagccctctcgctcctcctctctctcaaagtccggcgcacctccctctcctggcctcccctctccctccctcgccgacaggtgggcccgtcgaccccacttgtcagctccatccccaacctccagc

SEQ ID NO: 55156 - DNA, 558 bp, Oryza sativa
  Clone ID: PAT_MRT4530_57190C.1
ccccgggctgcaggctcaccgctaccgcctccccacgctcccctccgccccaccaagatggctgcgtccaccgccgccggcgggcaccccacgtccgcgcctctccgcgcagagtcactgccgccggcgccagccctcaatccgctggcggccacatgctcccgggccgcttcctgtggcagtgcccctctccctcttcagatctggagcagcatcggtggtgaaggcggtgggaggatcggctaggaaggaggtggcgcggccggggatgaggtggcagcgagagttgctggagctcaacctcgacggtgaccgcctccttccctcctcgtcgctcccgtcgccaccgtcgttggccgccctccctctaccgtcgctgcttccccctccgccgtgtcgcagaagggatgcccggaccgctcggcagcggtcgttccacaggaaggcgaagtcaacggcggttccgtccaccaggcggacgacgggctcagcactcgcggtgaccgcattagaggctaggaagcaggtgctacagtcacactgttggctcgcttatta

SEQ ID NO: 55157 - DNA, 202 bp, Oryza sativa
  Clone ID: PAT_MRT4530_57191C.1
cacgttgaactttttaatgggttgccaatgggaactactaggcctagagtggatgactttgccccactagtggacagagtcgaaagaagtctcaatgctagctcaatgtttctaccttacggggggaggttgactttggttaattctgttctatgtgctatccctgcatattacatttgctcccttcagctaccagtaactt

SEQ ID NO: 55158 - DNA, 209 bp, Oryza sativa
  Clone ID: PAT_MRT4530_57192C.1
gcgatgcggcggcgacttggtgtggcaccgacgaggatggggtcagcgccgatgaggatggggtcgagcccgagggcggaccgagcgtcacggcgtcgagctccaccccgcttgcgacggcgcagagagagggaaagagagctccaaccgagcgtcgcgacgtcgagctccccgacagaggccggtggggagaggtgggagaggaggag

SEQ ID NO: 55159 - DNA, 876 bp, Oryza sativa
  unsure (1)..(876): unsure at all n locations
  Clone ID: PAT_MRT4530_57193C.1
ataccccgtccgtcctgtaataatctcctcggcgcgacgccacgccaccgaccaacgcgacaaggcgagacgacgcgcacgcgacacacagccagcggaagcagcagcaggacgacgaggaggaggaggagatagcttagatcccgctcgcctctgatccccccggatccgatccgagatcctccacccatggcgtccggccggtgctgcacgttcctcgagatcctgctcgccatcatcctcccgcccctcggcgtcttcctccgcttcggatgctgcagcatggagttctgcatctgcttgcttctcaccatccttggctatgtccctggcatcatctacgcagtctatgtgcttgttgctcttgactcagaccagtaccagagggaatatcatacccttgcttaggcagtccacttcaattctgtcgaaacctatgctctatccagaacagccaagttctgctgttgaattggtatctggtaacttcgtctgggttttttgatatggcgttgtgaatcttgtgattataaagtagaaacagtggttcgtatcaaggaggacgaggaggcacctagtcatttggtcgttaaatctccctattcatctgttttgtgctaaatgtataattttatctggatctcttgactccttatttcagtctgttaaatgctcaaactgtggtctggtctccattctgtaattttgattcaagaaaataagttgttgagggtaaaaaaaaaaaaaaaaaatatgtcaataccgttgcaattcttgcctatttcgtcatggaaacaatgggggtgattattttgttaaaaaaaaaaaaaaaaaaaaaaaaaaaaaaaaaaaaaaaaaaaannncggacgcgtggg

SEQ ID NO: 55160 - DNA, 820 bp, Oryza sativa
  Clone ID: PAT_MRT4530_57194C.1
taaggcagaagccagtggagaatagcaataaacaaggagtcgatactgcaatagttttaagtgggtagaagaaagtggagaaaagcaataaacaaggagtcaatactgcaatagtttcaagaaaagtaaattactcttagttcccaaagacactcttcaagatacattacgacaaggttccatagctgcaaaatattatcctagggcaaaacatcacccaacgaaacgcttcatcaagtctcgggtggttcttaggcttatcgcttcttggacacaccgacagtcttacccctccttccggttgtcttggtgtgctgcccacgcacacggaggccccagtagtgcctcagaccacggtggttcctgatcttcttgagcctctcaagatcatccctgagcttcatgtcgagcgcgttggagacaacctgggagaacctcccgtccttgtagtccttcttcctgttgaggaaccagtcgggcaccttgaactgccgcgggttcgccaccacggtcatcagccgctccagctcctccggcgtaagctcaccggccctcttgttcatgtcgatgtcggccttcttgcaggcgatgttggagaacctgcggccgacacccttgatggaggtgagcgcgaacatgatcttctgcttcccatcgacgttggtgttcagcagacgcaggatgtgctggaagtcctccccggcgatcagcgacatggcggcggcggcggcggcggcggctgggtctctcgagtggagaggcggcggcggcggcggcggcggcggcgggaggagctagggcttcggagcagcccggccgg

SEQ ID NO: 55161 - DNA, 453 bp, Oryza sativa
  Clone ID: PAT_MRT4530_57195C.1
atggccatctctatgtctttctcctcttttttttccctctttttacccctctttttcccttttttccaatgtgcgtatgacatgtggggcccgcttgcccgctctggcgttggctcactgtcaactgtcacgccgaggtgccgtggtggaagtcgacgctttgctgggggtgacaactggtttatcgtccagggtcactgtgcccgaggcgtagccatagatctcctccaagtgcacctcatctcgatgttcttcaatacacatgtgcgcgctacagtcagcctttcaggcatgatgcggaacaccgtcaaggtagagatggacgcaaaacatcaaggcgatgctgaggacgctcttgtgccacttgaaaagaatgaagctcaagcccacggcgcttgggaaccccttcttgagcgcctcagcatggcgccgccggtgctcaaactttattag

SEQ ID NO: 55162 - DNA, 225 bp, Oryza sativa
  Clone ID: PAT_MRT4530_57196C.1
atggcgatgacggtccggcgaggtggcacgcgcgtgcggcggcgagcgccgcagcggctccatctcggccggctggggggcgcgctcgagggcggcgccaggccgtgtgccacggcgtcggcggcagccgccaagctggagcttcccgtccccagcgagggacggtggaggtacactccaagacggcgcgcgtacgggaagaccgacgcggccgcaaggatgtga

SEQ ID NO: 55163 - DNA, 1401 bp, Oryza sativa
  Clone ID: PAT_MRT4530_57197C.1
tttttttttttttttttgaacgtcatttcgcttcccaaagatctgcattaacaaaaaataaactgtacatctccggtagcaactcaatttacagaactttgattccggggagttaggagggggtggcaacattcacacagcgattttacgatatgggatagggtcttctccgagtacatgtgtgtttggtggagccccggaggaatctgtcgggtccttggctccttgctgccaagatccactaaagccgataccgacaatcataggtacattagttgaagcagagccgtaggcatacactcccattggaggagccatcgttggatggtcaaatttgcaattcgcgccgaacttgcagatgccatagcgagaatagaacttgcacagttcttctcccggacgtagtggaagacccactggactcaagacacaatctggagtaggcattgatcgcacccggggatgatggaacttgcacaccgcaccaaatttacagtctccagtcttcatgtagtattgacattctggttgatcaggtctctcaggaaatacattctctctctgcaatgcgtattgaggtacaggatatgaactagatctgtagggtgacaacattccctgattgcctgcactggcatcaacttgctgagaagttccataggtttgttgagcccctggggactgcagtcgactctcagaagatgaaacaggcatcatttggccagtatatgagttccagcttggtacttgaacaagaccttgcggtacaatcatcggtgcataatttgagggattctgccatctagggcttggaataaaagaacctcttggaaaagcccagctagccattgttccagtataaggtggacccgcggttgcagaggaatgtacagaaggataaataggtgaaccacgtgaagaagccatagcattgaaaagttctggatggtgaaatttacatgtattcccatatttacactgtcctgtttttaagtaatatgcacactccttttcactcggtcggagtggatatcctaatgtgtttagctgcaccctccctgcaattccagctttttctctgggatgatggaatttgcatgtaggcccaaacttgcatgttccagtcttcagataatactgacattctggttgccccatcctctcagggtattctcctttcattctgcacaatccagtcctgaggtagtaagtgcagtccggttctccggaccgctcaggatatggtccaggttgcatagcgccactgccgctcatggtcatctgctgccacataccctctccatagagagcggcggggtcgtgggaaggctcgtccgtggcggcggcggtggcggggagcgtcaccaccgctggagcggaggcccttccggcgtcgtccat

SEQ ID NO: 55164 - DNA, 297 bp, Oryza sativa
  Clone ID: PAT_MRT4530_57198C.1
tttaaagctaatattcacaaaaaagatgttttagtggcgcgacagctattcattttgccgccctaaaaggtcatactcggtgccgtcggctccttgtggctgattacgtaccaagcttgccagaattttggagtgttatgcacgcaaaatgcacagatgaaacaaataaggaagcttttgatgcggtgtatgttaaattctgacgttagtctatgttggcatctactgatgactgataattgcacccctttacattctgatttccagagctctccggaggctaataaacaacaagtc

SEQ ID NO: 55165 - DNA, 664 bp, Oryza sativa
  unsure (1)..(664): unsure at all n locations
  Clone ID: PAT_MRT4530_57199C.1
nnaggaaaaaaaaannngnngnnnnngaattgtaatacgactcactatagggcgaattgggtaccgggccccccctcgagttttttttttttttttttttactantaacnggggntcagganaaattantcaatnccatctncacgactcnncanccagctcngngttnacagtatnttctattnnatgatatacttccactnatctcaacccacatatctcatgtctctactaaatnnacctgtcnaagtatacttcaangcatgtggcgctcctattctggcatnacactggatangctcctccngaatnccgcgcagggaggtggatccacntgnggcatagnggacgtcccgccgaggagaanngctcnagtgcgtataatnatggtgnatttccnccttngcgtctncatagnncttcctctttcctgtctggcnntntcnnnatctccaactccgggggatccttnnatnctgaaaccgnccnctgtcnngcngagntccctattagtnncctaaaccnanggttttttnaanntcgcgtccctgnccatccggaanccgttttganattntngntcnatcancctcccccccccnnggaaacgggttcctttttnggnccntnggttccacgaataaaanccccccncagnncttng

SEQ ID NO: 55166 - DNA, 738 bp, Oryza sativa
  Clone ID: PAT_MRT4530_5719C.1
atgtcggtgtcaagcgcgtcgactaaccgcgccgttaaggggcccaaagccagctcgtctgctctgggtgctgtaatctgctcatgtatccagccggagcaacgtcggccgctcgcgaagtacacactggagttgtgtgtgtctacgccgccgccggtggccgctgcggccatgaaggagtgtgtgcttgatgagtacgccaccaagcacaggatctccatcgataggtttctccagcttaggatatttgtcaaggtgcatgatcgatttaatgcttctagaatatttctctatatgtattcatgttctatgaaaatgctatcttttggtgttccatgcaaagagaaagcagaatatgaatgcaacaggctgcctgctatgattgatgctcatttattcagagattatcatttagcattctggtttggtctcttctgtgcatggggtcaaccccaggatggtgatctgcatctatggcttccccaccaatgtcgctgccatctagtatattttgtgcattttgatgctctattgctctgcaaaccatggcttttgaatgcactattttggttggacagccaattgcaaggcagagtcaccagatctgaaggcagaatgggcttggattgtggagacagtttagtgtggccttgtgtcacaaggtttgctaagcttggaaaaaaaaaggaagttgaagaaaacaattataccatggaagtgacaaaacagaccatgtaa

SEQ ID NO: 55167 - DNA, 1782 bp, Oryza sativa
  unsure (1)..(1782): unsure at all n locations
  Clone ID: PAT_MRT4530_571C.1
gtgttgacttcgacacaatctatcgatgtcgatgccgatgccaatactcctcctcctcctgctcctcccccagggccagggccacggcggcgccggcgacatctgcatcgtgggcagcggcatctccggatcatccaccgccttcttcttcaccaactacaccaccgccctctccggtgcccagctccgcgtcttcgagcgccgcgctaaggtcggcggccgcctcgccaccgtcaccgtctccggcgatcacttcgaggctggcggctccatcatccacccacgaaatctccatgtgcgccgcttcgccgacctgctaggcctcgaagccaagaccgatggcgacgatgactggctcgggatttgggacggccaccgcttcgtcttccagacgctccgcccgctaccgcccgggacgtcctggctccgccgcaagctgcacacccttgttaactcgctgcgcctctttaagcgctatggtctctcgctgctcaagatggacagatttgtccaggaaatgttgcaaagatttatgctctactacaatggctttgaatcccgacctgtttttgacacggttgaggagatgctcaaatggtcgggcctctatggcctcactcgcaggacactagaggcagagctgcttgatgctggcctcaattctcaaactatttcagagcttgtcactgtgataacaagaatcaactatgggcaaagtgtgagtataagtggccttgctggtgcggtttctttagctggttctgaatcaggactgtgggctgtcaaagggggcaactggcagctagctgctggattgctcgaggctgctaacgccaccttgcatctgcaagaaggcatagactcaattgaatatgcaggggatcactatattctgaaatcgaataaaggtcttgaatataattgtgtagcaacggtggttgcaacaccacttgacgaggtgaacattacattcagccccccaatctccattccagcgaggaagacgcagcatacccatgcaaccttcgtgaggggcatcttgaatcctaaatttttcggtctaagctcggtatcagatattccaaagctgataggaaccatggaggtccctgagatcccgttttcaagcatttcgattctgaagaagtacagcgagcaggacatgacttacaaggtgttctcgcgtgtgaagctgaatgagagcttgctggaccagatcttcagtgggaggaaggagacgatccggataaactggcctgcgtatccacactatgaagctccagaagtatttgctccgataatactggacggtaaacagctgtactacgtgaatacattcgagagcgcagcgagcgccatggagacgggggccgttgcagcggaaaacgtggccaggctcctcattgcaaggctcaggctgcctctcccttcccgacctgctgcgcctgcgcccgatcaccacgaccagcgagcagatctgtaactgtgactctgtgactgtgatgtgaggaggtcatcgcatcgatcggctgtattgtttgtgtctaacatgtctggaacccacatgttcgtaggagttttttttaaataataaatcagccagcaggtatattactaatcaataaaaagttctagagttnaaatgacatggaacccncatgtatgaatatgatgatgaccnccttagtaagtnggagtatgttttcacagaaatgataagttatactaggctgaggctaagttagttgngaaaaaaaaaaaaaaaaaaaaaaaaaaaaaaaa

SEQ ID NO: 55168 - DNA, 435 bp, Oryza sativa
  Clone ID: PAT_MRT4530_57200C.1
atggcggacttggacagcttgccgagggtgtggcagacggctgcatctggccagcgcggcatcgtttggtggaggggtcggagtccggcttggcgcagagaggcgcagccgatggagggaggccggctcggcgcgagaggcacaggcggcgaagatggaggccggattggcgcgagaggcgcatccggtggaggaggctggcttggcacgagaggcgcggctagcggtggagggggcgacctaggtgtgaggaggagctgtcggtgggtgtggcgtggtcttcggcgctcgaaggctagccaacgggggatgccggtgcaggggtcctacatgtcggcagagcttgtatggtggtggagcttcggtgcgttagccgtggattcgcaggtggtgagcgataatgatataaagagattacatgagagaaagctatag

SEQ ID NO: 55169 - DNA, 470 bp, Oryza sativa
  unsure (1)..(470): unsure at all n locations
  Clone ID: PAT_MRT4530_57201C.1
atgctaattctcttcaatgccagcaatacaccaacttctagccatggtgtaaaagatttcacatattcttccttgcagatggagaaagaaataaggaatttgagttacagcgtgatttagctcagtccaggctgggggatttgcttcaggttgttggagataaccatgtccatgtttcaaagcagtcctcggtatgcagacttccttagtataactatcgtttcataaccacataaagttatttacctttttccttctatctacatgtaggtttntgggaggaactttaccttcgatgttccacagacgtgtgaagatgagcaatcaacaactgagtcatcagaagttgttgacagtgttcaaaattttaggtttnaaggccggcgagtgggacatagggaacataagcctcagtaggcttgaaataatgtgcgggttactaccgcattttggtatttagtttatcagtt

SEQ ID NO: 55170 - DNA, 159 bp, Oryza sativa
  Clone ID: PAT_MRT4530_57202C.1
agagttccaaatcttagatcacctctcaaattccagggtagttccccaaagcactatcaagcttggctacttgctataggagtatacacacacacaaccacggcctaggtagcctacccagtacatacgccaagcacatgaatggtattgaccgtacac

SEQ ID NO: 55171 - DNA, 750 bp, Oryza sativa
  Clone ID: PAT_MRT4530_57203C.1
atgagatttggagcagtagagggagaaattctgacaagcagattgaccacagtagcccaaaagattgtcaatgtgagacaaacagccttcatttcaggcagatatatcttggatggggctgtcatcctgcatgaagtcctacatgaactaaaaagtaaaaatcagcctgggattattctcaaacttgattttgagaaagcatatgataaaattcaatggggtttcctatttgatgttctgcaaagaaacggatttggggagaaatggataggatggatgaaacaagccactatgaatggtagagtggcagtcaatataaatggagtgggtgaagagttctttaaaacacacaaaggtttgaggcaaggtgatcctttgtcaccattgctctttaatctggtggctgacgctttagccgagatgttagagttggccatagaaaagggccacctacatgggttggggccccatttggtgcaatgggggttgacacacctacaatatgcagatgatacaatattgtttatggagccttcagattcaaatattctgacagtcaaattcatgttatctcttatatcgaattcaacgctggttcccgggcggatggccctgccacgtggcgcggcgcggttcgaggatgtaaaccttatgcgtgaaatttcaaggtgcgaccgtgcgacagactcatcgaccccatggagtctcggcgtgcagcccaatggtccaagcagccatacaggcccataa

SEQ ID NO: 55172 - DNA, 1029 bp, Oryza sativa
  Clone ID: PAT_MRT4530_57204C.1
atgccgcctccagcgtgggggtggggctccaacccgctggagcccgtcgtccacaccgtcgcggccttctcccgccgcctcctcattgcccccgacgccgcgcccgacgaagcacgcctccgccccctcctctccctctccctctcccctccgcccaccccgccgtcgccgccgccgccgccaccggaggtcctcaagaaggattcgaaggcggcgcccctgaccaaggaggaggtcggcagggccacgtggatgctgctccacaccatcgcagcgcagtttcctgacgaaccaaccaggcaacaaagacgcgatgcgagagagctgatggctataatatctagactctatccttgcaaagaatgtgcggaacacttcaaagaagttttaaaagcaaatcctgtgcaggcaggatctcaggctgaattctctcagtggttatgctacgtgcacaatgtggtcaatcgaagccttggaaaacctatatttccttgccagagagtaaatgcacggtggggaagcagcgagaggaggaaggtgcagaagcatctgaagttacggtgttgcaggggagatgaagatgaagcgtcttcctctgttggttttgctactctttgcatttcttggaggaggaaacatgttgctagggatcgctttggatgcaagaagaagcactacgacatcctcaggctcatcgttttagcatttgtttgtttagattatgtggtggcaataaacaatgtactgacaatggatgacatttttgctacattcatagcagatcatcaaacctatggaagcattgagctaaacggcaggagattacaggaaagaagactttcttctactaaccgaaagacaagggccttggaaaatgtcaggatcgatgactaccgacctgttgatccaagtccaagctccaaggcgactatcggggcaggtccaattgagcatggcactcctctccttccttacgtgccgcgaccgaagccgcctcctgatcatcctgcccaatctcctgccacctag

SEQ ID NO: 55173 - DNA, 407 bp, Oryza sativa
  Clone ID: PAT_MRT4530_57205C.1
ggcctccgccgccgccgcttcggcagcttgcctcctcgtctcgccggcgcaggcggcgcctgcatctatccatccatccacccacccacgccaccctcccgttccgattcggcgcacgcggctgctagacaccgcgttcctgacccgccgcgaatgtcggggacgcctcttcccccaccggcgcagccgccgccgccgccgggggccgccgggcccgatggcgcggcggcgctcccgcccccgccgggcacggacatgaccgggatctgcttccgcgaccagctctggctcaacacctacccgctcgaccgcaacctcgtcttcgactacttcgcgctctcccccttctacgacctcacctgcaacaacgagtccctccgctcgggccaaatccaccccctcgacat

SEQ ID NO: 55174 - DNA, 181 bp, Oryza sativa
  Clone ID: PAT_MRT4530_57206C.1
gcatcaatttgagacaatttctcaccgcatacaagcataactcttttccaaattttctgaagctaatcagagataaagcatggtgcctttttctttttacagtttcagactttcagccaatctcaccgtggagtcgtggactatacacagtcaatctccaaggatgcctcaggcctctctt

SEQ ID NO: 55175 - DNA, 1044 bp, Oryza sativa
  Clone ID: PAT_MRT4530_57207C.1
aacttccgagctgtggaactgaaaccttcaactcctcaacttacaactccttccatttgcgtgttagtcaaatttaacttatcaatgcaacctctctcattggaatctaggcctttttgcagggccttgatcaatgataggatcaacctggggaggcagtgcctctgaggccaacagatcatctgatgctttctcttgttctgatggtacatagccctctggaaaaggtggagggggaggagcaggttgcagcttcctttgcaacgacattaggatatggtcgacccgcttcaactccttcaaatcaattgcttccttctgcgtctttgattcagaagctgctgtgtcaggctctgtttccacatcgtttattagagggatttgctggaagtgccaatttttaaatgaaatgatttgtaaaattgaaacttcagccttggaggtattcccagaattgtatatggtatacctattttgaaccataccatgcccaattttctccaactttgaacatgccgtagtaaaagcttttgagatgtgatgcatagccctactgatgcgggacgcgaagacgctgcagagctggggcgcctggtagatggagccatcgaggatgtagtaggcgagcatggcgttggacttctcggggctctcccgcctctgcttccggatcacgaacaggtgcggctccatcacgtcgctgagcacgtactccatccccgtcatcttcgtgaggtgggacatgtcgagggggtggatttggcgcgagcggagggactcgttgttgcaggtgaggtcgtagaagggggagagcgcgaagtagtcgaagacgaggttgcggtcgagcgggtaggtgttgagccagagctggtcgcggaagcagatcccggtcatgtccgtgcccggcgggggcgggagcgccggtgggggaagaggcgtccccgacattcgcggcaggtcaggaacgcggtgtctagcagccgcgtgcgccgaatcggaacgggagggtggcgtgggtgggtggatggatggatggatgcaggc

SEQ ID NO: 55176 - DNA, 244 bp, Oryza sativa
  Clone ID: PAT_MRT4530_57208C.1
gtattatattaatattttactactatttactatttttttttaaaacggagggattttaaagttttcaactttccactttcactttttcatagggacggctgtttgaaggttcaaccttcaactctcaaccttactaggtaccacattttttaagagactacccacatctcttaagcgttctaggtaccaaaattccttaaaaaaaccccccctaacttgcttcttaactggacataacatccca

SEQ ID NO: 55177 - DNA, 575 bp, Oryza sativa
  Clone ID: PAT_MRT4530_57209C.1
agcaaatctggtgtgtgtattcatcagaatgggcgcattgtgatagctttgtaacatgtttctcaaaaaaaaataaaatagcccaaatattaatttttttctaggaaaagttccgataatcagattcagagagacagtacagagtattcatacacccatggatatgtccacatttcacgaactcgtacgattgtcgtgcaacgaagaaattattgaaccatttcggaatgccggaaatctgggcacatctaggcgaggaattcacagacggccttccacgactccgggaagaagctcttacgggtggcgacgtaggcctcgccgtcgcggaccttgccgatggaggtggtcacgatgcccgcggcctcgccggtcacctcctccctgccgtcgcacctggaatcggtcatgtaccagtagccgccgaacgtggacccgtccatggcctccgaccggagcaccagcttcgacctcatcatcgggtacggcgccttgtcccgcagcagcgccgcgacgtacggcggcggcgccggcgggaggtcgccgccgccgccgtcgtcccgcctcagtctcac

SEQ ID NO: 55178 - DNA, 810 bp, Oryza sativa
  Clone ID: PAT_MRT4530_5720C.1
atggctaagcaatccctagtccaatctctagtcatgttataaccccaagctgacaaagggatatggtacaacaatagcatggctatgacaataggtaacaccccatagaggaggcgcggcgccgacaagcggggcccactggtcagcggctcaagggagagcggttcaccgtggaccgggaccacgcaggtggtccaccgccggtccacgggaccgacggcccagatcgccctcgggccgatcggacgggcggcgatagaggcggccgccgggctcggctcggcatcaaagccgaccggccggccagggctagcggcggcggcacgcgcgcgtcgcgttgccggcgacggcatccggcggcggaggcgacggcgcaaaagcgacgcgaaagcggcggcagcggacggcggcaacgaccgaaggcgacggcgagcgcgagcggcagcaacgcacggggaaatggggaagaaaaggaaaggggagggagtcctcaccggaggggacggcggcgtccggcgacgaggaacgacggagggaggtcgacacgcggcggacggcgaccgggacgacatggcgaccctcacctacgcacgatgggaatggcgctccggcgacgaacctcgacgaaagaggggtggacggggtggatctcggccacccgaacccgacggcggcgaccgtccggtgcggcgccgagcccccaagcctaactccgcccggccgcaggccccgacgtgcccgtgaaaggcgggggcttcctccgcccccgcaccacctgcggcgtgaactaaaaggcgtgcccccgcccat

SEQ ID NO: 55179 - DNA, 343 bp, Oryza sativa
  Clone ID: PAT_MRT4530_57210C.1
caaatgcaacccaatttgaattgaatggaggaaccacaaacacccccaaatttcaggagtggagctcattaaccacgggattacattacccagacgcacacacggcttcaccccaaaggttacgtattgaaaactaagaccaaaccaaactggttgaccaagctgcaactaataacacaacgtcccacccatttaaccatcatccggtggccaccgccacctaatacacgggcaccctaatacacccatgcttccggcctccggtaagtcacaggtatcgcgctccggtggaggatagctcaggttgaggaggccctactggaacgaggccacaaggtccatg

SEQ ID NO: 55180 - DNA, 1921 bp, Oryza sativa
  Clone ID: PAT_MRT4530_57211C.1
ttttttccttactttttttttatcgataaccctttctcctttcccccccttcttcaaaacttgcatttcttgtacaagagctaacaaacacaaagaatttctttttacaatagatctccccctttcactcgatcctatcatacatagctagccatcagaatatgatcatctatctcatcccttcctggtgattcccaaatggcacccaacggccagttcgtctcgagaacacaatgacacgcctttggctgcttgcagccttgcacatgccaattccagcagactttttgtttccttcgggcacccagtattttcaagatcatatttcgcagcgcaactttcagctttggcaccaattaattctaagtccttactgtactttttagattatcgactctatcaattaagtccatagcttttgtcctatcgatctcaaagtcgatgacaggaagcatcctcctgattgatagcaactctttcatgttgccactgcttggtgagtgactattacttttgctcaacctgctttgcttgctatgtctggacttagtctcgaactcttggcttttgcttataccagggatgaatttccagtacttgacatcccttagcatatcttgatcttcttgggtaagaagaggtgatgaactgctgctggcctttgtttggagataactgcgcattgtatgggccctttggtgtaggatcgagaaacaagagtatcgatctgactgatgatattggcgtaatgcagtgcaaggcctgctggacccaatctattacgtcgtttggtaggttcttgtgattcttcattgtctgagcgcccaaaggcattatggatctccaaatgtaagaaatgcacaatgtctacgagcttttccatgacctcttccaaattcttcgaccagagagactttttctgcaagcttttaacatgcttgcgttggcttttcacttcctgctttagtatgttcaggttttcacctctttggtgtacacttgaaccatcctcttcctgctgtttgcgctgataatcttgttcaaatctatccagtgcatgcatttcatggtatagttcagctgtgcactgaacacaagtcaccaattgttgcatcactgattctgcctcttctttcaagtgatgctgaggtgtccgttctgatgcaaaccttttgtcagcagcatatatctttagtaattcatccatatctttcgatataagattctgaacaccttctgaatgaagaactacttcttttaaatgctttatgctctcttttgaaagagcccgcatcaaattgcaacctttgactattgtattggcaacctcaaatgctaaaatagatattttgttgccctttgttgtagttcctgatccaaatccactatttatattcaaatttgccatgctactaccaagtgtgtctagcacttccactgctttcccaagcccaacagtactagccctccccaaaattgagcttacttctgaaacaaagcgattctggtgcatgaacttgtctagtgtatgcgaaccaaggccaaaacgattcactatggctattcttactaagttgaatgcacttgccttggcggcgctggctttcgccacacccatcccggatttctgcgacggcaaccgtgccaagttcggcacgccatcccatggcaactccctggcatcaatgggcgctctagaagccggggcttcctggaccgatgcaggctgctgccgttgctgctgctgctgctcctggatcctcttggcagcagcctccctcgcaaccgtcttcctctcctccttccccacgccaacgccagcgccgccacgctcatggccacggaccacccggtcgggaccgagcgtggtgtcgctgggcgacttgtccaccgccgatcccttcgagcaaaggccccccat

SEQ ID NO: 55181 - DNA, 507 bp, Oryza sativa
  Clone ID: PAT_MRT4530_57212C.1
atgccgcgcgccgccggcctcgccgtcgccgtcaccgtcgactgtattccgccgccatctcttctggcccagtcgtgcggccatggcgccgccaccgccgccgcctaccctcgcgttcgcggcgagcgagggcgcctcctcccgaagcaggggcccactgatctctctctactactgctcggcgccgccgccgccgtcgttgcggcggccacaccgcgcaccgcgcacgcggcgtccgggggcgtcatgggcggccgcgacacctccccatccccctcctcctactcgtcgtcatcgtcgtcgtcgtcgtcgtcatctccgtcggtgagacactaccactactacccgccatcaccgacgaggtcatcatcgccgccgactccggcggcccataccaccagctgccctatatgtccgtacgtgctgttggccgccgccgtcggtatcactatcatctttctctgcaccttggccagcaaccagaagactaccgtcgtcaagctccag

SEQ ID NO: 55182 - DNA, 3180 bp, Oryza sativa
  Clone ID: PAT_MRT4530_57213C.1
atgctggtgtgcactcaagtcggcgaaatcgtcttcccggtctacaccacgatgccgatctcgactggcccagaaatcaccaggatcaagaacgatgtggttacgaccccggtcgactccatgtcgaaggatcctcccacaggagcggagaacggaacatcgacaacgtctgcacctaagaaggattctaacgcggccagttcttatctttccaacaagaatcacgagccgacgaggacaacttccgaggcaacaagaatctggtgtcctattcacaagaccaaagggcacgacttgcaggcttgctcggtttttctcgacgtacaagctgaaatccgtgcctgcagggagcgtggaattcgacgtgcttctcccactcgtgatgttcattgtcccattcacaagacaaggactcacgacctctcgagctgtaaggtctttctcaatgccatgaagacgtcacctcctaaggtccaacagtcaaaaatctctcctagagaggcggacaaggaacgaggagcggctgctgtctcagatcgattcgtcagggtaatcgatattgatccccacgagccatctgtcttacatctggtcgaagatcaggcctcatcatcaacaagtacaccacgcgatgtatacgccatcggtgggactagcacgtctgcaggtggcaacacagaagcggaggatcaattggctacgccggcccaacatatcagaaccatcaacgcaatactgagggaaaccccttatgatcccgtcctgaacgctgatctcgatcagtggacagaacgactacgggaatcagtggccaacttcagtaacacattcgaagaggccgctgccagggcaccaccagaacaaccgccgactggcaacatccacgaaggatgtatgatcgccgacaacccactgcccccagcggcgggtgtagggctttcagtcgtgctctacgagatgtccgatggcctgagagattccatagtactctacgctgccggagcagacgacaacgcattggcaaaattatttgccagcggcgttgaagggatctgcccgttcgtggtttgttcacctcccgccctacttgatttcttcatgggcagatttgtggcagcagttcgtcgccagcttctaaggaacatacaagtgccacgcgatcgaggacgacctacatgcgttgacacagaatccggcaaatcattgagggactatattcggcgctttaatgagggcagaaatatgatccccgagatcactgatgcttccgtaattcgtgctttcaaatccggtgtccgagatcgctacaccacccaagagctggtgacgagacggatcacaactgctcgtaagctattcgaaattgtcgatcgatgcgctgacgcatacgacaccctaagacacaagaacgacaggccgaagatagggggagagaagaaaccagccaaggatgcaactgagtcaatcaagaagaagagtcgcaggagtgggaaaaggaaagctcaaacagaagtcctcgcagcagagtatgcggacccgcccaagcacccagacccacaaggcgacgatacggagaaaatatggtgccctatacacaagtcggacaagcactctttggagacttgtttcgtcttgaaaatggcactcgcgaagcaattggcattggagaagggcaagcgaatcacctttgatgtcgctgagtttgacacagcatataatgccatcatcgggagaattgcactcgcgaagttcatggctgcatctcactatgcgtatcaagtgctcaagatgcctgggccgaagggaacaatcactattcagggaaacgcgaagctagcggtgcagtgcgacaagcggagcctcgacattgtcgagcatactcccaacccgcccgccacagctgagccgcccaagaaaatcagcatggcgaaagaggatgaggagaagacagcattcatcatgccattcggtgtattctgttacgttaagatgccatttggactgataaccgccggaaacaccttccagcgcatggtccaaggggcacttaatgaccagtttgggaacaatgtcgaggcctacgtcgacaacattgttgccaagaccaagacaagcgactcattgatcgatgacctccgagaaacgttcgacaatctccgacgatatcgtctcatgctcaatccagagaagtgcacgtttggagtaccgtcgggcaagctcctcggattcctcgtctccggcagggggatcgaagcaaatcccgagaagatcaaggcaatcgagaacatgaagtcgcccacaagactcaaggaagtccagaagctaaccggatgcatggcggaagccgacgatgtgttcatcacactcaaacgctacctgtcaaatccccctatacttgttgccccccaacctaatgaagaattattcctctatattgccgccacgccatattctgtgagtatcgtcattgttgttgagagagagaaggtgcaacgaccagtttactacgtcagcgaagctctccacgaggcaaagacaagatacccacagatccaaaagctcctctatgcagtaattatgacatcaagaaagctacgccacttcttccaagcctacagagtcacagttgtttcctccttccccctcggagaagtggtcctcgccgatttcgtagctgactgggctatgcctgacaccagccgagtccgaagactactcgctgggataagagcagcagccgcagtaggagtcaagcgactaatcgtgaaagggaattccgaactagtcgtgaaccaggtgcacaaagactacaagtgctctagccctgagttatccaagtacctcgcagatgtcaggaagctggagaaaaggtttgatgggatcgaggcccgacatgtatatcgcaaggacaacatcaaaccagacgacctagcacggcgtgcgtccagacgagagccactcgaacctggcaccttcctggacgtcctgacaaagccatcggtaaaagaggcaaacgacgaagatagcacagtcgtccccgacatcggctcgggggctacagtgtcagaacacgtcgtcgccgacatcgagaccacagacgattggcggaccccactcatcaagttcctgagtagcgacgagttgcccgaggatgacacagaagccgagaaaataacctga

SEQ ID NO: 55183 - DNA, 158 bp, Oryza sativa
  Clone ID: PAT_MRT4530_57214C.1
atggtaaaccctatctaccacgcaccatgtttgaaatctaggacgccacgtggccccacgaagtcactgccaggtgaggccaaccacccaccgcgcctgtccggctgggttgtggaaaatgtgcatgcattggggtaccgagctcgaattcgccctaa

SEQ ID NO: 55184 - DNA, 261 bp, Oryza sativa
  Clone ID: PAT_MRT4530_57215C.1
atgaggactagtcacatgatgatcttcagccttctcctcctggtgctatcatcaggagatctggcgatggctgatggaaaattatctgatgctgactgcaaaatgatactcttcccagcgtattgcgacgatatcaaaacatgcatcccactatgcaccaacaatagccctctgaaacctgctccttcgcagctttcgaccgtcgtttgccttgatttgggatgccagtgtactttctgcccaaaaaccgctagaaactag

SEQ ID NO: 55185 - DNA, 317 bp, Oryza sativa
  unsure (1)..(317): unsure at all n locations
  Clone ID: PAT_MRT4530_57216C.1
ctccagtctcccctcctccttccttgcgcccccaacctcctccttggaggggcgcggcgccaatnacggcgaccacgactggngggatccccgctgccggggaggacgggtgcggggaggacagatccgccccagcngcggcgcggatgtgcacggngacgacggcgactggngacggcgacgacggcgacctngacagaagcggcgacgacggcgaccacgaaggaagtngcgggaccgngccctcccatcccctcctctcccctctcccagatcggtccgaggggaggaggctgccgccgtgaagaacgggcgct

SEQ ID NO: 55186 - DNA, 1083 bp, Oryza sativa
  Clone ID: PAT_MRT4530_57217C.1
cccacgcgtccgcccacgcgtccgaatcccaattccccatctgtgtcggtcgacatcttcttcactcctcacttcccccactttctctactcctagcatagcagcctcactttccctcctcgatcgaagcagcaggcggaggcggaggggatcggcgatggagcagcaggaggaagtgccaccgccgccggcggggctggggctgacggcggaggagtacgcgcaggtgcgggcgacggtggaggcgcaccaccgctacgccgtggggccgggccaatgctcctccctcctcgcgcagcgcatccacgcgccgcccgccgccgtctgggccgtcgtccgccgcttcgactgcccccaggtgtacaagcacttcatccgcagctgcgtcctccggcccgacccccaccacgacgacaacggcaacgacctccgccccggccgcctccgcgaggtcagcgtcatctccggcctccccgccagcaccagcaccgagcgcctcgacctcctcgacgacgcccaccgcgtcttcggcttcaccatcaccggcggcgagcaccgcctccgcaactaccgatccgtcaccaccgtctcccagctcgacgagatctgcaccctcgtcctcgagtcctacatcgtcgacgtccccgacggcaacaccgaggacgacacccgcctcttcgccgacaccgtcatcaggctcaacctccagaagctcaagtccgtctccgaggccaacgccaacgccgctgccgccgccgccgctcctcctcctcctccaccggcggcggcggaatagcctttttcttttctttttggacctctctgcaatttcacttctattcagggaggtgcttcgaatttgctccatgtctcatgaagttggaggaggaagggtcagcttctaatacatctcattcctggtggtgctgcctgtaataatctcttcatcttcttttttcctctcctcctcctcttctcttcctggatttcttttgcttggaatttttacttacctttgtgtgtgtgtctcacttcctgattggaatccatatttgcttttcggtggttttgttcttcaaaaaa

SEQ ID NO: 55187 - DNA, 3987 bp, Oryza sativa
  Clone ID: PAT_MRT4530_57218C.1
tcataggactaggaacttatatagtactaaaatataactaattgtctggacagtccatgcatccatgtaactggagatcctactaggacaatacgcgagggacaaacccaagtatgtgtcagtgccaaactcagctaatcctagtattttgttgcccttaacatcaacagcaagaacccaagcctgacgttgcatgaatttggcctttgtcagcaagtaaacaacaccttcaccatccaggctgagagcaggttgagatgtgaggaggttgtgcaatttcctctccttgccatcctgcattttatcacgcagcaatcccggttgcagtaagctgtcatgaatcgcttggtcgatattgatttgagaagcttcaactccgtgcaccaattgccaatcctcccaagcaccggtgatcttgctgttggtatacatgtagagctcccagttcttgatctcacgatcaaggtgcccagtttcagggtcacgcgtaggaagtatctcgccatgaacttccaattcgaccatcctgaggcaaccatcaagaacagcaatacccctattggccttagggcatccttcgacttccgcgccgcgatcgaccaatctccttggcagcggcaatggaacaccaacgagcgtgggatgatcgccgccgcttagcacgtcgcagaacaggatgccgcgatagagatcgacccagcccatcgtgccatcttcacctccaagcgtgatcgccgttgttgtgatgtgctggttgaggcgagcggcgttcctggggatcttgattgggaacggtctctgcggcgaagctacgatcaccttgccgacattggtccagctccatgacgcggaatcgaacaatcggaggttgaacccgttcaggcggacggatagcacggcgatcttgaattgctgctcaccgccgggaacgggaaggggaaggatcccagcctcgtcgtcgtggaaggggaacggcggcgaggggagacggcggagcgaggggcgtccaggccactggtagctgtagacgaagtagtcgttctccagccgcgatggcgcggtggtggtgacgatggttacgcggaggaggaggaggccatcggcggcggagacgatctgggcgtcctcgtagaggagggagacggtgtcccggttgaggcggcggacgaataggcgggaggggttcggcggggaagccggggagatggagacctggatctgggcatcttccgcggtggtggtggcgttggggcggcggtcgccgatgtggacgtgggtgtccaaagaggatcgagggttgaagaagaggagtggcggcgttggtgatatcagtggtggtggtggtcgccatggacgtttggttttgaggaggaaggaagaagtcgatggaggccgcggcgtgagtttcctagtgtgcgcccacaatgcgccgtgatcgtttgcaagcagcttatttgctgtgccgaatataggagtgatatcaacaggcacctgcatgtgttctattttgtccagcgccacacgcagtggttgcgtcaagcttgcatgggactgcagaagagactgggcagcaggcttatcgccctttgcttgtattgtcaggatctctctactgagactctcgacagcgtcctcaacctttgtgaaatcaactgagaattttccatcagaatgcaagacaaaagcccctttctcatacaaccagttaaactgcaaagcttgcccttttccatgagcttcttctagtccaaagcggatcgatcggaagcatccagccaggaatgagacatacatggattctgataggctcttaggaagtaaaccctttttaataagaaaattcagtgcccatagaccaactatatcagctttggcctcctccaatgctgaatgaaattcttgaagttcctgagtattagcaaagttattttccattgctaagtgaatatgctgcattttcattctaactgttgatcttttaccagttggaagggttatggaatgaggaccaattccatggcagcattcatggcaaacaatatgtgtataataaggctcaaaatcaacataatcttcctgttcctctctgatgcaagcattagctataggctttaagatatgcttaaacttagcttctgaaatgttcttaagcataaccatcgaggtccctcgttcattcacaatccgctcatcattgggcaaattaaaagcaatagtttgtgggcctttcacatccccagagttgtacagaagattgataacgcgaattggagcagcagatacattgtcggatttgtaaatgttgtccagtggaagatgcttctctaaatcccggagttgatcaccgaagagtttaacttgagaagtggcaatgtcatcccgtacaccaacaaatgcttcaaaggttgccttataactaaaaagaccatcttcatatgtctcgtatgggccaatagtgacatccaagttggagtccagctccatccaagctatatcagattcatagtaatcatttgaaaggaaagcatttgccttggttttgagcaaattcttgaggcttggagaatcagaacattcagatgctttatgaagaagctcagcagctttctcaagggatgatttgtactcctcagagtatggaacaacgaaaagatcatctgatgtcttggtttgatttgatccatctgactgcgctagtattgaaggcaacaaggcatcatgccgttttatgacagtaaaaaatccagttgcatatttttgctccttttcaggcagtccatttttccataattcaaactccattttgtccatatcaggaggataaaagtttgccccgggaggattatctcgaggaaatgcagcacgatactcaatccccttccatcctgaaactgatttggtggcatctgtgagtaatttcacagcagaatctgcagtcgatagaaaagccttattttcatcaaggcaggaccatggactcttattaatggaataatacaaccacttcaacttatcaaaagaagagtagttagcacgtgctttcagccagtctctcagcgtgcagttgctattccaaacctgctcataaaagatgtcatcaataactattgatgctttaagaatatatcccaaggcttccctgtctccttctgatagactagtcaactctggttccaaatggatgggagcataacggttgatttgcttttgcaaggttaaactgcgggattcgatattgtctttgtacctttcttcaataatactaaatagttggccatatgtcccattcacatcgtaaggcacatattctccgctttcttttgcaaggcagctcttgtactcgtcaagatgcatatacctaaccgcagatacttcactttcttggagagtgaatgcctcaagtggaattggagttaaagtagtcacaagataaacatcattgtactcattgttggtgtatgtgccattgttgataacacattcctgaagaaaaacaaataacagctcgaaagcatcagatggaagtttgatgcctagttcttcatcgagctcccgctgcgcggaggagagagaggagtcgccggcggagatgtggccggcgctggagatgtcccactggccgggccacgtgtccttgcagtccgcgcggcgctgcagcagcagctccccggtgctctcgctgtagatccacacgtgcaccgcccggtggtagtcgccgtccctgtgcacctccgacgcgatccgatcgaatggaatccaaccgaagcggcggcgggagtaagctgggtagggggtagctgcggcgtgcctggccttggaggcgcctgtcttctcgccgccggcggtgaggacgtcgaggcgctcctccggctccgcggccatgaaattggagtcagagaggttattcgctccagtttcaaatgacccgaaagatagggacacgagatgctttgtttgggttgggttttttcagattccgaagatttt

SEQ ID NO: 55188 - DNA, 1671 bp, Oryza sativa
  Clone ID: PAT_MRT4530_57219C.1
aattgtaatacgactcactatagggcgaattgggtaccgggccccccctcgtgttttttctcttctcttttatacttaattatgatccatattgatatccaaccagccacaaactcacaaattaaagtctcacaacacaacatcgaaattttaagagtcgatccaaaattatatagagttttggactaatattaaccaaagcacattaccatgcatgcaccccagatcgatatctagaaccgaacttgatgaagcaaccaaagacgacgacgataactaattaagcttgatcttaatcctcgcaacttaactgaccatctcatcgtcgacatcgatcaagattcaagatcaagccctagctggggcgagctcgctcgctcgatcgaccgatcagttcatggcggcgaggcggtcgacgaagatggcgaacgcctcgtcggtgtcgagcatgctgatcctgaccaccctcccgtcggcgccgaacttgccgccgccgcggctgatgatcttgcgctcgcgcaggtacccctccaggtcgtccaccccttccttcccgcagcgcagccacgcgaacggggggtaggcggagacggtctcgttggcgaaggtgcagtggccggggagctcgtcggggagggtgaagatgccggaggcggcgacggcggcgcggagcttggcccagcgagagaccatcttgcggcgggcgaagtggaacagtcggctcgagtcgtcgtcgtcgtcgccggcggcgggcgcgcggtcgtagccgtcggtgatggccttgaggatcttggcggcgcggagctgcgagtccttggagacgccgatggtgttgagctcgatgaacttgctcatcttctgcgccaccgccctgtccttcaccagcgcccacccgaggcgggtgccggcgtggccggtgcacttggagacggtgaagagcatgatgtcatgggcggcggcgctggtgatgggggtgtactgcggccagtagtaggcgaggtcgtggacggcgacgccgtcgccggacttgagcacggcctcgcggatgccgccgtccgggttgctcggcgagcagacgagctcgacgtaggtgtcgccgtcgaacatcttggcgtcgccggcccacctgtacagccccgacttgaggaaatccgtcaccgccgggtacgaggagtagtatggtgcgggggagacgacgttcatgggggcggaggggcccggcggcgagagggcgtagagcgcggcctggaagagctgggtggatccggtgccgacgagcacgtggtagccgtcggcgacggcgttgccgacgaggcggtggaggcggcgcacctcccgctccaacccgggctccaggaaccagcacaggctgcccacgtcggagaagtagctcatcgtctgccaccccgggatcacgatcgtcgccctctccccggcgccgccgcgccagaacgcctcgtacatcgtcgggtcgccgtggtcgaggttgatgattgagtccttggtcaccggcggcttcccggaggacggcgcgacctccgcctccgccttcttcctcaccgcggcggcgtcgtcaccgccgaagtatctccggcggaggtagaacgcgagcgcggcgaggttgaacgccacggaggcgaccaccccgagcctcccagcctgcgccgccat

SEQ ID NO: 55189 - DNA, 1278 bp, Oryza sativa
  Clone ID: PAT_MRT4530_5721C.1
atggcgctcgcggtcgacaacggcaacagcttgcacacgcgagcggttccgcggcggcccgttgatccccggggatcagaccccgtgttctttcatccggcgcctccgtgcgacggatgggcttcccccatccgacggtacaaagatgacctcttgtctgatccaacggctcgcggtcactccgtgcacagggcccaaggcttcgaagctcgtctaccacctctgcgcagcgcacgcctccccagcccagaagctgaaccatcgcgtcgttcatcagcagcggagaagccatcccgcttcccgcatcatctctcccaccacaaccaaaccctaaccccacccaccccaaccatggagttcgctcgccgagccaccgccccggtcgacgccgacgacggctgcggcgttccccacccgtccccgcgcgaaactaaacagcggtggggttggggagtttcagtgcaggtgacgatggacgcgctccgccgggagctctgggaggagggcattcgtcaggaggtcattgctgctgaaattgctgagcagagagaactggaggccaaggtccagcgcgatactggattgctctgtgatgtgccctcgcgattgtccgtcagcttccagccggtccgcggtgacacattcccttcgcctcatggtgagctttggttaggaggaccgatggcaatgcctgcaggagcatccatgtttagagtgcctgtgaaagatcggatcgaggaatggtatcgacctccatgggataggacagcagatgaagagaatgcatcttttaatgcgctctacaaggaagctacacgtatcagtctcaacgatcacatatgttgcctggagcactctgctggccataggaacgaggaaaacaatgctttggaatcaagaaaggaagctattgggacgaagaagaaagtagaaacagagtccttatctgtcacacggcattatccaccaacatggaattatggtatttgcaaagccaattgttcaagtgaactggacttaaaaaatcacctaagaggtaggaggcaccaagaaaacttagaagccctgaagagagaagacaaggaaatggaagcaaaggtgtatgcaaaggaagtggcgcagtttgttgaaaagaaccaaaagtttgtgccaagatggagttgcagcacttgcaaggctaattgcacatctgcatctgacttggagaatcacttccggggtagaaggcaccaacagaacgtaggaaggagttcaaacgtggtaatgctccgtgcataa

SEQ ID NO: 55190 - DNA, 2449 bp, Oryza sativa
  Clone ID: PAT_MRT4530_57220C.1
ccgcgcggcctcttccacctctcgcgctcacgccatttatactctcctcctcctcctcctcctctactcctagcagcagcgttggttggtgagctgaggcatatggccatggctgccacgtcccgcgcgccgtccacgctggccccggcgtcgttctccgccgccggcggcagcaggaggcggcgccggtgcccgaatcccagggtgcgggtgggggtgggggtgcggtgctcgctcgacagcaacgtctccgacatggccgtcaacgctccgaaaggattgttcccgccggagccggagcactacagggggccgaagctgaaggtggccatcataggggccggcctcgccggcatgtccaccgcggtggagctcttggaccagggccatgaggttgatctgtacgagtcccggccgtttatcggcggcaaagtcggttcttttgtggataggaaagggaaccatatcgagatggggctgcacgtgttcttcgggtgttacagcaatcttttccgccttatgaagaaggttggagctgataataatctgctagtgaaggagcatacccatacatttgtacgcccacgcggcccgattggtgaacttgattttcggtttcctgtgggagctccgttacatggtatccaagcattcctacgaactaaccaactcaaggtttatgataaagcaagaaatgccgttgctcttgctctaagcccagttgttcgagctcttgttgatccagatggtgcattgcagcaagtacgggatttggatgatgtaagtttcagcgattggttcttgtcgaaaggtggtactcgagagagcatcacaaggatgtgggatcctgttgcctatgctcttggtttcattgactgtgataatatcagtgcacgttgcatgcttaccattttcactctgtttgccacaaaaacagaggcatctttattacgcatgctaaagggttcacctgatgtttatctgagtggtccaataaagaagtacataacagacaggggtggtaggtttcacctgaggtggggatgtagggaggttctctatgataagtcacctgatggggaaacctatgttaaaggccttctcctatccaaggctacaagtagagagataatcaaagcagatgcatatgtcgcagcttgtgatgtcccggggatcaaaagacttttaccttctgaatggaggcaatgggatacatttgacaacatctacaagttagatggtgttcctgtagtcacagtacagcttcgttataatggatgggttacagaacttcaagatttggagaaatcaagacaactgaaaaaggcagttggcttggataatcttctctacactccagatgcagatttttcatgtttttcagaccttgcactttcatctcctgctgactactacattgaaggacaaggttccttgatccaagctgtgctaacccctggcgatccttacatgccattgccgaatgaggagataattagcaaggttcaaaagcaggtcttagaattgttcccgtcatcacaaggcttggaacttacatggtcgagtgtggtgaaaatcggtcaatcattgtaccgcgagtcaccaggaaatgatccatttagacctgatcaaaagacaccagttaaaaacttcttcctgtctggctcttacacaaaacagattttaagcaggaaggactacattgacagcatggaaggggcaactctctcaggcaggagaaccgcggcctacatctgtggtgcaggagaggagctgctcgccctccgaaagaagctcattgtcgacgacagcgagaaggccaggggtaaggtcgaggcccttcagacaagctgagcttcctcaaatgacacatgctggagtgagtggattgctatgcccaaaacaaaaacagcttcctgggtgtagtaggcgatttccgcagcgactctcatgtaaatcctacttgattgagcatttaggtccaatctgctgctgccctttttgccttgacacgatcgttcgttcgcccgtcaatggtgtgttcttcgttattgtgaatttgtgattgggaaccaaaggtggcatacgggattacatcaggcagcgtgtgttttgttcagcttaaccgatcattgaacccattgatgatgatgatgatgtttatatagtgcacacatcacttaaaatcttgtgagagatggtgcttaaatttggtgagtactgctgtactttataaggcagctttagagtttttataaggagtatattttgaacattgtgagatgagaaattttagatacttaaaagtacaaataaattaaattttacactagtaagatattggtatcttaaaattttggtaccaagtcggtaccttgtcaaggacagtaaagtttatcaaggcccagtaaaattaccttgtgagaaaaaaaaaaaaaaaaaaaaaaaa

SEQ ID NO: 55191 - DNA, 384 bp, Oryza sativa
  Clone ID: PAT_MRT4530_57221C.1
gcgcggtctccacggcgcggcgaggcagcggcggagggatggtgggctcggccgcgtactccgcggcgtcggccatcgtcgtggtgatggccaagggcaaggggcggggcggcagaggcggcccctctggcgccaacaaggtttctgagcgacggcctcctaggataacttccaatgtgaagcagagcttgaggattctaaaattttggaaggattatgaaaggaggcaaacaagtggacctcagcctgctactcggtaccgcaaaaagaaagtaataaaagaagtgcttcctgatgacacagacttctacgatgatgcttcttccactcttcactagtcaggcttgcctctcattgcattatcaggacctcaccacatttttt

SEQ ID NO: 55192 - DNA, 206 bp, Oryza sativa
  Clone ID: PAT_MRT4530_57222C.1
ccctccctcttatttacaccaacacctacaaccccaccggggggggacttcatacaacacggcggtgtacaaaaaacctcaccaacaaaccttacaatacattgcataacaacatggaacccactaaccaccccctaatccaccttctccaccgaatcctcatcaaatcccactactcctatacacagacgcatcctttcaaaccc

SEQ ID NO: 55193 - DNA, 134 bp, Oryza sativa
  Clone ID: PAT_MRT4530_57223C.1
aacaaattcttgtccatggtggatgtcgtgatgtcgctgatgctctacttcggcatatgaagaggcagggccatctgagcgatacatctgcgcactagaacaaatggacctgaaggatttgttgagtttgatga

SEQ ID NO: 55194 - DNA, 495 bp, Oryza sativa
  Clone ID: PAT_MRT4530_57224C.1
gcattgccttgttccacctgcagccaaactgtgtaatataagcaagcttgctatagggggactaggcactctaggcttacctaatccaccccttcaggcttcagctgttcagtgcagacacagagaatgaattgggtggagtttctgaagcccgtagtcgcaatgctggtgtttgacacgctcttcgcgctgatgacagcattggtcaagaaggctttggctgatgggttaaaccacgttgtctttatcaccctacgccagtttgtagcggcagtcctgctcgctccgattgcttatttcaaagaaaggaatacaagaccaagatttacaacagagatctttgcctacatgttcatgagcgcattgcttgggggattatgtgctcagtatctgttctttctggggttgagctacactacagcaacactgactgcaacattctccaacatgactgccggtttcacctttttaattgctatccctctccaactggaa

SEQ ID NO: 55195 - DNA, 114 bp, Oryza sativa
  Clone ID: PAT_MRT4530_57225C.1
atggccggaacgcctattggccatttctgtcgtcaccttctccgcgacatactagaggagggtggcccagtcgacccggtgagccgagccgtgcctcacgctttccgcggcgcg

SEQ ID NO: 55196 - DNA, 846 bp, Oryza sativa
  Clone ID: PAT_MRT4530_57226C.1
atgacaagccagccgcacgccggcgaggatggcggcgaccgcctgagcgcgctacccgactgcctcctccacgcaatcatgtcgttgctcccggcgcgacacgccgtgcagacatgcgcgctgtcgcggcggtggcgcgacctgtggcgctccatgccatgcctcgacatcgtcggcgacgagttcacgtcgtcgaccaccggcagcgtgaggtgggacaagttcgagagcttcgcaaccaacctgctcctcaaccacgacgccccgttcctcgacaggttccggcttcgtctacccagctcatggcacgtcaggggaggtgtacagcaacgcgacatcaaatcacactcacagcccgacgtgcgacagatcgagcgatggatcaaccgcggcgtccggttctaccgacccgtcgagctcgagatcaccatcggcgttggttatgacctcaagcttccaatcctcggcgccgtcgtcttctcccaccgactgaaatcattgcgtctctctcgccttgttctggaccgcggcttcggctacaccatccgttcgtggtgcccggtcttggaagccatggagctcaactcctgcatcttcgagttcgacgagatcactggcaatgcgctcaggagtttggccattgatggctgctcccgacgtggtctgcaggtgcctgatgatgcattgtgtgtcacggcgccaaagcttacctcccttcggctcaagttttcgatacatgatttcagcgtgtttttggttgatcgaatgggtttcctcgttgatgcgtcgatctgtaaaatgttttcgtccacgaccaactttggaaacaatgtatgcaacttgtag

SEQ ID NO: 55197 - DNA, 1119 bp, Oryza sativa
  Clone ID: PAT_MRT4530_57227C.1
ctagatcacgacgccgatctcaaccggtcctccaatgaccggagacgagaacgtagtggctacgaaccagggcgattccatgtcgaaaaatccccccgtcgagacggagaacggaatatcgacgacatccaagctcaagaaggattttgatacggccaaaccttgtccttccgacatgaaccacgagctcagcaacgcatttaaagaagctgctaccgcagcacaccaggagcagccaccaactggagaggccaatggtgtaacaccccagccccctcctctttcccctctctctgtcgccaccgtcaccacgcgccgctgcccgtcgcgcctggccgcctcgcgccccgagccgccgcgcgccgtcgccatcgtcgcctgccgccgcgccgacgtcgccatcgccgtctgtcgccgtcgccatcccatcgccgctgccgcgccgcgcgccgttgccccgcgcctcgagccgtgccgctgccgcgccgcgcgccgtcccgtcgccttgcgccccacgccgctgccacgccgcgtcgccatcgcgtcacccgtcgccccgcgtcgcgccccgtgccgcgccgccttgcgccccgagccgcgccgcgtcgtcgccatcgccgcccgcgcgtcgcgcgccgtcacatcgccgcccgtcgcgtcgccgcccgtcaccaacgccccgcgccgccgcgccgccgtcgcgtcacccccttcaccgcccctcccttctcttccctcttcccccttttcccctctctcccctataaaagcccaccattctcccctctccccactccatcccctcctcctctccctcttctccccccccttctccacccgccgccgtcgtcgtgccgccgcgccgccgccttcgagccgccgcgccgccgccacgaagccgccgcgctgtgccacgccgtgcgccgtcgtcgccacccgcacgtaactatagagcccgagggagttgcggatccaagcgaaggccaagacccgcaagactttgagcaaggcaagtcatcactattccttgaacatgttgatcccaattgcgaaattgttttgtttacaaataaaattgcatgcaatgatgaacatcctacttgtgattatgccatgcct

SEQ ID NO: 55198 - DNA, 696 bp, Oryza sativa
  Clone ID: PAT_MRT4530_57228C.1
atggacggcgacacgacgttcacgaagctgttcgtggggggcctgccgtgggagaccaggggcgacgcggtgcggcgccacttcgagcagttcggcgagatcgtcgaggccgttgtcatcgccgacaagcacaccggccgctccaagggctacggttttgtgacgttcagggaccccgacggcgcggcgcgggcgctgcaggacccgacgccggtgatcgacgggagaagggccaactgcaacctggcggcgttcggcgcggcgcggcgcgtgcaccctgtcgcggcgccgtttgggatggccagattgaggcccgcaatgatcgcgtcgtcttcgtcgtaccagggctctgctccttcctacttcccccaagttctgtacgcctacccttactgctatggataccatggaggatattctccggaaataacgcaccaagcgcacatgggctactatggtggatacggtgtatctgcagcacaggcacagcagcagcaagcacaactgcacgcgtactatgcggctgctaggccggccggagcttaccagtttcaggcggccggtgaacagacgcggagcgctcttgccccaacagtgcttccgaaggatcgtctgatcagcggcccgcgtcatgacaattttcctgatccgagcaacaagccaataattccccacggctcacatcctccagagtga

SEQ ID NO: 55199 - DNA, 276 bp, Oryza sativa
  Clone ID: PAT_MRT4530_57229C.1
atggagcggggcgggccctgcgacgacctctgtcgcttccggattcacctaggcacgagaggggactgcgcgttgcccgctggggacgaggagtttgagtacgcgtcagatggtggtttctccgaggagaaggcttcgttcgtgccgtcgaggatgcctgtggaggggcgttcccgctgccgttcaaggtacctcatcgtgcccctcgggcccgaggggctgggtcgccccgaggccctcgttcgaccgccgcgtggtagccacgtggcagtttga

SEQ ID NO: 55200 - DNA, 2089 bp, Oryza sativa
  unsure (1)..(2089): unsure at all n locations
  Clone ID: PAT_MRT4530_5722C.1
atgcctcctccagtctcctccccgtcggctccgcgcctctcgccgtccgcggcgcgcgcggccgagcagcattgcctccgcctcctcgcggcctcctcgacgcccacgtccctcctccagtcggtcgccttcctcctcaagtccggcctccacgccaactcgctcgtcctcacccggctcttcgccgcctccgcctccgccgcgcccgcgctgctcgatcccctcgtcaccgccctcctccgcccctccgtcccgctcgacgccttcctcgccaacaccctcatccgcgcccacgccacctccccgatccactccctccgcctccgcgccgccgccttcttccccctcatgctccgcggcgccgtcgttcccaacaagttcaccttccccttcctcctcaaggcgtgcgccgcgctcccgggatccccggacgtcggcctccaggcccacgccgccgctctcaagttcgggttcgcgacggatcagtacgtctccaatactctcatacacatgtactcctgctttggcggcgggttccttggcgacgcgcggaatgtgtttgatagaatgcccaaggagagtgccgttacctggagtgcgatgatcggcgggtatgtgcgtggggggctgtcgagtgatgctgtcgatctcttcagggagatgcaggccaatggggtacaggccgatgaggtgacagtgattggagtcctggcggcggccacagatttgggtgcacttgagctggctcgatgggtccgacgctttgtggagagagaggggatcgggaagtctgtgacactgtgcaatgcactgatcgacacgcttgctaagtgtggagatgtggatggggcggtggctgtgtttgaggggatgcagcagcggagtgttgtttcatggacatcggtgattgatgcgcttgcgatggagggtcgtgggaaggaggctgtgcgagtgtttgaagagatgaaggttgcaggtgttccacctgatgatgttgccttcattggggtgctcacagcttgcagccatgctggtatggtggatgaaggctgtggctactttgatgccatgaaagtggagtatggcattgagcctaagattgagcactatggttgcatggttgacatgtttggtcgggctggcatggttgagcgggcgatggaattcgtccgtacaatgcctatacaaccgaacccagtaatatggcgatcacttgtttctgcttgtcgtgcgcatggccgccttgagctaggtgaaagcatcacaaggagccttcttcatgagtacccggcccatgaggccaactatatcatgctctcgaatgtctttgcactaacacagagatggaaggagaagtcagagataaggagagagatgagcaagagaggaatcaagaaagtgccaggctgtagtatagttgagcttgatggagaggtccatgagttcatagccggagatgagtctcacccgcagtacaaggatatataccggatggttgaggaaatggcaagagagctaaggcgcgttgggcacattgcagctacctcagaggtcttacttgatcttgatgaggaagataaggagggtgcacttcagtggcacagtgagaagctggcaattgcatttgcactactgagaactcctcctggaacacaggtccgagtggttaagaacctacgtgtgtgctcggattgtcatgcagctataaagtgcatttcacaggtttatcgacgggagattgtagtgcgtgaccggagtcgtttccatcgcttcaaggatggttcctgctcatgcaaggatttctggtgatgaaattgtgttttacaaggttattctgttttggacaagatgctaatgaattttccanggagctcctgcaagtctcacacatctgcattgcaacacaaaggttttccacagaaaaatgtgatgcttattcaaggacgatggaatcagaattggaatataattcagaaaatatcaattatcaaggttgaacttttcttttgtacatacaccaatagattggatcgatcaatcctgaggcatcattaaattttgatctctcgacagtgtgaggttatggatt

SEQ ID NO: 55201 - DNA, 718 bp, Oryza sativa
  Clone ID: PAT_MRT4530_57230C.1
cccacgcgtccgctcttgtgtgctgagacgaacaacacgtattttttttttttgggtgccgtaagcacaattctgttgtcgcaatatgtttattccacagcaagactttcatgtctttagtcttagtacaaaggtcaggaacttcaatcaaatacaagttacagcccgatcagattttgctgtaaagcatgataaacatgtatacagtagaggcaccatcattcttctttaaacacaatatatccatcatgaccaacaatagtataaacctttgttataaatagtgcccgaatcaccatgtctctcaagctcacatatagcaccctaccagaatggaaagagcttggatcaacagtccaagattatccaagaaattattcaaggctaaaccattcgctccccgatagaggtagggtacttgatactgcttccgtggcccaatgcagacactgctttgcagtggcgctgtggatgcaaccatgcaagaacttcgaagtgcttcgaagtggatattttaccaagtacttgatcattccacgcccttcaacactgagtttgacgcctgaaggtttcttctttggggctttcagctggtgaatttcttgtgtcatactttaggcgggcgtggtcttggacaactggttagacgagccctaattggtcgggatcaatttggactggggcgaataaaagtcaagccaaatttggggtaaaactg

SEQ ID NO: 55202 - DNA, 321 bp, Oryza sativa
  Clone ID: PAT_MRT4530_57231C.1
atgtggcgggtggagcgagcgggaaggggacctaggctgaatagccatcaatgcgcggcgccccaactatccctcactgcgtttaatgcagtaagggcagacgtgcgacgtgaccagtctgtgaccggcctgtcgccggtcacgtcggattgaacgggcggctatgcccccccccacgtcgcctctgtatccagcggagtggaggtagagagaatgacagggctgcctcccgtgccaagcgggcggctgcgctgggtcccactccaggaagggctgctgcttagcttccaagcgaaggcacggatcgtgacctggtcaagg

SEQ ID NO: 55203 - DNA, 239 bp, Oryza sativa
  Clone ID: PAT_MRT4530_57232C.1
atggggatgcctagcgtgcaagacgcattgcgctgcctcccgccgctaatccggccgcactgtgcactgcgctgcctcctaccgctattctcaccgccgaggccaccgcagaagtgtgtgaaggtatatgtggagggagttgagcacaaaaatgttgcatacgtggcatgccatattagcggtcaaacgtggtcaaagaacaattggaccaagggtggggcgtctgcgtcaacgacgtg

SEQ ID NO: 55204 - DNA, 218 bp, Oryza sativa
  unsure (1)..(218): unsure at all n locations
  Clone ID: PAT_MRT4530_57233C.1
tttggaaggtctngnncgtntatcgacgnaattggcatctatgtccacccttgactcccantggnaatagaatnccnacctactacnataactncgnaataatgtncnctggtntngttgtnnttcangcaatcccccncttgtctgtgtacgtnttgcnccnatccgtagtannatnnagttngcgatatatatgttgtccnaannnaaaaaaanaa

SEQ ID NO: 55205 - DNA, 3120 bp, Oryza sativa
  Clone ID: PAT_MRT4530_57234C.1
atgaagattactgcagttggacagttgatcttggttctgatggcttgcagctcacatgcagtcatctgctcaacttttggaaatggaacagatcagctgtcacttcttgaattcaagaaggcaatcagtcttgatccgcagcaatccttgatctcctggaatgatagcaccaactactgcagctgggaaggtgtctcatgcagtctgaagaatccaggtcgtgtcacctcccttaatcttacaaaccgagctctagtagggcacatctctccttcacttgggaacctaacattcctgaagtatcttgcactgctcaaaaatgcactctctggagaaatccctccttcccttggacatttgcgtcgcctccagtatctttacttgagtggcaacacactgcaaggaagcataccaagctttgcaaactgctcagagctcaaggttctgtgggtgcacaggaacaacctaactgggcagtttcctgcagattggcctcctaatcttcaacagctgcaactttcaatcaataatctgacaggtacaatccctgcttctcttgccaacatcacctcactgaatgtgcttagttgcgtgtataatcacatagaagggaacattccgaatgagtttgcgaagttacccaaccttcagactctttatgtgggttctaatcaactgtcaggtagctttccacaagtcctcttgaatctttctactctcattaaccttagccttggccttaatcatctaagtggagaggttccatccaatctcggtagcgctctgcccaatcttgagatatttgaattgcctgtcaacttctttcatgggcgtattcccagttcactgacaaacgcttccaatttatatttccttgagttatcaaataacaatttcaccggattggtgcctagaacaattggggaacttaacaagctccagatgttgaatcttgaatggaatcagctccaagcacatagagaacaagattgggagtttctgcaaagcttgggcaactgcactgagctacaagttttctccatgactgggaaccgtctacaagggcatgtgcctagttcgttgggtaacctttctgatcaactccaggagctacacttggcagaaagtaaactttcaggtgattttccttcaggtatagcaaaccttcagaacctgattattgtggcgttgggtgctaatctatttacaggtgtgcttccagaatggcttggaaccatcaaaactttgcaaaaggtatctttgggtagcaatttctttactggagccatcccatcatctttctcaaatctgtctcaattgggagaactatatttagactcaaaccagttagttggccaattaccaccaagctttggaaccctcccaatccttcaagtattgattgtctcgaacaataatcttcatggtagcataccaaaggagatcttcagaattccaaccatagtgcaaattagcttatctttcaacaatctagatgcacccctccataatgacattggcaaggcaaaacaactcacatatcttcagctttcatcaaataatatatctggatatattcctagcactttgggtgactctgaaagtttggaagacatagagttggaccacaacgttttcagtggaagcatccctgcatctctagaaaacataaagactctaaaagttctcaacttgtcttacaacaacctgtctggatccatccctacaactctgggcaacataaagactctaaaagttctcaaattatctaacaacaacctgactggatcgataccggcttctcttggaaacctacaacttcttgagcaactagatttatcattcaataatcttaagggtgaggtcccaaccaaaggcatcttcaagaatgcaactgctatgcgggttgatggaaatgaaggactttgtggggggtcactggagctacacctactcacctgttctaacaagcctttggattcagttaagcataaacaatctattttgctgaaagtagtactcccaatgaccatcatggtgtcacttgttgctgcgatctctattatgtggttctgtaagagaaaacataagagacagtctatctcttcaccctcatttggtaggaaatttcccaaagtttcttatcatgatcttgtcagagcaactgaggggttctccacatccaatctaagtggcagaggaagatatggctctgtatatcaagggaaattatttgaagggagaaatgtggttgcagtgaaagtcttcaatcttgaaactaggggagcaggaaagagcttcatcgcagaatgtaatgccctgaaaaatgtacgacatcgcaatctagtcactatccttactgcatgctccagtattgattcagctggaaatgatttcaaagccctagtctatgaatttatgccacaaggggacttgcataatttactatactcaactcgagatggtgatggatcttcaaatctgcgcaatgtttcacttgctcaaaggttaagcattgcagtggatgtgtcagatgcattggcatacttgcatcataaccaccaaggaaccattgttcacagtgatataaaacctagccacatccttctaaatgatgacatgacggctcatgttggagactttggactagcaaggttcaaatctgattctgccacatcatcttttgtcaactcaaattcgacctcttctattgcaataaagggaactataggatatgttgctccagaatgtgctgaggatggtcaagtttcaactgcctcggatgtttacagcttcggaattgttctcctcgagatattcattcgaaagaagccgacggatgacatgtttaaggacggactgagcattgtaaagtatacagagatcaacttgcctgagatgttgcagattgttgatcctcagctgctgcaggagttgcacatttggcacgaaaccccaacggatgttgagaagaatgaagtcaattgcctgctttctgtgctaaatattggacttaattgcaccaggttggtcccaagcgagcgcatgagcatgcaggaggtggcctccaagctgcatggaatcagggatgaatatctgagaggagactgaagattgaag

SEQ ID NO: 55206 - DNA, 467 bp, Oryza sativa
  Clone ID: PAT_MRT4530_57235C.1
ggcggtggaggcggaggcggcggggaaggatggcggggaggaggtgagggagtacaagagcgacgcgaggaagctggaggagctgttcaagaagctgaacccgtcggccgaggagttcgtgccgctggcgcgccgccgcggcggcggggacggcgcgcgccggctgtcggcggacgcgcccgtgttcgtgtcccccgcgatcgacttctactcgcaacacccggtgcagcagccgccgccgatccaggtgctccccgtggtggtgggcggtggcgggggcgcgggattggactccagcagcgacggatccaccaacggccagccgaatcgtcggagaaggagtagctttaaccaagggaggaggaggatgggaggccgaccaaggcgaactgattgggaggatagtgtgcggcgaactgtcttagtatctgacattgatcagcatgggactgaacagaagcttgctg

SEQ ID NO: 55207 - DNA, 1899 bp, Oryza sativa
  Clone ID: PAT_MRT4530_57236C.1
gcacgaggcggacgcgcccgtgtgcgtgtcccccgcgatcgacttctactcgcaaacccggtgcagcagccgccgccgccccgggcgccccccctcgcggtgggcggtgccgcgccccccgcacgaggattccaataataaaaatcccccccaggtttcctcgattcgattcttccagcgagctccgttctctcctctcccccctcctcctctcgcgtggttgcgcgtgcgatcggaggcggccgggctcgatcgatccgcgccgagatggttgccgtggcggcggaggccccgatccgcgccgacgccgtgcccgcggcggcggcggcggcggctgcggccgcgccggatgccgccccaggtgagggggcggatgcggccgcggcggtggaggcggaggcggcggggaaggatggcggggaggaggtgagggagtacaagagcgacgcgaggaagctggaggagctgttcaagaagctgaacccgtcggccgaggagttcgtgccgctggcgcgccgccgcggcggcggggacggcgcgcgccggctgtcggcggacgcgcccgtgttcgtgtcccccgcgatcgacttctactcgcaacacccggtgcagcagccgccgccgatccaggtgctccccgtggtggtgggcggtggcgggggcgcgggattggactccagcagcgacggatccaccaacggccagccgaatcgtcgggtaatcgatcgcctaatcgcgctgctgggttcgagaaggagtagcttcaaccaagggaggaggaggatgggaggccgaccaaggcgaactgatagggaggatagtgtgcggcgaactgtctatgtatctgacattgatcagcatgtgactgaacagaagcttgctgaagttttctcaaattgcggacaagtggtagattgccgtatatgtggtgacccaaattcagtgctgcgttttgcctttatcgagtttgccgatgatgttggtgcaagagcagctttaacacttggtggaaccgtgcttggttattaccctgtgagagttctgccatctaagaccgcgattttgccggtgaaccctaaatttttacctcgaacagaggacgagaaagaaatggtgtcaaggactgtgtattgtactaacatcgataagaatgttcctgaagatgctgtgaagagcttctttgaggggatgtgtggtgaagttgctcgactgaggctactgggtgattatgtgcactccacatgcatcgcgtttgttgagtttgttcaagcagactctgctattcttgctctgagttgcagtggcatggtccttggagcgcttcccgtcagggtgagcccgtcaaagacaccggtccggccccgttcgccccgtgtgacgtcgcactgaaacccggctctctcatctgaagccatcgtccagggcagcaaagcctcctctctagtctgtgtggccttagagaccgtctgtcgcgtcgcggatcagtaattgtcgtcgaagagagtttgtccttttggttattctactagtcttagcagaaggccccctacataccgcgctgatgtgttcttggatcagacagagaccaatctgtatgttctccgggagctctattttgaccccctctcatctctcctctgccccccaacttatcacccccttcccttttgttattttgttatcgatggatgctgtagcggcctttgacaggcattggaacaaataatgtctatggcttgtcctaaactagtatattgcaaccagttacggcccgattgcgcaatagacctaactctttttcttgctctgttctgcaggggtctcggcgttacacgggttgttgccagaagagattctgtggtagttcagggtgaaaatgaagcggattcaaacggatag

SEQ ID NO: 55208 - DNA, 405 bp, Oryza sativa
  Clone ID: PAT_MRT4530_57237C.1
ttctttctcctttaattcattatcctttgcatgcccctctccagctagctaagatgagtccgaggattcagcagctggccgctgtgttgttggcggctgttgtcgtcgtcgcagccgcccaggatgaacctgcagcagcaaaaaactaccaaactcaatgggatacagtaatgtcaatacttaactgtaagagtgattcgttaatcccaagctacatctgcagcgtgattagcaaaagtcgctggggttgggcgtcagatgatcccaacgacgacgaccagtacacgccggatcatccgctgccggcgccggggcggggggcggcgggccgtgggtccgcgatgaccaagcttgaacctgaccaagtacgtggacgcgctgtcgcggatagccaagattcggggc

SEQ ID NO: 55209 - DNA, 159 bp, Oryza sativa
  Clone ID: PAT_MRT4530_57238C.1
atggcgcggcacatgcgacccgctgcgcacgcccagtcagcccagaggccacgggccaacagcagcagcagcagcagccgtggcccgtggccggcgtgcatatgcggcagcgctatctgcaatgcaagtttgcatcttggactgcactgccccggctag

SEQ ID NO: 55210 - DNA, 237 bp, Oryza sativa
  Clone ID: PAT_MRT4530_57239C.1
atggctacacaactttatcgctgggcaccttcatcttcattgctggttgacctgactgctgccgactggattcttcgcctccacggttgtgcaacttcatcacttttgattggtatcactatcttcactaccaccaatatttttgccacctctggaggccctctagggggcatgagcacatatgatcatcagatccgcctcagggaagccaccgacgccgccgttgggagggtgtag

SEQ ID NO: 55211 - DNA, 865 bp, Oryza sativa
  Clone ID: PAT_MRT4530_5723C.1
ccccctcccgcgatctcccgtggtccctagccacctccccgccgtcgtcccctctcccgtgccgccggccgtcttcagccgcccctgccgccgcgttagcacgccggccagctgtgccgtcgcctcctccagcgtcgcagccgcctcctctccgccggccttccctctgtttcccgcgaagacctccggaagtgcatccccgccggcaacagtggcgttgccaccactgttccgcctccggccgcctctgccgcgtcccctgtgcgccggccgacgtcgccaccacctctcccggcaccggaacgccatcctcttccccggccaagccacggcatcgcccccccttttgccgtgccagtgcgccggccgacgtcgccgtctccacctccggcatcgcagcggcaaggtcgccctcggcctcgtctccccttcgaccgaacccctccgcggtccatcctcgtcatctctattcgttctcgtcgtcgacgtcccgtcggtcgcccggctcgtcgtctcgcggcgccgcctccgtcgtcggcatcgcagtggcgtgttccacgccatcctcgtcttcgtgcagccgctccccatcatcgtcttcgtcctcgcctccgcgtcgtcaagcctcgtgccggccgtgtctcgccttcgttcaaggatcgccgctgaagtcgttcccttgccatccgtctccgccgcgcccgttcgtcgttgtctttcccacgcctcgtcgcgtggtggtaaggatctctcctctcgctgccccgtcctcgtcctttcggtgtcgccccgtacccgttgtgcggttgtcgaccccggtacccgtgtaccggtgtcggtagtcgttcacgtgtgcgggtggtga

SEQ ID NO: 55212 - DNA, 461 bp, Oryza sativa
  unsure (1)..(461): unsure at all n locations
  Clone ID: PAT_MRT4530_57240C.1
gcacgaggctgtccgcgctctaggctccacctttctccaccaccgcctcccctcttcgccgcgagtgccgccgccccacctcgccgccacggccacagcctccccnttctcgccgcgtcgcggggccctccctcctcgccgcctcctccttctccaccaccgcctccgctgtctctgccaccgcctctgcagccgggctcccctcctcgacgcttccaccgcgccacctcgctcctccgccaccggccgtgatgcgcgatgacgaccaacgatgatggcgacgcctatgggatctgccattggcttggcccgggcgcgtggatccgccgctggctggtctcggggaangggganggggagctgggtggcgaccagggggggaggcgccgccgcacctcctcgctctcccttcgtcgcaccgatgacgatggcgacgacggcgccgcgtgtggtaagcccgg

SEQ ID NO: 55213 - DNA, 485 bp, Oryza sativa
  unsure (1)..(485): unsure at all n locations
  Clone ID: PAT_MRT4530_57241C.1
gggtagggggtccacgttgttcgtcaactgggcagacatcatagngcatcanccaccacctgggcccccagacatagtattgggtcagcgcnangatttagaggttactatataattcacaggtggaacccaccccgcgtacaaaacacccaagttaagccaaacaaaagccaagaagattgcctggcctcaattaaaaccctttgaaaaaacaattgccccacccccaagacaaaggggaaaagcaaaaccaccaaggaacaatgggaaaaagcaaattccctggtatgaaatgccacacatattcaaagatctcgcagcatnatttgtgggataaaaatactctgcgaaagccaaccataaactgaatacctacttgcaaaaataggcccctaataaccaattgaaacgaaacaccccaaaacccgaacttggggaaacactggnaggaactttgggtctctacaaaaggttgccaccgntnn

SEQ ID NO: 55214 - DNA, 607 bp, Oryza sativa
  unsure (1)..(607): unsure at all n locations
  Clone ID: PAT_MRT4530_57242C.1
aaaaaaatnttganccatcanccaatataccanccataaatattcanttnaatgcaaagcnacaaatnccagggattatttactgcaggagggggcattttgcagggaccantncttttacctttttttttaatcaaatttgtaggtcaatggcaaaaaaaatttctaatcaaaaaacggcacggtaatatnaatcnctaaacnatcttgcnatcnaacaancncncagtgtttactgccctgtgcttttnctaaaacttcaaancantntttttgcatntgggacaggtnttcttcncaaccagccattgcctgacgcatccaacatggaantcatgtccacagtccaatgtccnaaatctccccntcaacatnccttcctggcaaaaacagcatggtctcctcccanangctcccacccccanaanaaaattcctttctttagaacttgtccctctccccctgaggccgtggcaanatgctatccttctccatgccanaccccanaaatttttntnntnaggcntccnntttttntaatcacccccaaaangaccactaattcccccggacattcaccttcggattcataaccnccnccgcccac

SEQ ID NO: 55215 - DNA, 219 bp, Oryza sativa
  Clone ID: PAT_MRT4530_57243C.1
atggagcccaagaggcagatcgcatcgagtgccgaagacccaaacggcgcgacatacaccacctcatgggcatcatcgagttcctatgccacgttcgtgggtaaagggtggctggtgatctactacgcctatgccatgaggtatgtggaggacatcaggggctcagactgcgaggagttcaggttggagcagtggatgaacaaagccggcgtgttttag

SEQ ID NO: 55216 - DNA, 333 bp, Oryza sativa
  Clone ID: PAT_MRT4530_57244C.1
ttttatatttcacccacaggaaccaggcgtgatgggggagataattgaaactgcatggtcagtacgattccaccactgtaagaactgaaaattccttaccctctttattttaacctcctcccaccgaataaacaagcgacaacacattgcaccgattgggccgacgcccagaccttagtaagggactccaagaacagtagagtactcaaacacatagcctcatcactgcgttgtggaaatgctcctaacacccggcgaccgaattagctatgtctgcatgcaagcctggatcataattctttgggggaaacaaacccggcgggcccgaattac

SEQ ID NO: 55217 - DNA, 344 bp, Oryza sativa
  Clone ID: PAT_MRT4530_57245C.1
cccgtcgccctcccgcaacgcgacctatggtcccgcggcaacccgaccagtcccctcgcgaccccacgggcgcgccaacgagcgcagccacacagataccccacccaggccgccaccaacaggggagccccacaccacttcgaaaacgattcaactcaggagatcccgagaagcggagcgcggaagaagacaagaaccggaagacctcgagaatccaaggcaagccagagggggagtctccccagggggccctccggacaggaggacacatgaactggcaaaggaactccggaggcacgtccgtgtggaggcatcgccttgcgagatacaacaggcggtcctag

SEQ ID NO: 55218 - DNA, 508 bp, Oryza sativa
  unsure (1)..(508): unsure at all n locations
  Clone ID: PAT_MRT4530_57246C.1
ttttgttgaagaggagctgtatggacggacgtctcacgagggtctttttcaactagtgtttagtagtttggagtagtgtgggcgcttgctgttgagatgttcagatggcatcttctctcattctttctttgtccttttttcccttgcatcgccatcaaggcatcgcccatgctgtggatgcatttgacagaaaaaatgacgattccatcttacataacactgtgaaaaccgaatattcatgattgagaatccacattatcgatcaagacaacttgtgggaatcgagatcgaatttgtgaccatttgcatgacatttttggatccttgattatcatgccaaattgtttctggttacatacacanaattttctcagaacatgcatgccaatgtatcatactgatcgaattcttcagagctgagctaacctcaagttgcatatgacttcagatcaccaaattcacctgcggcgggttcgtgatggggcttccgttcaaccacgcgttggcg

SEQ ID NO: 55219 - DNA, 2060 bp, Oryza sativa
  Clone ID: PAT_MRT4530_57247C.1
atgccgcgcagcagccggccagccttgtcgcggcgcaccgacaagaacgccctcgccacgcacggcgacgacaccaccacgacgccgcaggcgcccatcttgagggtagatagggtagattatgaggagagacaaggccgtcccatcctggaaggcaaagtggtgcccaccggccaccgtccacttcagcaccatccgggagtgaccatacgcgagaagcatgaaatcggccttgccaagcgctacggaagcgtgaagcgcgccttattagcacgcgccgcttgcagcctcctctgtccagggctccaggtgttctaccggacgcagaatgcatccaacctaagctacccaacacacctgacgacttgctataagtatcccctttacagccactccatagctcatcaagcagttcgaacactccatttggcgggcgcgccgcgccggccgcccggggcgcggacgcgcgcgcccgcggggtggtaggggtgggggcgctcggcggcggctacgctcctacccaagcattccacaagcttgccgttttccactgacagctcaagtgctcgtgcaacattagctgatcagctcgtgttcccaaccgcgacaaagcttcacagatggaggctcagaaccaagaggtcgctgccctggtcgagaagatcgccggcctccacgccgccatctccaagctgccgtcgctgagcccatccgccgaggtggacgcgctcttcaccgacctcgtcacggcgtgcgtcccggcgagccccgtcgacgtggccaagctcggcccggaggcgcaggcgatgcgggaggagctcatccgcctctgctccgccgccgagggccacctcgaggcgcactacgccgacatgctcgccgccttcgacaacccgctcgaccacctcgcccgcttcccgtactacggcaactacgtcaacctgagcaagctggagtacgacctcctcgtccgctacgtccccggcattgcccccacccgcgtcgccttcgtcgggtcgggcccgctgccgttcagctccctcgtgctcgccgcgcaccacctgccggacgcggtgttcgacaactacgaccggtgcggcgcggccaacgagcgggcgaggaggctgttccgcggcgccgacgagggcctcggcgcgcgcatggcgttccacaccgccgacgtggcgaccctgacgggggagctcggcgcgtacgacgtcgtgttcctggcggcgctcgtgggcatggcggccgaggagaaggccggggtgatcgcgcacctgggcgcgcacatggcggacggcgcggcgctcgtcgtgcggagcgcgcacggggcgcgcgggttcctgtacccgatcgtcgatctcgaggacatccggcggggcgggttcgacgtgctggccgtgtaccaccccgacgacgaggtgatcaactccgtcatcgtcgctcgcaaggccgacccgcgtcgcggcggcgggctcgccggcgcacgcggcgcggttccagtggtgagcccgccgtgcaagtgctgcaagatggaggcggccccggcgcgttccagaaggcggaagagttcgccgccaagaggctatccgtctgagtgcgtgcatagtaatcctggctgtgtctcgctgtccgtgacatcggccggctgaaacattattggtatcggtttgtgtttgtgcttctgtggggttcttgttcttgttgtgtggatgatgctaggcgcctgggcattgatccgtgccaatgcattcgtgtttcggtgcaactctaggggacggacgatcgaaaggcgcactatattatggcaataaatcatttgattatacttatgctgcatttgcgaagctaaggtatactatgcaagccatatgtttgtgttcgtacgtgttgtttgggacgtacagttgtgttgttgtacgtcgtgaagtactgaagtgttcacagtagatcacaagttcacagcaatcaatgaggaccctgtaagccagtgtaaacgaggaacatgccatctgtgtatgacagtgagaaattatataagaaaaacattttgtgac

SEQ ID NO: 55220 - DNA, 185 bp, Oryza sativa
  Clone ID: PAT_MRT4530_57248C.1
cggacgcgtgggctctcgtgctcctcttcctgatggcgatctcgaaggcttggatctcgctgctgctcgcgctcgccgtcgtgctgtcggcgccggcggccagggcggaggaggctcctaaagcggacgactacgcccacaggaacgagctctccagggccaacgaagcaccggcgcatcagcaa

SEQ ID NO: 55221 - DNA, 676 bp, Oryza sativa
  Clone ID: PAT_MRT4530_57249C.1
gcacgaggggaatctcaaaatcaagcggaagcaatggaggagaggaagtggagatcaacgtcgtcgtggccgccgatgctgccggtgatcatgatggccatggcgatcttggcggtgtccttcaacggcgccgccgcccagccgccgccggacaccaacgtgctgtgcgtcagcaagtgcgggacgtgccccacggtgtgctcgtcgccgccgccgccggcgtcggggaactataatccggtgctgtcgccaccgaagggcaccggcagcggcagcgttggtgggtcgtcgtcgtcgccttcggcgccgttggcgaagggagggcagccaggcggcagcaactactactacttcttcacctccggcggcagcagccatggctgcgcggcggcgctgctcctgccgccgcttgtgtccctcgccgtcgccgctctgtcgcagtgatcgatcgatcgtgtccagtatgatcacagtagctagctagctatagctagtgggttaattagctgcttgtttaatttgcacctatatatttttcttttgctgatcccgatcgagttgttgatatttcgtgaattacttacttattattacctgtttaatacgaaacatgcagtttaattttcagatcgaaatgtacttaactttttttaaagaaactgtccctttggattgg

SEQ ID NO: 55222 - DNA, 637 bp, Oryza sativa
  unsure (1)..(637): unsure at all n locations
  Clone ID: PAT_MRT4530_5724C.1
ggaccacgcaggtggtccaccgccggtccacgggaccgacggcccagatcgcccttgggccgatcggacgggcggcgatagaggcggccgcccagggctagcagcgatggcacgcgcgcgcgaatgcgttgccggtaatggcatccggcggtggaggcgacggcgcaaaagcgacgcgacagcggcggcagcggacggcggcaacgaccgaaggcgacggcgagcacgggcggcggcgacgcacggggaatcggggaaggaaaggaaaggggagggagtcctcaccgaatgggacggcggcgaccggcgaagaggagcgacggagggaggtcgacacgcggcggacggcgaccgggacgacctaaagaacgaaaagaaatagattagagaggaagagaggggccataggagacgggaatgccggccgaaggcggcggacatggcaaccctcaccgtcgcacgatgggaatggcgctccggtggcggacctcgacgaaggaggggtggacgtggtggatctncgccacgctaacccgacngcngcgacggcgccgtgcggcggcgagcctatcggcgggtagcggcggccggagtagcggaaaccgcggcngccggtggttgcaccgcgcgggaccat

SEQ ID NO: 55223 - DNA, 600 bp, Oryza sativa
  Clone ID: PAT_MRT4530_57250C.1
atggcgcacatatatacccaaattaaatttactgaatcactgatttacataacgccgccggctgctgctccagccgcatctcgccaaacgaagaccgccggcaaccatctcctcgaagccacaagccaccggaacaccgctgtcactgtcaagaccaaggtgaagaccgtccacccgttcgttgccgccaaagagcgtcgaacgccgccgtcgccttggacccgacctcgtcgctgtttgaagctccctttgccgtccgtcgtcgtcgagctgcccctcgtcctgtgccggccgaccatctaccatggacgcatgtgtgcattatcattccaggatctcttcttcctctcgcaggatgtgacagtggggttgggaccgaacggcgagctccgatacccgtcgggagcgacgggaggtgggcgagttccagtgctacgacacaagtacatgctgcagcagctgaggcggcacgcggcggaggctggtgacccgctgtgggggttgtcggggccacgcgactcgccggacgcgtgcggcttcttcaacgatgacggcatcctccccacccgccggccctgcgcaaagaagcgagagaaatag

SEQ ID NO: 55224 - DNA, 669 bp, Oryza sativa
  Clone ID: PAT_MRT4530_57251C.1
atgggcatgtatgcaattgacctcgctgacaaacccgcggtcttgcagccgcatctcgccaaacgaagaccgccggcaaccatctcctcgaagccacaagccaccggaacaccgctgtcactgtcaagtgtgaactcgatcgatctactccgcctccggccaagcctcaccggcattcccatcgacgccaagattagatgtcgcctccgttggattcgcaggaccaaggtgaagaccgtccacccgttcgttgccgccaaagagcgtcgaacgccgccgtcgccttggacccgacctcgtcgctgtttgaagctccctttgccgtccgtcgtcgtcgagctgcccctcgtcctgtgccggccgaccatctaccatggacgcatgtgtgcattatcattccaggatctcttcttcctctcgcaggatgtgacagtggggttgggaccgaacggcgagctccgatacccgtcgggagcgacgggaggtgggcgagttccagtgctacgacacaagtacatgctgcagcagctgaggcggcacgcggcggaggctggtgacccgctgtgggggttgtcggggccacgcgactcgccggacgcgtgcggcttcttcaacgatgacggcatcctccccacccgccggccctgcgcaaagaagcgagagaaatag

SEQ ID NO: 55225 - DNA, 3197 bp, Oryza sativa
  Clone ID: PAT_MRT4530_57252C.1
atgcctcctactctcctcctcctcctcctcctcctcccaccctccctcgcctcccccgaccgcgacatctacgcgctcgccaagctcaaggcggcgctcgtcccatccccctccgccaccgccccaccgccgctcgccgactgggacccggccgcgacctcccccgcgcactgcaccttctccggcgtcacctgcgacggccgctcccgcgtcgtcgccatcaacctcaccgccctcccgctccactccggctacctcccgcccgagatcgccctccttgactccctcgccaacctcaccatcgccgcctgctgcctccccggccacgtccccctcgagctccccaccctcccctctctccgccacctcaacctctccaacaacaacctttccggccacttccccgtccccgactccggcggtggcgcctccccctacttcccctcgctcgagctcatcgacgcttacaacaacaacctctcagggttgcttcctcccttctccgcttcacacgctcgcctccgctacctccacctcggcggcaactacttcaccggcgcaatcccggacagctatggcgacctcgccgcgctcgagtaccttggactcaacggcaacacgctctccggccatgtccccgtctccctctcccgcctcacccgcctccgcgagatgtacatcggatactacaaccagtacgacggcggcgtcccgccggagttcggcgacctcggcgcgctcctccgcctcgacatgagcagctgcaacctcaccggccccgtcccgccggagctcggccgactccagcgcctcgacacgctcttcctgcagtggaaccgcctctccggcgagataccgccgcagctcggcgatctcagcagcctcgcgtcgctcgacctctccgtcaacgacctcgccggcgagatccctcccagcctcgccaacctctccaacctcaagctcctcaacctcttccggaaccacctccgcggcagcataccggacttcgtcgccggcttcgcgcagctcgaggtgctgcagctgtgggacaacaacctcaccggcaacatccccgccgggctcgggaagaacggccgcctcaagacgctcgacctggccaccaaccacctcaccggccccatcccggcggacctctgcgccggccggcggctggagatgctcgtgctcatggagaacggcctgttcggccccatcccggactcgctcggcgactgcaagacgctcacgcgcgtccgcctcgccaagaacttcttgaccggcccggttcccgccgggctcttcaacctcccgcaggccaacatggtggagctcaccgacaacctgctcaccggcgagctcccggacgtgatcggcggcgacaagatcggcatgctgctgctggggaacaatgggatcggtggccgcatccctccggccatcggcaacctcccggcgctgcagacgctgtcgctggagtccaacaacttctccggagcgctgccaccggagatcggcaatctcaagaacctgtccaggctcaacgtcagcggcaacgcgctcaccggcgccattccagacgagctcatccgctgcgcctccctcgccgccgtcgacctcagccgtaacggcttctccggcgagataccggagagcatcacgtcgctcaagatactgtgcacgctgaacgtgtccaggaacaggctcaccggcgagctcccgccggagatgtccaacatgacgagcctcacgacgctcgacgtgtcgtacaacagcctctcgggccccgtgccgatgcaggggcagttcttggtgttcaacgagagctcgttcgtcggcaacccggggctgtgcggcggccccgtggccgacgcgtgccctccgtccatggccggcggcggcggcggcgcggggtcccagctgcggctgcggtgggactcgaagaagatgctggtggcgctggtggcggcgttcgcggcggtggcggtggcgttcctgggcgcgaggaaggggtgctcggcgtggcggtcggcggcgcggcggcggtcgggggcgtggaagatgacggcgttccagaagctggagttctcggcggaggacgtggtggagtgcgtgaaggaggacaacatcatcgggaagggcggcgcggggatcgtgtaccacggcgtgacgcgcggggcggagctggcgatcaagcggttggtggggcgcggcggcggcgagcacgaccgggggttctcggcggaggtgacgacgctggggaggatcaggcaccggaacatcgtgaggctgctggggttcgtgtcgaacagggagacgaacctgctgctgtacgagtacatgccgaatgggtcgctgggggagatgctccatggcgggaagggggggcacctcgggtgggaggcgagggcgcgggtggcggcggaggcggcgtgcggcctctgctacctccaccatgactgcgccccgaggatcatccaccgcgacgtcaagtccaacaacatcctcctcgactccgccttcgaggcgcacgtcgccgacttcggcctcgccaagttcctcggcggcgccacctccgagtgcatgtccgccattgctggctcctacggctacatcgcgccagagtacgcatacacgctgcgagtggacgagaagagcgacgtgtatagcttcggtgtggtgctattggagctcatcaccggacgccgccccgtgggcgggttcggtgacggcgtggacatcgtgcactgggtccgcaaggtgaccgccgagctgccggacaactccgacacggcggccgtcctcgccgtggccgaccgccgcctgacgccggagccggtggcgctgatggtgaacctgtacaaggtggccatggcgtgcgtggaggaggcgagcacggcccggcccaccatgcgcgaggtcgtccacatgctctccaacccaaactcggcccagcccaatagtggtgacctcctcgtcaccttctgaaccccaaacttaacggtattgtttgctgttaatgtgtgcgcttaattagcggctaattaattttggcttagctggtacttttgccgcgtgtggttgacgtgtacaataacaggcggattactactgcttttctgctatgcgtaatagctaaatgaatatgtgcatattagtaaagttgaagttgaaatgtctaaaaaaaaaaaaaaaaaaaa

SEQ ID NO: 55226 - DNA, 4137 bp, Oryza sativa
  Clone ID: PAT_MRT4530_57253C.1
atggtttcgcggggcctcttcggctggtccccgccgcacgtccagcctctcactcccgtctccgaggcctccgagccgccggaatccccctctccctacgccgctgacctcgccggggacgccgcgccgcctccggaggatgacgccgccgccgccctcgacgatggggacgacgagcccgatccgccccccgccgccgtccccttcaagcgcctcttcgcctgcgccgaccgcctcgactgggcgctcatgtccgccggcgcccttgccgccgccgcccacggggtggccctcgtcgtctacctccacctcttcggcaccgccatccactcgcttcatggccgccacaaccacgaccttttccaccacatcaaccaggtttcatgctggattcttactggggaaaggcagacagcagtgataagatcaaagtatgtacaagtgttgttaaatcaagacatgagtttctttgatacctatgggaacaatggtgatattgtcagtcaagtgctgagtgatgtcttactcatccagtctgcgctgagtgagaaagttgggaactacattcacaacatggctaccttttttggtggtcttatcatcggtttggtcaactgttggcaaatagctcttttgacattggctactggtccgttcattgttgctgcaggaggaatatcaaatatttttctccacaggcttgcagaaaacattcaggatgcgtatggtgaagcagcaagcgttgccgaacaggcaatcttatacattaggactttgtactcattcacaaatgagaccctcgcaaaatattcttatgctacttcacttcaagcaacactgcgctatggaatcctgataagtctggtgcaaggtcttggtcttggatttacatatggccttgccatatgttcttgtgccttacaactttgggttgggaggttccttatatctcatggaaaagctaatggtggtgaagttgtagtagccctgttttctattatcctgagtggcctgggacttaatcaagcagcaacaaacttctattcttttgaacaaggacgtatagctgcatacaggctctatgaaatgattagccgttcaacctctgttgtaaaccaggatggccgtaccttaccttcagtgcaaggcaacattgagttccgcaatgtctacttcagttatctatcccgcccagaaatccccattttaagtggtttctaccttactgtacctgctagaaagactgtcgctcttgttggcagaaatggttcagggaaaagcagcattattcctctcatggaacgtttctatgatccaactttaggtgaagtgcttttggatggagagaatataaagaacctgaagttagagtggttaagaagccagataggacttgtgacccaggaaccggctttattgagcttgagcatcagggaaaatattgcatatggaagatctgccacaactgaccagattgaggaggcagcaaagacagctcatgcacatactttcatcagttcacttgaaaaaggatatgatactcaggttggtcgggctggcctttcactgacagaagaacaaaagataaagctctccattgctcgtgctgtgctttcaaatccatcaattcttttactggatgaggttactggtgctcttgattttgaggctgagaaagctgttcaggaagcactagatattctgatgcttggtaggtctaccatcatcatagctagacgcctcagtcttatcaggaatgctgattatatagctgtaatggaggaaggtcagcttgttgagatgggaacacatgatgagttgttaaatctggatggcctttatgcagaactacttaggtgtgaagaagcagcaaaacttccaaagcggactccgataagaaactacaaagagcctagctccttccaaattgaaagggattcttcagcaagtcacagcttccaagagtcatcatctcctaatatgtcaaagtcgccgtcacttcagaaaacacacggttttcttgcattccgtaattcagatgcaaatcataactcacacgaatcaccaaatattcaaagccctccttccgaacaaatggcagaaactaggttacctacagttgcttctgagagagctccatccatcaaaaggcaggacagttttgaaatgaaattgcccgatcttcccaaaattgatgtcccactacaccgacaatcttcaaatacttcagatccagaatcaccaatatcaccactattgacttctgatccaaagaatgagcgctcgcactcaaaaactttcagtcgtcctcttgatatgtttgacaattttcatgctgaggagtcaaagaagcagaaaacaaaagctccatcgttttggaggcttgtagaacttagtcttgctgagtatttttatgctctattagggagtgctggtgctgcttgctttggttcatttaatcctcttcttgcttatacaatatctttaatagtggtggcatactatagaattggtgtacgtgatgtgcatgatgaagtcaataagtactgctcattcattgttggcatgggtataataaccgtgctagctaacttcttacagcacttctattttggtataatgggagagaagatgactgaacgtgttagaaggatgatgttttcagcaattttgcgcaatgaagtagggtggtttgatgaagaagaaaacagtgcagacatattatcaatgcgactcgcaaatgatgctacttttgttcgtgctgctttcagcaacaggctttctatattcattcaggatacagcagccatttttgtggcacttcttcttggcatgttgctagaatggcgtgttgctctggttgccctggcaactttgcccatccttgtaatttctgcagttgcgcagaaaatgtggctttctggcttttcaagaggaattcaggagatgcacaggaaggcttctttggttcttgaggatgcagtcaggaatatctatactgttgtggcattttgtgctggtaacaaaataatggaactttacagactgcagcttgggaatattctttggaaaagcttggttcatggaatgggtattggttttgcctttggcttatctcagttccttcttttcgcctgcaatgcacttctgctgtggtatacagccgtagctgttaagaatgggcaccttagtctggtaacagcacttaaagagtacattgtcttctcttttgcgacttttgcactggtggagccatttggccttgcgccatatattctcaagcgtcgaaaatctctgacgtcggtatttgaaattattgatcgtgcacccaagattgatccagatgatgcaagtgggctaaaaccccccaatgtctatggtagcattgaattcaggaatgttgatttttgctatcctacacgccctgagacgatggttttgagtaatttcagccttagagtcaatggaggacaaactgttgctgtggtaggtgtatctggatcagggaagagcacgataatttctttgatagagagattctatgatccaaccgccgggcaagttttattggatggccgtgatctgaagctgttcaacttgagatggttgcggagccacatgggtttagttcctcaagacccagttatattctccacaaccataagggagaacataatctatgcaaggcacaatgcaacagagtctgagatgaaagaggcggctaggattgcgaacgctcaccatttcattagcagtttgccacatggctatgacacacatgtgggaatgaggggagtggatttaactcctgggcagaagcagcgaatcgccattgcccgtgtagtgctgaagaatgcacccattttgctgcttgacgaagccagttctgcaattgaatccgagtccagtagagtggtgcaggaggccctcgacacattgattatggggaataagacgacagttctcattgcacatagggcggcaatgatgaagcatgtggataacattgttgttctgaatggtggaaagatagttgagcagggaacgcatgattcactggtgcaaaagaatgggttgtatgtcaagttgatgcaacctcatttcaccaaaggattccgtcaacgtagactaatataa

SEQ ID NO: 55227 - DNA, 345 bp, Oryza sativa
  Clone ID: PAT_MRT4530_57254C.1
gtatgtaaatattacattatggtaaaccatgttgaggagctagactagcatgccttattaacacggagatacgcaccatatcatgaggattaacatataaatctgaagctacatgcaattaaggcagtggagcaaaggaggaaggatgatagaagactccaactctccagggatggaaatgacatcaggtcgccttgcataactctgcagccagatggatgcacgcctgctcggagaacaccgtgcggggctcgtcgtacgatcagtagtacctgtcgagtacctccgacgccgtacgagaaacagcatcacgagccgatgatgagagcttggcctctgggtaca

SEQ ID NO: 55228 - DNA, 2721 bp, Oryza sativa
  Clone ID: PAT_MRT4530_57255C.1
atgtcctccattattcttactcagacaccatcagtaccacgacgcctactgctcctcctacagctctcgtttctgctcctcctcagctccgccagcaatgctgtcacgccggctggggtgccatgccggccagaccaggcggccgcgttgctccggctgaaacgctcattcgccgtcaccagcaactccgtcaccgccttccggtcatggcgggccggcaccgactgctgcggctgggagggcgttggctgcgccgccggcgccggcgccaacaatggccgcgccgtgacatcccttcatctgggtgactggggcttggagagtgcaggcatcgaccctgcactcttcgagctaacctctctggagtatctaaacctcgcctataacaacttcggtgggtcaaagattccttctgatggatttgagcgtctcatcaggctcacacatctgaatctttccagctctggattcaccggacaggtgccagccagcatcggcaacctgacgagtttggtatcactcgacctttccacttatttcatgatcgtggagatacccgatgatgcttatgagacgcttatatctcaaactgctaattccatatggctcatagagccaaattttgaaacctttatctcaaaactcacaaacttgagggatctccacctcggctatgtggacatgtccaacagtggagcgcagtggtgtgatgctctagccaattcctctcctaatcttcaggttattagcttaccattctgttcaatctctggccctatctgccgctcactttcccttttgcagtctcttgctgcccttaacttgcaacataacaatctgtctggtccaatcccagacttcttgtcaaacttatccaatttgagtgttctccgacttaaccataatgagcttgaaggatgggtttctccggcaatctttggacaaaagaatcttgtcacaattgatctccaccataatcttgggatctctggtattctcccaaatttctcagctgacagtaggctggaggaattgctcgttggccagactaattgctcgggtttaataccaagttccattggaaatctcaaatttttgaagcagctagacctcggtgcgtctggtttttttggagagctgccctcatcaattgctgtggtcgatggagaatataactcatcagtttctcttccccaaattgtgctcctatatttaccgggttgcagcatgtctaagttccctattttcttgaggcaccaatatgaaattaatggcctcgacctttccgacaacgaaattaacggtactataccgcattgggcatgggaaacttggaattatatttcccttttgggcctatccggcaatagatttacgagtgtgggatatgaccctcttcttcccttacaagtagatttgcttgatcttagcaataacatgcttgaagggtccattccgattcctcgaggctcttcaacatctctcaaatattcaaacaatgggttctcatccatgccatctaattttagtgctcatcttagagatgttacctttttcatggccgacggaaatgaaatctctggaaatattcctttggagttttgcagtgctaagagtttacaactccttgatctgtcttacaacaacttcaatggatcaatctcttcttgtttaatggacagtgttagcacgctgcaagtattaaatctgaaaggaaatgaacttcatggggtgttgccagacgatatcaaagaaggctgttcatttcaggcattagatattagcggaaatttgatagaggggaaactaccaagatcattagttgcttgcaaaaacttggaggtatttgatgttgggttcaatcaaattagtgacacctttccatgttggatgagtactcttccgagacttcaagtcattgccctcagatctaacaagttcttcggacaggtcgcacaatctgctgtagagaaaaattcttgtgaatttccagctgcaagaattattgatctagcctcaaacaacttctcgggtccattgccacaagatcaatggtttaagaaattgaagtccatgatgatcggatactcgaatacgtcattagtcatggatcatgaagtaccacgagtaggaaggtacaaattcagtactacgatcacatataaagggagcgccgtcacattgaccaagattttgaggacatttgtattcatcgatgtctcagaaaacaaattccatgggagcattccagggaccattggagaacttattctgttacacgcactcaacatgtcacacaacttcttgacaggaccgattccatctcaactcggccatttgaaccagttggaggctttggacatgtcctcaaatgagctttcaggagtaattcctcaggagctagcatccttggacttccttgcaatattgaacctgtcatacaataagctagagggaagaataccaccacagtcacctcatttctctacattctccagcatctcatttctggggaacaagggtttgtgcggccttcctctgtcgacaggatgcagcaacacgacatctctgaatgtgatcccttctgagaagaatcctgtagacatcgtgctattcctttctgctggactgggattcggccttggatttgccattgcaattgtagtagcatggggaattcccattaggaaacggtccacagtaaggcagagagctctctga

SEQ ID NO: 55229 - DNA, 555 bp, Oryza sativa
  Clone ID: PAT_MRT4530_57256C.1
atgaagaaaaatgccaacgctgatcatcaccgtggacctgcagtgctgccgctgcaacatcaagatccagaaagtcctctgctgcatgcaagagcgaggcgagttggagatcgagaagatcgtgtacgagaaggacacggtggtggtgtccggcccttcgacgccgagaagctctcctgcaagctgtggtgcaaggccggcaagatcatcaaggacatcaagatcaagccgccggaagagaagaagaagcccgaacccaagcccgatgagaagaagcccgatcccaagcccaagcccgacccatgcaagctcataccattcccgtacccttacgtgtacccgccgccgccgccgtgcggcggctgcgccaccccgcactgctgcgactgccaccccaagccacctccgccggcgccggcgccagcgaagccagcgtgcggctgcccggcttggtcgtcgccgtgccactgctacccgccgccggccatgccgccgtacccgccggtgctcgtctgcgacgagggcccgcagtacggcgcctgcgccgtcatgtag

SEQ ID NO: 55230 - DNA, 2176 bp, Oryza sativa
  Clone ID: PAT_MRT4530_57257C.1
tgttccattctcatttcccaaagaccgcaaaaaaattttccttccatctctcgccgcatttccctttccccctatgcggatccgctcccttgcatccaccgccattccccgcgtctgatccgtcgtcgttgtggaggatgagggaagggggagcgggcgaggggcagggcgcggccgtggatgaggcgacggggttcgaggtcgggatcgtcgtgcccaagctctaccgcggcgctgcggccgggtgcggcgaggtcgagaactgcgtggcgcggctggtgcgggagctggaggacgtagggctgatcgtcgagcgcgtccgcggcgtccccgcggagttcatcaagctgtctgcgcccatggggaccctggggagagttgcagcggagatgaacatgaagaagctaacttatatcggaatggaactgcagtttgaatgggaccaggttggagcattcgtcaggcagcccgacgggtccctgtttagctggcgagagcggtttgcctgcttccggcacttgatatacagcatcgtgaacaagaccgattctgatataactctcagctttgacgataaagagttccactggactcaaaatgagtcactcttaaccaggctggaagatgaaggaatcgtaaagctagtcttccctttgcatgatgaaattaaaaggaagcaactcctgagaagctgggcactcaagtggtttgatttcacatggcaacctattgatgaaatttactcttactttggaacaaagattgcaatatatttttctttcctcggaatgtatacacgttggctgttctttccagctgtttttggacttgcaacccagctgatagattttgggtcattacagtggttggttcttccagctttctttttcttcgttatttcttgggctgtcttctttttgcaattttggaaacggaagaattcagctgtccttgctagatggggtataaattattcattttcggaatacaaaactatgggcaatgaactggaccctttaagcttttctatggctgatgacaatgttcagcagaggaaatttggtgctcccaaggagaaaagtatagtacaaagaaatgagtggtttggtgttctccttagaattaggaataatgctatcattgttttggctatcatttgtcttcagctgccatttgagttggcctatgctcatctatatgcgattacaaaaactgaggcgctaaggtatgtgttaactgcagtgtatcttgctgcaattcagtattacacaaggataggtggcaaggtgtctgtcactctaataaagtatgaaaacaaccaaggggaacagtctagtgctgatagtttggtttataaggtattggaaaatctgattgagaattccattccttacctcaattatagctataaaaagtatagagctgttcaaccaattcagagatgtaagaaatctcttccatcttgtagcaagaaaaaacatgagaaagaatcgccagctgggaagtcagttcggttatctacaagagtagagaaagaatatctaaaaccctcgtatactgcaagcattggagaagaacttgaagatggtttatttgatgattttcttgagctaactcttcagtttgggatgatcatgatgtttgcttgtgcatttccgtcgatattctgctttgctgctctgaataatgtgactgaaattagagcggatgcattgaagttgttggtcatgttgaaaagacctgctccccgtgatgcagctacgattggagcttggctgaacatattccagttcttggttgttatggcaatctgtacaaactgcttgcttcttgtttgtctgtatgatgaggagggtaaatggaaaattgagccaggactggcagccatcctcataatggagcatgctctcttcttaatcaagtttggtttctcacactttgttcccgaggaacctgcatgggtgaaagcaaatcgtgggcgatatgtagctcaggcgcagaatgtctgctccaaacaactcctgagaagcattgcaaaactggatgcgaaattggagtgagaatggagaagagatttggagatacatactacagcctccgtcgcctgtcgcttgaacgaataaatgtaatcaatgtaacgaatcaactggaatgtgcatcatctgctgcttgtcac

SEQ ID NO: 55231 - DNA, 805 bp, Oryza sativa
  unsure (1)..(805): unsure at all n locations
  Clone ID: PAT_MRT4530_57258C.1
tcccgggtcgacccacgcgtccgtccagctttctttttcttcgttatttcttgggctgtcttctttttgcaattttggaaacggaagaattcagctgtccttgctagatggggtataaattattcattttcggaatacaaaactatgggcaatgaactggaccctttaagcttttctatggctgatgacaatgttcagcagaggaaatttggtgctcccaaggagaaaagtatagtacaaagaaatgagtggtttggtgttctccttagaattaggaataatgctatcattgttttggctatcatttgtcttcagctgccatttgagttggcctatgctcatctatatgcgattacaaaaactgaggcgctaaggtatgtgttaactgcagtgtatcttgctgcaattcagtattacacaaggataggtggcaaggtgtctgtcactctaataaagtatgaaaacaaccaaggggaacagtctagtgctgatagtttggtttataaggtctttggtctttactttatgcaatcatatattggattgttttaccatgcttcactgcaccgcaacattatggcactccggcaagtcctaatcaagcgtctcattgtgtcccaggtattggaaaatctgattgagaattccattccttacctcaattatagctataaaaagtatagagctgttcacaagaaaaaacatgagaaagaatcgccagctgggaagtcagttcggttatctacaagagtagagaaagatatctanaaccctcgtatactgcaagcattggagaagaacttga

SEQ ID NO: 55232 - DNA, 534 bp, Oryza sativa
  Clone ID: PAT_MRT4530_57259C.1
catattccagtttttggttgttatggcaatctgtacaaactgcttgcttcttgtttgtctgtatgatgaggagggtaaatggaaaattgagccaggactggcagccatcctcataatggagcatgctctctttttaatcaagtttggtttctcacactttgttcccgaggaacctgcatgggtgaaagcaaatcgtgggcgatatgtagctcaggcgcagaatgtttgctccaaacaactcctgagaagcattgcaaaactggatgcgaaattggagtgaggtatccaggttttatataaggcggcagtagttttgtagattaggatagtgcacaaatgtgtcttgtgcgagcacgtacaaattgtaggtaggtaacatcgtgcaaccactaactgttccaattggtaaatgtagatgtcgctatataatttataaggtcctgcaagactgcaacatcaatgtaagaatgcaagggtgttcctttccttctaactatatatatttgttgagttgaactggggaggtatcccccc

SEQ ID NO: 55233 - DNA, 703 bp, Oryza sativa
  unsure (1)..(703): unsure at all n locations
  Clone ID: PAT_MRT4530_5725C.1
gaaatcagcaatggtatcttcttggagttgctcttccaacttctaattgttcatttcaaagaatacaacagttccaaagaacggcatatgcatctatcagaccatcacccgggatttacatccaaaaaacctttttgattctaacccattctgggtatcttgagatgtataaggggtatctatccccaatctgtaccgatgtctcaaaaattacaggggagccgagcttttaccttataagacctaaagtacatctacaatttgtatggaatgaaagaatggctgggattgcttgcagttcgctggtcaaaatcattctgctgctcttggtgacctaagagggaggccttcagcagcagacctgagggggatgccttcagccgcatagccatcttcatcatgtttcggtattcggataggtagagttggtgggagtccatcgaccatatctttcgtcttgtgaagaagaaacgtcccagaaaggatggtaacaaaaccacacatctctgtcacaatttgagttggattttgacgatcccagtccttgaacattatcacactagccaaaatggttagtgatgtaaacattgtataatatataggcgaaacaactgcagtattgaatgtgtcaagagccttgtttagatagttcatctaagttagtatacatgcnncancancaatggtgaacatcagtatctaa

SEQ ID NO: 55234 - DNA, 393 bp, Oryza sativa
  Clone ID: PAT_MRT4530_57260C.1
atggggaggaatggagtggtggcagctactgctgctgcctgcatcttgctgctcatcctgctgacgtcaggccagctgcagctggcgtcagcggagtccgagatcggcagatgctacgatgactgcttgcctgactgcgagcaaggcagttctcgagctggctgcaagctcttctgcttcacctgctgcgtcttgaagccgattcacaactgtacccgaggcggcgagtcgacggcggcggcggcggcgccggtgttcgccggagatgcaggctgcagggagctctgcacgtcgtcgatcggggatgcggcaaccggagaatcagcacgggcaacagatgctgatgttgcagcttgtgtcgatagctgcaacagttacaaggagaagaactag

SEQ ID NO: 55235 - DNA, 873 bp, Oryza sativa
  Clone ID: PAT_MRT4530_57261C.1
atgtcgtccaccacctgtctgatcagccgcggggcgttcctcctgctcgccgcggccgtcgccgtcgcgctgccgtgcgccgccgcgctgcaggagctgcagctgcaggacgccgtgctgatcgacgacgtcgtccaggaggcggcgcaggcgtggtaccacgggaggcaccggcggacgggcgtcacgtacccgctctcgctcccggggagcctgtccggcgtcgcggccgacgtggcgcgcttccgggcaggtagcctccggaggtacggagtccgccggttcggggagttcgccgtgccaccgggactcgccgtgcgcggccaagcctcgcacctgctcgccgtgcgcgccaacctgggcaacctctcgtccgtgttcgacgagtacgcggcgagcggcggataccgcatcgcgtcgccggtgctcgggctcacgttctacggcctggcgcggcggggtggcacggccaggctggaggtgctcgtcacggccgcggccatccgcgtcaacttctcgatggcggccgggagcaacacctgccacgtgtgggaccagggacacttcgcgctcgtcctgggcggagcaggcgacggcggcggcgtggtggcggaggccggcgaggtgagcaagtggaagctggcgctcttcggggcggcgctcggcgcgggcggcacggtgctcctggggctggtcctggtggcggtgctgagcatccagcggcgcaagtcggaggtggcggagatggcgcggcgggcgtacgaggaggaggcgttgcgcgtgtccatggtcgggcacgtccgcgcgccgtcggcgggcgggtcgcgcaccacgccggacgccctcgagaatgagtactgcgccgcattgtga

SEQ ID NO: 55236 - DNA, 420 bp, Oryza sativa
  Clone ID: PAT_MRT4530_57262C.1
tttttattaaacgccaaactggattcctgacgcgtgcgcgcgcgcaaagccaccttctctacaattcgatagttccagaaccgcggtattaaggcggtctgactgccaggcgctggcctcatgcaaaacgggtgttatagcactagccatattatgcatgaggacttgactggcacacagggatgcctgcattaagatcggcatgggttaccctgcttgactgggttgcacgctggcgacaccgacgtgcttgctcatatgctgcaagagtcatagtatcatcctaggcagtgagataaaactctccgagggggagagcttgggcgagcgtgggatccacacgcaatcatggcttcgatgcttacatcagacatagggtttgaactttcactccaagtaccaagttaaacgatgtgattg

SEQ ID NO: 55237 - DNA, 153 bp, Oryza sativa
  unsure (1)..(153): unsure at all n locations
  Clone ID: PAT_MRT4530_57263C.1
cagcctcgtccccatgatgccgctccccagcagcctcctcccgatgatgncgctcgtcgtcgtcgtcggcccctactgggngcactcactggactggtcccgctccgtcatgactgnnnncatgtcgaacggcagctancgcacacaactacg

SEQ ID NO: 55238 - DNA, 1454 bp, Oryza sativa
  Clone ID: PAT_MRT4530_57264C.1
ccccgccgccggctcctcctcctcctcctcctctctctctctctctctctctctacctctttcttgtctccaactagaagtagctatagctacctagctccacgacaagtgagctcccggagagcaggaggaggcttttggtagcctccctcgccgccgcttcgccggatttcggttgacgttgtggcgaccatatgacgagtgggttggtgaccgccggcggtggcggcggcggcaaggtgatgagcctgcggctgcagtactacgtggtgctgggcggggtgacggcggtggtgctcctcgcctgcctcaggtacacgcctactgccgccgccgtggccgccgtcggctacggcttctggggcaacggcgacggcgctagccttgccgcagctggggcggcggcgaccaccgtcggtggcactggtactagcgctgctgcgacgacgggtggtggcggcgccggcggggggcggtctccctctcgcgtggtgatcttcaacttcggcgactccaactcggacaccggcgggatggcggcggcgatggggttgaacatcgcgctgccggaggggcgcacctacttccgccgccccaccggccgcatctccgacggccgcctcgtcatcgacttcatctgtgaaagcctgaacacgcctcatctgagcccgtacctgaagtcactgggctccgacttcagcaacggcgtcaacttcgccatcggcggctccacggcgacgcccggaggatccaccttctcgctcgacgtccagctccatcagttcctctacttcagaaccagatccatcgaactcatcaaccaaggcgtgcgaacaccgatcgatcgcgacggattccgaaacgccatctacaccatcgacatcgggcagaacgatctcgctgcctacatgaatctcccctacgaccaagcgttgtacgggcacggtgggcggaagttctgggtgcacgggacgggggcgctggggtgcctgccgcagaagctgtcgatcccacgcgacgacgactccgacctcgacggcaacgggtgcctcaagacgtacaacgcggcggcgagggagttcaacgcgcagctgggcgcggcgtgccggcggctccggcagcggatggcggacgccgccgtggtgttcaccgacgtgtacgccgccaagtacgacctggtggcgaaccacacgctgcacggcatcgagaggccgctcatggcgtgctgcggcaacggcggcccgccctacaactacaaccacttcaagatgtgcatgtccgcggagatggagctgtgcgacatgggcgccaggttcgcgagctgggacggggtgcactacaccgaggccgccaacgccatcgtcgccgccagggtgctcaccggcgagtactccacgccgccggtcaggttcgccagcctcgtcaactccaccgccgtacccaacgacggctaa

SEQ ID NO: 55239 - DNA, 903 bp, Oryza sativa
  Clone ID: PAT_MRT4530_57265C.1
atgtggccacttgcttcttttcaacacgaagagaaacgggagaaggagaagaaagggatgccagtgatgttgcaacgtctcctctgtgcacctggcatcaaccccatcgatctaacggccagtggtgctccccttcaaccaagtgatcgtcagcgagaggagccggccgcggtggccggggcgacgactggtgctgcaccactctcccaagctgaggccaacaagaagagcaagcagcgtatcccggctccaattggagagattcaaaatgtatccttgtcagagcagaacaacacctacaacatgcacatactctggtgtttttctgcatctgctatttttgccaacgagatcatcgactccccaccctccaggggtgagtgggatgggttggtccttggagaggaatattcctctcagatccgggatcaaccgatccggccaaatcttgcggacgaactcgtcccacctgggactagcggatggcgtgacgacgccctgctcgccctcgggagatggtgggctcgagcgaaggcagacggatcgagcgacggcggcggtgggggcctcggcgacggtggatcccgtggtggggagggcggatccggcgatggggacggctgcggcaaccgtgctcctccacccggacgaccgcgatggtggccacggccggggccaaggtcgaggccgacagcgccctcctcggcgcggcagaggtggggcctgacggcgatgcggccatgggaggcgaaggagaaggagagggagccagggaaggagaggaggaggcacttgctggcagtagcggagagggaggtgagggcagaggcggaggcggccatagttgctctgcccgcttgcccgctcgtgccgctcctccaccttcttgtcgtcaggttgtag

SEQ ID NO: 55240 - DNA, 582 bp, Oryza sativa
  Clone ID: PAT_MRT4530_57266C.1
ctaacagtggccttcgctggcggtggcgacgcttgttggtgaagacgggtagggggaagatgaacggggatggtggcgcagtgaactccgcctctccttgtcgcattcgtgaagggatccgaccgggccgtcgcgggcctcctcctctcccgccttgcccagcccgacctcccctgcacatgggaggtgggaggcaaaagaggtgggaggacggcatgctcggtgaggtcgaagcggggcacgagggcgctggaggacgacgtggccaatgaggtcgaggcggcgcgcgaggaggtgggaggacgacgcgaccggtgaggtcgagccgaggcgcgacgaggtcgaggtggggcgtggggagatcaaggcggggtatggggatgtgtggaggcagccggcgaggtccgccatggatcgcaccaagagcagccggtgcgtcctgcttggcagggcgaggtccttgacggagaccggcttcaccctcgagcttgccgctgccaccttcccgccgagataagtgccgctgtagatgctgcccgactgccgcttttccactgcccaccagccgttgtagactttcat

SEQ ID NO: 55241 - DNA, 1356 bp, Oryza sativa
  Clone ID: PAT_MRT4530_57267C.1
gcttacccttatttttttttttttttttggtttttttttttgggcgaagccagatcacacagttaatgaggtttaaactctgagcccataacaaaactagctaattacaaggatgctactagccggctaaacattagttccattgccatgaaattaacagctagatcgatctacttctagtacttttaatgactagacatacatcttctagaccttcatgcaaaaccaaagggccagagtacaacatgcatgccccacaaacacactaaaaatcatcaagagcacactaaaagctactagcacactatctaacgaccaaattaagctagctagcaactacagcaagaacaaagaaaaaaaacagagagattattagcaattaattaacccttcaactgcaagaactaaactaagctagctagtagctctaattaatcttcatttagctagctaagttattttttttttccattgagatcctatagtagtggtagtggtacgccgccgtcggctgcggcggcggaggaggagcgggagccggcggcgcggcgagctgggcgcagacctcggcgaaggcggtgaggatggcggcgtggtggcgcggcgcgttgagggcgaggaggcggcggagcatgcagcggaggtcgtcccacccgcacagccccatctccaccaccatctgcaccatgctctcccggaagtcggcgcgcgggtccgacgactccttctccaccgccaccccgacgtcctcctcctcctccgccgccgccatcttctcgtacctcttcttcctgctcggcctcctcctcgccgccgccgccgccgacgacgacgacgacgacgacgacgacttcccgtggttgttcgtcgtcaccgtcaccggcgccgccgccgccgccgccgccgccttcccgtagtacgggtactggttggtggcggaggaggaggagtacgtggtggtgtaggtggcggcggaggacgacgagaacgacgcggtggacgccgacgaggggaagaaggaggaggagtgcgagctcgtgctcctcggcaccggcggcttcagggccgacggccggagaaacgacgggaggctcatcagcagctgcctcggccggcgaggccggcagccgcagccggtgtcaaccaccggcacgtggcgccaccgcccgccgcccaccggaaaatgcctcccgccaccaccgccgccgccccgccgcgctctgctcgccgccgttgacatggcgcagcgaggcacacagcttagcttagcttagccctagctttgagctaggattccgaggtggtacaaaaactttgggacttgtgagctatgggtgggtggcctcctgcccgggg

SEQ ID NO: 55242 - DNA, 1629 bp, Oryza sativa
  Clone ID: PAT_MRT4530_57268C.1
ggagagagagagaactagtctcgagtttttttttttttttttttgtctcacaatgcaactgcaaagttgaaatctgcaatcgaatcaaatcagagtgtttatctgccacttcttctgttctattcttttctcttcacaagttaactaatagtcgagtgagctgtgtttctctcctacgtggtgctacaacttgacccactccaacccgtcgatgaagctgagggagatgaacggcttggcctcctggtccgtgagctccctcgaccacgccaccctcccggcgtagttcgaacccggccccgtgcacttgtactgcccgtagaacaccgtcatctcgcgggtgggatcgccccagttgtaccagccgcgggggatgatgatgttgtccatgtaggtgtaggcgaagacgacgcgggagaaggtgccccaggcgcggccgaggtagagggcgccggagcccgtcacgcggcagttgacgaacgagaaacccgtgtcctccaggatgctcatccggttctgagccgtcagggctccgtagttccgcgcgatcgcgtgcacgtgacatcctagtgggctcatcaacattccatttgcgttggatttcgcattaaacgaagtgccacacgggcatgcacaacgcattggcaccatctggttcgtgtagctgtagtagggccagtcacaagatcggggggctaatgtggccgataatagtggtttgcctctactgtaaccctcgtagagagagagggcgttgccgaatatgaagtcgacggagccctcgatgtagcagtctctgtagtaatggcggccgaggtggtcgtacagcgtgtcctgcgcgccgaggaagttgcaccccaagaacgccgcgttgtccgccgatatccgcagcgccacaccctgcttccccagcgcccccggcctcggcaccggcgccgtgttcttgaaggtgatgttcttggcgacgaagaactgcgcgttgacggcgaacgtggcggaggcgaaggtgccgaaggggcgcccgagcgggccgaccgtgtcggccgtgtcgccccactgcaccaccgtcttgtccgcgccggcgccctcgatggtcacgaacgcgcggagcggcgagatggtcaccttctcagtgtatgtgccggcattgaccttgatgacgacgcgggcgaggttgatgagcgggatcgagtcgacggcggcctggatggacgtgaagttgccggcggcggggttcttgtcgacgacgagggtgcgcgtgggcagcagcccgcggtagagcgcgcgctggaacgtgctgtggcgtcgcccgaccatggaccgcacccaccgcgtgaactgccgctcgatcgcctccaccgccgtcgcgttcaccggatagtacggcttcgccgccgccttccccggccgcaaccccttcgtgtgcccatggcgtcgcccgccgccgccggcggccgcaccgcccaaacccgacgtaacaagcaacaccgccaccgcgacgcaggccaagaaccgcggcgcccacgaccacgacacggacaccgccatggatggtggttggtggtgtggtcgtcttgctcgcggcaagaggtggcaggcctactcctcccgccggccgaattcctgcag

SEQ ID NO: 55243 - DNA, 231 bp, Oryza sativa
  Clone ID: PAT_MRT4530_57269C.1
atggctcggccgagcctccttcaacccattgggccgcgcctcacgctcggcctaaaagtccatatttcctccctccgtccaatggccgggagcgtctacaagccctccacctacctcgtgttcgatccggccgtgtcatcgtcgtcgcactacgaggtgtttgtgatccctagtgcaccacggaagcagaagacggagatggtgacgtgccatcgtcatagtcaccactag

SEQ ID NO: 55244 - DNA, 1254 bp, Oryza sativa
  Clone ID: PAT_MRT4530_5726C.1
gtccggattcccgggtcgaccccgcgtccgatcccatctccccacgtctgaaaatccccaattcgcgtctcgtctcctcgcaaatacgacgcgttcccaaatcccccaatccgatctgcctttcctcttcctcctcgtcaaaccctagccaaatccacgatcggggctagctcgtcggcggcggcgatggggaacccggagaagctgatgacccagatcttcgacctcaagttcacctccaagtcgctgcagcggcaggcgcgcaagtgcgagaaggaggagaaggagcagaagctcaaggtgaagaaggcgatcgagaaggggaacatggacggcgcgcggatctacgccgagaacgccatccgcaagcgcaccgagcacatgaactacctccgcctcgcctcccgcctcgacgccgtcgtcgcgcgcctcgacacccaggcgaagatgcaggtcatcggcaagtccatggccaacatcgtcaagtcgctcgactccgcgctcgccacggggaacctgcagaagatgtccgagaccatggacaacttcgagcgccagttcgtcaacatggaggtccaggccgagttcatggagggcgccatggccggctccacctcgctctccacgcccgagaccgaggtcaacagcctcatgcagcaagtcgccgacgactacggccttgaggtctccgttgggttgccgcaggccgccgctcacgccataccagctgccaaggagaaggagaaggctgttgatgaagacgacctctcccgccgcctggctgagcttaaggcccgcggctgagggatttcacttcagatatgattctcaagctgctatgagccattgtcacgtcaaaggctactcatatttgttagattcgtaaatactgttatgctaaaatgcgtgtgttgatatcccatatgggatctgtggacttcattaaaaccttgctgtgtgatacaaatccataatatgtgagcttgagaacgtctctgtgtcgctgtatcctaagcctgcccgtttgaacagaaatgttgaagttgtccatcttttcacgggatgttttccttgctttaatgccatgaacaaattcggtagccgcccatgataaacatagccacccctagcatcatacatgaatacttaccttctgttgcacttgtgaaatattgttttagtttttatcaatttgatggagaatgtgaaggtggttatgtggtgtgtatctagtatctaaaaaacacaccaaac

SEQ ID NO: 55245 - DNA, 340 bp, Oryza sativa
  Clone ID: PAT_MRT4530_57270C.1
tttatctcgtgggcttctccccctgctttctgctcctgacgcgagagcaagaagaagaaaaggccatggcggagaagagggcttcttcttgaggcagctgcttcgctttcctcaccccccaaatcgcgccagaattcgatcttttccggcggcggctggtggagcgcaagatcgcgctgcgcgtttgatgggcaaggcgtgttcttggcggagtttcttgggagccgcctctcgtcctggatccgtggcggccggcgacatcctgggccggggaagggtttctcggatccggttcttgctaatccgatcggaatccgagcggatggggtcagcgatggat

SEQ ID NO: 55246 - DNA, 1779 bp, Oryza sativa
  Clone ID: PAT_MRT4530_57271C.1
atggtgcacaagctcgctggcgctgccacgccgagggcggcgtcgttcgcgccggtcgacgtcaacgccgccgcgccgccgccgccgccgcagcgcaaggaggtgaagacgaagaagaaggaggagcggcgcaagcacgaggcggcggcggcggcggcgaatctctgggacgaccctgactcgtacgtcgtcaccatcggcggccgcgtcctgggacgcggcgccgccggcaccgcggacgccgcgactgacaacgtgagggacgtcgtcgtggaggactccgacgtgtgggtgcagggggtggcgctgttcgagggcgcgtcgctgcgcgtcgcgcacgggcggcggtacggcctcgtcgggcccaacggcaaggggaagaccaccctgctcaagctcctccactggaggaagctcccggtgccgcgcggcatccgcgtcacgctcgtggtgcaggaggacgacaaccgcgacccccgcccggtgatcgaggtggtgctcgccgccgacgaggagctcgccacgctgcgcgccgagcgtgaccagctcgaggcctcctccgccgccgccgccgccaacggcgcccggctcgccgaggtgtacgaggagctcacgcagcgtggctgggacaccgccccggcgcgcgcggccaagatcctcgccgggctggggttcgaccaggcgagccaggcgcggccggcgagctccttcagcggcggctggatcaagcgcatcgcgctcgccggcgcgctcttcatgcagccaacgctcctcctcctcgacgagcccaccaaccacctcgacctccgcgccgtcctgtggctggaggagtaccttaccgcgcagtgcaagagcaccctcgtcgtcgtctcccacgaggagggcttcctcaacgccatctgcgacgaggtcgtgcacctccaggacaagaagctgcacgcctaccgcggcggcttcgactccttcgtcggcagctacgagcagaagaaggccaaggccatgaaggagagcgagaggctggccaaggcggcgcggaagagcggccggagggcgcccaagaagtggcacgactacaccgtcgagttccacttcgccgcgcccaccgagctcgccggcggcgggcccctcctccgcctcgccgaggccgggttcacccgcggcggattccagctgtccgccatcgacgccgacgtctccatggggcagcgcgtcgccgtcgtcggccccaacggggcagggaaatccaccctcctcaagctcctcgccggcgagctcacgccgacgagcggcgaggcgaggaggaaccccaagctgaggatcgggctctactcgcagcacttctgcgacgcgctgccggaggagaagagccccgtgcagcacggacaatgtcaccgagagtgtctcgacacgcatccccacctgaagagcaagccatgggaggcgcgcgccaagctcgccaggttcgggctggccaaggagagccacctcaccaccatcggcaagctctccggcgggcagaaggcccgcgtcgcgctcgcctccgtcgcgctcggggagccgcacaacatcgacgcgctggcggacgcgctcgacgagttcgccggcggcgtggtcatcgtcagccatgactcgaggctggtgtcccgcgtctgcgacgacgaggagaggagcgcgctgtgggtggtgcaggacggcacggtgaggccgtacgacggcacgttcgccgagtacagggacgatctcctggacgacatcaggaaggagatggccgccgactga

SEQ ID NO: 55247 - DNA, 1821 bp, Oryza sativa
  Clone ID: PAT_MRT4530_57272C.1
atggtgcacaagctcgctggcgctgccacgccgagggcggcgtcgttcgcgccggtcgacgtcaacgccgccgcgccgccgccgccgccgcagcgcaaggaggtgaagacgaagaagaaggaggagcggcgcaagcacgaggcggcggcggcggcggcgaatctctgggacgaccctgactcgtacgtcgtcaccatcggcggccgcgtcctgggacgcggcgccgccgccaccgcggacgccgcgactgacaacgtgagggacgtcgtcgtggaggactccgacgtgtgggtgcagggggtggcgctgttcgagggcgcgtcgctgcgcgtcgcgcacgggcggcggtacggcctcgtcgggcccaacggcaaggggaagaccaccctgctcaagctcctccactggaggaagctcccggtgccgcgcggcatccgcgtcacgctcgtggtgcaggaggacgacaaccgcgacccccgcccggtgatcgaggtggtgctcgccgccgacgaggagctcgccacgctgcgcgccgagcgtgaccagctcgaggcctcctccgccgccgccgccgccaacggcgcccggctcgccgaggtgtacgaggagctcacgcagcgtggctgggacaccgccccggcgcgcgcggccaagatcctcgccgggctggggttcgaccaggcgagccaggcgcggccggcgagctccttcagcggcggctggatcaagcgcatcgcgctcgccggcgcgctcttcatgcagccaacgctcctcctcctcgacgagcccaccaaccacctcgacctccgcgccgtcctgtggctggaggagtaccttaccgcgcagtgcaagagcaccctcgtcgtcgtctcccacgaggagggcttcctcaacgccatctgcgacgaggtcgtgcacctccaggacaagaagctgcacgcctaccgcggcggcttcgactccttcgtcggcagctacgagcagaagaaggccaaggccatgaaggagagcgagaggctggccaaggcggcgcggaagagcggccggagggcgcccaagaagtggcacgactacaccgtcgagttccacttcgccgcgcccaccgagctcgccggcggcgggcccctcctccgcctcgccgaggccgggttcacccgcggcggattccagctgtccgccatcgacgccgacgtctccatggggcagcgcgtcgccgtcgtcggccccaacggggcagggaaatccaccctcctcaagctcctcgccggcgagctcacgccgacgagcggcgaggcgaggaggaaccccaagctgaggatcgggctctactcgcagcacttctgcgacgcgctgtcggaggagaagagccccgtgcagcacggacaatgtcaccgagagtgtctcgacacgcatccccacctgaagagcaagccatgggaggcgcgcgccaagctcgccaggttcgggctggccaaggagagccacctcaccaccatcggcaagctctccggcgggcagaaggcccgcgtcgcgctcgcctccgtcgcgctcggggagccgcacgtgctgctgctcgacgagccgaccaacaacctcgacatgcagaacatcgacgcgctggcggacgcgctcgacgagttcgccggcggcgtggtcatcgtcagccatgactcgaggctggtgtcccgcgtctgcgacgacgaggagaggagcgcgctgtgggtggtgcaggacggcacggtgaggccgtacgacggcacgttcgccgagtacagggacgatctcctggacgacatcaggaaggagatggccgccgactga

SEQ ID NO: 55248 - DNA, 159 bp, Oryza sativa
  Clone ID: PAT_MRT4530_57273C.1
atggtacttaactcagcatattcggcggttggtgcgcttgaaaggtcggcggaggtcgacattgctggcgagggagttgtcgtcacagggaatcgcccgtggagtcgccggaaagctcgaggaggttgccggggaagattggggaaagtttttggttag

SEQ ID NO: 55249 - DNA, 961 bp, Oryza sativa
  Clone ID: PAT_MRT4530_57274C.1
ggaattatgcacaaatcatcacgattttatagctaaaacaatacgggcgtacctccgtttagaaaaaaattaattctaacgacgaatctgaagttctaaacatatgattgtctagatttatagttaagatttaactcttttttttttaagtagtaagtctagtgcatacaagaaccgatcgatcgatcacgaacggcggtacaactaacaagcaaccaagaaaaacaaaaacagaagtaaattcagcgttcagaacgacgattccgacgagtgcgccgccgcggcggcgtgcagcggcgccccccacgcctgctcctgcgcgggaggcggcgaggccgccgccgccggaacgctccacggcggcgcagcggaagtagggtacgggaggtggccgccgccgccgacgcagccgggggtcccgtggttgtggaccccgtcgtaggtggtgacgacgtagcgcgggtcgtcgccgtcgcgctccacccgcttcttgacgccgcaccccgccgccgagcaccggtagtagttccgcgggttcgggctgctcttcaccgccttcttcccgtactttcgccacttgaacccgtcgtccagcacctccacctccgacctcgtcctgaacccgatcctgctcgtcgtcgccgccgccgacgacgacgacgacacgccatactgatcattgttcccgccggcgaccaccaccggctgcgacggcggcggcggaagcggcagcgagtacacggaatggccgagctccaggaattcaccaaaggaacagccgccgccgccgccgccgtcgacgatgtggtccgccatgagaggagggaagcacaaggaggaggaggtgttcgacgccgggtacgagtaggcgtacgacgtctcgtggcagagtcccagcgaagccgccatgctcgcgtcactgtgcgttagctaagctagctgctgctgccggacgcgtggg

SEQ ID NO: 55250 - DNA, 412 bp, Oryza sativa
  Clone ID: PAT_MRT4530_57275C.1
ttggttagggctgcccgtcttcctctacaactactgcacccacgcagatgcacggcatgttgcaggctgcgagctttggcggaacaaacatccgtccgacggggggggaggacaagaagtgccccggagagtcacgcttacctgaacaggcgaaggttgcgactaggaagatctatgacccgctggaggaggacaccttccggacaatcctcgaccactgcgacgggcccatgttaaggctggaggttagcgttgccgaggcactctcccttgttgacatgttcgcagacaaggaggacgcctgcggctactgtttccctgatgctgcttgttgaggaatatcaggggactgccgcagaaggacacaaggcataaagatcatacgtgtatccgttgagagatatacagacat

SEQ ID NO: 55251 - DNA, 502 bp, Oryza sativa
  Clone ID: PAT_MRT4530_57276C.1
gtttttaaggctgtacagcttagggaccatcttggcatagtttttttgacgattcagagattaattcctcaaacccttcaattgttttcagtgacattgtctttcctcaaaactgaattttttacaatttgatccttttaaaaaacttatttcataaatagacaaaaaacttatactaaaaatggtcctttttaggatgctagagttgctggtgctgttgtctaacgggacatcctcctgctaccgtggcgggtcggcgatgaggtggcagggggacgcttaggagcatacaagaatcaaccatagaaaagttaaactcaaatggatgaaatatgtgacctgtagaattttccaaagctctaccgaaaagcttctcgccttgaaaacacaatctttgcaagcggaattttgaggttctaatttcgccgaacccggcaaagtgggggagaatcggatgtattttctgtagatgtccgtggatatattatttacctgattccga

SEQ ID NO: 55252 - DNA, 2208 bp, Oryza sativa
  Clone ID: PAT_MRT4530_57277C.1
atgtctggccaagagagagatgatgttccaatgctagagctacaaagatttcctactagaagtgtatcgatgtgtatacctgtcagggatgatatatatgaagactcaatcatatcccacagtggtcctattttcaccccagcaccaactcagtatacatccgtggctattccatcaggaaacagagacatgctcgataagctgcctcgtccaaaggttaagagcaaaccacatgttgttacgccggaagaagttggaataagtaactggccttatgaccagcatgttccgaagaacaaacacctgatgatgtactctgagcctctgggactgtgtgataatcctgattgtgtcgactgtcctcgtgcttgtaaaaacaaaaggcatttccagagaagtttagctccgtttgataacaagtttcacaacattctttatggctacggtgatcgatggaagaagaaagctgggcattacctttcatacattccaattatgaagccacatgataaggctgttcatcggtggaaccagttttttgtgatatcatgcttgctagccatattcaatgaccctctgtttttcttcctattgtcagtagataaggattataagtgtatagtgttcaactggaatttcgcgatagcattagctgttggaagaagtgtgactgacgccatatattttttacacatgcttcttcagttcaggctagcatatgtagcaccggagtcgagagtagtgggaactggagatttggttgatgagcctatgaaaattgctatgcgctatcttcgtgggttttttgtactcgacttatttgttgttcttccactccctcaggtgatgatattgctagttatccctaaatatgtgggattatcaagtgcaaactatgcaaaaaacttgttgcgtgctacagttcttcttcagtatgtaccacgtattataagatttgtgccactgcttggtggtcaatctacaaatggattcatttttgagtcagcatggtctacttttgtgatcaatcttctaatgtttgttttggctgggcatgtcgttggttcatgttggtacctcttcggactacaaagggttaatcaatgtctacgggattcttgtgctgcatcaaacatatcaaaagcgttgtgtaataattgtacagattgtggaattactggaataaataggaccaattggttgaacaactcagacttaactggctgttttgatactaaaagcggtaatttcccttatggcatctaccaacaggcagtgttgctaaccacagaacctggacttaagcgttatatatattcgctcttttgggggtttcagcaaattagtacattagctggcaatttgatcccaagttactttgtatgggaagtaatattcactatggctattattggactggggttgttgcttttcgcattactcatagggtccatgcagaattttctccaagctcttggaaaaaggagactagagatgcaattaagaaggcgtgatgttgaacagtggatgagccataggcggctgccagaagatctgagaaggagggttagatctgccgagaggttcagctgggtagctactagaggagtgaatgaagaagagcttttgagcaatttgccagaagatattcaaaggggcatacgccgccatttctttgggttccttaagaaggtccggctgtttaacctgatggacaatgcaacctgggatgcaatttgtgacaagctaaggcagaacttgtatattacaggaagtgatattctttatcagggtggtcctgttgaaaagatggtttttatagtcaggggtagattggaaagcatcagtgcagatggaaataagtctcccttgcaagaaggagatgtttgtggtgaggaactcctttcctggtacttggagcaatcttcagtgaaccgagatggtgggaagatcaagttgcatggcatgcgtttggtcgccatacgtactgtcagatgtttaacaaatgttgaagcttttgtactgcgagcacgtgatctggaagaagtgacttcacaattttcaagattcttgcgcaatccacttgtgctaggtacaatcaggtatgaatcaccttactggaagaaccttgcagcaaatcgcatccaagtcgcatggaggtatcggaaaaggcgactgaagagagctgagatgcaaaggttgcaatag

SEQ ID NO: 55253 - DNA, 927 bp, Oryza sativa
  Clone ID: PAT_MRT4530_57278C.1
atggggactgcagcgacctctaggatctatgaagcactgaagatgttgcaaccaccaccttgggtccatgctcgtcctcatctctgcctctaccacgtaaccctcgtggtactcaccaccaacttatcaagtccccttttctggccaccctttccactcgctttgcatttcgccggttccagtagcgtcaccattgccagggcattcatccctgacaccatcaacaaggccattggcaccgacaagaaggccaccgatccgcagtccccactctcgagtctcgactcctccgctgctctccactcatcaatttgctcctcgctcgacctcggtgtctccatcttcgccgcgcaaagagaaatctgcgatgcgctccctgtcccccacctcctgcaatccctcatgcttctcgggccagcggccggatccgcagcccacgataccttcgcccgccgcatccggaagacaactcccatattcccaagccgatgtgattatcggcgcaaaaatctggtagtgagctttggtgctggacaaagcaccatgccgtccctcttctttctccccgggttcaatggatttggcaagtctgtattgggacgggcgttctcgagggtgactcctgtcggtgagatagaagcgtttaggaagggcagcagcatggcggcgggaggcacaggggagggcgaggtggccgggcgaatgccagcggtgggcagagcagcgatgggaaagcgcggatgcgggcggcaggcgagcgcgggctgcaatttcgcgctccatataacgccgctgtggacgtacagcagaggccacgtgcaaaccctgcctgcgccgtgtgttgtcatacgggcgtgtggcggtgggctggcggccatgtccccgtatgaggctatgggcgtagcggcggctgggacgcagctatag

SEQ ID NO: 55254 - DNA, 156 bp, Oryza sativa
  unsure (1)..(156): unsure at all n locations
  Clone ID: PAT_MRT4530_57279C.1
atcctanctccggtggctcaaaccctagctcttcgcccccacctcccaatgctaccgtggtggttacctcggaacagaacggcaacacagaccagtcaaatccagttcggcttagcagcggtggccactgtgctggtngtntagccgccgtgatgg

SEQ ID NO: 55255 - DNA, 756 bp, Oryza sativa
  Clone ID: PAT_MRT4530_5727C.1
atgcggggcccaccggtcagcggctcgggagagggaggaaaggggcgccggcacgcggggcccaccggtcagcgactcaagggggagtgcggttcaccgcggaccgggaccacgcgggtggtccaccgccggtccacgggaccgacggcccagatcgccctcggggtcgatcggacgggcggcggcgacccagctcggctcaaggccggccaagcggccacggcgacggcgacggcgcgcgcgcgcgaacgcgttgccgggaacggcatccggcggcggaggcgacggcgcaaaagcgacgcggaagcggcggcagcggacggcggcaacgaccgaaggcgacggcgagcgcggcgcggcgacgcatggggaaacggggaaggaaagaaaaggggagggagtcctcaccgaaggggacggcggcgaccggcgatggggagcgacggagggaggtcgacacgcggcggacggcgaccgggacgaccgtcgctcgatgggaatggcgctccggcggcggacctcgacgaaggaggggtggacggggtggatctcggccacgcgaacccgaccgcggcgacagggcggtgcggcggcgaccctaacggcggctagcggcggccggagtagcggaaacggcggcggcgggtggttgcacggcgcgagagcgatggggagctcgggagagttcggcgaaatggggaaaaagcgagagggggcgacggggaagcttaaataggggaggggagggccggacat

SEQ ID NO: 55256 - DNA, 411 bp, Oryza sativa
  Clone ID: PAT_MRT4530_57280C.1
atggagagaaacagcgtgaaacatccaatacccctgaccccacaggggaagcttggtggaggtccggcggggcgtggtacagaggatcacggaggcgccatcactagagatggcaacgggtgcgtacccatcgggttcgcctaccccatacccacacccattgaaatgaaatgctcccgcttcattacccacacccgctcacggctcggctttgccccccgccccgcccccgcccgggtgcccgccttcgtgcacgcggcgcgggcgagcggcgttcgcgtgacggctagcttccccagccacgggatggcggcgcgcgggtggcgcgggcagcggccggcggccggctgggcaccctacagaacgttctacgacccggcccacccgatgggtgaagtttatgcccgataa

SEQ ID NO: 55257 - DNA, 524 bp, Oryza sativa
  Clone ID: PAT_MRT4530_57281C.1
agggaataagcttggcgcgctctgtttttgtttttttgtttttttttatatagatattctaatccttggtcccaaaaggccataaaccctgtatcgagtgtccctatcaagtccatgggaaactcaatgctccctaggacatgcaaacaccttctaccttcattatctatattcgagccttaactctaacaacggcttattgggggaccttacgagataccaacctcacaatatgagctataatgcacactgcctatcacacagatcacaaatctgtgacgccaatggctctcggacatgcgtcatctcacggcgtaaacgcagcgatcgatcgatcacggtttgccgggagggcctcacttgcccaggaaggtgtgggggcctgcttccgaaatcttggtctccagggtcaaatgccctattacgagtatcctcaaattcgggggattgcgctagatggaacctgtgagaaaaaggcctccgctcagccttgaacccaacatacgacccggaaccataaagtg

SEQ ID NO: 55258 - DNA, 620 bp, Oryza sativa
  Clone ID: PAT_MRT4530_57282C.1
tggaagtgctgctctaacgtttggatgagaccttttgcaccatgaagatgagtccagtcaaagtaaatctataccagaaccactcctttcaccattttggaacatcaacgctcacagcttcgtgtatattactcaagccgtgcccgggttcaagttgtcaacaacaaatggaaaagacagtgttcaacggcgagcttccccggacactgcttattataccacaaccctatccagttgtaaagaagccacacaagagaaggatgtcgcttacattccattcaagaccaatcctaactctatggtaacccacattccaggaaagagttccatcttccgtggctctccccaatgatgttctaccaaatgcatatcgcatctcaagagaagaggctcagaggctcaaccataacacgaggagatgatttcggtccattcaccccaatccaatacacagagctacccagactttataatccgccaagaatcctcttagtcgccttccggataaagaataactaaataaataaatcccaaccaattttttctgctatgtactgtccattctttcgactaatgatgataaacctctcttttacccttaaaaaaaaaaaaaaaaaaaa

SEQ ID NO: 55259 - DNA, 1123 bp, Oryza sativa
  unsure (1)..(1123): unsure at all n locations
  Clone ID: PAT_MRT4530_57283C.1
ccacgcgtccgtccacgcgttcgcccacgcgtccgcccacgcgtccgcccacgcgtccgcccacgcgtccggtcgcatcgcacttgtagctctcgacccccgcatctcatccctcctctcgcttagttcagatcgaaatcgcaaatggcgaagattaagatcgggatcaatgggttcgggaggatcgggaggctcgtggccagggtggccctgcagagcgacgacgtcgagctcgtcgccgtcaacgaccccttcatcaccaccgactacatgacatacatgttcaagtatgacactgtgcacggccagtggaagcatcatgaggttaaggtgaaggactccaagacccttctcttcggtgagaaggaggtcaccgtgttcggctgcaggaaccctgaggagatcccatggggtgagactggcgctgagtttgttgtggagtccactggtgttttcactgacaaggacaaggccgctgctcacctgaagggtggtgctaagaaggtcgtcatctctgctcccagcaaggatgcccccatgtttgttgttggtgtcaatgagaaggagtacaagcctgacatcgacattgtgtccaatgctagctgcaccaccaactgccttgctccacttgccaaggttatcaatgacaggtttggtattgttgagggtttgatgaccactgtccatgcaatcactgcaactcagaagaccgttgatggaccctcgagcaaggactggaggggtggaagggctgccagtttcaacatcatccctagcagcactggagctgcaaaggctgtcggcaaggtgcttcctgctctcaatggaaagttgactggtatggctttccgtgttccaaccgtggatgtctctgtcgttgatttgactgtcaggctttgagaagccagcatcctatgatcagattaaggcagctatcaaggaggagtctgaggggaaactcaagggtattctgggttacgttgaggaggaccttgtttccacagacttccagggtgacaacagggtcaagcatctttgatgaaaaggccggtattgctctcaatgacaactttgtaagcttgtgtcttggtattacaacgaatggggtncagcttnggggttg

SEQ ID NO: 55260 - DNA, 1707 bp, Oryza sativa
  Clone ID: PAT_MRT4530_57284C.1
gcacgaggcgcacttgtagctctcgacccccgcatttcatccctcctctcgcttagttcagatcgaaatcgcaaatgggtaactccgccatctgatcccgcttcctccgatctcgatctggtctccccgttcccgttctgttctagtggagtgatttttttgcatttttttctgactttttgctggttggttttttggcttctgcagcgaagattaagatcgggatcaatgggttcgggaggatcgggaggctcgtggccagggtggccctgcagagcgacgacgtcgagctcgtcgccgtcaacgaccccttcatcaccaccgactacatgatctgtgagtttggaatttggatatcagtgtgtcgacctgtcgatcaaatagtcattgatatgtcttcagatgcatttgcacatgcaaaatcacagattgtgccggttgctttaaaattccgcacagcgatatgctttgctgtgacatacatgttcaagtatgacactgtgcacggccagtggaagcatcatgaggttaaggtgaaggactccaagacccttctcttcggtgagaaggaggtcaccgtgttcggctgcaggaaccctgaggagatcccatggggtgagactggcgctgagtttgttgtggagtccactggtgttttcactgacaaggacaaggccgctgctcacctgaagggtggtgctaagaaggtcgtcatctctgctcccagcaaggatgcccccatgtttgttgttggtgtcaatgagaaggagtacaagcctgacatcgacattgtgtccaatgctagctgcaccaccaactgccttgctccacttgccaaggttatcaatgacaggtttggtattgttgagggtttgatgaccactgtccatgcaatcactgcaactcagaagaccgttgatggaccctcgagcaaggactggaggggtggaagggctgccagtttcaacatcatccctagcagcactggagctgcaaaggctgttggcaaggtgcttcctgctctcaatggaaagttgactggtatggctttccgtgttccaaccgtggatgtctctgtcgttgatttgactgtcaggcttgagaagccagcatcctatgatcagattaaggcagctatcaaggaggagtctgaggggaaactcaagggtattctgggttacgttgaggaggaccttgtttccacagacttccagggtgacaacaggtcaagcatctttgatgcaaaggccggtattgctctcaatgacaactttgttaagcttgtgtcttggtatgacaacgaatggggatacagctctcgcgttgttgacctgatccgtcacatgtacaacacccagtagaagatggtcactctttcggaagaaatggagtagagtgctactgaaaataagtcggaccttttgcgagctactccagtagagcttcattagctgtatgctgccttttgtttttgctggcttttcgcatgatgttttattaaaactcgatgtaatgttaatttgtgtacttcatctccggcactttataaatcgtggtttttgaatttgaaagttcaagtggcattagacgaataatttcttgaggattagttggctgcgctgttgattgtagatgcttggttcatatccatagttgttgatattcacggcacgggtttgctgaaaaaaaaaaaacctgcagcccggg

SEQ ID NO: 55261 - DNA, 2544 bp, Oryza sativa
  Clone ID: PAT_MRT4530_57285C.1
cagcagcctctctatagtctcagctcttcttccaccaccacccagctcctcctcctcctcctcgtcgttgttcgccaccaccgctcggagagatggcgagccagaccgccgacgccacggggttcgtcgcgagcgacccgctgtcgtggggcaaggcggcgctggagatgacggggagccacctggacgaggtgaagcgcatggtggcgcagtcacgggaggccgtggtgaagatcgaggggtccagcctccgcgtcggccaggtggccgccgtctccgcggccaaggacgcctccggcgtggtggtcgagctggacgaggaggcccgcccccgcgtcaaggccagcagcgagtggatcctcaactgcatcgcccacggcggcgacatctacggcgtcaccaccggcttcggcggcacctcccaccgccgcaccaaggacggccaggccctccaagttgagctgctcaggcatctcaatgccggaatcttcggcaacggctccgatggcaactcgctgccgtcggaggtgtcgcgtgcggcgatgcttgtgcgcatcaacaccctgctccagggctactcgggcatccgcttcgagatcctcgaggcgatcaccaagctgatcaacaccggggtcagcccatgcctgccgctccgaggcaccatcacggcgtccggcgacctcgtgccgctgtcctacattgccggcctcatcaccgggcgccccaacgcgcaggcggtgaccgtcgatggcaagaaggtggacgccgccgaggcgttcaagatcgccggcatccagggcggcttcttcaggctggagcccaaggaaggtctcgccatcgtgaacggcacctccgtgggctcggccctcgctgccatggtgctctacgacgcgaacgtcctcgccgtcctgtccgaggtgctgtccgccgtgttctgcgaggtgatgaacggcaagcccgagtacaccgaccacctgacgcacaagctgaagcaccacccgggctcgatcgaggccgccgccatcatggagcacatcctcgccggcagcgcgttcatgccgcacgcgcagaaggtgaacgaggtggacccgctgctgaagccgaagcaggacaggtacgcgctccgcacgtcgccgcagtggctgggaccccagatcgaggtcatccgcgcggccaccaagtcgatcgagcgcgaggtcaactcggtgaacgacaacccggtcatcgacgtccaccgcggcaaggccctgcacggcggcaacttccagggcacgcccatcggcgtgtccatggacaacacccgcctcgccatcgccaacatcggcaagctcatgttcgcccagttctccgagctggtcaacgagttctacaacaacgggctcacgtcaaacctggccggcagccgcaacccgagcttggactacggcttcaagggcaccgagatcgccatggcctcctactgctcggagctccagttcctcgccaacccggtcaccaaccacgtccagagcgcggagcagcacaaccaggacgtcaactccctcggcctcgtctccgccaggaagaccgccgaggcggtggacatcctcaagctcatgtcctccacctacctggttgcgctctgccaggccgtcgacctgcgccacctggaggagaacctcaagagcgccgtcaagaactgcgtgacgacggtggccaagaaggtgctcaccacgggccccgccggcggcctccacagcgcgcgcttcagcgagaaggccctgctcaccgccatcgaccgcgaggccgtgtacagctacgccgacgacccgtgcagcgccaactacccgctgatgaccaagatccgcgccgtgctcgtcgagcacgccctcgccaacggccccgccgagaaggacgacggctcctccgtgttctccaagatcaccgcgttcgaggaggagctccgcgaggcgctgcccagggagatggaggcggcgcgcgtggcgttcgagaccggcaccgcgccgatcaccaacaggatcaaggagagcaggtcgttcccgctgtaccgcttcgtccgcgaggagctcggctgcgtgtacctcaccggagagaagctcaagtcccccggcgaggagtgcaacaaggtgttcctggccatcagcgagcgcaagctcatcgacccgatgctcgagtgcctcaaggagtggaacggcgagcccctgcccatctgctgatcgaaccagtccacccgcgaacgcgacaagatccaggaagagacgatacgtgcaccgaaataagaaagggaggaattcaggatcctgaaggcttctcgtacgctcatcagcagattacgttgtttctccgtccgtgttttttttttcctttttgagcttgctgtatttatccgtgttgtaatcgtgtgagattgctgctgcaatgccgtggcgcctgcagcgttcatggccttggctggcagctttctgattccgttgttgtattttgcaagtgaaatatactaatatagcgctatcttgattacatgtgttgaaaaaaaaaaacaaa

SEQ ID NO: 55262 - DNA, 1044 bp, Oryza sativa
  unsure (1)..(1044): unsure at all n locations
  Clone ID: PAT_MRT4530_57286C.1
ctatgagtgccatggggtttagttcagtttggttgggatgggtcgaaaagattttttcctctacctcctcctcttcagttctgctcaatggagttccaaagaagaattttcattgtaaaagaggtgttaggcaagtagatcctttgtcttttctttttgttctgggagtaacttctttagtctgttataaataggattatattttgggtttattgtccaagcccatccttattgaaggtgatcaaaattttcacataattcagcatactgatgatacacttctttatcctaaagcatgtggaagagaattaattactctgagagctttactccagacttttgctcaaggtttaggtcttagggttaattatcacaaatcatgaatgattccaattaatgcgtctgatgaaaaggcacaaattttggcaggagtatttggttgcttctctcccattcagcatcttaggtttgcgttttagtagtaaagttgttgactttgctccgtaggtgatacttgccagcagacnnnnnnnnnnnnnnnnnnnnnnnnnnnnnnnnnnnnnnnnnnnnnnnnnnnnnnnnnnnnnnnnnnnnnnnnnnnnnnnnnnnnnnnnnnnnnnnnnnnnatctatagcttgggataaagtttgtaaccgaaactcaagggtggtttgggagttttaaatctctcaattcagaatcaagctttgctttttaaagtatttggacaaattctatgataggaaggatttgccgtgggttaatcttatttggaactcatattatagaattgtccactttgaagggttctttttggtggaaagatgtttgcaatctaatggatctttttagaggaattgccagatgcttagttggtgatggtgtttctcgttcgaaatgatgtttggagtgatagttctccactctcagtcattatgccgaggctgtactcccttgctgctaatacaaggatctcggttcaatttccttaatttggaattagaagaaaattttcagttgcctctttctcagcaagcctttgaa

SEQ ID NO: 55263 - DNA, 144 bp, Oryza sativa
  Clone ID: PAT_MRT4530_57287C.1
atgtctccgagtcctacttggagaccagttgacctgcggtacaaaagcgaccccccaggaggacctaaggcatcgaatcttaccgccaacacatccaccatagcctacgaagccggagcttacaggagccaagtcgccgggtga

SEQ ID NO: 55264 - DNA, 359 bp, Oryza sativa
  unsure (1)..(359): unsure at all n locations
  Clone ID: PAT_MRT4530_57288C.1
caaggacgangncaacgcgcgcctcgaggccgtcgccgaggagaagggccatgtcctgaagcttctccgcgcgaaggaggcggaggtngcgtccgtgtcccacaaggtctcgaaattggaggccatggtggcgcactgngagaggaacaactccgcgctgttcggtgagaaggatgaactggcgaacaattggaggtcacgaaggaggagattcggatggtgtcanaccagaaggccgcggtggagaggagtttaggcgagctcaagaacacggcgcaggcggaccagattgaaatngaggagaaagtgaaggcgaaagtggaggaattgaaggtgttaggtgccaagaaggcggagat

SEQ ID NO: 55265 - DNA, 249 bp, Oryza sativa
  Clone ID: PAT_MRT4530_57289C.1
cggacgcgtggggtccgttcagcatatgaatcgacatccaaggacacttgttaatgttttgttgggcatggtagcacgccagcacttacgttatgctcgccagacaaccttcagagggaaaaactatattggccactataggaaatcaggtaggtactcacgctctgttttaaaggtgtcacctgttaatccatctacttccttagtaactttgatcataaatttctttaaaaaaaaaaaaaaaaaaaa

SEQ ID NO: 55266 - DNA, 1278 bp, Oryza sativa
  Clone ID: PAT_MRT4530_5728C.1
atggcttatggaaaaccgcatgagaagctgggcacaaaatattgcaagaagttcttagaggcaagggcttttaaattttccagctatttgctagtgataattttaacagaggaaagaacccagatagaaagagttactttcagatgcataacaagaggtgaagaggaattgttggctaaggaatatctctttgaagaggcattcgaaggatatgaaatactgctcggatgcctcatcacggtggtgattgttggggtagtttcaatttcgtgccatcttagaagaagagcacacaacctgaaacgatccaagaaagatattgaggtcactgctgtatctgttgagtatgaggaggttacctgcaaacagatgtgtaccaaagagatttacgacgcaactgaaaacctgagtccactgaatgtcattggtcagggaattgcagggaaagtgtacaaaggagtgcttgcaaatggctggcctgttgctgtaaagcacatcgttaagaacgagcatgcagaaactttcctaagggaagttacaagcctctcacatgtgagacatccaaaccttgtgtcactaagaggttattgcgatgggcaggaggaatgttttcttgtatatgagttatgtatcaacggtaacctgtcagaatggctatttgggaaggataagaacctgtcatggattcagaggctgcagattgcacttggcagcgcctgtggcctttggttccttcacatatatcctgaaggctgcattgttcaccgtgatgtcaagccaaccaatatacttcttggggttgatatggaacccaaattgtcggattttggactgtcaagagtcattgacataggagtatcacacgtaagctccgaagttagaggaacatttggatacgtcgatccagagtatcgccacaatcacaaggtaaatgctgcaggggatgtctacagctttggtatggtgctcctacaactcctgtcaggaaaacgagcaatcaatatcatgaacactgctaaaccaatgtcattggatcgaatggcttccatgctcatcagagaaggcaacgtgttggagtttgctgatcctaggctgaacggagagtactcgacagaggcatttgatctcagtttgaagcttgccctttcatgcactggacacaagaagcagcgtccgtccatggagcaagttgtgtcacatcttgagaaggccctaaagatctccatgagagatgacgataagcataacagcattagcatcatcgagtcccattcatag

SEQ ID NO: 55267 - DNA, 943 bp, Oryza sativa
  unsure (1)..(943): unsure at all n locations
  Clone ID: PAT_MRT4530_57290C.1
cctcctcaacctgcacgcaaccccctccgnccgccgcccttctcccctcgtccccccgtgcgccgccgccgccgaccgctgcaaccagatcggccgacgcgtcctcctccttccgccgccccactctccaccaacctcaccgccgattcctcacccaatcctccattcctgacctagggagaagcttcctcttcctcttctcttcccccgcctgttccttcccttgttggttcggatggcgaccgtcagcgacgactacgcgcagatcgacatctccacggaggagaaggacaagcttgtagcggaggtgatgcgccacgtgctcttcaagacgcaccagaccgccggctgccccatcaagcgggaggagctcacgcagatcgttaccaagaactaccgccagcgcgtgctcccggcactcgtcatcaaggaggccggggacaggctcgccgccacatttggctacgagatgagggagctccagaggacacgcgccccgtccacccgctctggccgcccgtcccagcagcaggttaatgtggatgcgaagagctacgtcctggtcagtaagttagaccctgaggtgtacagcaagtacgtcgagcataaggaggctgcccatgtgtctggcttcgcttttgttgtcattagcattgttcatctgtccggtggaaaaatttctgaagaggatctctggcatcaattgagacggctgggtttaaatgagagcgatgaaaaccaccctgttcttggtaacaacaagcaggcacttgaactccttgtgcagcaaaggtacctactgaaggagaagcttagtgggccagaaggccattctatgatgtatgagcttgcagagagagcattggatgagtccatcagtgggaagcttaaggattacatttcgcaggttgtgagcacaagcactgctgcagaagtagattga

SEQ ID NO: 55268 - DNA, 164 bp, Oryza sativa
  Clone ID: PAT_MRT4530_57291C.1
gcacgaggggttgatgaagttattgagcagctcaaacttgtcggttatgtccctcatacttcacatgtgtttccatgttgaaatgggtgcaggcaggcagcaaagcaacaagcctcaagcatacatcagtgcagcaagctggcaatctcttttgggcttctcaa

SEQ ID NO: 55269 - DNA, 1515 bp, Oryza sativa
  Clone ID: PAT_MRT4530_57292C.1
atggccggcggccgcgcgttccggccgtcggcgccgcgccgcgcggcgttcgcggcgctcctgacgctgctcctgctggcgacgctctcgttcctcctatcctcgccgcctccgacgcacgcctcgcaccgctcctcctacctcggcgcatcgccgccgtcccgcctcgccgccatccgacgccacgcggcggaccacgcggcggtgctggccgcgtacgccgcgcacgcgcggaggctcaaggaggcgtcggcggcgcagtcgctgtccttcgccacgatgtcgtccgacctgtcggcgctctcgtcgcgcctcgcctcccacctctccctcccggaggacgcggtgaagcccctggagaaggaggcgcgcgaccgcatcaagctcgcccgcctcctcgccgccgacgccaaggaagggttcgacacgcagtccaagatccagaagctctccgacacggtgttcgccgtcggcgagcatctggcccgcgcccgccgcgcgggccgcatgtcctcccgcatcgccgcgggctccacccccaagtccctccactgcctcgccatgcgcctcctcgaggcccgcctcgccaagccctccgccttcgccgacgaccccgacccgtccccggagttcgacgacccttcgctgtaccactacgccgtgttctccgacaatgtgctcgccgtctccgtcgtggtggcctccgccgcgcgcgccgcggccgacccctcgcgccacgtcttccacgtggtcaccgcgcccatgtacctgccggcattccgcgtctggttcgcccgccgcccgccgccgctcggcgtgcacgtccagctcctcgcctactccgacttcccgttcctcaacgagacctcctcgccggtgctcaggcagatcgaggccggcaagagggacgtggcattgctcgattacctgaggttctacctcccagacatgttcccggcactgcagagggtggtgctcctggaggatgatgtggtggtgcagaaggatttggctgggctctggcatctcgacttggatgggaaggtgaatggtgccgtcgagatgtgcttcggtggattcaggagatatagcaagtatctcaacttcacgcaggccatcgtgcaggagcggttcgatcctggcgcatgtgcttgggcatatggggtcaatgtgtatgatcttgaggcatggcgaagggatggctgcacggagctgttccatcagtacatggaaatgaatgaggatggtgtgctttgggatcccacatctgttctacctgctgggctgatgacattctatggcaatacaaagccgcttgacaaatcatggcatgtaatgggccttgggtataatccaagcatcagtcctgaggttatcgctggtgctgctgtgatacattttaatgggaatatgaaaccgtggcttgatgttgcgttgaaccagtacaaagctctctggaccaagtatgttgacactgaaatggaattcctgacactatgcaactttggtctatga

SEQ ID NO: 55270 - DNA, 234 bp, Oryza sativa
  Clone ID: PAT_MRT4530_57293C.1
atgtcgtcggcgggatggcgctgcaaagttgctgctcctcctcctccatgcccgcgacctgttcggcgctttgcctcgcggaagccacgcgcgcgggagcgggagggcgccgactccaaggcggtgcagctggtgcttggcggccacgcgcacgacgacgggtccgagtccgagttgctttctgcctacaacgagaaggtagctttgaatggcgtaagaggcacgattgcatag

SEQ ID NO: 55271 - DNA, 862 bp, Oryza sativa
  Clone ID: PAT_MRT4530_57294C.1
tgatgtttcgatgtatgcacgcgtggacaacttggcagtgctgacatcgcctcgtttgatctcttctctcagcttgcaataaatttgtactaccatttgggctttggctagctgccatgtcatttgatcgattttctctgcgtgcgtgtacgtgacaaggaaacaattagaacaataacaatgacatcgtcgacggttaggggatcggatcctcacgcgtatggcgcccggggagcgagatgcatgccagcaaatgcgaggcagccagggtgtgtccttgcagggtttggcatgcatgcattcgtgcgtgcgtgcagtaaatgtgagagattctgagtcacattcatgtgagccatagcagcacagggacagcctcgaattcgacggagatcggtctgaccgagattgatctgcaggtcggaccgagtggatgccgccggtctgaccggtatagatcgtctgaccgccgatgtcgcctgccgcgcctgtcgccgacgccggtctgaccgtcgtgctcccgccggttggaccgccgcgatgccgccggtctgacgctccccctctatttatacatgaggtaggcagcataaagccacgaaccaaactcatactaagagttctaaacactttaggaaaccctctagtacaagaaagaaactttacataaccaatcgtaccaaatttggatccttccaaatttgactccgcatcccatacgcacacaataacttcatcgtatgcgatatggaatctccatcaaccacgtgcatcaactctagccttagtatctcccgaggcatcgagtcacctacacatgaaacaaataaagaaaccatattccgagaccaagctatccccaact

SEQ ID NO: 55272 - DNA, 474 bp, Oryza sativa
  Clone ID: PAT_MRT4530_57295C.1
atgcgcgcggcgtttgcgtgtggttgcgtcgcgggagacggcgccccgcgcccgatcgatcgatcgaacgagcccacgcgccgcgtgcgcgtgagccctcgcacgcaacacatgaagctagtcgatcgatcgagccgccgtttcgttagccgacacgcttcgctcgatcggcagctggcggctcgcggaaaaggcgagacgaaatcacgctgcaacttgccgccggatatgcacgcattgcatgcgtatccggtcaaaactcaacggggatccacagctagtttatttcaagtctggactacttggttcatcacatcgaccaatctcggcgcgagatgcgcgcgccgccggatgaaaggtgtggtgtgggtgtgtgggtggtcggagggaaagctgcaaaagccggcaggagcactgcggtgcgggcggagatggacgtggtacgtcatgctgctggccacagtggtgcatgcc

SEQ ID NO: 55273 - DNA, 189 bp, Oryza sativa
  Clone ID: PAT_MRT4530_57296C.1
gggggggggggaaaaaaatcctttttgaggaaaaatcaagcgatttgcttttttattgatcttacatatgggggctcaaggtgggtcaacacagatagttaagcaaacaattctgggccattacacgaaaaagcggagggtaacctaagccatattttctggggacttggcaagaaagtacctcaattt

SEQ ID NO: 55274 - DNA, 1556 bp, Oryza sativa
  Clone ID: PAT_MRT4530_57297C.1
ctcatctctttcctgcagccaagtcagtttgcattcgcacaaagccagttgcaagcatgcagcaagaacaggcagacggccgggagatcgtcatcgccggcgccggcctcgccgggctcgcagtggccctcggactgcacaggaaaggactgaggagcgtggtgctggagtcgtcgccgacgctgcggacgtccgggttggcgttcatcacatggacgaacgccttccgcgcgcttgatgcccttggggtaggcgacaagatgaggagccagcaccagcagatccagaggttgaatgtcatgtcttcagctactggagaaatagtgcaagaaattgatctgagggcgcaaggcaaacggggaacccatgaggcacgctgcgtgagccgcaccgcgctgctactggcgttggaggaagagctcccaagaggcaccatccgctactcctccaagatcgtctcgatcgaggaagacggcaacgccaagatcctccatctgtctgacggatcgactctcagagcaaaggtgctgatcgggtgcgacgggatcaactcggtggtggcgagatggctggggctcgcgaagccgtcggactcggggcacacggccacgcgcggacgcgccaagtacccggacggccatggcttcgagcccaggtttctgcagttggtcggccagggattccgtgcaggcatggtgccctgcaacgacaccgacgtctactggttcttcacgtggtctccttccccagatgataaggatgtcgacaagagttcagccgcgacgaagcagttcgtgctgacaaagctccggagcacgaacgtgccaccacaggtgctcgaggcggtcgagcggagcgagatgaacgacgtgctcgcggcgccgctgcggttccgatcgccgctgtcgctcccgttcgcgagcatcagcaaggggaacgtgtgcgtcgccggcgacgcgctccacccgacgacgccggacctggcgcagggcgcgtgcacggcgctggaggacgccgtcgtcctggcgaggtgcctcggcgaggcgctgctgctccgtaccggcgactgcgccgccgaggagagtcaccgggtcgtcgaggccgcgctgcgccggtacgcggacgcccggcggtggaggagtgcgcagctgaccggtgcgtcgtacgcggtggggttcgtgcagcagagcgaccaccccgccgtgggcttcctgcgtgacaagctgttgtccggggtgctcgccaagacgctgctcatgatgcccgactacgattgcggcacgctctcgagttccggtgcttgttgacgtgatttgggttttggccgccgcccagctgcaagtctgcaacctgtaatcatatcgtcgtgctgtttgtgatgtttgtctgtatgtgctccgtctgttttactgttccgtcacgtgtcaatgatcccaaacctgtgaaacgctcctttttgtgtgcagaaaaataaagtcgagtgcatttgggtttttggtcggaaaacaaaataaacctataaagagaataaaaaaaaaaaaaaaaaaaaaaaaaaa

SEQ ID NO: 55275 - DNA, 483 bp, Oryza sativa
  Clone ID: PAT_MRT4530_57298C.1
atggaagataaactaggtcttccagaaaataagcttagagattttatccaaggagctgacaaggcaaaatggatagctaagaataatcataacataaagtattttacagaagatgagatcaaaagaactaccagcaactacagcactagccttggaaatggttcattcggaaaagtttacaacggaatcattgatgataacactgcagttgcggtgaaaagatattcccgcatagattcagaagaagagtttgccaaagaagtaattgtccacagccaagtcaaccataagaatgtagttaggctaattggatgttgtacagagaaaaatgctccaattatggtctttgagtatgtctctaatggaaccctttgcgagaacccacatggcagtaatgttcccgtctatttggacaaaaggttgagtatagccatacaatgtgcggaagcgctagagatagttttacatatacttccaacgtaa

SEQ ID NO: 55276 - DNA, 560 bp, Oryza sativa
  unsure (1)..(560): unsure at all n locations
  Clone ID: PAT_MRT4530_57299C.1
ctgcagagaaattcggtactaggaacaccaacggcgaaagcactgtgctgggccgacactgacactgagagcacaagaaagcataagcaacacaagggattaactcatcaatcacttaggtaattaaatcttcgaccatgtcggacaagtgcggcaactgcgactgtgctgacaagagccagcgcgtgaagaaaggtaccagctatggcgtcgtcataattgaagtcgagaatgagccacttttaggaggtccccgccggcgaggagaacggnggatggaaacacaggcaccaacatgttcctgcaccgactgcaantgcggcnagtgaagnnannaaanaancgaacacncnncgtcggcgagtcacctaccttaattagggnnnnntaaaaaccacccatatgagtgtggtnagtgtgtgtgcngattattgntgaattaaacncnagtgttatanatnaaanaagcagntggtnnctaacgngactatgcgggaatnaacgnatgaatttgngngatgnganntacccaagntntnctcaccgaaanaattaataag

SEQ ID NO: 55277 - DNA, 1550 bp, Oryza sativa
  Clone ID: PAT_MRT4530_5729C.1
ccggcggcggcacgcgcgcgtcgcgttgccggcgacggcatccggcggcggaggcgacggcgcaaaagcgacgcgaaagcggcggcagcggacggcggcaacgaccgaaggcgacggcgagcgcgggcggcggcgacgcacggggaattggggaagaaaaagaaaggggagggagtcctcaccggaggggacggcggcgtccggcgacgaggggcgacggagggaggtcgacacgcggcggacggcgaccgggatgacctaaagaacgaaaagaaagagattagagaggaagagaggggccataggagacgggaatgccggccgaaagcggcggacatggcgaccctcatcgtcgcacgatgggaaaggcgctccggcggcgaacctcgacgaaggaggggtggacggggtggatctcggccacgcgaacccgacggcggcgacggcgcggtgcggcggcgagcctagcggcagctagcggcggccggagtagcggaaacggcggcggcgggtggttgcacggcgcgggagcgatgggagactcgggagatgggggaggagagagaggcgggattcgaaaatcgaatcacggccatctcgggcgcgggcgcgagctggagagagaggggagtgggcgcggggaacgcggcgcacgtgcgggcgtggtcgtcgtggcccgaaggaggcggagacgtgggcgcggcggcggttgcgggcgcggcggcgcggcgggagcggcgggaggtgggggaaggacccgacaggcttgggaggagaacttcggggtgtgacatcctcgccccctccccttctctcccgtcgatcttgaggagcggtagcgatgccctcctcgtccctatgaactccgatgacaagaggcggccaacgagctccacgctctcctctccttcatctctctcttcctcggcgagctccacgcgcaaaggccggcgcccaacgccttcttggtcttcctccacatcccctccattgctcccagaacacgcgtcaccgccggacctcctcctgcctcgtgcctctcccgcctcatcgacctccgccgcgcaggcagcgctgtcaccatcgccgctgtcccggcgcatccgtagtagctccgttggggtgctcccgccgccgtgtgcagcaccatggccggatccggcaaggttgccatcctccttcctgcttaaaccagcaatgcaagcgaatgaatttttagagggcttggaggcaagcgagcgatgccgtccaggaagtagcaccagaagacaggcttcttggacactgcttccatctcgatcgacctctgtcagcggggcggcaaagctgtcaacgacgtgcttgtacgattggaccagccgcggcttgcgaccggcggtggtgttgccggggaggaagagcaggtgccagctccgctgcacgccatcgtcgtccggctgcggcctcaggaggacattgtactccttgtactccaagggatcctctcctcctgctgttagggcgccgatgcattggtggtggtggagcgccaccgggggaggaatgggcat

SEQ ID NO: 55278 - DNA, 2248 bp, Oryza sativa
  Clone ID: PAT_MRT4530_572C.1
agaaaaaaacttccaccacggtccacggttgatatacatcaagaaaatctacactcagattattctaacgaatcgtataatgtcagggagcacacagttccactatatcagaccggatgatcgttacatttgttatggagcagtaaaaagaaacacaggtacagaaggtatctacaaggttgatgatgaggggaggtgaaactaatttgaccagacatgcaccaggcctttgctgtttccagtgtagatttcgttgcggtcctcgtcgtagaatagtgcggtgatgtcctcaagagcatcagaaacagtgctccgaatggtagatctgctgctgtcacctctttttcgaggagcaattgtgagagtagggtcgaggggggagatcttggcgacgcactttcccgtgaagatgttgctcatgttgattgatcccgtggggggagctatgccctcgcagccgccactatctctgacctcctttgaagctttgcagtatgagataatcaagtcctggtcggcagtgatgtatatattattggtattgcagttagaatgccacaactcatgatcatcaaatgaagtaactagctctccacggaaattccatgctgcaactgtcctattgcagaatgtcaggaatagattattttcgtagaggaagatgaatgccgaaggagtcatgaattcggttttgttgacctcaatcaagttggagtttctaacatcaataatctgtaggttttccttgtcttgtttcacaagaagtttttcattaaactgctcgatgaagtcaacctttctgctccgatgaagcaactgggtgaaggttttcagtggggttccatcctcaattgagagtatctttaatggaacatgattagctgacttctgataaattacgagcatgattccaggacttattttgatttcctggatgttcttatcacatatagaatacagaaagttgtagttcttcagatcaaaaactttgtaagtgctatcctgggctgaaaaagtcagtactttgccattaacatcatcaaactcaacaaatccagggtatttcagtgattccgtttcaaataaaggaaacccatcattcaattggcctcttctaatgtactctattggagttgttctgcacttgagcgagctgaaacgatctgattcataaactgaaacggtgataagggattcattgtttttattataaaacaaactcctaatcacttcatcaggacttatattcaagtagcatatgcgcttgtttgttgctgccaacatgagaagaagttttgttaggaacataaatctgacaaaagcaaaaccagttagcattgaagaatgagatttaccccgattaaatgcaccgcatagtccagattgggcaagtgcaaatatgacatcctttgctgcaacaatctcaataattttggttctgctccacaaaaatggcagctgaacaagaaaatggacttcatcatcataggtgtcatactcttcctcagtggcgtttacatcaatgtcttctatggtgccacaatagcagctacatatgtcttcttccatgtcattagcatatagcattggtcttgcacatgtcctcttcccacttgaaaatttccatattagaggcttccagtggcaaacatacaagcaaccaaaatccacaaatatcttttctttttcagctaccggtgcaatgttataacattgccagttcactaaccagattaccactattgtagcaatataccacagaaatcgcagctgacactgacaatggacttcatcatcataggtgtcatactcttcctgcagctggaaattccggaatttctcggggcaggagaaggcggaggaggagggcgccgcgggccgcggcggccggcggtgccccccgccgatctcgcggcgcgcgaccttgtggacggagtcggacgggtcgcggcgcggcggcttgcggcaggcgggctgcaggcccgcggacagccacgcgcgtcgccgcgcggcggtgatgcggaggcgcacccgcagcccgggcttgtggtggtggtgctccatggcctgcctccgccggcgaggcgggagcgaggggcgcgggcacggggacagccgggggaccgaggaggtgtaggggaggggggcggggactacgcggggttagggtttagaggaggcgccatggatggggaggggaggggaggggacgcgggaatctggaggctagcgactagcgaggaagaat

SEQ ID NO: 55279 - DNA, 347 bp, Oryza sativa
  unsure (1)..(347): unsure at all n locations
  Clone ID: PAT_MRT4530_57300C.1
cccacgcgttcgcccacgcgtccgcccacgcgtccgtgcagtagcctgaggtgctgacgaagagcnagttgatcgacgcgccgcagtgttactactccggcatggccacctacttcgcgtcgtcgtcgacgctgttcggtattgagtttatcctgtttcactacttgtagatgctttagtgcgtgttttatatgtttatttgtttgtgtttgtgttttcttttttttttaattttttttatgttttatcttttttttgtttttattttagatttttatatgtttcttttttttttataattttattttagcttaggctgttttagtgtcgttttttttttgttttta

SEQ ID NO: 55280 - DNA, 1016 bp, Oryza sativa
  Clone ID: PAT_MRT4530_57301C.1
gcgccaaagttgtcgggccggtatcctcacggggactcgagaaacaccgcgaccaggagaaatttcagcaggagcaggcgatggcgagcccgcagtgctgcgcgaacccaccgacgctgaacccggccggcggggaggggaaggtggtggagagcttcggcgggatcaaggcgtacgtcgccggcgccgcggagtccaaggccgccgtcgtcctcatctccgatgtcttcgggtttgaagcgccgaacctgaggaagatagccgacaaagttgcctcgtctggatactttgttgtggtgccagatttcttacatggggatcctttagtacctgaaagtactgagaaaccgtttcaaatgtggataaaagaacatggcccggacaaagcatttgaagaggcgaaaccaattattgccgctctgaaggagaaaggagtgtctagtattggggctgtaggttattgctggggtgcaaaggtggtggtagagttagtgaaagctcatgagatccaggctgctgtgatgtgtcacccctcttttgtgactgttgatgatatgaaagaggtcaaatgcccaattgctatacttggagctgaaattgatcgtatgtccccaccagaagtggtgaagcagttcgagcaggttctttcttcaaagtcagggattggccactttgtcaagatcttccctggggttgaacatggatggactgtgagatacaagaatgatgatgcagctgctgtcaagagcgccgaggaagccctggcggacatgattgactggtttaataagaacctgaagtgaatttgacatatccgctgtccacgatcggtttgtgtattgctcatgtttcatcgcaagcatcctgaatttacggttgagtagccttcccattatgtttgtgctagtagtgtatatgctttgcttgtgttaggaatttgctttgtgtcaacctgaacttccacttctgtaataaaaatggatgggcgagcatcttctcggtttggtggtccaaaa

SEQ ID NO: 55281 - DNA, 1279 bp, Oryza sativa
  Clone ID: PAT_MRT4530_57302C.1
cccacgcgtccgcccacgcgtcaaatccccagtcgacagggtgctcccaacaagaatcccaccgccaccggtcgccatggctgcggtcgccaacaccgtcacaaccctccccctccttccctcccctcatgccttcgccgtgcccgcaatgggctcgctgcccttcctccggcgccgaatgcgctcccgtcgcctcgccgctgtccagcaggatgcggccgtctggacccccgcccccgtctcctccttcggcccagccaccgccgacggctcgctcgtccacttctccgtggacctctccgacgctaccgacctcgccgcatcctacaccacgccggggcagtatctcctaatccgcgtccccggcgaggatgagctcaaaccggcgttcatggccatcgcctcgccgcctgggggtgccgcgttcgagttcttggtcaagaccgtacctggtaccacggcggagaagctgtgtgggctccgcgacggggacgtgctggagcttggcgcgataatgggtaatgggttccccatcagcaggataaatccgcccgatgaggcgcaaactgtgctcctctttgctacagggaccgggatcagtccggttcggtcacttattgagtttggttttgctgcggatcaaagagctgatgtacgactttattacggtgccagaaatctccaaacaatggcatatcaggataggtttacaaactgggagtcaactgggcttaaaataataccggtattgtcacgagcagatgatagttggaaaggagaacggggatatgttcaggatgctttcttgaaagcccagaacatagcaaatcatttttctactggggcagtgctctgtggacaaaaacaaatgtctgaggagatcacatcagcccttgtagcagatggtgtatcaccagataaaatcttgaccaactattagcaaggattggcgagcctcctgtaaagctcagtgcttcctttggcctcaagatgttcttttttctgttgtattttagctgttctcgtcctatagttttttatatttctcagcacatagatatgtatacattataatcattcttcagagtatggccaccttttcaggccatgtaagcattgagctccaggcttatttgcagttatgcggtcccttgcggaacttgcaaatagcagagtaacatttggcaactcttcggctcttgtattattggcaagagaacatggtggtgtttggttcaataatgttaacgtaaacgtaattgggaatgcttccgccggt

SEQ ID NO: 55282 - DNA, 2889 bp, Oryza sativa
  Clone ID: PAT_MRT4530_57303C.1
atggacgcggaggcgtcggagctgcgggcgaggctcgccgccgcggtgcacgcgctcaatcacggcggcggcgggcaccacgacccgtcggcgcggctcgcggccaaccagtggctcctcgcgctgcagcggtcgccgcaggcgtggggggtggcgacctcgctgctggccgcgccgcccccgggccacccgcccccgcccgccgacctgctcttcttcgccgcgcagatgctccggaggaagatccagtgcccccccgccgccgccggtggttgccccacgccgcaggaggttgcccacctcctcgacgcgctcctcctcgcggtggggcggttctgcctcggcccgccgcggctgctcacgcagatctccctggcgctcgcggcgctggcgctccgcgccgagggcggggtggacggcctcttcgcgcggatgcggcacctccccgaccccgccgtgatggagctgctcactgtgctccccgaggaggtcgtgcaggaccagagcggggacaccggggtggacgccgcggcgcgctgcaggttcacccgcgagctcatggcgcacgcgcccgccgtgctcgagttcctcctcgcccaatccgagaacaccgccgccgccgccgacggggtccccctccacgagcgcaaccgcagaatcctgcgctgcctactgagctgggtccgcgtgggatgcttctcggagatgccggcggcggcgctcgcggctcacccacttctcaccttcgcgttcaactcgctgcaggtgtccttctcgtttgatgtggccgtagaggttatgaccgagcttgtcagtcatcaccaagatctacctcaggcatttctaagtaaaatgccatatattagagaagctcttcttctgccagctcttgccaacagaagcgagaagactattgctggtcttgtttgtttgatgtgtgaagttggtcaggcagcacctgctttggttgcagaagggagtgttcaagcacttgctcttgccgatgcacttttgaggtgcagtttagcacattttatacttgatagtgatgcacaaacagaaaaaaggaatgctgcacaagagatattttcccctgtgttttcttcactgcttgatgcacttctttttcgtgctcagattgacactgatgaacatggcactgatggggaattatgcatacctgatggactagcacagttcagaatgaacttggaggagcttcttgttgatatttgcttgcttctaggtgctcctgcatatattaataagcttttttctggtggatggggtttggctagccaatcaattccttggaaagaggtagaagttcgaatgtatgcacttagcatggtatacaaatcatttggtgatgtcattggttcttactcaaagttgttggcatcctctcaaagtaatattaaaccattactcctgttctgtgcttcagggatttcaaaatccatatcatcaaatgcttgctcattagctttgcgtaaactttgtgaggatggttcttcattcatgaacgagcctcagaatctggaaattcttttctggatcagtgagggcatggatgcggggaatctgcgaatagaggatgaggaagagatcattactgcaattacacatgctttatgttctgttcttgacaaagagttaaggaaaagttcactagcaaggttactttgttccagctacacagcagtggagaagcttattgacatagacagagatcaatctctgcgtcaaaatccagctgcttacacagaagcattgaaccttgctgtccatggtctctacaggatgggtgctctatttggccatttggcgacatcaattacatctagtctgattgatgatgacacggttttggttcttcttggtatattctggccacttcttgaaagactttcccgatcatctcatatggagaatgttagtttatctgcagctgcatgtcgttctctttcttcagccatacattcttgtggacaacacttccagattttgttacctaaagttctggaatgcttatcaacaaatttcttactgtttcaaaggcatgactgcttcttaagaacagctgccagtgttattgaagaatttggtcacaaggaagaatatgttgctttatgtgtcagaactttcgaagcacttagctccgcagcttcaatatctactttgaattcttcttacacatgtgatcaagaacctgatcttgttgaagcctatgcaaactttacatccacatttattcgctgctgcccaaaggaagctattgtcgcatctggctccctgcttgagttgtcatttcaaaaggcagctatatgctctacagcaatgcaccgaggagcagcacttgctgcgatgtcatatatgtcatgttttcttgatgttagcctcgctgctgcactagaatctcgagagcacccctctgatggatcacctggtgtggtgctagctcaaattttggcacgctgcggtgaaggtctcatgtcaaatgtactttatgctctacttggtgtatcggccttgtcaagggtgcataaatctgcaacaatattgcagcagttggcagcagtgtgcagcctctgtgagagaacaacgtggaaggccattatttcttgggattccctttgtcgatggctgcaatcagcggtgaaatctatgccctcagagtacctaaggcaaggggaagctgagatgatagttcctttatggctcagcgtacttcatgatgcagcctcagactatcttcacagtaggactggtgataatgtcagaaacaaccatgcttacatgcaagggaaaggcggaagaacccttaagcgtattgtcagggactttgcagaaagccatcggaatgcccccatgccctgcccttcataa

SEQ ID NO: 55283 - DNA, 485 bp, Oryza sativa
  Clone ID: PAT_MRT4530_57304C.1
ttctgaagcaatgagcactaggagcagcgatgattctaaatgttcgatgggggagatatccgacgatgatatcgaagaatacattgaggatttcatcgaaggattcattacatctggacttgtacgaccgcaaaagggcaccacgtcgcgtgcccctactgactggccaacagctagtgacatccttcagttcaagtacaacttagtgtcttatgaggttagcgcactggaagcggaagcggtagcattttcctgtgaactatgtcagggggtgaagctaataggagagcaaacaataggttcgaaagatcgggtcaactatttccaaatatttttaccattgcttcgagcgatagcccgtatggcagactggagcgaccgtgtaatttttgatgtaactggatggtcggggtcagtgcacgaccaccgggttctgctaagtccaataaggaagtatcctgatcagttccctaggctgccaccag

SEQ ID NO: 55284 - DNA, 515 bp, Oryza sativa
  Clone ID: PAT_MRT4530_57305C.1
aaaaagggaaaaaagggaattgcaacccacctttaaaaaccccgggggggggcccaactttataaaaaaccccccccggccccgcaaaaaggggggaaggaccccccaaaaataaacttttcccccccaccccccccaaaaattaacccaaaaccttaatcaatcaaagggaacaaattagggacccccccccaaaaggaaaaacggaaaaggccccttttttcccccttaaaaaacccccccaacaaacccggggggggggggggaaataaaaaaatttaaaccccggcgaaaaaaaaaaccccaaaattagtaaaggaatttctggaaaaaaaggaaaaacccccccccggccccccccaaatccggggaccccctgggggaagggggggacctcccatattcccaacgattcaccccctcgggagccccaaaaaaggcgggcccggggaaacgcagttttggcccctcggggggggccctacggcgatcttccccaagggggggttttcccc

SEQ ID NO: 55285 - DNA, 512 bp, Oryza sativa
  Clone ID: PAT_MRT4530_57306C.1
tcgtgttgaacatggcactgatggggaattatgcatacctgatggactagcacagttcagaatgaacttggaggagcttcttgttgatatttgcttgcttctaggtgctcctgcatatattaataagcttttttctggtggatggggtttggctagccaatcaattccttggaaagaggtagaagttcgaatgtatgcacttagcatggtcgctgacacaattttacaagatggaagccccttcgatttttcaatcataatgcattttgtgaacattctgtccagcagagcacacagcgaacttaatggatgcctatccttggtatacaaatcatttggtgatgtcattggttcttactcaaagttgttggcatcctctcaaagtaatattaaaccattactcctgttctgtgcttcagggatttcaaaatccatatcatcaaatgcttgctcattagctttgcgtaaactttgtgaggatggttctttattcatgaacgagcctcagaatc

SEQ ID NO: 55286 - DNA, 126 bp, Oryza sativa
  Clone ID: PAT_MRT4530_57307C.1
atgacggcgggctcgggcaacgacaggagtggtagtgccagcgtcgacgcaggctgcgatgagctcggtggatccggccgaggtggatccagcggcgacaggctcaggagccaagggtgtcgatga

SEQ ID NO: 55287 - DNA, 168 bp, Oryza sativa
  Clone ID: PAT_MRT4530_57308C.1
atggaccatgagaggcccaatgataagggaggtacaatagacttggggaatggcaaaggtcgcacgcagctgcgggaggccagcactgattgggccgcgtgcggcggttgggcggtggtctccggtcgcgctgatgaaatatgcagtttgaccaagggcaaaagatga

SEQ ID NO: 55288 - DNA, 152 bp, Oryza sativa
  Clone ID: PAT_MRT4530_57309C.1
gttacacaatgagggcgggcaggttggtgatcctcgtggcggtggcggtggtggtggtggtcaccgtctgcagagcggcggagggcgccagctagtgcgggagggcgttcgtcgaccgggtggcgctgcggctgtcacctagctgtttctat

SEQ ID NO: 55289 - DNA, 606 bp, Oryza sativa
  Clone ID: PAT_MRT4530_5730C.1
atggacatctctaggacaaatgaaggctacacgagctgtggcccggtagtcgagatgtcatggcacagggctggtgtcctgctgctagggactcaatcctgcctgcctgtcccggaggttccggccgtaggcggggctgggtcgatactcttgtttatggctaggatgggttggaactatgtcacgtcttccgtccgtatgccgtggtgggtctccgacaagtggggcccacctgtcgggtccttccccaacctcccgtcgctcccgccgcgccgccgcgcccgcaaccgcagccgcgcccacgtctccgcctcctccgggccacgtcgaccacgcccgcgcgtcgtcccggtcgccgtccgccgcgtgtcgacctccctccgtcgctcctcgtcgccggtcgccgccgtccccttcggtgaggactccctcccctttcttttccttccccgattccccgtgcgtcgccgccgcccgcgctcgccgtcgccttcggtcgttgccgccgtccgctgccgccgctttcgcgtcgcttttgcgccgtcgcctccgccgccggatgccattgccggcaacgcgttcgcgcgcgcgtgccgtcgccgctag

SEQ ID NO: 55290 - DNA, 270 bp, Oryza sativa
  Clone ID: PAT_MRT4530_57310C.1
ctagagagttgagaagttcaggagagtagagggggagagaaccgcgtaatcagatggcttcgtcatcaaatccatcaaatcttcccgccccttacagatgtggcccactgggtctgtccagattgctccggtgatgtcacagccagctacccgccatctgatgttgttcgtccggagagcagcctcatcgctgcgattcgtgtgattgaggctgatccggtgctgtccatccaagagaaggctcgtcgtcgccaggaacttcttggccat

SEQ ID NO: 55291 - DNA, 195 bp, Oryza sativa
  Clone ID: PAT_MRT4530_57311C.1
atggctctggtaagaaatgggatggtgggcctggtgggggaggtcctggtggtggcccttatgggggcggccgcggcggtggaggcggcctccgaggtcctcgcacactatctgacatccgatctaacgatcagatcagttaaagatgtgtccttcaatggacctgcacgaattcgtgaagccaatgccagataa

SEQ ID NO: 55292 - DNA, 470 bp, Oryza sativa
  Clone ID: PAT_MRT4530_57312C.1
ctaaacattaaattaaaacaattggattaataactaggcagctagttacattctgaaaagtattaggcaactaggtaaaattgatagatataaattactagttgtatcacctaggagtaccacattgtcctcttcatcactttgattggagaagttgtgataacaatccggcccaggtgggattgaccaaggcccaataaattaaggttgcccggaccccaacaattcataggcacacccactcggggaaaggcccaatctccctaaaagactagtccgataggggaagggtggctctccctttaaaggtggcttcctcctcccaagctaagcaaggtgggatttttcagaggctcacacggtcgccgcccgacttttgcgtctttgccagcgggtaatagtggaggatgtcctcatcaagttgtcatgctttccaccaaatcaataagcattttgagccagtatctttt

SEQ ID NO: 55293 - DNA, 272 bp, Oryza sativa
  Clone ID: PAT_MRT4530_57313C.1
cgagccaaaaccacacgattgggccgcgtattgatacgatatggattatcccagatgctatcagtcgagaggcgagatgatactactcatatcaagagcaacatgctactatgattgcagcaagacatggttggtcttaccaacactggttaccataaaaacgaactaggggggcatacacatacgctgaaagagttgctcatgatcaacagagacgaatgcttgtacatgcactggagcactaattatttacttaaacttggcgggattag

SEQ ID NO: 55294 - DNA, 578 bp, Oryza sativa
  Clone ID: PAT_MRT4530_57314C.1
accttgcgcgctcgctcgcctggcctggcagggcaggcggcgcgcgtgcacgacatacgcgtcgaatggtccgtcaaaattggtgagatgcagttcgtttttgttttggaaatgttccgaaaaatccggtgcgtgcaaacggcgtggagtccggataagttacgcgcgacttacgcgcagtggagatggtgcgggcgccctgatcaagcgacccttctctatataaaccgagccgccgccttcacgcaacacacgcgaaatcaatctagggtttgcctcctattctgtgctgcgccgtcgctcgtaggttactccatcccgctcgccggcgtgcacctgcgattgggagagcaggtctccggaacctctgccttcgacgtcctgcaccgggagaaggcgacaataaggtttttgggaagcgctttgcgcgactgctccctgtttgtccgcgacggctcgtcttcctcttcgctcgcgtgctgcgtgccttcgtagacgccagcaaggactagagggtacgatagcaagctggaacaattgtgctgcatatgcttgcaacatctagaaaattgctgcat

SEQ ID NO: 55295 - DNA, 490 bp, Oryza sativa
  Clone ID: PAT_MRT4530_57315C.1
ccaacatggatgacagcctctgggaccccgtcatgaacgtccacgctcgtggtacctacaaggtcaccaaggccgcctggccctacttcctcaagcagaagtatggccgtgtccttaacaccacctcaaccagcggtatctacggcaactttggccaggccaactactctgcggcgaaatgcgctatccttggtttctcccgtgcccttgcccttgagggtgtcaagtacaacatcttcgtcaacaccatcgctcctaacgctggcactgccatgaccaagactatcctccccgaggagctcgtccaggccttcaagcccgactacattgctcctcttgtccttgcactctgcagtgacaaggtgcccaagaaccccactggtggtctttacgaggtcggcagcggttgggcgggacagacgaggtggcagcgcaccggcggccacggctttccggttgacgttcccctcactcctgaagaggtcatcaa

SEQ ID NO: 55296 - DNA, 621 bp, Oryza sativa
  Clone ID: PAT_MRT4530_57316C.1
tggttattgcttaccatattgaacaaactgggcgatgtggaagcgagatctagcggtgtgtgtccatcgtcgttcaagacatcgttcttgttttgtgcttgaaagctatcgaatcaacaagctgatatctcacctaagctccgaaagacagcagcatgcagagcattctgcgagctgtagagtccgaataagttacgcgcgacttatccggttcggttacgcgcagtagagatcgtgcgggcgccctgatcaagcgacccttctctatataaaccgacctgccgtcttcacgcaacacttgcgaaatcaatctagggtttgcctcctactctgtactgcgccgtcgctcgtagactactccatcccgctcgccggcgtgcaccggcgatcgggagagcaggtctccggaacctctgcctttgacgttctgcaccgggagaaggcggcaataaggtttttgggaagcgcttcgcgcgactgctccctgtttgttcgcgacggctcgccttcctcttcgctcgcgtgtttcgtgccttcgtagacacctgcgaaaagtttcaaccaagcaaccggtctttacgtcacctcggtacgtgttcaatccaataggaacgaaccggg

SEQ ID NO: 55297 - DNA, 612 bp, Oryza sativa
  Clone ID: PAT_MRT4530_57317C.1
gcgcgtgcacgacgtacgcgtcgaatggtccgccaaaattggttcctcaccttgcgctccttttgcagttttgttttgctgcaaattcggattcgtttttgttttggaaacgttccgaaaaatctggtgcatgcaaacggcgtggagtccggataagttacgcgcaccggcgattgggagacgtggagtccggataagttacgcgcgtggagtccggataagttacgcgtggagtgaagatcatgcgggcgccctgatcaagcgactcttctctatataaaccgactcgccgtcttcacgcaacacacgcgaaatcaatctagggtttgcctcctactctatactgcgccgtcgctcatagactactccatcccgctcgccagcgtgcaccggcgattgggagagcaggtctccggaacctctgccttcgacgtcctgcaccgggagaaggcggcaataaggtttttgggaagcgtttcgcgcgactgctccctgttcgttcgcgacggctcgccttcctcttcgctcacgtgcttcgtgccttcgtagacgcctgcgaaaagtttcgaccgagcagccggtctttccaccacctcggtacgtgttcaatat

SEQ ID NO: 55298 - DNA, 621 bp, Oryza sativa
  Clone ID: PAT_MRT4530_57318C.1
gcacgaggggacgacggaggatgatgagaggctgacggatcctctcctggagcctaagccggcgatcaacggcggcggcggaggcagcaacgaggaggaagaagaggttgggtcgctggggcggcgcctggtggaggagaacaagaagctgtgggtggtggcgggtccgtccatctgcgcgcgcgccacctccttcggcgccaccgtcgtcagccaggccttcatcgggcacatcggcgccaccgagctcgccgcgtatgccctcgtctccaccgtcctcatgcgcttgagcgtcggcatcctgtaatccttctcccaatctacctcttcaccaccccgctcctaattgcgcttggtcaggatcccgatatctctgttgtggctggcaccatctcactatggtacattcccatcatgttctcctacgtctggggcttaacaatccaaatgtatctaacaatcacaaagcaagaacatgatcgttacctacctctccttgctcaactttggactccatctcttcctatcatggctcatggtggtcaagtttcaccttggccttgctggggtgatgggctccacggtcattgcctgttggatccctatatttggtcagctcgc

SEQ ID NO: 55299 - DNA, 646 bp, Oryza sativa
  Clone ID: PAT_MRT4530_57319C.1
gttttctacaatcgtgacatgtgctgttcaggcagaagctgagtttcatgtttctttttgcagttttgttttgctgcaaattcagattcgtttttgttttggaaacgttccgaaaaatccggtgcgtgcaaacggcgtggagtccggataagttacgcgtgacttatccggtttcgtgtggagtccggataagttacgcgcgacttatccggttcggttacgcgtaatggaaatcgtgcgggcgccctgatcaagcgacccttctctatataaactgacccgccgtcttcacgcaacacacgcgaaatcaatctagggtttgcctcctactctgtgctgcgccgtcgctcatagattactccatcctgctcgccggcgtgcacctgcgatcgggaaagcaagtctccagaacttgtgccttcgacgtcctgcaccgggagaaggcagcaataaggtttttgggaagcgctttgcacgactgctccctgttcgtccgcgacggctcgtcttcctcttcgctcgcgtgctgcgtgccttcgtagacgcctacgaaaagtttcgaccgagcagccggtctttccgccacctcggtacgtaggaactcgcaggtgtaatatccgcatagtacggttcccaccggttgctt

SEQ ID NO: 55300 - DNA, 365 bp, Oryza sativa
  Clone ID: PAT_MRT4530_5731C.1
cccacgcgtccgcccacgcgtccgcccacgcgtccgctcgaagcctaggtagggttttgcgctcgcttcgcttccaacccacccatggcgggcgtcgaggcggcactgcttcctccgccaccgccgccgccgcaggcgaggtgggcctccgtgcggcgacccctgctccggctcctcgcgctggccgctgacgtgctggtgtacggactactcgccgcgatgtggctgaacaacgccgtcttccccgccgacatcttctcgcgctgggccagcggcgagggctccaccaccgtgggcatattgtcgcgctcggccagaggcgaggggttccgcggcgtcgacatcgtaggcgtcacgatggtctg

SEQ ID NO: 55301 - DNA, 1044 bp, Oryza sativa
  Clone ID: PAT_MRT4530_57320C.1
atggagaggacgacggaggatgatgagaggctgacggatcctctcctggagcctaagccggcgatcaacggcggcggcggaggcagcaacgaggaggaagaagaggttgggtcgctggggcggcgcctggtggaggagaacaagaagctgtgggtggtggcgggtccgtccatctgcgcgcgcgccacctccttcggcgccaccgtcgtcagccaggccttcatcgggcacatcggcgccaccgagctcgccgcgtatgccctcgtctccaccgtcctcatgcgcttgagcgtcggcatcctgataggcatggcaagcgcattggaaactttgtgtgggcaatcatatggtgctaagcaataccacatgttaggcatatatctacaacgctcatggatagttctcttctgttgtgcagtaatccttctcccaatctacctcttcaccaccccgctcctaattgcgcttggtcaggatcccgatatctctgttgtggctggcaccatctcactatggtacattcccatcatgttctcctacgtctggggcttaacaatccaaatgtatctacaatcacaaagcaagaacatgatcgttacctacctctccttgctcaactttggactccatctcttcctatcatggctcatggtggtcaagtttcaccttggccttgctggggtgatgggctccacgtgtagaattatggtacaacaccatattggtgctcctcactggttatatgaagaatgcagaggtgtcgctattggatctggttggcaaactatagttgcctatgttaatgttgcatcgtactacttgatcggtatccctattggggcaatactaggctatgctctaggatttgaagtaaagggcatttggattggcatgcttgttggaacactagtgcagactcttgtgcttttattcatcacacttaggactgattgggaaaaacaggtagagattgctcgagagagactaaatagatggtatacggatgataatggaagatcacaaaattcgagaggaaatccatga

SEQ ID NO: 55302 - DNA, 576 bp, Oryza sativa
  Clone ID: PAT_MRT4530_57321C.1
gccttgcagggcagggcgcgtcgaatggtccgtcaaaattggaaatgtttttgttttgctgcaaattcggattcgtttttgttttggaaacgttccgaaaaatccggtgcgtgcaaacggcgtggagtccggataagttatggtgcgtgcaaacggcgtggagtccggataagttacgcgcgacttatccggttcggttacgcgcagtagagatcgtgcgggcgccctgatcaagcgacccttctctatataaaccgagccgccgccttcacgcaacacacgcgaaatcaatttagggtttgcctcctactctgtgctgcgccgtcgctcgtaggttactccatcccgctcgccggcgtgcacctgcgatcgggagagcaagtctccggaacctctgccttcgacgtcctgcaccgggagaaggcggcaataaggtttttgggaagcgctttgcgcgactgctccctgttcgtccgcgacggctcgtcttcctcttcgctcgcgtgctgcgtgctttcgtagacgcctgcgaaaagtttcgaccgagcagccggtctttccgccacctcgatacgt

SEQ ID NO: 55303 - DNA, 2118 bp, Oryza sativa
  Clone ID: PAT_MRT4530_57322C.1
atgagcgcgagtagagtggccagcgacgtgatcgctcctctgccgtacgcccggccgtgcttcatgatggtggtggagataggcatggcaagcgcattggaaacattgtgtgggcaatcatatggtgccaagcaataccacatgttaggcatctatctacaacgctcatggatagttctcttctgttgtgcagtaatccttctcccaatctacctcttcaccactccgctcctaattgcccttggtcaggatcccgatatctctgttgtggctggcaccatctcactatggtacattcccatcatgttctcctatgtctggggattaacaatccaaatgtatctacaatcacagagcaagaacatgatcgttacctacctctccttgctcaactttggactcaatctcttcctatcatggctcatggtggtcaagtttcaccttggccttgctggggtgatgggctccatggtcattgcctgttggatccctatatttggtcagctcgcatatgtcttctttggcggttgtcctcaaacatggacagggttctcgtcctctgcctttactgatcttggtgctattatcaagctttcgatatcatccggagtgatgctttgtgtagaattatggtacaacaccatattggtgctcctcactggttatatgaagaatgcagaggttgctcttgatgctctttctatatgccttaatatcaatggttgggagatgatgattgctattggatttttggctgcaactggagtgcgggtggcaaatgaacttggagctaggagtgcaagaagggctaagtttgccattttcaatgtggaggtagtagatgcagtcgctgatcttgctccccttctagctttctccattttattgaatagtgttcaaccggtgctctcaggtgtcgctattggctctggttggcaaagtgtagttgcctatgttaatgttgcatcgtactacttgatcggtatccctattggggcaatactaggctatgctctaggatttgaagtaaaggtgaagctgtcaagcacccaaatggcggcgccggtgaggtcggtcctccccgtcgtcctcctcggctgcggcggcgtcggccgccaccttctccgccacatcgtctcctgccgcccgctccacgccaaccagggcgtcgccatccgggtgctcggcgtcgccgacagctcctctctgctcgtcgccgacgacctccactccaacggcttcgacgacgcgctcctcgctgatctctgcgccgccaagtccgccggctcgcccctatcttccctgctcgctcgagggcaatgtcagctattcaacaacactgaggctaggaggaaagtcattgacactgccagcgttctagggaaaacaactggtcttgtactagttgattgttctgcaacttatgatactgttggcatgctaaaggatgccgtggattgtggatgttgtgttgaggatttcgaaaagttggtctccaacttccgtcgcataagatttgaatctactgttggagccagtctgcctgtaatagcttctgtgactcgtattattgcctctggagatccagtttctcgtattgttggcagtctgagtggtacacttggttatgtgatgagtgagctggaggatggaaagaaatttagtgaagttgtgaaaactgccaagtctcttggctatacagaaccagatccacgtgatgatctcagtgggatggacgtagctagaaaggttgagagtttataccccagtgaattaggacctgatgcaatgtccacaaaggacttccttgaaagtggtttagtacagcttgataaaagcattgaagaaagagtaaaggcagcatctttgaaaggaaatgttcttcgctatgtctgtaagattgaaagcacagggtgccaagtgggccttgaagaactcccgaaaaactctgcactgggaaggttgagaggaagtgacaatgtggtggagatatacagcagatgctacgagagcgcccctctggtgattcagggcgctggagctggcaatgataccactgcagctggagttcttgctgacatacttgatctccaggatctcttccacaaaacggcttga

SEQ ID NO: 55304 - DNA, 676 bp, Oryza sativa
  Clone ID: PAT_MRT4530_57323C.1
cgactgtacgagatggccacggtcgcggccggttggatgcatgtatatatggtaacgggcgtagtatacgcgcgcgtgcaggcgctggggtcgcgcgccggccagccaccaccgccactggacggacgtactgaggtggcgtaaaggccggctgctcggtcgaaacttttcgtaggcgtctacgaaggcacgcagcacgcgagcgaagaggaagacgagccgtcgcggacgaacagggagcagtcgcgcaacgcgcttccaaaaaaccttattgccgccttctcccggtgcaggacatcgaaggcagaggttccggagacctgctctcccgatcgcaggtgcacgccggcgagcgggatggagtaacctacgagcgacggcgcaacacagagtaggaggcaaaccctagattgatttcgcgtgtgttgcgtgaaggcggcggctcggtttatatagagaagggtcgcttgatcagggcgcccgcaccatctccactgcgcgtaaccgaaccgaataagtcgcgcgtaacttatccggactccacaccgtttgcacacaccggatttttcggaacgtttccaaaacaaaaacgaatctgaatttgcagcaaaacaaaactgcgtttccaaaacaaaaacgaatctgaatttgcagcaaaacaaaactgcaaaaggag

SEQ ID NO: 55305 - DNA, 1056 bp, Oryza sativa
  Clone ID: PAT_MRT4530_57324C.1
atgagcgcgagtagagtggccagcgacgtgatcgctcctctgccgtacgcccggccgtgcttcatgatggtggtggagataggcatggcaagcgcattggaaacattgtgtgggcaatcatatggtgccaagcaataccacatgttaggcatctatctacaacgctcatggatagttctcttctgttgtgcagtaatccttctcccaatctacctcttcaccactccgctcctaattgcccttggtcaggatcccgatatctctgttgtggctggcaccatctcactatggtacattcccatcatgttctcctatgtctggggattaacaatccaaatgtatctacaatcacagagcaagaacatgatcgttacctacctctccttgctcaactttggactcaatctcttcctatcatggctcatggtggtcaagtttcaccttggccttgctggggtgatgggctccatgtgtagaattatggtacaacaccatattggtgctcctcactggttatatgaagaatgcagagtgcgggtggcaaatgaacttggagctaggagtgcaagaagggctaagtttgccattttcaatgtggtcaccacttctttcttgataggatttgtgttttttgtgctcttccttttctttcgtggaagccttgcatacatatttactgaaagtcaggaggtagtagatgcagtcgctgatcttgctccccttctagctttctccattttattgaatagtgttcaaccggtgctctcaggtgtcgctattggctctggttggcaaagtgtagttgcctatgttaatgttgcatcgtactacttgatcggtatccctattggggcaatactaggctatgctctaggatttgaagtaaagggcatttggattggaatgcttgttggaacactagtgcagactcttgtgcttttattcatcacacttaggactaattgggaaaaacaggtagagattgctctcgagagactaaatagatggtacacggatgataatggaagatcacaaaattcgagaggaaatccatga

SEQ ID NO: 55306 - DNA, 624 bp, Oryza sativa
  Clone ID: PAT_MRT4530_57325C.1
ggcgctctaaactagtggatccccgggctgcaggatcggacgagggttaaataagttccaaattgatgatttggacaccctgcatgtaccctgtgttctcgtttagtatttcggctttacttttagtttgcacaggagagcactcttgattttcttagtacataatcagttcatcattctacttgcctacatttaagttaattaattctgtctcttcatttaagtttgttgaaatttgagaaaagaatatgaataatgtagtacgcttttctcatttgaagttaaggaactgttagattctatagaatgactagtacgcccttgtttaatgctactgtatggtagttacacatataaaggggactctggactcagctttgttattgatagcacatcccaactgataagtcatttagtatcatatttcttgccagttgtactagtagatcctgaatccttagtccttacccagagggagtattaactggaatccactgtgcatgcaagcctcattcgtaaaagcattttacgatttcataactttgtgagctcaaaactacaaagaaatcaccttgtacatctataagaacagctcctcaacaatccttgctgctcctgcacaca

SEQ ID NO: 55307 - DNA, 1458 bp, Oryza sativa
  Clone ID: PAT_MRT4530_57326C.1
tcatggatttcctctcgaattttgtgatcttccattatcatccgtataccatctatttagtctctctcgagcaatctctacctgtttttcccaatcagtcctaagtgtgatgaataaaagcacaagagtctgcactagtgttccaacaagcatgccaatccaaatgccctttacttcaaatcctagagcatagcctagtattgccccaatagggataccgatcaagtagtacgatgcaacattaacataggcaactatagtttgccaaccagatccaatagcgacacctgagagcacaggttgaacactatttaataaaatggagaaagctagaaggggggcaagatcagcaactgcatctactacctcttgactttcagtaaatatgtatgcaaggcatatagaaagagcatcaagagcaacctctgcattcttcatataaccagtgaggagcaccaatatggtgttgtaccataattctacacaaagcatcactccggatgatatcgaaagcttgataatagcaccgagatcagtaaaagcagaggacgagaaccctgtccatgtttgaggacaaccaccaaaaaagacatatgcgagctgaccaaatatagggatccaacaggcaatgaccgtggagcccatcaccccagcaaggccaaggtgaaacttgaccaccatgagccatgataggaagagatggagtccaaagttgagcaaggagaggtaggtaacgatcatgttcttgctttgtgattgtagatacatttggattgttaagccccagacgtaggagaacatgatgggaatgtaccatagtgagatggtgccagccacaacagagatatcgggatcctgaccaagcgcaattaggagcggggtggtgaagaggtagattgggagaaggattactgcacaacagaagagaactatccatgagcgttgtagatatatgcctaacatgtggtattgcttagcaccatatgattgcccacacaaagtttccaatgcgcttgccatgcctatcaggatgccgacgctcaagcgcatgaggacggtggagacgagggcatacgcggcgagctcggtggcgccgatgtgcccgatgaaggcctggctgacgacggtggcgccgaaggaggtggcgcgcgcgcagatggacggacccgccaccacccacagcttcttgttctcctccaccaggcgccgccccagcgacccaacctcttcttcctcctcgttgctgcctccgccgccgccgttgatcgccggcttaggctccaggagaggatccgtcagcctctcatcatcctccgtcgtcctctccattgctactctgctctgatagctagctctccagtgcacaacaatggagatcgatggagttaataggagcaggaatatactttgagttgcagatattagtagctgtctgaattgaagaaggctgccctcgtg

SEQ ID NO: 55308 - DNA, 419 bp, Oryza sativa
  Clone ID: PAT_MRT4530_57327C.1
agggtttattgcatcagccgagggggaggggcgcgcggaccgggtccatgggagtgggacccacgcggcagcctcacggtccacggtggaccaggtgcacccgggctcacacctgccgacgccgtgggccccacacgtcagccgcacccgagggcgcgggcggctgacggctgggccccacgcggcagccactcggtgcgcccgagggcggccatgccggcgcgcccgtcagcgagggtggcggtcgggcccgccagtaagcggcgcgcgcgtggggagggaggccgaatgggccgcgtgggagaggagagagagaggggggagagggagatgggccgagccggcccaaaggagggaagggggacttttagggtttttcttttttataaaacctttttaactttgtttatttcttctta

SEQ ID NO: 55309 - DNA, 180 bp, Oryza sativa
  Clone ID: PAT_MRT4530_57328C.1
atgagcgccgcgtacgcgtacgcgaacgcgaacagagtagcagaaatcgtcgagcagatcatatccatcatcagatcacatgtgggcggtgaggcgagagcggtggaggagtgcatttttcacgttcacaatgtggcgctactactactactgattggcaacaacgaccacacagccaac

SEQ ID NO: 55310 - DNA, 366 bp, Oryza sativa
  Clone ID: PAT_MRT4530_57329C.1
catgcaagaaggatcaaaagagagatggtttgttaattgcatgtgcgcactcctgcaggacagctgtgcatgggcttaagaagaagtatggatgtggagagtatggaaattagatgaatggcaatggtgggccatgaaatgtgatcactttgaatgttacgtggtgcaatttaatttcaggaactgatgctgactggaagagacatgtttgtatgggttatttgattttcagttctgaactattattggattgtatcacccttttgtatgggttctgaactactattttcagacctatgtcatgtaatcttgtttggattattttcatatatatgtcatgcactattattgaaaaaaaaaaaaaaa

SEQ ID NO: 55311 - DNA, 376 bp, Oryza sativa
  Clone ID: PAT_MRT4530_5732C.1
cctttttctttttttttatcgcattcctttctgacgaggatcgccgactttgcccataaagcaatagggatacacctccgtgtacggaaactacattagcgctgtacagatcctaacaccaatacaacaaacttgaggagaaacgtctctttcagagtaatcactaacaatacaagcatcctggaaacatgccagcgcatcacaaacacttagctctggactctcatctcgacatggatcatcactgatgcatagtcacgacctgctcttgaatgcattagccatattgccacctgaggcctaatggcaaaaaaggcactgcaatgcaagggcctaccgagaatatccaaaggatatcccaggcttagcccctggt

SEQ ID NO: 55312 - DNA, 456 bp, Oryza sativa
  Clone ID: PAT_MRT4530_57330C.1
actaacgctaatttttgttaatttgttgatacagggagacctgggaggagggcctcaattacatggtttcttcaacctctagcccaactcaaggaaaaaaaggaaaaagtatacttttactccctcaactccggcccgagcggcggcgggtgttcgagggccgtagcggcggcagccagcgggagggcgggcgctgcctagagacggagcggcgacgaggcgccctcgaggcggagctatggctcgtcgtcctcaaggcgttccgatggctcccgccgcccatgcatgtcgtgacgcctgtgccgccgtcgccgccttgattgaaggtgagaggagaggaaaagatgagagagaggggagaggggtgagaatgacacgtggggccatatgtcggtgggtcccactattttttttttgttaatgacacgttggtcctacaaatttttgattttactc

SEQ ID NO: 55313 - DNA, 363 bp, Oryza sativa
  unsure (1)..(363): unsure at all n locations
  Clone ID: PAT_MRT4530_57331C.1
acacagaggcacagagcaacagatagctttattggtatagtacacactatacgcttatacgtacatccataccatatacgaggtgtacacatactgagcccatacgtacaaaaaccccggctcttattcagctgcacacgcccatggccacaccttacgcgtgcgcgcggacgccggccatggcgccgccgccgccgcatgcatggcgcgatcgatcgatggatcatcagccgaagaggtggtgcttcttcttcccctcgccgccgcgggcgccggagccggactcctcctccgcctcctcctcggcgtacttcgccgcctgcttggcctccttcttgtcngggtgctcgtggaacgcgaacc

SEQ ID NO: 55314 - DNA, 879 bp, Oryza sativa
  Clone ID: PAT_MRT4530_57332C.1
atggctgcgggtggcgggcggtcgaggagccaacgccgactggcggtcggcggcggggatggctgtgggcggcgggcgggcgaggagcggagtgtgtgcgcgaacgggcgctgccgcagctcccccgtcggcgactctgtgactgcgaaggcgaacgcgttgctggcaactgcaacggcgaaggcgaaggcggcgacaagatcgaaccgcgagctccggaaggccagcgacggtggcacgagcgaccggcggccagcggcggaggcgcccgggcggctggtgacggaggcgaaggcggacctggcggccggtggcggaggagaaggtggacctggcgggcggcggcggaggcgcccaggcagccggttgcggaggcggagctcgctcgggcggccgagagcgctccgcgcgaaggtggtggccctccccgccacggccttccccgcccagaccaccaccgtcactgcattgcaggaaagtagaggggaaagggagaaacggcggtggcggccttccgcgttgccgttcgccggcggaggcgcagctccatctctcccggcaacaccgtcgcagtgccctccggccgccgcccgccctcccagccacgcccgccgcgtctccagcatcaacgcgcgcccgtcccccgccgccgccgtccccgtccccccaccgccgctgccgccgccgcgcccgtccaccaccgtcgccgccgccgtcgtcgtcgccgtctacaagggacgactgcaggaatcacctgatacctgcgcatgtgggctccgtgtgaggcacatggcatatggcgccggcattggacggtacggtcgtgcgccaagagagggcggcgtgttcgacagttcgacggggtcgtcgaacccctga

SEQ ID NO: 55315 - DNA, 705 bp, Oryza sativa
  Clone ID: PAT_MRT4530_57333C.1
atatttacggcttgggtgaattgggtttaagacgcacgctgggaatgactgaccgccattgttgctatacggatattatgctgactgacttggctttgtggttatgactgtgaaatgatgatgccttggacactgcgggtgctgtccggctgcgttggtgggtggccgtgcccgggggcggttgatcgtgctgcggctcaccagggctgcccctacggtccatgctttcaccccttgcggctggttgtcgtgctgcttcgggttgccgaaaagctcggtggtgcgcctggctggggcccggcgccgcgatgtcccgggggcgcccctcgcggccccattttgatagtggaaatgaagctgctgtggtgtgcctgggccccaggaatggtgacagcgctgcgtggcgcccttgatatgatgcatacctgatatgtggtggtgatgccccccacccgctgcagctgctgtctgcccccgtgtggccctgtgtgctggtgatgtgtgatggcatggtgaccgaggaaggggctgaggtgaaatggtgtgtgtgatgatgatgtgtggcatgtggtggaaatggtgctgtgttgctgtgggatgagtgcagcaatgtgaacctgctgtgttggcaagctggtgagaatgatggatgcatcacccccggcccgccctgccgcctccccccaaaaaaaaaaaaaaaaaaaa

SEQ ID NO: 55316 - DNA, 4542 bp, Oryza sativa
  Clone ID: PAT_MRT4530_57334C.1
atggaagcaacggtggtgagcgtggggaagtcggtgctggacggagcgctaagctatgccaaatccgccatcgcggaggaggtaactctgcagctcggcgtccagcaagaccagggcttcatcaaggacgagcttgagatgatgctgtctttcctgcgtgctgcagacaaagagcagggacacaatgaggtgttccagacttgggtgaagcaggtccgtgacgtcgcctacgacgtcgaggactgcctccaagactacgttgtccggttggagaaaccgtcctggtggcgaaggcgcctctcctgcacgacactgcgggagaggcatcgcatcgccaccgtgatgaaggagatgagaggcaaggttgaggatgtcagcctgagaaactcgcggtacaaactgcttggtggccctgcagctgcctcagagccttctccccttacggctgctgagctgcagtccaccaccttcgatgacattgaggctacgcgtgtcgccaagcagcaagaaaaggtggacctcgtggatctcattactaaggacggcgatggccttcaagaaattgcagtgtggggaacaagtggtgctactggagtggcttccgtcgtatgggtggcttatcaaaaggtgaaggacagatttccggaatgccatgcttgggtaaaagtgatgcatcccttcgatgccaaggagttcattgggagcttggtgaggcagtttaaagcaaactcccatgaggggactagcaacacaccacaaggaacaccttctggggtgtcggctctgaacgagatggaagcaaaagattataacttgcttgacgacttctgtaaatatgtggctaacaagaaatatttgattgcccttaatggcctgtgtaacatagaagagtgggactggataaaaacctatcttccaaacaaacataatggcagccgaatcctggtgtgcacgccgcaagctgaagttgcaatctgttggaaaaacaaggatgggtacaaggtgtctgaaattcgacaggaagggtcattcgtcacacctctttacgtcttctacgaggaagtaaaggactctccaaccgaacaaactgacaagacaaagtccagctcaaacgccactgctagtacagagggtcgaaaaagcccacctgtgcctaacgaacgcaaggatccagagtcccaagttattgatctaatatccaaaggtgggcaggtgatcgctgtttggggaatggaaaatgatggtgtcagaaggactgctcttgtgaggaaagtgtatgagcgctctgttgacagatttctgaggcatgcttggtttggcatgacgtctcaattcaatcatgatgagctcgttatggagttggctcgccagttgaatccagataactgcgaagacacttgcctcaaaaaaaaagaagacagtcaagacacagaaggctctactcatcgtaagcagcaagaagatggacagaacagtagtaataaatcaaaaaggggaaccaccgagtcgacaaggaactcattgaccacgattttatcggggcacaaatgcctccttgttttcgacaaaatatcttcaaatgcagaatgggactccataaggaagagccttcccattgagagcaatgcagatagccggatcatagtcacaacaaaggattccaatgttgccatatactgttctggggaaaagcagtacacgtacaactacaagctaggaagccaaaatgatggaactgcggtgggctctgagtgggttggtctagattccaatgagataaattcagagaccaagcctagcatggccagttcctctactggcggtgacaaccaccctgagggcctgcgtgaaagcagttcaccctctctcaacaaagatcctaatgcggccgtgaagaaactcacacgctgcacggcaatggtacccaaacgcagcaggacagtggtagccgctgaggaagctcagctcatgattggtagaagaaatgaaaaggataaacttatcaaaatgcttgattctggttgtgatgcgaaacatcgagtgatttcggtgatttcggtgtggggaatgggtggaattggcaaaaccactctcgtcaaaagcatctatcagagctccgagcttgagaagcttgggtttgagaggcgtgcttgggtacctgtatcgcgtccattccgacgtatcgagctccttaggatcttggctcagcggttggttaaagattcccccggaaagaaggtagaatctacaccaggacttgcaaggagtggtttaagcatgatgggatctaaagaattaattgacaagttgaagcaagatttaacagggaagaagtacctcattgtccttgatgacctatcgactactactgagtgggatttcataaaaacaatttttcctgaaaacagttctagccgcatcattgtcaccacaagacctaaattggttgcccaacattgctccgaggaagaagagtacatgcacagaatcggagatctaaaagataaagatgctcttgatctattcttagataagttcttaatatatttatttggtaattacaaggtatgtaagaaaggggatgaatctgaattgaagcctgacatgatggacatcctcaagaaaaaccctgacatgatagcagaagcagaactcattgtaaagaagtgtggccggcttccccttgccattgtggcggtgggtggttttctgtccacaagacccccaaacattagggaatggagaaaattcagtgaccatatcagtacagaattggatgagaacccaagtctcgagatgataaagaaaatacttatctcaagctatgagggtttatcataccaccttaagtcttgctttttgtatctgtcgattttccctgaagaccatgacatcaggtatggacggttattgaggcggtggattgcagagggttactcaagagcaaagagaaacaataatgctgagaaagaagcggaggaacagtttacagcccttctcaacaagagcatgatccaacagtcaagaacagttaccaccgggaagacaggtttctgccaagtccacgatctgatgcgtgaaatcagcattgcaaagtctgaagaagaaaatcttgttcttgttctagatgaacacagcatctcgagctctaaagataaagtacgacaccttgttataagccagagttggagcagagaacagaagaagaacaatgatatgcaaaatatagtggatgtctcgcatatacgatctctgacagtctttggggagtggaaatcatttttcctttctaagaagatgaggatgcttcgggtacttgatttagaagacacagatggtcttgaggatcatgacattgtgccaattggaaagcttcatcatttaaagtacttgtctctaagaggatctgcaacaatcctcaatcttccaagttcctttggtaatctgttgaacctggagacactagatatcaggggaacatgggttacaaagttgccagcaaccattggtaggttacaaaacttgaaatacctccatgctggcatgccaccagatgatgaggatgacaccagaagctgggttccgactccgccatcggcaattttagaggcatttcgtgagtactggacaaaccaagaagaggttgggatgggaatcaagttatttgtatcagtactcatgtttttgatcagtggttggttgagaaatatggatctgtttggtgttaaagtgccaagacgaattggacgattgaggtccattcacacactgagcgtcgtcaacatttcacggggaaaggccatgctgaagaacctcaaaaagcttacccaattgcgaaagctaggcgtaactggcattaacaagaataactgcgaagaactctgttctgtcatcgtcaaacatggatgcttacaatccttattacttcgggcggagggtaaggatgggttagaaggttgtttggatggcttgtccccccctccaaaagaccttgagagcctccagttgtatggaaatctggtgaaattacccgaatgggttaaggagcttgaaaatctacaaaaattgagccttcggagcacgaatctggaggcggatgctaccatgcaagtgctcggaggcctaccaatgctcgacattctacgtctccaggacaaggcgtgcaaggagaatgaactacgtttccatcccgattgtttcacaaatctgagggcactggagcttatttcgtggggtagcctcaaatcagtgatatttgaagaaggagcgacccctaaacttgaggtgctactggtggaccattgttcgtccatagacgaagctgggtttcctgggatagaaaatcttgcaacactgaaggaagtttcgctccagggttactactacactgaattcaagaaaaaactacagcagcaacttaacatgatcgagcccagaccaaatctaaggattctgtaatacaaaactgtactcccccttacaatctattcacactatgtaatgaaccttgtccgttccctttcaccctttcaatgcaatgac

SEQ ID NO: 55317 - DNA, 273 bp, Oryza sativa
  Clone ID: PAT_MRT4530_57335C.1
atggtcgttgctgaggcgctccctgtgcttgttgcggcatgtgctcaaattgattgtattgaggagcaaactgaggctgagccgatcctccttgctgatactgaacttgcggagatggaggctgctactgataattcaaattgcccccttgataattctgaaattgacctggtgccgatgacggtgcagcaggtgcaggatctgatactggtgctgtcggttgagccgatggtgcattgggagcaattggctgaacagctggctgattattag

SEQ ID NO: 55318 - DNA, 2998 bp, Oryza sativa
  Clone ID: PAT_MRT4530_57336C.1
gtgctctgaggcccaggcccatctacaacaagaacaaagccctcttttccctacccccgaaaaaggaaaaacccgctccactcccccctccgctccgccgcaccacgccctacgacaccaaccaaaccctcctcctagccccccggcggcgatggccggcgtcggcggcagcagcagcggcggcggcgacgtggagatgggcgggtggtcggagctcctccactcctccactaagctcctcgagcaggccgcccccaccccgcacttccctcccctccagaggaacctggaccagctggaggtgctctccaccaagctcaaggccaagacggtgcgcgccgaggcgcccgtgcagtcgctctccgccaccaggttgttggcgcgcgaggggatcaatgcggagcagctcgccagggacctcaaatccttcgaacttaagcttcatgaaatggcaatcgtctcatccattcaagaagcacaaaaggacaacttaaggagttttaacaattatatgatgcaagttctcgaggatgattggcagaaggagaagcgagacttcttgcagagtctaagccgactctctacattaccgaaaagaaacactaatctcatggccagtgggatttctcgtcctgctctgatgccatcttcagcttccagtccccaatcttcgtccggtctgccatctaaggaagtcatgcccatacctaacaaaactataattgaaaacaaatcttcagtttatgctgcagttgtgagagatcttaatgatgctagagggcgcagcctaccttttggtcctgctacagcattcagggctgcttatgagtctttatctgttggtgctattgggacaaaatcagtgaccatgcataaagtgtggcatttaattcaggcattagttggggaagggtcaactcatcgaaacatttcaagaaaaatgtcactagtgattggtgctagacgacaccttgagtggggtcatgaaaagtacatacttgagaccatcaatagccatccggctctagctgctcttggtggatctgttggcaatcttcagaagattcgcgcatttcttcgggtccgtttgcgggatcatggtgtgctagactttgatgcaactgatctgcgtagacagccaccagtggacacaacatggcaacagatttatttctgcttgagaaccggatactatgatgaggcaagacaagttgcccaatcatctcgtgctgcattcaactttgctcccctgcttgtagaatggattactactaatggtgctgtatccccagagactgctctgacagcttctgaggaatgtgacaaaatgctgagaatgggtgatcgacctggccgtcctggttatgataggaagaagttgctcctttatgccatgatctgtggttgtcgacgtcaaatcgacagattgcttaaagatctgccaacacttttcaatactatagaggatttcttgtggttcaaattgtcagctctgcgggagtacaccagtgcatcttcttctaatgtttcaaatgaaggcttggtgccttatactctggaggatctgcaaagttacttaaacaaatttgaaccatcatattatacaaagaatggaaaagaccccttggtctatccatatgttctgctgttaagcatccaattgcttccagcaattctttatttgtctaaagaagttggagaggaaggataccatgtagatgctgtgcatatttcaattgctttatctgatcatggtgttctccctgatggtgttgggtcaggccagaagatgggtatcatggatgcttgtgcagaagctgccagtataatacggcagtatggctctatttatttgcgtaatggtaaccttgatttggccttggagtattatgcacagtctgctgctgcaatgggtggaggagaggtatcatggattggtcgagggaatgctgatcagcagcggcagcgaaatctaatgttgaagcaactgctgacagagatattactaagggatggtggcattcaacttttgcttggtccaagtggaatgggggaagaaggagaattaaagaagtatatgatggattggagaagcaggcagcaattcttacttgaagctgcccatcagtgtcatgaggcaggcctctatgacaaaacaataaataagtgcctgtcggatgcaatatgtgccatggcacgcagtatgttagatggtgaaagtcgtgctgctgctctaattcattctggtaatgaaattatggaaactgccagatattcggaagccagtgttcaagacaaggacctcatatctgagcaacaaactgtactgagacagcttgaagctattctccatatctataggcttgctcgagctggacagactttagatgctttgagggaaaccatcaaactcccatttcttcatttggatcctcaggctccaaatgtgacagttgatgtgttcagaaacttgtcaccgcatgttcaagcttgtgtgccagatctcttgaaggttgctctaaattgtatggacaatgttagagatactgatgggaccttgcgtgcagtcaagtcaaagatcgcaaacctcgtggcaagcaacatgagcaggaactggccacaggatttgtatcagaaggtggcgcagtgcatatgatggggatctgtccggccatatacctgacactatcaaaagcttccgaaagcacgcggaaatgcttttctgtgtttgtgctggtgatgtgcttatggtccgaaccggaatgtttcagactggtggatgcaaatccttttgatcactcagctatatcagccaaaagagaacatatatgccatgcccgggggtcatctgatgtgtagtgtgtgaaatgtgaaacttaatggcaccaatcagaatctgtattattaatccatggttgtaaagcagtttctgaatatccaaatgcactgttgcttagttcgaggagattatctgcggctctattgtactgtcgaacaa

SEQ ID NO: 55319 - DNA, 1404 bp, Oryza sativa
  unsure (1)..(1404): unsure at all n locations
  Clone ID: PAT_MRT4530_57337C.1
agagagagagaggggtgtgttttttttttttgtttttttttttttataagttcatttgtatgttttgacatcgaagatctttataaattcttacattgagcgtactccaaaataacttcgcaaagtagctgaaccaaaacaaaacatttcgatgtctctcctctctcgaccatgataaattcaaatgcaaccaattacacaattcgaaatttaagaaacacgaatcaaagatcctgaaccattacacccgagtacccgatggccggaaaagcagatcgcattgtataattgtattagcacacttgattattttgcaccattggcgacggcaggagaaggcagcaagaacttgagcaggatatcgttgaacatcttgggatcctcctggtgcgccaggtgccccgtgttcggtattatcttcaccgtcgccttctccccaagcatctctttcactttgtgtgctttctccacagggaaaatctggtcgaactccccccagatgatcaaaatttcttgagggagaggagaattaagctgcgagtcttgttcctcggtgacgatctctttgatcagccggatcttctcctctcttttgtccgcgaaatatttccggaggaggtcgcggacgaggaagtcggggatgtacttgggcgggcggtggacgcagagcgccatcagccgccggaacgccttcccgtccgccggcgccatcagctccgtcacctccgccacgccgcccttcgccgccagcgccgcgtcgtcctccgcccccttcgccaggtcggcgtcgcacagcaccaccttccccacctccacctggccgtcgccggccgacgtcgacagcgcccgcgccaggtgccgcgccaccagcccgccgtagctggtgcccacgatgtgcagttcccggcgttcgccgccgaggcctgggaggtgcgcgccgccgctggtgaggagcgcggcgatggcggctgcctggaacgcgtcggagcgcggcgcggcgctggtggtggaggcgccgaagaagaggagggtcgggaccaccaggtcgaagtggcgggagagcgggcccacctgcgcgccccactgccacgtcgggtccggcccgaagccatggacgagcaccaccaccggccgccgccccgccgccgcggcggcggcggcggcgccattcttggaagggaggatcaggagagaggagtgcgcccagaagtggagcgtcgtgccgtcgtcgtcgacgacggcggagcctggccggaggccggcggaggcgaacatccgccggaacatggcgctgatgagagacacggcgaaccccatggccgncgctctctctcggagagctctgagctgtgtctgtgactgaacgattcagtttggctccatgaatatgccngccccgtcccg

SEQ ID NO: 55320 - DNA, 361 bp, Oryza sativa
  Clone ID: PAT_MRT4530_57338C.1
atgaacagtggcatattcgatctccgctggttagagggtgcgcatttcgctgagctcggtgaggtgatcgacctagatgctgtgcggcggacgtttaatgagtatctcgtgaccacgccgaaagcgttcaaggaagagaatcgaaagtggcaagacccgctcccgtctcctcagaagaagtacgcgttcaatcctctccaggacaaacccttcatcgagatagaggcaggcacaacggtagcgccgtgggtgcaagcaatcctgatgaaggctcttcccccgtcgatctacttcgtgggcctacgcgcctacgggaacgcgttctcacgcgacctcggccatatctatcagcactacgtcg

SEQ ID NO: 55321 - DNA, 942 bp, Oryza sativa
  Clone ID: PAT_MRT4530_57339C.1
atggcggccgtgcagcgactcctgcgggcgtccgcctccggtggcgcggcggcggcggcggcggcggcgaggaggcgcatgtccacggcggtggcgccggagcagacgcctgcggccgcggcgttcccgttcgcggcggcggcggggagggcgaggcagcgggtggcggaggagaggaacgtgcagtgggtgttcctcgggtgccccggcgtgggcaaggggacttatgccagccgcctctcccgcctcctcggcgtgccccacatcgccaccggggatctcgtccgcgacgagctcgcttcctccggccccctatctgtgcagcttgctgaaattgttaatcaggggaaattagtttctgatgaaattatcatcaatctgttatctaaacgtcttaagaaaggagaagagcagggggaatcgggatttattctggatggttttccacgtactgtaaaacaagcggaaattcttgatggagttactgacattgatatggtggtcaatctaaagttgagagaggatgtcctagttgagaagtgccttggcagacgtatttgtggccaatgtggaaagaacttcaatttggcctgcattgatgtgaagggtgaaaatgggctgccaccaatctacatggcaccactattgcccccaaataactgtatgtcaaagcttatcaccagagctgatgataccgaagaggtcgtgagaaatcgtcttcagatatataatgacatggtatttaacgtggttcttggaagatataaatcctgcaccatgttgatttgctcagtagggagccaacctgttgagggtttctaccggcaacaggggaagcttttagaatttgatttgcctggaggaatccctgagtcttggccaaagctgctccatgttctaaatctcgaggaccaagaagagatgaagctggccactgcgtaa

SEQ ID NO: 55322 - DNA, 1365 bp, Oryza sativa
  Clone ID: PAT_MRT4530_5733C.1
atggcgaagtcaccctccttcggcgggcacccttcgcccaggatgtacagtcttcgccatggggctccatcttttgccgtcctcgttccattgtcttcgccatgtggcttcaccgctttcaccatggggcttcgccccgatgaacttaacaccttgagcctgaatcctgactggtcgcacggtttcggcagcgcccttagagtcgctaggtcgttcgcccgttcaccctttttgccacagcgcatgcttctcgccatggctccccgcaaaccgaatccggcctccgcgacgggccgcgatcccggccagatcgacaatgacaacaccgcctttttaggggtttcacttgtggataaggacgagttggcaaagttggtcagctctggcgcggtggtggaggggcaagctttcgccccggggaaggccgtggtgccgaagcccggcgacaaccggacggttgtattcgccatgttcttcaaggcagggcttcggtttccgtgcaacgtactgttgcctgagatccttcgccttttccaggccggccgcaggccgaggcccagccaggccgccccgccgccctcctctcctggggtcaccgacaggtggggcccacctgtcgggtccttcccccacctcccgccgctcccgccgcgccgccgcgcccgcaaccgtcgccgcgcccacgtctccgcctccttcgggccacgtcgaccacgcccgcgcgtcgtcccggtcgccgtccgccgcgtgttgacctccctccgtcgctcctcgtcgccggacgccgccgtcccctccggtgaggactccctcccctttccttttctttcccaattccccgtgcgtcgccgccgcccgcgctcgccgtcgccttcggtcgttgccaccgtccgctgccgccgctttcgcgtcgcttttgcgccgtcgcctccgccgccggatgccgttgccggcaacgcgacgcgcgcgtgccgccgccactagccctggccggccggtcggctttgatgccgagccgagcccggcggctgcctctatcgctgcccgtccgatcggcccgagggcgatctgggccgtcggtcccgtggaccggcggtggaccacctgcgtggtcccggtccacggtgaaccgctctcccctgagccgctgaccagtgggctccgcttgccggcaccgcaccccctccgtgctgacgtcagcccttttgcaggaatatgaggatgtttttcacgatgagatacctccaaggatggccattcgtcggatacgctcataacttcacacgttccaatgataattacaagtccaagtccagttcggcctctggagacagcactgactgcaaacggacctagcgccttcat

SEQ ID NO: 55323 - DNA, 272 bp, Oryza sativa
  Clone ID: PAT_MRT4530_57340C.1
ggccggaacaattttattggtgataacacatcggcaaggaaaacacacaagcttattacgggggaaaaacccttaacaaaaagacacggccccaatagaaaggacatgtggacccaaacataccagaggtgctcaagacaaagataagagttggaagcggcgtggtagaaaaagaatacataacaaatgaaatcaagaaggagcataaaaacgcagcgaaaaacaaaccaagccaaccatcctcaacaacaacaacaccattgacaaaagtt

SEQ ID NO: 55324 - DNA, 1752 bp, Oryza sativa
  Clone ID: PAT_MRT4530_57341C.1
tcagaaaatctcgctgttaagttgagggacctctggtgaacttattccctgctgcctcgcctccgccgcctccacctcctcctcctccacctccacctctccaatggcgacgactccagcgcccgtctcgctctcggccgcggcctccaccgtgccggcgcgcctcctcgtggggcggggcgccgcggcggcgccggtggcgaggcggcgggcgaggatggtggtggtgcgggccaagatccgggagatcttcatgccggcgctgagctccaccatgacggaagggaagatcgtgtcgtggtcggccgccgagggggaccgcgtcgccaagggggacgccgtggtggtcgtcgagtccgacaaggccgacatggacgtcgagacgttccacgacggcatcgtcgccgccgtcctcgtccccgccggtgagtccgcccccgtcggcgcccccatcgcgctgctcgccgagtccgaggacgacctccaggccgccctcgccaaggcccaggagctctccaaggcccacccgcagcaggcgcctccaccctccgatgccgccgcgccgccaccgccgcctcctccacccgcggccgctccggcggctccggcgccggtggcagccggcacgaagggcattgccaccccgcaagctaagaagctggccaagcagcatagggtggacctagctaaggtggctggcactgggccgttcgggcgaattacgccggccgatgttgaggctgccgccggcatcgagccgaagccgaaggttgtgcctgctgcttctgctgctcccgtgccgctgtctgctccggcaattggcgccgtgccacaggccgcggagcttcctccggtgcccggtgccacggtggttccattcactggcatgcaggctgcagtgagcaagaacatggtggagagcctcgcggtgcccgcattccgtgtgggatacccaattgtgaccgataagctcgatgagctatatgagaaggtcaagtcaaagggggtgaccatgacagttctgctggcgaaggccgcagctatggcacttgcgcagcacccggtggtgaatgctagctgcagggatgggaagagcttcacttacaacaccaacatcaacatcgcggtggctgtcgcaatcgatggtgggctcattacacctgttctggaggatgctgataagttggatatatatttgctctcacaaaaatggaaggaactagtcaagaaagctcgtgcaaaacagctccaaccaaatgagtacagctctgggacatttacactgtcaaacttgggtatgtttggtgttgatagatttgatgcaattcttccacctggccagggaggcataatggctgtcggagcctcaaaacctacagtggtggctgataaagatggtttctttagtgtcaagagcaaaatgctgaccccatgtattactgatagccagtggcaaaggcaggagctctgcttagtgataaacgaattaccccatgtgtataatttggggtggttgggtgtggttaatgtcactgctgatcacagaattgtatacggtgctgatctggcagcattcctgcaaacttttgcaaagattattgaggatcctgagagcttaactttgtaattatagaggcaagttgtcctttttttcccaagtttccctttgcggtatgccgtctttcggtggcgggtgcgccgatctttacctcgcttattattatctgcatgactccctgtcactattagttc

SEQ ID NO: 55325 - DNA, 767 bp, Oryza sativa
  Clone ID: PAT_MRT4530_57342C.1
aaattagtcttaaccccacgcgtcacagtttttttttttttttttttttttacttcaacagaaattgtgtatagctgaagcagaacaaccgtacctcaacagtgtgcaagtttcagtacatagtaacatatataatagctattacaaatatctcataatgcaagatgatgattatttcctagtgattgattgattgatttttctcaatgagcacgctctctaagaagctcaatgtccagctccgacggatcagttgcctgaatctcatagtgcacaccatccagctctctcctgaaccgttctttggaggtagcatacaacatcttggcgcggatgcgagaaaccgaaggcgaccatgcgacgaagaagatcttgctcttctggcagttctcctcggtgacgaagtcgaagtcgtagatggcgtagcggcagtcagattcagggagtgagtccatgaaatcgtcgaagctctcggtcgatgaacctgtcttttcgacgacgacctccttgcacttgtcgtcgatcttgaagatgacatagcggtgtgatttcttcctctgaagctccagaaatgtctgcttgcactcggcagctacaccgattccagaggaagcatttgcgcgtgatctgacgaatgccatggttaatttcctcctctaaagatgctgattaagcagagaaagatacaagaacacacaagaacaagaagctactagaccagaaacagatatatagagcaagctaagcaaaagcaaaggctaggccgc

SEQ ID NO: 55326 - DNA, 947 bp, Oryza sativa
  Clone ID: PAT_MRT4530_57343C.1
cccgggctgcaggaatcggcacgaggcccccccccctttttttttttttttttttttttttttttgggactgaaaatacacttaatgggctacttaaaataacccagccaatactactgaatactaagtataaatcaataatatgatgctgcggggctgacagcatctgcagctgaattttatatgaaatttactcaatttaattaagcagggagcaccggggcagccaccctgcaggtgttgtgagactggcaatggcagcacttgtgccctgccaccctcgcgtacacctgcgtcgtgtccctgcagtcgttgcacacgatccatccctttcccatgtaatctatgtgcagcatatttgcttcaatctcagcgtccaaagccctcaagaacttgtccatgtcaaagataggcatcgagcatatgggacaagagaacttgtcgtgcttcagcatctcgtggaagcattgcaggtgcatcgtgtgcccacatctgagcacggacgtctcccttagagagtcaaacagatactcgtaacagatggggcagttgttcttcatggagttctcgatgcagcagtgcttgtcgcgcaggctgaccgagtagcatgatcctgcagatgccgcaatcttggcagtggaagtgttccctgtcaaccagatccagcagaagcaaagcaagcagcatcggcatctcacgtcgtcgtcgaagaatttgcacgcgctgcagaagtactcgcccatgcaaacgccgcagttgtagcacacttgcgcaaccggctgttcggtgtcacagacgagacagataaccgtggactcgttgtggcaatggcggcagtggaagacgtcgttgcagcacggcgcccggatcctgcacctcctcctgtagtgcttgcatccaaatcccatcctgccgaatccgtggcgagacgcgtcgtcgagctccat

SEQ ID NO: 55327 - DNA, 589 bp, Oryza sativa
  Clone ID: PAT_MRT4530_57344C.1
gggaaacgaataaaatcttttttgcaaaaacatcattttttttttcatttttttaggggacacaacaccaacttgatcattattttgtggcactaaacccatttttcccaacccaaaaacaacgaacttgttggccccaaatccatccaaccccaattaaccactggtaagctacggtcccccactttatttgccggggaccaaattggtggcgtacccccaggcctttttttttacggggtccgcgaggtggtcggcaaggtttttgagggggcccttgccggtgaccatggcctggaccaaaaaacccaacatggaaaacatggcgagggggccgtttttgatctcctttaccttgagctccgggaaccccttggggtcatcggcgaggcccaccgggtcaaaggcccccccggggtaaagcgggttaacaacctccccgagcggccccccggggatgcggtaccccttgacggggcccatgagcaccacctggaccgcccaaatggcgaggatgctttgcgcgtggattaagctcgggttgcccaggtaatccaaccccccctcccttaaaaattgtgagcccccc

SEQ ID NO: 55328 - DNA, 528 bp, Oryza sativa
  Clone ID: PAT_MRT4530_57345C.1
atcccccctcccccattctctccactccatctcccccttggtctcccctctcccctctccattgcgccgccgttcccgtgccgctgcgccgccgttcccgtgccgccgcgccgccgttcccgtgccgccgcgccgccgttcccgtgccgccgcgccgccgttcccgtgccgccgcgccgccgttcccgcgccgccgtgccgtcgctcctgtgccaccgtgccgccgcttctgtgccgccgtacgccaccgtcgccaccgccgtcgtcgccgctgctgccgtcgctgagccgccctccttccccctcgcgtccaccgccgccacaggagggagatgaagacgaaggcgtccagtaggtcttagtacggtcgttgcctgtggcaatggcatgccgctgcctgaattccgctgccttatctatttctgcttttggatgtattccggaccgctcggtccgatgatttaagactacgctgcgcaactgcgacacacgcgctcgtgaaaccgcgagagtcggctctgataccat

SEQ ID NO: 55329 - DNA, 1347 bp, Oryza sativa
  Clone ID: PAT_MRT4530_57346C.1
tcaattagcaccatcagcgtcgtcaggccagatggccacctcgtggcggccgccctccgtggcgcacgccctgaacatgccggtggtgttgtacgccatggccacctcgccggcggccgacacggccaccagcccgaccttgcccggcggcacgccggccacgacgcgcgcggcggcgtcccccagggagaggccggccggcggggcgtgctccagcagggccgcgacgtcgcgcgccaccgtgtgccggatgatggcctcgcccacgcccgtggccgacacggcgcacagcgcgttggcgtacgtcccggcgccgatcaccggcgtgtcgccgatcctgccggccatcttgttcaccagcccgccggtggacgtcgccgtcgcgaggttgccggcggagtcgatggccacgcagcccaccgtgccgacccggctgttgtcgtccttgggaattggttgggtgtaatccaccgtcagcgagaaagaggagagcgagcggaggtgcgacgatggctggcggcgaggaggaggagcggcgcaatattgcgagcaggcggacgaacagaggaggagcacggacgggcgagcaggggtgcggttggaggagcaggccggcggcgaggaggaggagcggcgcaatattgcgagcaggcggacgaacagaggaggagcacggacgggcgagcaggggtgcggttggaggagcaggccggcggcgagcaggcagaggacgcggatccgcctccaccgcccgtcgtccagtcccccgcggtcaccgagccgagccctcccacggccgtggtcgccgtcgccgagcccaccgcggctgccatcgctgagcccgctgcggtcgccgtcgacgtcgctgagcccgccgcggccacggtcgctgtcgtcgagcccaccggtgtctaccgctgctcctgagggcgagtagggcgagcgcgcaggctgctccctggcgaaggcctcggcgccatcgaaggcgaggtagatgtgcggcgtcttctccatgacgagcctggcgagggagacggcgttgacgacggtggagagtccggagacggcgccgcagcgcaaggtgttgccgtccatgacggcggcctccatctcgacggtgccgtcggcggtgagcacggagcccacgccggcgttgtagtgcgggcagttctccagctccctcacgacgagctcgacgacgtcgagggcagcgcggccggaacggagcgcggcggtggcgaggtcgaggcagcggcggagcgtggcgaggcggggctccctgcggtcgggcggcagcgagcgcgggatgtccccggcgccgccgtgcagcgcgaccgcccaccccat

SEQ ID NO: 55330 - DNA, 3488 bp, Oryza sativa
  Clone ID: PAT_MRT4530_57347C.1
gttaccccatactggcaacggatggcacatgctatggcattggctgctgctgttttgatggccctgcagggagaggctatgcgtgcaagtgccgctcaggatatgatggtaacccttacatgccaaatggatgccaagatattaatgaatgcatgctgccaaatccacccctatgctttgggaaatgcataaatacagtaggatcatatgagtgtatctttcttacaaatccaggactcatcattggaataggacttggtggcagtctaatcatcgtggtactaattcttactggaattgtcgtaaggcgaaagttcaagtctcgaagggccaaaaaactgaaggaattcttcttcaagcaaaaccgaggattgttgcttcatcaacttgtagacaaggatatcgctgaaaggatgatcttcagcttagaagagcttgagaaggcgacaaacaattttgacgagtctcgaaagcttggtggtggtggccatggaaccgtctataaagggattttgtctgaccaacgtgttgttgctatcaagaagtcaagatatgctattaagagagaaattgatggatttattaacgaggttgccatactttcccaagtaaatcacaggaatgtagtgaagctttttggatgttgtcttgagacagaagttccattgttagtctatgagttcattccaaatggaacacttcatgaatatcttcatgtcaactctgcacaatcagtcccatggaaggaacggctgaggatagcacttgaaatagctaggtctcttgcttatctacattcagctgcttcggtatcaatcatccacagagatatcaagaccaccaacattctacttgatgataggttcatagcaaaagtatccgacttcggagcttctcgaggtatcccaattgatcaaaatattgtaactactactatccagggaacttttggatacttagatccagagtactaccgtaaaagccgacttacggagaaaagtgatgtatacagctttggtgtcatacttgcggagctaataacacgaagaaggccaacttcctacatatcaccagaaggcttcaatctaaccgaacaatttatcttgctagttagtgaggacaggctcttggaaatagtagacagtcaaatcactaaggagcagggagaagaagaagccagagaagtggcagaaattgctgttatgtgcttaaacttaaagggtgaagacaggccgacaatgcggcaggttgaggtgaaacttgaagggttgcagggtgctgtaaacactatcagaggtcgacgtgcagttcagttgaattctccattgactgaagagagcgattccaacatcggggtttcaaaaagacatttccctactgtctctttattcaaaacttatatacaactagccctttcgtccaatggacatggtcacctccatgattgtcccttttggctatgccattcctccatgacaaccttgatcataagctctacttgtgtaaagctcaactctaatgtcctctctctctctctctctctctctctctctctctctctcccacacacacacatacaatcaactcgattgtcatcgatgctacctcttgcctttgcttggactagggtttgcaagcttgacccacgtgggtaaatcctacttcctgtcggatttaaacattatagcgttggtaggatgcaacgcccaggtctccctccgcgattggggcgatacactcgtcaactcctgcatcacgtcgtgccctctatcactcgactccggtaatggctcctgctcaggaattggctgctgtgaggcaagcattgctatgcacataccggtctacagcattagcgccaaccaagtggtggacccgggtgcaggacctgaccctaatgaaccaaattttttcgtgtacatagtagatcaggcgtcgttttatttcgacaccaacatggttactaagggcatcagcaatactcctgaagcgctcccagccatgttaaactggcttatactcagcaattcatcagcgtgctcggcatcgaccaatgcttctgcaccttcgtctgcccccgaatgttgcagcgccaacagcttctgcaaaggttacaacggtactactgctgactacgatgggtatcggtgctactgctccgatggctatgaaggaaatccttatgttgatggtggatgccgcgatattaacgagtgtgcggaaccagaaaaatactcatgctatggtggactctgcataaatacgccaggagcttttgtttgccgctgccacgacggaagctacggtgatcccttcacaaaaggagggtgccgttcatctaaaggtgacattattgcacaactatactacgtaccggctatatattaatctatctatgtatgcctatcattggtctaatagtcagcggtggttcagtccttctacttctagggcttgctgctcccttcatagttcgcaaggtcaagctacaaagggtaaagaaaatgagggataaattctttatgcaaaaccatgggttattattacaacagttaatatcacgaaacacagacttcgccgaaagaatgatcattaccttacaagagcttgagattgctacaaacaattttgacaaatctcgtgaggttggtactggaggacatggggtcgtgtataaagggattatagatctacatgttgtggccatcaagaaatcaaagattgttgtgcaaagagaaatagatgaattcataaatgaagtcgcaattctttcccaagtgaaccatagaaatgtggtaaagctcctcggatgttgccttgagacagaagttccattattagtttatgagttcatttcaaatggaaccctttaccatcatcttcatgttgaaggatctatatcattaccttgggatgatagattaaggatagctcttgaagttgctagagctctttcatatctgcattcatcggcatcaatgccaatattttatagagatattaaatcttccaatatacttcttgatgacaacctaacagcaaaggtatccgactttagagcttcaagatatatctcaatcaatgaaacaggaataactactgcagttcaaggaacgattggctacttggatcctatgtactattatacgggacgacttacgagcaagagtgatgtttttagttttggtgttcttcttatggagctacttactcgaaagaaacccatcggtggtacatttgataatggcgatggtcttgtttcacatgttatctcacttctctcaaaaggtaatctttataatataatagattctcaagttaaagaagaggaagatggagaagtcctagaagtggcaacactagccacaacatgtactaagtttaaaggagaagagcggcctacgatgagagaagtagagatggcactggaaagcatagtttcaaagaaaagcgatattcagttatacattgtcagtgcaccaacacaa

SEQ ID NO: 55331 - DNA, 1656 bp, Oryza sativa
  Clone ID: PAT_MRT4530_57348C.1
atggaggaggatcaaggagggaagccacccgctccggatgccggcggcggcggcgggggaggggagagcaagaaggggagcccgtgcgaggagtgcggcgagcagccatggaagtaccggtgcccgggctgctcccgcctcacctgcagcctcccctgcgtccaatcccacaagcgccgcaccgcctgcaccggcaagcgcccccgcaccgaccccgtcccgctcgccaacttcgacgaccaccagctcctctccgattacagctttctggaggagacgaagcaggtggcggagtccgcgcatcgcctcatcggcgccttcggccgcaactacggtggattcggcggtgcgcagcttccgaagtggctcttttacctccgcaaggcggcgcagcggcgtggtatctggctccagttccttcccaggggcatggccaggagggagcagaaccgttcaaggcacaaccacagaaaggattgcatatactggacgcttgaatggaaatttaattcaacagatgttgtcctgactgaccacaacatagatgagcataccagcttgctatcatcattggaaaaacatctgagtcctggaccttggaaaaatcagctcacaccatatcgcaatacagatttgcgtgatctcaaactgttcattcaaaagtctgccaaggaatcaacttcaccatatcgccaactcaacatagaagaaccattgggtccacaactgaggagcattaaaattgtcgagtacccaactattaatgtctttcttccatcagacagttgtgatttcgaagtagaaaagtttgtcaacaagcttcctgcaagtgagaagccccctggcagctcgaccgatagcccagatctagaaggcactgagtttcatgaggaagaaatagaagaaggagaattggcaccagaaacacaagttatagacctcaaggaatgtggagcttcacatgcctctaacctagcttcagcgaaggatacaagtggatctaaggtagacaccaagagagattcttctgtgctgtcatatatacgcagtcttggattagatggtcaacaaaaagcactaactgaacgaagcaagatggcaccaaatacaacatctggggcttccaagactaaaaattgcatgaaagtctatccgatggacatggaggaaagtggggatgctggggtgatctcggagaggcagggcatagaatgtaagaaccaggcagcttcgcatcctggtaatcttacacctgtggaaggtacaaccgtatctaagatagatagcaacacagattctttagtgccgtcttccatcagtattctagcatctgatggcttcagttgtcctcaggttgaacataatcaacaaagcaggctgacgccaaattcaactcctgaagctctgaaaaggaagtcttgcatgaaagtttacccactggacaccgagaaaaatctggggttattttcagaggttcccaacttgggctttgagcaagaaatcggaaatgcttattcagatttgtttggggacataaatcctgatgatttcctcaactttgatcttgaaatgatggatgaagatgaattggcagggataacgtcgccacttaagctgtgggatgatttggaggaaggggagattccaaccgcttga

SEQ ID NO: 55332 - DNA, 492 bp, Oryza sativa
  Clone ID: PAT_MRT4530_57349C.1
atggctggcggcgaggaggaggagcggcgcaatattgcgagcaggcggacgaacagaggaggagcacggacgggcgagcaggggtgcggttggaggagcaggccggcggcgaggaggaggagcggcgcaatattgcgagcaggcggacgaacagaggaggagcacggacgggcgagcaggggtgcggttggaggagcaggccggcggcgagcaggcagaggacgcggatccgcctccaccgcccttcccactactagatcctccgtcgccgttgctgagccccccgcggtcgccgtcgctgagcccccaccggtcaccgtcgtccagtcccccgcggtcaccgagccgagccctcccacggccgtggtcgccgtcgccgagcccaccgcggctgccatcgctgagcccgctgcggtcgccgtcgacgtcgctgagcccgccgcggccacggtcgctgtcgtcgagcccaccggtgtctaccgctgctcctga

SEQ ID NO: 55333 - DNA, 814 bp, Oryza sativa
  Clone ID: PAT_MRT4530_5734C.1
atggctaagcaatccctagtccaatctctagtcatgttataaccccaagctgacaaagggacatggtacaatagtagcatggctatgacaatagggctgacgtcagcacggagggggtgcagcgccggcaagcggggcccactggtcagcggctcaggggagagcggttcaccgtggaccgggaccacgcaggtggtccactgccggtccacgggaccgatggcccagatcgccctcgggccgatcggacgggcggcgatagaggcggccgccgggctcggctcggcatcaaagccgaccggccggccagggctagcggcggcggcacgcgcgcgtcgcgttgccggcgacggcatccggcggcggaggcgacggcgcaaaagcggcggcagcggacggcggcaacgaccgaaggcgacggcgagcgcgagcggtggcgacgcacggggaattggggaagaaaatgaaaggggagggagccctcaccggaggggacggcggcgtccggcgacgaggagcgacggagagaggtcgacacgcggcggacggcgaccgggacgaccgtcgcacgatgggaatggcgctccggcggcggacctcgacgaaggaggggtggacggggtggatctcggccacgcgaacccgacggcggcgacagcgcggtgcggcgacgagcctagcggcggctagtggcggccggagtatcggaaacggcggcggcgggtggttgcacggcgcggaagcgatgggaggctcgggagagttcggcgaaatggggaaaaagcgagagagggcgacggagaagcttaaatag

SEQ ID NO: 55334 - DNA, 1604 bp, Oryza sativa
  Clone ID: PAT_MRT4530_57350C.1
ttaggagcagcggtagacaccggcgggctcgacgacagcgaccgtggccgcggcgggctcagcgacgtcgacggcgaccgcagcgggctcggcgatggcggccgcggcgggctcggcgacggcgacgacgaccgtggccgcagggactcggctcggcgactgcggggggctcggcgacgacgaccgtggaggctcgacgacggcgaccgcggggggcttgactcggcgacggcgaccgcggccgtgagggggctcggctcggtgaccgcgggggactggacgacagcgaccggcgggggctcagcgacggcgactgcggggggctcagcgacggcgacggcggatctagcggtggggggcggtggaggcggatccacgtcctctgcctactcgccgccggcctgctcctccaaccgcacccctgctcgcccatccgtgctcctcctctgttcgtccgcctgctcacaatattgcgccgcttctcctcctcgccgccagccatcgtcgcacctccgctcgctctcctctttctcgctgacggtgatagcaaacggcgcccatcccatctctagctcatccctgggcccactttgcagggacacacactcccttcgtcttaaaatatggcaatctagtactggattggtcatatcgtagcacaacgaatcagatggacttgcagtgctgttttgcatcaccaatgccatctcttgcattgcttgatggcatctccccacattgtccttatctacagggagtttagaagattcaagaacaccgccaaagtcaagaacgcggcctccgtcagcaactacagatagagctacagctgtggcaatctcagaaggtctgaatctcaggaacacagttgctttcatggtgctgagtatgatctcggtgcatcgagatatcagttcactggttatccgatttccctcattgatcttgtccaagaagtgaccaatgtaagtgaaaggggtcacagcttgcattctccatttcagagtggttagcacaatgatctccatcctatggatagtctctgcgtcgaatacgtattctggattgcaaacctgaaggtctagagtgccgggagctgcagtctcctccatcttggcagcaagagataggcaagcaactatcagcagctgctgcatccagggcatgtcatttgttactgagaactctaccgaggagaggaacctatccagatagttgacagcaaggtaagcacacaatggtccaaaactgtagtaagcctgaaccttgcaaatccaatcaatggcagcaatcctgcaggagagctctatgcctccattgctcagcttcgtcaggtactctcctctcgcagtctcaaccatctgctccacctctttctccatgaaagatccaacgagctcctcaccaccaccaccaccatccccaagatggtgagacgcagagaagccaaggctcatcatcttccccaactccggcgccatcgtcgctgtctcctccacaccgtcgtcgtcgctgccgaagacgctctcgctgtcctcctcgcacagcagggagaaggactccgccggtgcagcgctgctgcggcggcggcagaggaaccccat

SEQ ID NO: 55335 - DNA, 979 bp, Oryza sativa
  Clone ID: PAT_MRT4530_57351C.1
ttaatttttgtgattttgtgcgtgtaggagctctagtagatgggagaccgtgtgactctgaaacgttctcagtttctggcctgtgcggcttgtgcgtcgatcgagttgatcaccgtgctcgtatcccgcgtaggctccctttttgccgttactattcaactgccacttgatcgtgcccgtagtaacgatcgagtcagtatacgatttatagtccatgtgatgcggttgatcgatctcactctcacagtgagtacgagtgattttactgctcgtgtggttatttatttcctcatcagcggcctggctatctgctcgatctgcattcatttctttatccgatccgtcgagtaatgtttggtttataggatgggacaatcccaattttttgtttggttgaagggatgagctacagatgggatgagtgccgtttgctatcactgtcagcgagaaagaggagagcgagcggaggtgcgacgatggctggcggcgaggaggaggagcggcgcaatattgcgagcaggcggacgaacagaggaggagcacggacaggcgagcaggggtgcggttggaggagcaggccggcggcgagcaggcagaggacgcggatccgcctccaacgccatccccaccactagatccgccgtcgtcgtcgctgagccctccgcggtcgccgtcgctgagcctccgccggtcgccgtcgtccagtcccccgcggtcaccgagccgagtcccccacgaccgcggtcgccgtcgccgagtcaagccctctgcggtcgccgtcatcgagcctccacagtcgctgtcgccgagccccccgcggtcgccgagccgagcccccacggccgcggtcgccgtcgccgagcccgccgtggccgcggccgccatcgccgagcccgctgcggtcgccgtcgacgtcgctgagcccgccacggccacggtcgctgtcatcgagcccgccggtgtctaccgctgctcctga

SEQ ID NO: 55336 - DNA, 149 bp, Oryza sativa
  Clone ID: PAT_MRT4530_57352C.1
aaaaagtagtcgacccaaatcacggcctcacgtgctgtaaacattgaagccagatgtcttcagctgggaggagaacgtacttgctttgcgcgtaaacattcttgtggttctagtcctcttactagtaataactttcaagctagcaaggc

SEQ ID NO: 55337 - DNA, 986 bp, Oryza sativa
  Clone ID: PAT_MRT4530_57353C.1
gcgagaaagaggagagcgagcggaggtgcgacgatggctggcggcgaggaggagcggcgcaatattgcgagcaggcggacgaacagaggaggagcacggacgggcgagcaggggtgcggttggaggagcaggccggcggcgagcaggcaaaggacgcggatccacctccaccgccctccccaccactagatccgccgtcgccgtcgctgagccccccgcggtcgccgtcgctaagcccccgccggtcgccatcgtccagtcccccgcggtcaccgagccgagccaccccacggccacggtcgccgtcgccgagtcaagcccctcgcggtcgccgtcgccgagcctccacggtcgccgtcgtcgagccccccgcggtcgccgagccgagcccccgtggccgcggtcgtcgtcgccgagcccgtcggccgccatcgctaagcccccgccggtcgccgtcgtccagccccccgcggtcgccgtcgccgagccgagccccccgcggtcgccgtcgtcgagcccccgcggtcgccgagccgagcccccgcagccgcggtcgccgtcgccgtcgccgagcccgccggtgtttaccgctgctcgaggtagatgtgcggcgtcttctccatgacgagcctggcgagggagacggcgttgacgacggtggagagtccggagacggcgccgcagcgcaaggtgttgccgtccatgacggcggcctccatctcgacggtgccgtcggcggtgagcacggagcccacgccggcgttgtagtgcgggcagttctccagctccctcacgacgagctcgacgacgtcgagggcagcgcggccggaacggagcgcggcggtggcgaggtcgaggcagcggcggagcgtggcgaggcggggctccctgcggtcgggcggcagcgagcgcgggatgtccccggcgccgccgtgcagcgcgaccgcccaccccatggatctatctatagccagtcgtgcccgcac

SEQ ID NO: 55338 - DNA, 2286 bp, Oryza sativa
  Clone ID: PAT_MRT4530_57354C.1
atggcggaggagagagaaagcttcgagagtcagtgggcgccttccgatgtgacagaggaaaacttgaaggaaatggtggtgcacagtgttcttccggcgaaggagatcatcgggtggcgtctggcgtgcggtgaaacatttccgacccccgatacacacgaggtcgtggtgttctcccatttcttctacggtgggttttctcttccaacctcaagattcttccaagggattttggatttctatgggattagtttgcatcatctaaaccccaattccgtactccatattgccaatttcatccatgcttgcgaggcttttttgggtgttagaccgcattttgccctattccgccgcatcttcttcctcaagccccagccgaacaagagcaaactgtgcgttgttgggggagccggttttcaactaagggtaaccttgagccaaaaatacttctccatgcccttcaagacctcgaacaagggttggcatgcaaattggttctttgtgcaaaaccccgagccagcatttcccgggtactcctgtcttcctccagtataccgagatacctggaactcacttcccataggagaagaggccgcccaagcacttgccctgttggaccgcatgctgaagcttaaagaacagggtctgcaaggggagcaaatcaaagagagatcccgcacagccttcgagtttgacggcaagcaagaccccaaccgagaggacccagaatctcttgagttcaaaatcatgcaggagagaatgtacaaaatcttctcgaatgttatcgtggtcggctattcgcacttgttgccagtcgtgccatacaatgccttcaaccctcctcctccggaattcgccttgatgaagtcggatcctccgatcgctcaacgccgctcaccccgtcggcagactggccaggctagtggagggccgaaaatccagtccgacgttcaacccaacacctcgaagtcaattaaccagtcagactctcgtaagaggaagttggtttcaagtgacgatgagggcgacgatgtggaaaaggtaggcaacaaaggggcgactgagaaacaaccaaggcaagctaatccaaagaagaaaacatccagtcgtcccataccaaaaatcaggaagtcatccaggaagccatatgacatcgatccttctagaaagaactctgaaacgaccagcacggagactggtcctacaactgaaaccgggccaactgccgaagatcgcccgagtaataatcaaccagcaaccgacaatgtacaatccagcaacgagcctccgactggaaaccagtcggccgaagctgagataggtgctgatcaggagcccccgactggaaaccagtcgggtatagaacaaaatgaagacatcccggaagtagaggctcaaacaagcagccctctccgaaaagataccagcgccgacccgaggttaggctcacctgttagggtgcaagggcctgctcgtccccgaccagaagtcataacaggcccaatggtcggcgatgaagaagaggtcctccggatacggttagctgaagattcttgcccacccatcttagttaagtggtgggatgatgaaatgcaaccgcagggaattgtaataaataaacagaaggaagacgaggaagtatgtctgctgaaaaagacactcagtcaagccactcgtcttgtaaatagaatccatcttagaaataaggcgaagaccgcaactctcgagagattggtcccccaccttggaaccctggaagcaaccagagaccaacttcgtgaagccaaggagcttgctagaaaaactgaacatgatcttagagaccgaatcgccgagcttcaagattccaacattgagcggagcggttcgtccaaagcaaaatcaaaaagcttgaaggagccagagacgaagtcgccaacgccactacgccactcggtccaagccatgtttttcaataacaatggtccgagttcaattgatgctgtcgaaatcttcgacaaactgagatctactctagatacctattttaagaacatcaaagaagctggaaatataggggtgagtctggcattggcgatgaccaagtcctggtacccgaagattgatattgatgctgttgatggctttgcagatgggacaagtgaggaagccgcccttgatctcatcagtgatgtgcaaaaagctgctgacaagatagccgctgatgtagttgagaggttccatgacaacgatcttaagccgactgggtctgataactctgatgatgaaaaaactgaatctgattga

SEQ ID NO: 55339 - DNA, 538 bp, Oryza sativa
  Clone ID: PAT_MRT4530_57355C.1
gcacgaggttttgtagtccactaaattaaacaaacaaatggagtagtatatactaagggaagggtaattatgcatatgtaacaccaatttacttgaaattttaatatccaaaaactagatagataggggttaatatgtaaaagtgcctttctccattaaattaattccactttcccacctcacctccaaaaactatcaactagatagataggggttaatatgtaaaagtgcctttccccattaaattaattctacttccccacctcacctcctcttcgattgatttgaggagataggggttaatatgtaaaagtgcctttccccattaaattaattctacttccccacctcacctcctcttcgattgatttgaggaagagattcagtcaccttttttgtcagatcttgccaggtgttgcccacacgctcgatttcgtcaactcctccgctcccatctttccaagcaaaaaaaaatctttttcgcgcaagcaatccaaatccaaacccaaaggtggagcctttcttccgatttaagcca

SEQ ID NO: 55340 - DNA, 204 bp, Oryza sativa
  Clone ID: PAT_MRT4530_57356C.1
atggagggcctcttggagccgccgccagcgaaaatagagctattttttatggcgggcctcttagcgtggccgccagtgaaaatcgattttcgctggcaagaggccaaaattagaaaatcaagaatcaacaaggaagagaaatacatcgttgcttgccgtggtgaatcctcccgcgagtgcgccaaccatcgtcgagcaacctag

SEQ ID NO: 55341 - DNA, 985 bp, Oryza sativa
  Clone ID: PAT_MRT4530_57357C.1
ttaagcttgacctttgggacatcatcatgtaagattagtgtgaaaacatatacgagatttgcagtatttatgataaataaaaggatccaagaccacttttctaacatgttggaaaaaagaatcgtaaagtggttgtggtcctcgcacgagggggtagtactaatcgaacaggagtctggggtttccttatatgagcatgaatcatgagggattttgaaagagaaggtttcatgctcatttgtggagtgatttctcttgtccaccagagctgatgtctcaagcttgtccatggcctgaaggttctccttgccaaaggatgtgtcgtgcatgatcgaggttgtttcctgacaactatcaagaacaacatctcgagggccagagggacaaggtttaggctcgagatgaggttgcgatggtggttctatggataacacttcaagggtctcgccggaatcttctttttgaatgaaatgataaacatcctgttctaaaagggattttcctctatgggagcattaccaggagggatgtccgtcaaggtgttctcatgatcgttatgaagaccatccctaaagtctagagcgcatcccgaagattgaaattcttcgttcttcggtgctgatggcttgggagaggattccttagccgaaactgtcccgcaatctttccagtcaccgtttacacacccgacgatagatgtgtacaattgctttgctctctcttcaagagagaacgaaaacaacttccaccgtatagttccttgtgacatgcctcgaatcttaaggcatgagcacagcagctcaaactcccacaggtgatggtagggattttcctggtgaagaccaaagaaaggtttctccctaaccatgtgtatgaattcggggcgaatttcatagccagttgtaaaaattggctccgatgaaggaggtggctcataaaattcgccccatggagcagacgattggaagatagattgtggctccat

SEQ ID NO: 55342 - DNA, 192 bp, Oryza sativa
  Clone ID: PAT_MRT4530_57358C.1
gttgtgttgtttttgttgtaaggtgggttcaaagtttcacatttttcacacagctgggtgcactgcatgtatattggcagcatactcgataggtttgattttgattcctttgtgattaaagagaagtggggatagagataacgatgatcatgttacgctgaaggagctggctgcgctattgactaacttact

SEQ ID NO: 55343 - DNA, 201 bp, Oryza sativa
  Clone ID: PAT_MRT4530_57359C.1
aatagaaggcagaactgtgttgttcatgctaaacacatcactgtcgggtcagctggatcaacagcaacccttgcttacacaacggtagacaggaaggatgcaagcccaagtagaaaacaggtctacccggactgtgttttgccagtaacagattaaacagagttcaggctggggcgcacaacaaaccacctggattccaca

SEQ ID NO: 55344 - DNA, 323 bp, Oryza sativa
  Clone ID: PAT_MRT4530_5735C.1
ggaaaacatagactcttcaaaaaaattctaagtattttacgaaagcaagtacctaaactattcacagctacttttgtcatcattggaataaagaaatttcggacatacgctaccaggcaacatacgaggtggcacgcttgcattgcatagcaatgcaatgcaccagagaccaaatataggtgaacacgtgacccatccctaacggactagatctcaccgcacgatctcaaaatccaacggctccggatgcacccacgtcagaagttgtccatgagcttggcgtactacgaggacaccctattcccttgcacccgcctgtacta

SEQ ID NO: 55345 - DNA, 833 bp, Oryza sativa
  Clone ID: PAT_MRT4530_57360C.1
atagatgtatcaagaaaagatgtacgacacatgaaaaactcactcgacgtacataatggaagcatctaaatttattgactaggctaaggcacatgctttgaggtaaaattttgggccacttagtggagcatggattttatgaagaattacaaggtttggacctatcacaaggaaattgtcactcttgaaggtgacggtaatgcagaagtgaagaggttttcaaatgtctgaggtagagaattttacaattgagttggtagtgataatttcgaggttgattttgatcaggaggatacgctacggcacgctgaatcagaggtgctagctagtcggtacagcacgaggattagacaattggaaggtgctaaagaagtcagcgaaggatctttttttacgatgaatccaagggatgtaataagaattttatggtgttgcgtttggcatttaaacttctcagattgaagggtaggcacggatggtccgatggtagtttcaatgatttgatggatcttagagtttgcttcctaagcctaatttcttgtaatccaacacatgtcaagctaagaaacacatatgtccattatcactaggtgttgaaaaaattcacgtgtgtgtaaatcactgtgtacagtgtcgtaaggaatatgtagacttggacagttgcccctaatgggacatgcaagttggtacaaaacgggtaacaggtgctttgataatgaggttatcgacctagatttatcggtgcatacaaagaaaaaggatccgactatggtgatattacatctggacatttcagatgcgtggtgcgtctcaaatcccacatgctttccatt

SEQ ID NO: 55346 - DNA, 1792 bp, Oryza sativa
  Clone ID: PAT_MRT4530_57361C.1
ctcgggccggccgggtcttccgtgcccctccgccgcacgcgttccccatccccaccaaagcttcttcccccgagaggcggcgaaatccccaaatccgaacaagccaaagccatcgtcgagctccttcacccaccgatcgattcgatctgaccgcgccgccgcaagggaggaggaggaggaggacgacgagcagcagccatgtgggcggcgtcttgcctggcgtcgtgctgcgccgcgtgcgcgtgcgaggcgtgccgtacggcggtcggcagcatcggccgccgctccgcccgcatcgcctactgcggcctcttcgcgctctccctcttcgcctcctgggcgctccgcgaggtcgccgcgcccctcctccaatccatcccatggattaaccacttccacaagacgcccgaccgcgagtggttcgagaccgatgccgtgcttagggttagcctcggcaacttcgtcttcttcaccatcctcgccatcatcatggctggcatcaaggaccagaaggacccccgcgacaagatacaccatggcggatggatggccaagatattctgctgggttgtcatcgtcttcctcatgttcttcgtgcccaacggcgtcgtaagcttctacgaatcaatatccaagttcggatctggactgttcctgcttgttcaggttgttcttttgttggactttgttcatggatggaacgagaattgggttgccaaggatgaacagttctggtacatggctctattggttgtctcagttgtctgttacattgtcacattctctttctcgggtctgctctttcactggttcactccatctggacatgactgcggaatcaatctgttcttcattgtcttcacactgattcttgtttttgtttttgctattgtcgccctgcacccaaagatcaatggtagcttgctgccagcatcagttatcgccctctactggcacctatttgtgctacagtggactttcaagtgagccgagggattatgaatgcaatggactgcacaaccattccaaagctgtgtcgactggtagcctttcgctgggattgctaaccaccatcctttctgtggtctattcggctgtccgtgctggctcatctgcaactgtgctctcagccccagactcaccacgtgctggtgccgacaagccactgcttcctttcagtaaggcagatgaggaagcggaaaagaaggatgtgccaaggccagtgacatactcctactcgttcttccacctcatcttctccttggcaagcatgtactccgcgatgctcttgactggctggtcaacctcagttggtgagagtggaaagcttgttgacgttgggtggccatccgtttgggtcaggattgcaacccagtgggcaacggcaggtctgtacatttggtcccttgtcgccccactcctcttccccgatagggaattctagatgaaccagcgtaagtactcaactgctgagatcgcatccttttggagcatcatctatcttgtcaagcttatttgcaaatagctaagccgtctctctatgtgtggtctgtaatattaaccgtgcgtaaaccagtggcaagaagtccctgtccgtgtcatggttatcgagtctgtctacttaataacgtgtgataccaggcattgtgcctgtattttaacagtaaaaattgggtacgttgtttgtgtttgtatatatattggagttggtttacctcaacaagatggagtaccctacattcgcattgtactgcctacgttttatattacaagtcattttaactttttttag

SEQ ID NO: 55347 - DNA, 406 bp, Oryza sativa
  Clone ID: PAT_MRT4530_57362C.1
aacaccggacgtctgaacgacgggactacctactaaactggctaccttcggcagaaggatcttgcgtaaccgggcgaggggtgcaagcactgttcaggtcctggtctgtccatctcccgttgtaaggtgtggctggggtaccggttattacgggcggagcaggaccaaaagcatgattaactataacagatagtgcatgggttactggtgagtctattgacttccttgctacacttggaaaggccagtgccacggatgctagttcatgagcatgactaggttagaacctatcagaataatggattatgacaaattaaatacgcacacatcgaaactatacagatatattaatttgtgtatacatgcatgatgtatgttccagtatagctactaaatgatttccaat

SEQ ID NO: 55348 - DNA, 1737 bp, Oryza sativa
  Clone ID: PAT_MRT4530_57363C.1
atgccgagacaatataaatcacttagatcgaaatatatattaacaacaagactatcaaactttgccttctccctctccggtgattcctccgacgcaaaaggcgatcccaaggcgattccatctccggccagatctccgcccgttgtggtgtcgtcctccgccagcccatccgcgccgttagccgagtacgctgagcacctctccaatctagttgcgattcccagcctatcgcatgaaaaccattactttcttggtccaatcggcaaccttgaccctactgagttcatcgttggtgaaccaaatagggtccctttcagattagccaacccagacctaggtcactggaaaaacacctttaaatcttggccatcgcttgagaaaaccccacccgagaagagctggattacgtggtacaagcgcgtatcggctagtaagaaagttcactggaacgagatcgggatcggccaagcgcttgcccttaccatagccaattcagctaaggatgaacctctgatggccgccgccacttatttctggtccaacaccatcaatgcctttctgttcaaccaagggtcgatgactccaactttgatcaacatcaccatgatcaccggattagatataacttcattggctaaccctatgagtatgaacaccaagaaccaattttacttcaggaccaaaagcatagggggttggtctggctatgcagcaacatatatgggtaaaggacctgtcactcctcgggagcatacaacagaatcttcccctccacatcaaagcaacagtggtagagacatcaaatacgccccaggtttaattccaaatggaggtggactatcccctcctgtcatcggctacaatgcccccaagacctcaacccttcttcaagggctcatcagagaaccatccgatgcaggcaaaaagagaagaaccaggtcatcggctacagacacattagctctagccctgaaaaagaaggccaaactcaagaaacctaaaccagccgatgatctgcctgtcttggatccatctatcgaacaagctctagatgaagaagatattgaagatgatgttgatcaggctgtagccgaagtgagtgatacagaaagaacaccatcggcttcgcccaagcagacacctccaactccttatgccccaactcatttctcaagaaagaagaaaattgctgtaaagaggaaattggcagcaacaattctcaaaccagttccaccacaatcatcaagtgaccgaactccatcggctgtagggagtcatcacattgaagaagaaatacaaccagctgctcctaccatcccggccttagccgatctgttttcttttgacattaaagattatcttgacgaagaagcagaagaggataccaccagcaaatctctgcttgttcatgaagagaagaccaaacttgatcagctatctgagggtccgattaagtccaatattaatcggcttgaggctcgcaagattgagctcttggcacaacttgaagaatgcaacgccgagctggatatagaacacaaaaagctagccgatctcccaaaatctatcgaagagcagaaggcaagacttaaatcggccatcaagaatgttgctgttctaaccaagtatttgaaaatcatccctggaaccaatgctcaagacgcccaagccattgaagaagtagaacaaattaggcaaagggctatatcggctatccaacactatttgtcccagtga

SEQ ID NO: 55349 - DNA, 458 bp, Oryza sativa
  Clone ID: PAT_MRT4530_57364C.1
ggggggggccaacttttaaaatccccgggggaatttctttaatcccccccccaaaagtttttttttttttttttttcagaaaaaaaaaccccttaaatttttccccgttttgttccaaatgaaccccaaggggctccggaccggaggcttccattttccccaaaagagggggccaaaaccccattttgggggggggggcccccccccccccctgggaaaccccccggggggggttttttcccgggtttttccctggaacccaaggggggggggcctaaggggaatttttacccgggggggggccaaaagggacacgttgaacttttcgggtttttaaaaccccttggtaccccccccttttaaggggggaacccttgtttttccttttaaccccacaaaaaacaagggtttttttgggttggccggcccccccccggggagggccggggcccccccgg

SEQ ID NO: 55350 - DNA, 546 bp, Oryza sativa
  Clone ID: PAT_MRT4530_57365C.1
atggagggtagggctgtcaatgagcccagctcgagcgagcttgcctgtctaggctcaagctcgacacaagctcgagccgagctcgaatcgagccagtcctccttcgagcttttaagcaggctcggctcaagctcggcggtagattcactgacctgcaaaaacacatttcagcgaataaaaacaaagccgcaccacccacaggcgccgccgctggcctccccgtccggccgacggctcttctccgtccgccaccgcccccacaagcgtcgtcctcgtcacgtcggcgccatcgtcgttgcgcatctcctccccctacccataggtggggccgttgtcgtcgcgcgtcgccgggagagggaggagccgaaccgagtcaccgtcgccgggagagggcggattcgcatgcccggggcgagccggcggcggatccacatgcgtcagcgacgtccgttgcagccagtggtggaggcggcgagaaggcgagccgcggcggatccgcacgcctggggtgagccggcggcagatccccaggcatcagcaccatag

SEQ ID NO: 55351 - DNA, 363 bp, Oryza sativa
  Clone ID: PAT_MRT4530_57366C.1
atgaagaagaaaaagatccatctcctcttcaatgaagtggacctcggagccttcacaaactgttcttcggccctcggtaccttgaagccttcacgactcgttcttcggctcttcattgattcagagacgttgacgatgatggaaggcccttcacaaactgttcttcggaccttcatagatctgataaaggaccttcacaaattgttcttcagtccttcattgagtgatgatgatgtcaactccgatggggagatgagagaagtagctgatgaagatggacaggagatggtttattgtctacttttcagaagagaggagaacaagaagcctttgatactcgacagcatggatggtgttgactaa

SEQ ID NO: 55352 - DNA, 402 bp, Oryza sativa
  Clone ID: PAT_MRT4530_57367C.1
atgctaggagcgccaccaccacccgtccaagggattggacctggttttcaacaggagcgtcctgctagggagaggaagaagggaggtttcacgacaaagcccccaaggggggatgtgacgcccaaaggcacagttattgccaacaagaaagatgacctcctagctgttcggagcctcccatccctccccaatgccgcaaccctagcactccccaccaaacaaccttcgccaacacgtgaactccactacacttccttcgattgtggggaaggccctttggggcctccgacttctacagccattgtgccaacgcccctccgccggaacctccgcaacatcaacgctcccgcagccagcctctcacctctacacgacaccaccacctatgatccatgccattaa

SEQ ID NO: 55353 - DNA, 185 bp, Oryza sativa
  Clone ID: PAT_MRT4530_57368C.1
acgacaagcagatgcctacaagacctatgtcgcatatggcttccaacacggtactgatctcggtattgctcctcgccattctgtccgtgctcgcggcggcgatggctaccatggctgaccaccaccaagtctacagtcccggtgagcaatgtccggcaggaataagctatccgacatacttactc

SEQ ID NO: 55354 - DNA, 380 bp, Oryza sativa
  unsure (1)..(380): unsure at all n locations
  Clone ID: PAT_MRT4530_57369C.1
ttttttttgaagatatagtattattagagtaatgatgaacaaacgtgacacaaaataaaataataaactagaaatctaataatctatataatctatctagtactctaattagctagatcattggcactaataccaggacgttttcagatcatcggaaaaaataaggcggcgcaaaccacgtcggcgcccggcaggcctccagcgggtcatcaccagcgccgtccttccacagcatctccaggctcccgctcttgacgtcgaacgtcccgacgncggtcagcctccggttcgacttccgcgcgaagagcttcaacttgtccgcgaagtaggacgcggtcccctccgattcgngccgccggggngcgcgcacgggcgcggcg

SEQ ID NO: 55355 - DNA, 527 bp, Oryza sativa
  Clone ID: PAT_MRT4530_57370C.1
aaacattcttcactcgagcttgagattacgtcactcctccatcccatctcaagaactgatcaaggaaaggaaaaaaaatggcactgaggagaataatcaaggagctcaaggaccttcagagggatccgccgacttcctgcagcgccgggcctgtgtctgatgacatgttccactggcaagcaacaatcatggggcccaatgacagcccctactctggaggagtgttcctggtgaccatccacttccctcctgactaccctttcaagcctccaaaggtggcattcaagaccaaggtgttccatccaaacataaacagcaatggcaacatctgccttgacatcctcaaggaccagtggagcccagctctcaccatctccaaggttcttctgtcgatctgctcgctgctgacggacccgaacccggacgatccgctggtgccggagatcgctcatatgtgcaagactgatcgcctcagatacgaatccaccgcaagaggctggacgcagaagtacgccatgggctaagct

SEQ ID NO: 55356 - DNA, 301 bp, Oryza sativa
  Clone ID: PAT_MRT4530_57371C.1
atccgcccgctgctgccgcggacgccgccgccaccgccggcggatctgccgcgggagagaggctagaggggccgccggatccgccctcggccatcgccaccgcggccctcggccgttgccaccaccgccggagatcggacggctgcgtattctcccgcatcaggctgccgttcccgggccaccacacaattgggccatctccgccggagctgtgcacagcatcagaggccgccgcgcatgggtacgccgtcgtcaccgctccgccaaatcacagccgttgtcgctgctcatttctagcgcg

SEQ ID NO: 55357 - DNA, 250 bp, Oryza sativa
  Clone ID: PAT_MRT4530_57372C.1
ggaaaacaacttgcccaacaatttatcaaaaaatgcatagcagttcgcaacctcggttacacaaatagcagacaacagcgcctagaatacaaaggctaaccccgaaattttagaaaagccccttgctttgaggcctgggatagggagactgcccccagcggctagcactgatatcacgagatcgctattggcgcagcgggggcgggcgacgaagggcggggggtttggttgggctgcgacgcgcgggggg

SEQ ID NO: 55358 - DNA, 449 bp, Oryza sativa
  Clone ID: PAT_MRT4530_57373C.1
ataccacaaagcacgaacttggatattaaagatgcgacagagacggtgcacatagacaacacaggacacagaaatgaacgctacaagcaaaccctgcatagtccaaaagcaaatgttatttaaaaccagacacacaaactgatagatagaagcccacgcggacagaccatatgatagcagctggaatcaagcattgccaaggcaccaggcaggaaccctgaacctgtctagtactcagttaccctaatgaccgtagccaccattgccaaactcggagcctgcctactagaactacttatccagcgcggcgaggacctcgcgggcctttgagaactcccactactgcatgccctagacgacgtaccagaggacgaatgcgctcttggagatcatgaggtcaaacttgatgtcgatgcagaagaacatctccacgacttttgtggagatgg

SEQ ID NO: 55359 - DNA, 693 bp, Oryza sativa
  Clone ID: PAT_MRT4530_57374C.1
atggaaatacaagttgaagtagaagaggaagtccagccaaaagcaacacttgcaattctcctagcggaatatgaagttaaggccaaaaagacctggatggaagtcacttatgcctctgcagttgagcaggaaatctgcactgcgtttctttttgtttcccaagttcatggtgttgaatatgcatttggagcacatgactacccctcaagtggagtatttgaagtagagcctcgtcaatgccctggtttcagattcaggaaatcgatatttctcggtacaacatgcttagatcccattcaagttaggcaattcatggagctacagtcagtgaactacaatggagatacttaccaccttatcacaaagaactgcaaccacttttgcaaggacatgtgttacaaattgactggtaacaaaattccaaaatgggtaaatcgcctcgccagaataggtgccatttgcaactgccttctgccagaatcactcaagatatccccagtcggccatgatccaaacagtcgacctgaagattgtgagaaaaggcggctgaggaacccgttgagctgcttctcttcgatctcgagccagaggcagctgcccccatcttccccgttcccgacatcacctgtgaaagagcctcttgcgtacagttcatcaaggaaatccagcgctccatcactgaggaataggtag

SEQ ID NO: 55360 - DNA, 1347 bp, Oryza sativa
  Clone ID: PAT_MRT4530_57375C.1
tgttgctggtctggctgctacaacagctgaaagaatagtggattaataatatacaaaatacatcccggttcgtgtctcatgatcagtacagggggtgggtagaattgagaggcattcactctcacccacacagagacacctctccaggtgactcactcgcattagttccacttacatgatacaacaacaccaccaagcattttgactgataccgagcaaaaagaattagctgacagttgcggcagcatgcagggtagtgccctccagatgttgccactgaccaaattagcctaacttggtatcaaaagttacacaagggaggccaggctacctattcctcagtgatggagcgctggatttccttgatgaactgtacgcaagaggctctttcacaggtgatgtcgggaacggggaagatgggggcagctgcctctggctcgagatcgaagagaagcagctcaacgggttcctcagccgccttttctcacaatcttcaggtcgactgttttggatcatggccgactggggatatcttgagtgattctggcagaaggcagttgcaaatggcacctattctggcgaggcgatttacccattttggaattttgttaccagtcaatttgtaacacatgtccttgcaaaagtggttgcagttctttgtgataaggtggtaagtatctccattgtagttcactgactgtagctccatgaattgcctaacttgaatgggatctaagcatgttgtaccgagaaatatcgatttcctgaatctgaaaccagggcattgacgaggctctacttcaaatactccacttgaggggtagtcatgtgctccaaatgcatattcaacaccatgaacttcaattccggagtgaaatataccaaggcctgcccaatatacatagccattcatgggtgttaaatcatacacattaagataaactggtgtgtcatctggagattgacccgcagcctgaaccttgggaaacaaaaagaaacgcagtgcagatttcctgctcaactgcagaggcataagtgacttccatccaggtctttttggccttaacttcatattccgtcgagcagagacgagggaggaggccaatggcgacgccgggagcggggacgccggtgccggtgggggagcccgccgccgaagagggggaaggaatccgaggaagaggaggaggaattcttggaggcgcaccagctgggtggggtggtggtggtggtggtggtctggtggagtggctgtggcgtttgcttggtttttttgggggaggtctcgtgatggctggggaaaagcaccgcggaacaggggcccctatgggagggtcgtttttgtaa

SEQ ID NO: 55361 - DNA, 510 bp, Oryza sativa
  Clone ID: PAT_MRT4530_57376C.1
aaaggggaaaaaaaaaaccttttccccctaaaaataaaggttttttttaaaaggcgggaagtttataaaattatccccaggaaacagtttatgaaaaaaatataaaaggaagttatagggggtcggggcccccaacccccttggacaaaaattcatggggggggctccccaaaacaacaaaaaggcatttttcttttttttttacattcacgggcaaacccagggggggatttttaaatatttttaccacccttcagctagtttgggttaaaagggcccccaaaaggccccagggggcccacccataaaagcaaccccgagagcaaaaagctttgttttgacccggacaaactggggaaaatccttgtttttccgggaaagggttttttgttcaatcatttggggaaattgctttgaaaaaatgccagctcgtttaaaggccttgcccttaaggggcccacccaaagatgactttggctttaacccaaggggggaaagtttatgggggac

SEQ ID NO: 55362 - DNA, 2480 bp, Oryza sativa
  Clone ID: PAT_MRT4530_57377C.1
cttcctgtcaactaacacccctgatcctctcagcagcaggctgtccgtaccgtccggcgagctcaacctgtaccgcgccgccgtcgcgctccggctcgtcctcctcgccgccttcttccgctaccgcgtcacccgccccgtcgccgacgcccacgcgctgtgggtgacgtccgtcgcgtgcgagctctggctcgccgcgtcatggctgatcgcccagctcccgaagctctccccggccaaccgcgtcacgtacctcgacaggctggcctcaaggtacgagaagggcggggaggcgtcgcggctggcgggcgtggacgtgttcgtcgccgcggcggacgcggcgagggagcccccgctggcgacggcgaacaccgtgctgtcggtgctcgcggcggactacccggcgggcggcgtcgcctgctacgtccacgacgacggcgccgacatgctggtgttcgagtcgctcttcgaggcggcgggcttcgcgaggcggtggatccccttctgccgccgccacggcgtggagccgagggcccccgagctctacttcgcccgcggcgtcgactacctccgcgaccgggccgcgccgtccttcgtcaaggaccgccgtgccatgaagagggagtacgaggaattcaaggtgaggatgaaccacctcgccgcgagggcgcgcaaggtgccggaggaaggatggatcatgtcggacggcacgccgtggccggggaacaactcgcgggatcaccctgccatgattcaggtgctcctgggtcaccccggcgaccgcgacgtcgacggcggcgagctcccgcgtctcttctacgtgtcgcgggagaagcgaccgggtttccggcaccacggcaaagccggcgccatgaacgcgctgctcagggtatccgccgtgcttaccaatggcgcctacgtcctcaacctggactgcgaccactgcgtcaacaacagcagcgcgctgagagaggcgatgtgctttatgatggacccggtcgccgggaacaggacgtgcttcgtccagttcgcactgcgcgacagcggcggcggcgactccgtcttcttcgatgtaagagacgaaattctggttcagatcgagatgaaatgcctcgatggcatccagggcccggtgtacgtcggttccggttgctgcttcagccggaaggcgctgtacgggttcgagcccgcggcggcggctgacgacggcgacgacatggatacggcggcggactggaggaggatgtgctgcttcgggagggggaagaggatgaacgcgatgaggaggtccatgtccgccgtgccgttgctggactcggaggatgactccgacgaacaggaggaggaggaggcggcggggaggaggaggaggctgcgcgcgtaccgcgccgcgctggagcgccacttcggccagtctcccgcgttcatcgcctcggcgttcgaggagcaagggcggcgaccgaccgtggcgccagcgcgatctctcctcaaggaggccatccatgtcgtcagctgcgcgttcgaggagaggacatagatggggcaaagagattggatggatgtacggcggcggtgtcgcgacggggttccggatgcacgcgcgcgggtggtcgtcggcgtactgctcgccggcgaggccggcgttcaggcggtacgcgcgcgccagccccgcggacgtcctcgcgggggcgtcgcggcgagcggtggcggccatggggatcctgctgagccggcggcacagccccgtctgggctggccgccgcctcgggctcctgcagcggctgggctacgtggcccgcgcctcctacccgctcgcctccctcccgctcaccgtctactgcgcgctcccggccgtctgcctcctcaccggcaagtccacgttccccagcgacgtgagctactacgacggcgtcctcctcatcctgctgctcttctccgtggccgcgtcggtcgcgctcgagctgaggtggagccgcgtgccactgcgggcgtggtggcgagacgagaagctctggatggtcaccgccacatcggcgagcctcgccgccgtgttccagggcatcctcagcgcgtgcaccgggatcgacgtcgccttctccacggagacggcagcttcggaagaggaggcagcattggcatcggagattacgatgcggtggacgaacctgttggtggcgccgacgagcgtggtggtggcgaacctcgccggggtggtggcggcggtggcgtacggggtggaccacgggtactaccagtcgtggggcgcgctcggcgcgaagctggcgctcgccgggtgggtggtggcgcaccttcagggattcctccgggggctcctggcgccgcgagaccgggcgccgccgaccatcgccgtgctctggtcggtggtcttcgtctccgtggcgtcgctgctctgggtccacgccgcgtccttctcggcgccgacggcggcgcccacgacggagcaaccgatcctgtgagaa

SEQ ID NO: 55363 - DNA, 1076 bp, Oryza sativa
  unsure (1)..(1076): unsure at all n locations
  Clone ID: PAT_MRT4530_57378C.1
ccggccgggcccaacgtcataaaatccacccggattctccctcccgcgaaaccaaacaacccaacccaacccaaccaaaatcccaccctccgccatgcctcgcctccacctcctcctcctcgccgtcctcgccgtcgccgccgcggcggcggaagcggcggcggagaagaagccgacggcgtacgaggtcctggagtcctacgacttccccgtcggcatcctccccaagggggtcacctcctacacgctcgaggccaccacgggcgacttcacggcgacgctcgacaccggcgacgacgacgactcatcctcctccacctgcgagttcgccatcgagggctcctactcgctccgctaccagcgcgccatcaccggccgcatcgccacggggcacctcaccgacctccgcggcgtcgccgtcaaggtcctcttcttctggctcaacatcgtcgaggtcacccgccgcggggaccgcctcgagttctccgtcggcatcgcctccgccgacttcaccgtcgacaacttcctcgagtccccgcagtgcggctgcggcttcgactgcgacgacgacggcatctcctcctcctcgtccctcccgccgccgctcgagcccagcctgctgcgactgcgaggtgcgttctagaatccccatccttcctccaacccaatctgcgatgacgtcatcaatggggagctctattaattactgttggtactagtactagaaatgattcccaattaactgtctaaataagacgcaagtgtccccagcttttagatgggactctcacgagttcagaacaccatttcattctcatatgtatgggtggggtcttgtattgtactctatcaaggcagttcataaatagtatgaaattgggatcaataacgaagtcttaatcagttaaaaacgcggccgtggttttccctgttctgtaacctgcaacttttagccaaaacttgcagtgttggatgtatttcagagtggnccaggaatttgtttcttgaatcccacgaggcatgtttagaatgttgggatttcacttgattctcatatgaaaacaactcgattcccc

SEQ ID NO: 55364 - DNA, 415 bp, Oryza sativa
  Clone ID: PAT_MRT4530_57379C.1
tccgtatacagccaaaatagaaagactagtgtcccgcagcaatgaagatcatttctcgactttgctctccttgctattgctgcatgcagcgcctctgcacagttagctgaattgcgtgcaagttattgatttattcatttagagattctttatccgcatcggcaacttaagaggattccgccacattataaacgtcttggtagctcttgtattggaggggagtgaatgcaccgaactcatctcctctgttatgcttgagcctctgagcctcttctcttgagatgcgatatgcatttgctagaacatcagttgggagagcacggaagatggaactctttcctgcaatggggcttaccatagagttagggttcgtcttgaatgcaatgtaagcacatacttctcagcgcctctgcac

SEQ ID NO: 55365 - DNA, 632 bp, Oryza sativa
  Clone ID: PAT_MRT4530_5737C.1
cccagcgtccgcggtcgcgtgggtgtgactgttgaaacttagggtcatataaatctaaataaaatcatcttacctatttaaataaaaaaaaaaaaaaaaaaaaaaaaaaaaaaaaaaaaaaaaaaaaaaaaaaaaaaaaaaaaaaaaaatttaaaaaaaaaaaaaaaaaaaaaaaaaatattataaagaaaaaaaaaaaatataatataaatgaacaaaaaataaaaaaaaaaaaaagggggggtgtttctttggggtgtacccatttaaactccccttgcttcccaattttaatttttttttttttgggggcccctttttttcaagcctcgggcccgttcttttttcccccccttgcgcgtgggcaaaccatgcgtttccccctcttttttgtcttggggcttttcccccttttgctgtgggggtttctcgccgggtggcccctctcccttgcccccccccttttgcccgttcctttggtttggttccgggcccccccctttacttgcctttttttctcggggggtggtgtttttcccccgctttgtttctttttcttttcttgtctttttggccccctttttttccttttctcttttttttttctcggcttcttgttttgttttcctaat

SEQ ID NO: 55366 - DNA, 411 bp, Oryza sativa
  Clone ID: PAT_MRT4530_57380C.1
atgacgaccaaggccaccacccttctcctcctcctcgccgccgccgccgccgcggcgctcctctgccacgtccacgtcgccgtcgccggcgaggacccggagccgtgcgacccgtcggacatcaccatcgcgacggtgaagaccgggcgggtcgtgggcggcctgccggagttccaggtgacgatcggcaacgagtgctcgtgcccggagggcgacgtcgtggtgtcctgcctcgacggcgtgcccgccggcgtcgaccggagcaagatccacaccgccggcagcgacggcctctgcctcgtcaacgacggcctgcagatcgtgaaggggtcgccggtggtgttcacgtacgccgccagcgcgccgatcagcctcgccttcgacaacgcctcgccgcggtgccagcgttga

SEQ ID NO: 55367 - DNA, 320 bp, Oryza sativa
  Clone ID: PAT_MRT4530_57381C.1
cgtcgccgcccctcccttgctgccgcgccagccatcccccgccgctgctgccgcgccggccatcccgcgctgcttcttccgcgccgtcgcgccggccctccgccgccgccgccgcccctctcccgcgaagaatccgtgccgcccaaagccgcctccgccgcccctctgccgtgaaggagagcctccccagggcgccatcgccgccgccccaaggcgccggttgtctctccgtctctctcgtgcaagccgctgccgctgcccgactcccgcgaagaagcagagccgccccaaggcgccgtcgccgccgccccaagccgccg

SEQ ID NO: 55368 - DNA, 177 bp, Oryza sativa
  Clone ID: PAT_MRT4530_57382C.1
atggtgggggttccgcgcctcctcccaaccggcgtgctgttcggcgccttctgcctgaagcgccctacccatcgcttccagtgctccagctgccgcttccaccaccgcttcctcgccgtggcggcgggtgtaccaatttccctcggttttgttagacacaacagtactaccgcctaa

SEQ ID NO: 55369 - DNA, 1539 bp, Oryza sativa
  Clone ID: PAT_MRT4530_57383C.1
ggtgaggactcaaccccaaaagaaacgcctccaaaagctgtggttatgcaggggacgtggaacgcgaggccgcactcggggagtaggcggaggagctcgccgtcgcggaactcgccgaggcagacggggcagtcggtggcaccgagcatgccggcgccgtacgtcgcggtaccgcgtgagggcaatggattcgatcgcggcctcatcgagctgctgctgctggtgctggtgcctacggtggatgaagcagtagattttttgaacgatgatgaagcagtagatggacgtgttcggggtgcggcgacacgacggcgccgcccttgccgttgctggccgtcacattatgcttcttacggagttataaacatgtcagacatttcagcactaagctacttgaaggtgttcatggatgctcactgccaacttggtgacttggttgatgctgttgttcccttcatgggtgaatccataaccgatggaacccttgccaccttcttaaagaaacctggtgatagagttgaagctgatgaacccatagctcagatcgaaactgataaggttacgatggatgttgctagtccagaagctgggataattgaaaagttcgttgcgagtgaaggtggcattgttactccaggtgtcaaagttgctatcatatctaagtctgctgctcaaagcaagacacatacacaatcatctgaagatacctcccagaagcatagcacaaaaccaccttctacaaaggaaaacaaggttgaggctaaaccaccaaaagtagagtccagcacaacacacgaatcaaaactaacttcctcttcagaaccacaactccctcctaaggaaagagagagacgggtgccaatgccaaggcttaggaagcgtatcgcaaatcgtttgaaggattctcaaaacacttttgcaatgctaattacattcaatgaagttgacatgactaacctgatgaagctactttccgattataaagatcagtttgttaccaagcatggtgtcaaattgggcttaatgtcttgctttgtgaaggctgctgtttctgcgcttcaaaaccaaccaattgttaatgctgtcattgatggtgatgacatcatctacagggagtacattgacatcagtgttgctgttggaacttccaagggtcttgtggtgcttgttatccacgatatagatgcaatgaattttgctgacatagagaagggtataaacaaccttgcaaagaaggcaactgagggggcacagtccatcaacaatatggcaggagggacctttaccatctcaaatggtggtgtttatggaagccttatcagtacacctatcattaattctccacagtcatcaatcctcggaatgcattccattgttcaacgtcttgtggttgtgaatggcagtgtccttgcaaggccaatgatgtaccttgcactaatgtatgaccataggctgatcgatggtagggaagctgttctcttcttgcgccgtatcaaggatgtggttgaagatccacgaaggttgctccttgacatatag

SEQ ID NO: 55370 - DNA, 138 bp, Oryza sativa
  Clone ID: PAT_MRT4530_57384C.1
tcactttttggaaagctcgcacgcctgcacgttcccgcccggaacggctcggccgacccacgctttcttgaggaatcagacacgcctgtcaaatagctgtgcattgttctggcacggcgagtgcggcacaacccctgc

SEQ ID NO: 55371 - DNA, 385 bp, Oryza sativa
  Clone ID: PAT_MRT4530_57385C.1
gatttctaggcgcggaaggagccaattatcgtacagtgagcaggggttattttaacccttgacatagcatgcttgctgagtgacctcgttatatcttttaccatttcacaccacttacgatcgggtttctttaaccctaaggacagcggtggggcacgagtgagctgtcccacctcaattgcggggaggaaaatgacagcctttcagttggggagacctggggggcgaccccattaaggatttaggaaattggcggggagaggtggattgtgtattgtgcgctttcagggttcatcggtcactgactgaatgttctctgcctgccagctgctgccagcgtgttcccttcactcaaatgctgggcctcgggggtccacttacttat

SEQ ID NO: 55372 - DNA, 474 bp, Oryza sativa
  Clone ID: PAT_MRT4530_57386C.1
atgcatgaacgagtgctcctctctgaatataatgataaagaaaaaattggagcatttcacaatcaaccattgcattgcatgccaggcaagcagaaggaaaaaacacatccaagtctacccgtcagacgacgaatgttttcagacaagaagttcgctgaaaacatgcgcgccaatcagtcgctctcctttgatgtccaatcacatgtggtccatttcacagtagtgctgcttgcatccagcgtgcttgcttacagcggcaaaagagagaagagcacaccaagagatcagggcagaggagtatcacgtaccagcgtggctaccagctgcagcgactgtcgagcatacataccctcggtggtttggaatgttatacttcctatccaactctcgtcgggcatggaggatcgtcttgtctgcactcctttgtttgtgccgatctgctttggcaagcaaaaggtcccgccaaatgtaagt

SEQ ID NO: 55373 - DNA, 618 bp, Oryza sativa
  Clone ID: PAT_MRT4530_57387C.1
atggcaatctcgggggaggtgtcggggaccacggcaacgctggtggtcatcaatggattcacggtcacggtggagtcagtcggggactcgcggtgcatcctggacacgcagggtggtgaggtgcagttgctgaccgtcgacaactgcctggagaagaatgccgaggagcgggagcgggttagcgccagtggtggggaggtcggccggctcaatctcttcggtggtcaggagagcccgtggttaggtgatccgagattggtgcttgctggctggattagtcaattagaaaaagttcttgtaccctgccttcccttgaggctacttccggatacccaaggccctagcgcgaagacgtgtgagggggctgcagtgatgcagtttttcaagcaagtggataagagcagcaagtattatgaatttcgctgcaaaactagattagtgaaaccatcaatcctccactttcagaacctatacaaggaagggctcttggagcaactgctacagtcaactgctctactggttagttggtcacttggtcgtcacttgtcagtggaaatgtacatcagagaagcccctagaactgctcctattacaaataagaccgtaacaagtcattaa

SEQ ID NO: 55374 - DNA, 508 bp, Oryza sativa
  Clone ID: PAT_MRT4530_57388C.1
gcgaaaagtccaaaaaaactaggactagttaacgcatgtaacaatgcaagtagtcgtctgcttgggagcagctgcatgacctgatcgatgatcagacaaaacaattttggaaagtatatgcaggtgtaattttatttgaaagcagtatcgatcagacaaaagaatcgccgttgattctgggagcgttcgcctacaacgatcgtcttgttcttgtgacgttatgcctatgaaaacacacttgggatattcacatattctggtagtgattattgtatattcctacattttctttagaaaataatagaagtttttatttaactcagctaattatatcaagatgatacaaaaccactaacacacttatgacctctatataactatataactatgatgcacacaaccaaaacacacacacatccaaaagtttacaagaaaaggaagcagatgaagtattacgaaccatcacttctaagattagatcgccacccatatttttgagtaaaagaat

SEQ ID NO: 55375 - DNA, 600 bp, Oryza sativa
  Clone ID: PAT_MRT4530_57389C.1
atggcggcgcttcaccaccaccaccaccaccacagccaccagatcaaggcgccggcgccgacttggctcatcgtgaaggctaccccgccgccgagggacggggccaagaagctggccgcggcggcgtactcgccgctcctgctgtcgccgtccgtgtggcagaaggcgcaggacgccaagaagggcaaggcggacggcggcgacggcgccctcccggcgtcaccgaggatcacctgcatggggcaggtcaaggggaggccgaggagatgctcgggcgcgcgccgcggcgaccgtccggccgcgagggccggtagctcgggtctactggagcggctcacgctggggctgttcgggcggcggcggagggggaggacgtcgtcgcgggcgtgctccaaggtcagggacgtgccgacctgctcgtcggcgcagtcgcgggggaagatttattgcggccgcggcggcgcggcggcggtgtgcacgcttgacccgccgttgccggtggtgatcaggcggcccgcggcggacgacgaagcgccgacgctctgggagaggcggcgcggcggcggcgggaaggccctggagactctccggttaacgtag

SEQ ID NO: 55376 - DNA, 592 bp, Oryza sativa
  Clone ID: PAT_MRT4530_5738C.1
ccctgaaacatcatcataagatccgcatgaacatttcaggcatcctctaaaacaaacatttcaggcaggcatgttgttacagttatacaagcaaagttttatgatactgagatgctcatgcgccgtgcttcgttaacatctttcactttgtaagtcggcacgccctctccaggcctccattgtcccccaactcaggatctcttgaggccagcatcctaactgccaataaacctgcattttctgcatttccaattgcaacagtagcaacaggaatacttttcgacatctgttagtactctagtgaatgcgtccgtcatgtcaggacctatctttgtctttccccttttcccccttatccagtatctcctctgtttgcatacagtatggctagtgatgcgttgcttattcatattatttacaactttcggcttcattttcttgacctttatcagaacggcaaagcatgtcacattgggtaaagagaagaagaccgcgtctgtgagagctcatcgccttcgtcagcatcaccatgacaacaccagcgctagcttcatccatgaccgcggctactcgaactgctccatctgcgctt

SEQ ID NO: 55377 - DNA, 243 bp, Oryza sativa
  Clone ID: PAT_MRT4530_57390C.1
atggaggtccatggcttgggtgaaggcagcttccttcgggtcggaggaggcgacggctctccagtgagggagatgctagtgtcgatgataatgatgacaagattggcaccaaagttggagtctacgaggagtgctgacgacggggaggacaacagcctaaggagccacaatgagcgggtggtggcgagatgccgaactcactctagcaccactgtcgccaccacgggagcctccgccagctga

SEQ ID NO: 55378 - DNA, 171 bp, Oryza sativa
  Clone ID: PAT_MRT4530_57391C.1
atggacagatgatcagaaaaagaccagtgcatccgccatcaggccatcagtgacgccaaagtttacagcttaattaccacgtacggcacagtaagatcgccgtcaggctttcagcaggacggggagagagtacgaccaaatgaagcaaatgacaagaaactggctggatcg

SEQ ID NO: 55379 - DNA, 381 bp, Oryza sativa
  Clone ID: PAT_MRT4530_57392C.1
ggaggggaacccggctaacattaaccctcggggaccccagcggcaaaaaccgcagggcatttaagaacaaaacagggcacacccagttctttgaagggcaaactacatcagggaaaacaacctctcaaaacaaacggaacaaatgctactacagggcgggtaaagccccaggttattgatccctctacccaaaacggggggaagttcaaaacaaacaggctacgggaagggggcccccctaaaaccttccgggaccccgcccttgggaaggttgctgaacccaaggaaaagggtcggcccaaggcccccgggaaaaaagcccctgggcggcccaagcttcatgtgggacttaataaggggggcgggcttaacccccaagaa

SEQ ID NO: 55380 - DNA, 556 bp, Oryza sativa
  Clone ID: PAT_MRT4530_57393C.1
ttaaatttcctcttttctcacgttgctacatctccacttcaacaccaaatggtctagatccaaaccagatccatggaggaggggggaggctgcacggcgcgtggagattgatagagcgacgacgagctcgggccagtcgaatagttgagtgaggagacacaacggtggaggcagaggcggctcatgagcttgaatctggtcttcctcttccccatcgatcctgcggtgagcctctctgaagacctccaaatccctttcctccttagcagtcaaggctggagctgctgctgttctcttaattgccaagaagaaatgctccgagaactgagttgttgtggctgctgcattgtactctcgatgattttgtatctttagttcgcgcgcgccgctgcctagagctttctcggcgtcgatagttcctgctctggcggcggcagcggcaccatctccactgctgctagttgtgatctgctgcttgttgcttgccatgctattgctaattgccatcaagtagggagaggcgctcgctcccaatctccctctctcgtgccgtcgt

SEQ ID NO: 55381 - DNA, 1299 bp, Oryza sativa
  Clone ID: PAT_MRT4530_57394C.1
atgaacggagcaagctccggcggcggcggcggcgccggtgccggcggggatgggccgttggtgtaccagcgctggaaagggaacaatgacatgtatggtgtccgtaggagtgaggcgcgcggggccgccggctatgtggtgatctgggggggcttgatcccgccggagtggttcttgggctgagagtgcggcgcccatgaacggagcaagctccggcggcggcggcggcgccggtgccggcggggattgggccgttggtgtaccagcgctggaaagggaacaatgtgtttgttcttcaggggaggtttatatttggacccgatgcaagatccttgtacgtcaccatgttcctcatcatcgcgccagcgtcaatcttttgtttgttcgttgccaaagaactgatgaataacttttcttatggtctgggattaccagtaatgatttcagcagttgtgttcacggcatatgacttgagccttctacttctcacttctggtagggatccaggtataatacctcggaatgcactacctccagaatctgaaggtttggatggcaatgcagaggttggatctaaccagactccaccaatgctgcccatgggttgggcaatgcataggacttaggaattacaggttcttttatatgtttgtcttctcaacaactctgctctgcctctacgtctttgggttctgctgggtatacattgttaagatcagaaactctgagcagataacaatatggaaggctatggcaaagacccctgcttctattgctctgctagtctacacatttattgccgtttggtttgttggtggcctctctgtatttcacttgtatctcatgagcaccaaccagacaacatatgagaacttcaggtatcggtatgatcaacgggccaacccatacaacaggggagtcatggagaacattaaagatatattcttctctgcaattcctgcctccaagaacaacttccgcgccagagtcccagttccacaggagcaaggtctgaggcctcgcccaaccaatggtttcatgagtccaaacatggggagagccgtcggtgacattgagatgggtagaaagccggtggcatgggatgagccaaggatggcagccgatatcggcgatctgggagcaggcctgggcaacttgttggaggacaaggatggcaggtttcgcagtgcatctccagatctaagccgtgacgccctcgcaatcggaggcctggatgatcaaggatcctcagtgatgaacccagggcgtacaagctggggagttgaggcaggtcgatga

SEQ ID NO: 55382 - DNA, 473 bp, Oryza sativa
  unsure (1)..(473): unsure at all n locations
  Clone ID: PAT_MRT4530_57395C.1
cactaatcctgaggatagaattaataggtcactcaatatcccatgctggttttaaagttggtttttgccaccattcgaccatggatactggcaacaatttctttccaccagttttagaggtggtgttatgtgtgattataaaggaagatggacatatggtttgcagggatttggagtttattaatagtatagtaggtactttgtctacagcaattattttcacattgtaattgttcttattgaaattttaaagctaattgaaaagcatggcatacaagaaaagagagatagagaaagaacttggagaagggctttaagaatagagtatttcagtatagtatctacaatagtaattcaattccaggttcagaaagttgtcacatattcactcctgccgatctcacctattttacctctttcacaccttagntgagtactaataattttttaatttggctatgtagaaattggca

SEQ ID NO: 55383 - DNA, 388 bp, Oryza sativa
  Clone ID: PAT_MRT4530_57396C.1
gtccgttgcgaaatttatgcgagctcgcgacgcgggccccctacgccagaggcggaggcttgctctacatatactacgcctgcagacctccacgcgagcgtgccccggagtggaagcggaggcggcggcgggtcgagcgcaatctggaggcgtggcggcgcgaaacgatggcgatgaccctggctaggcagaagggaaggctgatggcgagcatgtctgggtcataatagaactggactctttgattcctgtgtgtttctggcagatccaagtagctggctgggtgcagcatatgctttttctaacgttggggcgatgatgcaccccacaatctgtggactattcctagtcactcagatcaacggggcaatatgtctcttccaatctg

SEQ ID NO: 55384 - DNA, 998 bp, Oryza sativa
  Clone ID: PAT_MRT4530_57397C.1
ttttttttttttaaatactactgtcaaccacaaacatatgattctgtagaataaaggtacaactagatagtttgttgtccataagtagtgaagctactctagctttaaactagagacgaagcaactgaaattccactcatgacaaagcacaccgacagataaggctaaacttaaataaagcattacgcaagatacagctactccatagtatagctagaagctagttattgactacattctagtagtaagccgcaaaaggttcaagcattccaacccggagaaatactgatttaaccagcaaatgggagatcttcaagaggccaaaagcaatcagaggggccagggtaacacaacatacatagactgcccaattttgctggttcatctcatagatgctctaatggcctcatttactgagcaaccctaggttgcacaccaccataaccactgccataatttgattggccttcagacactccattgactgaagccccaaaccctccaccttgtgaaggatcagcccaagcatttggataaccagaaccgccattcccgcttccatagccagcaccatacccagatcccccgccagcagctggattgccacccacgcgtccgcttcctccataacccccatatccaccatgattaccatacgatgcatctcctccatatccaccatatccatagccctggttcccatagcctgtgcctgcaccagcggcgtgactagtgggtgcattacctccagcagaagagttgttccaagcagcatagcctgcattgccaccataactcccagtgccataaccagacggagcttgaccaccccatggtcctctgtttgctcctggaggaccaccctggtaacctgaaccaggcgcatttggattgccataatgcccaccatacccagcaggaacacctccaaatcctccagccccataattcccatacgcagttccagggttagcatgcccatatccataaccaaccgt

SEQ ID NO: 55385 - DNA, 3682 bp, Oryza sativa
  Clone ID: PAT_MRT4530_57398C.1
aaagcaaaattggtcagctaacctaatactacatcagcatgctaaacaaatcttataaacaacgcatgcctagtttttcctacttccctccaagagtccagtctccagattactacacgtgacacaaaaatgacattcctacttggaagaatgtggaagtcaagctattcagcctacattgtacagtgccttcgctgcagactgctcattgccctggttagccgaatggttatgcatgcctcccggacaccagggcaaacctctgttctggcagctcataccagctgagaacatatttcatcgttgagtttgaagcactcccgagatgcaactatgcagccttaggagttaattggggaagagtatggcaacctacttggctgcataccaattctgcgcacacttggcatcaacagccagttcaacattcaagatgttggtgccgtagaagggcttggacatgcattcaaccacaatcgacttggccagatcggcagattccgtaggcccttccagtatcacttcatcgtgcacctgcaagagaagcctccaaccgagttccttaagacgagcattccgatctatctcgagcatagcacacatagcaacatctgctgcgctgccctcttttctatccctgtaccagagtttcagggtatcctttgcttccttgacagagaccttccaatctcgagcaagcccaacaggtgtttttccatatgcaatggagaaattaagcattttagctttccgcctctcagcaccaaaggcatccttcaacaagggcacaggaggtttctcttggccaggttgaggatgccattcaagaagtactttcttttcttcaacagcatcacggatatgctggtacatgttcatagctgtcctggaatggaagtcaccaccagctttgaaagcatctaacatgcttttacaactagcaagatgtgccaagatcctgagctccagctgaccataatcagcaacgatgagagagttccctggagctgcaacaaaggcttgacggattttataccgatccttttccagtgcaggttgattctgtaagggaagaataaagttggatatcaacgagtcaatagaacaaatctcacagagagccgcaatggcatggcatgcttcctttcctttctttcctcctccaaatgcttcatatgcagttccataagaggcagtgtcgtttagatcatgctcagaaatttctgaatcaccactgtcatcatcctctacatcatctgttgtgtaaacaagatcagttggcagtttaccagccaaacttctcaatgcatctccacttactgaaggccagccacttgcagtaaatagatcagttttcagatcttccacaatgctgaaaagttcaatagtacaatactttggagttttcttgccctctgcaataaggcttccatcatttggtactttaatagttctactctttggcaaagtttcaccaggtttgcatctattctctataccaccaaagaacagttggcgaatctgagtatcactgttcacgttcatgtattttgcatcaggacaatatttagatgcccatttccgaaatttatccgcagctagttttcgctgtgcaacagcaaccttttcaatttctgaaaggtaaccacggtcgactagcattccagctgtttccatcttgacaagaagggcaccaaaaggacgccaatactcctcgtagaaatcatacattgaacctctagggcaaccatcaaaagtccagtgctttttttccagcttgcttttcaaactttcataaagtcgtaaggtactcattgaatctaatgaagaataacagatccacatttctctgtcatccctttgtaatacttcgacaggctccatagagataattttccctgcagatccatcctttttaatctttttccaaccaaagatggttttcattgatctctttccaatcttttgtaattcctttggtacaacacccatgaccctgtgatcatttgtaagtccttcaagtgaatatcctccatcaattcttcttgaagagtcccaaagtcgtgcaagatgcatcgtatcagcatgaaacccagcaactttgattccatagttctctatgacatggctatcaaaactatagttgtgccaaaccttcctgattgaggggtcctcaaaaaatggagcaaactccatgaggacatctcgcccaccatccagcacgtccacccaaatgcatgtttttccatttccaaaatcagcttctgcatcagagttgccagagtagatgctaaagcaaatgacctctccatggctaactggtgtctcttgtttaacatcaatattagctacctctgtgtcacatgcatgaataaagtttttgtactttgaagtaagcaattgaacaacactcctagctgacttcacattgtcaaccaccagaactttgtcgtacacagtagcaagtgccttcctcgcatctttagactccttggacatgggtgccttagctggagaatcttgtactgtattcttggctgtgcattcatgttcatctccatcataaccatccctagctttgtcatcaaactgcaggcttgtctcgactttagagatcttcagaacggaagcatcagtcttagaatctggttgccattgagtcttcagttcagagccactagacctgttgagtggtttaatgtcatcgttaacaacactggtcagtgctgacacagcacttgcagcttgattcctcgtgttatgctttgccaactccatgttagcatgcctatttgcaagagaattaggagtcattctttctcttacattgtacaatgaagaatagttggaacttttgtgatcttccaaaggttcgtgatgaagaattcctgttcgtagatgagtagaacctttataaatagtgtttcccacgttattcctggttttgatcgaggatatcctcttgctctcctcaagccattcttgtgcattactttgcacattgaagttggtatacactccaattttgaaagcactgttgtctgtaactccaaggcccgagctactatgcgagtagtcctgccttccgcctccgatgaacggcgagcggccgcggcggccgccgcagcagcggaagggcgacggcgcggcccagagaggcgcggagcacgggcaccgccgcagctgcgcgggcgccggcgccggggccggagcggccatcgctatggagctcaccagccgcctcagcctcccccctcccctccctcctccccctccccctcccgctagcccaccgcacccacacccgaagccaccgggcgccgtcttgggcgactccgacgcggctaccgctcggagcagcagcaggcggcggcggcggcgcacgcgggcatcagggccactcgactcgacgaggaggaggcgggcggcgcggcgcggcgagaggagggagacgaagcgaggagagctcgggttcgcagagtttggagaggagtgggagggggatagaggaagggtttacggcagcaacggcgcggctggaaagcggaagtggaaggggattttcgttctttttcgctacgcgcacacggtggcggccaccaaaacgtttcacaatcttgttgttttgcgtgtctgtgagtggtacacgtcggcaggcagaggtaggtgcctctgtcactga

SEQ ID NO: 55386 - DNA, 308 bp, Oryza sativa
  Clone ID: PAT_MRT4530_57399C.1
ccttcggccaaatctggcgaggcggcaggcgggtggtggaacggaggggtcctgggctagctcttaggggtggtggttcgatgaagtcggccgacggacgggcgtcggtgtggtgtggtggatgctgcgtgctgccatatggtctcaggcaaaagcctagttcggtggttcaccgggctggcagcggctacgcctttggatgggcgatggcggcattcttggatgtcgtgaccaccgtggtggcatcgtttttggagcctcttctctgtggtgttgccgtaggcctagcggcatccggccatgcttag

SEQ ID NO: 55387 - DNA, 421 bp, Oryza sativa
  Clone ID: PAT_MRT4530_5739C.1
gggaaagaaaaaaaagtcttacaaggtttgctttacgaggggttggccaaaatatttgttgaaagctaggggcaccctcgggcaaaaattttggaagggttacaaatatatgtattggaacagggggaatgcatgttaaaaaaattgagttccagggggggcgccttgagcatgcatattttttcttttaaagctttttgccttccccagtttttctgccctgactgtctgggctttgcggataaaaacaattttttggggggggcatttagcactttgggcttttccaaaaaagttcctgttttttggaggccgggctttttttttaaggtgagatttgggaggaataggtagattccttttagggaaaccaagtaggccccttttcgagggcgcgcccctttttttaggggggctacta

SEQ ID NO: 55388 - DNA, 181 bp, Oryza sativa
  Clone ID: PAT_MRT4530_573C.1
cccacgcgtacgatcattttcagacttgcataatagtctaataaaaaaggcatggccttgcacagaacttgatgcaagattcctgcatcaccaaaaatgcagctgtatacggattttgtttctgaaatatgaatgggtagaacctcagttataccaacattatccacgggcactttcgatc

SEQ ID NO: 55389 - DNA, 1368 bp, Oryza sativa
  Clone ID: PAT_MRT4530_57400C.1
atggcggcggcggcagcggcggcggaggaggagcggaggatgcgaggagtctaccctagcgtgtggattcagtccatggattcagtttgtggatcagttattttactcagcccgcatccaccccaaaccaaaccacattttttctatgagcctggaccggcatttgaggagaacagcgaagaggctatgcttgatatatcacaaacagagtcaacagaactttggctaatacagtggcctctaaatcagttagatgcgtctgattttcatggtcaagaggttactcttaagttgcaccgtgatggaaaattgagcagtttggatagttcctcagggaaatcttatgatcttgttagctttgctgctcagcaaccagatgcaactgttttccttccatccggaccagaagcaaaagctgttgggaagattgcacgtcgagttagcttagttcgttatcctgaccctgaagaaccggagaagccaggtttggggagtctcactcctagcagtaagaagtctgcaggttcttcaaagaagacgaggtctcggttctctagcgggtcgaagaaccgcagcagccaaggctcagcgctatcgctgggccaacagagtgccgagcccgcgcacaaacacaatcagaagagaaaggatgagagcagtttggggcactcgaatgtatcgggcaagtcggctgaaggatcccaggttcgtggtggcgacagtggcacgaccttggaggttcctcagacgccaggggagaaatccaagaagaagaacaagaaggttagaatcgcagagtaaagcagtatcatcgtagctcggggggtcaggagaagagaggttaattttccctgaactgtcggcactcccccggagctttgcaggaaaggcgtcttgaatttcctgagcatttaggttgactcaattgcatttctgtgatgaggctcgagggctgcagccccatgcatgatatgctggagttatatcgttatggtttatgtatcttgaagaagacatgtttggtcgggcctgaagcttggtcgacagggctttacaaagcaccttctacttgttgcaagccatggaatgtaacatcttttgcatgaatcacacaaatgagacctgagctgttttgcctgtcaagccttcaccttcactgttcgtcgttgcggcgctcgtccatccatctgagcggctttggtctgatttgtcttttgcgtcggtttaattggtttgctaccaatcttgctctccaaaaggagcttattatcctatatgtatttttgatttgatgctcctgttttttcttctctctgaactgagcatccgagtcaaatataggcaaatttgatgttctatgacaaacaa

SEQ ID NO: 55390 - DNA, 726 bp, Oryza sativa
  Clone ID: PAT_MRT4530_57401C.1
atgtctctgtggatggaagctgcagacgatatgtatgagcaagcccttgagcatatggacatgcagcgccaacgtctagaggaagctgaacgcaaggaagccgatataagatacaaataccgagtgctacaaaatctatatgatgagaaggagaaacaaaactccatactccatatttgtgtcgctggagcatcattttgtcttcatcaagtacccggactagatagcgatgacgatgatgaggatgatggtggacatttatcaccagtacatggggatgagccacaggggcccaatcctcaagatatgggtgaaggagttttacaaggccttccaccatcaccatcaccgttgtatcctatccactctgatgatgaagctgaagccgaagcaacaccctcagctatggacataagtgaagctagccaagaaccagaaacaacaagagggacccgaatgtttcatattaatgatttgaatgttcctcctgtttgggttgagactcaagaagaagaagatcctgaagaacggatttttgaaacacaggaacatatcactgttcatcctaagacttgtgaagaccatgacgatgggattccctactcatgccctaccaccaatacaatggatatagctacaacatataatgctggtttttcacagtttgcacctacgtctttatttcctaatcctgcagaaggcacgggagggtggcttgatgactag

SEQ ID NO: 55391 - DNA, 336 bp, Oryza sativa
  Clone ID: PAT_MRT4530_57402C.1
atgtcgccgggaggaaagaccgcactgccttactatgtctccgaggagctcatcgctaaagagggggaaggaaggggtcttgctaaagatggtttcttgttaacagaaattaatctattaaaggaagctgatccagaagtgaccaagttaaaggagaatgcggcatggcaattcgatctccggcgaaggggtaagtcctacgttctgccggcccaggcaattgtctcatttacgtcggcgtcgtccaaggctgcatcaccaatgaggtttctggacattgcatcggcttgcaaggattacatgcgtcaaaatctacatcagaattatagccgatag

SEQ ID NO: 55392 - DNA, 1320 bp, Oryza sativa
  Clone ID: PAT_MRT4530_57403C.1
atggtgtcacaggtcgcgtcgccgcggcctcgtcgcgtccgccgcgccggcggagggggcagcgactgggcgtcgctcccggcggatctcatgtcctccgtgctcaggcgcctcgccggtgaccgcgagcgcgcccggttcggcgccgtgtgcaaggggtggggggccgccgccgccaggctgccgtcgcggccatggctcgtcgggtcccgcgccgacgactggaccggcctgagcggcgccaccatgtcgtcgttctggctctccctcgggcagcgcggcctcgtgccgttcgccgtcgacgtgcccgccggatctgagtacctgtcctcctcccgtggctacctcgcgctctccaaccccacgggtaaccctagggtgatcaccctcttcaaccccgtcaccggccgccggatcccgctgccgccgatcgggttcttcaagaagtggcacgacgtggccaccattgtgctgtcggctgacccggacacggcggaggcgtggtccgcggtggccgtcggcttcccggcgaactgcctcgcgtactacagctccgccaccaacgactggaagcccatcaggttcaactactcctccggctacgccggcgtcgagcacttcagggggcggttctacgtggcattcaagtcggagatcagcgtgctcgaggttgacgtcgccacccccgccgccattaagatcgagatagcccacgacgacgacgacgaagacgcggacgtcttcgacatcgacctcaacctcgaccacgagacctcgaacagcgacgacgacgacgacgacgacgacgactgcgccgacaccctcgccgggttgggcgacgaggattacccgctcaagtgcctcgtcgagacccacctggtggactgcggcggcgagctgctggtcgtgtcgatgcacgacgaggtggcgtacaagaagccgagcccggaatccgccgtcggccgcaagccccgcagccacgacgacgagcggtgggtggacgtgcacagggtggagtggctggagagcggcgcggcgcggctggtgcgcatggaggacctcggcggctacgccctgttcgtggggcggaaccacgccttctcgctctcgccggaggagttcccggcgtgccagcccaactgcatctacagcgtcgagcagcagggccaccccgacgggctcgtcagggtggtgaacttcaacgacgacacgaccgagtgggcttgccccgacgaggacatcttccccgacgacgacatgcgaggctcgccgacggcaggctgggctcgccgtggctgggtcttccccaaatactcctaa

SEQ ID NO: 55393 - DNA, 1002 bp, Oryza sativa
  Clone ID: PAT_MRT4530_57404C.1
cccatctccaagctctttctctccctgctggctccccatcttcacctcgtggcggcatctggtcatgcacctcggccacagcgcagctcgagcagtcgacggggtggagtggcctcggcagcggcacggattggactcggcgacggtggtatacttccggtcagtctctcgtccggatctacttccgacaagcctctcgtccggatctagggccttgcagcggtaatcactggatctggggtctccgcggctggatgccctctcctgcttcgtcgttgcggtggcaatcaccagatctggggcctctgcgcctggattcggttgatgggagttttggagcgaggatggaggtgtgtttgagaataatcacccctcgtctgctgactcgtccccatcgcccgaccggtccacggggttcaggcaacatgcatcgcggcgtctcggcatggagggtgcacagtgttggggttcagctacggcagcttcgtggtgttcgttgcctgctgtggggtgctttgtgttgtggatagtgggcgtggaccagaagctgattatgtgttttcaccgcgcgaaattggatccaagagtggggatggtgatgcagatggcgtggtaccagcatcaagcatgtgtgatggagctggaactcagaaacttcaactaccaagacaggagatcaagatgtctagaatggcattgtgaatttgtgatcctcaatacaattgaagttgttcacggagctgctcttggcacgatggcttctttggtgatggagcagagctcttagaatgtcttttgatcacaccacaagaacgaattttatttgtggtaccagttttgtttgtatatataggaggataggatgtatgcagcgttcttgtggtgttcggatgtaaaattgggggttcttttggtgttcggagagcgatttgggtgggaatcggagtcggaaaaaaaattgctacggatgcgatctgagaaagagaaaaaaaccgtgcgggg

SEQ ID NO: 55394 - DNA, 222 bp, Oryza sativa
  Clone ID: PAT_MRT4530_57405C.1
atggggtaccccagtcccactgtcttccacatctctaatggctctcttgcccatcagagacctcgtcgcctcccctgcctccaaactactcaggattcgtggtcaccgctgccaccgctccctaccatggaactagtgggtgaagaagatatggaagccctcccggccgtgaccggccccagcgccaatggcgaggtgaccgtggaggagtggcagtggtga

SEQ ID NO: 55395 - DNA, 323 bp, Oryza sativa
  unsure (1)..(323): unsure at all n locations
  Clone ID: PAT_MRT4530_57406C.1
gttcaacggcggggtgttngtcgccgtggtngtcgggctcgcggcgggctacttggcgttccncagcagcgacggcgaggacctcgtngtggtngacaacccctgcgcctgcgcctagggtttggctttgcggctgcccccaggtgtggctcctctgtttggtttcccgatcttgtatgacaagtagaaataaatctgtgtacaaattcaattgcgtgacagggggattccggtgtttntgtaatttggggggaaattgtagagtacaaaatgagaaagctgctacttttgtgtttccaaaaaaaaaaaaaaaaaaaaaaaaa

SEQ ID NO: 55396 - DNA, 627 bp, Oryza sativa
  Clone ID: PAT_MRT4530_57407C.1
atggcgggcgtcgggtcggcggtgcggcggctctacctctccgtttacaactgggccgtcttcttcggatgggcgcaggtgctgtactacgcggtcacgacgctgctggagagcggccatgaggccgtctacgccgccgtcgagcggccgctgcagttcgcgcagaccgccgccttcttggagacacattcacatatccttgttacttccttggtcataagctggtccatcactgagatcattagatattccttctttggcatgaaggaggcattcggatttgctccttcctggctcttatggctgaggtatagcacctttatggtattgtatcctactggtatcagcagtgaggtcggtttaatctacattgccttgccttacatgaaggcatcagagaaatactgccttaggatgcccaacaaatggaacttctcctttgatttcttctatgcatccatcctttctctcgccatctacgtgcccgtagctgggattaagataggatctgacaagaacactgcgttgcaggatcgcctcacatgttcacctacatgcttgcccaacggaagaaggcattggcaaaggctaaggctgcataatggtgatgctcaagagctttcttga

SEQ ID NO: 55397 - DNA, 588 bp, Oryza sativa
  unsure (1)..(588): unsure at all n locations
  Clone ID: PAT_MRT4530_57408C.1
ggnatgatctgtggntggatggctgtgggggtgcgtgatgggtgatggtattaggaagaagggnnagtgaacaaattgttctttttgtttacctatggatcccatgttcaataggcntctttagtttgcaatttgatagcgtagggttttgccaacattttcctgtgatgttgaatgaaggattataaaaagtagccttcaaaaaaagaggaggcaaaggttttgatcgaaaaaaaaaaaaaaaaaaaaaaaaaaaaaaaaaaaaaaaaaaaaaaaaaaaaaaaaaaaaaaaaaaaaaaaaaaaaaaaaaaaaaaaaaaaaaaaaaaaaaaaaaaaaaaaaaaaaaaaaaaaaaaaaaggggggcgccctttctaaagaatcaaattttactccccctggctgccaccaataaattttttttttgggggccccaattttaattaaacggcccctgttttaaaaacgtctggatcgggaaaaaacctgggcgtccccaaattaaattcctttgaacaaaatccccttttcccaagtgggtttaataaaaaaaaggccccacacaatcccctttcccaaaatttgccccc

SEQ ID NO: 55398 - DNA, 401 bp, Oryza sativa
  unsure (1)..(401): unsure at all n locations
  Clone ID: PAT_MRT4530_57409C.1
atcagaatatcaattagttcgactaactgaaaatgaaatagcctttacagaatgctcctctgtacttcacaatcatattatccaagacaatgnncatgacctgcctacccaaacaaacaaacgaactctatagattacttgcattcttttcagctgtatgttggattagattacaagaatggactttaaagaacaccataacttgactgaatacagaagatgaacaatcaattccaagctacaatgcagcagagaggatccccagttcggcgcagagtggctccagcccttcctcttgcagcaaggaaagagcggcaagtccatagtaagaatggtagatatccgggaattgatcgtacaaaaactgtgtaaaaccctccattaaggtgaattggcaatag

SEQ ID NO: 55399 - DNA, 1164 bp, Oryza sativa
  Clone ID: PAT_MRT4530_5740C.1
ccataaacattgtgatcttccttccatattgcattcgattacaccctgaagatcgtaaaaaaagtccgtccttataatttttaatctgcttaatttatacattagcatcatattgctagtaaccaagcataaaaaaggaatataaatatatgtgtgtgttttcaattaacatagaaaatcccagccagagatatcacgcgatcaattccagaaccactcccagctgtttagcggcgcctcctcatccgccgccaccgtcgccgccacggcgtgctcgaaggcgtcgccgacgagcgtagcgtcgaccgggagtaagacggaggaagaggggtagtcgtcgtcgctgccggcgccgccgcagtcgtcctccgacgacgagggcggcgagcgagcgccggcgaagtaggactcggggctgtcgttgctggccgctcttgccgccgccacgcgcgccgccggcatcgcgacgccgccgccgccgccgttggtggtggtggtgctcccggcggcgtcgtagaggcggcgaccttcttcgagctgaaacgacttggcgctttcaggtgcggctggcacggcggtttgctccgccggcgccggcgacggtgacggtgacttcccattagcttgcagcttctcggttaataggatcacctgagatcggaggctctcgttgtcggcggcgagcgcggtgcggccggcgaggagctcgtcgtgggcggcccggaggcggtcgaagtcgagctcgagctgcttcgtcttccacctcgcgcggcggttctggaaccacacggccacctgccgcggcgcgatcccgagacgccgcgccagctcgctcttccgctccggctccagcttccgcttctcctcctcgaagctccgctccagcgctcgcacctgctccgctgtcagccgccgcttcctcgccgccgctgacgacgacccctgctcgtcgacgccgtacagctcgtcgacgaggtcctccatctggagctccagctcgtcgtgcgtcgtcgtcaggaacggcctcttccgccgccgccgccgcagctcggcctcctccatcaccggtgagcctacacgttcacacacgtaagcaacgcgttccaagctatatatatagaaccactgatctgggtcgatcgacacctccgacgaagccgccat

SEQ ID NO: 55400 - DNA, 1590 bp, Oryza sativa
  Clone ID: PAT_MRT4530_57410C.1
atgggtatggggacgccgagcgggccgagcccgatatttcttggaaaattactatggcctggtgaagtcacaattactttacgatggataggccatagggtcaaaaatggatggaaatttagagttacggcctacgggccattcaagcacgaatactacagtcaagatgcctacttcgtcaccgcttcattgatcagcatcgccttcttcctctggtacgccagccgactccgtcgaacagccatcctcctcccgcccgggcctcccggcttgcccgtcctcggcaacctgctgtccgtgcatcagttcacccaccgcggcctcgccaagctctccaagatccacggcggcttcttccacctccgcgttggccagccgaacgtgttcgtggtgtcatcgccggagacggtgagggagatcatacacgagaacgacagcgtcttctcgcactgtccggtcacggccgccatggtgtacgtctcctacgacctggccgacatggcgttcgcgcactacggcccgttctggcgccagatgcgcaagctctgcgtgctcaagctcttcagcccccggcgcgacgtctcgtggcgcgtcgtgcgcggcgaggtggacgccctcgtcaggtccgttgccgagctgcgccgagtcgcgggcagtgtcggtgatctggtattcaagttcgccaccaacgtgaccttccgggcggcgttcggtgcacagagccgggaggacgagaaggtgttcgtcgacatcatcctcgagctctcggagatcttcatggcgttcaacatgggagactacatcccttgcctcgggtggctcgatctcaacggcatcggtaagaggatggcggcggcgaggcacgcgctggacgttttcatcgaccggatcatcgacgagcacctggccaagttgaggaacggcgacgtgtcggcgtccgacatggtggacgacatgatcgcgtacctcgtcgacgctcccggcggacgacacaagagagccgacggcgtcgaactcggtgacctccacctgaccagagacaacatcaaggggctaatcatggcacgtaacgacatcatgttcggcggcacgaagacagtggcgtccacggtggagtgggcgctgtcggagctcctgcgcaacccagacgaactgaagcgcgcgcaggacgagctagccggcgtggttggcctccgccgcagggtcaaccaggacgacctcgacaacctcccccacctcaggtgcgtcaccaaggaggccatgtgccgcgacgaggcgctgtgggggaccgacgcggcggcgttccggccgtcgcggttcgccgacgagagcgcgcgcgtggagttcaagggtggggacttccagtacctgccgttcgggtccgggcggcggtcgtgcccggggatgcagctggggatgttcgccgtggagctcggcctcgcggagctcctgcactgcttcgactggtcgctgccagctgggacggagccgctcgagctcgacatggacgacgtgttcgggctcaccgcgcccaaggctgagcggctgtgcgccgtgccatcgccgcggctgtcctgcccgttgctctga

SEQ ID NO: 55401 - DNA, 2491 bp, Oryza sativa
  unsure (1)..(2491): unsure at all n locations
  Clone ID: PAT_MRT4530_57411C.1
acgatggtggctttggcttggttcctggttcagaatctcatgtgagtcaggtggagggacattctgtgctgttgcagctttgtgcctgatgggtttcattcaagttgatttggcatcaaatttacaagaaccatcatcaattgatgtacgcttgctcctggagtggtgtcttcagagacaagcggcagacggaggttttcaaggaagaaggaacaaatccagtgacacatgctatgcattttggattggaggtgtcctaaagatcatcggtgcataccgcttcattgatcatggtgctttgcgaagttttttgctctattgccaatcaccttatggaggttttacaaagtttttgtacgatcaattcccggatatctaccattcttactatggacttgccgctctttccttgctggaagaggaagggctggagccactctgcaccgaactggggatcctctctgctgcattgtagcttggaattgattgttcatcttctgtattcagtcaagttatggtgttctttaaagtccattcttgtaatctaatacaacatacagctgaaaagaatgcangtaatctatagagttcgtttgtttgtttgggtaggcaggtcatcccacattcccagcaccagctgcgcccgccgccgccgccggcgtcttcgggccgagctgttctcctccgtcagatccgagctaccggcttgtctatctccggcactgagagacgagggttcccctgcgagcgagcgacggccggtgatggcggagccggagcagccggagttcgcgcgcgagcggcacgtgctgtttctggaggctatggcgtcggagctccccgcggactacgcctcgcaggaggtcaaccacctcaccctcgcctacttcgccgtcgccggcctatctctccttcgtgagctcgacagtgacccttgccacaatggtagtcatcttgcaagcacttattctgcccttgctatcctgaagattgtaggttatgatttagcaaacattgataacaaggttcttttgtcctcaatgagaaacctccaacagccagatggaagtcatgccatgtcgttcgacaaacttgatattggtaaatacctcctttctggcctcgcgttcctcggttcctcctcctccttgctagctgctgctgagtgctcggcgatgacgggcgtcgggtcggcggtgcggcggctctacctctccgtctacaactgggccgtcttcttcggatgggcgcaggtgctgtactacgcggtcacgacgctgctggagagcggccatgaggccgtctacgccgccgtcgagcggccgctgcagttcgcgcagaccgccgccttcttgcaactctacaggcgattgtatgagatgctgctgcctggagcatcgggccgcgccgcccgtacatgcgcgcacctatccttgttacttccttgcccatcagctggtccatcaccgagatcattagatattccttctttggcatgaaggaggcattcggatttgccccttcctggctcttatggctgaggtatagcacctttatggtattgtatcctactggtatcagcagtgaggtcggtttaatctacattgcctttgccttacatgaaggcatcagagaaatactgccttaggatgcccaacaaatggaacttctcctttgatttcttcttatgcatccattctttctctcgccgtcctacgtgcccggatgcgcctcacatgttcacctacatgcttgtccaacggaagaaggcattggcaaagtttaaggctgcataatggtgatgctcaagagctttcttgaatttttcatgtgtggcttaaggatctgcctaaatagctcatatttgctactcttttagtacaagtctgtagatgaggaaatgttggaaaggaactactatcttaatcccagcatttgttgtaactgtagtaactgcccatcatttgttgtaactgtagtcttcaaccaagaattgtatgatattttacctggttaaattattgaatgattgatccaaataagatagactataaatgagatcattagatattccttctttggcatgaaggagacattcggatttgccccgtcctggctcttatggctgaggtatagcacctttatggtattgcttcctactggtatcagcagtgaggtcggtttaatctacattgccttgccttacatgaaggcaacagagaaatattgccttaggatgcccaacaaatggaacttctcctttgatttctcctatgcatccattctttctctcgcccgtctacgtgcccggatcgccgtcttggataatatgattgtgaagtacagaggagcattctgtaaaggctatttcattttcagttagtcgaactaactgatattctgatagacagttgagttggctgagcagttctatcacttggaaagctattgaaaacaactcatgtaacagctgaacaaaaaaaaaaaaaaa

SEQ ID NO: 55402 - DNA, 200 bp, Oryza sativa
  unsure (1)..(200): unsure at all n locations
  Clone ID: PAT_MRT4530_57412C.1
ggcatatttcattctgggttctggacgagatggactgattaccaaatcctacatggtcctccatccttcccgctccgttctgatctccttccgtggcgtactatatagctcatgttcctatgaccattctgctgcgccatgctatacaaggngctattctccaagngctacangacgggggggggggnggcaccgcatct

SEQ ID NO: 55403 - DNA, 738 bp, Oryza sativa
  Clone ID: PAT_MRT4530_57413C.1
tgcagttcgcgcagaccgccgccttcttggagattcttcatgggcttgtaggtttggtgaggtctccagtctctgcaactcttccacaaattggatcgaggttgtttcttacctggggcatcctgtggagctttccagagacacattcacatatccttgttacttccttggtcataagctggtccatcactgagatcattagatattccttctttggcatgaaggaggcattcggatttgctccttcctggctcttatggctgaggtatagcacctttatggtattgtatcctactggtatcagcagtgaggtcggtttaatctacattgccttgccttacatgaaggcatcagagaaatactgccttaggatgcccaacaaatggaacttctcctttgatttcttcctatgcatccattctttctctcgccgtctacgtgcccggatcgcctcacatgttcacctacatgcttgcccaacggaagaaggcattggcaaaggctaaggctgcataatggtgatgctcaagagctttcttgaatttgtcacttgtggcttaaggatctgcctaaatagctcacatttgctactcttttagtagaagtctgtagatgaggacatgttggaaagaactactattacactgcccatcatttgttgtaactgtagtcttctaccaagaattctagattttacctggttaaattattgaatgattgatccaaaatttaccagct

SEQ ID NO: 55404 - DNA, 298 bp, Oryza sativa
  unsure (1)..(298): unsure at all n locations
  Clone ID: PAT_MRT4530_57414C.1
gcgagggaccgacccaaaaaaagagggaagaaagggcaccgcaacaaaacggggcagagagaaggagccaaaaaacaggaaagagaagacaagaccagcganagcagagaacaagacccaaagcgaaagggacaaaacaccacgccccgccaggaacacaagcaaaaggagccgccaaaaaacaacccaagaagaggagaggacaagcgcaggcgggggaaaaggccaaccggccaccgcagccgccgagggaaccagcggagacgacccngaggacggggaaccacacaggcaccga

SEQ ID NO: 55405 - DNA, 2055 bp, Oryza sativa
  Clone ID: PAT_MRT4530_57415C.1
atggatgagatgatacctaagcctttgatcagcaatgacaatgagatgatgcacggccatggctataccactatggtccacggtaacaacgagatactcaatggtaacgagcttgccgttcatgccgaggtgataccatcagccagcacaagaggccagaagagaaagtcagcaatttgggaacacttcactcttgtagatgtctctgacgggtgcaaacgagcaagctgcatacattgcaaccagtccttagcatacagttcaggctcaaagaattcaggtactagccatctcaccaggcacattgcagaatggtgccgtgtgttaaaagatcggcaaaagagcaggcgctacactacatataatagcagcaacgaaaatgcttcatttgaccaagaacgtagttgcttacgattggcgaagatgatcattctgaatgactatccacttcacatcgttcagcagccagccttcctatcttttgttgatagtgtacaacccaatttcaagatggttgacattggtacaattgaaactgaggtgtatgctatttatctcaaggaaaaggatcacctgcagcaagcacttgcaaatattcctggaaggatcagcctcactgtagggtcattgaccacaaaccaaagtattaggtacatctcacttgctgcacaattcattgactcggaatggaggctgcatagaagagtgctcaaagtcatgatggcaccttggcctcagtcagagaatgcagttagtagagccatcatcaagtgcctctctgattggaacatgcaggacaagctgttcaccatcaccttggagcacgattgctcgtcgcacgatatttatagcgcaaatctgagaaaccatctctcaggtgacaacattctcatgctgaagggccagacctttgctgtgaggtgctatgccaacattctaaatgcagttgcacatggtgtccttgcttcagttcacaacgtcatctacctcatccgtgagagtataaagttcataaaagccgatgatgcccatgagaacaagtttgcagagattgccgtggaactgaagatcactagtaacaatagcctgtgcttggatgttacatccgagtggaacaccacttatctgatgctgttggctgccctggactacagacaggtgttcactctactggagtcttactatgacaactacggtacagcgccttcgacggaggactggaagaaagttgaggccgcgtgtggcttcttgaagctactatatgcgttcacgcttaacatcatgtcagcagaaggaaaccatcaaactgcaaacatgttcttccatgacgcatgggtccttcagctagagcttcaaaatggcatggctcatggagatgacgttatccgtggcattgtgatcggcatccacgagaagtttgacaagtactggaaggactgcaacgtcgtcttggccattgccgttgccatggatccacgcttcaagatgaagatggtcgagttcgcctactccaaaatctatggcccaacagatgcagccaagtatgtcaagttggtagacgatgctatccttgacctctacaaggagtacgctgcgcagcctgagctactcccattgtcaccgatctacgtcgaccaagtgccagctgacggtctgccttttatcgagaccggcggcgctccggcgacggcttcaccgtcgacggcggcggctggcgctgggctcgtggactttgacatgtacctgtcggaggtgaccaccatgggccaaccgttcaagcacgagctggagctctatctggaagaggccctcacccagcgcaccccggatttcgacgtcctgaaatggtggcaggacaacacgctcaagtacccgacgttgtcgaggatggcacgggacgtgttggccatcccgatgtccacggtcggcgtcggcagctcggttttcttacctgacaatggaagcaggagcctcgacgactaccggagctcactgcgccctgaactcgtggaggctctcctctgcgccaaggactggctccagtattcgccatga

SEQ ID NO: 55406 - DNA, 231 bp, Oryza sativa
  unsure (1)..(231): unsure at all n locations
  Clone ID: PAT_MRT4530_57416C.1
ccagnncccgccgcccgcnatggccgcagtggcaccgatcgcnatgcccgcncgggtgcaccaccaccaccaccaccaccgccgcgcgttggcggcgtctccggcggcgttanggcggcggggaacgggttgtnggcgacgaggagggtgaggaggtcgccggccgtggagatgaggcgggacggnangnnggcgggcgcggnanagcagccgcggtgcgnggaggtggcg

SEQ ID NO: 55407 - DNA, 1825 bp, Oryza sativa
  Clone ID: PAT_MRT4530_57417C.1
atggcgcccgcgctcccccgccgcctcctcccctggctccggaccccaccttcctcctcctccgccgccgccttctcgtcggcgccctcccgaggctgcccgctccacgccgcgctcgcccgccgcggcgccccggcggccgcctccctcgccctgtacgcccgcatccgcgaggaggcatcgccgcccaccccgttcaccttctccctcctcctcgccgccctcgcgtcgtcgtcgtcgtcttccccgtccccttctccgtccgcaggctgcgcgcgcctcgccgccgcgtgcctcgcccacgctcaggcgttcaagtgcggcgcgctcgcgcaccccgtcgtcaccaactccctcctcaagctctactgctcgctgggcctcctcgaccgcgcgcgcagggtgctctactccggtggtgccgcgctggacgtcgtctcgtggaacacgatggtgtccgggtacggcaagggcggggacctgggcgctgcgcgggaggtgttcgccagaatgcccgagcggaacctggtttcctggagtgccatggtggacgcgtgcgtgcgtgccggggagtttggggaggctttatgggtgttcgatcggatgatgcgggaggaattcaggccagatgtggtggtgctggtgagcgtgctcaaggcatgcgcgcatctcggcgccgttgaaagggggcgttgggttcataggtatctggagacagggagttttggaggtaggcgtggaaatctcatgcttgagacagctcttgtggacatgtactgcaaatgtgggtgcatggaggatgcctggcaagttttcgatggagttcatcgtcgcgatgtggtgttgtggaatgcgatgatcggtgggcttgcgatgaatggctatggtgagcgtgctctcgaattattccgaaggatgcttcagaagggtttcatgccaaatgagtcgacgtttattgctgttttatgtgcatgcacccatacagggcgtgtggacgaagggaaaagggttttcaagtccatgcaggattatggcattaagccacaaagggagcactatggatgcttagctgatctccttggccgtgcagggaatgtagaagaagctgaagctctgttactggatatgccaatggagccacatgcttctcaatggggtgcactcatgtcatcatgccaaatgcacaatgacatcaatgtgggtgagcgtgtgggtaagcggcttattgagctagagccatatgatggtggccgttatgttgttctattcaacctatatgctgtcaatggtcgatgggaagaagcaaggaccattcggcagatgatggaggataggggagccaagaaagaaacaggtttgagcttcatagagttaaatggtttggtccatgaatttatttccggggatacaagacatcctctcacaaggaaaatctatgcactattggaagatatagagaggagattgcaactaattggctatgttaaggatacaagccaggtgattatggacatggatgatgaggaagataagggcatcgccctatcctaccacagcgagaggctggcattagcatttggtatcttaaacattccccagggcgttcctattcgtattgtcaagaaccttcgagtgtgccgtgattgccatgtgcattccaagcttgtgtccaagctctacgagcgggagatcattgtgcgtgaccgtcatcgtttccatgtgtttcgtgatggagtatgctcatgcaatgactattggtgaaaaaagatttacattattgagtatgattggaatcaatgacatcgcaaaagatggccaaaatact

SEQ ID NO: 55408 - DNA, 467 bp, Oryza sativa
  Clone ID: PAT_MRT4530_57418C.1
agcacatacaaatcacataaatttagcgttcccatctggggtaaagttaacagggtttttaatcgtgcattgaccgtaaaatatgaacttcaatgggaaacaattaccaaaacacaaaatcatgggcagccaaaacagtttatggattaagggatttacaagaaagatggggggtcagcattcgctgtttccaagcatggagtcaccattatgggtcactttgtcaattttggggttggcgactgaaaacctgcctgctctttgctcttttcatttttgctttgaacctcaattttaacaatcaaagtctccatcgtgttgacaaagttgccgactgccattaccaccagcaagatcccacaaactacaacctgccattccgatgcaagcccgtgcaaagccgtcttaagaagtaatactccaacatatccttcgaaaacctgtaatggggaaaaggaccggggtaa

SEQ ID NO: 55409 - DNA, 996 bp, Oryza sativa
  Clone ID: PAT_MRT4530_57419C.1
gttgaggaggaactggagcgtgccagggtaacaatctcagatagtgacgtggctgcatttctcccaagcaagcggaatgggaagttcctcaagacctttgttggccctgtaaatgtgcgggtggcgagaaaagaagataagctcagagtgaaggacgagtacaacaactacaggccttacatgggagataaaaggcagcctgattgttccagcaagcagaggggggtacaacttttcctgcggtgggcaatcatgcaaggaattgcaatgcatctacagaataggtaccagcgtcaaagattgcgcacccggatagctctaggaaaggctaaaagaatggatgttgttgctggagaaacagctggtgtggaagggcagctcttgctactttacccggtccttttcacattacaggttttcgaaggatatgttggagtattacttcttaagacggctttgcacgggcttgcatcggaatggcaggcaagaattatcaactatgcgtacatggtgggagagcacggggacagctcggtggcgatatggtcgagcatgagcgtggccgggatgccggtgctcaagtcgctgcgggagagccaccagagcttcgacgaggaggccctggagggaatccggcgagcggtggtggacagcgcgtacgaggtgatcagcctcaagggctacacctcctgggccatcggctactccgtcgccagcctcgccgcctccctcctccgcgaccagcaccgcatccaccccgtctccgtcctcgcctccggcttcccacggcatcccccaagaccacgaggtcttcctcagcctccccgcccgcctcggccgcgccggcgtcctcggcgtcgccgagatggagctcaccgaggaggaggcccgccgcctccgccgctccgccaagacgctctgggagaactgccagctgctcgacctctaataaatcttattattatcatcgtcgtcgtcgtctcgtcacggaattaa

SEQ ID NO: 55410 - DNA, 2537 bp, Oryza sativa
  Clone ID: PAT_MRT4530_5741C.1
tattgttttaatttattaatcacgagaacaatatttttttctctagagggttaactgaatgactgaaagtgtacaagaactagaaaagatcaggagggtaattaagtctcattatctcccacatacatataaattgtctgtcagaatagaaagaagtagatagttaaatctcctaacagttataccttgatcaaatgcaattaacccaaatacatttaacatgatctatttatttaaataaattgaaacaatactgtctaccatatttagcatagtacttacctcgtgcaacatgtaaactacagcacaagtcgtttgcttcctggttcaaatagctacatcatgcaatagattgagtttatttaaagatctattgcgtcaccatacttggtgctcagattcggctcggcattagccctggcctgacccttttgcacggaggcacgcaagaacacctctcacatgcgtcacgagtctccgcattctctggcacccgccaagtacagaacgccttccgtcctgggttagtgttgatgcgatcggtgccgcgcccctagcgctgtcagagctcattgcatcctgcctccgttgaaggacgacgacgccgacttcatctcggcctccaaggggccatgcatgtcgctgccgccaccgccatggtgctcccctctcgccatcgacatccccctcacgaaaccgccgccgccgacgccgaggaagtcacgcgtcacgtcgccgtcgccgccgccgccgccgccgcgctgcaggctgaacttcacctcgtgctggtccatgtcgtacagcctcgggtcaatcatgctgccactcccaaacatgccctggtggtcggcgttgccaccgccggcgagcgagttcatcaggctctggaggtgcatctgcccctggtcgaccatggtcgtcccgcggccgtgcgggatggacgacggcgccgacgagccggcgaagccgccgccgaacacggacgcgccggcgccgttcgcgctcgacgtgctcgagcccatctgcgccgccttctggagcagcgcggtcgccgacatctgcggcagcatcatggcctgatcattcgcgtacatcccggcaggagaaacctggtggtggtcgccgccggagaagttcccaccggcgccgaacagcgccgccgccgatgtctctgaaccgccgccgccgccgccaccaccccctccttcgctgaactggtcggtgttcgtcatctgtccctggctcgcgtggccatggctggaagtacccgagctgttcgcgctgttggcgatgtagccgaggttgtagagacccggacccgacggcgacggcccgccggtgccattcccttggaggtcagggagctgcatgaggccatggaacggcttaccctgcaagaatccgtgcggaccactgccgtcgccgccgtcgccgaacccctgcggcgccgcgccgaggaggaacggcgccggaggctgctgctgcggcggcggcaggggccggaacgcggaggcgctggacgacgacaggaggtgctcgaggcgtgcagccatggcgccaccgccgctgccgccgaagcggaggaggtccggggaggcgccgtgatggtggtggtggtggccgtggtcctggagggtggaggcgaggtgggagccgacctgggagaggctgagcgccatgttggcggcgccggcggagccgtagaggtggccggcggcggcgggtggcagccgctcgccctcgggcccccctcgggtcgcctcccgcgaccccgccccgccctcaccaccgagccgacgggccccccgccttcctgcggccccccccccctccctccctgccctgcccgccctggcgctctcctgggcgagggcgtcgcagaaggcgctgtgggtgatgaagctgtccctccgggagaagagggtgccgcagtcgcagcggtactcgcgggtgccgcagatcttggagtgggccttccagtcggactggacggcgtagcgcttggagcacttgtcgcacttccacttcttctcgccgtgcttgcggcagaagtgcttcttgatgccggtgaggtcgccgagggcgcgggaggggtcgtggtggacgcacgtcggctccgggcacaggtacacccggcggctcaccgcctccagcgggttcttctgcttcagcttccacggcaggttgtgcccgcgccggtgcagctgcaggttctgctcccgctggaaccccttgttgcacacctcgcacacgaaccggttcgtcgccagcagcgtcttcggcgacagcgctatcacctccgcgtccgggtctggtaaggttctcttcttcttcgctggtggcgccgccacggccgcttgaccggccgccgaccctgccgcagaagccgccgccgcggcgttggatggcgccataggtggctggtggtggtggtgttgctgctgctgggcaaatagcggcttaatctggtcctcatggtcgccatccctaattccaaacaacgccgccacagctgccgctgatgagttggatgccat

SEQ ID NO: 55411 - DNA, 311 bp, Oryza sativa
  Clone ID: PAT_MRT4530_57420C.1
ctggagctggagtccaaccaaacggtccaaatatgttcaaagctggagcggagcgcatggaatcgctctgagaaattgaactggcgggttggagcggcattttggtcgctccgcttcaccccgtcttccccgacctccagctcgcgggagcgaggaggcgaagcagcagacggcgcacggtggaggaggaagcggccggcggtaacgacgcaccggctggaaatagccggcgcatgggcttcccctttcactgtcgctcccctccttcccatcccggcgcacaacggctgagggcgagcacggcggcgcat

SEQ ID NO: 55412 - DNA, 1329 bp, Oryza sativa
  Clone ID: PAT_MRT4530_57421C.1
atggcgaccgacggcgacgccctcgagtcccaggcggcggcggcggccgaggcggcgcgggagctgcgcgaggccgccgcgtccctcgtcgcccgccgctccgccgacgaggacgcgctccgccgccgcgccacggcgctcgacgccgacctccgccgcctccaggcctccctctccaccctcgcccccaccacgctcgacaaggttgaggaggaactggagcgtgccagggtaacaatctcagatagtgacgtggctgcatttctcccaagcaagcggaatgggaagttcctcaagacctttgttggccctgtaaatgtgcgggtggcgagaaaagaagataagctcagagtgaaggacgagtacaacaactacagggatagggctgcctatatgtttctattgttcccatccattctcctcctacttagatggtggatatgggatggatgccttccagccttggcagttcagatgtaccaggcttggctactattcctttacacaagttttgctctgcgggagaatgtgttgattgtaaatggaagtgatattcgtccttggtggatataccaccactatttagcaatgctaatggctctcgttagccttacatgggagataaaaggacagcctgattgttccagcaagcagaggggggtacaacttttcctgcggtgggcaatcatgcaaggaattgcaatgcatctacagaataggtaccagcgtcaaagattgcgcacccggatagctctaggaaaggctaaaagaatggatgttgttgctggagaaacagctggtgtggaagggcagctcttgctactttacccggtccttttcacattacaggttttcgaaggatatgttggagtattacttcttaagacggctttgcacgggcttgcatcggaatggcaggcaagaattatcaactatgtaatgtttgcagttgatagttaattgtagtttgtgggatcttgctggtggtaatggcagtcggcaactttgtcaacacgatggagactttgatgttaaaattgaggttcaaagcaaaaatgaaaagagcaaagagcaggcaggatctcagtcgccaacaccaaaattgacaaagtgacccataatggtgactccatgcttggaaacagcgaatgctgacacaccatctctcttgtaaatcccttaatccataaactgttttggctgcccatgattttgtgttttggtaattgtttcacattgaagttcatattctacggtcaatgcacgattaaaaacactgttaactttaccacagatgggaacgctaaatttatgtgatttgtatgtgct

SEQ ID NO: 55413 - DNA, 1607 bp, Oryza sativa
  Clone ID: PAT_MRT4530_57422C.1
gctcgcggccccgccccccatgtcgcccgcattacatcgtctgcgaggatatttcagcgtcaaatcagcatgagcggtttggaaaaccgcggcctgcaggctagcgattgcgtcgcctctgcggcctcggctccagcgtcagggggtgcgctcccggggagcgcgcctcaattccaacatcgatcatttccatttccattttcaggagagatccacatcgccgttggcctttcatccagtgagtgagggagggagatctcgatctcggtctcgcgacatgaagaaggcttcgtctctgtcggagctggggttcgacgcggagggcgcgtcgtcggggttcttccgtccggtggcggacggcgggtcgacgccgacgtcgcaccggcgtcggctgacgaagatatcggtgatcggcgcgggcaacgtggggatggcgatcgcgcagaccatcctgacccgggacatggcggacgagatcgcgctggtggacgcggtgccggacaagctgcgcggggagatgctggacctgcagcacgcggcggcgttcctcccccgcgtccgcctcgtctccgacaccgacctggccgtcacgcgcggctccgacctggccatcgtcacggccggcgcgcgccagatccccggggagagccgcctgaacctgctgcagcggaacgtggcgctgttccggaagatcgtgccggcgctggcggagcactcgccggaggcgctgctgctgatcgtctccaaccccgtcgacgtgctgacgtacgtggcgtggaagctgtcggggttcccggcgagccgcgtcatcggctccggcaccaacctcgactcctccaggttccgcttcctcctcgccgagcacctccaggtcaacgcccaggatgtccaggcgtacatggtgggagagcacggggacagctcggtggcgatatggtcgagcatgagcgtggccgggatgccggtgctcaagtcgctgcgggagagccaccagagcttcgacgaggaggccctggagggaatccggcgagcggtggtggacagcgcgtacgaggtgatcagcctcaagggctacacctcctgggccatcggctactccgtcgccagcctcgccgcctccctcctccgcgaccagcaccgcatccaccccgtctccgtcctcgcctccggcttccacggcatcccccaagaccacgaggtcttcctcagcctccccgcccgcctcggccgcgccggcgtcctcggcgtcgccgagatggagctcaccgaggaggaggcccgccgcctccgccgctccgccaagacgctctgggagaactgccagctgctcgacctctaataaatcttattattatcatcgtcgtcgtcgtctcgtcacggaattaattaaagtacctactccgtacttagctagctacaataataaggattcattgatcactacaagagtgatcgactcgactgtagtatgtgtgtgcaatataatgtgctgtctatcaacaactactagtattgtcatttttttcgaaccagggaactttttaatgataagaagaaaaagacaagtacttattgtcgagcaaaaaaaaaaaaaaaaaaaaaaaaaa

SEQ ID NO: 55414 - DNA, 1255 bp, Oryza sativa
  Clone ID: PAT_MRT4530_57423C.1
ttcccacgtctcacgcgaactcgtaaacctctccctctccccactctcgcgcctcctcccatggcttccttcccgaccaccgccgccgccgccgccgcgcaggcattcgccttcgccctcgcgccgaagccatcctcctccgccgccgcaccatccgcgctcttcccccgcaccgccgcggcggcggcgttcccgacgctggctgtgcgaggaagcgggaaggcgaggcagccggtggtggccgcggcggcgggggcggggacggggagcgagcagagggagacgatactgctccccgggtgcgactacaaccactggctgatcgtgatggagttccccaaggaccccgccccgacgcgggagcagatgatcgacacctacctcaacaccctcgccaccgtccttggcagcatggaggaagccaagaagaacatgtatgccttcagcacaaccacctacactggtttccagtgcactgtcgacgaggaaacatcagagaagttcaagggtttacccggcgttctgtgggtgcttcctgattcctacatcgatgtcaagaacaaagactacgggggtgataaatacataaacggagagataattccatgcacttacccaacctaccaaccaaaagagcggaggacatccaaatatgaaagcagacggtatgaaaggcgaagagatggacccccagcaagcaggagaccaaggccgcagactgctcagcctgagtcagcctcttcttcatgaggtcagttttgcaggcactcatccacgtaatggaaagaaagaacttgcttactagctaattctaccacttggcgtcgcatacgggaaagctctgacagacaaatctatcctcaacccaaaatatcatccagagctgtgcaagcgattcatgcaggctgcatttggaattttggatcatgtggatcatcatcattcttgatattttgggtggactatgacctctgaatgtgacaaaagacggaaattctgatctatctaagaatgttactgtctcaaatatctagtgatatttttcttgtgttaccctgctacctagtagttgtgttgctggtttgtgtgtggaatttcttgatccttatccatgtgagttttcttgaactgaagttgattttttggcctttgtattggcatttgttctgctcagagcctgagacttgcaatttgggatgaccattgaatcgaagtgagattgaaaagcaaaaaaaaaaaaaaaaaaaaaaaaaaa

SEQ ID NO: 55415 - DNA, 201 bp, Oryza sativa
  unsure (1)..(201): unsure at all n locations
  Clone ID: PAT_MRT4530_57424C.1
aagtaccgcctatagcaacctgtgcaattcctggatgcttcggatggagctcttaagcagcncagccatggtttattatataatgacacgcttgggtttttaanccaaatggtcccactggtctagtggtcacggacacttggactctgaatcccgtaacccgagttcaaatctcggtgggaccttgaanattctttatgt

SEQ ID NO: 55416 - DNA, 2103 bp, Oryza sativa
  Clone ID: PAT_MRT4530_57425C.1
atggcggaagagagagaaagctttgagggtcagtgggcgccctccgatgtaacggaggaaaacctgaaggagatggtggcgcacggcgttcttctggcaaaggagatcatcgggtggcgtctagcgtgcggtgaaacatttccgacccccgacacacacgaggtggtggtgttttcccatttcttttatggcggattttctcttccaacctcaagtttcttccgggggattttggatttctatgggatcagtttgcatcacctaaaccccaattccatagtccacatcaccaattttatccacgcttgcgaggctttcctgggtgtaagaccgcattttgccctgttctgtcgcatcttcttcctcaagccccagccaaacaagagcaaaccatgtgttgttgggggagccggtttccaactaaggggaaccttgagccaaaagtacttttccatgcccttcaaaacctcaaacaagggttggcatgcgaattggttttatgtgcaaaatcctgaatcagctcttcccgagtactcctgccttcctccagtgtatcaagatacttggaactcgcttccaatgggagatgaggctgctcaagcactcgccctggttgaccgtatgttgaagctaaaggaacagggtctgcaaggggaacagatcacccggcattttatcaagagccggctggccccaatcaaggaaagatctcatcctccgattgcccaacgccgctcaccccgtcggcagactggccaggctagtggagggccaaaaatccggtccgacgctcaacctcacacctcacagccgactaaccagcctgactctcgtaagaggaaattggttctgagccacgacgaagatgataatgctgaaaagactggcagcaaagggatgactgggaaacagccaaaacaagccaacccgaagaataaaacagccagtcgtcccataccaaaaatcaggaagtcctccaggaagccatctgacatagatctttctgataaagaccctgagccgactggcacggagactggtccttcaaaagaaaccgggccgactgccgaagatcgcccgagtgatgaccaaccagcaaccgacaatgtagcgaccagcaataagcccccgactggaaaccagtcggccgacactggagtcagtgctgatcaggagcccccgactggaaaccagtcgggtacagagcaaaataaagatatcccagaagtggaggctcaaaccaatagccctcccaagacggacgctggcgctgactctggaactaactctcctgttagggtgcaaggacctgctcgtcctcgaccggaaatcataacagtcaagtggtgggatgatgaaatgcaaccacagggaatcatgataaataaacagaagaaagacgaggaagtgtgtctgctgaaaaagacacttagtcaagccactcgtcttgtaaatagaatccatcttaggaatgaagcgaagaccgcaaccctcgaaaaattagttccccaccttggaacccttgaagcaaccagagaccaactgcgtgaagccaaagaacttgccaggaagaccgagcatgacctcagagatcgaatcgccgagtttcaagactccaactttgagctgagcggttcatcaaaaggcaatacagtgcaagctaccaagatatccgagctggaaaagcgaatcaaagctctagaaaaacataagggcgaactgacgaagcagagggactcggctttgaaagatgtcgaagccatgttttttaataacaatggtccgagttcatttgacgcttccgaaatcttcgacaagttgagaattgctccggatacatattttaagaacatcaaggaagctggaagtatgggagcaagtttggcgttggcgatgaccaagtccttgtacccgaagatcgacattgatgctgttgatggctttgcagacgggacaagtgaagaagctgcccttgacctcatcaatgatgcgcaaaaagctgctgacaagatagccgttgatgtagttgagaggttccaggacaactaccttaggccgaccgggtttggtaactctgatgatgaaaaaactgaaactgattga

SEQ ID NO: 55417 - DNA, 233 bp, Oryza sativa
  Clone ID: PAT_MRT4530_57426C.1
cacttttgaatacatgacctcatataggtaacgacaaacaaactaccccgagactcgcagactgtaaccttatacgatttgtagtgatttggctgacaggtaaagacaaacggaacaaatcgtttaaaacgatctgtaacgttagacgattttgtagtgatttcttttttttttctagaggtgacttggcggatactggttttagtttgtaaatgtagttgagttcgaagtcg

SEQ ID NO: 55418 - DNA, 168 bp, Oryza sativa
  Clone ID: PAT_MRT4530_57427C.1
atgatgggatgcggcagaggaggcaagaaggtggcgaagaagaggcgcaagaagcgaatgatgggagagatggtagataaaaggtgtggacaccccgagtattataccatccagtgtccaacgcgaccaccacatactattggagaagtgggatccatacacgcataa

SEQ ID NO: 55419 - DNA, 3859 bp, Oryza sativa
  unsure (1)..(3859): unsure at all n locations
  Clone ID: PAT_MRT4530_57428C.1
gtgcgcgtggttgggcgcgtagggccactcctccagcagtgcggctcccccctggccccgccgcccgccccctcaactccagtggtcgcacgcatcgcgccccaccctcccccgagccctcaccgttgcccctgctgcaccgtgggctgcagggcttacccgccgccacctcttctcccgcgcaaagcgctccggccgccgttccgccgcgtcctcaccagcggccccgggccgccggcccgtccccccgaagtatcttctatggctgccaagggcttaggacgccatagacctgaataccgctaagagtatgatgcaggaggccagcaacatcagcccaagaagcatgaagtgcgcgacacgtaagaatactaggctgagcaagagcagaaacatcactccagcagaccatgaaatgctcaaaacatacaagaggagaagagttaacagtgcttccatccctcggttgtttgacgaggtcctcattgcgattattatcaggatggcggcgaacactattgctcgtttcaagtcatttggtaaggcatggaacaccatcatctctgacccatcctgcatgcgcggtcatctccgccactctgcggccaaccatcaacactggccctccgtctatgtgggattggcgccttctcacggtgtggtggggggttttaaataggcagagtcggtgctatcttcaaggaaggaccctcagggcactgcctatctggtggatgatatgcaattttgtggtgagtagcggatagtccattcaagtcccagtagtgatctcatgttcatgttacccgtgagcacgtgcttcaaactgaagtgtatgatcatgagaatagtacatagaccaatgaagtagaatctgtcgtggtcgcagagttaggaaacaatgatgaggactgtccagccaaggtcaatgtagatgaggtccatgacatctcagagaacaaaaatgagggttgccgacccccttctagccaatatgaggtttgtgatgtctccaagaccgatgatgagggatatcagcccttggccactgaagaacttggtgatgtaccaattgagacggataggtccaggaagattcctgttactggagatgggaggaactctacagctttctgaaggaatcattctcgtcaggtagatgaatgtgcagttacgacaactacggcagggtcaaattcaacaacatccgatactcatactgtactagagcttgtagtaatagaagcagtagcatcaattcctgtctgggtgccacatttccaagcttggcaaaccaaccacaattccatatatacagagagtgtgtgcaaagcatattgccctgatcaataattgcagctcaccatcatgctcctcagcttatggtggttccggtagcctttggccactgaaaatgaggcttgtgatgttccactgcttgagaatgacgaggcttgcagggtgccagctaatgtagacaaggtttgcgatgtcagcaatgaggacactgagttagaaattgctagtcctagttttggtaaatatgatacttttaaaagttgcttagacctctcatcacaaatagatgacggagattcgggaactgaaccattttctcctgaatttgatcatcagcagggttttgaatttagtctgagtaatcgttctgttgttgacatagatctggaggaagatataagtaaaactacccactgtgatcgaaatgatccattacagtatctagaggaggataataaaacagaaggtgaagatagttctgcccactgtcgcaaggtatctgatatgtccattgtaggaggttctcatggcaagaccaaggagacagcctcttctgaaaatgaggcgaataggcctgatggtttacattcaaccattggaaccagtgacaaagacaaattaggtagcattccagagaactcagcagctgaagaggaactaaataaagaagagcatcccaaattacaaaagggcttggggttcgaaatttctctttgtgggcacatgctacggccaggaatgggccaagcatcagctgaagaagttttccaacaacatcttgttcttgaggaagatttcaagttatcaggatcatcaattatgaaaaatgtaaaccttgttgtcaaatttgatagtcagtatttcttatggagtaaaatttctcatattattcttgggaaagctgtctttggtccgaacttctgcacagaacatattgatgctattccggttgaacaccaagaaacacctacttcaagagattctcttgggctgtctccctcaagcaggagatggaggctttggaacataccattcaggatatcaagatcccttcagcgcagtaacagtgattcatccgaggacatttttcttgacacagaaactgtcttgagtccaatggatgagcaaactccagagaataatataaatcagtcaccaagaaagcaatttgtgcgaacattaattcccactagtgaacaggtggcatcactaaacctgaaggagggccaaaacattgtaacttttagcttctccaccagagttcttggaaagcaacaggttgaggcacatatttacttgtggaaatggaatgctaaaattgtcatttctgatgtggatggaaccattacaaggtctgatgtgttgggccaggtcatgcctttagttggacgagattggagtcagtctggtgttgctcgtcttttttctgcaataaaggaaaatggatatcaactattattcctcagtgctagagctatagttcaggcatacctgaccaaaaactttctattcaacctaaaacaggatgggaaggtattgcctaatggacctgttgtgatttcacctgatggtttatttccgtcattgtaccgggaagttatacgaagagcaccacatgagtttaagattgcatgtctggaggacattaaagcacttttcccttctgattacaatccattttatgctggatttggcaacagagatacagatgagcttagttacaaaaagatgggaattccaaaagggaaaatctttatcatcaacccaaagggggaagtagccataaacagttctgtcgacgtgaagtcctatacctccttacatacccttgtccatgatatgttccctccaaccactcttgttgagcaggaagactacaattcctggaattactggaagatgccattgccagatgttgatctgtagtgtagttctaacaaacacagaagtagataacactagattctgcatcagcataacagtcaagtccgtgtacactaattctcaacgctatggtggggttctgtccaatctgtaaagcatctcaggagtttccatatttatggttttgatctccaacgcaaaggttgccattttatttgctttgacgaagctctcatgatcatacatcttttagggagtgatctgtgatactcttcgtcgaacttacggccttagcttgtcagctttccaagttgtatcagcagctgctagtcagcaatttttctctttgtgttcttgtagctgcagctcctctatgattagattactcctggttcatggaagcaacaggcaacccaaaactgtcaaaacacgctgtatgttgtacaagagaaaaacattgtacatttcctaccccattttcaccttctccttgtgctgtatgtaacattcaatgcctgtaactggtaaaagtttcatgtgctcgtcatctgatattttggatggaatgaattactctatagctgatccnnnnanatnanttnnctntttnnnttnnnnnnttttacttaaggggggggccggaaccaaattgccctataagagtggattacgcccc

SEQ ID NO: 55420 - DNA, 873 bp, Oryza sativa
  Clone ID: PAT_MRT4530_57429C.1
atggcggcggcggaagcggaactgcttgtctgcttctgcgagtgcgagtgcgagtgcgagtgcagcctgcaatttggggggaatcgcagcgccgtcaccgcaggagcgggagctaggatggagaagaataagtacatcggagggggatatcttctttcagaagaggaggctctaggaggaagtcaattgatagatgaagcaaaagaaatggcaaggaagaaggatctagagctagaagcagaggagcttattgcagacaatgtagatgatgaaattcaccttgaggaagtaaatgatagtactttgaatgagagcagcttcccctgcactgccatgacaatttcttggagaactgacaggagaaacttgatcactggaacagagaggttcatgttgagaaatgtttcgcacagctctcagagaagagagaaagaaagggacaaaatgatccaaagtgaaggtttcattgaggccgaatgctttgtcagtgctagcactagcaggatgctgctggtagaggttttcagtggtgaactggtacacatggatggagaattggcagtggctctaaacaatgtaaattatttcataattggcagtggcttcagaggttctgtcctgggctgtgggcctgtgtccaaatcttattactgctgcattctcctgtttttgcattttgcttctctaaattttactagcttaccaattgaaattgtggatgaaggttttggtttgctcataagatctaggaggggaatgatgtgtcaaggcgctggcactagcaggatgctgctggtgactttagaggttttcaatggtgtaactggtagtggtacacatggatgttgcctcctgggttgtggtcaaatctaa

SEQ ID NO: 55421 - DNA, 1469 bp, Oryza sativa
  unsure (1)..(1469): unsure at all n locations
  Clone ID: PAT_MRT4530_5742C.1
ggccacgcgtccgacacgccaaagaacacacacgagtagacaaccactagtccagtctccagtgtcactcgaccagagcactcagctgggtagtatttgaaggtaattttacttcctctcgtggctatggagaagcaggagaacggaggggaggcgccggagctgaagctgttcgggtcgtgggcgagctcgtacacgcaccgggtgcagctggcgctgcggctcaaggcgctggagttcgtgtacgccgaggaggacctcggcaacaagagcgaggcgctgctgcgcctcaacccggtgcacaagaaggtccccgtgctcgtccaccgcggccgcccgctcgccgagtccgtcatcatcctccagtacctcgacgacgcctggccggagagccgccccctcctcccctccgaccccttcgaccgcgccctcgctcgcttctggtgccacttcgccgacgataagcttgggccggcggtgggggcggtgttcgcgtcgacggggagggagcaggaggcggcggtgcagcaggtgcacgacaacctggcgctgctggaggcggagctccgggagggggcgttcaaggggcggaggttcttcggcggcgaccaggtgggcctcctcgacgtcgtgctcgggtgcggctcctactggctggccgtgttcgaggaggtcaccggcgtgcgcctcgtggacgccgacgcgttcccgctcttccacgcgtggctccgcgacttcgaggcccaggaggaggtcaaggagaccatcccctccgtcgaccgcctgctcgagtacgcccgcggcctccgccagatgctgctcgccctcgccgccggcgccggcgccggcgccgccgcagcagctggcagctcccccgtcaccaccgccgtcgacgcgccggcgccggcagctccaccagcggccccgcaggccgcggccgtggatatataatccaatcgctgggcccgcgcgccgtgcgtgcgctacgtcgtcgtcgtagctctgtgtagtttagcatctgtgcgtgtgtcgtcgtggagtgcatgtgatgactagtgatgcggcctaaaatgcgctgctgtgccgctgttgctagtggcgcagtctgggataggtgtcgagctaatctctcttttctcctgtgtgttctctgtctgttgttcgttgtgcttgtgcaaggaatctagcttgtgtcatcgtgtgtttttccctctaaaaaaaaaaaaaaaaaaaaaaaaaaaaaaaaaaaaaaaaaaaaaaaaaaaaaaaaaaaaaaaaaaaaaaaaaaaaaaaaaaaaaaaannnnaaaaaaaaaaaaaataaaaaaaaaaaaaaaaaaaaaaaaaagggggggcctttttaagggtccaatttttacgaccggggggtgggaagaaaaaattttttttttggggacccttaatttatttccctgggccgcgttttaaaaaaggcggcttgggaaaacc

SEQ ID NO: 55422 - DNA, 1058 bp, Oryza sativa
  Clone ID: PAT_MRT4530_57430C.1
atctgtggcaacagtttatcaccaacttccaaggtacatacaagcgccacgcaatcgaggacgacctacacgcgttgacacagaacccgggcgaatcattgagggactatattcggcgctttagtgagtgcagaaatacgatccccgagatcagcgatgcttccgtgatccacgctttcaagtttggtgtccgagatcgctacactacccaggagttggcgacaagacggatcacaactgctcgtaagctattcgagattgtcgatcgatgcgctcacgtggacgacaccctgagacgcaagaacgacaagccgaagacagcaggagagaagaaaccagccaaggatgcacctgagtcaagcaagaagaagagtagcaggagtggtgggaaaaggaaggctcaaacagaagtcttcgcagcagagtatgcgaacccacccaagcacccagacccacaaggcgacgacacgaagaaaatatggtgccctatacacaagtcggataagcactctcttgagacttgtttcgtcttcaaaaaggcactcacaaagcaactagcgttggagaagggcaagcgagtaagtgtagtcgagaaggccgcagaagcagctactcaggactcagactcagcctacccagactccgacctccatgtttcgcacatcttcggaggttccacgatgtactcctcaaagcgagagtacaaaaaggtggagcgcgaagtttgttcaacatggcagggggctacatccaagatgaagactgcactcgcgaagttcatggccgcatctcactacgcatatcaagtgctcaagatgcctgggccaaagggaacaatcactattaagggaaacgcgaagctagcggtacagtgcaacaagcggagcctcgacatggttgagcatactcccaacccgcctgccacagctgagccgtccaagaaagtgagcaaaaccaacaagacactgaagccagatggcgcaatcaagattgttctgctctccagtgccaaccccgacaagactgtcaagatcggggcgtcactagatgagaaatag

SEQ ID NO: 55423 - DNA, 733 bp, Oryza sativa
  Clone ID: PAT_MRT4530_57431C.1
ctattctgagctcatagctagtaattcagttttaaaagacggatagctgaatataattatgaaaacttcaataattccatcaaaataggtattgcagaaggcaatagagaaggatgatagggaaatggaagggaaaaaatatccagtcagtagctgcatgacgtaggagacggtgatggccccagcagctgagttgatgaactcggcagactgtttgtcgaagtaatgaatgacgacttgaactatgtaacttgaaaggagagacggtagatcagcttgtttgaacaacagcagcgcctgacgatggagacggatacgccctggacgcttcaggagttggcatccggaaggctcaaaggattcgcatgagatggggaaataccacatctcgagctcgagctcgcagaccatcgagatgatgctatctattgatgctgcccctatggcaatcgatgtgggacgaactgccatcgatgggctgacgacgatggaggaaaaagcctgcaaggacgcgagaagagtgagaagaagagaaggggagggaaagagaggggcacgcatgccatgccctcactccgttgcgcgaggcggggaaccggtggcgtgcgcggatgcgtcgccgtccgcccgcgagagggctacgacagcgtggcggcggatgaggccatatgtgagcgggccgcgagcgctgctagggttttggctgtgtggggatatgttgggaagatcttga

SEQ ID NO: 55424 - DNA, 612 bp, Oryza sativa
  Clone ID: PAT_MRT4530_57432C.1
aattacagtaagacacacttctcagaaaagaagtacagagcttgcccagagagaaagagagaggtgaagatggaatccatggtagcaggagacctcgtacaggcctacgtgttgaagaaagcctgcaaggagaagatgagggccgaaacaaacgccggcgaggcagcggcggcggcgatgacaggaaagaagacggcggtgggcggtggatcgtccgaaaagaagacggcgcctgaggttagcaagggagaacgccggggattctctgggctgatgatgatgaagaagaaggtgcacccgaagtaagctagcagatcgaactagctagctatcttcaaaccaccactgattgcagatttgcagggcttggtcatcactcgtcagtggcacatagttgttgctaggttgtttttgctctaaattaagcctgtaaaactgttctcgtgtttccttgtttcgctcttaaggagtgcaagtgtataattatggcaatacatgaaggcatgaaccagcaaatttcttgactactttgcaaaatgttgtggaatgttttagtaattttctcggagaaggaaaatgggttttaaggggctgttcaaaaaaaaaaaaaaa

SEQ ID NO: 55425 - DNA, 391 bp, Oryza sativa
  Clone ID: PAT_MRT4530_57433C.1
cccacgcgtccggtagctagctaggtgagatcgaggggcaatggagttggtggtggcggtagcaggtgcagtagtcgtggcactgagcttgtgcattggaggtgtgcaaggtcagctccaggtagggttctacgaccaatcgtgcccccaggccgaagtgattgtgagagacgaggtcggcaaggccgtagcgccaacgttggcctcgccgccggccttgtccggatgcacttccatgactgcttcgtcaagggatgtgacgcgtcggttttgctgtattcgacggcgaacagcacggcggagaaggacgcgataccgaacaagagcctgagggggttcgaggtggtggacagcgccaagcggcggctggagagcgcgtgcaagggggttg

SEQ ID NO: 55426 - DNA, 408 bp, Oryza sativa
  Clone ID: PAT_MRT4530_57434C.1
atgatcgagatcattgatttgagccaatacattggccctgagctagacaagaagaaggccaaacttgagaaggccaagtccaagcttcttgagctggagaagaaggccgacatagaggagaacactagggtgactgcagtagaaagtgtcatgcaagcattagtatttttggactcggaacatgatgtgaacatgattgttagtgactattgtatgccagagatgaccggctatgacttactcatggaagtgaagaaatcacctagactggtacatctcccggtgataattgcttcctctgataacatcccagaaaggatcagaaagtgcttcgatggaggagcaaaggattatattctgaagccagtcaagattgctgatgtgcctcgtattctgaactacatatga

SEQ ID NO: 55427 - DNA, 581 bp, Oryza sativa
  Clone ID: PAT_MRT4530_57435C.1
gatccgaatttaaacgttgctttagttcagttacttagctagtactaatactcctagttagcttgacgttggggttgcgaaatcgcaacgagaaagaaaagcgttacttgtgagtgtgcgcgttgaaatgttatgctacgatcgaaagaagcgtgcgtcctggtgatcaagtgggaaccagattccttcctaactatcaatcatttattggttattatatctataatataaagattggttttcaaatattcttggttattcttcatagcaaactatactaattaactctgcatttcgtaaaagctttttcgtactggggtgcattttacacatattttattcagtgcttgttaaaattttgccagacaataataataaaagatacaagaaaaaaaattggagttgagtaggtgagtatatgggctttaatatgtttaattcggctactgggtccacattaattcgagaaagaaacgattgaatttgaaatattagtacaagaaaattaaattaaccggtgtatatatgccgtttaggactactttagtagtctaagagagtaaaaaaaaaaaaaaaaaaaa

SEQ ID NO: 55428 - DNA, 1434 bp, Oryza sativa
  Clone ID: PAT_MRT4530_57436C.1
atggaggtagccttatctgcaattgcaagtgacctaatcaaccgactcacatcatttctgatgaagaaatacatggaaagtacttctatagatgacaagatgaagaggctgaaggaactcctacttagagtccacatagtcgtcgaggaagcagatgggcgatgcatcacaaaccctatgatgttaatgcaactcaagatgcttgcagaaagcatgtatcgagggtactacatgctggacacaatcaagtacaaatcaccaaaggatgaagaggtgagaaagttttgtactatgtcagtttctttgaaacgctcgcgcacaatttttgatacccctagaagccctgctgatgacaatgaattagaaattgtgctaaacaatttggaagctgccatttccaatatcaatgagtttgttgtattgttagtgggatgcgaacgtgtctgtcgcaggccctacgatgcttacctttatactgacaattttatgtttggtcgtcatgccgaaaagcagcagattatcaacattttgttgcaaaatccttgtcagcagggtggtcctcttgttcttccaatcattggtggctgcagggtaggaaagaaagctttagtcagccatgtctgtggtgacgagcggatcagatcttactttcgttcaattttgtacatcaatggagataacatgtggggaatggagcacacaaacttcaaaagggagaggactttgatagtaggtgaattttttacagacatagatgaagatgactgggtaaagttctattctactataagtcaaaagacagatcgagggagcaaagtgataatcataagtcggattggaaagcttgcaaggtttggaacagtaaagacagtttgtctaaacagtttatcacaagaggaatatagctaccttttcaagatgctagcatttggaagcatagatgaaaaggaccatcctaagatggccatggttgcaaatgatcttgcagttgtcttgggtggatcactgataactgcaaacgtggttgctgacttgcttagaaggaaccatgattttcaattatggaacagcgtattgcagcgcttcaaggagatggtaaaaagtaacttgtcaaaatatggtgaacatccaaaagatatcattgagaaagagcatccaatagacataactagatttggatcatcttatcgtactcgtcttcatctgatgccacctcgagtagaaagggatgatagtccaaacaggaaaaaaccaagtttgttatttagagacctaatagctggatgtgctgcaattccagatggcgattttgaattagtaacatgggaatcacgaataccacctcataccatgtatgtgcagtctgttgtagctttcgtcaatgttaagaatggatgtactacatctacaaggaagcgtcgatccaacgcttga

SEQ ID NO: 55429 - DNA, 261 bp, Oryza sativa
  Clone ID: PAT_MRT4530_57437C.1
tcattcctggaacagatacaagatgttctcaccgcagactttggtactgctcttctcatgatgcatatggtcacagaggttttcctcaggcaataccctgggaatcattccttggtggatgtccttctcgaggtctgcttggatgttgaccactggattagaacttgaagttgaagtggatgatgcagcagcaaaagcgatggaggagatcctaggcatggtgagaacggggacaagcgcggcttgcagggtcatccccat

SEQ ID NO: 55430 - DNA, 663 bp, Oryza sativa
  Clone ID: PAT_MRT4530_57438C.1
atgccatggcagtgtcaggtcctcctcatgctgccgtcagacatggcctcggctccgtctactggatttgatggtgatggcgatagaattggcacctacgccaaattcagcgggcccaagctcaggggtctccgaatatggccccagtatcatctcatctaccgcaccaagaggggttgccataaccacatcgcctcggtggctaggtccccagatttgacctcaggcaacggcaagacgcaacgtcaatgctccactattgtaacgtcccgtcttcccccaggccgggcccacttacatctgatagctttcataggccaagcacgcttaaccctggagttctttggagattggcttccggaaaagaagttgcaacttgttgatatgagtattctattaattctattaagccctaggccgggatgttacaactatgaagagcttcaagggcctcgtgaggtaggactcctccttgaactggccccctccctgttgcggggattccctagcaacaacggcgaggacctcaactgctcaccatcatccagcaaccaggcccaaggcccgattacttcgtctccaggtggtgctctcctttgcgtttttgtcttgggatttctcgatttttgtggaaagggaaatgtatgggagtttgtgttctag

SEQ ID NO: 55431 - DNA, 339 bp, Oryza sativa
  Clone ID: PAT_MRT4530_57439C.1
tttgaaactattgatatatataccacttgtgttatagtgcatagcttggtccacatagtatgtttaagctgatctgtaacatcccggcctagggcttaataggattaatagaatactcatatcaacaagttgcaacttcttttccggaagccaatctccaaagaactccagggttaagcgtgctaggcctggagcaatttgggattcgaattttccgggtgcacacgagtgaggacaaagtgtgcagaaaagacatgtgttggtctgtgagggcagtctatgacctataaaagctatcagatataagtgggcccggcctgggggaaggcgggacgttac

SEQ ID NO: 55432 - DNA, 236 bp, Oryza sativa
  Clone ID: PAT_MRT4530_5743C.1
ccacgcgtccactttgctggtcagggacaagatgactgacactgtactcagggggtgtattcatttgagtagaaatcactctcaaggcaggtggacacattctgtgttcatggtggacctgatggttacatcaccggtattctgagaagggtgcaatgcctgtcccaaaaggacattgcgagtgctgagacagatcttgaaaggcaggggcggcggcccggtacttgctggagggg

SEQ ID NO: 55433 - DNA, 581 bp, Oryza sativa
  Clone ID: PAT_MRT4530_57440C.1
atgatttccgctaagttgcctctcattttcgctctactatcttctgctactctcatctccgttgcaccttctgttcgtgcagctcgcctaccatcttcagtccttgtgagaggcgccggtgaattcttggagcacatagggaaggaaatcgcgaatcagttgagtgggagcagagattatccgaacgaaggtgatcagtccaacagcacccggcggggcttgtcgtcgacacccggcggggtgcaggagaaacatgtcgagcctcatgtgttcctgggcattggcacgccggcgatgaacgtcacgctagtgttcgacaccaccagcgacctcctctggacacagtgccagccatgcctgagctgcgtcgcccaggcaggcgacatgtacgacccgaacaaaaccgaaacctacgcaaacctgaccagtagtagctacaattacacatacagtaaacaatccttcacctcgggttacttcgccacggagacgttcgccctgggaaacgttaccgtggcaaacatcacgttcggttgcggcacgcgcaaccagggctactacgacaacgtggccggcgtctt

SEQ ID NO: 55434 - DNA, 408 bp, Oryza sativa
  Clone ID: PAT_MRT4530_57441C.1
atggccacgggtgcggctcgggacggccgggagcggcggcggctggaggcggtgaaagacggtggtttcggcttgcactgtgggaatggtgctgcgggggtggaaggagagaacggagtggatgccggggtgcgcacggcggctgcggtgccggagagggcgacggcgcagtgcggggtggacgggagtggcggcgcggcgctgctggagttcgccggagagcggcgcctcgagagtcgacggggaggccggttggcgacggatttgaagggggaaaggggcgccggcgacgtggacgcgcggggaggggcggcgacgtgggcggctcgggcggccatggcagttgccggcccgggctggaggttggggatgacaggtggggcccacgggtcccacctgtcggcctga

SEQ ID NO: 55435 - DNA, 539 bp, Oryza sativa
  Clone ID: PAT_MRT4530_57442C.1
cccacgcgtccggcaagtatcatatgatttagcatatatacacacacatcctcgcctctgttgcaaacaccccatgtgaatgaacaaatacacacaaaaatggggagttttagattacttcgatttcaattttggatgagatatgaggagtcgcatccacaggttagggattcaacgaaacctagaaatcgcaaaaatggagaaaggaaaatcaaaattaggaaatcgatgtatatgtgtaacatcccggcctagggcttaataggattaatagaatactcatatcaacaagttgcaacttcttttccggaagccaatctccaaagaactccagggttaaacgtgcttggtctggagcaatttgggatgggtgaccgaccgggaaattcttcccgggtcccgggtgcatacgagtgaggacaaagtgtgcagaaaagacatgtgttggtctgtgagggcagtctatgatctatgaaagctaccagatgtaagtgggcccggcctggggagaactgaaaattctaatcagaatgtttccc

SEQ ID NO: 55436 - DNA, 162 bp, Oryza sativa
  Clone ID: PAT_MRT4530_57443C.1
atggcctctcgcttccgacgtacagctccccttgtacggcatgatgcggaattgcggattactggtgcaatcgacgaaactcgacaagaaagcggcgacgctggccgcaggctccgcaagaaggcggtgtcggcgccgacgaacctcacgaggaggcgatga

SEQ ID NO: 55437 - DNA, 528 bp, Oryza sativa
  Clone ID: PAT_MRT4530_57444C.1
atggccgcccgagccgcccacgtcgccgcccctccccgcgcgtctgccgtttcccgcgcgcgtgtgggcgcgccggcttcgccgccgcgaggacaagcctatcggccgctcctctcccccaatcgaccgccaagctgtcacctccactgccaacccgaggccgccgccgctttcgccgccccggccaccgtttaccgccgctcccggccgtcccgagccgcacccgtggccatcctcagcgtcgccgcgtcgtgccgcacctcggttgccgcccctcgccgccgaaattccacgggagcccgcttttccccgttcaaggtcccggaggcccccggccgtcactcgtcgcccgtcggccgccgttggggcgccgccgtcgtcctcgcccggggagctccgccactacctcgcctccgtccggtgccgtgccgcttgctcgagctgatctgggccgtcggttcctgtggaccggcggtggaccaccccgtggtcccggtccacggtggaccgattcccttgacccgctga

SEQ ID NO: 55438 - DNA, 367 bp, Oryza sativa
  Clone ID: PAT_MRT4530_57445C.1
cttcaaatacaattttctcttaaactactcatccgatctacgatccgattacacctcccgccttcccccaggccgggcccgcttacatctgatagctttcataggtcatagaatgccctcacagaccaacacatgtcttttctgcacactttgtcctcactcgtgcgcacccgggaagaatttctcggtcggtcacccatcccaaattgctccaggccaagcacgcttaaccctggagttctttggagatcggtttccgaaaaagaagttgcaactcgttgatatgagtattctattaatcctattaagccctaggctgggatgttacatcctcacccccttaagattatggcaagttccaggcacg

SEQ ID NO: 55439 - DNA, 1611 bp, Oryza sativa
  Clone ID: PAT_MRT4530_57446C.1
atggcgacggtgacgaggtcctcggctctcgccggaatcctcactcccagatggggtgggggtaaacgccaccgcctcctcctccacttccaggacctcgaacattgtcacgcccagaaatttagcctaaatttccagactattttgtgtattaaatccctgtccaggatcaaccagggcgggccccacacgtcagcgggtcaagggaatcggtccaccgtggaccgggaccacggggtggtccaccgccggtccacgggaaccgacggcccagatcagctcgagctgatcgggcggccacgaggcagggcgcccagagcacgggcacggctcagagccggcccggccgagacacgacgcacggcggcgcacggccaccggcggcgagcggcggcgcgagaaggcgcgcgaagggcggcggaaaggagaggaggaagggggatgctcaccaagcggcacggcaccggacggaggcgaggtagcggcggagctccccgggcgaggacgacggcggcgccccaacggcggccgacgggcgacgagtgacggccgggggcctccgggaccttgaacggggaaaagcgggctcccgtggaatttcggcggcgaggggcggcaaccgaggtgcggcacgacgcggcgacgctgaggatggccacgggtgcggctcgggacggccgggagcggcggtaaacggtggccggggcggcgaaagcggcggcggcctcgggttggcagtggaggtgacagcttggcggtcgattgggggaggggagcggccgacaggcttgtcctcgcggcggcgaagccggctgcggtggtggcagggtgcgggagcggcgacggcggagggaggtggtgcacgtggtggcggtgtttcggagttggggaggggaaaaggactaggggtcggggtagagctcggcaccgcgatgccgacgacacaaacggcgcggcgctgcagcccctagggcggcagtagcgggcggctggggcggcgaacggcggtggaagctcggcctcgcggtgggaatggtgctgcgggggtggaaggagagaacggagtggatgccggggtgcgcacggcggctgcggtgccggggagggcgacggcgcagtgcggggtggacgggagtggcggcgcggcgctgctggagttcgccggagagcggcggtgcaagggctcggcgcggggagagcgagggagggcgtggcggcttggggaaaatgggggaaatggatgaggggagcccggggatcgtttttatagcctcgagagtcgacggggaggccggttggcgacggatttgaagggggaaaggggcgccggcgacatgggtgagtgggggcagtttggcgccggttttggaggggagaagtgggggaaatggtggaggaaggggatgacgtggggtggaccgcgcccacacgcgcgcgggaatcggaagacgcgcggggaggggcggcgacgtgggcggctcgggcggccatggcagttgccggcccgggctggaggttggggatgacaggtggggcccacgggtcccacctgtcggcggttcggtcgccgctggtggtgacgtcgtcgctgacgtcatcgtcgtcgtccat

SEQ ID NO: 55440 - DNA, 818 bp, Oryza sativa
  Clone ID: PAT_MRT4530_57447C.1
tcgcaaggctcatttttagttttgggtcaatggaggatgtaatgtcccgccttcccctaggccaggcccgcttacatctgatagctttcataggtcatagactgccctcacagaccaacacatatcttttatgcacactttgtcctcactcgtgtgcacccgggaagaatttcccggtcggtcacttatcccaaattgctccaggccaagcacgcttaaccctggagttctttggagattggcttccggaaaagaagttggaaaagaagttgcaacttgttgatatgagtattctattaatcctattaagccctgggccgggatgccacatcctcacccccttaagaaagatcaacgtcctcgtcgatcaacctcaggccaggaacgtcccctcttggccacgtccgtgtgtctagtgccagcgcatgtgccatgctgtgtgaccactccaggtccacaccagccatgcgcaccatgcctgcgcaactgcgacacacgtgcccgtgaaaccgcgctaggccgggcccgcttacatctgatagctttcataggtcatagactgccctcacagaccaacacatgtcttttctgcacactttgtcctcactcgtgtgcacccgggaagaatttcccggtcggtcacccatcccaaattgctccaggccaagcacacttaaccctggagttctttggagattggcttccggaaaagaagttgcaacttgttgatatgagtattctattaatcctattaagccctaggccgggatgttacaccctcacccccttaagagagatattaagtgcagggatccgtt

SEQ ID NO: 55441 - DNA, 1019 bp, Oryza sativa
  Clone ID: PAT_MRT4530_57448C.1
tccaacgggacagcgccagaccgtccgcctgccaccatggcacacgcgaaccgacgtgacaggaggagggcaccaccatggctggtgtcgcccccctccccacccctcgcctccattcctatttctggactcggaatcaggcaaataatatatccacggacatctatagaaaaagctacatccgattctctcccgcttcgccgggttcggtgagattaaaacctccaaatttctcttacaagattgtgtttttgaggcgagaagcttttcggtagagctttgaaaaattccacaggtcatatatttcgttcatttgagtttattttttttaggttgattcttgtgggttcctcagcatcggcccgccacgtcggtagaaggacggcgccagataggctagcgccgtcctattggacgacggtgccagctactctggcgccccaaaaaggaccatttctgggataagttttttcaggggtctatttgcaaaataagttttttaaaaagaccaaaatgtgaaaaatccaggccctccgcatctcgctctgatagctttcataggtcatagactgccctcacaaaccaacacatgtcttttctgcacactttgtcctcactcgtgtgcacccgggaagaatttcccgatcggtcacccatcccaaattgctccaggccaagcacgcttaaccctggagttctttggagattggcttccggaaaagaagttgcaacttgttgatatgagtattctattaatcctattaagccctagaccgggatgttacaactatgaagagcttcaagggcctcgtgaggtaggactcctccttgaactggccccctccctgttgcggggattccctagcaacaacggcgaggacctcaactgctcaccatcatccagcaaccaggcccaaggcccgattacttcgtctccaggtggtgctctcctttgcgtttttgtcttgggatttctcgatttttgtggaaagggaaatgtatgggagtttgtgttctag

SEQ ID NO: 55442 - DNA, 130 bp, Oryza sativa
  Clone ID: PAT_MRT4530_57449C.1
gctgcggtggttgaggatggggcttcagttctagaacttcttatcattcatatctttggcgtcaacctcatacaagttaccaccttcgtgacatgcgtcgacatcagctttgtcattactaggatatcat

SEQ ID NO: 55443 - DNA, 148 bp, Oryza sativa
  Clone ID: PAT_MRT4530_5744C.1
ggtgcgcgacgaccgaaacgagcgcagagaggagggccaataataccaagtacgcgcaggccctccacaacgagagtgacccccacactgaacagcgaaaccagctggaagagagagacaggaccaggaaaagagacaaaaatctgcg

SEQ ID NO: 55444 - DNA, 2169 bp, Oryza sativa
  Clone ID: PAT_MRT4530_57450C.1
atggctgcgatgatattaatagcagtagcagtagtcgtgcagcaagcgctgatcctggcagcaagagccatcggcgatgggcagccgatcacgctcgccggctgccccgacaggtgcggcgacgttagcataccgtacccattcggcatggcgcccggatgcttcctggacggcttcgaggtcacctgcaaccgcaccttcgacccccctcgcgctttcctcgcatggggctcgccggactctccgttccaggggaacgccgacggctactacctgagcgataacgacagcgtgactctgaaggactactggtccctccccgtggagctcgtggacgtgacgctgtcgcgcggcgaggctcgggcgtacggcgccgtcaccaccgactgcgccgccaccaacgggacctaccacgagttccggcggcagctcacggtgctctccggctcgccgttcgtcttctcggcgtcgcgcaacgtgctcaccggcgtgggctgggacatggaggcgcagctcaccacgtcgctggccagcacgggctacaggctcaactgcgcgtcgcggctgatgttccccgagacggcggagaacgggtcgtgctcggggatgggttgctgcgaggcgaacgtgacggccggcctccgcatagcctccgtcacgttcgcccacaagaagaacgtcttttggtcgtccaatccttgctcctacgggatgattgtccagaagaactggtacaacttcaccaaggaggatctctacggcaaccagaccttgtccaggaagcacccaaggggcgtccccttcgtgctcgacttcgccatcgccaacgtctcctgccctgcgcaaggccagccgccgctggacaactacgcttgtcgcagcagcaacagcttctgcgtcaacgcaaccagcagcccaggctacatctgcaagtgctccgatcattacgatggcaacccatacatcgctgatggttgccaagacattgacgagtgccaactccgaatacaatttcctgagcttcgcgacgtgtacccgtgctcgagtgatgggatctgcaagaacaggccgggaggttatgactgtccgtgcaaacctggcatgaaaggcgatggcaaagcaggaacttgcactgagaaatttccactggtagccaaagtgattgtgggagtcgtagcgggtctccttgtcctcgcaactctggtttttgttttccttcttcgcaaggagaaacaaaagatgagggaatttttcattagaaatggtggtcctatactggaaaatgcaaagagcataaagatattcaggaaggaggagctaaagcgaattacaaaaacttatagtcatgttcttggaaatggtgcctttggtatggtatataaagggttccttgatgaacagcatcctgttgcggtaaagaagtccatgaaagttgacaagacgcagaaggaccaattcgcaaatgaagttattatccaatctcaagtaatccataagaacatcgtcaggctaataggttgctgccttgaggtagatgtcccgatcttggtctatgaatttgtttcgaatggtagcctgcaagacatccttcacggtgagaacaaagttcctctcactttagacaaacgtttggccattgctgccgaatctgcagaaggcctggcttacatgcattccaagacctcaactagcattcaacacggtgacgttaagcctgccaatatacttttggacgatcaattcaacccaaaaatatctgattttggaatatcaaggttaattgcaagagatgtcaccgagcacactaacgatgttattggcgacaacaactatatggatccagtttatcgtgaaactggtctgctaactaacaagagtgatgtctacagtttcggtcttgtgctctttgaaatcatcaccggtaagaaagctgtttatggtggtgaaagtagctttgtcagaaattaccttgacacatacttaactgagataagagcaaataagatgctgtttggtaaggaggctgaagaaaaggacattgagcatctccataatcttgttgtgatatccaaagagtgtttagacaataatgtggaccaaaggcccgagatgacagatatagcagaacgtctgcaaggcattattagatcccggaagtttcttaattga

SEQ ID NO: 55445 - DNA, 648 bp, Oryza sativa
  Clone ID: PAT_MRT4530_57451C.1
atgggttcctttagcactcctgcgtgtggccacgacagcatcatcagctcatcacccttcatgccgctcaagccatgctcattgtccctcaactctggggcgacacgggaggcgcccccagccggtgcgccaccatccctgcctatctccctcctcgacctcaccgcccctcgagcaggctaccagaaactacgtggccgccaggatggcggcggcggggccatcccttccccccgaggtcgcggcatcgaagcccacgaccccgaccagatccagggcaatcgtggacgtggaggcggcaaggaggctactagatccagcccctcagcccggatccagcctcccaggcgcagggagccgatcctcgagctagtggcggcggggaggcggtggggcgcggcagtgtggaggtggtggacatcggaggtggtggggcagacatttggaggcggaaaggcgcgatgctgcaccatcgatggcatggtggcgctaggagatgcacccgatgaggtggggctgtgggagtctaacgtggcgagagcagaggcagtgaaaggccaccaagggctatggaaggtcggtgcaaacggcgtcatggtgcgagcatggcatggctggtgtgcagtggcggtgtggctgccgtggtga

SEQ ID NO: 55446 - DNA, 422 bp, Oryza sativa
  unsure (1)..(422): unsure at all n locations
  Clone ID: PAT_MRT4530_57452C.1
agttaatcatttttcttagctagctcgatctcgcctcgcctcctccgggcctccagcgaaagtaatcaatcagattcagatcgatcagcagcagcagcagcagcagcagcatccgctcccatacatgtcgatctctcactataaataacctgccccctctccctttctgcttcaattcctacctcacacttctgcaacaagctttantccagccaccggaacgagagatcgatacagctcgatcagctagccgcattcgcctcgccgccgccgacgatgtcgagccggaggtcgtcgcgctcctccgtgtcggaggaggagatcaacgagctcatctccaagtccagtcctcctcccagttccggcggcgggggncaacaagcgtcgacgacgaagctgctgaaggagactgnagtaaatta

SEQ ID NO: 55447 - DNA, 400 bp, Oryza sativa
  unsure (1)..(400): unsure at all n locations
  Clone ID: PAT_MRT4530_57453C.1
tttttattgttcttgttccggactacaaccatcaggcaggtcactggttttggtttggtgtttccctttcaagagggcccggtgtaaatctcttcctgattagttaattagcaacttaacatgtccctatcattggttagttaattatcaactctgtccttttcctgcccctcttccccctctttctgggagagtttttcttttgtaaggtttccactttangtgtatgttatggtctttgtatttgtgatacaatcgttgctgctgttttgggaagaaaagtcttccaaaaacagaacaaagaaatgataagaaaacgtgtttcctttgttttcatcagacaggagactggcggaggctaagcagcatttgacacatgcatagataatgggatgaccct

SEQ ID NO: 55448 - DNA, 567 bp, Oryza sativa
  Clone ID: PAT_MRT4530_57454C.1
atggccttgggtcatgacaacttggtatcagagccactcaccatggcttccgatgccgatagagttctccgtatcacagtgagccatctagtatatccggtggatgagtatctacttcaccaattgtttgatggctatagagcggaaaggaagattgaagtacgccagatgggaacacatgtggaggcctccgttccgtttcaaactcgagcagctgctgagcatgcttggaacctcaacggtcgtgccatctatgacggctgttgttggttggacatacagtgggagcagcagtccaacaactccatgacaccggtgacatatctctccacaatcatcactgtaacaccccagtggaaggaagacatcaaagagttgagggctatcatgcaggacttggcagccttgctgcaggagctggcaaaggagaaggaagaagaggcggcaacgggactagccatgatgccgacggttgatatgccttcaattcagttgatcccgccggcagcctgcatggtggagcacgaagtggcggtgcagcaaaaaaacatagatgagtatgactaa

SEQ ID NO: 55449 - DNA, 222 bp, Oryza sativa
  Clone ID: PAT_MRT4530_57455C.1
atggatccagtggtggtggagctcgttgaggagaaggaggtggtgcttgttgagaaggaagtggatccgaggtggtggctattaacaagaggggcggtggcagtggaggacgtcggatctggcctcctacgcagtgcgaccaccatgacaccgattgaggctatcaccaagaggagcagcgacagtggcgctgaacgatattttcgcaggaagacaacatag

SEQ ID NO: 55450 - DNA, 204 bp, Oryza sativa
  Clone ID: PAT_MRT4530_57456C.1
atggcggcggtgaccggcgacgacgacgactcgacggcggcgaatgcggcggcggcggcggcggcgatggatggaagaagaaagagggcacttcgtggagggaaaacttacgtgggacccacctgtaagagacacgcacgtctcggcgggggtgaaacgtggcgggagatctggccgtccgacgtgggggtgatggacggctga

SEQ ID NO: 55451 - DNA, 1618 bp, Oryza sativa
  Clone ID: PAT_MRT4530_57457C.1
ttttttttttttttttttattctctgaattgacttggacacagtatagctaactttatcattcacacgcaaacagttacattcctgtgttgtttgttcatactgtttccaatcagagtttgttcagatttcttgctttggtacaaaatcaacatgcagccagcagtacatcgacttggagaccatatcgggttcaactgaacttattaaagggtaaaacaatgaagcaaaatatcaacaaatatatggttatcccacaaagtctaacaagaaagctcaaatgaacaaggcgaaaagggcaacaatgccagcgttgtcatggtttgtttcctgatcagaatgaaggagaaaatgggggggaaaagagcataggcaaaaacagtacacggtacatcacaaagggcatcgctcctctggagagttatatacaggaaggcgcatcatgctaagttgctactccggtgctctcctatgccagacagacccaagtttttctggtcgttaccaagtcaaggcaacaggagtttatgaagattgcggagtttcttgaaggcggtacattgtgatctcttgctgcttgaagtacctccggtcttcctcgtcaacaagaaccaggttcaggtagtacttgacattgaacttgttgtttatgttgcggtaagtcggggtcaactcatatggtgtcaagaagagtcttaccggaatagactcacctcttacgggagcgccatccatcaactcaaactttgcaagtgtctcagtctcaatatatgtgccaggcccagatcctgttgattcccgccgacgaatctcaagctccatgttctttatctttattctgactagaagaaaatagatttttcccacgatcacatccttgagatggtacttgcttttgctgtactcaaattcaatatgcaaacaatcttcaattccaacttccatcttgatgctattgttaattgaaggaagaggagtgtaattccttacacagaaatctcgacattccacaacactagtagcatatggtctgccaattgtaactttcaggatgtacctcaatctgacatttgttccgttatacgactcataaggcatctcaacagtagagaattcaaatggataagtcttcctttcatagatttcaccagcaacctctaactctcgcactaacgaagtgaagtcatagaagtgacctctctcatggtacagctctatctgacccagcagctcaatcttgacaccttggtgctccacccttttacctggaacgggcgctaccgacacctctcctgcaatagtctccaggctctggaaggccggcaccatcaacgtcttcccgttatccttcttgatcgccacctgcttccggctcctctcatcggcgaaggtgatgaagacgtcgcagggcgccttgaatgctccgatgatgtaattcatggcggcgttggaggagcaggagccgaggtggagggggctctccctctggcggaggaggtggcggccgagctgaggagggtcggcggcggcggcgggggaggggagggggcggaggagatcgccggcgtcggagacgtcaaccgccgcgtgtgaagcctcagcccggggatccactagtt

SEQ ID NO: 55452 - DNA, 1213 bp, Oryza sativa
  Clone ID: PAT_MRT4530_57458C.1
gttttgactttcccaccccaaccataccggaggcggagagcttgacgccgccggcgacgagccgcatcggcggagcaagcgggagcgggaggtggggatggggtcgagcgacggggacaagccgctgcggcggatcgcggcgtcgttcgaggagctcgaggcggtggccaagcagcaggcccccggcccggccatggaggtgggctccttcgcccgcgcctgctccaacgtctccgtcctcttcggctgcctcggcatcgccttcaagttcgccgagatggactacgtcgccaaggcaagcccccgccgccacccccgctctctagtcttcgctctcccttgtcctcgaggagttaggtcggctattaattgtttgctactacctccgtttcaggttgatgatttgctggaggcatccaagtcaatctcaaaattgcctgagatggttgagttggacattcagaagggcaccgtcaggcaagctgggagccatactaggaatatgctgagggttaagcgtgggattgatatggttaaaattctgtttgagcaaatactggttacagagggcaactccttaagggatgcagcatctaaggcttatgctcaggtttttgctcctcaccatgggtgggccataaggaaagccgttgctgctggaatgtacgcccttccctcaaaatcgcagctcctgaagaaattgaatgaagatgaaaattcggcaaaggttcaaatgcagactttcatcagagcatctggaccagtaattctctacgttgaagatctgtttacctcaaggaatttaggcatggactggtgaaccaaagcctacttatccacttcgaatgtactaatccaattagacggtgtcaatacgcacgctttgtatgtactgatccaatatgatggtgtgctttgagctatgactacaatcagttgtatctggtttcgacctgttaaataagcttcagtctatgcgaatcagctcagtgattgacctgctgagctgtagatgattatcctgacaaaggtgggagaacatttacttctgcaagctctcccgatgcgtgtttcaagtgtggtaagagcgggcactggtcccgtgattgccccaccgcaaattgtggttctagtaccgtctccagccatgtcaagtcctcttctactttgggctcatggaacagccacagatactgatagccggtacctgtga

SEQ ID NO: 55453 - DNA, 276 bp, Oryza sativa
  Clone ID: PAT_MRT4530_57459C.1
atggccggccggccggctttgtgccgagccgagccgtgcctagccgccacctgcgccatccgatcggcctcgggccgatctggaccgtcgatcccatgggccggcggtggaccactcgtgtggtcccggtccacggtagaccggccgcctcgtgccgctgacatgcggggcccgcttgccggcgccgccccctcccttgatgacgtcagccctgattttggccatttcatcgatccacggtttctcgaagacgttgctgaggtctcatcagtgtga

SEQ ID NO: 55454 - DNA, 302 bp, Oryza sativa
  Clone ID: PAT_MRT4530_5745C.1
acgcccacgcgtccgaggaaattcatccatggcgatctccaagctccagcttgacctcctcgccgtctcaatgacgaagacttcggagggggccacccacttcctaacctacactatctaaacgacctcgatgaccgtatcgatcttgaaaatttcttaaatgctgaaccctcagtatttgatgctgcagctgattttgattctgatcttaacatgattctatttaaaagatttttccaacacctttagattctgtagccattattgcaatcaatgcttttcaattcattcctcacttttct

SEQ ID NO: 55455 - DNA, 1621 bp, Oryza sativa
  Clone ID: PAT_MRT4530_57460C.1
tttttttttttttttttatataagtgattaactgattaagcacacagagtgcagcagaacacaatagataagctaaataaacccacagcaatacatacatatatacgtgtgaaaaaaatcgtctgaagcggacggttcaaccgcttgtctacgacgcatggagaacaaaaacatcaacaccagtgctatgagcagtattacccagtggtatctagaaactgaaatataaatttcgccattttatacaacccctttggaaaaatttccccttttcttcaaatcaagcgcttacagaactatatatgtttacttgcaattagttttgtctataaaatataactggttctctaatatacggctcctgatcctgatcttgcagaacatttcctgatctaagcaattgtcctcctattgctttggatgaattcctcctgccctgtaacccagcatagtgttcagccctcggcgatcatctgctacgaattgttatcacctcttgcgtttggttttgacgctggtggaggaagatgggttactgtgccagtttcttttcctttggttgatgaaccagttgttgatctgctttagctgtagccctgtttcttggactagccgtgccttgtcttcctctgttggatatggccactttgcatgagactgccaccaagcttttaacgtagaagtcgtgtctcccggtagctttcccgctcttcgcttgcgaagaatttcttctcttatgtcaatcagcttctctttgtaaccctgctttagttcatgctttagctcttgacggacacgctccattagggatcgctcgctttctgtgggaaggccgaaacccatgttatccgctccatccaagcttggatcatacatgtttgcctcgctatctgcctgatcatcttcaccatctgacatggttgctcccgtgccttcaccgggcgaggcacctgtcaaactctgaaggttttgttcaagttcccagcatgccattactgcttccatggcatgaacacggacatgctgctgtagctgctctttaaacgaacataatagcaagacgtagtgcgtcatgaactggtcgagctcgcggccgtcgtccccggcggcggcggcggcgagggcggagtacttggcgacgacgccctgcgactgcgcgagctgcgcgtcgatgcgggggagctggtcgaccggggtggcgatgcggaggcacgccacgtgcgccgacagcagctgctcgtacagcgggtgcgccagtatctccgccttgcaccgcgccgcgtccgcctcgccgccgccgcccatcgcggccgccaccgcgtccccaccgtacgtacgcgcgccgccgcagccgcagcgccagacggcgacgccgacgagtccgacgtggtccgccgccgccgccgccgccaccgccgcgtcgtccgcgccgagcgcctgcatggtcatctcgtgcgggaggtgaccgtggaacgccatggcctcctccccgtccggcggcgtcgcccccctaggtagcaggaggactagctagctacctatagctagctagctagagaggtagagagctaggagtatgaggtgtagaggaagaggagggtagcccctcgtgccgaattcc

SEQ ID NO: 55456 - DNA, 340 bp, Oryza sativa
  Clone ID: PAT_MRT4530_57461C.1
cctgcttcttgactgccaataagggtttcatcggggtttcagccgatgaggtatctggacgttgcatcggtttacaaggattgcatccgattggtttctactagattatattattgttatattgtattatcatcagctgattgcctttatattggtatttatatcaagtgtcagaatatacattggatatatatccggtagctccgaatcctatcactatcggctggatcaaactgactggcacacccgcatctcatcaacctttggacctgcactggagctaagcggatctcctaggccagtgtgtgtttttcgcgtcaacacatctttggcacgcctg

SEQ ID NO: 55457 - DNA, 801 bp, Oryza sativa
  Clone ID: PAT_MRT4530_57462C.1
atgccttaccgcctcctgaggggaagctgtcggaaaccatgtggtgaccaaggacggcagcaacagggcacaagctttctccatccctgcccactccgccaaggagaggggaggcacggcgatgttccgcaaggggcagagatggctatgtccatgatggtcggtgacgacatggtagcctcggagctgtggccgaataaggagatggcggcaaagacggtcgcaatggaagcaacagcacgtgttggtgagaatggccagatccggctaccctatggtcacatccagtctcctctcggccagatcaggggcgttgggtggcttcggcgcggatctggcagtggtgaggccacaccagcgttggcagcggagaggttgctagtgagtggcgaggtggcggcaaggcagtggtacggtgatgtcggtggtgatcgtcgaggccgccagtgggcttggcggtgcggtgacttcggcactggcccacgaggtggtcgacgggctggctggacagtgatagcacaaactctctcgtcgtggaggtggcaatcgagcgtgttggctgggagtttgatggaaggccttctccatagttgtcggcagccacctaacctaccagtggagctcctcacctccttctgcaaggagcttcattgggaggtcgaaggaggcatattgacatcagggatagtcttgggctgccaaggcatcgcccctaggtcctggctcatcttggccagatctagcgaggtggcgggacggataaggtctttgacaacgcacaaaggtggggcagcggggtag

SEQ ID NO: 55458 - DNA, 975 bp, Oryza sativa
  Clone ID: PAT_MRT4530_57463C.1
atggcggacgggctagcggaggtggcgccacgagagcacccacgcggggcggcacagggaggccacgtggacggcccagatcggctaggacggtcgatcgaacggccacgggcaggcgcggcgcggcaaaggggccgggcagccacgggcgagcagggcggcggcagccggccggaaagcggtggcgctcggcccgatggtcgccggcagtgggcggcagcggcgctggatgtggcggcacacacgggtggcagcggggaagggagagggggctcaccaagaggacggggacggcgaggcgaagtcgggaaggcggccgacgacgaggattggcggtggcgcttctcgggttggggtcggggacggcgctccggcgactcccgaccgcggcggaggtgcggccgaggtcagcaggacctgggaagcaaagaggaggggttagaggagggagaggcatcgcggcacggcgaggaacaccagccgagcacaacatttgtggcgagactcaccggggagacgattacggtggctcccggcggcgaggaggtggtggccgagggtgctctcgtccttgcgtggccgagggaggcgacggcgtaccgcgaggaggtcgggaacggcgggaatcagcgatcggaggcagcaaatgaggtggcgacctcggatcgatggcgaaagtggtgctccggcggtggactgggcaaacaaagtggcggccggccttgctcttgcgacggcgaagtcaatggcgcaagcggcaagtcacggtggaggttgaagcggcggtggcgggctactgaggcagcgaacggcggtggtggctcgggtacgcggtgcagaggtggttccgacagggatacagggaggcagagcagatgccgaggtgtggctcggcgtggcggagccgatggtggcagtggcacggcgcggcgatggccaaggcggcgggaggcggcggctggagcacgccggtga

SEQ ID NO: 55459 - DNA, 329 bp, Oryza sativa
  Clone ID: PAT_MRT4530_57464C.1
tggcaagagcgcaccgtggcccttgcatactgggcgtgccactgggctgcacgcagttgccggagtggcaggcttgccaggacaggcatggtgcgcctggatggacatgggacatggactggagaacgttgtgccactggttgaacagtggcttggctaacccactgttggaaagggctggtgcccaagtgcgtgcaacacactgagttatatatattcactgccgtcccaaaatatgaacaacatttaaccctgcaggatttatccccaatataataaaaataatccatggaaatggctattgacaacaaaaaaaaaaaaaaaaaaaa

SEQ ID NO: 55460 - DNA, 381 bp, Oryza sativa
  Clone ID: PAT_MRT4530_57466C.1
atggcacccctgtccccccatctccatcccgcgagctgctgtgccattgtcctgctgcttccgccgcatactctctgttgggtgttcggaatggcggcgatgaggaaggaggctgtttgctccggtgcttctcgtgagcggtggtggctgactttgatctccgctttctcagagccattccttgatgcttcgcatgtggtgctccatattggcatggaggccaccgctttggcagccgctgatgttgaggtgcctgtggcagaaggggtggggactgttgaggctgtatccgcgttggctttctgcctccgggtggttcttgtgcctaggatggtcattccgataaatgataaccagggcagatccatttacattagttga

SEQ ID NO: 55461 - DNA, 342 bp, Oryza sativa
  unsure (1)..(342): unsure at all n locations
  Clone ID: PAT_MRT4530_57467C.1
aaaaaccaacccaacngccgccgcatcgccctcgttagaacgatgaccgcgtcggcgctgcaccagaccaccagcttcctcggcaccgcccctcgccgggatgagctcgtccgccgcgtcgggactccggtggccgcatcancatgcgncgcancgtcaagagcgcgccccanagcatntggtatngacctgaccgtnccaagtanctnggcccgttntnggagcanacgncatngtacctnancggagantttccgggagantangggtnggacanggcggggntattggccgaaccggagacgttnncgaggaanaaaggagcttnaggtgatccaattg

SEQ ID NO: 55462 - DNA, 216 bp, Oryza sativa
  Clone ID: PAT_MRT4530_57468C.1
gctccttgctctcctttgccttcagagaaaccggaagcaatggcgtctgctactctcctgaagggatctttccttaccaagaagtctgaatgggctgtcattcctgcaaggtttctgccctaaaccagggactgtctccatggttgtccgcgctggtgcctacgacgatgagcttggcaagaccgcgaaaaccattgcatcaccaggaaagggtat

SEQ ID NO: 55463 - DNA, 183 bp, Oryza sativa
  Clone ID: PAT_MRT4530_57469C.1
actgttggcccaaggaaattgggctaagctttcgctcggaaccccctaccgccgtggttcgtcgcctaatccgaaaccaccatctaaacatcagcggcacatggcttccgccacacccgaccgacgtccctccgccggccatcttccagtcctgccaacgacaagactgccaccacaccacac

SEQ ID NO: 55464 - DNA, 250 bp, Oryza sativa
  Clone ID: PAT_MRT4530_5746C.1
gccacccggcatggcacggcccaggcacaggccgatctaaacgtcaagctgtgccgtgcttgcccatgggctacacccacggcccaggcgcgacccaataagactcaggccgtgttcggccggtccgaaggacgacacgggcccaacactagtcgggccgtgctgtgccaaagcgccatgccacgggccgggctgtcgggccacgggccgggccatgggaacatggttaccttcctggtcctgacaaagg

SEQ ID NO: 55465 - DNA, 1302 bp, Oryza sativa
  Clone ID: PAT_MRT4530_57470C.1
gctgtgtcaagggagaggggtagtagcaccttgctctcctttgccttcagagaaaccggaagcaatggcgtctgctactctcctcaagtcatctttccttcccaagaagtctgaatggggtgccacccgccaggctgccgcccccaagccggtgactgtctccatggttgtccgcgctggtgcctacgacgatgagcttgtcaagaccgcgaaaaccattgcatcaccaggaaggggtatccttgccatggatgagtcgaacgcgacctgcggtaagaggcttgcgtcaattggccttgaaaaacaccgaagccaaccgccaggcttaccggaccctccttgtcaccgcaccgggcttgggacagtacatctccggtgctatcctcttcgaggagaactgtaccactcaactgtggatggcgtgagaatggtcgacatcctcaccgaacacaaaatcgttccaggtatcaaggtcgacaagggtcttgtgccctctgctggctccaacaacgagtcatggtgccaaggtctcgacggccttgcctcgcgcgaggcggcatactaccagcagggcgctcgcttcgccgagtggcgcactgttgtcagcatccccaacggcccatctgaactcctgagatccttctcgacggtgagcatggcatcgacaggatccttccaagtggcgcagaaagtgtgggcggaaaacttcttctacatggccgagaacaatgtgatgttcgagggcatcctcctcaagccaagcatggtgacacccggtgccgagtgcaaggacagggccacccctgagcaagtatctgactacaccctcaagctcctccacagaaggatcccccctgccgtccccggcatcatgttcttgtcgggtgggcagtcggaggtggaggcgacgcagaacctgaacgcgatgaaccaggggcccaacccgtggcacgtgtcgttctcgtacgcgagggcgctgcagaacacgtgcctcaagacgtggggcgggcagccggagaacgtgaaagcggcgcaggacgcgctgctcctccgcgccaaggccaactcgctggcgcagctcggcaagtacaccagcgacggcgaagccgccgaggccaaggaaggcatgttcgtcaagaactacgtctactaatccgatccaatccaatcaagacagtgaacctgctgctgctgctgctacgtactacagctactgctatactgctagtacctccaaggggggccggtgccgattcgccctatagtgagtctattacaattcactggccgtcgttttacaac

SEQ ID NO: 55466 - DNA, 603 bp, Oryza sativa
  Clone ID: PAT_MRT4530_57471C.1
atggatcgagacgagagcttgggcacgcagccattgaccgggaggcgggtgcgcgcggacacaaggcacccggtgtaccgcggcatccggctccgcagcggcaagtgggtctcggagatccgcgagccgggcaagtccagcaggatctggctcggcacgtacccgacgcccgagatggccgccgcggcgtacgacgccgcggcattggcgctgcgcggcgccgacgccgcgctcaacttccccggcacggccacgtcgcgcccggcgccagcctccggctcccccgacgacatccgcgcagcggccgcggccgccgccgcgatgatcggctccggtcaccgtggcaaccagcgcgccgccgacgcgagcacgtctcgcgcggcgacggcggcgccggaggccgccgtcgccgctggggcgggcgatcagaagcgcgtcgtggacgaggacgacgtcttcgagatgccgcggctgctggtgagcatggccgagggcttgatgatgagcccgccgaggctgagcccctcgacggacggcgtcggcggcgtgtcgccggaggacgacgaggacgaggacggcatgagcctgtggaaccattcctga

SEQ ID NO: 55467 - DNA, 615 bp, Oryza sativa
  Clone ID: PAT_MRT4530_57472C.1
atggattcagactccatggatccatctggagtcgtgccaagccttaaaagtttgcaaggatgttttggttaccacgtggacgcggagcgtgcatacgcgtatgatgatctggtcgccggcgatcccacgccggggaccaccgccggcggtcgagcaacgccaagtgcggcggtgcatttgcacaaattagtatctgcatgggcaatatccgagaaagtccgtatggtcgtaagtttagtgagcaggatccgtcaactggagggcccgtacttaaaaaggcaatcgtccaagctactaggcaaattgatcaacccaccagtgaacgcgaggtccggcggcgacggaagggctagtgcagcgagggcaagtgtggagcggtcgtggcaacgcgcgggcaagggcgaggtccgggagcaccggcggcaggcgggcgagggcggagggccacggcgcttgactagcggcgccggcgggacagtaggcgaggtccagcggtggcagctacgtgtggaggagcggcggcgtggccagacgacgacgactgtggtgtgcggagtgaggaggcctcctggcgccgaagcgcggagtgtggaggagcgccggcgcgcagagtga

SEQ ID NO: 55468 - DNA, 300 bp, Oryza sativa
  Clone ID: PAT_MRT4530_57473C.1
tggcaggtgcagctggagcggcgtcacgtgacgacgaggcatgcgccggtgccgcgtgcgtgagggcaatccgggctttttcgattgtttctctctccatgttgttcggaaataataaaataataccattggtgtctagtagctaattaccattcttttgcggtgtcatatagccaattcatgtctttgcggtatcctatgactaattacatgttctcgagtgtcctgtaaaaaaatttaccaaacaataaagatatgattgatgattgattattaaaaaaaaaaaaaaaaaaaaaaaaa

SEQ ID NO: 55469 - DNA, 1896 bp, Oryza sativa
  Clone ID: PAT_MRT4530_57474C.1
atctacatgtatgtttttttttcatttgtccaatttaaagtattaatttgctctaacttaaagttactcggttcgatgaatactagttaacgagaattggaggcgctgatcgccatcaggcaggggctggtcgacccgcacggcgtgctgaacaactgggacgaggactccgtcgacccctgcagctgggccatggtcacctgctccgcccacaacctcgtcatcggcctgggagcgcccagccagggattgtcggggaccctgtccggcaggatcgccaacctcaccaatcttgaacaagtgctgctgcagaacaacaacatcaccggccggctgccgccggagctgggcgcgctgccgaggctgcagacgctcgacctctccaacaaccgcttctccggccgcgtccccgacacgctcggccgcctctccaccctccgatacctgaggctaaacaacaacagcttgtccggggcgttcccgtcgtcgctggccaagatcccacagctctccttcctggacttgtcctacaacaacctcactggccctgttcctcacttccccacaagaacattcaacgtcgtgggcaatccaatgatatgcgggagcagcagcggcagccatgcggggaacgcgaacgcagcggagtgcgccaccgtggtcgccccggtcaccgtgccattgtcaaagggtggaggaggcgccgcgcggttgccgatcggagtagggacaagccttggcgcctccgcgcttgtgctcctcgccgtctcctgctttctctggaggcgcaggcgccggcaccgctgcctcctctcggacgtggaggatgggggaggaggggaggtgatggcgaggctggggaacgtgaggcagttcgggctgagggagctgcacgcggcgacggacgggttcagcgcgaggaacatactggggaaaggagggttcggggacgtgtaccgggggaggctctccgacggcacggtcgtggcggtgaagcggctcaaggacccgaccgcgtccggggaggcgcagttccggacggaggtggagatgatcagcctcgccgtgcaccgccacctcctccgcctcgtcggcttctgcgccgcggcctccggcgagcgcctcctcgtctacccctacatgcccaacggcagcgtcgcctcccgccttcgagggaagccgccgctggactggcagacgaggaagcggatcgcggtggggacggcgaggggattgctgtacctgcacgagcagtgcgacccaaagatcatccaccgcgacgtgaaggccgcgaacgtgctgctggacgagtgccacgaggccgtcgtcggcgacttcgggctcgccaagctgctcgaccacggcgactcccacgtcaccacggcggtgcgcggcacggtggggcacatcgcgccggagtacctctccacggggcagtcgtcggagaagaccgacgtgttcggcttcggcatcctgctgctcgagctcgtcaccggccagcgcgcgctcgaggtcggcaagggctccggcgtcatccagcaccagaagggcgtcatgctcgattgggtgaggaaggtgcaccaagagaagctgcatgacttgctagtggaccaagatttggggcctcactacgacaggatagaggtggcggagatggtgcaggtggcgctgctctgcacccagttccagccgtctcaccggccgaggatgtcggaggtggtccggatgctggagggagacgggctcgccgagaaatgggaggccaaccaccggccggcggcgatctccaacggctccgtcttcttcaacgacttccacgacaacgacagcagccttagcagcgacgaggtgcggtccatcgacatggtagaggagatggagctgtcagggccaagg

SEQ ID NO: 55470 - DNA, 676 bp, Oryza sativa
  unsure (1)..(676): unsure at all n locations
  Clone ID: PAT_MRT4530_57475C.1
cgtcgtgggcaatccaatgatatgcgggagcatcagcggcagccatgcggggaacgcgaacgcagcggagtgcgccaccgtggtcgccccggtcaccgtgccattcccgctggactccactccgagcagcagcagcagggcggcagcggcagcggtggggaggtcaaagggtggaggaggcgccgcgcggttgccgatcggagtagggacaagccttggcgcctccgcgcttgtgctcctcgccgtctcctgctttctctggaggcgcaggcgccggcaccgctgcctcctctcgggcccctcctccgtcctcggcatcctcgagaaggggagagacgtggaggatgggggaggaggggaggtgatggcgaggctggggaacgtgaggcagttcgggctgagggagctgcacgcggcgacggacgggttcagcgcgaggaacatactggggaaaggagggttcggggacgtgtaccgggggaggctctccgacggcacggtcgtggcggtgaagcggctcaaggacccgaccgcgtccggggaggcgcagttccggacggaggtggagatgatcagcctcgccgtgcaccgncaccttctccgcctcgttggcttctgcgccgcgggcttccgcgagcgcctcctntctacccctacatgcccaacggcagcgtag

SEQ ID NO: 55471 - DNA, 2328 bp, Oryza sativa
  Clone ID: PAT_MRT4530_57476C.1
atggatgctcttacaaacagcgtccagatctggaagctctttcaaacagcgtccatcttcctggtgcagccagaccctcaagacgctaccgatacgctaagagaagtatcgaaacaaaagttgttcgacctagctagggttagggatcgccggcatcgtcgtatgcgcctgttcgccttcgatccgtacgcttcaccctgcaaaccacgccgtactgtcgttgtcgacgccggcgccttggatttgttcattactcagcgccatcaatccagccacggcgtcttcagcggcaagttcgttggctgctcgccggccggcaataggcattcggtaagggatggctcaggtgtttctttggagccgggtcattcggaaagggatggctcaggtgtttctttggagccagataccattcattctgcaggacatgtcgtatccactttaacccatgacctgcattcaacagcattgccgttgtctccacaaaccaaccaaggtaacatggaatacgaaacaacgacaactataggtgatgccaatattgctgaagacacatatgtaggtgaggagacagatcttgcagagaatggacaagatagtggtaacgagcatgattctgatgatgcccttaacaatagttcagatgatgatatttcagaaccacgtgttactcattctgtcaatgcctttcctttgatgcgtgcatctggacaagatgctataaaagcattcagtgatatatctgtactaaggaagacaacagcagatgagaatttctttggatgcaagaatcaatttgacaatccactagcagaagcaaagacttttgattcaaaagagcatctacagattgccataggtgagtttcatatcaataaaaattcagaaattaaatatagcacaagtagtcagtctaagcttatagctcagtgcacggatactagttgcatgtggaggctgtatgcaacaccgataggaataggctcatgttggatgataaggaaatgtccgtatgctcacacttgtagagcaccggctgatagatttgatcatgctcagttatcgtctgctatgattgctaatgtgatacgtgatgcattaagggatgacttggaattaagtataaaaaatgtgagatcactagtccagcagagatatagaaatgtgaagccatcttacaggagatacaagggtagattgttgattgcttgtggatatgatgctaacaatcagctactacctcttgcatttgctattgtagagaaggaagatagtacaaactgggggtggtttatgagatggctacggaaggagcaacctcacattggatggaatgagggtgccggtgaatgcgtgcaccgtctttgctcacagcatgtagctgagaatctatggaaagcttgtcgtaatgacatggtgctcaagacatttaagtgggcagtgaagaaaaagaaaccccgaaaatttgaagaaggaatgtcatcgattgcaaatatttgtcctgaggcaataacatatcttgaaaaagttgggaagtatttgcaagaagataaagatgagcaagaaaagcctgagaaggtatttcaatgtaaggatgggggatatcgttggggaatcatgacaagcaatggatccgagtccttgaacaacgtttttaagttttctcgaaggttaccagtggcagccattgtggaggaaacattttcaaagtgcttagaatggtttgttgaacgaagacggatcgctctcaacttagtgcacagtggtaagctttggtctcaacgggttgaaaagttattggttaagcgaggagacaaggctagacgtatgagtgtaatctcatatggagaagaagttggaatatacgaggtgaaggttgacaacgaattagtcccaatgcaacaaggaaaccatgtgttttacacacgcagagacttcaagtacaaggtagttttgcaacccaacatcccaccatcctgtgattgtttgaagccaaatctaaccggtgttccatgtgctcatgtattggcggtttgcaagcacagaaatcttagtgaaaatgaattgatcgttccgttctactcttctcaatcacttgcgaacacctgggtggggcaatttcatccttatggaaaccaaactgaatggccaccttttactggtccaataattgttcctgatcgtagactgataaatcttggccgtcgtcagcataacaggattccaatgtacatggatgaaatgcaaggaaggagacttagacaccaggcacgccgttccacaagagatagcgaccatagtgaattaggtagaaaccaatttgagtaa

SEQ ID NO: 55472 - DNA, 1313 bp, Oryza sativa
  Clone ID: PAT_MRT4530_57477C.1
tgcaggaatcggcacgaggctcacacttcgcccgaagcaaacgagaacaagacgaccgcctctatccaatccaatatcccagtccaatcgaaagatttgcgttttgatcgtggtgccgtcaaccgaaggatttgcaagatggcagaagctgcaatcacaaggtactggtgccatgaatgcgagcaggccattgaggaggccatggtggatgagatcaagtgcccatcctgtggtggcgggttcgttgaagagatgaccgatgaggagattgagagactgaccaacaggcagccagagccgggtttctcgcaatggaaccctattgagcatccaggagaaacgatggacagcgacgatgaagataatgatttaggtcgtgagtttgagggttttatcaggaggcatcgacgggcatcaactctacgacgcgtgcttgacagcatccatgatgaccttgcagatgaccaagaaagggacagttccattctgatcaacgccttcaaccaagccctcgctctgcaaggctcagtgcttgatcctgatgagggccaaggtgaccaaggcggttcaacaaatgatgatggcttactggaggagtatgtcctcggagcaggtctgagcctgctgcttcaacatttggctgagagcgacccaagtcggaatggtacccctcctgcaaagaaagaggcggttgaagcgctgcccactgtgaaaatcgaagaggttgtcagctgttcagtctgccttgatgatcttgaggtggggtcccaggctaaacaaatgccatgtgaacataagtttcattcttcttgtatcctgccatggcttgaattacatagttcctgcccggtttgccggtttgagctgccttctgaggagacaaaagacttgaacgagcctagcaacattggtagagtggaggacagccatgaggaagtcagagctgatggccctggaaacgtcagcgagagcagtaacagaccctgggctattgttccttggttgaatgagctattctcaactcgtgaggcacagaatgctggaggtgtttctacggatcaacaatcaccgcacacttctggaaccaacccaaatgcagggcacagttgatttctgctgctgttgcgatttgtgaataatgatagtacatctgagaatagcgaagtgacccagattggtgaactgttgttttccatacctatcatctcccttggatggatcacagcatagaaagcttgccaggcattgtcatatcatctgtgctcatttgctttgcttcagtttactgcagctaaagtcggttctgcatgttg

SEQ ID NO: 55473 - DNA, 2472 bp, Oryza sativa
  unsure (1)..(2472): unsure at all n locations
  Clone ID: PAT_MRT4530_57478C.1
ggccctttcaagcatggcaagacgaataagagacccttttccttaattttgtttgatcattccctttcagctttgattttcctggtatgacatcacgcattgtccagattatttgttgtctgaggagcttatctcgattggggcctagaataactagaaagtctagggcagaagccggtctccacgatggaggacggcatggatttcagccctcataaaaatagcacagaacagaatcgaaccagctttgaagaagatgatcaattcagcattcgatcagcaccctccaaaccatctccagacaagaaatcgaagcccaagaacaagccgaatcatcactccgacaagacggcgaacccgccgccgcagaggcccgagacgacggcggcgctggtgacgacgaccgcagcagcagcaacagcaggaacaaaccgtggcgaggccgtcagcaacggcagcctggacagcatcagcagcggcagcacacggagcaacagcctggagagcagcagcaccggcgccgcggcggcgccaacggtgctgacgacatcggcgtcgacggcgtcggtgtcggcgtcggggcagaacgtgaagcggcacaccggcggggacagccggtgggaggcggtccaggcggcgacggcgcgcgacgcgccggcgccgctgagcctggcgcacttccggctgctgaagcggctggggtacggcgacatcgggagcgtgtacctggtggagctccgcggcacgtcggccttcttcgccatgaaggtgatggacaaggcgtcgatcgcgagccggaacaagatggcgcgcgcggagacggagcgcgagatcctgggcctcctcgaccaccccttcctccccacgctctacacccacttcgagaccgacaagttctactgcctcgtcatggagtactgctccggcggcaacctccattccctccggcagaagcagccctccaagcacttctccgagcccgccgccaggttttacgtggcagaggtgctactggcgctggagtacctgcacatgctggggatcgtgtacagggacctcaagccggagaacgtcctggtgagggacgacggccacatcatgctctccgacttcgacctctccctccgctgcaccgtctgccccaccctcgtcaagtcctcctccgtccacgccaccggcagcggcggcggcataggcagcagaggagacgccatcgacggcggcgagagcatgccggcgaaccagggctgcatccagccctcctccttcttcccgcgcatcctgccgcggcgcagccgcaaggcgtccaagagcgacatgggcctgctgctcaacggcgcggcggcggtggagttcaacgcggagccgacggaggcgcggtccatgtcgttcgtgggcacgcacgagtacctggccccggagatcatccgcggcgagggccacggcagcgccgtcgactggtggacgctgggaatcttcctctacgagctcatccacggcgccaccccgttcaagggcgccggcaaccgcgccacgctctgcaacgtcatcgagcagccgctccgcttcccctccgacggcggcgccagcgccgtcgcgcgtgacctcatccgcggcctgctcgtcaaggagccccacaagcggatcgccttcaccaggggcgccaccgagatcaagcagcaccccttcttcgacggcgtcaactgggcgctcgtcaggagcctcacgccgccgtcggtgccggagccggtcgacttccggcagtacgccgccgccgcgtccgccaccactcccaaggacaagaagccgccggagaacgccgccgccgccgccgcccccgccgcggcggatggtggcggcgcggccaactcgagcaccggcgagtcctacactgactttgagtatttttaattagtactatatatttattcctgacaatattgttgtgcacaccagattgttttgatcgatggttgtgaagtatgagaactcgattcgtgataattaagttgtactaactcattcttggactatggtagattcattgtaaacctaaaattcatatgaaaatgtagcgatttcttgtgctgtacttgcctagtgacaagagaagctgttggttgcaaaactgctggggctggtcagtttggtgttgtgattcgatgtgcttgacctggtggtgtttgtcgcaccacggcagcaaaattatcggatctgaaattctgaattggccagaattaggttgatatatgtttgcatgtttgaattcttctccccctgtgctgtttctgtagtgtagtgctatctaacagtctggtttgaaacatgggctaacaattgcgttccaggaaggcctcaacgatggatatttctggaactagtagcgtataagctcagtctgtttaatagtcgcagatcaaagttcaatgtgcattctttctccgcccccattaaaanaaaaaaaaaaaaaaa

SEQ ID NO: 55474 - DNA, 840 bp, Oryza sativa
  Clone ID: PAT_MRT4530_57479C.1
atggagacccttagcctggtgagcggcgtgaccaccatcgtcaagctggcgaacgacatcgacggcgcggtcaaggcggcgagccggagcaagaagagctgcgagaagctcgccgagcgcgtggccgacatcggcgacctcctcaagggggtagacacctcctcgccgtcgacggcggcggtggccacgaggaggctggtgggcaggctggagagggcgctccgccgcgcgctgctgctcgtcacctcctgccagtccaccagccgcatctacagcctcgtcgccggcgggtggcaagccgagcagttcgacaaggtgaactcagagatcgaccggtgtctcctcgacctcagcctctccagcctcgccctcgtctccaccattgatcacaagctcaacgccgccgccgccgccggtgaacggaacaccgtcgaggtcgtcgcgccgcccccgccggtgaagtgcagtcacgatcatgatcaggatgacggcgaggacaagatggcggccggcggcgcggctgagaagaatggcgagcttatctgcttcggcggcgagcaagacggcaaggctgagacggacgccggcgaggtcaccaccaccaccaccaccatcggtgtgccggcggccacggcggcatacatgcactaccatctgtcgcggctgccgccgccgcggtgttacggataccacttgcattattgccactgcacccatggccactgtcactgcgccggcggccgccactactcgccgtcgtactactccgacgacagcgctgacgtcaggctccggcatatgttcagcgatgaaaatcccaacgcttgctgcatcatgtga

SEQ ID NO: 55475 - DNA, 108 bp, Oryza sativa
  Clone ID: PAT_MRT4530_5747C.1
atggatgcatcattggaggtttgtgggcatagtgttcagtatgctggagttggctactggaagaatcatgatgctgatggtgtgtacagggccccaacccaggcatga

SEQ ID NO: 55476 - DNA, 1596 bp, Oryza sativa
  Clone ID: PAT_MRT4530_57480C.1
ttagtaatatcttcccgaaatctcccgcgcaattcgcctcccggtctcggtcacctcgccgtcctggctcagcaccccggccgccttgagcgtcctcacggcccaatgaatcaacttacgccttatgtggcaccatttatggacgaccgctttcaggcctcgaaccaggcgcgccgccgccgagccgccgccgccgatcagatgtacgggggcgttgtccgttccgcagtagccggagtcgacgatgtacttgattccatcgacgaacaccgagcagacggcgacgtcggtggctagcactaccttccgcagcccgttgagtgcgtgctcggctgcctcgacgtccgtgcagcccgggaggaagaccagcacgtcgcccggcggctccgtcgcgtggatgcggcacaccgcgtcgacggccgcgccgaggtagtctgtcaccggctccgggaggtaatgttggtcgattagaccggagtaggtacggagccagagctccttgccgtccatgccggagccggagaagaagccgtgtacaacgcccttgcagagggtgctgtagtggttcaggcagacgacgacccgaaggtccaggcggcgcgccgccgcggccttgacgcagctgagcacgacgccggtgagcgccatcccgtcgtgcgcgtcgtccaccacgacggcaccgtagcgggtgaggatcgggtcggcggcgagctcgcggagaagcgcgccgtgcgaggtgtacttgacgaccgtgtcggcgtccaaggagcggtcgtcgagggggacggagtaccccacctggcgtccgagactctgagctcggcgcgcatgtcggccgcggcgcgggtcgccgcgagcacggcggcgaggcgaactgtgaaagagaagctgatggccgctgaaactgaggatgtgagtgctgctgacgagggtctacctgctgtcacagctgtgaaagagaagctgatggccgctaaaactgaggatgcgaatgctgctgacaagggtctgcctgctgtcacagctgtgaaagagaagctgatggccgctgaaactgaggatgcgaatgctgctgacgagggtctgtctgctgtcacagctgtgaaagagaagctgatggctgctgaaactgaggatgcaagtgctgctgaggagggtatgcctgctgtcacaactgagaaaggggagctgactactgtaagtgagaaagagagacttattgctggaattacagaggaggaggaggggatgacttatgtggagggacagattaaaaatgtgaaagatatgcttgagactggatatctcgaaggagtagaaattgcctataagaaaaagagagatggcccggtgttgctcactggtcaaattcataaaatggcttattattgttctcagaactgtgagttctatcagaaggtacaagagttactgcattggaagaaagaatctgaaatcaaaatgaagcctccaaagcagaagcaggatgggtttgttgcttatgtaataggacagctggagagtgcattttcttcaggatcagaacaggcatctcgtccaggacaggaatctttgcttcatcagcttgaagtttag

SEQ ID NO: 55477 - DNA, 257 bp, Oryza sativa
  Clone ID: PAT_MRT4530_57481C.1
tcgtccacgcgtacgaccacgcgtacgttcacgcgttcgtccacgcgtgcgtacaaattcagactacagatgatctgcatacatatagacatggcttccaacagggtacagacatcgtgggtgattctcattatcgactacgtgctggccgcgtacggataccatggcggaccaccacaaacacctgttggatgtgcagactcgacgagcgttgaacgccaggagggtggtacccgatgtactcgatgccactctgc

SEQ ID NO: 55478 - DNA, 337 bp, Oryza sativa
  Clone ID: PAT_MRT4530_57482C.1
aatccgagaagaaagatggcggcatatttatagcaattccgaaaataaaaaggttcagtttttagtacaatgaaaaatcctcttgagacagacaggccagcattttttttgttgaattgtcgtgtatttatttggtttgcttcatcttaacctgaatttattggagtccaatccaagtgcttttatttgtgggcgtcgtcgtcctcctcggcgggagtccaaccgtgccggcgcacggcgtcgcggacgaggtcgctgtcgtggtagccgtcgcggaagttctcgatgtcgtcgaccatgtcggagagggatgacacaaagatctccttttttcact

SEQ ID NO: 55479 - DNA, 2404 bp, Oryza sativa
  unsure (1)..(2404): unsure at all n locations
  Clone ID: PAT_MRT4530_57483C.1
taccgctttatatgcgcctcttcttcttcccctcgccgccgccgatccctaaatcccctccccccaacccgctgcgatgtcctccccgccgccggccgccgccgcctccccctcctccgagctaaccaagtccaagaagaagaagatcaagtccaaggacgccgccaccgccgccgccgtcgacccgccgtccctcgccgaggcggaggcgaagaccgacggctacctcatcaagccgcagtcgctggtcccctccctcgacacctcgacatggccgctcctcctcaagaactacgaccgcctcaacgtccgcaccggccactacaccccgctcccctccggccactcgccgctcaagcgccccatcgccgagtacctccgctacggcgtcatcaacctcgacaagccctccaacccctcctcgcacgaggtcgtcgcctggatcaagcgcctcctccgcgtcgacaagaccggccacagcggcacgctcgaccccaaggtcaccggcaacctcatcgtctgcgtcgaccgcgccacccgcctcgtcaagtcgcagcagggcgccggcaaggagtacgtctgcgtcgcgcgcttccacgccgcagtccccgacaccgcccgcgtcgcccgcgcgctcgaggctctcaccggcgccgtgttccagcggcccccgctcatctccgccgtcaagcgccagctcagggtgaggaccatctacgagagcaagctgctcgagcacgacgccgaccggcacctcgccgtgttctggatctcctgcgaggccgggacctatgtcaggacgctctgcgtccaccttggcctgctgctcggcgtcggcgcgcatatgcaggagctgcgccgcgtgcgatcggggatcctcggggagcaggataacatggtcacgatgcacgatgtcatggacgcgaggtgggcgatggacaactacaacgatgagacttacttgcggcgcatcgtgatgcctctcgaggtattgcttactagctacaagaggcttgttgttaaggactctgctgtcaatgctatatgctatggtgctaagcttatgatacccgggttgctccggtttgaaaatgatatcgatgtcggggaggaggtggttctcatgaccactaaaggagaggccattgctattggtattgccgagatgaccaccgctgttatggcgacttgtgaccatggtgcagtcgcaaagattaagagggtggtgatggatagagacacgtatccgaggaagtgggggcttggtccggttgcgctcaagaagaaaaagatggtcgcagagggtttactggataagcatgggaagccaaatgagaagaccccagctgagtggatccggaatgtggcacttcctactggtggtgatgcgatgatcgctagcattgcagctgctcctgaagaggccaaggtgaaggcggaacaggatgtggttgcgactgaagaggtcaaggagaagaaaaagaagaagaagcacaaggatgaggaggatgctgccgacgaaggccgcaagaggaagattgaggatgatgacgcgtctgcttctgtgcctgtaaagaagatcaaggttgaagagagtgctgaggaggtagaaggggagaagagtgagaagaagaagaagaagaagaaagacaagggtgaacaaggatcaggtgatgcagaggtgaaggaagagaaggctgatatatctgatggggagaaggttggcagtgagaagaaaaagaaaaagaagaagagcaaggaaggaggtgatgttgtggatccagagagcgcagccaatggagatggcgtggaagctgagaaaagcgaaaagaaaaaggagaagaaaaagaagaagagtcgagatacagaggaggcataataggtagaattatagtacgcattggctgaatgtatccttttgctgcggttgtagggagtttgagatgcctatctttccttgctgtgatcccttttcaaccattaatggtttcaaaggcctaatgcccatccttgaattactaccattttactgctgtgaagtactgtggtaagtagcgatatttccattgaacttgttgaacaatgagccatgtattgctgttcctgttttcagttaatgcaatgagttttgcttaaaaaaaaaaaaaaaaaaaactcgcgacgggggcccccgcccccgtgccgccccctgctgcctcgtattanaattnactggccgtcgttttanaacgtcgtgactgggaaaaccctggngttacccaacttantcgncttgnagcanatccccctttcgccagntggcggaatagcganaggcccgaaccgttnggccttccnaanagttgngcgcctgaattggcgnatnggaaattgtaagngntaaatattttggtnaaattgtttn

SEQ ID NO: 55480 - DNA, 867 bp, Oryza sativa
  Clone ID: PAT_MRT4530_57484C.1
atggccgtagcagatagagtttggcgcatgatcgaagagagtggatctgaacgccattcccgttgccagaggaaggtggaactgaattcgcgaactgatggttacagtcgcgaggtgtgcacgcacgcgggatcacccagtacgagattgcgcacgcggggtcaccggccgaaagtcacgcacgccagcaaatcagtcgccgccccttttccttcgcacgcctccctccgcaaccttcatccgctcatcgcggcgtacccgtcccgtccgccgcgagttcgcttagatcggcgctgggtcgtcgcgtggatcaagcgcctcctccgcgtcaacaagaccgggcacagcggcacgctcgatcccaaggtcaccggcaacctcatcgtctgcgtcgaccgcgccacccgcctcgtcaagtcgcagcagggcgccggcaaggagtacgtctgcgtcgcgcgcttccacgccgccgacaccgcccgcgcgctcgaggcgctcacaggcgccatgttccagcgcctcccgctcatctccgccgtgaagcggcagctcagggtgaggactatctatgagagcaagctgctcgagcacgatgccgagcgacaccttgccgtgttctggatctcctgcgaggccgggacgtatgtcaggacgctctgtgtccaccttggcctgttgctcggtgtcggcgcgcatatgcaggagctgcaccgcgtgcgatcagggatccacggggagcaggataacatggtcacaatgcacgatgtcatggatgcgaggcaggagtttacttctgagatccctgatgctctgaataaacttaacacatactttgccttaaacccaaggcaaacaattggtccatag

SEQ ID NO: 55481 - DNA, 1121 bp, Oryza sativa
  Clone ID: PAT_MRT4530_57485C.1
atgtttcagtcattttctgtgtctcccatcctctcgctgaagctggccttcgccgtcgccttcgccgtctccttctccgtctcctgctgcgccgcgcctccctcgccgcgggccgtagccgccgacctcctcgccgtgctcgccggcccgggcgccgcggcgcgcgtgccgccggccgcggagtcggcgcgcctgcgcgcctgcctccggttcctctccccggtcctccccctccccgccgccgcagcgatctccgaggggagggccgccaggaaggttcttgtggagcgcggcggcgcggacgaggcggatgggatggtgatgtggccgccggcgccggtcatggagctcgcgcgcctcgccgtcgactccggcggcgaccccggtgccatccaccgcgcgctcgaccccaccatgctcccggtgcctgatgttcagagggcgaagaggaacaaatgccaactcacaagaacaccatatgggaggcgtttcgctaacaaggacatcaattcatacctggcgtttttgttcgaattgattgcggcacgaggaccatcagtggggttaaatgtatcacttagtcgatacgatttcttccacggacacctcttccttgcttctgggacaggaaggcttggaattctattccatgctaaagaatatccagcatttgataaggaattgttcccttacagtttgggattttgtcaggcaggatctaatgtagtgtacgatgattctatgaatttacgcaacatcctttggttagcaccattgccatctaatgaaacaaaagcttggctatcaccaggtgttttagttgtcctggatgcacatcctgatgggattatctatcaggatatgatacgtgattatgttcgggatgtacggacaatatatgaagatgattttggagaggtttccgttgatgtcaactatctgaatgttgccaactccgctcctgcgaatagagttttcatttgctgaaatttaaccagacaattagctatcttccccgggtgtgattttatcattgtgggaagtagacaccatgtatcattcttcaagtcatatagccaggaaagcaatggtttgcttagcaaaaaaaaaaaaaaaaaaaa

SEQ ID NO: 55482 - DNA, 426 bp, Oryza sativa
  Clone ID: PAT_MRT4530_57486C.1
cttcaaagttgggcttgttatctccccatgggtataaatatgtacacccaggtcattgtaaattatctccacgatcaataatactactctaagcgcatcgccaccctctttaccgaggtttttacttatcctccagtggaatttggcacctgacacggggctgcattagttcagttcgatctctagcgaagggataagtccaacgttccaccggcctaggcaattgtctcgtctacgtcggcatcgttcaaggctgcatcagtacattcgacctcttgaattgctctagtttggatgatatatttgcctacctatttatcagatgtctctgttaatctagtcttagcatatcaatttagctctattggctgcttctcgttttagggtttctgccggcatcggctaaattgtgttgctagattagat

SEQ ID NO: 55483 - DNA, 411 bp, Oryza sativa
  Clone ID: PAT_MRT4530_57487C.1
gggggaaagcaaaactaaccgcggggaccttaactcagaaggggctgcgctcaacattcgggccaaacaaaccatgaaacaaagcgaaggccccccgaggccaaaaaattggcgttcacacgggagcccgccgctgaaaaaaggacccaaaacccactggaaatgggacaagctccccaaattttccttggattgggaagccaaacaaccaaatcaccccggggggcaaagagaacaacctgaggagcagcgaatccctggggaaccctttcctcccttgggggaaaaaacaccggagtctttccttgacaaaaaacctcttgggggctacccaacccctttcaaaatacccctaacatggggacgtgagcagggccactatagagcacgagggaatggggcatgtaagga

SEQ ID NO: 55484 - DNA, 582 bp, Oryza sativa
  Clone ID: PAT_MRT4530_57488C.1
atggacacccgagtctgcggcgacgaccaagcggccgaagcggcgccggtgcgcggcggcggcgaggacgcagtcgtcgtcgtcgtctccggcgagggggcggcgtcggaagctggtgctgcctctactacggccgtcgccggcgatggcgtcgtcgaagcttctgcctctgtagacctcaccggcgagaggggacgacgccgcgatgatgaagcgcccaccacggcggcggcggtggcggaggaggaagcttctgccccgccggccgtcgtcgtcgccggcgccggcgacggcgacgacgacgacgaagacgggtacgtgacaccgacgtcgccgcgccaacggctgcagccgccgacggtgtgcccgccggcgccgaaggcggcgcgttcggcgccaacgcggctgcctgcgaggaggtttgagggagctctcgtgatggcggcgtcggcgtcgccgccggggcggaagagggttcaggcgaaccccgactccgagtccgacgaggtcgtcgtcgcgttcattcgcagcctgcggcagcggctgcttccaccggaggacgagaagaagaaccccatgtag

SEQ ID NO: 55485 - DNA, 1182 bp, Oryza sativa
  Clone ID: PAT_MRT4530_57489C.1
gccctccctctcggccgatcgcacacccatccgccggcgtcctcagctcgatctgctgccgaaattcggcgcggccgccgcagcatacacactctcctccccttcttgactcccaactcgccgtctcctccctcctcgctgctcttgcccccgccccacgcgcgcggtccactccaccatcccttcctcgtctcctccgctcctcgcgcgtcaagacgagccaccgctgccgatctccatctggcgagcagagcagaggaggggatcttggtgtaagtttgtgaagcatcagaggacagttgcatcaataaagttgtctcacgatggcctatgatggagatgaggaacaaagccaggattatctattcaagattgttctacttggtgactcttctgtcggtaaatcaaatttgctggcaagatttgcaaggaacgagttctatccaaactctaaatctactattggagtggagttccagacacaaaagttggtaattgatggcaaggaaatcaaagctcagatatgggacactgctggacaagagcgcttcagagcagtcacatctgcctactatagaggagctgttggagccctacttgtttatgatattagcaggcgtcagacttttgatagtgttggtcgatggctgaatgaactgcacactcattccgatatgaatgtcgtcacaattcttgttggcaacaagaccgatctcaagcatgcgcgtgaggtgagcaccgcagaaggcaaagctctggctgagtcacagggcctcttcttcatggagacctcagccttggactcatcaaatgtcgcggaagctttccaaactgtagtgaaagagatatacggcatactaagcaggaagagccctggtgtaatgccatgggattgggagacacatctgtccatgtactgcttcaggtttggtttagtgaaacaaacagtggttcccaccttcttctctagagctcaataggctgagtgaggttggttgtatgaaaaaggcgtgtgtgcttgctttccatcagaggaaaaatctcaatgtatagttcgattgatcccctttctgaggtattgggtatacgtgattgtgtaaaggaaaaagtgtgaccaactgggctgttgtgtcattctctctacatcattctagccttagattaaaaaaaaaaaaaaaaaaa

SEQ ID NO: 55486 - DNA, 724 bp, Oryza sativa
  Clone ID: PAT_MRT4530_5748C.1
taccagcgtaccccaataccctctatatccggtctacgggtatcccccatcgacagtggcgtgtcaggtaggggaacttggtgctcaaggttctactaatatgtcatcaagcttcgttgacaacagcgtcaaccctggcatcaaccaaggtgtttctacttcgacaatactgatgtggactcaaatcgtcttcctggtttacaccacggtgccaatcttgactggtccatcaatgaccgaaagcgagaacgctgtggttacaaccctggacggctccatgtcgaaggatcctcccgcaaaagtggagaacagaacatcgacgacatccgagcccgagaaggatcctagtgctgctaaatcttgtccttccgacgagaatcacgagccgacaaggacaacttccgaggcgacaaggtcctggtgtcctatccacaaaaccaggaaacataccttgcaagcttgttgggaattcaacgtacttctccaacccgtgatgtttattgtcctattcacaagacgaagagtcatgacctgtcaagctgcaaggttcttctcagcgccctgaagacgtcacctcctaaggtccagtagtcacaaatctctcttagagatgcgaacaagcaacgaggagcgatggttatctcagactgattcgttggggtaatcaacatcgatccccacgagccggtgtcacgcccaccaaaacttttcgttgagatcttga

SEQ ID NO: 55487 - DNA, 835 bp, Oryza sativa
  Clone ID: PAT_MRT4530_57490C.1
gccagatacaggaggtctcgtgttattcaatctctctcagcgttcaaaccaagccaaacctgtccttcacattggcatgcatatgatagcaagcagggcagccattaggcattagcaaggcgattcagtaattaccaacaacactgcactacatacacatctagtactactacctttcaggtgacagatttgggggcaggtgatagttacgaacggtgcgtgccatggacagagatagcaatccaatcctatatgagtatatagcagcagcagcagcaacaggaacatgccctcgaacatctcacggtatgactagaagaaggtcccttctggaggctgaaccagcttgcggctgtgcggcgcggccatctccttcttcagctgcgtcaggatattctccatggtgtactccctctgccagtttgccagcatatggaacttcttgctttcgaccagtccggtgtcagggttgacgcagggcatgttgatcctggagtggaagcgcacggtgggcggcttgtcggggtagtccttgtcgcagaagagcttcagctggtagatgcgcccctcgtgcacagagttgagtggtccaatgattgtgccggtccaggagcgcatgaagatgtcgtcgccgtcgtcgtccatgccgtagctgacggtgccgtcgccgatgcccttctcgccacgctccagctcctccagcaaccggaagttgcgtggcactactacgacgctggaggacgcgccgccgatcgtcatggccgccgattgatatgcttccgattaatccctcctccactccgcgtgtggagagcagagacgggccccctgcttt

SEQ ID NO: 55488 - DNA, 365 bp, Oryza sativa
  Clone ID: PAT_MRT4530_57491C.1
aatctatgaataaaatttttatataggtgttcctagtgatctaaaagtaaatgctgaaaaacaaattttaatgagaaaaccacaaaatcaggtccaaatctaagattaaaaatttaaattttgactgctaagcataaataaaagcgaaaagatgttacacgaacctattcagaaaaactacctaacggcatcccgtggagacgggatagtagtactgccttatctcctcttcccctctctctgtgtctcttcctctccactcgctctctctctgtctcttcccctccactcgatctctctctctgtgactaccacccatgagcatggaggcggcgatgacgatgacgacgacgacgacggtgccg

SEQ ID NO: 55489 - DNA, 340 bp, Oryza sativa
  Clone ID: PAT_MRT4530_57492C.1
gtcttcttaagcgcgaaaccctagcaatggcggcagcggctgcagaagagtgcggcggcggaggtggctgcggtgtacaacccgagctacgtgccggactctgtgaagacgttggtggagcacatgtacaggcacgttagtgacaagaacgtgtacgagatccaccagatgtacgaggtgcggcttccagcggctctacgaccgtcttttacgcgacgcgccgtggacgagagacgaagtcgtcttgcctactgggaccgataccacgtattcctcctcctctaccgggagctgtggtaccggcatgcctacgcgcaggccttctcgtggtcgaatgggt

SEQ ID NO: 55490 - DNA, 375 bp, Oryza sativa
  unsure (1)..(375): unsure at all n locations
  Clone ID: PAT_MRT4530_57493C.1
ggttgtgactgcagncctcaggaaagaagnccatttcaatgtttgtgtttggaagggagggcgagcattaggagcattaggtacctggctaggttagctctgttctgtagatgtgtaatgtgttgtactcataaaaaaactgcatggaagccatggaatgtgacctacctgtatggagcttncccttcagtttgctattgtgtcgaccatgttttgggcttgtgatgtgtttatgttttggaagaagtgttttttaggtcgtcagagtttaggcctnntaattangccttgganttttcgnatntctcatggattaagtatggattgattgttgatactcntaaaaaaaananaaaaaaaaaaaaaaaaaaaaaa

SEQ ID NO: 55491 - DNA, 2850 bp, Oryza sativa
  Clone ID: PAT_MRT4530_57494C.1
atgaccccatggaatacggactccgactccgactccgacacgaggaagaagcccatatggcgcacctatatatttgaatttctgtcgtcccacctcctccaacctctcgcccctgcatccacctgcgcgcaggtgctcgatcaacaactcgcgccgcgccatggatccaggcatccagctccgccgtccttgcgtgacctcaacgccgatccccccgccgaagacgacgaccacatcgtccatctccacggcgagcctctgcctcagccaccctacttcccagaaccgaagccgccgccgacctcgacggtggtcgaggccgttgccgttgccgtcgtcgtcgccgccgccgccgcctcgccggccacatgccactacatctggagattaattcaagcaatcaagcccctgctcacaatagggcaacgcaacaataggcaagatatgttcaggttacttcattacttggctgattgcccgattcttcgtattatattggttaaatggttagggtttggtcatttggtgaactttattatggagaattaccttaaaagaaaagtgcctgatagcagcaacaatgcaaggacttcctgtccagaagtaaatgatctcaattggaaagaggagatcaaatatgatcctggattgaggaaaccgattgatgcttatcatcctaacctgagagataggattcaaagtgaagatgctaaaaaggcttattttactcgtttaaatggttcaattagtgttgctagaaggttattgaagcaaggattacctttccgaggctatgatgagtccaaggattcctacaacaaagggaacttcttggagtttcatgatatgctattagagcatgatcatgctttagggaaggcagtgggtaaatatggagcagggaatagtcttatgacatcttctgatattcagaaggacattgttgagtgttttgcgaaggaaatattacattctatcatggaagaacttgggcatgatgtgttttgtttgctagttgatgagtctagagatgtgtcctacaaggaacaaatggcagtggtgttgagatatgttgataagtgtggatttgtgaaagagagatttattgaggttgttcatgtgaaggaaacaacttcttcctatctcaaggctgcgattgattctctatttgcaggctttaagctcagtttgaagcaagttagaggccaaggatatgacggtgctagcaatatgcgaggttgtgggatgcttcaaactggaactgggttaaatcaagagcaatgccttcaaagaccaggagatactcgttggagttctcactacaaaactctcaaaagtttgcttgacatgttcccaacaatagtcaaagtgctagaatttgtggaaaaagatgacaaagatagaacaaatagagatcaagcaaatggtcttctagtgtatttccaatcttttgagtttgtcttctatttgcatcttatgtcaactatattaattatcactaacaccctgtcattagcgttgcaaaggaaagatcaagatattgtgaatgctgttaagtgtgtcaaatcaactaggtgccatttggatgatttgagaagagatgggtgggaaaatttacttggtgatgtgtatgctttttgtgacaaatatgatatcatcaagcttgagttggctgtagcgtctcccaatccgaagaaacagaggcaaaagacaggaattacaaaccaacaccattatgaagtggattgttttaatgatgttattgattggctacttcaagagcttgatagtcgtttcaatgagacatcatctgaattgcttctttgctcagctgcctttagcccaagagaatcattccatgattttaatgttgagaacttgatgagactagcaaaactttatcctaatgattttaattctggggaattaagagatcttaggcatcatctttgtctctacaccgctgatgtgcgagaagatgatagattctccaacatacaaactattgcttcgccactggatccagctccgccgtccttgcgcgacctcaacgccgatccccccgccgaagacgacgaccacatcgtccatctccacggcgagcctctgcctcagccaccctacttcccagaaccgaacgccgccgccgacctcgacggtggtctggatggcgatgcagaggcatccttccctggatcgaaccccgaggccgacggccgcgaactcgacggtgatctggagcaagatcactcgttgttcatgttcttggaccccggcgaggtgcgatgccggaagcgcctccgtgcttccgaagaggacgacgtcgacgtcggcgacgctcgcggcgcgccggggcgatgctacgacgacgatgtcgcggaggacgggaggagcacgcagagtcgatactcatggcgaccgaggaatgcagatgatcagagctacacgcacgacgacgacacgccggcggcgcaagagatctccggagagcagattgctgcggatgacacgtactacgacagctactattacatggacggcgagtacggcggcgcatacgacgaggaggagcaccaacaagatgacatggcggcagcggacttccacgacggcaaccagctttcaccggagcatcagcgcgtgttgtaccgcttgttcggcgaggcagacggcagcacgcgccaggaagagcaagaagcggcggcgcagggctccggaggagagcacgtgccaccggaggaggactcgtacgaggccgccgccgtgctcgccggcgacgacgtagacgaggagcaactgcaacggcaagaacaggtggacatgactgacggcacggacgaaaccttctga

SEQ ID NO: 55492 - DNA, 2879 bp, Oryza sativa
  Clone ID: PAT_MRT4530_57495C.1
tttgtttttgaactatccaacaggaggagaccattttattgtgtaaatttggcgcctgcaagacaagtgacaatttaaactgtatgctatggcgtcagaagaaagaatcgggcaaaatcatacaactcccaccactccaaacaaaatgtgtttggcattggcatgtgtcccgcaatgcacaatgttacttcacaaaactttcagctatcgtttcgcaactctatcagaaaccaagccttgggttcttcagctatccacctttagggatccgattgttggtattagcttggttcaggtggaaccaatttgaggctgcgcatccactcgcagaaactatggtcatcaaagtggatgaagctgctcttcaacctagacctttgttcaggagtaagtgtccgtaactgaggaaatcttgactcctgctcataagtagggtccttgtgagctgggataaggcgtgagacaaaatatctagcctgagagctcccttctttgaatgaaagtatcctgggagccggaaaacggagctcgctgagttcttcagccagtgtacggcatgctgctaaagctgcagcactttgtccttcttgggctgctagttcagcacccaaccatatgaaaatatcagttccatggtccaataccaccgcagcattagattgcatggcaagatcatatgctggcagctcctcaaaggtaccaccttcgcggtgcattatacaacgaggtgctaacatacggaacgagaggtcaaatgaggcattcaagaacaaattcctaaggacagatcgctcatcttcatgtcctactatgctacctaagagtggtccccttctcaaatgaaacaaacacccaggtagtgatgccagctcttttggaaaccggtaaagctttgattttggaacttgagtaccaaatttgagagctaagtccttaactctttcatcgattgtgagcctcatgtcaatagcatctgaggcagttctggcacgcaagacagttctcttgccaatgatgaccgaagcaacatcatcctgcacacttgccagatatgcagataaaccatcaacagtttgcagcctcatagtgattactctggttatttctgtttgatacatattagagtaatggacagcaaactggaagtaaacaaaatcattcttgatatcaccctttgactccatagacacggaaaaactctgtgtttcctcgacactatgcatctggatacaaaatgaggtatcgtgcttgaatgtttcatgggaatcaggagatgcttcttcaccagggccaatgacttgagtaacaagcatgtcatcagaacatctaatctcaaataagccatgggaaccagctgctctagttgacgctctttgcaggttgaccccaaaggcctctccaaaatcatcatgaagtaaaagaacacctccagaacactttgctagtggctgcaatacaggaaccctcacaggacatgttccagcacaaaggatatcaacaacagtactgtgcctctgcgcttcatgaccaagacgctccatccacttcatagctgtcttctcgaggtaggcataatttgggtgttgaacagaatgaggcactgatcctggaccaaatgtgctagggccacccgcacaaaccaagatcctgtagttgcctccagatctcttgattattccacgggacacctccgctgctggcccttggataataccaagggcaacctctaccgctgcaccaatgcatcggtcccttgacacttccggtaaactcaattggtagggtctcaaagatgagaatattgtgtgtgcaacaggcagtgaagcatgtacaggagacaggtatatacctgttccatagattatagccttcaaagactcatgggtaggcgacttgtttccaggtagcacatccgctgacaccgctgccccctctgaaaaatcatacactgagacagtgcgcccataggaaatgatcccaattctagctgtaggagggagtgtatccacaaaagcatgcaatgaaccttgcagatgctgtagatgtgcctcatcaaggcactcatctatgaggataaaaatgggtccagacacccttgtgtcaggcaccgggacaaagcttggcctcctattccctgattgcacataatcgatggccgatgacgcaagctcaggccactggagcagatcatgcttgctggagacaacgaattccccttcgctgccattcatcttcttgcaaatcacgcactgccattgcccagagccaatcaacacgtcacagtaaagattaacataagccccacagttcagacatcgccgaggatcacgctccacagtctctggccctggcgccacttccctcccaggagacactagagctccgaaccctaagctaggagcattcagcagtttcttctgcttcagcaccttgtgtgcggagaagaggacgtagggggactcctcggggggcggaggcggaggaggcggcggggcggcggcggaggacgggaggtgggaggtgggcgtggcgacgccgttgaggaagtgcgggccggaggaggtcgggagcgagacggcggcggaggaggacgaggaggagtagcccccgccgcgggacgcgaagggcacgggctgcggcgacgccggggtggcgcggaagggcaccgcggcggggcgcagcggggaggagaagaccggcgggcccggcggcgtgctgaactgcgcctgcgccgcggcggagcccgtgcccgggctggggctgccccgcgacgagaatccgctcgtcggcggcggcggcggggtgaagaccgccgggaactggggagacgggtgcgccggctgcggctgcggctgcggcggcgtcgacgtctcctccat

SEQ ID NO: 55493 - DNA, 195 bp, Oryza sativa
  Clone ID: PAT_MRT4530_57496C.1
ccggccaagcctcccaacaaattcagaaatagaacgggtgggccgctagccggtgcccaataaacaaggggggccctgccaagggccccctggcctcgaaaacctcgggaccacccttaacagaacctttttatcccgggggggaaaggaacatggcaagggcatattttatcattttggccaatcaagccaaag

SEQ ID NO: 55494 - DNA, 1505 bp, Oryza sativa
  Clone ID: PAT_MRT4530_57497C.1
atgggggaggaggaggcggcggcggcggcggcgagggtggcggagcaggcgagggagctgcaggacgcggcggcgggcctcctgtcgaggtcgtcggcggaggaggaggcgctccgccgccgcgccgccgcgctcggcgccgagctcgccaggctccgcaaggccgccgcccacgccgacagcgacaaggttgaggaggacttggatcgagcgacgtgcctcataagcgatggagacattgcggcgctgctcccgagcaagacacatggtactttcctgaagatgttcctgggaccagtaaatctgcgggcaccgaggaaggaggtgcagctcaaggtgaaggaagagtataatagctacagggataggactgcattgctttttcttggtttcccaatgattctgttggtactccggtcatggttatggaatggatgcttcccagtattgccagttcagctataccaggcttggttgttgtttctgtatacaactttagctctgcgagagaacatattacgagttaatggaagtgatatccgtccttggtggatgtgccatcactattgtgccatgctgatgtctcttattagtctaacatgggagataaagggacaacctgattgttctcgaaaacatgatgttgcagaacagatatcaacgccaaagactatatactcggattgctttaggaaaggctagaagaatggacgttgtgtggggagagactgctggtgttgaaggtcaattgttgctactatgccctgtcctctttctgttgcagggttttgagggttacgttggatttttacttcttcgtactgctcatacaggcatcgtccctgagtggcaggttgtggtctgtggagtcctactgatcgcaatggcgataggtaattttgcaaatacagtggacacgctgatggccaagtccaggttcaaagcaaagaagagatccaggggcaaacgggatcctgacacatgcaactcaccgactggcctatcaccaacaaactcaactgccagagcttgatatggatccggggaaaaaaattctccattctatgaacatttcccatgttcaagcagggcttgttactaccattgtaaagcattagtttcttggccaccagctcctagtcctgactgtctctgtcaaagatcatactcatgtaatcagctgatgattaggttgctgatggtctcaggttgaggtaatcaagaataaactgctcatgttttgtgtattttttttcttttgttctgaacatcagccatcaggtggactagatgaacttaggactgtaacatgtagcaaaattttcccagtatagttattgtgagatttgcaatgtcagaaccaaacatgtgaagttgtgcattagcatgtggcctatcctgttctcttctcatgagattctttagctgtgactacagtctgtacaggtatgtgtgcctatttaatgggatcattggtcaatgtcaccccaaaaaaaaaaaaaaaa

SEQ ID NO: 55495 - DNA, 581 bp, Oryza sativa
  Clone ID: PAT_MRT4530_57498C.1
cccacgcgtccgatggaagtgatatccgtccttggtggatgtgccatcactattgtgccatgctgatgtctcttattagtctaacatgggagataaagggacaacccgatcgcgtccgcaaacgcgtgggcgtcgagctgttctgtgctgggccataatgcaaggtttcgccatgatgttgcagaacagatatcaacgccaaagactatatactcggattgctttaggaaaggctagaagaatggacgttgtgtggggagagactgctggtgttgaaggtcaattgttgctactatgccctgtcctctttctgttgcagggttttgagggttacgttggatttttacttcttcgtactgctcatacaggcatcgtccctgagtggcaggttgtggtctgtggagtcctactgatcgcaatggcgataggtaattttgcaaatacagtggacacgctgatggccaagtccaggttcaaagcaaagaagagatccaggggcaaacgggatcctgacacatgcaacttaccgactgtgctattaccaacaaacttaactgccagagcttgatatggatcccggg

SEQ ID NO: 55496 - DNA, 845 bp, Oryza sativa
  Clone ID: PAT_MRT4530_57499C.1
cacttccaatagatccacaaaagacgcaatgccatcagaccatcggtggccttcatgtaaaatggactccagaaccaccaaaacctacgagagagagtaatcgaacaccctgaagttttgctccttccatagctaccgggagacgaggagaactaaggaatcgaagcccttctaacaatgcttatgcatgcaagccctagaagtcggccaccaaacttgaagagaggaaccacgagccggagtaaggtcatgccagctaggtgcagacagaattcggtgccagacctgatgagcgaacacacagtcaaggaggatgtgattcgccattttgagttcttggacacaaaacggacaaggcgagtggttgtcaataccacgcttctccaggagatcgcctatccaacaacactgctggaacgcaagccagatgaaaaggttgtgtttagtagggcctttagcccacccaagcagatcggcacgcaaataaaggattgctacccaagaaagcaagcttggtaggccgagtgagccgagtaacgctggttgcttatccaacgccagacaggacggtcctccgtgcccggagagaactagacaagaagcatcgcatcccagaccatcaggtgttgggagaggacatacattgtgagagcgccgcggatgtcccttacccaagaattattgataagggtagaagcaactgaacgcaagggcacggtgaagtgaaggtcccgcactaaggaggccaccgagcgaccctcaatctacttatatgtccaaaagagagtcgacgcgccatcacctggcacgaagaaggtggacgccataaacatgtcggacgtgcc

SEQ ID NO: 55497 - DNA, 273 bp, Oryza sativa
  Clone ID: PAT_MRT4530_5749C.1
atgatcatggatgccaatattggtgcctcgtcggtgttagcggtggccacccaacagagcttcttcctccgtttcacaatcggtgtggcacagccgcacagcacagcacagcacagcacatccgccaatcaaccacacgcatccgagttccgatccgcgggatggccgcacgttgcccgcgtgcgagcgtccgcgagcgagcgcgggaccgcggccccggcgccctccgggggcggcacggtaggcagcagcatgtcagaatatcggtcgtag

SEQ ID NO: 55498 - DNA, 677 bp, Oryza sativa
  unsure (1)..(677): unsure at all n locations
  Clone ID: PAT_MRT4530_574C.1
tctagnagtcnnggccgcccacctttccttcttttctttttcttttcttttttcttttttctctttttctttttggataaaattattagaggtttaatatacggaacttaattaaacttagcatatttgattgttagagattgttagagatttaatataagattattagagatgtaatattcgaaacttaattagacttagcatatttgattatctagggttataatacacgacacttaaacttagcatatatgattatttgagttttaatacaagattagtagagttttaatattacccttagcaaatattttttttatgaatagatggctgatcacgatgacgaacagatactgtacgatacaatcgcaaagggaagcagccagtactggaacaaaaaagaggggaacgaggatccaaaccagtatttgaacgaggaggggaacgtggagagggatgcaaaggggaacgaggaggggaacgtggaaagggatgccggaggggaacgaggaggggaacgtggaaagggatgcggaggggaacgaggaggaggctgtgggaagtcatccctccgctggacagaagagggcacgcggcaaacgaggtgccgcgaagaagatagagggtcggcacatcataactgaggtggacgcaaaaggctgacctagtgccccggt

SEQ ID NO: 55499 - DNA, 336 bp, Oryza sativa
  Clone ID: PAT_MRT4530_57500C.1
atgcacgcggcaatcccgaggcggccggtggtgtctcaccgtcttcgccaccaccggcgccgcggcttgcagttccccttcccgggccattgcttggctctcctgctagctgcgatgcttcttgtgaactcgtcgtcagcggcggcgacgacgacaacaacaaactcgaggaagctattggtggcgccggcgaggacgtcgcctgagacggcgtcgggagggcagaagcaagagatggacgtcggccggtggcggacggcggcgccgttccggcggccgggagccagcctcggccgccacgtgcccgggtccaacgccaacccgtctcacaactag

SEQ ID NO: 55500 - DNA, 2667 bp, Oryza sativa
  Clone ID: PAT_MRT4530_57501C.1
atggctttcgctgctcccgcgacatgcgcgtgccgcatggcgccgccgccgccgctcgcggccgcctccgtctccgggcgtgggcgctcgccgtcgtcggcgtcgagctatagggcggcggcgcggtggtggccgggcgcgaggagggggaggcggaggaggtgggcggggttgagggcgaggtgcgccgggcagtccgtcgtgaagcccgggtcggagagcgccgccggggagggtttggtcggggaggacccgccgcggccgccgttcgatctcaacctcgccgtcgtgctcgccgggttcgcgttcgaggcctacaccagcccacccgaggatgtgggctggcgcgagattgatgcggctgaatgtcagacggtgttcctatctgattcatttctccgtgaagtatatgatggccaattggttgtgaggctgaagaaaggcgtaaatcttcccgtgatggatccttggattgtgatttcagtaattgatcaacgtaggacgaaggaaccaacatggaatgaagaattcacatttaacattagtttatctcgagaaaatctactacaggttgctgcttgggatgcaaaccttgttaccccacacaaacgcatgggaaatgctggattgtgccttgaatcgctttgtgatggaagtaatcacaacgttacggttgaattagaaggcctaggtggtggtgggactattgatgtggaggtcaggtataagagttatgatgacattgagcgtgaaaaacaatggtggagaataccttttgtgtctgactttcttgtgaagagcagcctaggatctgctcttagaacggtccttggatctgaaagtataaatgcaagtcagtttgtgcaatctgcatttgggcaactaagttctttcacttacacatatcttccaaagccaccatctttggatattagagctgaggcccctaaaagggctgaacaatctgtagataactcggctggatcaaatgaacttgaacagtacaagatggattcaaaagcttctggagatgattcagattgttgcagtgaagctgaatctactgctacagttgtgaacactgaaggaagcagctcgccaaatatgaaggaaacagatgaatacttctggaaagctttcaccagtgtactcaaccaaaatgttctccaaaattttggattttctcttcctgaggtcaagcaattggatggatttgacctattgagttcacttggcttaaaatcaagtgaaatcgctgaaaaggaatatttagaatctggactagcaacagtagatgcatcaatcagtgaaggccatgaaacaactcctaaagatgcaatcgatgttgacaaagaagatggcactattccaattaaagagaacttgcctaaagaggaggtgcaggctccctttccagacgttagtaaagtttctcgggatgtattatctcaaactgagaatatactaggagctttgatgcttctttctagaagcttatcaccacaagacaaggagtcagtaatggtggatgatggaagtaataaagaagattcggtcaaagaggaacaatgtgcttctgattatacagataatgatgatgatgctgtatctactgaagtgttcactgatgcacagaaagcagaggataggcaacgactgtttgagagtgcagagactgccatggaggcatgggctatgcttgccacttcattggggcgtaacagttttataaaatcagactttgagaagatatgttttctcgacaatgtttcaacagatacccagttaaaatctctgaaggttgccatttggcgtgattgttcacgaagaaggttggttgttgcctttagaggaactgaacaatcaaaatggaaggatttgctaactgaccttatgctagtgcctgctggactaaatcctgagaggttgggtggtgacttcaaacaagaaattcaagttcacagcggattcttgagtgcatatgactctgttaggaatagaatcatcgctcttgttaaatatgccgtaggataccaggatgaagaagacggagaaaacatacctaagtggcatgtctatgtgactggacatagtttaggtggagcactagcaacccttcttgctcttgaactttcatcaagtctaatggccaagagtggggtcatatttgtgacaatgtacaactttggctctcctagagttggaaatagaaggttcgctgaagtctacaatgcgaaagtgaaagacagctggagagttgtcaatcaccgtgatatcattcctacagtaccacgtcttatgggctattgccatgtggaagcaccagtttatcttaaatttggagatctaaaagatgcactggtagatgaggagactatagatgatgaaggtgattccataggggagtacacccctgatgttcttgtcagtgaatttatgaaaggagaaaagcaacttgtggaaaaactacttcagacagaaataaatttgctccgatcaatcagggatggttcagctcttatgcagcacatggaagacttttactacgtcacactgctagagggctactgccgttcagcttctttggctgatagatatcaagaaacattgcaaacaatggaacctgtgcaggaccagtttaggggttatggtcgaactcggaagtaa

SEQ ID NO: 55501 - DNA, 464 bp, Oryza sativa
  Clone ID: PAT_MRT4530_57502C.1
gaagcgagatgcaccaaactggtattccagcgcgaataggacatgggaccagagaaatatgatccggaacacacatggtgatgcctcacgacaaagggcgctaaacattgttgctaaggtagaatgatcagtggcgtgcattatcagctatagttaaagctgcaagtacattcagggaagtgaaggggagggaaaagagaagctgctccagcacaaaactactaacatgacataggcgcagaaaacggtctgatcgttgtaagacatattgccacgccgaatgtgaatggagagaagatcttaggcgggctggaccgaggcagactagctgatgacggcgaattcaggcttcaatgaagcaccaggcgacgcagaaaaccatcaacatacggctttggtgccagctcctcacaagtcgaaccagacactgaacctccatagatgaaccgggttgatgcaccaac

SEQ ID NO: 55502 - DNA, 288 bp, Oryza sativa
  Clone ID: PAT_MRT4530_57503C.1
atgaccgcgcgcatggaactggcagtggcagtgaggagcacgggttccaccgggtggcttctcatggaggatgctggtacagggagtggtgaagcatggtggaggatgcaagacggtgcggtgctcgagaggcgggcgcgaggtgatgtccggatgaggtcggcatcgggtgggaagaggacggtgggggagctccgtttcagatttggggaagcacagaacttgtccatgtttgaggatggcaccgttgtgtcaaagtccgaggaggctggatttacttactgttaa

SEQ ID NO: 55503 - DNA, 1647 bp, Oryza sativa
  Clone ID: PAT_MRT4530_57504C.1
atgatgacagcttctctgcatccatgtgtctgcaaggcctctcctgccttcagacctgcctcttctctgggtgcaagaacccagccaaaatccacagccacaaacccaaagagacctttgtttcaggagcttcagaggcgactttctttcaggattgacgaagcctcaaaggcgctggagacagcaaaacaggggcttttggatgcgttggtcgactcaaccttcaagttttctgaccaacctatgctcccatcagagaacaattttgccccagtcaatgagatcagtgaagccatagagattctgcagattgaaggagagatacctgaagatttcccagagggttccaatccactgtttggagccctccattcgaccgtctcaatcttcggaaaatccagcgaaatatgggttgaaggcgagggcatgctccatgccatctacttcacaaagaacagttcagatacttggtcagtctcctatgcaaatcgatatgtgcaatctgaaacattaaagattgagaaaaccagacagaagccatgtttcctccctgccatcatgggcgactctgcagccatcgtcgcggcctacattctcaactatatgaggtttggcaaagtgaacaagaacatcagcaacaccaatgtatttgagcatgctggaaaggtgtatgctgtttctgagaaccacctgcctcaggaaatcagcattcagaatctcgacacgggtgatagctgggacattaatggggaatggaaaaggcctttcacagctcacccaaaggttgctcctggatcaggagagctagtcatttttggttcagatgcaaagaggcctttcctaatggtcggagttgtctcagctgatggaactcaactaaaacataaagttgacctcaaactggacagatgtatactctgccatgacataggagttactgttaagtacaacataataatggacatacctcttaccatcgacatcagtagacttatcagaggcaatcagttgatcaagtttgagaaggacagctatgcaagaataggagttatgccccgttatggtgatgcagaatcagttatgtggtttgacgttgaaccattctgcatgttccattttatcaactgctttgaagagggtgatgaggttgttatcaggggctttcgtgcggctgactccatcattccaggccctcggatcagcctaaacaaaaatgatttgctctctgatccttctaagtgttctgtgaaacaaggaattaatgaagaatttttctctcgattataccagtggagattaaacacgaagacaaaggctgtttcagggcaatatttaagtggaactgagttttccatggaattccctgtgatcaatgaccactacacaggcttgcatcatagttatgcctatgcacaagtggtggattctttggaaagctcttacggcgttaatgagaaagtaatcctgaaatatggaggccttgcaaaactttgtcttgaagaggcagataatgtaattgcagaggtgcacattattgacgcccaaacatttgaaggtgctcctgtggccaaaatagtattgccacaaagagtaccctatggttttcatggaacgttcagatcatcactagcaaacacaatgacgtga

SEQ ID NO: 55504 - DNA, 733 bp, Oryza sativa
  Clone ID: PAT_MRT4530_57505C.1
tttttttttttttttttttttttttttttttttttttttttttttttttttttttttttatataaataacatatattcaaaaccatgctcgcatatagctccacaacaatattttggagtacacatgtatgccttattttaacaccagcctattacaaaaaactaaccacagaaaattaattattcgctcgctcaaacgtggcgtgatctcttttaagagataattatttagaggttcataattctcatgtgacccaacacaagagtatgcatgcctcttacttagagttggatgccactcttatattcagagccagcagtgaagctttcggggatgacatcatcgacgacgcggtagccgccattcttgacaaggaagcggacagagaaggggcccttgagcggcgcctcacttttgatcgtccaggtgttagatgatgactccttgagcgccacccagtccttgccacccttctccttgatctccacctcagagatggcgacgttggtgacaagctctagactactggcgctagagccctcagcgaccttgaaggtgagctcagtggcacatgagccaacaaccaacagtgctgccaccgccacggcaagccggaaagaggacaacgaggccattggctagctagtttatttgttggtgtaatcttccttgtttcttgactggtagagggatggatccggacgcgtgggtcgaccgcgggaattccggccc

SEQ ID NO: 55505 - DNA, 186 bp, Oryza sativa
  Clone ID: PAT_MRT4530_57506C.1
atgtcatcgttgccaagcgtcgctgcatccatcagcgagcagctccgacttcataagcagaaacagccgaagagcgtgttgcccaccgcaagaacaaagcgacccaagaaggcgaagggcctcgccaaaccccaagatatgaaagcttttaaacccaaaagaccatcaacagtcgtcgattcatag

SEQ ID NO: 55506 - DNA, 396 bp, Oryza sativa
  Clone ID: PAT_MRT4530_57507C.1
atggccggcgccgcgtgggtgccatcctgccctgctttcatcctgcacaacgatattgggcactattcacttttgatcaacacgcgttcctccttgtctgaccccttcccttccatcttcagcgactttccggtcgtcagtgagctcgaggtcgtcgtcaagccatcgatgaacctcttccttcggacctctttgggcgatgttggtggtggtcttcgctactattgttattctccaacaagacctaaagccacctgttccttctccggcgaccctcctgctctagcgacggtcttcttcctcgactacgacgatggcctgtatgtagctatgataaaaccagtggctgcaggccatggtttccaggataccaggggcaatttgttggttgcatga

SEQ ID NO: 55507 - DNA, 348 bp, Oryza sativa
  Clone ID: PAT_MRT4530_57508C.1
gtaggataggggcctaccatggtggcgacgggcgaggggcggcggcggacgaccggacgagggcgcagatgggcggggaggaggcagacggggggaggagaagctcgagggcgctgctgcgggtgtccgacggcgggagcgccgcagtggatcaggcgacggcaggaggacaacctgggcgcgggtggctgacggcgggagctcgtgctatggcgaaacctccagatctggtacgcctattcctccccaccttcactgctctatggctccaccagccggtgtaccacggcgtcgcctgctcgttccggaagagggcgggagctcgcgacggatgtggtggttgggata

SEQ ID NO: 55508 - DNA, 150 bp, Oryza sativa
  Clone ID: PAT_MRT4530_57509C.1
acccatcgacggacgacgtacgtgtgctctgcttaattgggagctggtagaagaggcccaggtaatttgaatttctgcaaagggggaaagatcaatcaatggcgcttgtcccgtcgttggccaccgtccgttaccccctgttcgggttgc

SEQ ID NO: 55509 - DNA, 668 bp, Oryza sativa
  Clone ID: PAT_MRT4530_5750C.1
ttacaggatcaaatcaactggcacgctaatatagccgaaggcgagctttggacctgcactggagttaagcagatctcccaggccacgtgttttctgtcaacacgcttttggcacgcccggtgggacctgtaagaagtcagacgtcagttcttactcatggccgagaaacagccaccaccaccatcaagcctaggttccgttaaaggcaaggcgttgaagctgggattgactgacatcattgatgacaacgtcatgccgatcgatccagagaaattcacgcctgcgcagaaggaggagtttgaagcaacgctgcagcaggcacgggatcagttcctgaactcattcatgcagacccgcaaggggacacttgttcagaagtataaaataaacgtggttgctgatagtcctgggactggttcttctaaagatggagaagtgaaacaagctctaggcaactcggctcagccgagtactaaaggtgctaccgacggctccccaagcgatcaaggcgacaattctgaaggagttcatggcgtccaaggtgatggtgcacataactttcaagatcgggttgattacgctatgcatcatgctttgatcaatcagtccggggtatttgtcacgcccggaatttctatccaaaattccaaagaagacgggttccagta

SEQ ID NO: 55510 - DNA, 249 bp, Oryza sativa
  unsure (1)..(249): unsure at all n locations
  Clone ID: PAT_MRT4530_57510C.1
tgcttgtccttctctgcccgccgatctgcctcgccacgcggttcgtcgtgctgctgcggggcggcgtccggcggagagggggcgcgcggcggggtgcaggtagctatgaagaacggggcgaggaaagacgcgggcggctgctggntctaaattgcctcttgccgggcgctgaccacatgtaactagcgctctaaatcgtgttcctgacggaggtggtttaattgagggagatgcagccaatcggctagg

SEQ ID NO: 55511 - DNA, 393 bp, Oryza sativa
  Clone ID: PAT_MRT4530_57511C.1
agacatgcaaatgttatgtttatttttagtagcaaacatgatgcctatcgaagaggcacattgccgctcatcattacagttacatcactcgtacacgacacggtgaacacattatcactacactggacttttttttcgctgcgagaatcgataggacacgacgatccaggagatttccaatatgccccatgttgtcctaatggttcttgctctgacaaacatcaagaacagatctcatatggcaactaacttgatacacgcgacagcagcggacaccggtgaccccattcttctccccctacagtaatcgccgaacacgtttcatgcaattaagcttgaccttcagaagagagaacaaggctggaatatgtagtgtatattaacagcatccga

SEQ ID NO: 55512 - DNA, 1080 bp, Oryza sativa
  Clone ID: PAT_MRT4530_57512C.1
atggagatcaacaagaaggcgcaggactcgccgtcgctaatggaatctcgcttagctccacttctactcttcggccatggcgaggccggcgacaagttcttgtacagcatacccagccggcggcagctgacggcggcggcggcggcgttcgtcgacctcatcggccactactcctggatcacgccgcggggctgggtgctcacgctgcagccggccggccggcgcggcggcggcgacgcccccgccgaggccttcctgcgagacccgttctcctcgcgccgtgttcccctgccgccgccggacgaggagatcagcggcctcgccgcgaaggcgctaggcggcggcgacgacgacgcggcgtggtgcgtgctgtcgcacgacgccgcggacccgcgctccgtcgtggtggtggtccaccccaccgagccggtgctgttctactgccggccgggaccgggagacagcgccggccggcggcggtggctgaggcacgagtaccagccggaggcgatcatcgccccggccaaccacgacgacgacgacgacctcgacgccgtcgtcatcgagtctatggggtggctcacggcgtcgggcggcaagctcttcgcggacctggagtggtccggcaagatggcgacgctggagttctcgccgtcgccggcgacgccgacgctggcgagcgctcccctcgccatggtgccgtgcccggcgtggtgcaaccactggaacagctcgctggtggactcccgcggcgagctgttcgtcgtgcacttcaggaactcgctgctgtgccagcgcacggtcctgctcgtgcaggtgcacctgctggactcgacgcggcgcgcgtgggtgaaggcggacgggctcggcagcaacagggtgttcctggttacgagccagtttggcgtgtccatggcggcggatgaggctgggttggaggagaactgcatctacttcaccaaatcggatgacaaggggttgtatgtgtatgatgtgggacagggaacaactgctttgtatgatcctggagaggacattcctgattccatggagcctatacttttgatgcctgtcagttga

SEQ ID NO: 55513 - DNA, 428 bp, Oryza sativa
  Clone ID: PAT_MRT4530_57513C.1
gcctcctcttcatgccgctcttgcccgccgccccggcctcgggacgccatcccgcctgcgccatcacgtgccggccgccgcgtccatccgccggcgcgccatctcctcctgtgctggctcaccccaacactgccgccacgccagatcgagcttgccccaacgccgccgccacaccggatcgagcaccgactacgagaccgcctcctcacgactgccgactagcaactccgtcgccgcgaccccctttccctccctctatcgctgccactctcaactcaccgcgcctcgcgtcgttcggcccgtggagaaggagcgaagagagaaggcagaaaggggaagaaaacgggagaaggaaggagaagatggaaaaggcaggggagagatgggaaaagtgacggcagaggcacagttataattttgtaaaatta

SEQ ID NO: 55514 - DNA, 328 bp, Oryza sativa
  Clone ID: PAT_MRT4530_57514C.1
gcacgaggctcctttgttcccctatgtctctccccgttcatctcatggttggagttaatttcggtcgctgttccctgttcggcctaaatagccttcccttgatccaccatatatcacgagtatgcggttccttgaccctctttcttcaatctactttctctggcatgctcgtgtgactgatagtttgggtctacaagttggtttgtttccgggcttccttggcgatttttgactcctccattgtcgttgatgttcccctccactagcaagtttgctacctttcaccacatctcttttgtctggctccttgtctagtcttcatctcctt

SEQ ID NO: 55515 - DNA, 1998 bp, Oryza sativa
  Clone ID: PAT_MRT4530_57515C.1
atgatcccctcggtgcacgaagcgattcccaggcgatttcctctccggccaactttctgcccacaacgatgtagacctccgccagtccatccgccgcatcttcaaccgagtacgcagagattagctaacccgaatctaggtcactggaagaatacttttaaatcttggccagccctcgagaaaacttcacccgagaaaagctggaccacatggtacaagcgtgtatcggctagcaagcaaacacactgggatgagattggaatcggtcaagcacttgcccttaccatagcgaattcggctaaggatgaacccctaatagctgccgccacctatttctcgtccaataccatcaacgcctttttgttgaaccaagggccgatgacaccaaccctgatagatatcaccatgatcactggtctagatgtgacctcatcggctaaccctacgagtctgaacaccaagaatcaatatgacttcaagaccaagagcataggcggttggtctggttacgtggcagcatatatgggccaaggatctgttactgctcaagaacacgtggcctttttgctcatgtggctagaaaagttccttttctgtggatccagttgtggtcctacaaccaactggcaatttgtagccgaggctctagaatcaaaaagacaatttcctctaggcaaaatcatcctcggctacctataccaaatgctgaacaatgcatcgactaagatagtcgtcggctcagtagttggagcaggtggaccatggtggctgctgcagacttggctgaatctggtagtcatgaaagctgtcaatcggccatccgtgatagaagccgaattcccaagactgcagccgattgtagaagatgatggagaagaaagcactcatcgtagatgcatgtcatatggagaatatgcattcacaccagccgatgctggagcgaagttatcagccgagctgctcaaagattggttctgcagcttctatgagggttttcaaaaagatgctcgagtttggtttccttatgaagattcagtgcatcttgatctcccatcagactttagattcgaagatatcaacaatgaaaaatctcaaaaatctaaagaagtcttctcagctgcgattagcccatgcattcttcctgtcggcatacatcaagggaggaacattcaggtttcctatgaattttatcactcgatgagctctgccagaccacttgggatgggtcaactaccaatcggcttgctctttgctgataaaattcaatgccgaggagaaatctcatcaaccttgatgatggatcggctgctgaatatccaaggacctcctttgggcagcattgaaaatatagagctggcaaggttcaggagcaagaactttgacagatggtggggtgaatggaagctgtatttgttccaccaaccggcctcaatatatgtgacagatctctttcctaatgttatccctcagacaacagaatcttctcctccacaccaaagcaatagtggcagagatatagactatcatgcccccaagaccgcaagtctgcttcaagggcagatgatagagccagccgataccggcaggaagaggaaacccagggcaccaacaatcgatccattagttctggctcctaagaagaagactaagaaacaaaaacccaaggtagctgatgatctgcctgccctagatccatccattgagcaagccttggatgaactagagattgaagaggatgttgacgaagctgcagccgagaagaagaagttcgctgtgaagaagaaatcggcagcaacccaatccaaaccaactctgccgaagactcttgaagatatttctcatcagctagaggcatcttctctagacaccttggtggtagattgtggatcaattacgactcggctacacgaagttcaagctctgattcctgaagaactagccgatgtcctcactccagctgcttatcttgaaaagcatcaattcaaactggagaaatga

SEQ ID NO: 55516 - DNA, 2714 bp, Oryza sativa
  Clone ID: PAT_MRT4530_57516C.1
atgtagacctccgccagtccatccgccgcatcttcaaccgagtacgcagagcaactttccaatctgatcgcagttccgagtttgtcgcataaaaaccactactttcttggtccaatcggcaatcccaatcccactgagtttatcattggtgaaaccaataggatccctttcagattagctaacccgaatctaggtcactggaagaatacttttaaatcttggccagccctcgagaaaacttcacccgagaaaagctggaccacatggtacaagcgtgtatcggctagcaagcaaacacactgggatgagattggaatcggtcaagcacttgcccttaccatagcgaattcggctaaggatgaacccctaatagctgccgccacctatttctcgtccaataccatcaacgcctttttgttgaaccaagggccgatgacaccaaccctgatagatatcaccatgatcactggtctagatgtgacctcatcggctaaccctacgagtctgaacaccaagaatcaatatgacttcaagaccaagagcataggcggttggtctggttacgtggcagcatatatgggccaaggatctgttactgctcaagaacacgtggcctttttgctcatgtggctagaaaagttccttttctgtggatccagttgtggtcctacaaccaactggcaatttgtagccgaggctctagaatcaaaaagacaatttcctctaggcaaaatcatcctcggctacctataccaaatgctgaacaatgcatcgactaagatagtcgtcggctcagtagttggagcaggtggaccatggtggctgctgcagacttggctgaatctggtagtcatgaaagctgtcaatcggccatccgtgatagaagccgaattcccaagactgcagccgattgtagaagatgatggagaagaaagcactcatcgtagatgcatgtcatatggagaatatgcattcacaccagccgatgctggagcgaagttatcagccgagctgctcaaagattggttctgcagcttctatgagggttttcaaaaagatgctcgagtttggtttccttatgaagattcagtgcatcttgatctcccatcagactttagattcgaagatatcaacaatgaaaaatctcaaaaatctaaagaagtcttctcagctgcgattagcccatgcattcttcctgtcggcatacatcaagggaggaacattcaggtttcctatgaattttatcactcgatgagctctgccagaccacttgggatgggtcaactaccaatcggcttgctctttgctgataaaattcaatgccgaggagaaatctcatcaaccttgatgatggatcggctgctgaatatccaaggacctcctttgggcagcattgaaaatatagagctggcaaggttcaggagcaagaactttgacagatggtggggtgaatggaagctgtatttgttccaccaaccggcctcaatatatgtgacagatctctttcctaatgttatccctcagacaacagaatcttctcctccacaccaaagcaatagtggcagagatatagagtatgccccaggcctcttgccaaatggtggttgaccaacccctccagttatcagctatcatgcccccaagaccgcaagtctgcttcaagggcagatgatagagccagccgataccggcaggaagaggaaacccagggcaccaacaatcgatccattagttctggctcctaagaagaagactaagaaacaaaaacccaaggtagctgatgatctgcctgccctagatccatccattgagcaagccttggatgaactagagattgaagaggatgttgacgaagctgcagccgagaagaagaagttcgctgtgaagaagaaatcggcagcaacccaatccaaaccaactctgccgcctcctcctcctccttcacctcctgtacagcatatgtcaagtgaatgaactccatttgctgtaggaagccacaatattgaggaagcagaacaaccagccgctcctactatcccagtaatagccgatctgttctcttttgatatcaaggactacttatagaagaggacaccacaaacaaacccttagctcccttatccgatgatgtgaagaagactcttgaagatatttctcatcagctagaggcatcttctctagacaccttggtggtagattgtggatcaattacgactcggctacacgaagttcaagctctgattcctgaagaactagccgatgtcctcactccagctgcttatcttgaaaagcatcaattcaaactggagaaagccatgcaaagactagccaaacgccgagaacgcaaagagaatgaatctaccatctaggccaatcggcaactcgtgcatgaagaaaagtccaagcttgatcagctatgtgaggggccaatcaagtctaatattgatcggctcgaagctcgcaagattgaactcttggcacaatttcaagaatgcaacgccaagctggatctggaacacaaaaagttagccgatctcccacaagctgtcgaagaacagaaggcaaggctgtaatcagccatcaaaaatgttgctgatatgaccaagtccctaaaaatcatctctgggaccgatgctcaagatgcccaagccatagaagaagtagaacaaattagccaaagagctatatcggctatccagcgctacttgtctcag

SEQ ID NO: 55517 - DNA, 216 bp, Oryza sativa
  Clone ID: PAT_MRT4530_57517C.1
atggggaagaggacgagatgcggcgggagcagcaggacaaacggcggcggcggcgaccctgctcgctcgctgcggaatggatggggggatcggcgtaggctgcgggtggcgggaggacgtgctcaccagggtgatggatgcggcggaagcagcaggacgaacgacggccgccctgctcgctcgcgggatagatggggatcggcggaggccaactga

SEQ ID NO: 55518 - DNA, 3483 bp, Oryza sativa
  Clone ID: PAT_MRT4530_57518C.1
atgccggccaagtacttgcagatgctcggggaggagaggcggccggagcttcaccggcagcaggcggggtgcgtcaccgggatcctgcaggcgttcgaccgccggtatcccctcgccgcccaccattcccacaatcgccttcttcccccagcccatgcactgtcaagcagtccaagtgttggggaagagcgaacaagatattcatctcagattgttcttgacaagaacatgagtaaaagctggatcgataatcaaagagcaccattaacagtggagttgtcgcaaggatcttattcatcgtcgtcttgttcttcgtcgtcctcccttgatggaaacagatcaggacagcaagacctatcctccactgatcgaatgctatttccggagaagccattcaaaagctcaccgaagctcaagagctcttctgacagtgactgtggagtggattactaccttgatgatgcccttgccaagctctcagcccaacctagctacccaactcttggtataagaaatctcgtaaaggattcaatatatagagatactcgtgatttttcaatcagaactttcaccaaagaggcagaaaaagatcacctattcaattgtggagatccgcctagaatcttgaatgagcctcctaacagtgctatccaagagaaaaacaaaggaaccatggacattgacgaatccctccgagttttagccaagctcaggaatccatctgaatcagtccagcaaccaaggctatcatatgatgctcctcgcttctcgtgtgaaggaagggaatcagcgtcaaaacttagggaggtgccaagattgtcactagacataaaggaaagccctcttaggaaccgcgaaatcgacgtaaggccaaagccaagcatgactgatgaagacaggagaagcagcatcagtaaagattacagtccacccttggagacccagcaagaacacaatgcctgtaaacgtctccctagcgttgttgcgaaactcatggggttggaagacttgccagagcataaggacaatactgcgatatcttcacaggtatccaaatcagttacagagaggagtgaagaacccaccatgctgaggcctttgagcctttcttcccaaaatgaggctactcctaggcagcagaggaatctagatgcaacaatcaagaatgttcctaactctaagttccctgtggaaactgcaccttggaaacagcaggagaagattgtgctacctagaaaattgccgaagggatcaaagggagctcatggaaaagagcaacatgctgcatcagtttacagtgagatagagaaacggctcaaggaccttgattttcagcaatcgaacaaggatctcagggcactcaagcagatcctggactcgatgcaagcgaaagggttgttgcagaacaagaaacgtgaggaaccatcgatgccgaagatatatgatggagaccatgataacggagatgtgactgatgtaaacctgagactgaatagcaccagcaacaccaaacaggcacctgaaggaaccccatcatttacaacggaagaagatagcactacagaaagaagcttcaaatcacccattgtaatcatgaagcctgcaaaatctgcagacctgttaagtgatgtaaccgaggattccgctgttggtccattaggcggtttatcagagctaccgcagctgagaacagccaatagtgctgataaaaggaaaagctcaaagaaggtcactagggaagctgtggagcaacataccaaatctagttcaagggcacctacacctcaacaccttgcttcttttgacaagagagcaaatggaaggaatgaagaaattagcaggaaacagaagtctacttcacagctgatgactgagaactcagctaggagacagcagatgcaaagagaaaataatggaagcttgctaaagcataaaaattccactagccctagagtacaacagaaaaaacctgattcagagcggagggccagaccgccaattccctctcccgattcaagcaagaatcaaaggcaatctgtggaaaggagccatttggattcagtatcacccagaagtaaatttagaagaaaacctgctcaagcacaaggtgaagatttccatcaaaatggtgtaagtagaaggacaaggagcctgaaccaggaaggcaatgatatgtccgcaaggtcagatggtagcataagtgttgcatcagagctggatgtagaagtgacaagtacagacagatctgcagaagttaacattttgagatctcagcatggcactcaaacaccatcaggaaggaatcctcaaaaagtgaaaacctcttatgatgcaaacaaggacctgccatctatggatcctgcagcaactattactgagcggcctagtccagtctctgtattggactcttcgtttgatcaggaggaatttttccataccagcaagaccacaaattcatctaatgttgatgatgagcatcacccatcaccatcagaagagtcctgcaagccttctgaaaagaagtccacagagctccccacacaacccaagaacagcaagctcgcaaacatagccagcctccttaagaagctccagcaattgagcgtaaacaaggatgaggcacctcctgtcgatcacattgccttcttgtgcgagacgccaagcccagaccatcgctacgtatccgagattctactggcgtcagggcttctgatgaaagaccttggttcagggctgtcacaaatgcagctccacacatcaggctaccccatcaaccctgacctgttctttgttcttgagcaacgaaaatctgggtggacatccaaacctgaggggatccatcagagcaggagcaccacaaagccagatgatcccaagagagcgcaccggaagctaatgttcgaggcggtgaacgagcttctccttgacaagtttgagaaggaaaccacactcatcactggagtagcagcaagggatccagtgatgagcagcgggcagcagctggtgaagatgatatgctccggcatcgaatgcctgaagacggagagatcgcgcatgtgccaagaagacagcagcgtgatccctgacgcagagatcctcaacaggttggaagggtggtcgccgagcttcatcaggagggagcttccaggcatggtgctggagatcgagaggtcgatattcaaggagctcgtcgacgaggtggtgcgcggcgagtccgccgacgtagcagcaatggatccaagtgatgagcagcaagggatccagttttctgacggctgcttgcgagagtttccttccgtgattacaaggaaaaataacctatgtaagtttccaaaaaacctaaatgatactaagaagaactgggttaaaggagatttggtgagagaaagcaccgagagcctaattcttgaccgtcagaagaagatcggcgcctgcaacctaaggaatgtgtgggtcgctgctggagtggcttttgcggaataa

SEQ ID NO: 55519 - DNA, 1329 bp, Oryza sativa
  Clone ID: PAT_MRT4530_57519C.1
atggattcgctgcgcctccggccgtcgctcctcgccgcgcgggcccccggcgcggcctcgctgccgcctctccggcgagcttgtgtgagtaatcaccatgcaatagacataacatgtttgtgtgtcggcaaaatcactttctaccacctttatgttctatccatagaaatggtaaacggccagtttctttgtccagccaaaggacccaaggtccttccttcgatcaatgtcagaaattctttggttggaaatcctcccaccacaggataccacatcgaccaacatctagttccgctgacgcttcgggacaacctctacaatcttcagctgaagcacatgattcatcaagcacttagcatagtctcagtttcgctgctagctgttgagaatttgtccgatgtgtctcccttgttcctcactggtttgctggaggcagtggtagcagctcttttcatgaacatctatatcgttggattgaatcagttgttcgacattgagatagataaggttaacaagccaactcttccattagcatctggggaatattctcctgcaactggagttgcacttgtatcagccttcgctgctatgagctttggccttggatgggctgttggatcacagcctctgttcctggctcttttcattagctttattcttggaacagcatattcgattaatacattcgtattcagaagaccagcagtctttaccaggccattgatttttgcaactgcattcatgacctttttctccgttgtaatagcattgttcaaggatatacctgatattgaaggagaccgtatttttggtatcaaatctttcagtgttcgattaggtcaaaagaaggtggtgggacatgcaatccttgcggcaatcctatggaaccgctcacggtcgattgatctgacaagcaaaactgcaatcacttctttctacatgtttatctggaagctgttctacgcggaataccttctcattcctcttgtaaggtgacaaaggcgattactccaggaaagtagattggaattggatcatggctggatggatgaacggacggcgccccataaaatcacctgcaaatcacccggtacacatgttgacatcctgcatccagatatgatattgatagatcatcgtcggcaccatcattcctctgaaagatttcgcacggcatttcaacctccaactcccaacgtaccccaaaaaaagtaactaggccaggtgagcatctgctagcctatagtagacgttattggaacagtggtagtacttgttagcagcagtaataataatcatcataataaagctgtgggttactgtccgctc

SEQ ID NO: 55520 - DNA, 2380 bp, Oryza sativa
  Clone ID: PAT_MRT4530_5751C.1
atggataacactggtaacaaaggctatgggaatgatggatccgatgactcaagaacccaagccagtgggaatgagaaaagcatcaacaaaacctcaccagagctaatccaaattgtggttaaccaaaccaacatgttggcaacagcctttcaactattacagaattggaacaacccagcagggacaaccaacgttcaagtacctacagtccagcaacagtgcaagttatcagaatttctcaaaactgagcctccaacctttgccattgccgtcgatcctatggaagccagtgattggttgcgcacaatcgagaagaagctagggttgattcagtgcaccgaccaggagcgggttggcttcgcaactcctcagctggttggaccggcttcagagtggtgggatagctacgaagcatcacggccagaaggacataccatcacctggaacgagttttcatctgtattcaggagatcacatgttcccgcaggaatgatcacattaagaaaatgagagtttcgctatctgaagcaaggagatttgaccgtcacaaagtacctgcacgagttctatcgtttggctcactatgcaccagaagatgtggaaacagatgaagacaaacaagagaagtttctccaggggttaaaagatgagcttgcagtgcaactccttctagaggattactaagattttgagaaacttgtggacaaagccatgcaactcgaaagtgagcataatcggatgacgaactgcaagaggaggattgtcaacatcccagtatttccatgtggtaaccaaagacagcgcactgagccacttcagatcaccggatcttctgttgtgcatcaagagttcctgccccaagaagatggacgcaatgcagacaacaacactagcaatactaatgatgatgataccaccaacaaccatggttcttgcctcattagcgaccactcgaataaagcgtgcaatgtcagtagcattcaccaagatgtcaacgatagtatcaatgttggaatccagaatgacaaccttagcaattttgacactgagaaagactccaatggtgatagcaactatggtaccactgatgccaatgttagcaaggatttccaaccaccaattccaactccaagtcaaaatgatcgtccccagatggacagctcaacaaagaagacgttgatttgttacaactgcaaagaaccaggtcatttctctagagattgtccacagccgaagcgtaacctacgccatcactccggccattatgcaagaagaagacaagtcactcgccttgtggtcactggagcaaacgccatacctgtttctctgaaaggcagcaagccaaaggacctcatcgtccccagaagcgtccgcaatccacattaaagaataccacctgttagagataagccgaaaggactcctcccgcaagaaatcgatccgggaaatcaaaaactcggttttggagataaactcgaaaacgagttcgattcggataagatactcaacgattagctccgatttttgggggtccgcaaacttcgccggcgtcattgatggagccgagatcgcccgcgccggcctctccttcctcctcgtcgacgtctcctccggcagccccttccaccgcgcccgtgcatcagccggcgctgccgtcccctccctcggcgtcgccgcatcgccctccaccccggctgctcctcggtttcgccggaacgccgtcgcagcgccggcctctccatcctcttcatcgccagtgtcctttcggccgccccttccacctccccggctcgtcggcttgctgcacctctaccatcttcggcatcgcagccgcgacgtcgtcctcggcctcgcctcccctccgaccgaacaccgccggtgtccgtcgtcgtcttcaccgttcatcctcgccggctcgccgtctcgcggcgccgcctccgtcgtcggcatcgcagcggtgtgttccacgccatcctcgcctccgtgcagccgctgccggctgccctcgtcgtctcctcgctggccccggtcgtcgtcgtcgtcgtcctctcgtcgttcccggtcgttgtggcgttcgtccctccgtcaagccgttctcgtctgccgcccgcgtttcgtcaagtgtgcagcagccccgtcgtcgtcttcgtcctcgcctccgcgtcgtcaagcctcgtgccggccgtgtctcgccttcgtcccaggatcgctgccgaagtcgttccctcgccgtccgccgcgcccgttcgtcgttgtcgttcccacgcctcgtcgcgtggtggtaaggatccgtcctctcgctgccccgtcctcgtccttttggtgtcgccccgtacccgttgtgcggtcgtcgaccccggtacccgtgtaccggtgtcgg

SEQ ID NO: 55521 - DNA, 549 bp, Oryza sativa
  Clone ID: PAT_MRT4530_57520C.1
atggacgctgctcctcctcctggtttctctctgcttcgcctgggcggctgctgctgctttgatcttctcgctcaggcgtgggacgaggccgactcggagtcgacggacgcccgatttctcttcgtcgcctccgcactacatcgcctgccgctcgcctcctctgcttcgtcgcttatcccctcagccgtcacctccgccacggtcgtcgacatcttcttcccgagcgttgaggaaaggggttcacgctgctacaatgccgagaccaagcggagatgtgggaagtggtatcataggagctatgacgatttagggaaatccacggcgcgcagacaagttaaggtgacaaggagcttgaaaggtgggagaacgtgttcgagccccggcactggtgatctcactcaagcacatgaagttgaggaaaagtgccatccagcaaatggtctactttggaaagtaccatgggaccacctcaacttgcactgtcaccagttggcaccaaatgtcactagggaccaccagaatgtgccaaaatgcccatataggtcataa

SEQ ID NO: 55522 - DNA, 513 bp, Oryza sativa
  Clone ID: PAT_MRT4530_57521C.1
ggcacgagcctgtttgtggagcaaatacgcaactgtggtgggacatgcaatccttgcggcaatcctatggaaccgctcacggtcgattgatctgacaagcaaaactgcaatcacttctttctacatgtttatctggaagctgttttacgcggaataccttctcattcctcttgtaaggtgacaaaggcgattactccagggtagattggaattggatcatggctggatggatgaacggacggcgccccataaaatcccctgcaaatcccccggtacacatgttgacatcctgcatcccgatatgatattgatagatttttgtgggccccctcattccttttaaaaattttgcccggcattttaacctccaactcccaacgtaccccaaaaaaagtaattaggccaggtgagcatttgctagcctatagtaaacgtttttggaacagtggtagtacttgttaccccccgtaaataataatcctcataataaagctttgggtttctgtccgcccc

SEQ ID NO: 55523 - DNA, 1144 bp, Oryza sativa
  Clone ID: PAT_MRT4530_57522C.1
cacgcgtccgatccatagaaatggtaaacggccagtttctttgtccagccaaaggacccaaggtccttccttcgatcaatgtcagaaattctttggttggaaatcctcccaccacggataccacatcgaccaacatctagttccgctgacgcttcgggacaacctctacaatcttcagctgaagcacatgattcatcaacacggcaaccaccgatcggattcgctgaatcgagaggaaatagcgggcacaatgggcttggctcattttacaggttttctcggccgcacactgtcataggaacagcacttagcatagtctcagtttcgctgctagctgttgagaatttgtccgatgtgtctcccttgttcctcactggtttgctggaggcagtggtagcagctcttttcatgaacatctatatcgttggattgaatcagttgttcgacattgagatagataaggttaacaagccaactctcccattagcatctggggaatattctcctgcaactggagttgcacttgtatcagccttcgctgctatgagctttggccttggatgggctgttggatcacagcctctgttcctggctcttttcattagctttattcttggaacagcatattcgatcaatctgtcattcctgatatggaagagatctgctgttgttgcaggcttgcagcactttgcgtattagcagtccgtgcagtgattgttcagctcgcattttttctccacattcagacattcgtattcagaagaccagctgtctttaccatgccattgatttttgcaactgcattcatgacctttttctcagttgtaatagcattattcaaggtaatattctgtacttatctgggaccaaaccatttggtatccgttcattcaaggaaacaatttcattgtacaagactatttttttttgtgtcaccatccctaccgcctccttcgccgagactctgatgtcgccgtcgccatccccgccgtcgttttattttctttttcaggtggtgggacatgcaatcctatggaaccgctcacggtcgattgatctgacaagcaaaactgcaataacttctttctaaatgtttatctggaagctgttctacgcagaataccttctcattcctcttgtaagg

SEQ ID NO: 55524 - DNA, 1077 bp, Oryza sativa
  Clone ID: PAT_MRT4530_57523C.1
atggccaccgccggagtgaccgagcacctgctctcgccgcgcgcaggcgcaggcgacgacatgagcgccggcgacggggaaggctggtgcaacgccctcgccaagtacgaggcgctcgcgtcctccctaccgtcttgccatggtctcgggagcgccccgtaccgcaggtacggcggattctggtacccggcgcacctgatgccggcgacgctggccgcgcgggacacgttcgtggcccgccccagcgacgtcatcctcgccaccatgcccaagtccggctcgacgtggctcaaggcgctcgccttctgcgtcgtgcaccgcggccgccacgcgccggccgccgggcagcacccgctcctccactccagcccgcacgacctcgtgccattcctgcactccatctacgagatcagccgcagctgccgcgtcgcgccaggccatcgcctcgatgccatgccgtcgccgcgcatcctggcagtgcacgaaccgctctcgagcctgcccgcgtcggtcaaggcgtccgggtgccgcgtcgtctacctgtgccgcgaccccaaggacgcgttcgtctcgctccggcattacctcgacgagatcaaaccagagggatccaccatgacgccgttcgacgaggccttcgagctgctctgcgacggcgtctcgccgtacgggcctatgtgggaccacgccgccgagtactggaaggagagcctggcgcggccggaggaggtcgtgttcctccggtacgagagcctcaaggaggacggcgtggggagcgtgaggcggctcgccggcttcctcggctgcccgttcaccggcgaggagcttgccggtggcgtccccgaaactatcgtggagctctgcagtatggaaaggatgagaaacgtggaggcaaatcgagacggcgagcacggggctacctggtcgtcgttcaagaactcggccttcttcaggaagggtgaggtcggagactggaaggagcacatgtcgccggagatggcgcggaggctcgacgacgtcgtggaggagaagctgcgaggctcccggatgtcgctgatccgccaccgccagtattga

SEQ ID NO: 55525 - DNA, 2745 bp, Oryza sativa
  Clone ID: PAT_MRT4530_57524C.1
ctgatcctcagcgtcctcgccgtcgccgccttggccacgaccaaccatgaagtggaggcggcggtggccgcgctgccacgcggcgccacacgccgtccggcgcccgcccacggcaacgtggcgacggcggccggctgctcgccgcgggagcgggacgcgctgctgacgttcaaggcaggcatcaccgaagatataatgggtctcctcgactcatggaagtacgacggcgctgggcctgggcaggcggaggaggaggccgattgctgccggtggcgaggcgtccggtgcggcgccggcggccatgtcgtcgggcttcacctccgcaacgtgtatgccgaccagagcaacgactacgacttcatcacctccgggtacgacctggccggcgagataagtccctctctgctcaacttgacgtatctggagcacatcgatctcagcaagaaccagctccagggacagaccggccgtgttccggagttcttgggctctctgcaaaacttgagatatcttaacctctccggcataccattttccggtgaggtccttcatcttgcttactgcaaccttgtttatgcggatcaatctttttcacactttaacctgaccaatcttgaggagcttgatctctctgtcaactatttcaaccatccaattgcatcctgttggttctggaatgcacaaggactcaagtaccttaaccttgggtcgaccaaactctatggccagtttccaaacgttccaggacaatttggatccctacgatttcttgacttgtcatccacatgtaacatagacatcgtgacaacaaacctaacaaatctatgcaacttgagaatcatacatctcgaacggagtcaaattcatggggacattgcaaagttgctacagagattaccgcggtgctcgtacaacagattgaatgaactatatttgtcagacaataatatatcaggaattctaccaaatcgtctggatcacttaactagcttggtcattcttgacatctctcataacaaactctctggacccttgcctcctcagataggcatgttcagtaatttaacttacttggaccttagcagtaacaacctcaacggagtgatcacagatgaacactttactagtatgagaagtttgaagacattggacttatccggtaattccttgaagattttggtggattcagaatggttacctctatttagtcttgaggttgcattgttttcaccttgccatatgggccctcgctttcccggttggctgaaacaacaggttaatattacttatcttaatatgtcatttgcgggtattactgataggcttccaaactggttttctacaacatttttgaatgctcaacttttagatgtttccaacaacgaaatcaatggtagcttgccagcgaacatggaggttatgactacattatctagactatatatgggatcaaacaagcttaccggtcaaatacctttgttgccaaaagcacttgaaataatggacatctcaaggaactctttatcaggacctctgccatcgaactttggagatgaccttgtcttatcttatctgcatctcttctccaatcgtatcactggccatattccaaactctatgtgtgatttgcatcaccttgtttacttagatttagcggacaatcttttggagggggaatttcctcgatgtttccagccagtgtttttgagtaagctatttgtcagcaacaatattttgtccggaaagttcccgccatttttgcgtagtagacataatctagagatgctggatttggcatcaaatgacttctatggaggattgcccatctggattggagagctgtcgaatctagcaatagtacgactaagcaataacaatttctctggaaatattccaacaagcattaccaaccttacaaggcttgttcaactagatctatcaaataattctatttcgggtgttttacctttgcatttgtccaatttaatatgtatgaagaaaagtggtcattgtgatatcgtaatggtcttcgatcgttactcaatttctggtcgttatggtcgcaatgttggcattgcaaatatgtctgtggacaccaagggccaaaaactttactacaaactacccatagtattagatatcgtgaccattgatttgtctttgaactacttaactggtgaaattccggaggagctaactcttctcgatggcattaaaaatttgaatttatcatggaatcagcttagtggaagaattccaggcaacattagtgtcatgcaatcattggaatcactagatctctcaaaaaacaatctttctggagaaatcccatcaaacctatcaaacataacatctctaagcaggctagacttgtcatacaaccatctcacaggaagaataccatcagggggtcaactcgacaccctctatgcggaaaacccgtctatgtacaatggaaacactggtctttgtgggtatcctcttcggagaaattgctcagacaacagcagtgcatcaaagcatggtgttgaacagagaagggaaagagattctgagccaatgttcttgtactctggacttggttcaggatttgtggctggtctttgggtggttttctgtaccatcttgttcaagaaaacatggaggattgcttacttccgcctcttcgacaaggtgtatgacaaagtgtatgtgtttgttgttgttacatgggcaaccttgtctcagaagtcaggcacacgttag

SEQ ID NO: 55526 - DNA, 754 bp, Oryza sativa
  unsure (1)..(754): unsure at all n locations
  Clone ID: PAT_MRT4530_57525C.1
tcggnnnnnttaanccancattnngggctgcagganttcngcacnnngccgtcgccgccatcctcagtaannangctgtgannccggcnggagntntatncgnaccnngcnnntcnctncnttttancnangagaggggccagcntcntatacatgntcnnggggggangnggtntnagcacagcggcncatgccccatcagantcaccatccccaaanccatctaanaacncngcagctgtctcccctncnaaggcanccaccttcacatnttcntcnatgaaagtcnaaacngnttccgctccnanaaaacaccntagnttcctncgctccttctgnttaacgaccaagtttttttttttttttttnnctttcnccaccntngtgtntcccctctncaatngantgncnatntctcttnattcccanttctccgttnnncagtanttatncaaaanttcanttcctttccgttttncnnctccctntntcnccantntcttcttctaanatttcangattcgnnaaaatttgantnttatattcaanntctnncacttcantncngaaactanntnaatnntttcttnttcttgaatnncncnctttttcccnngattttnccnacatanngtnnaactgtcccnnctgtcgtgttttaacaatnttncnntttanatgaanttngatantnattntgcaatntntcntanaannncctcntnctgcctatagntccnnatcgttgnatncn

SEQ ID NO: 55527 - DNA, 181 bp, Oryza sativa
  Clone ID: PAT_MRT4530_57526C.1
atccgattcagaagtagagcgagcggcggctgcggcgatggcggtggcggcggtgcgggcggcggcggctgacggggtggtgacgttcctgtgggtgctgtgcatgtcgacactgtgggcgtctacagcaacggtgacgtaggacctacgtatccacgaggttatccactacacgctcctc

SEQ ID NO: 55528 - DNA, 414 bp, Oryza sativa
  Clone ID: PAT_MRT4530_57527C.1
tttttggtttttttttttttttgtgtttttttttttttttttttgcacaaaaccttttcagctggcacaagtttcaattacaggaaggaagggcaggcgatgcataaaacagctgcaaagcttgactttttttggagcaacagtttacacaggggctggaaccacaaacattactaggaataagctccaaaaattccaggggggaggaaaagaaggccctccattttttttctttaaacccccatgaaaggaaggaataaccaagggtctttacaggaagatttccagggagggttcgtcctaaaaaagcatgccggtggaacaaaccacaaatccttacccttttctttccttggtcccaccacccggaatttataccatgcatacagacagatttcaacaaacctggttggt

SEQ ID NO: 55529 - DNA, 2959 bp, Oryza sativa
  Clone ID: PAT_MRT4530_57528C.1
atcccaaacagtaatttacttttcctttattactccgtgactatactaagatcttcctcccaatatcatttccttgtaataatacaatctgtacatcaaatccgttccctccttttctttccttttcccctcaatgtatctacaccacaacaaggatcttataacccagagtaacgtggtcactgatttgtgggcccgtgagtaatgacacgtcacgcttccatcgatctacaccggctatgcccgccgctatggtacaccgcaaaactcgcgcgcaaatgcggagttgaggagaaaacgtgcaacccttcactgccttgcctccgtgccgccgtcatcgccgccgccgccgacgacgaggtagagcttctgcccgtcgtggaccatgtcgacgtcgagcactctggcgccgtcctcgccgagcagccggagcccctcgccggagccggcgaggccgagcttctcctgcgccgagcaccaccccttcccgccgccgctcgccgccgtcccacgggtgggggccggaacaccggagcaccgccgcgggtgcatcttgtcccgcacctcctcgccgcgctccgggtacctggagagctcgccggacttggccgcctccagcagctgcaccatcgtccggctcccgcacctgcgcccttcgtccagcggcgtcgtgccccaccggtcggtggcgaacacgctggcgccggcgtcgacgagcagcttcgccatcaggtagaggccctcggcggcggcgatgtggagcggcgcgcggtggtcgtagtccctcgcgttcgggtcgccgccgtaggcgagcgcccgccggacgaagtccgtgtcgcccctcgccaccgccgtgcacaggtggctcccggcgttctccaggctcagcttcgcccccttgctgaacagcagcgtcgccacccggtcgtgcccctgcttcaccgcctccagcaatggcgtgttgccaaatttgtcggaaagatcgatgtcgacgccttcgtggaggaggaactggacgacatcttcgaaccctttgcaagccgcaagatgcagaggagatcgcccgtcgtaatcggtgttcttgggatcggctcctgcacggatcaggctcttgagctgatgcatgtcaccgtagaacgcagcgttgttcactcgcagcgtcagctctgcctcttgcttcccgatgtggaacgtgatgtcggattccagctgcttgatccggctgccgtattcgctactctcagaaaggttgctcagaattcttcttccatcaacgaagaagatctccaggatgtttgtgaaggattgcttgtcaagccgcaaaagacgacaaagttcgcagacacgaacggtgaagggttgtgggatattgcagagaacagcgatttctccaaaagaactttcaggctctagcattagaatggtctcttcttgaccatcttcaccaatgccaacaccttccagtgccccatgacagacaaagtacagttgatcaactgcacttccctgctccaaaataacctctccgggtaggaagaactcttcctgcagcctgatcacaatctgttgaatgaattctgctgaacatcctttaaacagtggaatgctttcgatatatggcttatacagtgtttgtgaaatcttcgcacgaattgagactgggatatcctgaaggacagaagcttcagtgtagctgctttcatactgcaacctcaaatgtcctttaatctgttcccttatgtcctttccaagcttgtttctgttcatgtacctgataacttctttcatcttatccctgaatcgctcggttctcgagcccttgacaataagtgcagtcatgttaccaatgaggtaggctccaagaatcatatcaaaggaaacataaatcatgatgaatatcatctccctgacattcacagcatgaatgtcaccataaccaacagttgccatggtgactatggcaaagtacagcgatgtcatataacgcttggtaagatcaatctccctgaaatgagaataactatagtctcccaactgcaagctccctatccatgtatatccttccattgattcaggaagtgttgttgcaagatagtagaagatacatgctgctgtgtgcgtacagtagagttccacaactatgagtttcacaatcctagtaaacaggtaatttatacggatatctttttccatgctcctgaagaactctgtcaccttcatagctcgtgtcaaccgaatccacaataggtatcttacttcttctttacttccacaagccttatagatagcatcccacggaaaacaaccaagaagatcaaaaatgaagcttgatttacaatatcggagagcgatggaggtgggattgtgaaccatgcggtaggtgtcaggatcacggtaggccaccaagaacctgagaacaatgtcgatgaggaaggcgatctgaccagctatgtctaggaagaagaggttcctggggagccccctgaagaagccaaattccaatggcgtgaagaaggaactgtacactgcccacactagtatgaacctcgtccataaccgataccacttgttgtcggggtcgatgacgaagtcctggaagatgccatcgtcgccgtcgacgggggcgacgcggcggcggcgcgggcggaagcggccgaggcggaggtcggagccgaacagcgccaggcggctcccccgcgacgacccgatccggtcgcgcaccacgtccacctcgtactcctcttccccatcgtcatcctcctcctcctcctcctcctccttcttcttcctccccggcatattctccccgtcgtcgtcctccaccctccgcttcgaccctatccccctccccatccccgcgcgcggctagaggcggcgccgccggcggcggataagcacactagctcgatcggggggagtgtcgcggcgcgcggcggcgatcgccgcacgtggtggcggt

SEQ ID NO: 55530 - DNA, 2184 bp, Oryza sativa
  Clone ID: PAT_MRT4530_57529C.1
cacgcgcaccacgaaccagcacgcgcaccacccaatggcggacgacgcgtacgacgacctcccaatggccggcgcggaggaggaggtggacgacgtgatgaaggacgagctcgacgaggagggggactcctcctcccccgtggcaatgaaggtcggggaggagaaggagatcgggaagcaggggctcaggaagaggctcctcaaggaaggggaaggatgggatcgccccgaatccggcgacgaggtccaagttcactacaccggcactctcctcgacggaaccaagttcgattccagccgcgatcgtggaacccccttcaaattcagcctcggccaaggggaggtgatcaaggggtgggatgagggtatcaagacgatgaagaagggggagcaggcggtgttcaccgttccgccggagctcgcctacggcgaggccggctcgccgccggcgatcccgcccaacgccacgctgcggttcgacgtcgagctgctctcctgggccagcgtcaaggacatctgcaaggacggcggaatcttcaagaaggtgctcgccgagggacacaagtgggagaatcccaaggacctcgacgaggtgctcgtcaagtacgaagcgaggctcgaagacggaactgtggtatcgaaatctgacggtgttgagtttgctgtcaaagatggctatttctgcccggcgctttcaaaggctgtcaagacgatgaagaagggcgagaaggtcctcctcactgtcaagccacaatatggctttggtgagcaaggcaaaccagcttctggagctgaagctgctgtgccgccaaatgctaccctgtacgtcgatcttgagttgctctcctggaagacggtcactctgatcggcgacgataagcgcatcctgaagaaagtcctcaaggaaggggagggctatgagcgccctaacgatggagcagtagttagagtgagatttatcggcaagttggaggacggcactgtgttttccaagaaagggcatgatggtgatgagccatttgagttcaggacagatgaggagcaagtcatcgaagggctggacagaactgtggtcaccatgaagaaaggagaggttgcattggtgagattaccacctcaacatgctttcggatccactgagactaagcaggatcttgctgttgttcctgcaaactccacagtctggtatgaagttgagcttgtctcattcgagaaggagaaagaatcatgggatttgaaggacaatgctgagaagattgaagcagctgccaagaagaaagatgaagggaatgtgtggttcaagatgggcaagtatgctaaggcctccaagagatacgaaaaggctgcgaagtacatcgagtatgacagctccttcactgatgatgagaagaagcaatcgaaagcactcaaggttagttgcaagctcaacaatgctgcttgcaaactgaagctgaaggaatacagggaagcagagaagctctgcaccaaggttttggaactggagagcacaaatgtaaaggccttgtacagaaggacgcaggcatacattgagcttgctgatctggaactagcagagttggatgtcaagaaagcactggagattgatcctgacaacagggatgtgaagatggtgtataagacattgaaggagaagatcaaggagtacaacaagagagacgccaagttctacggcaacatgttcgcgaaatggaggaagctggaacacatggagaacaagaaggtgcctgggaagcaggaggcacagcctatggccattgacagtgccgcttgaggattagctctgctttcttttttctgaacctggttactgctagtactactgtctctactggttgtatgagtatgaaatatgaatggaaaatggtagttaatttgccctttgcttgatagttgcagtctttgcaactctgcacccatatgtgctcagctttgtacgagaagtggttgccgtcatttgaagatgtgatgctgtgattgtattgtggtgttagaagagcaaaaatgccataacgacactttggactgcgctactaatgttgttctttcttgtttctattgcaatatggtataacatctgtgccttgtacgcaggacgtatgtcccgacattgtttgtttgtttatgagaagattgtgagactgaactaaaaaaaaaaaaaaaaaa

SEQ ID NO: 55531 - DNA, 315 bp, Oryza sativa
  Clone ID: PAT_MRT4530_5752C.1
atgagggcgacggcgaggcatggtcgcaaagctaccgggaggaagcggtttactcatctgccaacggagaggacgagcggcggcggaggcgtaggcaggccgcagccgccggaatgccggattaaccggagcgcgccggcggggatgcggcggagggaggggaaggggaagggaaatcacgttccgggccgataccgttcttctgggccgacagcttcagccctaaaatgtttcagcctactaaagctgcaaggccagaaggagacgccgcggggacaggcctgcaatgcatacatgcaaggccttctcccatag

SEQ ID NO: 55532 - DNA, 177 bp, Oryza sativa
  Clone ID: PAT_MRT4530_57530C.1
atggctaaggggagcaaggaggagaccgaggtgcaccgtgcgcagaggtggaggagcgaccgagtcgccatgaagcggacggcagcgatgcgtaggcttgagaggcggcacgtgcagacgcccttgaagacggaggatcgacgacagcgtcagcagctgtcggcatgggagagatga

SEQ ID NO: 55533 - DNA, 452 bp, Oryza sativa
  Clone ID: PAT_MRT4530_57531C.1
aaagaagaaagacaaaccaaactcgatttaaatcatcttcggtcaaacatgcaacatacgatgattcaagagctgatggttgcagttacaaactacgataatgagaaaatttaggacaagacaccgtcaaggggagtcatacaacagcgtcgtactacacacaatagagaagatgctagatgtaaatggcaaggaaaatgccaacactgtgaatactagatccagactgcgggctagggagagaacggaaaagcgccagaagtgaaaaaagcgttttatgggacacacaacgataatgtccaccggacgaaacagttgttacaacaacatgatccaccccagtagttgtatgaggtttgaccaaagctctgctgaagagactaagtggatcttcacaagattaaactggagccagacaaacttgtcatataggctaaggggctgaacctgga

SEQ ID NO: 55534 - DNA, 120 bp, Oryza sativa
  Clone ID: PAT_MRT4530_57532C.1
atgatggacaggatgcggcgtgtcgtggctagcggggttgacgggccaactggtggagttgatgtcgtcatggacagggcaaagacggagatgaagctctttgtcggctgcggagcttga

SEQ ID NO: 55535 - DNA, 534 bp, Oryza sativa
  Clone ID: PAT_MRT4530_57533C.1
atgtcgttgctgctgcagctgagcagctcctacgcgccgccgcgggagcactcgcgcgtcgtcgtcggtgccgcactacgcgtcgctgcaactcctgcatgccgccatttgctgcacctgcatactgtcgttgtcgaagccctttcgcccgcacatgccgccgctgtagcacccgtatgccgccaccgcagctctcgcgagccgtcgccgccgaagccctctatctcccgccgcctccgccatagccgaagccctctctgtgcgccgccaccgcagcccccaccgagcgtcgacgccgctggaccacagctcccatcacgagccgccgccgccgccctcaccaatggtcgggcgagtggggattggtcggatatgcagcttcctcgccagaagtcattgatgggccgcggcggcgggaggaagttgaggcaggtggatagcttgccaaggtcgcccatggcgctggcgtcaagggcgtcacttgccaagacagagtcgatagttgacatgcaggaactcggcgttgtggactga

SEQ ID NO: 55536 - DNA, 498 bp, Oryza sativa
  Clone ID: PAT_MRT4530_57534C.1
atggagctcgatggccatctcccgcatgccgtcgctgctgcagctgagctgctcctacgcgccgccgcgggagcactcactcgcgcgtcgtcgtcggtgccgcacctacgcgtcgctgcaactcctgcatgccgccattgctgcacccgcgcactgtcgttgccgaagccctttcgtccgcctctctcacatgccgccgctgtagcacccgtatgccgccaccgcagctctcgcgcgccgtcgccgccgaagccctctgtgtgcgccgcctccgcagctcgcgccaagcgctatctccgcagtccctaccgcgcggcgcccgccgttgcagccccgccgcgtgccaccaccgcagctcccgccgccaccgccacagccgaagccctctctgtgcgccgccaccgcagcccccaccgagcgtcgacgccgctggaccacagctcccatcacgagccgccgccgccgtcctcaccgtgcaccgcctccgccgaaccctag

SEQ ID NO: 55537 - DNA, 185 bp, Oryza sativa
  Clone ID: PAT_MRT4530_57535C.1
tccggccagtctggtgacgggaccacgcacacgagtacggtggtggagactgccaaggaggaagcgctagcctgattcaaaatcaatctaatttcttctatcttcattgtgcaccgccctctcatttgtgatttttgacacaatcatttgacagcaataatgaacggacttagcaatcttgtatg

SEQ ID NO: 55538 - DNA, 1184 bp, Oryza sativa
  Clone ID: PAT_MRT4530_57536C.1
ttttttttttttttttttttttttttttttttttttttttttcaaagcaacgaaaaaagttccggtcacgatttaagcagtttaacatcggtccttgtacatatagtattatattgcctatagcaagaactataggttatttaccagcaagaagtgcactttgtaagtcgccagcctgtcaaaccatagccaagcccagcttagatctacagcctagatcgagttcctccagcaacaacaatagtttcagctgtaatgaatgatgcatcgtctgatgccaagaaagctgcggctgcagccatgtcttccacagtacccaatctcttaagtgtgctcctgtcaataagctcatttttaatggtgtcattagttgtgaggaaacgagcaaaatttgtaggaacaaaaccaggggctatacagttaacacgagtatttggccccatctcagcagcaagagcctttgtgagaccaagcagggcagtttttgtaacagcatacatcgacaatgctggttctggattatagccagtaattgaagaaatcaatatcacggatgatcccttccgcaaatatgcagcagcatcctgaagaagaagaatagatgccttaacattaatatcccatagtttgtcaaggataggctctttcatttctaatatgttatctacggaaggattggcagcagcattggagacaactatgtcgatatgcccaaaattcttgaccgccgtgtcgatgaggttcttgcgctgctccgggatggagacatggcagaccaccccgacgacggtgatccccttcgccctgaggcccacgaccgcctcgtcgacgttcttcttcttgcgggaggagatgacgacggcggcgccctcgaggccgaggcgctcggcgatggcgagaccgatgccctgcgtggaggccgtcacgacggctaccttcccctccagccgacggcacttcacctccatcgccggcgctcctcgcttctcggcgacaacttggtcggagtagactagctaggcctaggagggacgaggcgtcgatgcgatattgcgaatttgcgatgcgacggaggaaaccagagcggggtagacttgccgtacgatttgtccgcacgtagctttggtcctccaaggctccaagcacgccgtgcgacgacacaacgacgacggattaatcaaggc

SEQ ID NO: 55539 - DNA, 1005 bp, Oryza sativa
  Clone ID: PAT_MRT4530_57537C.1
tcaacctcccgcctttctcttcatcttggccagagcggcggcggggacggcagtggggagcggcggcggcggtggtgaggacggggtggtcggaagcggcggtggtggcggtggggacgatgacggcggggagctgcggcggctgtggcagtgggagcggcggcggcggcagtcaagagcggcaacggcggtggcggcagcggtcgggaacggcagcggtggcggtggggacgaggcggcggcggtcgggagcagccgaagcacgagctgctccccgaggatgggaggtggttcatggatgtcttccatgtcaccaaccgcctcggtggcaagctcaccaacgacaacgtcattacccacccgcctgtgtgtcctctccttcctcggctggagccagcagttcagttgttcgcccgccgccacccctgtagccctatgccggagcaggctcctacgaaggtcatgacagtgccccgggcgagggacaagcacgcggacggcctcgtctagcccgttgacctcgccatcttggtcaccgacgccgcccaaggcaccatgcccactggatttgtgcgtgacaaggccgagggaggcaaatccggtggtgtcgcgcccctccgccacccggcggcacatgtcccgtgctccctcgccgctaggagtgcttcgagcaagaagagggtggaggagtgcttgcgacaagaagtctacgagaaggcaccgacgccggcaagaggtggcaagaagtgctcacgccatccttgcgacacgattcagtcaagcgccaacgcatatgccaaattgccattcttgcaatgcgatttagctctcatcactcacctctcgtctcgccagcaagtcagcagggaaaatcaccattggcctcttcggcgacgaggtccccgccgccgaatgaccaaatttgctctggttttcaaagatggaggaggcgttatatctggtattgcggttgagggaggtgattcaatcaggggcaagagttga

SEQ ID NO: 55540 - DNA, 933 bp, Oryza sativa
  Clone ID: PAT_MRT4530_57538C.1
atggaggtgaagtgccgtcggctggaggggaaggtagccgtcgtgacggcctccacgcagggcatcggtctcgccatcgccgagcgcctcggcctcgagggcgccgccgtcgtcatctcctcccgcaagaagaagaacgtcgacgaggcggtcgtgggcctcagggcgaaggggatcaccgtcgtcggggtggtctgccatgtctccatcccggagcagcgcaagaacctcatcgacacggcggtcaagaattttgggcatatcgacatagttgtctccaatgctgctgccaatccttccgtagataacatattagaaatgaaagagcctatccttgacaaactatgggatattaatgttaaggcatctattcttcttcttcaggatgctgctgcatatttgcggaagggatcatccgtgatattgatttcttcaattactggctataatccagaaccagcattgtcgatgtatgctgttacaaaaactgccctgcttggtctcacaaaggctcttgctgctgagatggggccaaatactcgtgttaactgtatagcccctggttttgttcctacaaattttgctcgtttcctcacaactaatgacaccattcacccaaaatgggcgataatgaatttcaaagaaaaactagatctgtggtatgttaccgattcacctaaatttatcgtttgtattccttttgttttggaattcttaggtggtgctagagtggattttagatccaagccattccttgactatgtcaaaagactaaattataagaaaaatgagcttattgacaggagcacacttaagagattgggtactgtggaagacatggctgcagccgcagctttcttggcatcagacgatgcatcattcattacagctgaaactattgttgttgctggaggaactcgatctaggctgtag

SEQ ID NO: 55541 - DNA, 522 bp, Oryza sativa
  Clone ID: PAT_MRT4530_57539C.1
atggaggcgggcggcggcggcggcggcgagctagcacgtcttcttcctccgccacggcccaacgaggcggctggcaaagctaggcaggcgtacgaacttgtggccgggaaaaccgccggcgtcgcaccgtgcaggggccaacctgccgtccatcatcaatgcctaaaggaatcctatgtctcgacgcaccaagcagctagcagcacagtgcagctctgctctgctgctctgagagattcggtcatctgcactgtcaccgtgtcgcgtcttacttacacggggcacctcttcaacgacgacgacgccgccgccgtggcgctggccaccgccgagatgacgccgctgtggacgccagcccgctcccactcccacagccctggccccgcggcgccgagccggcatcgcggtcgcatcaccgactcgtcgttcgccgcgaacaacggcgacgacaactactcggcggcgtcggccggcggtggcgcgcagcagcaggtggacaggaaggccgctgacgaccagtga

SEQ ID NO: 55542 - DNA, 1116 bp, Oryza sativa
  Clone ID: PAT_MRT4530_5753C.1
ttcccccccccctttcccctcttgggccggctcggcccagctccctccctctctctcctcctccccgcggcccatccggccttcccccgcgcgcgcgccgctgacgggcgggcccgcccgccaccctcgctgacgggtggggcccacccgtcatcccctacctcgcgccgctcccgccgcctcgcccgtgccctagcgccgccgccgctgcgaatcccgccgcctcccgccgtccccgcgcacattaaagtggggggaattattccccgggattccctctctctttccccccatttctccctctctctcccgcgttcaaacgggcggatttgcccccgcaaatctcgccggcgccattgaaggcggccgacctcccgcgccggtttcctcccttcccggccaccctctctcgccccggctctatttaaaccctccccgcacctcctccgtccggttccgcctctcgctgcccttcctgctcgccggattcgagctcgcgacgtcgctctctatctctccgccgacgccgaccgagctccggcccgctgccgacatcaccccggaccgcctcccacctcggcagccacctccttcggcattgccgcatactcgatcgacctcatccacctctccgtttcggacgccgaccgccggtacgccgcacaaaccccgtcgacccgagccgcgccaccacctccctccgctccggccgcctcctccgtcgccgccgtcgccccggggtgagccgtggaccgtcgcttcctttccccctaccctcccttctatcggccgccgctccaccgtgccggtggtcgccggcggcgaccatcgggacgcgggcgcgccgtctcccgccggccgcgctggcttggccgccctcgggcgcgccgagtggctgccgcgtggggcccggccgtcagccgcccgcgccctcgggtgcggctgacgcgtgggacccacggcgccggccggtgtgagccgggtgcacccagtccaccgtggaccgtgtggctgccgcgtgggccccactcccgtggacccggtccgcgcacccctcccctcggccttgttcaccctagattaaacaaaaccccaactagtggatactctactcat

SEQ ID NO: 55543 - DNA, 377 bp, Oryza sativa
  Clone ID: PAT_MRT4530_57540C.1
tttgtttttttttttttttggtttttttttttttttttttttttttttttttttttttttggacccacttaaaagatcctattttagattgggaattcaacaaggggaggggttcactgttttcacatttaagaagaaggggcccctgttacatttcagaagagaaacgcctagggttttccggttggctccacagggggatgggttagccggtttgggttgaaaaccttaccctttttttttatttgacataagggccttccctaatattaaaggttttttaggggggaagccaattcatgacacaaccaacttttgacaaaaaatgggcccgaggaaccggccaaaaataaaggggtggtaaaaaggggcgaaca

SEQ ID NO: 55544 - DNA, 318 bp, Oryza sativa
  Clone ID: PAT_MRT4530_57541C.1
acccacgcgtccgcggacgcgtggggggtttttgttcgcgcccccccggttagaggtagaccggtctccccggcgagattggccacgtctacgcatctgcctccccctccgccgtgcgcgactcgaataagaagagggggaaccggtcgtcggctaattctgaagctttgcaagctcgacgcccgccgcgagcagtggctttcgcaagtcaaggattgtatggtggcttaggcatttacttctccgacaggttcagagccaaatgctgggttcattacccgttctttgccacacccttcgcttccttggcgtaggtta

SEQ ID NO: 55545 - DNA, 747 bp, Oryza sativa
  Clone ID: PAT_MRT4530_57542C.1
atggcgtcgtctgttcccgaggatggtgctagcgctgctgctgcggccgctactgctgaccctgctgctgctgcggctgaggctcccgggcgacgcatcgtggtggccgtggacgagagcgaggagagcacgcacgcgctcacctggtgcctcgccaacgtcgtctcctcctccggcggcgacacgctcgtgctgctccacgcccgccgcccccgccccgtctacgccgccatggacagctcagggtacatgatgacctcggacgtgatggcgagcatggacaagtacgccgccgccgtctccgccgcggcggtgggcaaggccaagcacatctgcgccgctttccctcacgtgacggtggagacgatggtggagagcggggacccgcgcgacgtcatctgcgacgccaccgagaagatggccgccgatctgctggtcatgggcacccatggatacggcctcatccagaggtactactgcaaattgattgattgacactgtgcgcagaactgcaaatgcccagtgctgattgtcaagaggccaaaataatagttgctaagtaatatacttagtactggtaataaagctcaactaatgcagagcttgctagtttgatgtttgtaaatattggcatgtcatgcttggtttgttgatcgagaacaaaagctatatgttgtttggtggcatggcagcgttcgatgttcagcgaccgatgcggatctgcggatctgttggcaccttgtaatg

SEQ ID NO: 55546 - DNA, 166 bp, Oryza sativa
  Clone ID: PAT_MRT4530_57543C.1
atgttaacaacggtacattagatggcggagggctttttttcaacacattaaccacccccaatgctgttcatttacaaatttgatcctaccacaccaatgcaaacattgaccagaaaataattcgttcaaccctgctacctggtaatgcatgacaccagccatttta

SEQ ID NO: 55547 - DNA, 336 bp, Oryza sativa
  Clone ID: PAT_MRT4530_57544C.1
ccggcggggattccacctcctctccacgcgcagtggtgctcctgctcccctgcacggacgctcgccgacggcggaggcatggccgtcttcaccaccaccgccgccggatccgccgtcgccttcgcgcggccagccaaggcaatcactgtcagttcagagtctttcgctgagttaaagcacaacgatgtggatttcactctgcggccagagacacaaagatttgcaggtctccgcgctgccgaaaaggagacaatggaaaaggatggtgatattgagaagaatgagcttgcacattgctcaagggactgaggttaactgagcctctagaatcaccga

SEQ ID NO: 55548 - DNA, 1624 bp, Oryza sativa
  unsure (1)..(1624): unsure at all n locations
  Clone ID: PAT_MRT4530_57545C.1
gtgggcaaaaagcgagagagatctctcccgagctcgatccggtccaccgcgacacgaagacgaccatggcgatggctcgctcccagcttgccgccgtgttcctcgccgtcctcgtctcggtggcgccgctcgccggcgcggcggacaacctccaggacgcgtgcaaccggacgctgttccccaaggtgtgcatccaggcgctgacgacgaacccggagagccggacggcgaacgcgcggcggctggcggagctgtcggtgtacgtggcggcggaggtgggcacggcggtggcggcgttcgcgcaccacgagctgaacggcgtgaaggaggacgccctgttcaagtgcgtggacagctgctccgacgacatcgaggaggcggtggcgcacctcagcgcgctcacccgcgagctcaccgacgccaagttcctcgaggtcaaggcctggctctccgccacgctcggcggctcctccacctgcgaggacacctgcaaggacgcccccatcagcgagatcaagaaccgaggcctccggctccatgtccgccgacgtcgccctcccgcccgccaccggcgggcggcggcggcggctatggctatgaatccagcagcgccgccgccgcgccggcgccttccgagtccgactccgacgtcggctccggctcaggctccgccgccagcgcgccgggcccgagcccatccgacgacaccggctacggcggctcctccggcagcccatccagcagcccatccagcagcccctccagcagcccctccggcagcccctccagcagcccctccggcagcccctccggcagccccgccggcagccccgccggcggccccaccgccggcggccctgcatctggaccgtcgtcgtacggcgccgcctctggccccgccgaagggccgtcgtcgtccggcgccgcctctggccccgccgaagggccgtcgccgtccggcgccgccggccccgccgaagggccctcgtcgtacggctccaccgaagggccgtctccatcgccgtcgtcgtccggctccgccgacgcgccgggacccggcgccagctcctctccctcnccctccnnnccccnccccccctccctcnnnncnncttctcccccctcnctcccttccnttccccnnncccccctggtttcnnccccncccnntccccctnccccctttctcccctcctttcncccccctccncccccccncncccccccccggctncgtctccnnntctccnncncnccccncctctnccccccnncccnctccccccccccccccgctnccnnnnccccnncncncccggccttnnctnnctttcttccccccgggtnnncncccccnncnnncccnccncccnnnccccgcccnccgcccttncccccccnncccccnccccccccctcgccccggggcgcccccttncgcgccgcccgnncccccccgccggnntgccccccgggggtttnnncccccccgngcgcnngccgcgcgcatcccgcccccgccctcggcgcncgcggnccnnggnttgtcttcggcctttttnnnnnnggggcccggcgtccnncgccccgctcggctcggnggcgggcggcggcccggcgagga

SEQ ID NO: 55549 - DNA, 1087 bp, Oryza sativa
  Clone ID: PAT_MRT4530_57546C.1
atggcgatggctcgctcccagcttgccgccgtgttcctcgccgtcctcgtctcggtggcgccgctcgccggcgcggcggacaacctccaggacgcgtgcaaccggacgctgttccccaaggtgtgcatccaggcgctgacgacgaacccggagagccggacggcgaacgcgcggcggctggcggagctgtcggtgtacgtggcggcggaggtgggcacggcggtggcggcgttcgcgcaccacgagctgaacggcgtgaaggaggacgccctgttcaagtgcgtggacagctgctccgacgacatcgaggaggcggtggcgcacctcagcgcgctcacccgcgagctcaccgacgccaagttcctcgaggtcaaggcctggctctccgccacgctcggcggctcctccacctgcgaggacacctgcaaggacgcccccatcagcgagatcaagaacgccgtcgtcaccaagagcctcgagttcgagaagctcctccgggtcacgctcgacctcatcaccgaggcctccggctccatgtccgccgacgtcgccctcccgcccgccaccggcgggcggcggcggcggctatggctatgaatccagcagcgccgccgccgcgccggcgccttccgagtccgactccgacgtcggctccggctcaggctccgccgccagcgcgccgggcccgagcccatccgacgacaccggctacggcggctcctccggcagcccatccagcagcccatccagcagcccctccagcagcccctccggcagcccctccagcagcccctccggcagcccctccggcagccccgccggcagccccgccggcggccccaccgccggcggccctgcatctggaccgtcgtcgtacggcgccgcctctggccccgccgaagggccgtcgtcgtccggcgccgcctctggccccgccgaagggccgtcgccgtccggcgccgccggccccgccgaagggccctcgtcgtacggctccaccgaagggccgtctccatcgccgtcgtcgtccggctccgccgacgcgccgggacccggcgccagcgcaccggattccgaggagtactga

SEQ ID NO: 55550 - DNA, 356 bp, Oryza sativa
  Clone ID: PAT_MRT4530_57547C.1
tcggtagaaacaagccccaaggcaatcagtcagcacgcatgaagatgttttgatgccatctctgcaaaatctgctaaaaaagacgaatcttcccacactagagatcgaccttacaaacggatcctgctcgccctcatcatcgataagagctgctcccctcttatgctccgcctctcgtggcactcgtcggataccatctacttgtctccaaataccgttggcccgttcgcaaccatcaacaccccgcatgagctgttgcacgccgccaacgcattgctgtacatctcggcgcggatgctctatcccatcatggaggatatacccaccatcttctactccgatttctaccaccttgc

SEQ ID NO: 55551 - DNA, 394 bp, Oryza sativa
  Clone ID: PAT_MRT4530_57548C.1
gtgaattgcacagatgtaaatgcaacaaataaatgagacaaggagacaagagatttttcaccgaggttcggaaactcgccggtttcctactccccgttgaggcgagcccaactccactgctcaatcacgaagccaccgcacgccccattcgtcaaggggtgggtaaggcgggagaatcccccaactcagtgtactgccggtctgaccggaggtgtgtggccggtcagaccgtgctactctgcccggccagaccgcccaattgccgtcggtcagaccggccttgtgcaccggtcagaccggcccatcccacaaaataaaatgcaagcctagaagtcttctcccccttttgacatcaaggaccaaaaaggcttcactcttgtggaggagaaggagg

SEQ ID NO: 55552 - DNA, 333 bp, Oryza sativa
  Clone ID: PAT_MRT4530_57549C.1
atggcccatcgtgccttcgggccggcccggcacggcccgagacgtgttgggccgtgcctgggctgtgagtgcggcacggggagggccagctgcccgtctgccccaacgccgccgcggcgcgtcgtcgtggttgcgggagaggctatcaaagacgaggaacagcgcggcacggggccgaaggcgagcacggtggtaggaggaggagggcggcggccgccgggcaaccaggacgacggccatcgcgccgcggcgggatccggcgggaacgagggggacgacgacgccgacgaggaggagaggatcccgtcgggaggagcgggcttgggcgaatga

SEQ ID NO: 55553 - DNA, 435 bp, Oryza sativa
  Clone ID: PAT_MRT4530_5754C.1
gggaaaaaaaaaaaattccgggggttaaaacccagggaaagccaaagcctcccaaaaccaaccaaaaaaccacatttgtaccaggggacctaaacttttaaacaagggtgggggggaaaaacccgggggggataaatagggggaacccccccccaaaggttaccatggaaaaaaaggggatggcccgcaaacaggaaggggcatgaggcccaaataaggggcgaggggggaatactataacgggggggaaaggaacacttcggatacaaaggtccattaaggagctgggtaaaggggaacccaaaaaaccggcgggggaagaaacgattctataaaaaaaagcggttggaacaaaaaaaaagcgggaaagggggggaaaaaattttgggtcgggaaaaaaaaaaagggggggttggaagggcggggggggggggg

SEQ ID NO: 55554 - DNA, 621 bp, Oryza sativa
  Clone ID: PAT_MRT4530_57550C.1
atggcggtgaccggcggcgccgcccctttcctcatcgtcatcgccgttctgttcttggtggttgccatccttcctcggacgaggaggcgtgatggcgacgcagcgccgagccagccggtgctcggccacctccacctgctcaagaggccgccgctgcaccgctcgccgcgccgccgcggccagggcgccgctggtgtcgctgcggctgggccgcgcggcgggcgctgctcgcgtcgacgcacgccgcggcgcgggggagcgcttcacggcgtgcgacgccgcgatggcggggaggcccccggctgctcgccgtggacgtcctcggtatgtgagttttttcaaggcagtcatcagtatatccttgagaatcccaacaactgcaccttcgaggaggagagggaaaaatcccagagaagaaattttatttaccttttggacaaggggatatgtatgactaatcctcctcatttactaactgttgtgaaaaaggtttgctcatttatcacatgggatggataccagtacatgtctaatcagtttgggagaactaatgcagttgccctccctctgaagaaaggagctggatttgagctcatcttacaacaagatttacattattga

SEQ ID NO: 55555 - DNA, 243 bp, Oryza sativa
  Clone ID: PAT_MRT4530_57551C.1
atggggctttgtccttgccgtgtctgcctgtggggcctgcgtgtcacgagaaaccccgcatgcatgcgcgcggcgtacgttcgtggcgtcggcatgcggcgcaaggaggacgatgaggccattgatggtcgccgatgcatcgctggaagactgggaggcagtgagccggtgaacgtgactcattccttacgtggtcgatatcaacagctatatgagcaacgttttctcgcgctgcgcaactga

SEQ ID NO: 55556 - DNA, 684 bp, Oryza sativa
  Clone ID: PAT_MRT4530_57552C.1
attcggctcgagtttttaggctgagcttgtgagaaagaagcttttgggagattcgaccgaatgctattcacttctaaatcttcgatttccatcgtttcccgtcattgatttcggcgcaaaaatcttccccaaacgtttccccaaatccatttcattctcacacccttcatcgaagtttcaactttgtggaatttcccgagctatggaagtggtcgaaggaagtgaagagagtaaagggtcgtcatcccctctaatgaagctcttgttcgtggaaatgggtgtcggctacgatcaacatggacaggacataacggttgcagcaatgagggcttgcagggatgcaatctcttctaattcaatccctgctttccgcagaggttccattcctggtgtcagttttgatcagatgaaattgcagattaaactaggggttcctcattccctccagaattccttggatattgagaaagtgaagtcagtatttccctatggagaaattttgaatgttgaagttgtggatggtggtttgatatgctcaagtggggtacttgtagaagagatgggtgacaagaatgatgattgttacattgtgaatgctgctgtttatgtgggctattaactttcaggttttgcagagctttgctctgtttggtctcttgttaaatggatgattactacaatttt

SEQ ID NO: 55557 - DNA, 501 bp, Oryza sativa
  Clone ID: PAT_MRT4530_57553C.1
cttgtgttagtcgttcttctagtggcttgattgtccttcaccattttattctggtagtcgttcttctagtggcttgattgtccttcaccattttattctggtaatttactgcacgtaggttaccacaagatcaacatccctatatggggcgtgtggctggttgtgctaacttgttatttctgttgtggtacctgcactcctttcttttcttttttttttctctccgccacttacggagtaataaacctggacggcgccgttcctttgcaggcccatcgaaatcgacatacggtcattggcgcgctaaagttgaaattggagaatagcacatcagcaatccaaagtacctataggtatcgtgaaacagacttcacgccttgattgtccttcaccattttattctggaaagctacggagattcacagctgagaaagcggctgacttccatggcatggcatagactttgagcatcatatccatttggtttcaacagggggattc

SEQ ID NO: 55558 - DNA, 342 bp, Oryza sativa
  Clone ID: PAT_MRT4530_57554C.1
atggaggaggacgacggcaccgttgtggttgatggcggtggccggtggctattgaggcgaagtcattgcttcgggcctcgctcccgaacgccgggcaacaccttaactagcaaggagaggatagggtggagtccgccggtgatggaggttgttcgctatttttctttttctcgtcgtctctatgacatgaacgagaatgtttttgcatttttttcgtgcttgctagagatggatggctgctactgcgcagtgtcaagctcatctctataccacaccgctacatccttccatgactctatcgtcgactaccgctcgccacccgattgccctctccactactag

SEQ ID NO: 55559 - DNA, 164 bp, Oryza sativa
  Clone ID: PAT_MRT4530_57555C.1
gtgtccagttttggggtgattctggtggaaacacgccacaagccacaggtattgtaagtgaatttgcgcatgtggtaaagccatggtggtgtgcatgatccttgggaacgtaatggcttggtctaaataataatggtgaactaaaagctttagtggtcactgca

SEQ ID NO: 55560 - DNA, 636 bp, Oryza sativa
  Clone ID: PAT_MRT4530_57556C.1
atggcgggtggagtgggcggcggcaaagagggcacccgcagccaccggcgcttgggacagcggagaaggggacaacggagggaagctgggatgccggcgagtgcttgcggaggggaggcggcaagcgtgccgagagggaggaggcgggtgacgctcctctcctctcccctgccgccgcgccgccatgccgcgcggtgctcctctctgcaaacgagctcgtgcgcgaggggcgcaaggaggctgagagacgaggaggtcggactcccccgcgatcgccgtctccagccagatcccagcgagcaggcgtcgaggaagggtagtggggcatggcggtcgtcgttgggccagagccaaaggtggtcgccgcagcaacgaggatggctggaatcttcgtactccggtggaagcggctcgaacgatgacagcggaggcggcggggatgactccgactactctcccggccttcccgccccctcgccggcctgctccctcctcagcccactccctggcctcctcacctccttcctctctggccgcccccgctccacccaccctactattgtcggcatgcttcggccgctaccgctccgcccgccccgctctgccaccgctgcttcaccccaccgctctgcctga

SEQ ID NO: 55561 - DNA, 405 bp, Oryza sativa
  Clone ID: PAT_MRT4530_57557C.1
ttgttgttttttttttttttttggtttttttttttttttttttttttttttttttttttttttggggaaaaaaaaaaaaaggggggtccctcaaaaaaaaaggatccctggcccatttgcaaaaaacccggggggggggccctcaatctggtagaccattcataggggcaggggcccttagctttttcctctccaaggtcaaaccaaacccttggcaggttggataataagccttaaaattagcccaaaagcctccaggggggtgcctttatttacaacttccccttccattttattcccccaactccttttttaaccaaccccccttggggccctgggggtcctttggcccaacaaaatttgggggtccaaacaagggcttggggaaaaggcccgggactttcc

SEQ ID NO: 55562 - DNA, 2527 bp, Oryza sativa
  Clone ID: PAT_MRT4530_57558C.1
ccacgcgtccgatttctcgtctccccccttcctccaatatatcggcggcgatcccggctcgaggagaggaggctccgccgcgattttttcggtgtcgcatcgaaattatgattttcgatgcattttaggctaaaagtgctcgggtctgaaacctacgtgcttttcttgtcgccgaagatggtgtcagcaaatatacatcgacgcacatgaacagcgatgatgcgttgctgaatccgtctgaagctgcaataagcatgacggttttgcaaattatgatactaaaccattcatgctgctacgccctcgtctggaactttcttcttctgatgcaaccgtgcacaagcaaacctagcctcgaagcgattgtgatgagttttagaggtggtgcgggttcgatcacgtggagttctattggtgttcagtgactcttggcaaaagttctcttgtaaaatcgacgacgatggaaaggtacaaagtgataagggagataggcgatggcacctgtgggaatgtttttagggcttataacactgaaacaaatgaaattgttgcagttaaaaaaatgaagaggaagtttttccaatgggaagagtgcattagtctgcgagattcccaccccggacccggaacctttggggttttggtccagaacctgaggacaactaccttggagttaactctgagtctaaagccaagttttcctggcacagatttttcggacaatgttccagggcttacaaaacagcgaattctgctgtacccaggatttgaaaatcctcctgtgcagtcagcacggttttggcctctcgttgcatcagaccgcccaatgggcgatgttccagccatgtcatcctggccacaggcatatgtggttgacggccaagccacacttccagctgttggattctctggttctccattcggtttgtcccccttacaaccaaatctgtttgagaaccgttcgttcgcaacacccatccggcaggtcaatttcttctgaggggatacgattaacagattgagcactgaaactatttttcagtccatacattcaacttgttcctttatacattgaactcaaataaacgggggcggcagatgaaatgtatataatcgtagcttgtttccttttttcttttctccccatctaaattcccctcacggagtaccctataatgtcagattctatatttatctagattgtgaatatgtgactttccaaaacagttttgtacgtcgatttgtcaaatgataacagcaagtatggatgagctgatcagaagaggagatacggaactttatggtgcagatactgcaaggtcttgcatatatgcataacaacggttatttccatcgtgacctgaaacctgaaaatctgttggtgacagatggcactgttaaaattgctgactttgggttggcaagagaagtatcttccagtcctccttatactgactatgtttccaccagatggtatcgagctccagaggtgctgctacaatcgtcagcttacacacctgctattgatatgtgggctgttggtgcaattttggctgagcttttcacactgtctccacttttccctggtggaagcgagactgatcagctatacaaaatatgtgctgtgcttgggacaccggatcatactgtctggccagagggaatgaacctgcctcgttcaagcagctttaattttttccagatcccaccaagaaatctatgggagcttattcctaatgctactttggaagctatcgacttgattcaggtgcttatgtactgggtaccaaggccactccatgcctctcacacaaagacaattgaaactagaccgaatccaaggttggaactgaacctgtgggattttggtacagaacctgaggacaactaccttgatttaactctgagtctaaagccaagttttcctggaacagatttttctaacaatgttccagagcatacaaaagaggaaattctgctgtacccaggatttgaaaatcctcctgtgcagtcagggttttggcctctcgttgcatcagaccggccaatgggcgatgttccagccatgtcatcctggccacaggcatatgtggttgacggccaagccacacttccagctgttggattctctggttctccattcggtttgtcccccttacaaccaaatctgtttgagaaccgttcgttcgcaacacccatccggcaggtcaatttcttctgaggggatacaattaacagattgagcactgaaactatttttcagtccatacattcaacttgttcctttatacattgaactcaaataaacgggggcggcagatgaaatgtatataatcgtagcttgtttcctttttcttttctccccatctaaattcccctcacggagtaccctataatgtcagattctatatttatctagattgtgaatatgtgactttccaaaacagttttgtacgtcgatttgtcaaatgataacagcaagtatggatgagcgataactgacgatttgtgaagctgtttttgtatg

SEQ ID NO: 55563 - DNA, 477 bp, Oryza sativa
  Clone ID: PAT_MRT4530_57559C.1
ccggccgggatccttgacacaagtcaaacgctacagcagaggcatagcagcagcaatcctacataaacgaagatattacggaatgtgttctccctgctattgatgaatggcaagagcttatgcacgatttagacggtcttagtcaaagatgtctgacaatacaactacgattgcatctcctgctacagcatcaatgtgctcagacgcatgcagtcgacgatcaaaagcgtaacaggcttaggtgtatgcgtcaaccccagttctgcgtaccagctacggtgcagttgataaacaaccgagtcatgcagcgaacagcggtggcaacagctcaagctggtagcgcaacaatatcactaccaggtcattattatgcgatcagacgattgggcagcaactacacggtgggcagggcggtattatctactttgagcaaactcaagatcaagctcaagacttaggtgggtcttttaactttgc

SEQ ID NO: 55564 - DNA, 6230 bp, Oryza sativa
  Clone ID: PAT_MRT4530_5755C.1
tacatagaatttacgtaattgatcaatgttccaggaatttgccaactcgcggccatcgccgtctgcgattttgaatgcgcctggccgcagaacttgggtgagagcttgttgtgccctgcttggttttgaacccgtcggaggacgttgtcgccgatcgaaagcgtgcgtgctcggatgcgcttctcatggtaacggcgaagggcttgttggtagttgactgctcgaacggcaactcgttcgcgatgttcctcgagtagattcacatcgtcgtatcgctgctcctcctgatcctcatcggagtacttctgtactcgtgtactttgatgtcgtagctcggtggggagcatggcctcttagccgtacacgaggaagaagggtgtgtccttgttggacgttgtcggtgtggtacgcatggcccatagtagggtcttgattccttgtagtactatgccgtttgccctctcgacttgtccattgctctgagggtgagaaaccgaggcaaagcagatcttgactcccaacctaatgcagtaatcctagaaatcggcactgatgaactaggagccgttgtctgttatgatacggtggggcaatccgaatctgcagaatatccctttgatgaatttgatggcgttgtcggccttgttttcccccgtgggtgtcgcttcaatccacttggtgaatttgtcgatcgctacgaataggaacctgtagccgccttgtcctcgtgggaatggcccgagtatatctagcccgcagcacgagaacggccaagtgagagggatagtctggagtgcttgtgctggcagctttgtgtgtttacatgttgcaagcgtctttgagggcggttggccagaaaaacctttgtcggaaagcttttccaactaatgtccgaccgacggcatgtgacccacagaccccttcatgtatgtcgagcaggaggtgtctgccgtcgttggacgagacgcattttaggagtaccccgtttagtgccttcttgtatagatcgttgccgatcatacagtagacttttgctttacgggatattttctcggcttctgcgtcgtcctcgggcaactcttcgtggctgcttgaatttaatgagtggggtgcgccagtcgtccgtggtctcgatatcggcaacggcacgctctgcctctgtagcccccgagctggtgtcgggggcgaccgggctatcttcgccgcttgcctctttcactgatggcctcgtcaggacgtccagaatggtgctaggtttaagtggttctcgtctggacgcacgtcgtgctagatcatccggttcgatgttgtctttacggtatacatgtcggacctcgatcccatcgaacttttttccagcttcctgacttctgcgagatacttggataactcagggctagagcacttgtaatctttatgcacctagttcgcgactagttcggaatcccctttcacgatcagtcgcctgactccgagtgcagctgcagctcttatcctagcgagtagtccttcgtattcggctgtgttattggttgccctgaagttgaggtgaattgcatgcttgaattgatcttctgaaggtgatgtcaagatgaatcctgcccctgctccctggctgttgagtgcgccgtcgaacgccattgtccatatttcattgtcgatttggttgtctaacttgttatcaggcatggtccaatcggctacgaaatcggcaagtacctgggacttgatggctgttcgtggcacgaagtggatatcaaattggcttagctcaactacccatttcgcaatgcggccgacaacgtctttgtttctcacgacttcgccgagagggaaggaggagacaactgtgaccttgtgggcttgaaagtagtggcgtagctttcttgatgtcatgattactgcgtagagcagtttttggatctgtggatatcttgtctttgcgtcgtggagagcttcgctgacatagtagactggtcgttgcaccttctctctctcgacaacaatgacagtgctaacggaatatggcgtggcaacaatatagagaaataattcttcattaggttagggggcaacaagtacaggtggattttataggtagcgcttgagtgcaatgaatgcctcttcggcctcctgtgtccatacaaatttgtcttgctttttcagcagagcaaagaaaggttgtcctcgctctcccatcctagcgacgaacctgcttagtgctgccatgcatccggttagcttctgtacttccttgagtcttgtaggcgacttcatgttctcgattgccttgatcttctcgggatttgcttctattcctctgctagagacgaggaagccgagtagcttgcccgatggtactccgaacgtgcacttctctggattgagcatgaggcgatatcgtcggaggttgtcgaacgtttcccgcagatcgtcaatcaatgagtcgcttatcttgttcttgacaacaatgtcatcgacgaaggcctcgacattgtttccgagctggtcgctaagtgcaccttggaccgtgcgctggaaagtgtttcctgcggttattagtccgaatagcatcttaacgtagcagaataccccgaacgacgtgatgaatgctgtcttctccttatcctcttttgccatgcttatttggtggtaaccggagtaagcatcgaggaagctcaacaacttgcaaccagctgttgagtccatcagttggtctattcgaggaagagaaaagtgatccttgggacacgccttgttgaggtcggtgaaatcgacacacattctccacttcccattggccttccgtaccatgactgggttggctagccactttggatggagtacctctatgatgaaaccggctttgagaagcttgtcgagctcttctcgtatgggttgttttcgatctggtgcaaatctccgcagtttttgctttactggcttggcatcgggtcgcaccatgagtttgtgctcaatcacctccctgggtacccccggcatgtcggacggctgccaagcgaacacgtcagcattgtcgcggaggaaggtgatgagcgcgacttcggtcttgtcggggttggcattggagagtggaatgatcttgattgcgccgtctggtttcggcgtcttgtttgtcttgctcactttcttgggtggctctgctgtggcaggcaggctgggcatgtgctcgaccatgtcgaggctccgcttgtcgcattgtactgccagcttagcgttcccttgaatagtgattgttcccttcagtcctggcatcttgaacacttgatacgcatagtgagatgcggccatgaacttcgcgagtgcagttctcccaatgatggcccccgaacgtctctgccgcttcgacctcgccgccgtcgccgtccgttgtcgtccgccgtcgtccgagccctcggtgagttcgccgcgtcgccctctacgcgtaggtgccctccgtttgcgtcgccgcgccatcattcgctggctagcacgaggtgccgagccgccgccggtgatgacgtcatcgtcgacatcagcgccacgtcagccgtagacccgtggtggattagatgtcgaacagactttacgttccactttcttgtattctcgctttgaggagtatgccgtggaacctccaaagatgtgtgagacatggagatcggaatctgggtatgctgagtccgattcctgagtaggcgcgtcagcgtccttctcaaccacgcgtactcgcttgtctttttccgatgccatgtgttttgcgagcgactttttgaagacgaggcaatcatcaagagaatgtctgtccgtcttgtgtatagggcaccatgctttcttcatgtcgctgccttgtgggtctgggcgctagggagggtccacgtattctgttgcgagaacttctgattgagctttccttttcccactcttgcgatttttctttttgcttgactcaggtgcgtccttggctggtttcttctctcctccggtcttcggtttgtcgttcttgcgtttcagtgcgtcatccacatgagcgcatcggtcgacaatttcgaataatctccgagtagtcgtgatgcgcctcgttgccaactcctgagtagtatagcgatctctgacaccggatttgaaagcgcgaattacagaagcatcggtgatctcggggattgtgtttctgcactcgttaaagcgcggaacataatccctcaaggattcgcccgggttctatgtcaacgcatgtaggtcgtcttcgatcgcgtggcgcttgtaagttccttggaagttggctacgaactgctgccataagtttgcccacgaagagatcgagtaggggggaagaagcattagccatgaacgtgcagagcctttcaatgcggttggcaagtaattcaccaacgcgttgtcatccgctccggcaacgtagagtaccgtggagtaaacctgaaggaactcttccgactcggtgctcccatcgtatttctctattgctccaagtcggaatctttcgggccatcggacatcctgaagtgaacgaccgaaagctctacacccagcgctgggggcggtgggttgtcggcgatcatgcgtccttcgtggatgtctatccgatgatgaagatgacgaggatgatgacgatgacgatgggtcgcttggttccggcatacgattacggggacgtcggctgggttctcgagaatcctgtcgtcgtctcccgctgttgtctcggcgccgatctccatcatcgtcgtcattattgcgacgtcctcgactagtatcgcccaacacccgccgttcacgatcgtcgtgatcgtggcggttgtggcggttatcaccgttatcgtgacgccgtgaagagatatgacgccgggaatggttctcgttgtcttgtgtgtgtcgtgcctctcggcggccattcaggtgatcgcggagatcactggtgccgcgaggtggaggggtcgctcgatgaggtgattcccgccgttcagggtcttcaccatttgcatcgccagttggtggctgttccgggtgcgctgcagcagcggcctcttcgaacgcgttgctgaggttggtcactgattcccgtagtcattctgtccaatgtgtgagatcgtcattgagaatgggatcgtagggggtttccctcagtattgcgttgacggctctgatgtgctgggtcggagtagtcacttgattctccgctttcgctttggtgcgcgctgacgtgccgacatcgtcgatagacaatacctcacgcggcgtactcgtcgatgatccatagtcttcgagtaggtgcaagactgatggttcatggggatcgatgtcgattaccccaacaaatcgatctgaaattggcgtcgctccttgttccttgtcctcatccctgatggggatgcgtgactgctggaccttaggaggtggcgtcttcatggcgctgagaaagaccttgcagctcgagaggtcgtgattctttgtcttgtgaataggacaatagacatcacgagttggagaggtacgctgaattccacgctctttgcaggcacgaatttcagaatggacgttgagaaagacccagcaggcttgcagggtatgtttcctggttttgtggataggacaccaagactttgtcacctcagaagtaatcctcgtcggctcgtgattcctgtcagaaagacaaggcttggccgcactaggatccttctcgggttcggatgtcgtcgacgttccgatctccgctttggcgggaggaaccttcaacatggagtcaccccgggttgtagccgctgcgttctcgtttccggccattggcggaccagctgagatcggcattgtggtgtaaaccagaaagacgatttcgtcgacttgagtccacaccagtgttgttgaagttggaactccttggttgaggttggtgttgacgctgttgtcgacgaagctggatgtcatagtagtagaaccttgagcgccaagtccccctacctggcgcgccactgtcgacgggggatacccgtagaccggatatagagggtattggggtacgctggtatgaggatttcgtaggttgtggtggatgtgttggctctgaaattcgatgccttaggtctacccgggtggtcccttttataccgtaggtcaactggtctccaagtaggactcggagacatcggacccgacacgatataatgacgacccagttctatctgagtaggactctttccatctgtagactccatgat

SEQ ID NO: 55565 - DNA, 272 bp, Oryza sativa
  Clone ID: PAT_MRT4530_57560C.1
acatatatgctggtcctatagagccaaggcaccctcatgatctcttactcaatgaggaacataggcgccttgcaccgggcaccaactgcaaccccatattgagggtggcatgcctttttacaagcatcactatctctatggtgacaacacgactggttcaaggaatatatccagggtatacatttcttttgatcataatatattacccagaaggcgctgagaagatcaatgtacgcatcacaggcttagaggcacaacaaaaaggtgagtag

SEQ ID NO: 55566 - DNA, 386 bp, Oryza sativa
  Clone ID: PAT_MRT4530_57561C.1
ttttctcttgcttcctcatcataaccattccatccgcggttgatgagaagagctccagggagcatctactcaaatggcgggcgttggcaatatatagactcccattgatcacagcctatgcgatcatgcattctagaccaattgttagaaacgcctttcgaactgcaagatgcccgacctcaagattgctaggatgacacaatctgaaattcagagcgatctgtgttaccagagccaggctgtgcttgacctataaaaagtttgagaaacgtaccttgttggtctattagaggacaccaacctgtgcgctattaatgacaatcgtgtgcccattttttttcaagtaatacaattggctaggaggatttgtggagagaggtcttaaa

SEQ ID NO: 55567 - DNA, 687 bp, Oryza sativa
  Clone ID: PAT_MRT4530_57562C.1
aaagaaacacagctgtagctcgagggccgcgggttttttttttttttttttctcagaaaagtaattctagactttatataataaatagaatattctttacgcatttacctaagcgatgtcgctgctcttgatgatagttccaaaagcatcgccaatctcactcaaagcaaccttgaccaactgatcagcaccaacgccggggatgtttcggtcaccgacggcgtcttcggggatcaaaacatcaaagccacgctctgcagcttgacgcgcggtagtcgagacacaaacatgggccatgtatccagtcagaacaaccttcttctttcccgtcttgtcaagcacctcctgcagatccgtctttgcaaaagatccaggatagttcttctggataatagcctcgccatccttgggcttgagctcatcaaactcctgcgcaagcttggtaccgggtgtgaagacgggagcgccctctggcgtggcatgcacgacatgcacaatgcttccattggcggctctgtacttttccagaagcgcggcgatcaccttgcgcgactcggcgacgttggtgacttggagtttaccctcggcatattcgttctgagcatcaatgatgatgagaacgctgtcggtgggactagcgctggagggctggacgccgatgagttcgcggaatgatgtagccgatgc

SEQ ID NO: 55568 - DNA, 1864 bp, Oryza sativa
  Clone ID: PAT_MRT4530_57563C.1
atgccgatgcggcggcagtgcgccaggggcgtcgtcgtgcggtgcgcaggggcgggggcggggcggtcgttcggtggggcctcctgcgggggcgggggcgggggcgggggcggggcggaggatcaggaggaggaggggacgaggttcgtggggtggtttcgggaggcctggccctacgtccgtggccaccgggggagcaccttcgtcgtcgtcgtctccggtgaggtcgtcgccgggccccacctcgacggcattctccaggatatttcacttcttcatggtcttgggatcaaatttgttcttgttcctggaacacatgttcagattgataagctcctatctgagagagggaagaaggccaagtatgctggtcgttaccgtattactgattctgattcattagaggctgcaatggaggcagcaggcagaatacgcttaactatagaagcaaaactatcccctggtcccccaatgttgaatcttcgtcggcatggtgttaatggtcgttggcatgaaatatgtgataatgttgcaagtggaaactttcttggcgctaagagacggggggttgttggtggcattgattatggattcactggtgaagttaagaaaatagatgtttcacggataaaagaaagacttgatagagatagcatagttgttgtgagcaatatgggatattccagctctggcgaggtgttgaattgcaacacatatgaagtcgctacagcttgtgctttagctatcgaggcagacaagcttatctgcattgttgatggtcaaatatttgatgaacatggtcgagtcaatcgtttcatgtctattgaagaagcggacatgttgatcagaacacgtgctaagcagagtgagattgctgcaaattatgtcgaagttgtaggtgaggaggatattagttatgctcgcaatcttcctatcaaagaggagaaagaattaggattgattggaagggacttcgttgatgggtatactgcatctttccggaatggtgtgggtttcaataacggaaatggtctgtctggtgagcaagggtttgcaattggtggggaagagcggttgagtaggtcaaatggttacctttcagagttagcagcagcagcatatgtatgcaatggaggcgttcaaagggttcacattatagatggcactgttggcggatcattgttgttggaattattcacaagagatggtgttggaacgatgatagctagagacatgtatgaaggaacaaggatggctagagaagaagatctttctggtattagaaagatcatccgacccttagaagaatctggtgtcctagtgcggcgaacagataaagagcttctagaagcattgaagtcatttatcgtcgtggaaagagatggttcaatcattgcatgtgctgctctctttccatttcttgaggataaatctggggaagttgccgctattgctgtatctgaagaatgtcgaggacagggtcaaggggataagttacttgattacgtcgagaagaaggcattatcgcttggtcttgagaaaatattcttgctcaccacacgaacagcagactggtttgttcggcgtggcttcaaggagtgttcgattgagtccctgcctgcgcagaggagaaaacgaatcgatctttcacgtggatcaaaatattacatcaagcggctccgggcagcagagattgggcagatggctgttaacaattttgctgtcagatgagatactgcacgcaatcccggtgttgctcatgaggtttctaactttctatgataacctcaaaagcgattgtacattgtataaattgtgtatggtatatatgtgagtaatcgatcaccaaaaaaaaaaaaaaaaa

SEQ ID NO: 55569 - DNA, 2972 bp, Oryza sativa
  Clone ID: PAT_MRT4530_57564C.1
atggagatccagcagcagaagggggttggcaattccaaagttgtgaaggttgagaaggaggagtcatgggatctgttcgtcaatcaagcaagcaacgaaggccaccctgttgttgcccactttggggcttcatggtgtgtgacttcgctgtccatgaactacaagtttgaggagctagctcagacacaccctgagatactgttcctctatgtggatgttgatgatgtccagagtgtttcgtccaagcttggagtgaaggccatgccgacattttttctcatcaaggacaaggaggtggtgaacaagattgttggtgccaacccagatgaggtcaagaagatggtggacgcttctgctgagtcctttggagttactgctcctcctgatatagtgccaccgcagaaagtgcgcgttaattttgttctcttcttgttggggtcttggggaaaggagcaaggaggaggaggagaccaagaacacggagtgaaagggagagggttctgttcttgcttcttaggccatatggagatccagcagcagaagggggttggcaattccaaagttgtgaaggttgagaaggaggagtcatgggatctgttcgtcaatcaagcaagcaacgaaggccaccctgttgttgcccactttggggcttcatggtgtgtgacttcgctgtccatgaactacaagtttgaggagctagctcagacacaccctgagatactgttcctctatgtggatgttgatgatgtccagagtgtttcgtccaagcttggagtgaaggccatgccgacattttttctcatcaaggacaaggaggtggtgaacaagattgttggtgccaacccagatgaggtcaagaagatggtggacgcttctgctgagtcctttggagttactgctcctcctgatatagtggtggaatagatatatagatgttgcctttatcttcagaaacttctctgtgaccgtgggtgcttcttggtcaggtccggaaaaatgcgtccatgtgtacattctagctttgctcctgtgactctgaatggtgtccctttgaactgataggcttgtgccttgcggtagtttgttctgcaggctgcagctgtggctttaccatgctctatgaaatttacttacatgtgtttccagttgaaaaataaacataccataattaacagcagttactagtctcgtccactttctctaacaggaggtaacaatgttgaaagtacacaccccactgtgaagcctaacactgtgcactataatggaattgggttcccttcacctgctattgcaagtggctacaagccatatgttagttatggccagggtgtttcaattgatgatgatgacggtgacaagaagatcgaggaagaatccacttggaagtacaatggttttcaaacaagttctgcctatggaatcgagatgcctacatctgcaatgtcaacaggtggtgtctctgcatatggaggtctaaactcacataggatctttcctccatcagtgccatacaacaattctgttaacaattttggagtcaatggccttggcactcagagccacttaaatatagaaaagaggctttttggccgtgatgagagggtggtgtatgatgaagccctgaagggtcttgggaagacaatatcaactattgcccttatacaaaaggagagggttgagcagtctaagttcatgtctgctgatgtgggcagcatgaaatctgtagctaaccttgatgaggatgatgaagtagtgatagtcatggacaagaagcaactgaagggtgaatctgtgaatatgctacaggattcaacactgtttccatcatcagaagcagcaagtgatgccgcagatctgaagccctgggctagtctaccggggtctgctgttgatagaatggacccacctgaggatgttgttgtagcaacatgtgctgataaattggagtctggtgcaacaactagtagttctgtagaagcagatggctctccatcaatctgtgaaagcagttacatatcttctaagatcagggcaaccactgacatacttaactcaatcgtgaatacacctgctctaacttggagtgatactatggaatcaagtccaagtgaagtagccccttctaaggcgatagtattctcccagtggactggcttgctggacttgctggagctttcgctggatagcagccgtataaaattcagaaggcttgatggtgcaatgtctctcaacttaagagaagcagcagtgagagaattcaacactgatccagaggtgagagtgatgctcatgtcacttaaggctggaaatcttggtctcaacatggtagctgcttgccatgtgattatgattgatccatggtggaacccttatgctgaggaccaggcagttgatagagcacacagaattggtcagacccgtcctgtaaccgtttcccgcttaactatcaaagacacagtggaagatcggattttagctctacaggagaagaagagaaagatggtccaatctgcttttggtgaggacaaacctggcggcagtgcaactcggctcaccatagatgatctccaatatctattcggaatatgagggcagctcatgatccttttgtggagctagctggtgaattttgtcgtagcaagactgacatagtcctatcagctatagctgatgacaaacccttagccccattaatttatgcacccgatgttcctccccatgggtgatgccatgtcttttgaattgctctgatcattggacaaagagggttagttagcttttgtaattagattatgttccccgtcgctggaatgggatgttgggaggttttacatcagaagcagcctttttttgtgtgtatataaatatggcatgctaattttaatgttggttctctgatggaatgcgttacaaagtacaaactgttactcctataattgtgatggggaagtttttttcgccctttaagg

SEQ ID NO: 55570 - DNA, 971 bp, Oryza sativa
  Clone ID: PAT_MRT4530_57565C.1
tgcttagctagctgtttgttttggcgataccatttgcattgcttgcccagcatcgtcgtcgtcgtcgtcgggagcaaggaggaggagagaccatcgatcttgattgatttgaagctagatggcggaggaggcgaagaaggtggaggtgaccaaggacatcgccgaagagaaggcagtggtgccgctgccgacgccgccggccaccgagcacgacgactccaaggccatcgtcctcgtcaaggaagctgaggctacaggaggttcagctgaaagagatgcttatctcgcaaaaattgtgtcggagaagagattggtactgatcaatgcctgggaggaaagcgagaaagctagagcagagaacagggcggccaagaagctgtcatacatcacttcatgggagaatgcaaagaaagcagagatggaggctgagctgaaaaggatcgagcaagaactggagaagaagaaggcggcgtacgaagagaagctgaagaacaagctggcattgctgcacaagacggcggaggagaagagggcgctcaccacggcgaagcgtggcgaggagctgatcatggcggaggagatggccgccaagtaccgtgcaaagggcgaggctccgacgaagctgttcgggctcttgaaagcctgagagaaatcatgaggagttcatcatacatatatgctgggatttggtgttgttgattagtctgtgaacttacagaaatttgtatatgtgcaatgcatggcatccgtgtttgcgtcgtgtgtatgtcgtctaattgaagggccatttggtttgtattttgtcagttgggtggtttgatttctggtgcgttttgtaaaggaattgtgtatatgcataggggagtgcaggcaggggatgatggattatgaatacgcttattctttcatgaagatttgttagtaaaaaaaaaaaaaataattgttgtatttttttcaaaaaaaaaaaaaaa

SEQ ID NO: 55571 - DNA, 505 bp, Oryza sativa
  unsure (1)..(505): unsure at all n locations
  Clone ID: PAT_MRT4530_57566C.1
atctaacacctccatggttcatataaaccaagtgaataattagtccatttctaattatgagacccacaaaacaaaacaaggataaattagggggggaaccccgtaagatagctgctcttccttgtggctagctgctagcgtgtgtgtacgtacgtattgcagtacacatcgatcgatcatgcggcggcggcggcggcgaagttgttcgagacggcgccgtcgccctcgccgcaggcgctgtggatggccctcatcctgtcgacggacttgcagatgccgctgcaggaccagtcgaaggacgccgcgcacacgttccccgcctgcttcttccactcgcagtccggcggcttcgcgcaacacaggtccngtcgtccacntgctccactccanccctatcanccagcccccanganacttctccttcgcaaacngtgcatatccggtggttgatgaaatttngagncagtccttgaanggttnatntgccgtgnntncgaatccgtcc

SEQ ID NO: 55572 - DNA, 3114 bp, Oryza sativa
  Clone ID: PAT_MRT4530_57567C.1
atggatattattgacttgtgttcagacagtgaagagtacttcagcccgtactcagatacagaagacaatcttgattttgacgatcccaatgatggtgttaaccaggtggttttgcacaacacagcatttggcaataatagttcagaactactagtcgggctggatgacgataactggttaaacaacactcatgctttatcctctcatagacctgctgagaatagatcagacattattgaaagcagcagcggtgtcaacactgactgtcagaatagtgcttggcaatacaggactcttccacataccttcatgagcagcagttacaagtctcgtccactttctctaacaggaggtaacaatgttgaaagtacacaccccactgtgaagcctaacactgtgcactataatggaattgggtttccttcacctgctattgcaagtggctacaagccatatgttagttatggccagggtgtttcaattgatgatgatgacgatgatgtctatgaggttctgcatcaaccatttccgttcagtcattcgagtttaggtgacaagaagatcgaggaagaatccacttggaagtacaatggttttcaaacaagttctgcctatggaatcgagatgcctacatctgcaaggtcaacaggtggtgtctctgcatatggaggtctaaactcacataggatctttcctccatcagtgccatacaacaattctgttaacaattttggagtcaatggccttggcactcagagccacttaaatatagaaaagaggctttttggccgtgatgagagggtggtgtatgatgaagccctgaagcaaatcagtcaagaaacaacggaagaaaatttgcctgaaggtgttatgtcagtatcactccttaagcaccagagaatagcattagcttggatggtttccagggagaatagctcacattgttcaggtggaattttggcagacgatcaggagagggttgagcagtctaagttcatgtctgctgatgtgggcagcatgaaatctgtagctaaccttgatgaggatgatgaagtagtgatagtcatggacaagaagcaactgaagggtgaatctgtgaatatgctacaggattcaacactgtttccatcatcagaagcagcaagtgatgccgctgatctgaagccctgggctagtctaccggggtctgctgttgatagaatggtaaatgctgtcaaagttgaacccaagaagaaggctagagtgagaccatcatcttcgtcaactttgaggtctgctaatagatcaactgcgggaacactagtggtgtgtccagccagcgttcttagacagtgggctagtgagttggctgccaaggttactgaaagttctaaattgtctgttttggtttatcatggaggttcaaggactaaagatccaactgagttgacaaaatatgatgttgttgtcaccacatacactattgtagccaacgaggtacccaaacaaaactctgatgaggatatggaggaaaagaacagcgaaacatatgggttatgtccagcattttctattggcaataaaagaaagaaagacagcgaaccaaagaagaaaaagaaacccaaaaattcagatgctgaccttgatggtggaccacttgccagagtgcgatggttcagagttgtgcttgatgaagctcaaacaataaagaatcacaatactcaagtggctagagcctgttgtggactgagagcaaaacggagatggtgtttatcaggaactcctatacaaaatacaattgatgatctgtatagttatttccgtttcttgaagtatgaaccatattctgtgtatggttcctttcgctctatgataaaataccaaatttctagagatgcaactcgtggatataagaaactccaagctgtcttgaagatagttctgttgcggcgcacaaaagaaacactaatcgatggagaaccaatcataaaattgccaccaaaaacgattcagctgagcaaaatagacttctcaaaagaggagcgaactttctatatgatgcttgaagaaggttctagggaaaagttcaaggaatatgcttctgctgggacgataagagaaaattatgcaaacattcttgtattgctgctgcgacttcggcaggcttgtgaccatcctcttcttttgaagggaaaggaaaaagatttgattgatactggttctgtagaagtggcaaagaaacttcctaaggaaacagtgataaatttgcttggacagctggaaggagactatgcaatttgttccagatgcagtgacccacctgaggatgttgttgtagcaacatgtggtcatgttttctgttatcagtgtgtgcataagagcttaaaaagtgatgagaatgtctgtccctccccttcttgtgggaagaaattaagcgctcaatcagttttttcacctggagtgttaaggttttgtatagctgataaattggagtctggtgcaacaactagtagttctgtagaagcagatggctctccatcaatctgtgaaagcagttacatatcttctaagatcagggcaaccactgacatacttaactcaatcgtgaatacacctgctctaacttggagtgatactatggaatcaagtccaagtgaagtagccccttctaaggcgatagtattctcccagtggactggcttgctggacttgctggagctttcgctggatagcagccgtataaaattcagaaggctcgatggtgcaatgtctctcaacttaagagaagcagcagtgagagaattcaacactgatccagaggtgagagtgatgctcatgtcacttaaggctggaaatcttggtctcaacatggtagctgcttgccatgtgattatgattgatccatggtggaacccttatgctgaggaccaggcagttgatagagcacacagaattggtcagacccgtcctgtaaccgtttcccgcttaactatcaaagacacagtggaagatcggattttagctctacaggagaagaagagaaagatggtccaatctgcttttggtgaggacaaacctggcggcagtgcaactcggctcaccatagatgatctccaatatctattcggaatatga

SEQ ID NO: 55573 - DNA, 338 bp, Oryza sativa
  Clone ID: PAT_MRT4530_57568C.1
ctcactaaagggaatcagcttggttgtttgcttccgccgaccgcctcctcctccaaaacctcgtcggcgcgccgccgcggaccaagccgctgtgctgtacaagaccccgtgttcggcgaccaccgtaacgttccgatacccgaccgacgccaccacggtacgactggggacacggcaaacgcgtgacgtcgacttattactcacggacattgatttcacgcacgctggaaccctggtgttatttctactgatgacacgcggcaacgaccctccatcgatctggactcaccacgacgacacgcttgacactttacggacacgtactgaactccaccgac

SEQ ID NO: 55574 - DNA, 2263 bp, Oryza sativa
  unsure (1)..(2263): unsure at all n locations
  Clone ID: PAT_MRT4530_57569C.1
aaatggtggagtccacatgggccccacatgtcatcctcacccctcccctcctctccttcctcctctcttccccatatcccctctcttcatcccactctcctctcctctctctccaggtgacggagaggcagcggcacacacggcggctcccggtcgtcgctggccgacttgcgcagcggcgccggaagcaggaggaggtggcggccgcgacgccaactgcgacacgctcgtgccgccgtccttcgtgcgcactgacggctgcggccgtggcgaccactccccgccggtccacacgttcggcttcggcaaggaccacgacgcggtggcgatgcacaccatcgccgaggtcaccggcgggacgttctccttcattgagaacgaggcggccatccaggacgggttcgcgcagtgcatcggtggcctcctctccgtcgccgtgcaggagctccacttcgacgccgagacatggagaggaccggacagaccacgagcgtggccggcgacgaggaggcggagtccggcgtcgccgagcgctccgtggaggtggaccgggagctggtccgggtggaagccatcgacgacatcgcgctggaactgaaatcgcgtgtgtttgctgatagctccgtcgtggtctccttcatgcagcggccggtgggaagctaccaccatgtcacctgccacgacggcttcaaggagttcgacgatgatctcgggttcacgctgtgcaatgattactactcgccgccgccgaagttggtggacttcgtcgccgaccatccgcgctgctgcgaccggccgcctcgccgcgcgacgccctgcgaagacgatggattgcgacctctcctcgacgatgaagccctgcaagggcgaggagctcgcccgccaccgctcctcctctgctccgccagcccgcttcgcccgctcgtccacgcctcgccgccgaggtgctgtcctgctcgtcggcctccacgcgcgctcgtaggcctccctccgtcgcccttctcttctctccggcggatgcgggaggctggcagcgagcgagcgcggcagcggtctgcgagtggcaggcggaccggtggcgggcagagcggtggagggcgagcacagcagctgccggccgcctttcccctcccccatctggccatatcccgtcgaccacctctccctctcccatcctctccacgtacgcgtcgcgccggcgggagagggggtggagcgccgcatcgtcggccgcgtgtcgtgaggaagaaggcggcggccggcggcggaggtggaggtggaggtggagggaagggcgtggtggcgacgacgacggcgccgacctgctcgtctgcttcccagcgaggcagcacctggcgctgatgcccaagccgatacgtgaggcctccttgaagggcgcgccgtacgcgccattaacgacgcactggacgaacacgtgaggcctcatgtcgcggttgttgttgagcaccacatctctggggctcgggctgtccctgtccatgaccacgctctcgtctttgcggcaatggcgcggaacttgaatggcacaccgaactggcgcgcgcgcgcagatgctcagccggcggcctgtctcctcgatctggtcggctggccggaagcccggctgcgggacgtcgatgccggtcatcctcacctccggtggtccgccttccctggttcccagcaaaaagaacaaagctggccactggaatccgtagctgaggccgtagtcgacgatgtgcagcttgcgcttcccggcgacggcgttgtagatggtcttgttggagaagatcagaagatgacgctcaccttcttgacgcagcaggccgccgtgaacagcttgtacgccttgaggaagtccaccgtcgatgtgcgcttcgcaacgagcgactggtacatctggctccccgttccggcgagacgcgcctcgagcgtgttctccaagtggctcatggtgctggaagggagcgaagagacacgacacgccggcctcatctccgccctctccggccagcaccagctgctgccgcgccaccgccgccgcccctccgcctgttcctcctgagcccagccaccttgncgtcatcattcccaccttgcacccgactccttccccgccgccgacgttgccaccgtcttcagagtcacagtcgccgtcggcgttgtcaccgacgccaaccaccggcttcacaaaaccgtcactgtgccgtcgccctccaccatcaagcagcttggatgcccacgccatggcttccaccgccat

SEQ ID NO: 55575 - DNA, 532 bp, Oryza sativa
  Clone ID: PAT_MRT4530_5756C.1
agaagtcaagaacccatttttgtgctttatttctgctgttatgtggaatttattagagttaaagcctttttcttttccgttggtcgtgtagacgctgcagcttcggaagatccgctcttcgtggaagttgaagccgacgtttgggaaagcgagcaaggcaagacacatcatcgctccttcctttcaaaacccctaaaatggttttgggctgggctaggggtgcatggttttgatggtagcacctcggccgtataaggaccggtcttcgggcctctgttgcaaagcactaccgtacttccacatgtctagtgggtaaggcttagtttgtggctcagtctaggatgggttggaaactatgtcacgtcttccgtctgtataccgtggtggtatgtggcacgtggttgcacgtaaggaagatgtgtcttgtggcacttgtgggtgtgtcttgttgagtacggtggttgtactcagtcttgatcaatttttcccaaacccagaagaggagccccttgaagatgaaggctttggtgtc

SEQ ID NO: 55576 - DNA, 2547 bp, Oryza sativa
  Clone ID: PAT_MRT4530_57570C.1
tggaaaggccaatcgtgggcgccttttgtattaaaccaatcggaaaaaggggaatgtgctcaaagccatttattggggaacgcgggtttttccagtcaaaacgtttaaaacgcgggcagtgaggggggtaaacgaccacataaggggaattgggtacgggccccccctgagttttttttttttttttttttaccgaattgaagccgcaattctgatcattaggtatctaggttattatagtctagaaaggcaccggtaaatacaatacagaactactaccaaaaaaagatacttataatatatcatctgcagaagatcctctgccatattttacaggtatgagctagatcgagcaccagaaactaaagtcctcctgcaaacatgaatgcctgcaggaggaataactaagaaaaacaaaataagactcgtgattattttctgctgccttcatattcccttcacccataataacgataagcatatgctatttgcactagatatccagtcttgtagtgattccggaaaacaaacaattggtcaggaattcccttctgtggtggtggacaatatctgaaaaccgtccatctaaatttgtagcaggcacccatagcatagataaaaaactgtagttacttttgccctagtatagaagctgccaatctaagaggagccaaacccaccggattgtccagaattgttgccgccaaagttgccaaaactgcctgagccagagttaccaaatcccccaccaaacctacctgagccagaatctccaaatccacctgaccggccaaaaccagaacggcctgagccaccgccggaactaccaaatcctgaatcaccgtaaccgccaccacctgagcgaccaaatcctgagtctccgaaaccaccaccacctgaacggccaaacccagaatcaccgaagccaccaccactggaacggccaaatcctccaccaccagaacggccaaatccaccacctgaacgaccaaaccctgaatcaccaaacccaccgcctcggcttgaagagctgccaaaactaccacgacgcccataggacccacccccttcacgaccaaatccaccaccaccgaaggaatcaaagccaccactcatcaagtcagaaccttcaacattaatctttggaagctctgtaaatttgcagccaacatcattctcaaccatcctgatagctctactttgttgatagctgtgcataacaattgccttacccttctttccagcacggccagttcggccagacctgtgaacaaacaattccgaggagtttggcaattcaaaatgtatcaccaagtctacatttgggatatccaaaccacgagcagcaacatcagtggcaatcaaaatattaaaatggccttcacggaatccttttaatgttctctctctttgggcttgtgtgatgtccccatgaagggcctggcactggaaactccgacccatggtgtaggacaatcgatcagcatctctttttgtttgtgtaaatacaatgcatttaccaccttttgcatgctccttaatcaattctccaaggacagcaggtttggcatggccctctgaagcgatagaataaagactgattccttctgctagcttctgatcatcttcacccacaaggtcaattgtaacaggattcttaaggtatttctgggtgagtctctgaatccaagttggcatagtcgcagagaacatcaaggtttgacgttttggaggtactctatccaaaattgtctcaacatcttcatcaaaacccactgacaacatctggtctgcttcatcaagaacaacaaaccggacctctgacagattcagagcacctcttttaagcaggtcaattactcgtcctggtgtcccaataacaacatcaactccataattgagttgtcttatttgctggctaattggagttccaccatatacacagatcgtttccacattggaagaatcagaaaattccctctcaacttgtttcgcgagttctcttgttggggccaaaacaatagccaagggaaatttaccagggctattcttttcattgtgccgaataattgcgtccagtatgagagttccaaaagccaaagtctttcctgtacctgttttggcacgaccaaccatgtcctttccttgcattgctggttcaaggacagctctctggattgggaacagcttggttatgccgcgcgaggcgagctggctgacgatcttgggcgagatcccgagcttggccacctccaacccctcctccgcgccgcccgcagcaactccacccgccttcgcccccctcttatcctcctcgtagaacaacccctcatccgccgcgtactgcggcctcgccgccgcccccgcggcccccgtctcccggaaccccagccacgccggggaggagtggaaccacgccgccgggatcgtcgcccgccgcgacacgaccacctccgccgccgcctcctcccgccggagaaccgcggcggccagggcggaaacggcgcgccgccggagcggcgccgcgcggcgaaggatagagtacat

SEQ ID NO: 55577 - DNA, 435 bp, Oryza sativa
  Clone ID: PAT_MRT4530_57571C.1
ttccgttctgcgctgcgccgggagatcgtggacaccctttccagcatctctatcaaacaccgccctgttacaaaccgagtggttgaaaaggtgccagaaccgatctaactataccaaggttagaaggtcgcatgaagattactcaccaaagagaagcttaagctcatacgggcgcagtgccacatggatcaagtgcaaagactccaggacgagcttatccttccaacacttgcatgcttgaaccagctgcacgtgaagcgcgtttcaatacactaacacctgacaccatctcaacagccattgccgtacaaccttcatcaatgatgagaggagactccttgccgatgaggactgaccgcttctttgcaatacacacagaacctactgtatacttgctaaattcgaagacacccgtaggatcatgacacaagactg

SEQ ID NO: 55578 - DNA, 469 bp, Oryza sativa
  Clone ID: PAT_MRT4530_57572C.1
gttcttggatatatttgactccatggacattgacgtttactgtttgctccttgacgccaagtagaaaatggtttgtgcattttgcatcttattttttgtagtgtgaatgacggaattggacctgtgtagtacgttctataagtccttaggttggaaacttggaatagccagcagaaaagacgtatagtgatgtggagttgtgcacgggcttcacttggaaaattttatctggtcccaactcttctcctgggtttgttggctaaccactcgcctaatctagctaggagttcagcttctgcaagtcaggttacacacctaattcattgttcttcatttcataatgttaacctaaacatgataggtttggcattgcggatgtgaacaaggctaatgattgcaacttctcacaagtccacttaattgtctcatctcaaatatatatatatatatatatatatatatatatata

SEQ ID NO: 55579 - DNA, 1551 bp, Oryza sativa
  Clone ID: PAT_MRT4530_57573C.1
cgcgtaaacaaaacctcccccgccgtgagatctcgcagcaatggcggtgccgcgccaccaccacctcgccctcgccgtcgccctcgccctcctcgtcgtcaccgccgtggcggtggacgaggggggaccgcgggggaggcgggtgctggtgctcgtggactacctgacggtgcggtgtcgtggctgcagcttcttgcaaccgacacaaacccaaagctaagcttcgagctcccccaacactgatcccagtagctctcattgtcctcacgcttcgactcgcttgctagatctttgggttcttgtgtgttgtgatcgcgcgatgaggacggtggcgcttggcattgtggcgatggcctgcctggtggccattgcgcatggaggcaacttcttccaggacgcggaggtgtcgtgggggcagggccgcggcaagatcgtcgatggtggccgtgggctcgacctcacgcttgacaggagctccggctctgggttccagtccaagagcgagtacctcttcggcaagatcgacatgcagatcaagctcgtccccggcaactccgccggcaccgtcaccaccttctacttgtcgtcgcagggttcgacccacgatgagatcgacttcgagttcctggggaacgtgaccggcgagccgtacacgctgcacaccaacgtgttcacgcaggggcaggggcagcgcgagcagcagttccgcctctggttcgaccccacccagtccttccacacctactccatcatctggaacccacagcacgtcatattcgcggtggacgggacaccgatcagggacttcaagaaccacgaggcccgtggcgtggcgttccccaagagccagccgatgcgggtgtacgcgagcctgtggaacgcggacgactgggcgacgcagggcggccgcgtcaaggcggactggagcaaggcccccttcgtcgcctccttccgcgacttcaacgccgacgcctgcgtctggtcgaacggcgcgcagcgctgcgtcccgtcggcacaatggagaccgtcgcagcgccggccggcggcaggaggggcggggccatggggtggtggaacaaggagacctcacgcgacaggcaccggatacggggggtgcagagcgaaggataatgatctacaatatagtgcaccgatcccaagcgcccccagcccaggcccgtccccgccgagtgctccatgtgatagtaagaatatcccatcgtcgtcgtcgtcgtcgtcgtcgatcgccggcggagcaagatggccggagatgaggaaggtgactggctggcgtctgtaaaaataaacgtctgtataaataaataaagattggcactgggggtggtaaaaaaaaagtgtaatgtagctgtggtgggtaaaattcttttttgttctctgtttcgtagtaagccactgcacgccctgttcgtgtgtaactgatcgtgtccatgcaacaattcatgtgtaatatattcctcaacaacaaaaaaaaaaaaaaaaaaaaaaaaaaaaaaaaaacagccccctcccgccgaactcctgccgccccgc

SEQ ID NO: 55580 - DNA, 1123 bp, Oryza sativa
  Clone ID: PAT_MRT4530_57574C.1
tcgcgacacaaacccaaagctaagcttcgagctcccccattgatcagtgagctagctagtagctggttggttaaaaggcctttttgttttgtttgagttggagcagaggagaagaatggcggctctgcttgtggtcgtgttggttgccatgtcggccatggtggcgacggccaactttaaccaggagttcgacatcacctggggcgatggccgtggcaagatcctcgaggatggccagctgctgacgctcacgctggacaggacgtccggctcagggttccagtccaagcacgagtacctctacggcaagatcgacatgcagctcaagctcgtccccggcaactccgccggcaccgtcaccgcctactacttgtcgtcgcaggggccgacgcatgatgagatcgacttcgagttcctggggaatgtgaccggggagccgtacacgctgcacaccaacgtgttcacgcaggggcagggccagcgcgagatgcagttccgcctctggtacgaccccaccaaggacttccacacctactccatcctctggaaccccaagcacatcatattcatggtggacgacatgccgatcagggacttcaggaacctggaggggaaggggatcgcgttcccgaagaaccagccgatgaggctctactccagcctgtggaacgccgacgactgggcgacgcagggtggacgcgtcaagacggactggacgcacgcgcccttctcggcctcctaccgcggcttccgcgccgacgcctgcgtcgtcgccgccggtggccgcacgcgctgcggcgccaccgtcggcaccgacgccgcacccggcaccggcgccgccgccgccgccggtggatggtacaaccaggagctcgacctcacgcggcagcagcggatgcggtgggtgcagagcaagtacatgatctacaactactgcaccgatcccaagcgcttcccccagggcgtccccgccgagtgctccatgacagaagacgacgagaaggggcacgagtacgaatacacgagaaggacaagggctcgtaatgatccgtcaggtctgcagactctcagttgtctcgctgggcactgggcgatcgatgtgaaatgcgtgttcaatttctga

SEQ ID NO: 55581 - DNA, 438 bp, Oryza sativa
  Clone ID: PAT_MRT4530_57575C.1
aggacagcggaaaatatcccaaatcaagtcacaaaatcctacatatcataggcagaacaactttactgccactgtccaaatttacagggcacaggacttttccaaacaatggacactcctatgcatttcacccgtacgtacattatcatcaaaacgcccccctctctgtgctgcgtgcaggctggcgctttatcttgggctctttcccggtgccccggatgtaaagattcacacgctgaataacccacctgctgagcaatgactcccggcaaaacattgccaatccgagaaaattaaacaccccaacgctaacacctttgccttttaaggctattggtggaaaaatccccggcaatggttttccctaaaattggattggtgggaaaaccacccgcttacccccagaaagcgttggggcccaagttgaacaggaaaaac

SEQ ID NO: 55582 - DNA, 406 bp, Oryza sativa
  unsure (1)..(406): unsure at all n locations
  Clone ID: PAT_MRT4530_57576C.1
cctttnggctncnngnattcccgcnttagcaacatttnntgttggtccntctcaanancaaggggcattnttattgttcaagaagtggganaaaagttttaagaaaaacgtgcacnttgcagcaaacaaaganacaccagttccngggttgaatgtttcncnctggtggtaccncggaaggcatcccggattgggaaccccccccnctgnacctccnanaaagaatttgtttgaaggaagaactttgcctnaaggttggctgaatttccttccaatgccnccantgaaacttggcttttnaaggttaaggggngcacccnnggtggnaaaccaaaactaaaaggactttgtttgccccttttgcaatcctgatanccaacntnccnnccccnaaattgcaaaaact

SEQ ID NO: 55583 - DNA, 794 bp, Oryza sativa
  Clone ID: PAT_MRT4530_57577C.1
cgcttctcatctcacctgctcgcaatggcgagcaagaagagctcgacgcaggcgtctcccatggccgccgccgccgccagccttctcctcggtctcctcctcgtcctccccgtgccagccgtctcgtcgtcggacgcggaggaggcggtggtctcccggttccgggagtacctccgcatcgacacggcgcagccggcgccggactacgccgcggcggtggcgttcctccgggggcaggccggcgccgcggggctcgaggcgcgcacgctcgagctcgtcgccggcaagcccctgctgctgctccggtggcccgggcggcgcccgtcgctcccttcgctgctcctcaactcccacaccgacgtcgtgccgtcggagccgcacaagtgggaccacccgcccttctccgccgccctcgacgaggcatccggccgcatctacgcgcgtggctcccaggacatgaagtgcgtggggatgcagtaccttgaagccatccgccgtcttcgtagtgcaggctttatcccagatcggaatatctatcttacatttgttccagatgaagaaattggtgggcatgagggtatagaagcatttgttgcatcaaaggagttcaaagacatgaatgtaggtttggttctcgatgaagggcttgcatcacctggggaggagtaccgcgtgttctatggggagcgtagtccttggtggcttactattaaagctaaaggagccccagggcatggtgcaaagctgtatgatggtagcgcaatggagaatttgatgaagagtgtggaagcatt

SEQ ID NO: 55584 - DNA, 1846 bp, Oryza sativa
  Clone ID: PAT_MRT4530_57578C.1
tgcttctcatctcacctgctcgcaatggcgagcaagaagagctcgacgcaggcgtctcccatggccgccgccgccgccagccttctcctcggtctcctcctcgtcctccccgtgccagccgtctcgtcgtcggacgcggaggaggcggtggtctcccggttccgggagtacctccgcatcgacacggcgcagccggcgccggactacgccgcggcggtggcgttcctccgggggcaggccggcgccgcggggctcgaggcgcgcacgctcgagctcgtcgccggcaagcccctgctgctgctccggtggcccgggcggcgcccgtcgctcccttcgctgctcctcaactcccacaccgacgtcgtgccgtcggagccgcacaagtgggaccacccgcccttctccgccgccctcgacgaggcatccggccgcatctacgcgcgtggctcccaggcaagattcgatttcttgtctccaagattgcttaaaatctctatttttggttgtttggtgaactctagctatgttgtcagcatgttccttgacatgaagtgcgtggggatgcagtaccttgaagccatccgccgtcttcgtagtgcaggctttatcccagatcggaatatctatcttacatttgttccagatgaagaaattggtgggcatgagggtatagaagcatttgttgcatcaaaggagttcaaagacatgaatgtaggtttggttctcgatgaagggcttgcatcacctggggaggagtaccgcgtgttctatggggagcgtagtccttggtggcttactattaaagctaaaggagccccagggcatggtgcaaagctgtatgatggtagcgcaatggagaatttgatgaagagtgtggaagcaattaggaggttcagaacatcacagtttgatttggtcaagtccggagcaaaggctgaaggggatgttgtatcagtgaattttgcatacttgaaggctggcacaccgacaccaacgggttttgtcatgaatctacaaccatctgaagcagagataggtctagacatccgactccctcctagtgttcatactgaggctctagagaagcgtcttgctgaagaatgggcaccttcttcacgcaacttgacatttgagttcaaacaaaagacctctgtacttgacaactttggcaagccagccgtcacccctgctgatagctcaaatgtatggtgggctctatttgaagaggctgtgaagagagccggtggcaaacttggtaagccggaaatattcccggcctctactgatgctcgttactttcgggtgcttgggataccagcatttggtttttctccaatgacaaacacaccgatattgctccatgatcacaatgagtttctgagcaaagatgagtacctcaaagggattgggatatacgagtctatcatcaggacattggccactcttaaggacagcaatgtcgactacgaatccagggcagagctatgaagaaaatgtttaggcaaaacctgatactgccataattcttgcaatcagatggagcacagaaacatgtttcggcaaatcaactgtgttttcttactgctcctagggtggaatcgaaacttcgaacacgatcgttgtaaattttcattgaaacctgtttagattttagaataaattgatcctgcatttgcagttaacctgtatgcttttcgcaactgctggtgctgcttgatgcatcattggctcactgctgtaaaaagaataagaaaagtaaacccacgcaatgcaatgcatgctgtgtcagaatgcacttgtttaaaaaaaaaaaaaaaaaaaaagagtgaatgcagcccggggatcc

SEQ ID NO: 55585 - DNA, 312 bp, Oryza sativa
  Clone ID: PAT_MRT4530_57579C.1
atggaggtgacagcttgtgggggcacatttgagcatgcttgtgaggaggccgccctcagggtgatggcccatctgagggagctgcatgacgacactctgaacgccaccgcctaccgcttccatcctcgccgcggttccagctccaacaccagcaccttcaagtcagcttggggagagaacgatgtcaccttcggccacatgagtgacgtgatggagggctacgacaagctgcacgccatgctccacaaggcaaccaagaggctcaacgaccagaagcttgtgaggatcgctgagttgcaggatgagttgtag

SEQ ID NO: 55586 - DNA, 1149 bp, Oryza sativa
  Clone ID: PAT_MRT4530_5757C.1
atgagtagagtgtccactagttggggttttgtttattctagggtgaataaggccgaggggaggggcgcgcggaccgggtccacgggagtggggcccacgcagcagccccacggtccacggtggaccgggtgcacgcggcttacgccggccggcgccgtgggtcccacgcgtcagccgcacccgagggcgcgggcggctgacggccgggccccacatggcagccgcgggacgcgcccgaaggcggccacgccggcacagccgacgggaggcggagcgcccgcgcccctatggtcgccggcggcggccataggcacggcggagcggcggccgagagaggggagggaagggggaagcgaaacagcggtccacggctcaccccgggtcgacggcgacgacgggaatggcgaccggagcggaggaaggcggcggcgcggctcgggttgccggggacgccggcgttccggtggtcggcgggcgaaacggagggggtgacgaggtcggcgaggtcgcggcgaacccgaaggaggcgacgccgaagcgggagaaggtccggagcgacgacggcggcggaccggagctcggcggcgacggcggagagagagagcgacggcgcgggctcgattccgacggggagagagagcggcgagtggcggaaacggtggaggaggcacggggagtgtttatatagggttgggagtgagagagggcggccggaggagaaggaaaccggcgcggcgctctcgggctccatcaatggcgccggcgagatttgcgggagcaaatccgcccgtttgaacgagagagagagagggaaaaatggggggaaagggagagggaatcacggggagtgatttccccctctttattgcgcgcggggacggcgggaggcggcgggattcgcggcggcagcggcgctagggcacgggcgaggcggcgggagcggcgcgaggtaggggatgacgggtgggccccacccgtcagcgagggtggcgggcgggcccgcccgtcagcggcgcgcgcgcgggggaaggcccgatgggcctcgggggacaggacagagacggagggagctgggccgatccggcccaataggcggagggggggggggaaaaaaggacttttagggtttttctttttataaaaccattt

SEQ ID NO: 55587 - DNA, 367 bp, Oryza sativa
  Clone ID: PAT_MRT4530_57580C.1
cccacgcgtgcggtcctttgagcatcatactggtccgcatggagcgctagagacgcactttgtgaacacgagaagcttctcagggacggacgttaagatttactaaatgttgagaatggaagttctagtggcatgatagatattaatgtggcatcagccataatgttatgcgtggtcgcgtcatgcttattaataatgctttacaagatgatgtcttactggttagcggagctactggaggtaatattttgcgtccgaggtgacgagggcctgacaacatgcctagaggctctattatcaacgtggattagagctgcttcagaatgcttttttaaagtgccattatgtggagctgtctgatacctta

SEQ ID NO: 55588 - DNA, 224 bp, Oryza sativa
  Clone ID: PAT_MRT4530_57581C.1
aactcaccttgcgtcgctggattctctctgcactcttctcctctgcttgaccaaataaggggtgtgcatttctttctgcgtgtcatctatcaatctatatatatctttactttgtacaagtaaatcaatatttatcgaaccttgactttctccaataaaaaaaaaaattattcttttttacaaaatatataaaataaaaatatattataaactcaggtcttccc

SEQ ID NO: 55589 - DNA, 3198 bp, Oryza sativa
  Clone ID: PAT_MRT4530_57582C.1
atggaatttacaaattcagatgaggcttgggcattttggcttagctacagtgggcagaaaggttttgaggttagaaaaaggtatacaaacagaagcaagtcggatggcagtgttacatcatgtagatttgtttgtgcaaatgaaggtcatcgattgcaagacaaaagggatcatttaaccaagtgtcctcgagctgaaactagaaccgattgtcaagtccacatgaatctcaaaatgaatagaaagaagggaaattatatagtgtctgatctgatattggaacacaaccatgcactacacttgccggaaaccatacatttaatggtgtcacaaagaaaaatttcagatttgcaagcttttcaaattgaaacagccgatgatgcaggaataggaccgaaagcggcacatgagttggctagtcgccaagttggtggatccctcaaccttagctacacactccgagatcataggaactatctacggaccaagcgacaacgggagatggcatatggccaagcaggtagcatgcttaagtattttcaagacaaaattgctgagaacccatcattccaatatgcattgcaaatggattgtgaagaacaaatagcgaacatattttgggctgatgctaaaatgatcgcagactacgcacgttttggtgatgttgttagttttgatactacttttggaacaaacaatgagagtggagtgaagaatgaggagagcaaagaagacacaagtgttctgtcagattttagtgcatgcatatatgagtacgaagacatggcagcatttgaacaaaaatttgacatcatgagggcaaaagtgagcaagcaaacctggttggatagtatatacaagttgaaagaaaaatgggccgaatgctatatgaaagatgtcttcacattaggaatgagaagtacacaattgagtgaaagtctaaataatgacttgaaaaaccattttaaatctgattttgatatcatccggttctttaagcattttgaaagggtggtgcaaggaaaaaggaatactaaactgaattcagaatttgaatcaaggaaaaagttgcctaaaatctgtatgcggaggccaccacctatgttggtgcaagctagcaagttgtatacacctattatatttgaagcttttcaaggtgaatatgaaaaatccttggcagcttgcagcaaggaattggatggtaacaatgaatatctagtaggagatttcacctatgaggaggagtacaaagttatcggagatcctttgaagcaaacagttcaatgcagctgcaggcgattcgatagaattgggatattgtgtgcccatgctctgaaagttcttgatttgatgaatatcaagtcattaccaccacactacgtgctgaagcgatggacacgagaagcaaggagtggaactatacaagacaatttggggagaaatataatcgaaaatccaaacatggatgctatgcttcgctacaggtttatgtcccacaaatttctcaatttagcacatcgagcagccaactttccagagtgcaccatgttagtagacagtgcacttgacatccttgatgttagtccaccaaatgacttgttgagtaatgcacgtctaaagaaaaaggaggtcaaaacaagaagttcaaaacgaacaagaggttggctcgataaaaaccagaagactaggaaaaagagaggaaaaaatgaaaaaacaaaacaaaaaaaatcagtgatacaaaaggttagggaagaggtaggtgatgcagaagaacaacttgcagatgatagtgctcctatggataaatggaaggagcctgaagattacgaggccattgatagcttcactcaactgttgacatggcccatggtggtggcctcgaaccaggaggcgttgaggccgacgtcgtcgacggagacggcagacctcgacatccatggaggggcagcagagttcccgcacggggaggacgcggggctgagggtaggcgagagcgtcgcggctgagggtacctactccactcgcgccagcgccggtggacaggaggcgacgagcggcggcgagagttcattttcgctgctctgtttttccccttcggcctccgcaactgacaactgggccgaacgctggacagctactgggccgaaggacgacgaaaaaggaaatcgcgccgtcgccgtaggattcggaatggacgctgatgaagcgaagtacatccctctaagatctgcttccggaggagaccggtgggggaggcgggagtccagcggcgccgatgcggcagacggcgcgcgtggcccccgccttggtgcgcgccactcccctcgccgcgtccacccgcaccgcctggagcgcggcgacgtcgacgacggcgaaacgtgctgccccctcgccgtcgccggacggccggagcgagcagtacgagaggccctcgtagtcgtgcccgccgctgcgcgcgcggacggtgaggccgtggtcgcggcagcagacgacgtaggcgcgcacctcgtcagcggtgaccggccgaggcgagcagcgagaagtggtggaggagagggaggcgcgagcggcttggctccatggtcatcttgctcgcggtcgcggccggagctttgctcagctttggccttggcggccgtcttggccttggacctggccgccgtcgccttcttctcctcggcagcctccctcactgaacggcgaactcgtccgccgcgctcgcctgtctctgcttcgctgcccgcagcccggccgccaagggcgtcgtcggcgccaagaggaagaggaccccgcgcccctccgccgccgctaagaagccgcgtcgtcggcggcggcggcgtctgccaagtgggagaagaaggcgcgcagttcccccctcgccccgcccgcgccaagagggcgatgaaggctgccccccgcgaagccgatgcagccgcccaaatccatccgcgcgggcccgccgccgccggactcccgcctcccccaccggcctcctcccggacctccccacccgccggctgtcgctgttctgctggtgagaaaagaagaggagagagggagaggtggagaggagtgaagaggaggctggcacgtgggatccacgctgagtcagctgctacgtcggataaaatcggagtcaaaaccaccgagggatctacttatccagttttgtggttcgaggacgattttgtaactcga

SEQ ID NO: 55590 - DNA, 198 bp, Oryza sativa
  unsure (1)..(198): unsure at all n locations
  Clone ID: PAT_MRT4530_57583C.1
cctgtcagacaacctgagagccatcctgccaagcgaggccggcaaggaacgatcctctacagccgtgggatcgaatcagccagtgacatgatccggcngttaatcacgctctggcncacaggtcatgcgtcatcaaccaagcttgagtgcttgcctccttattagtcaaggatgcaacggtacgagcctatagaacag

SEQ ID NO: 55591 - DNA, 1950 bp, Oryza sativa
  Clone ID: PAT_MRT4530_57584C.1
atggccaccgccgccgtcttctccgcctcggcccgccgcctcctctccaccgtcgccggcggcgccggggccggatccgccgccgagctccccgtcttgattggccacctccgcagcctcgcccgcgcgggccgcctcgccgacatcgacgccgccctcgcgccgcacctggcgtcccactccgtcgcggcggtctccgccctctcctcggtgggcctccccgaccgcgcctccgcgctcctcgccaccatccggaacccaaccgccgcgcacctcaacgcgctcctggccccgctcctccgccgccaccgcctcgtgggcctcatccccaccctcctcgcggcgcacccctccgtcccgcgcgacgacgccacggagggcatccacgccaaggccctctgcatcgccaccggcgccgactccgcgctccacctcctccagcgggagtcgccgccgccgtccctccagctcttcaccagcgtcatcgactcctactataagcagcgcaagccccaccgcgccgagcagctgtggcgcgagatggtcgaggaccacggcatcgtccccgacgccgccgcccacaacgtcaggatcacctacaaggccgccaccggcacggtggaggaggtcaaggagctgatccgcgccatgcgcgaggatgccggcctccagccggacatcgtctcccacaacgggctgatgcgcgcgatggcgcggcacgggagggtggacgagatgatggaggtgtacaagaggctggagaagggtagcgcctccgccgcggcggagggcaagtcggcgccggactgcgcgacgtacacctgcgtggtggccgcgctgtgcaaggcggggcggtggtcggaggcggacgacgtgttctacgaggcggtgaagcggaggaagctggccgacctcgggacggcgcgcgttctggtgcgaggcctcaaggaggccggcaaggggcgggcggcgaggcgggtggtgatcgggctgcgcaagaagttccccgaccgcttcgacggcccgtggaaggatctcgaggagttggccgggatcgccggcgaggatgaggagagcgatgtcgaaggggaggacgacgagcagccgccggcgacgacgacgaccactgccgcgttaaacacatctcccatcctcgaacttggcacgacgccgccgccgccgacgacgcggcttcttagcggcggcggaggggcgcggggtcctcttcctcttggcgccgacgacgcccttggcggccgggctgcgggcagcgaagcagagacaggcgagcgcggcggacgagttcgccgttcagtgagggaggctgccgaggagaagaaggcgacggcggccaggtccaaggccaagacggccgccaaggccaaagctgagcaaagctccggccgcgaccgcgagcaagatgaccatggagccaagccgctcgcgcctccctctcctccaccacttctcgctgctcgcctcgctgtgttccgcgcggtggcgagacgacagccgcggcttcctctggattgggagatcaatggcatagacagatcgggtttggatgctcaggttgctgaggcatacagtgctaatctagtgcaaatcgcctcgccgcggacgctccgccctgtgctggtgctcacgccggtcaccgctgacgaggtgcgcgcctacgtcgtctgctgccgcgaccacggcctcaccgtccgcgcgcgcagcggcgggcacgactacgagggcctctcgtactgctcgctccggccgtccggcgacggcgagggggcagcacgtttcgccgtcgtcgacgtcgccgcgctccaggcggtgcgggtggacgcggcgaggggagtggcgcgcaccaaggcgggggccacgcgcgccgtctgccgcatcggcgccgctggactcccgcctcccccaccggtctcctccggaagcagatcttag

SEQ ID NO: 55592 - DNA, 482 bp, Oryza sativa
  Clone ID: PAT_MRT4530_57585C.1
aaaaaaaaaaaaaaaaaaaattcggcattaaaaaaagggggaccccgggggaccccctcataatcaaaaaaataaaaaaaaagggccaaaagggccaaggaaaaaaccttgccggacaggggaaaagggccccccccctgaaaaaaaaaaaaaaaaaaaaatgggggccggaccccccggggaaccccaacgaaaagggaataaaagccttccccggcaaagaccggggggcccaaaaagaatgttaattttttccaggggggacttcgtaaaccgaacttttccacccaaaggggtcaatctcgttccgggcaaatttgaacagctttaccccttggacaaaaaaaccccctttccccaaaaaagggggaccccaaaccaaaatggggcggggggggtttttttcctgggttcccacaggaacaaaaaaacgggaaaacaaggtttttttggcccccttcactggaaagggcaccaaagtt

SEQ ID NO: 55593 - DNA, 876 bp, Oryza sativa
  Clone ID: PAT_MRT4530_57586C.1
atggagccaagccgctcgcgcctccctctcatccacttctcgctgctcgcgtcgctgtgttccgcgcggtggcgagacgacagccgcggcttcctctggtgccccgcctcgcgcccccctcggcgtggcccgcttgctatcgtagtctacgctcatgacgagacggccatgtcgccggagcaggaggattgggagatcaatggcatagacagatcagcatacagtgctaatctagtgcaaatcgccacgccgcggacgccccgccccgcgctggtgctcacgccggtcaccgccgacgaggtgcgcgcctacgtcgtctgctgccgcaaccacggcctcactgtccgcgcgcgcagcggcgggcacaactacgagggcctctcgtaccgctcgctccggtcgtccggcgacggcgaggaggcagcacgtttcgccgtcgtcgacgtcgccgcgctctgggtggtgcggctggacgcggcgaggggagtggcatgcaccaaggcgagggccacgcgcgccgtccgcagcgtcgtcgccgccggactcccgcctcccccaccgatctcctccccacccggtggctgtgctgcacccgccctccaccaccgccaagatgagctgcgtgggctgtcgtcgtgtaccgctgccgcatcatctagcgagaaggccatgaccgctggatctgacgaccccttcttccccgctagtggatccggttggctagacgacaaccttgacaatgagcagatggccatttctgagcgacggtgggcaaggggcaacatttggagcgcccacctcggtggctctcgaaagggcgcattctgcctcttcggggacgtagccatcaacgacatcgacttcttcatcaactag

SEQ ID NO: 55594 - DNA, 282 bp, Oryza sativa
  Clone ID: PAT_MRT4530_57587C.1
atgtacaatatggtgcctcgtaactcactgaagaggagaaaaggggaactagaggccattgacgagttgacgggctggaggtcatcgccgccagcccatgcctcgttgtggcccgtgccgccagggagggaggagagggagcccaacggcggctccgaacaaatcgacgccacctccgggaagacgctgacaacggcggtggctcggccagatccggcgagcatgacgccagatctgtggatctctctggttctcgagctcggccagatccagcgagcatga

SEQ ID NO: 55595 - DNA, 2508 bp, Oryza sativa
  Clone ID: PAT_MRT4530_57588C.1
ccacgcgtccggaaaaaagaagaagaaaagcttccttctagatgcttctttggagtgaggtggggcctacatgtcaggatgatcgcctcgccacggccacgccggtttattataataaaagcatgttcatcagtttattactccattgattgagcagccggcggcggcgatctttgcttaaaccctaatctcagacgctgcctttgagagaggagaggggggagatcttcttcttcgcttacggcgggtgcagtctggcaacttctctgcaacagacaatatggcctcagcattcgggagcacctcagcatgtggcatcaagatcactcctaccgcttttgccaccaagaaacatctttgcctggttccacccccagtcgtttcacttccccggaaaaataggcctcagaggaagtgtaatttcagagtaaatgctgccaaagagttatatttcaacaaggatgggttggctatcaagaagctgcaaaatggagtcaataagcttgctgatctcgttggagtcacccttggtccaaaaggacggaatgttgtccttgagagcaagtatggatcacctaaaattgtcaatgatggtgttaccgttgcaaaggaggttgagctggaggaccctgttgaaaatattggagccaaattagtccggcaagctgcagccaagacaaatgatttggctggtgatgggacaacgacttctgttgtccttgctcaagggatgatcacagagggtgttaaggttgtggctgctggtgctaatccagtacagattacccgtggtatagagaaaacggccaaagcacttgtgagtgaactccaaaaaatgtccaaggaggttgaagacagcgaacttgctgatgttgctgcggtaagtgctggaaataactacgaaattggcaacatgatagctgaagctatgaacaaggttggacgacagggggtggtcacacttgaagaaggaaagagtgctgaaaataatctctatgttgttgagggaatgcaatttgatcgcggctatatttctccctactttgtaactgacagtgaaaaaatgtcagtggagtatgagaattgcaagatactcatttgtgggctctatgcatttgatgctaatgttgattctatcacccagttgctccttgtggacaagaaaatcaacaatgccagagatcttataacaattctggaggatgctattaggggtgggtacccaatcctaatagttacggaggatattgagcaggaagctcttgcaactcttgtggtcaacaggcttaggggtgcattgaagattgctgctattaaagctcctggttttggagaacgcaagagtcaataccttgatgatattgctactcttactggaggtactgtcatcagggaagaagttggcttgtccctagacaaagctgatagagatgttctaggaacggccgccaaggttgtagttaccaaggattcaacaacaatagttggggatggtactacccaggacgaagtaaacaaaagggtgacacaaatcaagaaccagattgaggttgctgaacaggaatatgagaaagaaaaactgaatgagagaatagctaagctctctggtggtgttgctgtcatccaggtaggagcacagacagaaactgagcttaaggaaaagaaactgagggttgaagatgcactgaatgcaaccaaggcggctgttgaggaaggtattgttgttggaggtggctgtacgcttttgcggcttgcatcaaaagttgatgccattatagaaacacttgagaatgatgaacagaaggttggggctgaaatcgtaaggaagtccttgagttacccacttaaattaatagcaaaaaatgctggtgttaacggcagtgttgttactgagaaggtccttgccaatgataacttcaggtatggttacaatgccgctacaggaaaatatgaggatttgatggctgctggtattattgatcccaccaaggtggtgagatgttgcttggagcatgctgcgtcggtggcgaaaacattcatcacatcagatgctgttgtggtggacatcaaggagcctgagaaagcagctgctgctgggaacccaatgggtggatcaggttttggattttagtttagaagaagaggagtaccctttttggcagttggcaaccatttttacactggaggcaggcagaatttcacagttgcatctgagacgttttttcttttcctgtgtgtaattgttgcgtacgtcaatgtggcagatgagaggagtagtaggttatgaatggccagcattatgacagtttattgttgctcgaccttacagaagagctgaaacagtgcaacataatgtttttaaggttgagaattatgcaagctgaagtagttggtaataaccggaagaggattgtgttgtcgttggagtagatgatgattttactagctagttagatcgagttacaaacatataattaattaattaagggggcattggcagattccaat

SEQ ID NO: 55596 - DNA, 425 bp, Oryza sativa
  unsure (1)..(425): unsure at all n locations
  Clone ID: PAT_MRT4530_57589C.1
cctttgggtgcaggattccgcntnannnnncccnaacgaagaacacgangtcttcnggttcctcccccgaaaggncccttcccntccanaattcngcannacgtcgggttccattcttgcgncctggctccgaataacaancnangaaacgccaantccngccnggnttgtttctttcccgaaaggncccttcttttttccaggtttcgncccncctnngggtnnctncnagcgcccnggccacaaacaaataataataaaggcccccctnttccccccncccncnggtttccctntccnccttgntctaaccnnttttccanacattcttcccacnnnggnggggtnnattaaaagaataaanaangggnnttcccttttttcccgcncccnttttttcctttnnncnnccnnntnttnttttt

SEQ ID NO: 55597 - DNA, 663 bp, Oryza sativa
  Clone ID: PAT_MRT4530_5758C.1
tcatcccgagcctccccgtggtcgtatcacccctccccgccgtcgcccttctctttcccccgcgccggccgcctccagccgcctctccctcctcgcccgagcgccgtccggccgtgccgtcgcctcctccagcgtcgcagccgcctcctctccaccggcctgccctccgtttcgcgcggtgaccaccggaggcgcgttcccgccgtcgtccagtgccgttgccgccactgtaccacctccagccgcccctgccgcgccgctcaggtgcgggccggccgcgccgtctcctccttcggcgtcgccgcgtcgacctccaccccggcctgctctttgattcgtctggagaccgccgtcgcccgcgccggcctttccatcctcttcgtcgccggcgtccctttggccgccccttcctcctccccggctcgtcggcttgctgcgccacaaccacgtccggcatcgcaacggcaaggtcgccctcggcctcgcctcccctttgtccaaacccctcctcggtccatcgtcgtcgtctccgttcgttctcgtcgtcgacgtcccgtcgatcgcccggcttgtcgtctggctgcgctgccaccatcgtgggcatcgctgcggcgtgtcccacgccgtcctcacctccgtgcagctgctgccggctgccctcat

SEQ ID NO: 55598 - DNA, 288 bp, Oryza sativa
  Clone ID: PAT_MRT4530_57590C.1
atggggagctgcgcatccaagaagatgaggacgacggcgagcgccgccgcggtgcacccctggtcgccgccgccggcggccggccagctcaccgtgcggatgcgcgccagcgagttcaacgcgcttgccgccggcggcgacatcggccgcgccatcctcgacggctgcatcgccggtcttcgtgcagtggtagctcaattaagcaatgcacagcagatcaatgctcaagattacaggcggagacaccagttggcggcggcgaaggcaagccggtcggtgaagacgtag

SEQ ID NO: 55599 - DNA, 375 bp, Oryza sativa
  Clone ID: PAT_MRT4530_57591C.1
atgatgaagaggatggtaatcttgaggcggtgcgagccgccgccgccgcagcctgcggcggcggtggtggcggcgatgggaggttgctgcgggagggtgaggtacggcgagtgcaggcggaaccacgcggcgaggatgggcggccacgcggtggacgggtgccgcgagttcctcgccgagggggaggagggcaccggcggcgcgctccggtgcgccgcgtgcggatgccaccgcagcttccaccgccgggtggtggtggtgcagcaatgctgcgcctgcgacaccgcggcggcggcggcggcagccgggggatgggagtggcgggactgctcgccggagtcgtcctcctcggcgtccagcaccacggccagctag

SEQ ID NO: 55600 - DNA, 1434 bp, Oryza sativa
  Clone ID: PAT_MRT4530_57592C.1
atgcctgctcctgctcctgcagcgacatgcttcgtctttgccgcgtcgggcgtcgatcaggtgcagggcattctctacgccgatcatcaagaacgtgcggaagcatgtagtagcaagaaaaggcattctgacatggctcctggtggcttcaaggcgcgtaaaaagacagcgcttgcagttcggccagtgaatggagtccttacaaggggaagaaaaagtttgctaccaagtgaagtccctcgtgctggcccagctgatgaaagtgatggcttggaggaacaaaacatccatgttgccagcagaggtgatggtatagaccagggtcatgggggcaatcaggtggccagtggaggtgatgttgatggtatagctcagggtcatggggacaatcaggtggccagcggaggtgagggtgatggtttagcccagggtcatggggaaaatcaggtgggcagcgggggtgatggtatagcccaaactcatggggacaacctgatggcctgtgaagatgacggtactgcccagcttgaagaagaggaaccatggatcagggggaataataaaggagcagctctgcagaggttgtcccgatctcggcgtgggaagctgcccgtggtcatcaaagaaggggacataaggccgctacagcctgtcgttgctgcaaagtttgcaactgaatgcaacattatagtgaggaaccatgtgcctgtgtttcccaaatggaaggactacaagaatcagtctgcgatccgcagaatgtttaggatgaaattagctgcaaagtttgatatcgacataagagctactcatgttaaatttgcttgtgtcgaaatgatgaagaaagcagttcgccaacatcgctatcacctgaagaggattttctttaatcctttcccgctccatttgagaaactctgaactgaacaaaaccaaccgaagcaaggtcaagtaccatcatacaactggctcacgcagctacaaggtgcatttggaaaatttgggagacaagtacaaagaccaggaacttgatgcagtggatatgttcaaggagtgccactacagtaaaaagaaaggctacacaccagatgtccagcttgctattgatgaaatggaaaacaagctgtctgaacatgcagaagatgaagaggccccttccatgaccgaggtagttgctggtgttcttgctgagaagaccaagaaacccacatttctgcagactgtggggattcagagcagaaagaaaggcacacttaaagagcaactagctgcagagaagttggcaaaggatgacctcaaatcacaagtgcaagagttggcgaagaagctacaagaatctgagcaagcaagggtggcggaacaacaggatatggcaaggaagcaagctgagactaatgcaaagcttgaccttctgttgagtaagattggacaccactag

SEQ ID NO: 55601 - DNA, 786 bp, Oryza sativa
  Clone ID: PAT_MRT4530_57593C.1
atgggaattggcggcaaagatgtgtcaaagatagggatggcaaaggcgtggggcatgggcggggagggctccaccactgcctctcgtcccgccgccgggctgccaccacctccccacccgccgcctgccctccttccagatctgatggaggtagggcgccaccgcctctcgtcccgccgccgcgtcgcccctcccttccgctgccgcatgccgccgctaggccgcccctccacggccgccgctgggccgcccctccctagatttggcggagaggagggcgcggccgccaccgcagcctccgccggccacgggcaacgagagagagtcaagaggggagggtgctgccgccaggccgccagcgcctctcgtcccgccgccgcatcccccctcccttccactgccgcatgccgcctcccgccgatgacgccgctgggccacccctccccagatctggcggatgggatggcgggggctgccccgccgcctttgccggccgcgagcagtgagcgaggcctcgcatcgggcggcaacatggagaacatggtgacatcattggatggcaacaagcacttgtttgcatggctggttgtcgacgaagggatggaggcacgcccggcaacccttccttggctgggaacgaagcaagtgacgggaaaaaggagaggacatgcggagacatccagcaaggggaacaagaagtcgatgacctggcatggagggatggaggccggaggagaggacagtagacgacgaggagggagagcgcttctcgctccaacggtgtga

SEQ ID NO: 55602 - DNA, 378 bp, Oryza sativa
  unsure (1)..(378): unsure at all n locations
  Clone ID: PAT_MRT4530_57594C.1
aggggggggggcgnacaccacgcaagaangcgcccggggaggccgaagggcgcggnccgcaagggccaccacggcaggcaccaccacgcagagcggcccagtttttttaggcctgggcaccacgggtgggggggggcagtacatgatgcgnacgttgggcatgggtagctccacagccatgttcatatcacagccaatggctcccctgcagcagcattgttgcgtgcagctgccgggcgtgatgcctgattgcagctgtggcaccaggtaccagatgatgcagagcatgccacaagttatttgtgctgaactggggctgcagcggatgatgatgaacatggcgatgcctatgccatacgtgtgcaacatgggccctga

SEQ ID NO: 55603 - DNA, 558 bp, Oryza sativa
  Clone ID: PAT_MRT4530_57595C.1
cttcctaattttttttttatatattactcatttgttggatactttttttgtcttgtttaaaattaatttgctaaagattaaaaacaaacctcgatgttcagaacttgaaacaaaactgggagggggtgcagcgaaatggtaagaggctaagccgaagaggctaatgcccaggccaccataggactcctccccgggctcttccttttttttttcctccttggcaggcgagggagcagaagcaccactgccgggggcaactggggcaggaacagcaaacttgatgggggcttgcaaatactccttgatcttatcagcatggggggacgagtattgggtttccacagcaacagcaagcacattcttttacccatcgaggaacatgaggggggcagcaccaatagttgggttcgagactgccagggagactgaggcaaccctacaaacaccagaaccaaacttctccatcagcgtcatgctcagggagggcaagcccctcacggctggagactgaccccctgccctggacattgggaataaccagcccaccccataaggggg

SEQ ID NO: 55604 - DNA, 2554 bp, Oryza sativa
  Clone ID: PAT_MRT4530_57596C.1
atggagatcgaggccgtcggggccgatggcaatcctatgcttgcacttataaacgcataccttcaggcatataagtttcaaacttcatacgattgttcaagtgacactattgtcatggctttttgcaaaccatgtctagtattctattctgttcttacttttctgatcctaaatggtggtccatctcatgtacttgcaaaggtttttatggtggtgatggaggatgacccaatcatttcccccaagtcaagccaaaagaaagtaatgagaggtgaggaagctcagaagtacaaggcaatgaccacaacgaagcatgatatcttcctggattcatttctcccagctggatcttacaagaagctatacagttacacccaccttctcaatggctttgctatctatgcaaaatctgaaaaggcaattaaaactcttagtggagcaaaaggagttagactcatccaagaagatataaaaatggccaagatgaccacatacactccgaggtacattggagctaatgtagtctggccgctcctcggtggtgccgagaaggctggtgacggagtagtcattggcatggtagatactggcattgaccccagcaacccaagctttttaagcacatcggaccaagcaaaaccaccaccggccagtttcaaaggaacatgtcaaactggcgaaagatttcctccagattcatgcaatggtaagattgttggagctaggtggtttgcacgtgctggtcaagcaactggagagttcaatgctacaatgcactatgcatctccttacgatcctgatggccatggcagtcttgcaatctacaaagctgcctattcttttggtggatacatgtcagatgttatagctgcagttgacaaggctgtagaagatggcgtcgatattatcagtctttcactgggaccaactactattacatctgggccagcatcattcctcaatttgctcgagacacaacttctccttgccaccaaggctgggatctcagttgttcaagcagttggcaatggaggccctgatgcaaactcagtagtttcgttcagcccatggataacaagtgttggggcatccacaactgacaggaagtataacaaatcaattataattggaaatgggcaagtcttctcttgcggcggcctatcaccatcgacaccaggcgagaccatgtaccctctagcattggctgatgatgtgtgcaacacgaattcaactggtggatcttccaactgccaagatccggatgtcttcataagatctcttgtccaggggaaggtgattatttgcatgtttgtgtcgtcaaactactacgaaggcgacttccttgctggcattgtcgatacgattcagaaaattggtgctgccggagttatcatcactgaccgttcttcgagtgactccgacattgaatatcatcccacatttccgacgtcaatcccttcagccatagttgtgaacagtgctgatgcacaggctctattggagtactacgacgacaacttggtccgagacaaggaaggaagtgtcaccaagttcggcgcaaccatccgaattctggatggacggcgagcaatctacaccagggaggcgcccgtcgtcgccgagtactcgtcgaggggcccggacgtcgacgacatgcagatgcaggcggcggacgtgctgaagccgaacgtcatggcgccgggccatcacatctggggagcctggagcccgacgagcgacgccatggtcgagttccagggcgagagctacgcgatgctgtccggcacgagcatggccaccccgcacgtcgccggtgtggtggccctgatcaggcagaggcaccccaagtggagccccgccatggtcatgtcggcgatcatgaccaccgccgacgtcaccgaccgctccgggaggcccctgatggcgcggcgtgacgggggcgtcctggagcgcgcgacgccgttcgacatgggcgccggggccatcaacgcggcgcgcgccgtcgacccgggcctggtgttcgacgccgggtaccgggactacctccagttcctgtgcgccgtgcctggcgtggacgacgccccggtgctccgcgcggtgggcgtgccctgcccgccgtcgcgggcgcggtggtgctcggacctgaacgcgccgagcgtgacggtggcgagcctggtggggtcccggcgggtggaccggcgggtgacgagcgtgggcgcggagaacgaaacgtacatggcgcacgtgcaggcgcccgacggcgtggcggtgcgcgtgtcgccggacacgttcgccgtcgcccccggcgcgacggccacgctgaggatcgtgctcaacaccaccgcgccggggaacaccttcagcttcggcgaggtggtcctcaggggcgacaagaagcacaccgtgaggatccccctcgctgtcttccccgccgcggcgttgagcccgtgaagccccgaacagggatagtcctggtatatacaaatattacttacgtatacgtatgcgagcggatggagttgtacgatgaatgaataacatgtatacatacact

SEQ ID NO: 55605 - DNA, 291 bp, Oryza sativa
  Clone ID: PAT_MRT4530_57597C.1
atgggtaaccgggggagagatcaagaccccattttgtcggcggcaagagaggtgcgcaggaagctcgatgccggcggcaaggaagctcgacgccgcctacgctcctctccccgtcgcctggctgccgcccgctccccgccgcctacccctctccccgccgcctggccgccgctcgccgctgcctacccctctcctgctcgccggcgggaggagctgcgccctagcccactcgccgtcgccaccgcctggctgccgccgcacgattcgggaagagtcgatttgtgtgcgtga

SEQ ID NO: 55606 - DNA, 5496 bp, Oryza sativa
  Clone ID: PAT_MRT4530_57598C.1
atggcctcgccggcggcgttgacggcggcggcggcgagggagcacgtggagaggatccggcgggagcgattctacatcgggcgagaggagaggaacccgctggcggaggacatccaccaggcggtcacctacctctcccaggagctctactccaaggacctccatttcctcatggagctcatccagctgaggctagcagcattcttcacttgtgtaatatcttcaagcgcactgaatgcggaggataatgagtatccatcagatgtggaacctgcactggagttcgttatcattaagaaagacatcactgctacaggagctgcctcaactcttcttgtcttcaataatgaaaggggattttctgctgcaaacgttgaatccatttgtaggattggtaaatccactaagaaaggaaacagacatcttggctatattggtgaaaaaggtattggatttaaaagtgtatttctggtatctagtcaaccacacatcttcagcaatgggtatcagataaaatttaatgaagaaccctcagaagattgtgatatcggatacattgttcctaaatgggttgatgagaagccaagtattgatgacatacatgcggtatatggctattctaaaaagcttcctacgaccactatcatcttacccctgaagagtgataagatactcccagtgaagaatgaactatcaagcacgcatcctgaaattcttctgtttctttcgaaaattaggcagctgtctgtcagggaaataaacgatgatccaaaggccagtaagcttagccagatttcaatctcaagtgaagtggactataagacacagaaggatataaatgcagagtcatacactctccatctagctatgcaagaaaataaaaggggtgataaagaggagtgtacctactatatgtggaagcagaagtttgtggtcaaaccagagtgcagagataagaaaagaatggaggtagataaatgggtgattaccttagcatttcctcatggacaacgactaagcagaggagcacggtcacctggtgtctatgcattcctgccaacagagatggttactaatttgcccttcattattcaagctgatttccttcttgcttcatcccgtgagtccatcctgcttgacagccaatggaatcgtggtatacttgattgcgtaccttatgcttttgtcagtgcatttgaagctcttttgaaatcatcaagcaatgccccatcatttgcccttcctccaatttttaggtttctgccagtagcaacttcttccatacctgtgtttgattcagtaaggttgtcaataaaaaacaatattgcaactaaagatataatgccttgcgagtcctttgatacacagaaggttttctgcaaacccagtgaggtcgctaggctggatggtgcgttctggagaattctaatcatggccaagaaacgtggaattaatctgcagaatttatgttctcatggcacttctgtcctgaactcctatcttgatagcaaggaatacaatgatgtattaggatttctgggagttggatatgtcaaccatgaatggtatggtaagtttattgatggttcaaatcttgtgacacaggctccggaagatatttatcttgaaatattatcttttattgctgataattggtggttgaagttttctaatacaagcatgtcggatgtacccctcataaaatatgtgactggagctgattgtccgtcatattgcagtgtaagtggagctaacatgcatcataagaggatttgtatagcatccaatgttaatgacttaccatggattattggctggagcaaggaactctcaactacctctaacatgttctttctgcccctgaatacacagaagtctcttaacacgttttgcaggagaacacagattattgagtggcttcagaaaattgcgaagctggaaattcggaacctctatgaatatgcttttgcagcttcgaagactatttataaggcaagttctgctattgcttactgccacttcctttatcactcacatgcaaacaaatacattactgaggggagcattatcaacctgtctcatgcaatgcctttggtagataaatgtggatccgtgataaaacagaaaaatgctttgcttgttcctgctgaagggagcaactggtttactttgattggaacgaatccttggagatctcaaaagtatattgatctatcagcagattacatgtcttctggaacttatgccggaaattatacacctgaaggtcagctcataacattcttaaggacttatgcacaagcaatggatgtgccgtttatgcatcctcccaatgctagtttcccctctgtttcatctcctttagctagggagaatgcacttttgcttctgcaatggattaagaatataagatcaagcaatatcagtctaccacataacttcttgagctgtatcagaaatgggaagtggctaaagacttctgttggttacaagtcgccatcagaatcttttctatcaagtgtaggatggggaagcaagctacagattcaattcattttttctggtgtgcccatagttgacgaagaattctatgggagtaaactgcgtgggtacgtggaagagttgagagcaattggagtgcagtttgagttcgcaaatgctaatttacacattgccgaccaaccgttgagcatggaaaatgttattttactcctacagtggatcaaggatctaagatcgataggtgtccaactacctcataacatcaggagctatattaggaatggaagttggctgaagacatcaattgggtacagttctccgtcacgatcttttttgttgcctgcacattcaggaaatttggggcagatcatatctgtattttctgatgtggccatcattgatcaagaattttatgaaaataaaataagcgcatacaaggacgagctgcatggtattggagtgcagtttgagtttgcagatgcatctgtacatattgtcaactatcttatgtcaaaatcatcaaacggtgctctttctcgggtcaatatgtttgcaatgcttcagtttatcagaaacctgaccgagaataacctgacctctgtaaatttcattgaaaaaattaaaaagggctgccagttcaagacttgccttgggaacagattgccagtaaattctatcctgtttaactcagaatgggaaaatgcttctgtcatcagctcattgccttttattgacaccctgttttatggtgaggacatacttgagtacaaaccagagcttgagctactgggagttcatgttgcctttaaacagaattaccagctgctagttgacaacttcagtctcattagagatcaaattactcctgatgtcaccatactgatgctcaagtgccttcgatatgctgagatacctcaacattttgctaaaaagctgaaagagctgaaatggttgaagacttgtcttggcttcagagctcctcctggaactttcctcgttaatgatgattggaaatgtcttctgaatattgttgatgatgtaccgctgcttgatttgaagttctatggagatgaaattagggtgtacgcaggagagttaaggaaggttagtgtaatcgttggctttatagaggcaagtaaggcaattgcctgtagagtcacgaaactgttatgttcttccttgtttacagaggagaggggagttgccatgctggaatgctacagagaacttagtaccaagcatggaaagttacctgttgatcttgccaattgcatgaagtatgagagatggctgcatacatcacttggattcagagctcctcaggaagcaattatttttggttctgaatgggaacatgtttctaaaatttccaatctacccttcattgatgattattattattctgagtatggccaggggaaaggtatcagcatctacagagatgaactaatggccttgggtgccaaggctgaactaaaacatggagcaccctttgtcatctctggactcaaaattcctcatgatgcttcagctattacaccagaagctgttatatcattgctgaagtgcatcaggagctggaaaatgcttggctcagctttacctgacaatttcatgagctcaatcaacctgaggtgggtgaagacgactgcaggatataggcatcccaagaattgtctcctgtttggtcctgcctgctcttctcttcacagggatgatggccccttcgtagatgaagtgttttatgggcaggagatattgtcatatgagagtgagctgcacacattaggagttattgtggatgctagggctggctgtgcgctgatggcgcagtgcttaaagagttgctctaatggcgatgcaatttccaggatatactcatatttggaggcattacgttggaagcctcgcaatgctaacgataattggatttgggtaccacagggaagtgataatggacagtgggtgagcccagatcgttgtgttctttatgacagaaatagcctctttggctctcagctccatgttttggtaacatggtacgactacaagctacttaggtttttcaaaactgtttttggtgtgaagggtcatccaacgattggcgactactgcaggctctggatcatgtggcagaactccaaatccactccgacaccaaaagattgtgctgctttctttgaatttgttgataagaattggaacacagaaattggcaagtaccttgctggatccatcacaaaagttcctgtctgctcagaagatcggatcttgctacttccgaagcaggatgtgttcattccagatgatctgctgctggaggatttgttcaggatgcaggctgagcaacctttatttgtatggtatccaccagctagcttgtctctcttatctccagcaaaactaaatgagatttatagcactgttggtgtccagaaaatatccaaggttgttacgcgggatgaatctgaggacttgaagctcgatcattcgctaaccatggttcagaaaggaaccgtgatcaaacctggcttgctcaggatcatactagcatttcttgcagatcctgctctcgactttcctgctgaaaagaggcatgaaatggtatcatgcctcaccaatgtggttgtctatgagacagctatgcctctcacagtgagctatcaggtagggctttcttcaggaagaagcttgaacgttaaatctgcacggattttccgctgggaaagggaggaatccagaattttcatgactaggaatttcgggtcggcgtcactggagaatgcggagagggtacagtgtgcagcatattttgctgaggagatatcaaaagggttgttgtttgagagaacagaccaagttcctgctctcgctgagcttatcatggctgggtttctgttggactttgatgttcctgctgttcggtttctgttgaagttcaagaacgtaaggctgcttgaggacgatgaacagttctgcagctaccttgcatag

SEQ ID NO: 55607 - DNA, 378 bp, Oryza sativa
  Clone ID: PAT_MRT4530_57599C.1
atggacgccatttgtggctaccgtcaacccacgttcgatcccggcggcaagctggtgggagcggcggaaggaggagtggtggcgaccaacaggcagacgggcggacgagcgagaaggcagatgaccagtcgtggaggagaggcgaggcggccgctcgcggaggagaggcggcggagacaaggtgacgacgggtcgcggaggagcgttggcctctcgcagaggagaagcggcaacatgtcgcggagggtcggcagcagtgggtcgcggagggtcgtcgaccgctcgtggaggagaggtggcggagggtcgtggaggagaggtggcagccgcttgcagagaggcgtcggcagttgcggaggtggcagacagcacggatga

SEQ ID NO: 55608 - DNA, 183 bp, Oryza sativa
  Clone ID: PAT_MRT4530_5759C.1
atggcgttgacccctctcactacttccaaaataatcactcccaaaataatcaccaacttccacatccacccctccaagcgcctccgcccttccttcggcatccctttcctcctccgcatccagactctcacgccggtggcactagaaaattggaggagcttcttgtcgaggagacgtggctaa

SEQ ID NO: 55609 - DNA, 381 bp, Oryza sativa
  Clone ID: PAT_MRT4530_575C.1
aaacagaacagctgactatatatatacccaagcagtcacagagactattgcatacaagatcactaataccgggcataggggccaacagtacgaacacactttttacttgcagatggctcttgcacataaatggctaaaaacaccacagtcaatgcttgggagcacatcgacctataacaggaactggctcacaccgtagaaagcctcgagctatgcaccttctaggccaaggacagattgtctgaaccacatttgatgcaggaggtgagtaccgaagcctctagctagccgcacccatcatagtccatatatgctgtatgcaaggcgtacaaagaagatactctatcaaggaggttggataaccagcctatcataaatagt

SEQ ID NO: 55610 - DNA, 317 bp, Oryza sativa
  Clone ID: PAT_MRT4530_57600C.1
gttcactatctatttcttgtttacacgccactattctcggacacaatttgatccaggaaagcgtgaccttgatcactgatcattgcaaagctcagatatcgattacagaggcatatatacgccttattatatgtccgctaatgctctcacaatttacgctgatgaataccgctaattaatacaccttggagcagacgagcctgatttgtccctgcgttcccgtcaactgggcgaagtttcccattttctccatggacggcgggaagccccttctgatcctctacgggccggactcgtacgaccgaacctgtgcgccc

SEQ ID NO: 55611 - DNA, 219 bp, Oryza sativa
  Clone ID: PAT_MRT4530_57601C.1
tcttcttcttccttcacacaacccccatctcctccatctccactccacctcacacgcctcatctgactcccggagaaccaccaccgccttctcccatgtgccgccgccaccgtctccgtccgcttccacccggccgcatccgccgcgcgctgcggcggcggctcgcgccggagcaggcgcctgtccggggtcatcagggcgcagtcggcgccggcttcg

SEQ ID NO: 55612 - DNA, 363 bp, Oryza sativa
  Clone ID: PAT_MRT4530_57602C.1
cagataaccggccggctatcgatcattatcgcatatatagccttcatcccgaagaatgtagagaaatcgatcgaccaaagtaaagatgcgggtgcgtttgttgacgatagatcgatcgagaacaccacgacgctgacgcaccgatcgggacttggggatatgcaccgtatgtcgtatacgtacgcaggcacccacgtatgccgacacgcgtggtgtacgtacaagctagcagagccgtctcgggtcgtcgtatgtgtactgatagtcggggcggatctacagtacaatgaccggtatcgggtgacaccgacgactttcggcaaaacctatagcaaaactgtttatccatatgttatcatacca

SEQ ID NO: 55613 - DNA, 150 bp, Oryza sativa
  Clone ID: PAT_MRT4530_57603C.1
ctacactgcaaggagaagggcatagcggtagtgggtggcgcagaggagttgggggtcataatgcggaagagcaccacgagcaccaggagcgtggtggccttggaggcacggtcgaagagggaaggcaccggtgaggtcgccgcccaccat

SEQ ID NO: 55614 - DNA, 241 bp, Oryza sativa
  Clone ID: PAT_MRT4530_57604C.1
tgaaaatgcttctcctaatcagcccaactgttagatccacaagctcgctactcaagtgaagaaactccacaaggagaacatagagcttagggatcgtaatgcggagctaggggtagaacttgctgagcttaggaataattttgatacacttagtcgcggtttgtgcactaagatcaagcgtgcattcatagagatgggaaaggaaaatatgtattatgctaattagatgtttcctttccca

SEQ ID NO: 55615 - DNA, 4393 bp, Oryza sativa
  Clone ID: PAT_MRT4530_57605C.1
tcaatccctgatctctgtgccaaaaatccgataccttctgcttccccagggatcgttcttgtccagacggtaagacttcaagcaacaccatatccaaggtgggttcctattcgatggagcaccttcctcggtgtcttctgggatacccagaagcttgttcatctttctgatcacagcttctgccgtcaggaaaccaccaaaaaatttggccccatcgtccttgtggatgtacgcatgaattcttgccgtaggatcctcaagagtcaaccttagacaacaattgccagccaatagtgaacaaagatgactagctccacgtggatatgctgcaacaactcgaaccaaggttttgaatttgtgcgtcacctctccatgggtgagcgactccatcaatgttgtgtaacctgctctctcgtattctacatcagcaatatcagaagcattggggaggcttgccattggctgacgatgaatttgggtggcaatgcgactgtcgaatagcttcagacgatcagcaacgctgccatcttcatttgataaaaggcggactctgctagaaggcagcagaatccctttccacatgccaaactgctgcttgcacgtcatattacagaacctggcccaataaatacccttttgcaagtgtagcatttccttgaaaaacctgtttgagaaaaccctcagcacactcccaacacaaggcaatgtgcacaaaacctcccttggcagaggtgctccttcaagatgtagagggggtggagaaactgattcattgtccaaggtcgggaactcggtcacaggtgtatcagttccatcccaaacatacaaaatccatacgccattggaagcttcatgaacatctagaaccttgcatactagatcaaaagtagaatcggattttatactccttaactgcagttcaagatctttcagacctggaggattatatacaatccacattctcaagtgagtcaaaaattcactgtcatgtttgctgccatggtatttcatagaatgctgatatggtatgcatcccgtagatactttcccttcaaatagcgcaaatgaagaaaaccttttgttatatgtgacaaagaattcgccatggtgcattgttatcacaacattatggagactgatcacatctccacttgacctaacacagggcagtaatgcagtgttatcagcaaagaaggtcacagagattgcagatgcacgtgagtgatccacaatcctcaacgtaagagtgaaatcggtgccgcggctgcggacggccgcgccgatctcggagacggcggcgaagaggcagacccgggccccgggggccttcagcgcgtcggcgatgggcaggtacacgtactgcgcctccccggatgccgccgtcgatggacccacgtcgccgtcgcgcggccgcttccgctccggcgccgctgcctcctccatggcccgaatttgtgcgcgcagcgacgtgggcaccttggtgagcgaggacaagttaatgggagggaggtgcaaggcgtggggcgccttgctccggcgaggcttcccttcagtcagaggttccatctcccggacagaggccctaagatcaatgctctgcgactgtcttgtggactgtggtgggagcttccatgcctttcggttggaatggaaggtgggctcactgtttgcaaactcgttttctatgtcagatatgttcctggggatcttggcttctgacctcactctagtacctgtgttcttgtttgcagtttgctcttctttctgaggcggctttgttgcactgtcgagcctggtttttgtcatgctttctcggaccgatggctttgcgcttctattttcttcggagtctcggaatttccgtaagctttgagccgtcaggacggatgaaggggtcttcctagagctactgtgctgtacttttgggggcacttcaatccttgatactggtgtgcagtcgatgttttcagacctctccacgcttttggcaatgccaactctctcggcagacaatgaacttcttactggaggagatggagtcttgaacttggcactcaagtataactcccggttgatgacaggtgacttctcgtccagttctctcactgacaatggagagcggaaccttctctgctttccagatgatgagcttctgatctcgcttgtacaagtgtctacactggaatcctgaccagcttcaggtttcgaggacaaggtggtggttagaggtgacctcgttcttgcatttctcttttcagaggccacacggttcgcgatatctcttagctttgatgcttcacgttccttgtcgtctaatgccaatttcatatttagaaatctcttccttcagatctttgacctgcccaacttccttattagcatgagctgcaccaagttctacggtggctacacgctctgcaaacttgagggtactcattgtttcaccaaaagcatctgcttcaggattcatgtggacaaacatcaatgtcttcgcctgaccacctaaggcatcttgtagcacttgtgttagcttgctatttcggtatgggacgtgggagctcttttgggcaagtgcagctataacatcaccaagtgcggacagtgatttgtttatatgttttgcttcgtttaatctttctccagcggcctcggacttatccacccgttcacttcccgcaagatccacaagatgaaggcatcctcttagagttgaccccgaagctatctccttgccttgaacatgaactgtcaacacactgtgtgagcgactacttcgttcattaagagcagtagacccaactgccctgttcctgtggccaactctcatcaaatccaaaacgtcctgtgcacacttcactggaactaaatttgcatctgggatgttcagtccatttacatgagaactgtttcgtatttgctcattgtatatttcgatcatctgaactttcacatcatatgtggtagtatctgctctattttgcgaaatagcaaatagatcattaagtgaccggtagttcacgccccaggtttcctctgttgtaatatctggaccgctcatggtatatgtttttccagatcctgtttgaccgtatgcaaatatgcatacattgtacccatccatcacagatctgatcaatggctgtgtatcagcaaaaacctcagcattctccccaatatgatcaacggtagatctttgatcagtttgcattttcaggaaaggtttcactctacaatataccaataaggcaatcgccactgaaaataagagataataatggctattgttacatttacattgtacaaaagggcgtgaggtttgtacgaaacagacacacgaacttcaaaaatgaaaggaaaaaaaaaagaacaaaccaatgaatgattgtgttcctctcaggttcgtctacccagccgtagaagacctacagatatagccggatcacagggtacaatgaaattcgcctgacgaaaaaactagatttttcagcacgagagccatcttcccgcggggcagagagatctccttcgctgcgccgggtctccggtaaggggacgttggttctatcaccgtggggcgccttgctccggcgaggcttcccttcagtcagaggttccatctccgatgggaagcaagcagaatggtgaattctttacaggcttgttcaagtattgtttcaaggaccatatcatctaagggcaagccctcagcttcaccccattcctgaaggaatgcccgcacaactcgaagcacaaattgctggaaaagtgaatgctgagattctccaactctagattcctcaagggagacttcagacagaaggtgcacaaattccagcatttgttggttcagatcagctgaacctcctcccctggatgaatatgaaggcaacctcttacttgaggatgcaattttcacaatgccaccatagcgccatatgccaatcccaccagagagcttccattcgtggtatgctttgaggcaaagtatgcaatcgacaactttcattgatgaacctcccttctctatgtcggaagcttcaaacgtcaagagattcatctcgctaactgcaacaaggaagttcctcatgttctcgaaatactgaatcgcagactgggccgccacatcagacgactgcaccgcaacaatgggattctccacgaccttggggacggcgcccgggttgacgtggttgaggacgttgcagaggacgagcccgttgcgcagcgccacgcagaactcctcctccgacggcctctccggcagggactccgccgccgccgcctccatctgccgcagccatcgcgccgcctcgcacctccgcgcggcggattcctcggccttgcgcagcgccatcccctgatcgtgcctcccgccctccgccgccgccgccat

SEQ ID NO: 55616 - DNA, 234 bp, Oryza sativa
  Clone ID: PAT_MRT4530_57606C.1
atgggagcggtggcgaaatccccaaatccattgtctcctcctcctccgccgccgcatggatccagctgccggctcgccagatccaacgtcgggggcgacctcctccacggcggtgccgggtgcgaccttctctgtgtcgtccctgcccaagtcggcaactctgactgcgccgcgcgcctcgccgtcctcttgtccaggcaggccatcgacgggatcgacgatgaccagatttga

SEQ ID NO: 55617 - DNA, 635 bp, Oryza sativa
  Clone ID: PAT_MRT4530_57607C.1
gggaatccacttgagcaccctcccgtccgacacgcccgtgtacgggccgtcgccgtcaaacgccacgcagccacgctctccggcccaaccgcggacctgctcctgggggaccctgcagccctgcgccgacgagtcgtgcggccgcgccagcgccgcagtcgccggctcggcggctcgccgccgccgcacccgtacgcctcctcttgctcggctcccgtgtctagggtttgggtattaggtgattagggttagatggggaggagaattggggaaaatgtcgaaatgggctgagttgctcctggccatcgtgtccagcatcggagctgctccggatcaagcgctgcaccaccatatggagcgctgctgtggattatgggaggcaacatcagatgaagcagcgagtggacggaggatgtagcggcggcgggaggcgatgcgaggcagcagaaaggcgggaggtggtgcgggagtaccgtcgcggctgctttcggggtggggaagcctgccgccgacgcctagagaggtgccgacgccgatcagggctaccggccgcggaagcgagatgccgccgccgccgccgccgcgggtgtggggaatgccggacgcgtgggcggacgcgtgggcggacgcgtggg

SEQ ID NO: 55618 - DNA, 1908 bp, Oryza sativa
  Clone ID: PAT_MRT4530_57608C.1
atgaacccagccgccgacaggtgggcccgtcccgggaccccgcatggtggacagcggtccacccggcttcccgagtggaagcggattgctttgctgctgggcagcaggactctaggagtccgagaaaatgaaaaaggctctgggagccgattaatcaagtggaatggctctgggagccgagaagctgctgggaaggtgacgctgcgcagcgaaccaaaggagaaggcgatcccgagtaacgaagagcgcaaggaatggcctgtcctggtgcacgtggtggcgccggcgaaaacggagcgtttccccatcgacctggtggcggtgctggacgtgagcggcagcatgacgaaggcgacgtcgatgcacgggtggacgaggctggacctggttaagggcgccatgaagatggtcaccaacaagctcggcgccggtgaccgcctcgccatcgtgccgttcaacggcaaggtcgtcgccgccggcgcgacgcggctgatggagatgaccacgaaaggccgcgcggatgccaatgcgaaggtgaaccagctcaaggccggtggcgacaccaagttcctgccagccctgaagcatgcctcgggcctcctggacagccgtcccgccggcgacaagcagtaccggccaggcttcatcttcctgctctccgacggccaggacaacggcgtccttgacgacaagctgggcggcgtccggtacccagcacacactttcggcatgtgccagagccggtgcaaccccaacggaatcacgtccgccgtcgccgtcaacgcgcgcgtccaactgcacgtcgccgacaactccggcgtgctcatcaacaagatcgactccggagcctacgacaagacgatcgagagcgggaacgggaaggcgtcgtccaagggcaccatcaacgtcggcgtcttgtccgctgaggaggacaagaagttcatcgtctacctcgatgtgccaaagctggagaacgctcaggcgaagccgccgcagctgctgctaacggtggccggtgagtatagcacaccggctggcggacggaaggtggagaatatggaggagtccagcgtacaagtcgagaggcctgcgcctgcgggcggcgcaacgaaaaccggcgatcatctcgtgacgtggtcggaggcggtcatggtggagatggtgagggtcaaggtggtcagcatcgtgaaggaggtgttgaagaagcacgagcacgacgaggagccggaccagaagcagatggccaaggatctcatggaggaatgggacaagttcatcaaggagaccccagccgggaaggacgcagcggagcgcctcaaggagaagcttcccaagcatcacgtcgaggatatgcgcaggagcctgaccaaggaggagcacgacggcgtgctgtacctctactcgtggctggcgagccaccagacgcagcaggccaccaccatggcgtcgtcgccgccggccggcgtcagcggatggttccaccagcagtacatgaagcaggtggccgtcgacgcggagttcgacgcgtgcggcatccagcccggggtagagacgaccgagatcgacgcgacggcggactgcggctgcgtcgtgggccttcaggacaggatcgaccgccggctggagctctggtccaacctcaagcgcgaggcgccgctcatgttccagccgtccgaggacgccgagtcgcaccacctcaccgccgttttccgcgaggcgtcgctcgatgccatcaaccgtgccatgcaccacgacatgtacctggccgtcgtgcatgcgagcaacctgaggcgatgctactccggcgccgggaagcagcagctgcatggatacggctcgtcggagctgcctgcacatgatgatgaagcgctgccggcgacgcgtgctgttgaaaaacacagcgagtga

SEQ ID NO: 55619 - DNA, 478 bp, Oryza sativa
  Clone ID: PAT_MRT4530_57609C.1
gagatcgaaagagctaattaaacgaatactcttagttacaataggacagcttccctgttggagttgtaatactggctgtactttatacaatgaacacatatgctatgttcaataggagttacataccagaaagtgggctgatccaaatgattcaagtctacacaaggagggatgggatctccagcccttagatcaagcgctagattctatacaccagacggacctgctactaacaaatatgcgctcatctgacattttttctgcacattaactaactagtactcaacctgtgaacctgagatgaaggatctttgtacattaacttcatcatatagcttgagtgcactacaatgctatggcaaatagtttctcccatcgactgatgacactgggaaacgtcattgatgccgaaggcacacaatgtacacagaacctcaacgacgagccatgtactattcaaagaaactgataaacttct

SEQ ID NO: 55620 - DNA, 773 bp, Oryza sativa
  Clone ID: PAT_MRT4530_5760C.1
ctcgccggcgaacggcggcattaggacgcaaacgaagcccaccagcacgtagaggacgaccgggcgaactcaccggtgaccaaaacggcggcggaagatcaacggacggcgacggcgactaggaggaaacggaggaaactttcgggtcgacggcggcgatgaagctccggcgatctccggcgacagcgaaggggcggacgaggacggcgacgacttggcgaccacgacggcggtcttcccgagcgacggcgatggctgaaacaacggcggcgcacggctggagcggcggcggcgacggcaaagctagggcacacggcgctagaacgattcagacgacgagaggcgaaggcaagggtggcggcgggtagaggagacaccggggaggcttttaaaggggctcggaggcggcggcaaaggcccacggcggccgacgacgaggaaggaaagatcgggaagaatgaatccgagacaaactcgaatccaacgctttccaaaacgatttagccaaagattccaaaggagaaaaggtagaggagatcccggagattgtttcccctcaatcaattcgaccggagaaggaaaggaacggccggattggaaagcggcggcggcggcggcgcgctagggtttcggccggaggaagacgacgggcctgacaggtgggccccacctgtcagcggcagcgagggcgcgcccgcgcccggactgggccggcttgggccgagggagagagagagagcggttttgggccgactttcggcccaaagggctgc

SEQ ID NO: 55621 - DNA, 210 bp, Oryza sativa
  Clone ID: PAT_MRT4530_57610C.1
tagagatagaaatattagagccctgtgccaaacattggcccaaacactgggcctttacatttagagagagtttgcccagacccagattaaagagggcttttaaagacctaaagacgttcccctcatatatatccgtacactatacacctagagttttggacaggaaacacccatgtatctcaaaccaaacattgggatagagcaaattct

SEQ ID NO: 55622 - DNA, 2322 bp, Oryza sativa
  Clone ID: PAT_MRT4530_57611C.1
atggcctcggctgatcccttcctagccgcatcgtccccggcgcacctcctcccccgaaccctcggccccgccgcgccgcccgggaccgccgcgtccccctccgcggcccgcggggcgctgctcgacggcatctcccgaccactgaaagggtccaaggagctagttgagcaggctagaatggcgatgaaggctgtcggggacatagggaagctctatggcggcgatggagcgggggtggctgccgccgctgcggatggcaagaacaaccagctggggagaaggcctgcgccggaccgcaagcgatttcggctcaagaccaagccccccgcgaacaaaccggtgcaaaatgtggactacacagagttactgaacattgaagatcctgatgaatactttttgaccctggaaaagctcgaaagagctgataaggagattaaaaggttaaggggtgaggttccaactgaaggaacatataataaccgaggcattgaaccacctaagctacgacctgggctgtaaaagatgatgtcagtccattcttacaagtttagcgccagctctgatgccccagatgccattgaagcacctgcttcccaaacagaaactgtgacagaatcacagactacccaagatgatgtgcatggctcagctcatgaaatgacaacagagcctgtttcttcaagatctagccaagatgctataccagatatctcagcgagagaagattcatttgtttggaaggataacagtttcaccttgaattacttactctccgcattcaaagatctggatgaagacgaagaagaaaatttactccgaaagactttacagattaaagaaataagcataggaaaagtttgtctccctgacttcaatgttccaggtgacacgcctgcaagcaacactactgagcagaaaaatcccatgagtgatcatgcattagaaagaactgcacctggaagcgtggttgctcgaatttcacaattggagaaacgcatttttgttggagatgccctggaagataaacatgcagatctttcaaaagatgatgaatctgatgggtctccggaaagtctgctgtgtaaacaatcacctgtgcgacgttcatctgatgcagtgggtttgatgatcaatgagggctctactgcaatggagaccccaagtcctagcatcaaatctccagagcatgtgcttgaatctgaatcgaaccctccagatggtgtaacaacagatgaacagccaacagaaaattcaccaattggtgtggacagagatagtgaacttgtcaaagagaagggcacatcttccaggcatagtgtttcgttagaggaagatgttatgccaatagattgcacggtttctcctcccgatcatttggaaggtggctcgactgaagtgttgacgaacattacaagtagaaatgtatctccattgcatcatggagatggcaattctgaacatcaggaaatagttggaggtgatgtggcccaagataatccgatccatacactggaaacacccccagaagatactccacagaatcaatctgaaatacatcgtggaagcattgagaaactggcagttgataaaagcaacgcactctccccaagtcaagggaagcaacatagaggcaaaaataagaagcagccatcgaagagaggaaaaagagagacagataatccgatccatacatcagaaacacccccaatggatactaatccacagaatcaatctgaaatacatcgtggaagcattgagaaactggcagttgataaaagcaatgcactctccccaagtaaaggcaaggaacaaagaggcaaaaataagaagcagccatcgaagagaggaaaaagaaagacagacaacctgatccatacaccggaaatacccccagaagatacagacaacacagtacatacaccggaaattcctccagaagatacttatccacagaatcaatctgaaatacatcgtggaaacactgagaaactggcagttgatataaacaatgcactctccccaagtaaaggcaaggaacaaagaggaaacaataagaagcagccatcaaagcgacaaaaaagagcagcaggtgaggcaggtgatttggaaacacacgcaccaaactttgaaccagagattcaacctcatgtgcaggacacagatgttgagatgcgggtcttacttggcaagcgggtgttagacgaagcacacgaatacggtcaaaacctttgcagcattggcttggtgaaagatttatatatgggcgtatacatggaagaatatataactggtgctaaccagaccttccggtttggaccatga

SEQ ID NO: 55623 - DNA, 297 bp, Oryza sativa
  Clone ID: PAT_MRT4530_57612C.1
atccgggccttcaaaaaaactcctgtaaaattggcccgtttaaaatctttttttttttaatagggcaaccgggaaacatgcctgaactgatcctcagtacatttttttaaaaaaaaatatttccccaacatttgaaaacgcaattaatttcgtgttgacaaataatagaaggcgtgctaccacttgtttagatattttaggcctgaagattttttagcagcagtagcagcggtcgttcattacatacgttttggattgagtggatttgtccatacccttatgacaggagtgtatttg

SEQ ID NO: 55624 - DNA, 1126 bp, Oryza sativa
  Clone ID: PAT_MRT4530_57613C.1
acggcacgaggcttctccactcacccgagacccgccgccggtagcagcggcacggcacagcgcggccgcggcgaagcgaggaggggaaggagacggggcgcgatggggctcggcgtgagggcggcgccgttcacgtacgtggcgcacgcgctggccgtggcggccgccaccatggtgctggtctggtgcatccacttccgcggcggcctcgccttcgaggccacaaacaagaacctcatcttcaacgttcaccctgttcttatgcttattggctatataatcctaggcagtgaagctataatggtatacaaggtccttcctacttggaagcatgatacaactaagctgatccatctaattctccatgcaattgcccttgtattcggtgcggttgggatatactgcgctttcaaatttcacaatgaaagtggaattgccaacctctacagtctgcattcttggcttgggattggaacaatttgtttgtatggtattcagtggatattcgggtttgttgctttcttcttcccccgtgcttcgccaagcgtgaggaagggtgttcttccttggcatatactgtttgggctcttcgtctacattttagccctggccaccgcagaactcggatttcttgagaagctcactttcctccaaagctcagggctcgacaaatatggcgcagaggcatttttggtgaacttcacggctttgattgttgtgctattcggtgcttccgtcgtggttgctgctgtttctcctgctcgcgttgaagaaccgcatgagtatgctccaatccctgaaagttagaacatctgtagtttacaactttacagcatatacaaacacaaccaaagaagtttgttgttgccacagtgagacctggtggctggtgttcatataactccccttgaaacaaagaaagaacatactggacatacaaagaaaggaaatatgcatatttgttgtgtgtgtatttgttatgtggttaatctatattaatatagaaggcgtcggacgtgtcactaccgtccatgccatgttcgtgtaaaggaacatttctagccgtccgagctgatttctctttcgtttcaatccgtgaggggtggcattcctcaaattggccaac

SEQ ID NO: 55625 - DNA, 880 bp, Oryza sativa
  Clone ID: PAT_MRT4530_57614C.1
accggaaatacccccagaagatacagacaacacagtacatacaccggaaattcctccagaagatacttatccacagaatcaatctgaaatacatcgtggaaacactgagaaactggcagttgatataaacaatgcactctccccaagtaaaggcaaggaacaaagaggaaacaataagaagcagccatcaaagcgacaaaaaagagcagcaggtgaggcaggtgatttggaaacacacgcaccaaactttgaaccagagattcaacctcatgtgcaggacacagatgttgagcaacagccagcttgtacaagccagtcaccatcaccgagtaatggtacgagtaaaaatgaagttcgaaagagaaataagaagcaagatttgaacagaagaaaaagcttggcagatgcgggtcttacttggcaagcgggtgttagacgaagcacacgaatacggtcaaaacctttgcagcattggcttggtgaaagatttatatatgggcgtatacatggaacaatggccacagtcatcggtgttaaatcattctctcctagtcaggaaggcaaaggcccattgagggtgaaatcctttgttcctgaacagttctcagatttgttagccgaatctgccaagtactgaggtcctggcccgggaaagtccctatcttcctttctttggacaagttgcattcttcgacatgcatggctcgcgcaacctgtgatctgttccgtatctatgtgttacttttgctgttaatttttcgtcatttgaggtgcttcctcctatattgtagagctaactctgtgtagaagtgtttgtatctgtggagttgcagtgtaatgcatacatgctatgaacttgcatacatgatttatttttttt

SEQ ID NO: 55626 - DNA, 912 bp, Oryza sativa
  Clone ID: PAT_MRT4530_57615C.1
atggcgaccgcaggaatatctttttccccggttggtcccgtcccgttcgaggacgtcgacggcgagctgccggcctccgagcggccggcgccggaagggattgacgacggcgacgaccacctcgccgacatggtctcgtctctcccgagcaagatggaggtcaacctgccgctcaagctacgcctctaccggggcttctggctggcggagatccacgtcccggcggccgtggccctgcggcggcgcttcgttccccgccccgacgacgtcatcgtggccagcctccccaagtgcggcaccacgtggctcatcgccctcacgttcgccaccatggcacgccacgtgcaccaccctcccacctccgcccccgcctccgcctccagccacccgctccaccgcctcaacccgcaccagtgcctccctttcctcgagggcctcttcgcccctgtgctgatgcccgacgtgtcattcgccgaaaccctcgagtcctaccgcgacgacgacggtggtgccaagatatacgggccgttctgggatcacatcctcggctactggcacgcgagcaccgaggtgccggacaacgtgctcttcctgcggtacgaggagttgctgcgtgaccctgccgggaacgtccggaagatggcgcggttcgtcgggctgccgttctccgaggcggaggaggaagccggcacggttgaagccatcgtggagctctgcagcctcgaccgtatgaggggattcgaggcgaacagaacgggttacgttgatgcgcagcgaaagattccacgtgagacccttttccggaagggcgtggtcggtgactgggtgaaccacatgacgccggagatggcgcgccgtgtggatgacatcgtcgctgacaagtttagtggcacaggactcacgtttaaatga

SEQ ID NO: 55627 - DNA, 776 bp, Oryza sativa
  unsure (1)..(776): unsure at all n locations
  Clone ID: PAT_MRT4530_57616C.1
caggagcccatctagattaatagaagcacagtatggcatagaaggggaatccggccggggttggctctcgcgccgccggaacagcggcaaacccagcctagggcgaagggaagaaggagaagaagatggtggagaagaagggaggagcggcgaggaaggaggaggtggtgacgagggagtacaccatcaacctccacaagcgcctccacagctgtacattcaagaagaaggcgcccaatgccatcaaagagatcaggaagtttgcgcagaaggctatgggcactacagatgtcagggtcgatgtgaagctcaacaagcacatctggagcagtgggatcaggagtgtgccgcggagggttcgtgtgaggatcgcccgcaagaggaatgacgaggaggatgccaaggaagagctctactctctggtcactgtggccgaggtccctcctgagggtttgaaggggctgggaaccaaggttgttgacgaaacggattaagctttaccttctctgcatctttagaatgagtttagtttgaattgcaacatcaaactttattttggcaaatcagaagttttggactatagcacatcgcaagctgtctatcttcgtatatattccatggatttacctttttgttcatgtagtgttcattattgcctctggtataagctctggtactcaatgctccagtttgggaaatcgcctgtggttgctcgtccannnnnnnnnnnnnnnnnnnnnnnnnnnnnnnnnnnnnnnnnnnnnnnnnnnnnnnnn

SEQ ID NO: 55628 - DNA, 423 bp, Oryza sativa
  Clone ID: PAT_MRT4530_57617C.1
atggcgtcgacgcagcgtgacacgaggccgaggtcgtcggcgaggggaaggaggccctcacatgaccaaagggcacggatggcgtccctggggttcctcaggacggtgtgggacatgaacctgtcggcgcgggagaatggagatgaggttgttgtcggagtggtcatcggacatgccgaggcgctcggcggcgcagcggagcggcgcagcggtgatcggcgtgaggtcaagcttgacgccgttgcagaacttggccgccagctgctcgaacgcctccacgccgcgcagggaagtttgggaggcggatgtggtgcacgtcggagtcctcgtcgagcccacctctggcctcgactccttgtctcctcctccccccgcacgtcgtcgtcggctgcctgcgcgccatcgcagccgcgcgtggcatga

SEQ ID NO: 55629 - DNA, 331 bp, Oryza sativa
  Clone ID: PAT_MRT4530_57618C.1
ggctggaagaaggaaaaaacccaggggcagtggcttcacaaactgccacgaaaaagggggcactggcccccacactacacaaaagcatcccacaatgggggggaagcgcaaaattaacaatttggttccttcccggaacgccttgggggggccccggggggaaggaaaaccaagcaattttttcaggccttgaaaacgaaaagaccccgaaaaaggggccccaccggcccttgcaggggctagaggaaaaactcccacattgaaagtttaggggggggggcccccacgaaaagggggaggggccccttggcccctgggggtgattctgggg

SEQ ID NO: 55630 - DNA, 324 bp, Oryza sativa
  Clone ID: PAT_MRT4530_57619C.1
atgccctctgacggcgtcgcgccggacgcggagtcatactcccccatgcgccgtgctggtgtcgccccgagcgtggtcacctacaacaccatgctccgcgtgtacggcgacgccgggctgttcggggaggcggttcacctgttcggcctcatgcgcagcgccgcctccgatggcagcgaccgcggtggcagcatcatcaagccgaacgtggtgacgtacaacaccatgatcgccatctacggcatgtcgctgggagacgagaaagccgggagcctggtgcaggacatgcaagccaatggcattggtgtccagaagttcagatga

SEQ ID NO: 55631 - DNA, 189 bp, Oryza sativa
  Clone ID: PAT_MRT4530_5761C.1
atgacccctcttgcagattgcatgaacgaagaagaggagggcactgcgttgccggctggcttgccgccagtatgcgggactgcatgtggccatgccaccacagggagatggcgggaagagggacaccgaggaattctgccgccggtagggctcatctctccctctcactcgcacgacggcatcaacaga

SEQ ID NO: 55632 - DNA, 860 bp, Oryza sativa
  unsure (1)..(860): unsure at all n locations
  Clone ID: PAT_MRT4530_57620C.1
gcacgagatcgcagccatgcgccggacgtcgaggcgcggctgctcgccgcctcctccaagccggccaccgccgccgccgcctcgctgccgcgccgcaacaagtaccccttcttctgcgccgtcctcgcctccatgacgtccgtcctcatgggctacaacgtggcggtgacgagcggggcgcagatcttcatggcggaggacctgggcgtgagcgacgcgcagatcgaggtgctttcgggggccatcaacatctactcgctcgtcggcgcgctgctcgccgggtggacctccgaccgcctggggcggcggctcaccatcgtgctcaccaacggcttcttcctcgccggcccgctcgtcatgtcgctcgccggcgggtacgccgcgctcatggccgggaggttcgtcgccggcatcggcgtcggctatgccctcgtcatcgcccccgtctacgccgccgagatctcccccgcctcctcccgcggcctcctctcctccctccccgagatatttatcaatgggggagtgatgctgagctacgtgtcgaacttcgccttctcggggttgccggtgcacctgtcgtggcggctgatgttcgccgccggcgtggtgccgacggtgttcctggcggcgggcgtgctcaccatgccggagtcgccgcggtggctggcgatgaaggggcggcgcggcgaggcgagggtggtgctcgaccgcacgtccgacacgccggccgaggccgagcagcggctgcaggagatcgaggacgtcgtcgccgccgncggntccgntgncggcnncggcnncggcggcggcggcgcgnggnngggggnggcgnccnngcccggcgngcggcgggggcncgc

SEQ ID NO: 55633 - DNA, 645 bp, Oryza sativa
  Clone ID: PAT_MRT4530_57621C.1
atgccaatggagaggtcggtgtcgtgcgccgagaggccaccggcggcgttcggcggcggcgcggccgcggacctgcggtgctacagcgcgtcgtacgccacgtcgtacaagccgggcgctggcgcggcagcgggggcggcggcgggggcggggacgaacacgacgacgaaggtgatgaagcgcgccacgagcgccaacgcgtggtcgcggccgggcggcggtggcggcgtgcatcggagcgggagcaccaagacggtggcgtcctccgccgccggcgcgtcgtacgccgcgtcgtactcgccgttcgaggacccgagtccggcggagaagaccggcggcgggggcggtggcgcggcgacgtgggcgtcgtcggcggggcggcggtcggtgaacctgagagggtacacgccgtcgttcgcggcattggacgacaccgccgtggcgccgccgatcccggccaagaagcaggtgtcgccgacgggcagcttcgccggcgccgtcgtcgacgacgccgagctccagcggcggaagcggctggtcgcctacaaggcgtacgacgtggaagggaaggtgaaggactcggtgcgccgcagcgtcaagtggatcaagggcaagtgctcccgcgccgtcgacggcaagtggtga

SEQ ID NO: 55634 - DNA, 225 bp, Oryza sativa
  Clone ID: PAT_MRT4530_57622C.1
atgtcgcgccttgaccagctcccacgggtgttggatccattcgccggaggggactgcgaggcgggggtggcagtcagtggcggatggtgtgtgcggaggagggggctgcgaggaggcggcgacgcggtggagaggcagggggcagcggaggtgctccatgttgtgctcacccccaagcgcggtgtgtggtggagcatcgacaccggcatggccctcgcgctgtag

SEQ ID NO: 55635 - DNA, 1167 bp, Oryza sativa
  Clone ID: PAT_MRT4530_57623C.1
taaataccccatgttatgcctaaaatttcttatattttggggctgatgcagtaatcaatacgtatttttaaatgatctatcttttttaaatatctgattaagttagttaaaacatttgataaaatatttttctccaaagcgataaaataccgctcgacatttttttcctttcagatcggacgtttgatttgcagtcgcgacctaaatgtttaccataacaatttgacacgtaataataagaagacattcccgagtttttcaaaacaaaaagaattaaaaacatcgccagaaacaattgtggcatatccaagactgacacgtcatattttttttccttttctctttatatgttgagatgaacacgttcgatcggctcttgatgctgtacccaagtgtccattatcaggcaaagctttaaatcctaaatatgacacgtcgttttccgaatccgacgggtcagcaaatgcacggctgctacctagacccgtacccgctaagcctccccctttatcggatccgggtgatctcgcgcccataaattggcccctcctcggctcctcgcctcgctgccattctcttctcctcctcgaaaagaatttcaaagcttagccgaagatgccaatggagaggtcggtgtcgtgcgccgagaggccaccggcggcgttcggcggcggcgcagccgcggacctgcggtgctacagcgcgtcgtacgccacgtcgtacaagccgggcgctggcgcggcggcggcggcgggggcggggacgaacacgacgacgaaggtgatgaagcgcgccacgagcgccaacgcgtggtcgcggccgggcggcggcggcggcgtgcagcggagcgggagcaccaagacggtggcgtcctccgccgccgggtggagccgcggcggcggcgggccgacgcccgggttcaacctgcggagctacagcgcgtcgtacgccgcgtcgtactcgccgttcgaggacccgagtccggcggagaagaccggcggcgggggcggtggcgcggcgacgtgggcgtcgtcggcggggcggcggtcggtgaacctgagagggtacacgccgtcgttcgcggcattggacgacaccgccgtggcgccgccgatcccggccaagaagcaggtgtcgccgacgggcaagcttcgccggcgccgtcgt

SEQ ID NO: 55636 - DNA, 181 bp, Oryza sativa
  unsure (1)..(181): unsure at all n locations
  Clone ID: PAT_MRT4530_57624C.1
ccaccttcacgccggcttcttttcacttcctagcaccggncgacttcaacacgccctggcgccgngtnagttaagccggccggccgtggcattcggcttcccccggnngtggaggtcggccttccctttccccggcattgctcttcgtttnccggcggagaccttcgcaagtgctatctct

SEQ ID NO: 55637 - DNA, 292 bp, Oryza sativa
  Clone ID: PAT_MRT4530_57625C.1
atgggccggccggcccaagaggacccggcccagagcgcgcgcgggaggggaggagagagggggccggtggaccgggctcaccacgcgcggtcccgggtgggacccgcttgtcagcggctcggctcaccgtgcggagggagtacgcggctcatgcgcgcgggcgggggagggacgcggtgcacgcgcgcggacgcgagagccgcgccctgcgcccctccgcttctcccccgctcagctccgctccgcctcgctcgcgcgccgcgcgctctagcgctgttttgccgtgctggta

SEQ ID NO: 55638 - DNA, 1812 bp, Oryza sativa
  Clone ID: PAT_MRT4530_57626C.1
gcacgagggagagagagaactagtctcgagtttttttttttttttttttttttgaagaggacaaacaatatttatgagatttgttgaagagaaaaaaaagagttaattttatacgcaactatgttacagatggggaatgcgatttgtccagaaccaccgccataactatgatgctaattaatacaaaatactagtaggaatgatcgaccagttagcttgaccatccaagcaccacccaagtacaggccaagcagcggaccagccaagagcatctgagtcaacggatctgtcgacggtgtaagcacagcagcagcaactacagcgccaacaacaacatatctccagatggaaagcatttttttttttttttttttaagaggaaaaacaatatttatgagatttgttgaagagaaaaaaagagttaattttatacgaactatgttacaatggggaatgcgatttgtccagaaccaccgccatgactatgatgctaattaatacaaaatactagtaggaattatcgaccagttagcttgaccatccaagcaccacccaagtacaggccaagcagcggaccagccaagagcatctgagtcaacggatctgtcgacggtgtaagcacagcagcagcaactacagcgccaacaacaacatatctccagatggaaagcatttggtcactagaaaccaaaccgacttgccccagcagtagctggataacagggacctgaaaagataatcctgtgctgaataaaagcacaagcacaaactcaaaatactgatcaatcgaccataacgattccactgccccatctgcgctaatccatcaacctatagcttaacgatcactgccattgcaatggcgcggtgcactttgctcgttctcctcgtggcggcggcggtggcggtcgtcccgctcgccgccggccagccgtgggctacctgcggcgacggcacgtacgagcaggggagcgcctacgagaacaacctcctgaacctggccctcaccctccgcgacggcgcctcctcccaggagatcctcttctccacgggctccaacggcgccgccccgaacaccgtctacggcctcctcctctgccgcggcgacatctcccgcgccgcctgctacgactgcggcaccagcgtgtggagggacgccgggagcgcgtgccgccgcgccaaggacgtcgccctcgtctacaacgagtgctacgcccgcctctccgacaaggacgacttcctcgccgacaaggtggggccggggcagctgacgaccctcatgagcagcaccaacatcagcagcggcgccgacgtcgccgcctacgaccgcgcggtgacgcggctgctggcggccaccgcggagtacgcggcgggggacatcgcgaggaagctgttcgcgacggggcagcgggtgggcgccgacccggggttccccaacctgtacgcgacggcgcagtgcgcgttcgacatcacgctggaggcgtgccgcggctgcctcgagggcctcgtcgccaggtggtgggacacgttcccggcgaacgtcgacggcgccaggatcgccgggccgaggtgcctcctcaggtcggaggtgtacccgttctacaccggcgccccgatggtggtgctgcgtgagtaggcgctggccatgcgtgaagctagaataaaatggcacaaattaagagtgttccaccagaataaatgtattgtatactgaataaacctgcatgcaggatatctatctaagctgtaaccggattatactattgtactatcaaataaaaaaaagtgtctatatgattatatatcatcgtt

SEQ ID NO: 55639 - DNA, 738 bp, Oryza sativa
  Clone ID: PAT_MRT4530_57627C.1
atggcgcggcggaagcgcgcagtcgccggtgatggcgaccggcgggcggcggcgcggcacggggaggaagcggaagaggcggagagggaggtgagggggggtggggtctcaccgagggatgccggtgacgggatgacgatgagaggcggccggcggagctcgggcggagggaggcggcgatgctccggcgacgggcgcgctcgggaggaggcagatgagggcagccgcggcctggggaaccaaatgagagtggttagggagaaggaggagttgcgacgtggcgagaaacaccggccggagtggacaatggcgacgagactcaccggaaggcgcggggagacgagtccggcgacgatttggcccggtggagtggtggccgaggagcgacacgggggaaaatggggtggatgccgaggtggagctcggcggggcgatgccggcggtggcggcgtcacagcgtgggagcggctagggctcgggcagttgccggccggagatcgacggcaagaggcggagggaggttacacggtggggaggtggttccgatggcggttggaggaaacggagtggaggccggtgggcggcattattcagcgaagccggtggaggcggtggcgtggagcggtggaggctagagaggcggtggtgtacggctggagcacgccggcgggcagcggtgctcgagcttgcgtggggagagcgggagagggcgcagggagcttgggaaattgggggtaa

SEQ ID NO: 55640 - DNA, 369 bp, Oryza sativa
  Clone ID: PAT_MRT4530_57628C.1
atggtggtggtggccgtggtggtgatggtcctcgtggtggtggtggtgaccatggtggtggtggggatcatgcgggggcgggtagtagtatggcggctgctgcccctcgctgaagtagccctgaaagtcttacattgtgaaacggagggaccacatgtaacccatcaaaaatcttgtgttggctacgagaagaaacacaataaggtgtcgggtggctgcatcgagggcaacagcgacgtgcgacgcgaggccaagtcctacgttcacatccgtagccgttgcttcaccgagaacgccttctacttgaggaagcgacactccgccaaggaaaaccaggttaacacctccacctacgtcgggctggagtga

SEQ ID NO: 55641 - DNA, 454 bp, Oryza sativa
  Clone ID: PAT_MRT4530_57629C.1
tttgtttttttttttttgagacaggtcacattggccaatccattagtaaagcctgctccagggtaatcagtgatcaaacaaacaacttgtcctaagagacccttttgatggtcaaagaatctttttcatggttagtttggacataagggattaaactgtaaaatggatccaaaactttcctatctttccacaaccggtctactccaactccagaggcaatcaatcagactatcgcactatgtgagttgatctggggaggcagcagaaaggcagcattttacaacacattctcttaactgtaacaaaagaattgactgatcagtagacttgtctgatgttgatatttatccttgaattttgaatgtagtttaagataaaagagtcatctttagcagatagctgcggaaccagcgcagagatttctgcctgatcacttcctgtgaagattcgtgga

SEQ ID NO: 55642 - DNA, 202 bp, Oryza sativa
  Clone ID: PAT_MRT4530_5762C.1
aataccacatggtgacctaggagcgtttgtaaaaggtcacgtggcggctaccctgcccgatcctgacccagttatgatggacgtgccgacgcagaacgtgttcgacaacgcctactaccccaaagcaagtggcggcacgcacggaggggatcagcggaagcacgggcttgtggaggaagggaacggcggcggcaaggcgtga

SEQ ID NO: 55643 - DNA, 1210 bp, Oryza sativa
  Clone ID: PAT_MRT4530_57630C.1
gcagtcgccccgcccgtgaggcgcatggaggaggaggagagaaagtagtggcctgggcgtgcgacgcggagggggcgggcgatggagagcggcgcgaacgcacggcggcggcggcggctggtggataggggatccgatcgcctcgccttcatcaccggccaagctcagagcctcccctccgatccgtccccagattcaccactttatactgttgatgctgcttcccttcagcgatctgaacgtcagctaaatgaagttggcattggtgatgacatattcaactacataactcagttgcaaaaatcagaatctggtgttcaaccgactagtgaggcccacctggaaactcataaagagaaacaccaaggtaatgaaagtgacctccaaaagctcaagacaagcaatgtggttcctgaaattcagccagtaaatgaaaaggcatttcaaaggcacagtgaggaaaccctcaggaagaagaacagtcatgacagatcggcaagtacacagcctatgagggaaatggaaacaagatccagatatgtgcctccaaatcagtctaatcaatctgatagtgcaggttggtctgtggaaactctgaaggaaatcctgaatttcgcaccacatgagattacccaggccatatcagctacagagtataaccgatttttggcttccgtcatcattggttttctggtggttctttcaaattgggggctggacgttggtggcactatcaccaaagtattagttgctacaaggccaattctatttcttattgtaacgaacataaccattgtcttcactttgttgatggagaacaaggaccccaacgtgaggggtagaccagctggcagcaaccttggttctgctgataacttaggccaaatgctagagattgggttgctgctacagaaagccctgagcaccctcctgatagactgcagcgtttgcgctgtcatcatgatctgttttatttgattttgaggggtaccattgacagtattttacggaattgcttgtaagaacgccaggtaccattctgtctatcgttcgaatttggagccctttttgctttatgtatttatctactgttttctgcatatatgaatatgtataaaccttgtccaagagaacggacgcgtgacagagtgaggttggtatcagtctaaaaaaaaaaaaaaaaaggggcggcctaaaaaaaaaaaaaaaa

SEQ ID NO: 55644 - DNA, 465 bp, Oryza sativa
  unsure (1)..(465): unsure at all n locations
  Clone ID: PAT_MRT4530_57631C.1
aattaatcttgatcttttagtattccgtatttgtttactactggcctgcatgtgagtcagtcccttgtcactgcatcagtgcgtctgtctcgtgacgatgtaagctgtaacgcttttagctgatttatcagctccgcccagtcaccgcacgacgacccgccgtcggacacggctgtgcgcgccgcgacgcccagctcgtccaccctcgctctcctcgccgcagcgtcgtcgtcgcccatcagcctacccaccgctctcgccaccgcctcggccggcaccaccgcctccatggccgngttgccggcagcctcacgcacccgcacgcccangcggagacgtcggacgaggaacacctcgttgaggaactgnttcggcgcgcaaatgggccaagttcgcggagtgggcacgccggcagagatggggatcccaattatcgagttccacccgcagtggttgaggaagccg

SEQ ID NO: 55645 - DNA, 1030 bp, Oryza sativa
  Clone ID: PAT_MRT4530_57632C.1
gcgataaataatatgtcttgcatacaagtaatccgatacaatgagatatggggtgctgttggactttatacaatgatcgacgccaatgggttggcgttggcggtgaggagcacggtgacgacgcgctcgagtatatgcgtgtggaaaccagcggaagttgcaatcagcggtggcggtagtgaggaccaccgcagcgcatggttattaccatgctcattgagttacatggtggcctacttctctaccacagcggcggtgtcggcaaccagatctgagagtgattgtcggggccaaacctatggtggctcgttgctgagctggtgtcgttcatggaggcatcgagtggaaagcggtggccagagcggaaggacctggcgtgttgcatgtgcgccagccactggcggtgcgaggccacggcaaccgtcatgctgccgctgtccaggggtggctcttctgcgggcgatgaaaagggcagtggcaacatcaatgtatcgacgaacgtaatgtgcttgctggcctagtagacatgaacacatatcactaagagggagtgaaacggtgttgacgagtagcctgcttttggttgtaggtaactcttgatctggctaaaggtgtatatgcaaagttcattgactgggatgaacaaatgttcgatcgggaaacatgtacgcctgctcattcagctaagtatgtgccatattatttccatatatgtgaatttagatttttcatccaacctatttattttttagtacagcttacataagtgtctctttcagcacagctattagtgaagaccttggacaggttgagtacgttttgagtgacagaactggaacactgacagaaaacataatgattttcagaagatgttgcatgagtgatactctatatggagaaaacaatggggatgctttacaaggttatccacttatgttctagctaccaggagaaattctcttttctctgggcttagtgtgataccatgttatttgtttgcacatctggtcatgaactgtctgactttctt

SEQ ID NO: 55646 - DNA, 135 bp, Oryza sativa
  unsure (1)..(135): unsure at all n locations
  Clone ID: PAT_MRT4530_57633C.1
aactacatcacgctcaacagcgcctttactcccatcgcgttcccggccaccnacctcggcggctactattcataagcggcaatatcctcctctactgcaancttcancttcacaaagggatgaagtcctttaacc

SEQ ID NO: 55647 - DNA, 3381 bp, Oryza sativa
  Clone ID: PAT_MRT4530_57634C.1
ttttttttttttttttatgagaattaagtactccaaaagtccaaatgatcacttgacatcatcagtgagcattagtaaatctgcaggtcacccagttccagcaattgtttcagttatattctgaactcagaacatgacatcacagactgatattcaaggagctaaatctaattacaactgatattccaggtttcacaaggcctgttcttcaggtgcattgctatctagaatcagagtttataccgaaacaaagagatgtacaccatgtttttttatccaatgcaggtttctggagccccaaattaggggctgagcagcatgtacaatgttgattgattactgtcaagctaccaaggacacaaatttctctgcaactccacccaaaaatacagtttcaagatcatttcccgtcagctaaggcacctaaaattctctctcaagctagacgcaatgacgcattgttcgccggagggcatctcggtcgacggcagcgcctggttgttcttccccacccagttatgccgagagcattagcgtccaagtcagctgggggaggaggtggcggcgctggagctggaggtgggcttacctcaacttcctcaacagcgatagccacgcttcttgctcggcgcctccccctggactgcgatccgtttcgacctccccgcttcgatggcgttgaccttccaagggtgtgaagatcctctgacacctcgtgcttcgacagcgaagcgaggtttggtagaatgtccttctggaaatctttcttctggggacgctttcgtgctcggcctcttcgaggttttgtctgaagcagtgaggctgcaacagagccatggtcttcattgctcttatgctctactggtgttttcggtgttgagtagagctcatagcctttggtttcttctagctgcagtgtcaaagcttcaaattcatcatcgctgtcactttcgctactacagaccactgcatcctccttcgatgcaatagcgaggtcagcgaaccaatgcaaaatgtcagcaaggggagaccctgcttgaaagacatctttacacaaggctactaggctctctgctgcagttctagcaagagagtcctcagaaggatcatctggttgctgaggaacagtgccaccttctgactgatggacatcaatgtctggctcatccatggaaggcgcggcattgaggtcaatgagattcctcgcatttgcatcatctttcttgtgcatttccatgtcagcttcgcgcttgatcaatggttcggtgtttctttcagcggctgcattgatagggaaaccgagtactcttgtgctaccttctgaataagctgtggaacctaatgaaatctgggattggccatttgcacaacttggttgcacttgtgacttcatcagatctacagggtccttcctgagccaagatatatcaaccggtgaattctcacttccctgttcctgaatagcagtgacatcttgaggggtatcattcagattcacaccatggagtggggaatgcttttgatattgaggttctcctggaaactttgaagaacgttggttatgataatgattagttgccattggagtattgatagaatccactgagaagccgttgaagaaaccattctgagcaaagggcgtgtaaacagaaccatagtaaccattagcagtgtaacttgtgttgctgctttgccacggagacttgactgcagcgttggagctggtcggtgcgtcgattagttgattgaagggattacatctaggcaggtaatgcgcagcagagaaattaataccatttggctcttgtttgaaccatcccatgctgacattttgataatctgttttattgttgaatgaactgttacgctttacttcctcatttgcaccaaaaaagtttgaaccagatgcttcaccaatacgcttttctttcatggtgtcttccaaacttaggtggttcaggttcaccctgcccgatgaataacgttggctttgagaagtggaggttcccacaccaaggaagtctggcattttcatgctagaagactcttccactgctttatttaaaacgtttactgtagagacatgttgaggatgtaaaccagcgatccagctcttctccatgtgtgaagagccctcgctatttccgacgttgagcttaacaatcccaccaacaacggagccatttattcttggcaaaatctttgcaggcttctcctctagtatttccacatcatcatcatcgtcgtcgtcatcatcggcatacgcatcagctggaagctgaaggtccaacattttctttgtggacctgccattattattattcatcaaaggagctccatttcgagcatactccgatcccttagcaaaatttatagatgattgcttaatatcatttccagatgtaggaggcataacttgccagactctttttacatcccgtgatgttgcctgtgatgaataagaccttgcttgtaacatgtctgcagatctaggatatccattgcactcttctctttggaattgtgccattaggtccttctgagttttatacaatcgatgaagctcatatacctgtttccggaatgttgcttcatgcaccagcattgtccgctttagcatttccttatcataatctggagatgcattcgcggttgttattgtgaaactgtcactaacatgcccgctgggtttgctctcctcatgatacgacaaccaattgccgttggaatttacactagaatctgccatggtgaagtatcctggaagataagtcttgctttcaactttcgttcccatccgaaatgttcagatgtaaaccagtgcaggaatcaggatgacaatatctgcagaccaagtctcccgtattgccaaacttatctgttacggccaagatgctccaaaaaagaggtcgccacaacgattgtgaagcgatggtggatgaggaattcttcttcttcttctgcagctgccaagaaaatcgaagtgtgactgccaagccgattcagttcatctttatctaacgccagaggcagaggagaaaggccacacacacacacacagaggttgcgtcaccaacaagagacctcaaccgtatcaccagctgggctgggctgggggggagagagcctccaaaatccaagaaaagattccaacctttccccacttcctcaagccaggagacaaggccaaccaaacagacaccagcaggacacatatacaataatactatatatatccattttcacatggacaacaacaacacaaacaatccttccttgcttccttgttagagcatgcaaggaagaagagaagaagaagagaggtgagatgagaggagaaaacccagatgcagatcagagagagactagataagggagagc

SEQ ID NO: 55648 - DNA, 499 bp, Oryza sativa
  Clone ID: PAT_MRT4530_57635C.1
gtcttaatttgtggccgccagccccacactgcgaggcgggccctgacctatccagggggccgtcaccctacggcgatccaccgctgcctgcgccgaagccaagtcgcccatactcgctgctcgatcctcccgtcgccagatcaccaccaggccgctgaaaccgacgaagaagctggcgggctcggcgtagccaagccgatctcctccgtgccgccagaacttcatcacctgttctagaaatacgatgcacactgacagagagagaaaagagaagaagaaaagctgcaaaagccggaaaagaattgcggaggagacctcctcctaatcggcgggaaataaaaaaaacagagagagtggttcttgcttcgcctgcaaggaatcctctccggcctgtgttccaaaattttgatatgtgatttgaacctttgaagtaggactacccaactaaaattcctgactactgttctggtactacacgcctgcacattcctacatgcgg

SEQ ID NO: 55649 - DNA, 393 bp, Oryza sativa
  Clone ID: PAT_MRT4530_57636C.1
ttcccaaggggaggagggttattacatcgatcaaatcacatctcttttatacggatcctcatttagcaatgtgccattggatctgtttcccttacatgtggcccagtcagtccctattaaggccactcactcccgtgataggccggaatgggccgaccgttcacgacgcgacatttctgaggcccatcttggtgccgccgaagaagctgcatacggttgactaatcaggcaacataaggtgacgatgccctcgaccattctcgccctgttgagacgaaactttgaccccaagcttcagccaatggaaagcgatgacccatctcttgagcattctccgaggtgatcacctgaacatctggaccacaccaagcaacctggacaaactgcaccatt

SEQ ID NO: 55650 - DNA, 243 bp, Oryza sativa
  Clone ID: PAT_MRT4530_57637C.1
atggaggccacctccaccaccaccgcctctgctgcctcctcctcctcgttgtcgtcggcggcagaagccctcaagccttacatgcatctctcgcggctgatggaggagcagcccgttgtaaaccaccataggctgcgaaaggagctgggtcccgccgcgctctcctccctctgcacgggcatcgagacactagtcaccgaggggcggcaccacaaggcgcgtgatgtgtttcgcggggcctag

SEQ ID NO: 55651 - DNA, 1131 bp, Oryza sativa
  Clone ID: PAT_MRT4530_57638C.1
atgctgatggaccctcctgttatgcaagtagattgccaattacagaatgatttggagaaaacaacacctattacctacaatatgacacatgccttgtcacatgatgatcatgggtggcaaggttctgatgctcatcctgcaagtgagacagttagctgcaagcctgttgaagttaacaattgttctcgaacaagcatatatgagaacctggatggttcttctgaaaagtctcatgctaacttgtcagatttacctcagaagatgcatgccgagcccccaaaagagatgaatggttctgatgcatacttcaatgatgttagatttcaattgagtctaagcactgaaaatgatgcccctcaaagcacgtctgttgacgtcaatcaacagagtgttagtaatcaggatgcacctcattctcgggaagagacgcatccacctgccaatatagtgactgtacttaggccatgccagtccaatggagatgctcagccttctcaagacaaggacattactgaagaacaagtcaaagggaacaaggaagttggatctgatatggaagagaatgagacatctgtctcacctaagaacaacatggatcagcttgttcttaacaacagttgtaatggcaatactcattatagaagtggtcatcccaatacaggaaatgttggtgcagaagatcagactgttgcactttgggtaaagtggagaggaaaatggcaaactggaattcaatgctttagagtggactgtcctttatctactctaaaggcaaaaccaacacatggcaggaagagctatatcattgttttcttcccccgtacaagaacttattcttgggtagacatgctacttgtccgtccaattgaggaatatcctctgccactggttaatggaactcatcgcaaatggcgaaagctagtgaaggatctgagtattcctcgacgattcatcatgcagaaacttgctatttccatgctaaattttagtgacgagcttcatacagaggctgtagttgagaatgctcggatggccacaacttggaaggagtttgctcgggaagcatcttgctgtagagattatactgatcttgggaagatgcttgtcaaacttcaaaatgacatatcatga

SEQ ID NO: 55652 - DNA, 483 bp, Oryza sativa
  Clone ID: PAT_MRT4530_57639C.1
atgaaattgtccgccaggagcactcagaaggacgagaatacggaaggaggcgtcgattgcctgttctgtcggagaaacgagaatagggcttcatatgcttctacttgtgcagaatcggccactgttaacatcgacacggataacaacaacaccatggacggctctcctggagggaaccccgttaatgttcagcacagggagggtgacggtgttcaatccaatagtggcagcactgcaccgggcgacactaacaacatgcgacgctcccgcagctttgacgagtacatgagggacaggccggcgcgggtggatgatgatggttgccgcgctcttcgtacaaatggccttccaggcggcgctgcagccgccgaccgactggttagtgcaactccgttcctaccgaagcaaaaccagtgctgctccggctccgtcgaccatcacctctgctccttctccaagtcctcaccaagtaccaaactgtga

SEQ ID NO: 55653 - DNA, 1122 bp, Oryza sativa
  Clone ID: PAT_MRT4530_5763C.1
gggttttattttcctagggtgaacaagccgaggggagagcgcgcgcggaccgggtccacgggggtggggcccacgcggcagcctcacggtccacggtggactgggtgcacccgggctcacaccggccggagccgtgggccccacgcgtcagcctcactcgagggcacgggcggctgacggccgggccccacgcggcggccactcggcgcgcccgaaggcggccacgacggcgcggtcggcggcaggcggcacccgcgcccctatggtcgccggcagcggccataggcacggcggagcagcggtcgagagaggggaagggaagggggaaaagaggcggtggtccacggctcaccctaggtcgacggcgacgacgaaaaaggcggccaaaacggaagaaggcggcggcgcggctcgggtcgacggggtcggcggcgttccggcggtcagcgagctcggcgtgggggtggacggggtcgacgccggtgcggctaacccgaagaagccgaccccggggcggaagacggtcctggcgagcggagaagcccgcccggaggtcgtcggcgacggagaagagagagggcaacgacgcgagctcgattccggcgaggagaaggcgcggcaaagggtggaaacgggcgaaggaggtgcggggagggtttaaatagggttggaagggggagaggccggccggaggggaaggaaaccggcgcgggaggtccggccgccatcaatggcgccggcgagatttgcgggggcaaatccgcccgtttgaacgcgagagagagagagggaaaatggggggaaagggagaggggatcccggggagtgatttcccccactttattgcacgcggggacggcgggatgcggtggatttggcggcggcggcggcagcgcttggcgcaggcggaggcggcgggagcggcgggaggaaggggatgacgggtgggccccacccgtcagcgagggtggcggacgggcccgcccgtgtgcggcgcgcgcgcgggaagggaggccgaatgggccgcgggggagaggagggagagggggggagagatgggccgggccggcccaagggagggaagggggactttttagggtttttctttttataaaacctttt

SEQ ID NO: 55654 - DNA, 1983 bp, Oryza sativa
  Clone ID: PAT_MRT4530_57640C.1
atggcatcgccggcggcggagacctcgccgccgtccaccccctccaccgcatcttgccccaccccgcggccggatgcggcggcggcggcgccaagcatgagcccctcgctgctccgcgccgcgcgcagcggcgacgagcgccggttcgtgaaggcgctcctcgccgacccggccgccccggacctcgacgccgtcgccaccgcgggggggaacacgctcctccacgtggccgcgtggggggggcaccccgcgctcgcgtcgctcctcctccgccgcgccccgggcctcctcgccgcgcggaacgcggcgctcgacaccccgctccacctcgccgcccgcgccggggcgcacaaggtcgtcgccctcctcgtcgccgcgttctcctcctcctcctcctcctccgccgccgcggatgcctcctccccgtccttgcgcgccctcacccgcgccaccaacaggcgcggcgagacgccgctccacgacgcggtgcggggcgggcacgaggccgcggcgcgcgcgctgaccgccgcggacccggggctcgcggggctgtgtggcggcgcgggggagtcgccgatttacatggccgcggcggccggatcccttggcatggtgcgccttctcacaaagacttacaggaacgacgaggaggaggaggaggaattgcccgtattgtgttcgtgcactggcccgggcgggcgcacggtgctgcacgctgctgtgctcacgagcaacgtaatagaaatgacacagggattgttgcagtggaacccaacacttgtgaaagaagtagatgattctggaagtactcctcttcattatgttgcatctgttggaaatattcctgcgttgaagctgttattgggatatgatacatctccggcatatgtcccagattcaaatggtttatttcctgtacatattgctgctaaaatgggatatggtcaactgatctatgaactatcaagatacttcccagattgtgatgaaatgcttgacagcaaaggaaggaacttcctacatattgctgttgagcacaagaaatggaaagttgtttggcatttctgtggaacccaagaacttgaaagaatgttgaatgtcatggattatgaagggaatacagctctgcatcttgcagtcaagaatgctgaccagatgatagtgagccttctgatggcaaataaagctgtattgccaaatatagtgaacaaccaggggctcactgccttagatcttgccgtgttggcaactgacaaaggaattagttatacactgaatccacaggtcattatacttcgctgtttggcatggacgggagctgtccttagtcctcgtcgcttggatcatttcatagatgagtttaacatcgggaaagcttctggaaatgaactaaagaaattcaccaacatttcacagaacttagtagttggttctgtgctgatctccacagtcacattcgcagcagtgttcactctgcctggcggttacatatctgatggtcatccacatgccggtgcaccgattttatggcacagatataccttcaaggcatttgtgatggcaaacacccttgcatttgtgggatccacgctgtccaccatttggctcacttatgctggttcagagcatgtccacccactgctccgggcactctacatgttcttctcagtgatttcgatggagcaggcgacgagaagcatggtggcggcattcgcactgggagcatatgttgttctgagcccggtcagcgagcggatcgcccttgtgctgtatctcctggcactcaagctcaagtcgatcaccgtcgggcttccaccattgcttcagaccgtgcccgtcaccgtcaatgctcgagttcttccacaacctcgccgatggcaggagatgctgcagcgctccttctcgtcgtcgccgatcaaggagaagaacatgccaaagtacgacagcatctcattgtcgtcatctgcacctttctcgaagtag

SEQ ID NO: 55655 - DNA, 725 bp, Oryza sativa
  Clone ID: PAT_MRT4530_57641C.1
ccggcccggccgggaacccaggccacaccgccgcctccacccacgctgcacgccgccgttgactccgcccaccggcgtcctgcgcccctgcgcccggccgattcctcctcctcctccttctgtccgtccgccgccgtccgtccgtcgcctgctgacgcctcccctcctcggccatcgactccgcccgccggcttccgctgtgggctcctcccgttgctgggctggaggatcgggatggtagcggcggcggcgacggcgctcaacgccctcgtggcgctcggatccgcctcggggacggcgtccaagtcgtccttcgtgaaatccatcgtcaaagcccacgatgtcgtcatcttctccaagtcaaaatcggaagggctgctgaaattgttctgctaaagatgtcacttgtcccagaaattgtccattgaagagttttttgctgatgctcttgtagacttgtccattaaagatgtcacttgtcctagaaattgtccaatgaagaaattgtccattgtccattgaagacttgtctgtactcttgtgtgcatatgctctatgcagatgcatatatatatatgctatcctaggtgcaacagaactgtttttttttttacctgagatgcaacagatgttgaatgcatattgatagtctatggagtcttgaattgctgaatgtgtgttaaatgtctatggaatttgtactgattttgtgggttgatttgggt

SEQ ID NO: 55656 - DNA, 319 bp, Oryza sativa
  Clone ID: PAT_MRT4530_57642C.1
ggttctaacattggccctctttacatgtagtcctgtatacagttgagttccagaagcgcggcctccctcatattcattgcttactttggcttgctgctgagaatactgagtttagtgctcccattgtcgatggttttatttttgctgaaatacctgatgtgttgactgatcctttaattttgctcttagtgatgaatttatgattcatggcccttggggcaattaagaccgggcatgcccatgttataaaaagggagaatgctcccagcatttccctaaattttttccggaagagattattgtggtcgattttggtttt

SEQ ID NO: 55657 - DNA, 256 bp, Oryza sativa
  Clone ID: PAT_MRT4530_57643C.1
ttctctactagccgagctgctactctcgggttggcccacggaggctctggcacctcgggctcatcagctagtcacgcgctccgtagcgcgtccacactggcttggacgcgatgggaggacgtctgcgggggcatgagcataagaatcggccctatgcctgcacataccgggggactttgagcaacggtcctgtcgatccagggggcctgctggtcagcaggtggatcgcaccgggaccacagctcggtactacagg

SEQ ID NO: 55658 - DNA, 411 bp, Oryza sativa
  Clone ID: PAT_MRT4530_57644C.1
atggcggcggggttggagacgggcggcggtggggtgaacagatccggcggcggcgcgtctggatccggcggtggcgcgacgtccggtggtgtttggagcgtgcggcgccggcagccaacctcgcccgtggctggcgatggtggtgaaaggaggacggccgatttgggctttaggtctagatccggcgcgttctcagtcggggtcaagggtggtgcagaatccggtcattgtgcaggtggtgtccatagtgcagcgccctcggacgccgttcaccttcttgaaggcgttgcgtttggagccctcgtttcaactccacttcaaggaaactcttcgggtgaaaaccttggattcgttaggatcggacgttgtcgccgttctgtcagcgtaaccttcttgaaggattcgttctag

SEQ ID NO: 55659 - DNA, 470 bp, Oryza sativa
  Clone ID: PAT_MRT4530_57645C.1
atggtggtggtgagtggtgacggcgacgagctaggcaccaaagcgtcgtcgccggtggtcccaccgtccacgtcccatgccagagctcattgccggcggccacatcctccaccgtccgtgccacgtcggagctcgtcgccagcggccgcatcctccggcatccacgccccacacaggagctcgtcgccgacggccgcatcctccaccgttcacgccacgtcggagcttgtcgccggcggccgcatcctccaccgcctcgacgagctagccaggtacgtactcgtcgtgctccgcgccgatgatggcggcgagggcagcaccttcgcgctctacttccttatctgccgccgcgtccgcgctaggctcctccccggcgccggcgaggagctcgcggtcgcggggcagtgcgtcgatggtgtgggcgtgggcgccacagccggcgtcgccgccgaggagctcacggtcgcggg

SEQ ID NO: 55660 - DNA, 1033 bp, Oryza sativa
  Clone ID: PAT_MRT4530_57646C.1
gtggcggcacgggaggcgacgactcggccaccccttctctctcccccacctccctcctccgcctcgccgctgcccgagtggccgccggcaaagccgcgcggccacaaggacggcggcggcggggctcctctctcgcgccactcttaggagaccgggggtctctccggagaggcggcggcggtaaaccgccagattcgcgccgcttcggccggatctggcggggcggcgatgggcgacggtggcggggatggagatggcggcggtagtggcggcagcggccgatggcggcggggttggagacgggcggcggtggggtgaacagatccggcggcggcgcgtctggatccggcggtggcgcgacgtccggtggtgtttggagcgtgcggcgccggcagccaacctcgcccgtggctggcgatggtggtgaaaggaggacggccgatttgggctttaggtctagatccggcgcgttctcagtcggggtcaagggtggtgcagaatccggtcattgtgcaggtggtgtccatagtgcaggtacccttcggtgtgcaggaggcatttggaagcttccgttttggatgctttggttgacagggtctccgaggtgaaaaccttgctccgcttctggtgctactaacggcagcgccctcggacgccgttcaccttcttgaaggcgttgcgtttggagccctcgtttcaactccacttcaaggaaactcttcgggtgaaaaccttggattcgttaggatcggacgttgtcgccgttctgtcagcgtaaccttcttgaaggattcgttctaggagtttttttccttgttggacaattgtcatttggttcagttttgtcaatgccgggttttcgccagttttcctttaattaactgtgcagttgtaaggtttttgggtccggttttccttataaactggatcaactctctttttctatagtaaattgcaggagctccctgcctgtcccctcgaaaaaaaaaaaaaaaaaaaaaaaaaaaaaaaaaaaaaaaaaaaaaaaaaaaaa

SEQ ID NO: 55661 - DNA, 3714 bp, Oryza sativa
  Clone ID: PAT_MRT4530_57647C.1
atggatggtgttgacaaggataaagggaatgggaaggtgcatttcagggattcctctccccaggaagctttccgaacctacaagaggcgccggcagccacggccggagccgcaacagcaaccgcagccgcagccgcagtcagagccggaaccacagcaacagccacagccacagccacagccacagccacagccagaggcagaggcagaggcagaggcagaggccaaggctgcagatgttctggcacggcaggtgactgaaacattttggaaaagtagggacattggatggaagcatggcataatgatcgacgagaacagacaacactggaagtgcatgtattgtcacctgactagatatggtggtggtgtctctagacttaagcggcatcttgctggtgatctggatgtcaaaatgtgcccaaaagttccagctgacgtctctgaaaaaataagggagcatttgcggaagaaaagagaaaggcgaaagaagcgagctgcacaaaatcgtgataactgtgtgacggctaagagcacctctgatgatatcaagtctggcaaagatcctttacccgttgattcagaggtgctgactggagtagacactgttcttgaagaagttactaaccaaacgaaccatgataatcaggatcttacttatcccaaggctaccatgttgttacgagggataagagatattgggtgggagcatgcagtggatcttgatggaaataaaagacgatggaagtgcaagtggtgttctttatgtcgaagtggtggtgtaactacattgaaggctcatcttactgatagtagttgcccaaatattcctaaggaaatatcaaaaaaagtgttgaactttattgaagagaaaagggcagcacgccatctttttaatagcgctgcaaaatctcctttcaatgtcaaatttgacgaggatgcagttaatctctcagaaatacaggtggaaggtactccaccattgacagatgatcgacaacctttaggaaattccttgcatatacaaacatcagagtgcaccattaatgagtttgaaaaggtggcagctggaagcaaccaacagggtgcagaacatagcaaccaactacttaaccatggtgaacagctgatgaaaagcagcgatcaacctgaggagcactgcaccttggaacatggaaggtgccaagtacttgacaataataagcagcagactatggacaataaaactgataatccggaacacaaagaggtcttgaaacaccctaaaaaaactaggtttaacataaggaagcatatagttatcgttgatgaatctgcaaggcattggaggtgtagatattgtggtttggatgggtatggcaaaacgtctaggctccattttcatcttgctgctgtgtttcgacatcctaagtgcccaagtgttccaaaagaagtttttgcaaaggcacggcatcatattcacttaaagagaaggctcaatgtgaaaaaggctgggcaacaagctcgttcaaggccacatattcttgggcaatcgagtcagcaacagcagaacaacaatccggtactttccaattacccaacaagattgagggacaatgcatgggaacattcgcttattcatgacaaagagaagggccattggaagtgcaagtggtgcagtttagagggttatcatggcataactagattgaagtggcatcttgttgggtggcagaatcgtcctcaatgcctaaatgttccagaagatgttgctaaaactattcgggataaaatgatatcaagagagaagcagaaagaaggaagattgaatcttgatgttattgacagttgcaacatgccatgctcttctgagagtttacagtttgatcaagagaattttgctgaggtaatgcagggaaaaggttcttctgaagattttaatcaagctgaaagacaatcaaacacattgaacacagtatgcaataccactcatcctccacagaacagcaacaattatcagggacttcaagaaaatggattatatagtagcaaaaacaaatctgagaagcaaactgaaagatatgactgttggagtcactggcgatatgttttagatggactgatgcatttgccaggtgcactagagggtcctggcattcagagttgcatccgtgatgtacttctttacggttctgctgaatttggaactgttggggacaaagtggaaatggattccaacagaaaagtgtcaagtgatgggaatattgctaagtgtcagagtgttcttgtggatgttttaaagtcagagaattttgccttattgtgcaatgtgcttggcagaactgtccatcaagatgagcaaaggactaagtattttgattttaccatgattgactcaaggatgaaaaatggagattatggccgtgcaccattattattcaaacatgatttgaaaatggttgaaagagagaggggatcagatgatagtgaagagaatctgaagggagctgcggcgaccaatttggaacccatgaacatggtcaagtcaaatgcattggtactttcaacctcacaaggcttcaaccagttggatcaaccagatccaatggatgtttgcgatgaacaaaacggtactaactgcaatgaatgtggcaaggtagcgaaaattgatagcatcctcacatgcaagagatgcatgctagcattccacgtctcatgcattgaacctcctgtgccatccacttcaactggaagctggtgttgtaaaacctgcagcaccatctgtaacgaatcagctgaagttggcatggccttggtccattatgaaccaaatcgtttgcacggacattgcgtcgcatgcaaggaccttgagttttgcaggcctccaaggtgtgaggaaactgccagtgaaagggcacctgctgataactccagagcaattgtgattcccagtgcagagcctgttgaggatgtggaattgtcagatattgatgtcaggggcttatgcaagatgtgtggaaatcccgaggagaaggacaagagattcttggtatgtggtcacacccattgtctatataagtactaccacatttcttgcctgaaggctacacagatcgctagtgacaagcagctggacaagccctgctggtactgcccatcgtgcctttgccgagtttgccattctgacagagatgatgacctgaccattctgtgtgacggctgtgatgaagcttatcatctctactgcataacaccccgtcgaacttcaatacccaaggggaaatggtactgctcatcatgtgcgatagagagagcaaaggaggggatggcgcggcatgagaaaaggatgctgaaactccataggaaggatgatcctgggctgcaaggcatgagatatgaaatggtggacatgatactcgctgctgcggagatgcttagcgatgatgagcagcaggggacctgaatcaccttttcttttttcctgatcaaacagaatcatttaggaagttgaacctgtcatcttttttttttttgcttcacctcatttaggttatacctaattaaagttaaacaacttgtcgtcgtcggaagtttaagggatcgagttaagtactcaggtggttgaatattggttttgtctggggaacagtggtagcgaaatgtcgctatattgtgtacctgtgggtgcaattttgtgaacaggctccaattgaagtgaaaaatgctgaagaatttc

SEQ ID NO: 55662 - DNA, 1774 bp, Oryza sativa
  Clone ID: PAT_MRT4530_57648C.1
tggatcccccggatggcgcctcctcccccaaaagtctcctctgacatcgaggcgatcgcagagcttcctggcttctactacgacccggacaagaaccgctacttccccatccgaggtcccatccccggcgccgccacccgccgccctgcactaccgcctcctgcccaacccccgccgccccaggctgcagcagctggatgcaggaagacggcgaggcagcccgagctggtccacgccagggagatgtacggcggcggggtcatcttctccaacaagaggaagtccaccttcatgcgccagtgccagtacgcccaggcgtctcaacccatggtttggaagtacaagggcacggccttggtggctgacaaagcactcgaagaattgtatgtgacgattcagacaccaattggactgaaagaatccaaggtgctagtgaccggaagcatgaatggcatagttcgtatgacagtaggttcctttaatagtaagagacaggacacatatctaccatcgtttgatgttatcttaagactgcattatttcaatgatacattggtgctcatcggatctggagaatctggtggttctatacatattatggatctgtctgatactattgacgtggcaatgggctcgatgaatgcctatggaggaaatattataggaaatattataccggttgcttcatttaatcgcacaatctggacagctgattgtaattcagatggcacacaggcagtcataggtacaaacagtggtgctgctttttttgatttggaaagaagagcattatcatggatgtatcactgcaagagtgacattctctcccaacaatttatgcaatcgggaaatgttgtgctatgcggcttgaggaatgggagcatatttcctcttgatgtacggcaaaagcaacataatcgtcctaccgagctagcttcacctggtactgctaggaggactattcccctgacacccagaaggcataatcgttggagaaatcaggctgataacgctaaatcttcaagagctatttctatgtcttcagcagtttgcagcttggtggttctctcatcagatgagcactacttcttagggagctccatggatggatctatcaagctattcgatctccgtctcattcagaaagggcctatacagtcttatgcagggcatataaattcacatactcatttaccacttgttgtcgatccctctgaaacccttcttatgtcaggtggggaagacagaatggttcgaatttggagtataaaaacgggcgagcaaatatttgcacagagtgtggctggttcactattcacggcactttgctggccagaaagcggctgcgacttgcacaattcttcgctgttcggtgtaaatcacagttggggggcttggatgggatcgcgtgatggtctgttctatgtgcatggtacttaagcgactgatggtactgactcaagccatgatggctctactggtgttatgtacataagcatataaggagcgatggactgagttctttgctgctggagagttgacgctaacgttactggagctgtgtgcactgatgagaagagtcatctcaatgtagccgatgttatataaccatgagatagatgtgtgctcattttaacgtttttttctttttaatcttattatgatgatagattcttaggtcatgggtgagaggtactgggagctatgttcagcctcatgtctgtgttgaaccgcttgtattttcggttatccttacgagctaactattcgttgt

SEQ ID NO: 55663 - DNA, 1147 bp, Oryza sativa
  Clone ID: PAT_MRT4530_57649C.1
ttagcactcgccgctgatctggtcgcgccgttcctcgtcgtcctctacccccgtctcctgccgcccggactggttccgtcctcgtcgccactcgtcttccccgtcgccgctcgtcttcctcgtcgccggccgaccaccgcgcctccgcctggatccctccgccgcaccgtcttcaccgaccgcctctccaccgccgccacccctgcccggttttggagaccggctccacgatgatgggcgcccactgatctggccgacggggccctgcctcctgccggcctcggcgccccgcaccctccactggccggtcgccgcatgttgacctacgatcggtggagttcccgccgctgcatcgacatggagttgcacctgtgttgtcctctcggaccacagcctcgccgctttcgtcgtcttcatcgccgttcgcgtattgacaacctcgtcgtccgcactggtcatcgtcagccgctgaggctacatatacatggctactgacgtcgccgtccaggccgttggtcccgctacttctacttcgtctaacatgattcatcgccagcgtcgccgtatcttcctcgactacgcttcgctcttctccgacaactacgtgctgctccggcaattcttcctctacgccgttctcgcttgtccccgagtctggcaaacccggcgagacgtctcgtccttcatggttcgactacatcagctcttcggcgtcatcttcctccacgatcgccgcgattgtgtcaccgtcttcgtctctagcgcgtcttcacgcaccattggttcacgacgccctcctgtgcgtccacgaccactctacggcacctcatgcgctccctgcggctcaactatctcgacatcagcttcttgacttcggctacatcgaccacggctactctacgcacggcttcatcgaccacggctctcttggctccttcgctttggctacgtcgactacggcacaaagggctatcattcgtattgagcactcttgtcggtttttttctcccgtccaagtgtccacgctgctcacgcttggactgcaggaggataatagaatatatgtactcatatatataccggccccctgaggctcaatacaagtgtgtctaatattcgcagtattcctcttcctatactatccaac

SEQ ID NO: 55664 - DNA, 1186 bp, Oryza sativa
  Clone ID: PAT_MRT4530_5764C.1
ccattacaagattgcatcagagaagatatcttcatagataattgttggagcaagaacacaagaaaacacgtaggttcaattataatcgatcgtggagatggtgaccagcaaggagtttgcaagggatcaggcggccatggatcagaagatcaagagcgacgtcggcgaggtggtgctcgccggagacgaggaagaagacggggacgtggtgctcccggggttcaggttccacccgaccgacgaggagctcgtcacgttctacctccggcggaaggtggcgaggaagtctctcagtatagagatcatcaaggagatggacatctacaagcacgatccatgggatctccccaatgcgagcacggtaggtggagagaaggagtggtacttcttctgcctgagagggaggaagtacaggaacagcatcaggcccaacagggtgacgggatccgggttctggaaggcgacggggatcgaccggccgatctactccgccgccgtcaacagcaactccggcgagtcgatcgggctgaagaagtcgctcgtctactaccgcggcagcgccggcaagggcaccaagaccgactggatgatgcacgagttccgcctcccgccggcgatcgccgccgccgacgcctccccgtgcatgcaagaagctgaggtctggaccatctgcagaatcttcaagagaagcatcacctacaggaagcagcagcagcagcaggcctggaggccgccggcgacggtgaccgtcaaggccccaccgccgggggactcgagctccaacaccggcagcttcgagtcggacggcggcggcgacgagttcatgaactgcggcctgactccggccatctcccagcagcagcagcacggcggccgtcatcagatgatgagcacgatgagctgcaacggcggctacttcttcaacgacggcatccatcacagccacagccaccacaagcttcatagtcaatggggctccctacaaatggcgccgccggagccgaagccggagccggagcagaagcctctgagctcgccggcgatgacgatcgccttccatcaaaacgaccatggcttccccgccgccgccgcggatttctacaaggatgggtacttggaagagattgcgaggatgatggaggtggctgatccaagtccaacaggattctatgactgtagatattga

SEQ ID NO: 55665 - DNA, 193 bp, Oryza sativa
  Clone ID: PAT_MRT4530_57650C.1
ttttgtggttttttatacctggggggttataatttttccactcaagagtctccgaaaactcaattgaacgagtgacaatatactgctccaatgcacaaacacggctgacggcagtctttaccataaagcctttccatttcagtgataaatcaaactcttggtgagaatatgcaatgacccttttcctcaatat

SEQ ID NO: 55666 - DNA, 322 bp, Oryza sativa
  unsure (1)..(322): unsure at all n locations
  Clone ID: PAT_MRT4530_57651C.1
gcgccgtcgccggcaaacgggcggggcagcgagcacgacaaggagcggtgattaattaggcgatggtagtagaccccgtcaaacaagaaaaatatttttgattttttgtccgtgcttttttacttcgtgttaggctagtaggagtactacgtagttgtagttagttcactttttaattgtggatggaagaaatcaaacacgaaatggaggatgataatgggattgggtgatgtacaattgtacatgaggattgtttggttttaacagggtataaaacannagagatgggcaagttgaaattcttganaaaaaaannntntaa

SEQ ID NO: 55667 - DNA, 196 bp, Oryza sativa
  Clone ID: PAT_MRT4530_57652C.1
aaatcatccctagatgtggcgagctagaaacttgccctttcttgtcgttcccctcggcgatcgacttaggtgaccaccgatgtgcgggaggatgaagtggatagaaggattgctccagtggaggtggaggtggaggcggaggtagaagccaatgttagctttatagtacctaagtgatcacttgatggattttgct

SEQ ID NO: 55668 - DNA, 1026 bp, Oryza sativa
  Clone ID: PAT_MRT4530_57653C.1
atgacgcgccgccgccgctcgccgtcgctaccgtgcgcggtgcgcgtgcaggcggccggcttcgcgctcgggcaccgccgggacggcagcgtccggcgcctcgtcttctccctcttggacatccacgtcagggccaagcgccgcgccggcgtccgctccgtcgacgtcaccatcgacgcctcacgcggcctctgggcgcgcgtcttctccccgccgccgacgaagggagaggcggcgcaggcgctcccggtcgtcgtcttcttccacggcggcggcttcgtgctcttctccgccgcctcctgctactacgacaggctctgccgccgcatctgccgcgagctccgcgccgtggtggtgtccgtcaactaccgcctcgccggccccgcgcgccgcttccccgccgcctacgacgacggcctcgccgcgctccgctacctcgacgccaacggcctcgcggaggccgccggcgtcgccgccgtcgacctctccagctgcttcctcgccggcgacagcgcagggggcaacatggtgcaccacgtggcccagcgctgggcggcggcgtccgccgcctcaccgtcgtcgtcgacgacgctccggctcgccggcgccgtgctgatccagccattcttcggcggcgaggagcggacggaggaggagctggagctcgacaaggcggcgctcacgctgtcgctagcgaggacggactactactggcgggagttcctgccggagggcgccacacgggaccacccggcggcgcacgtgtgcggcggcggcgagcacgacgtcgaggtggcggaggcgttcccggcggcgatggtggcgatcggagggttcgacctgctcaaggggtggcaggcgaggtacgtggaggcgctgcgcgggaaggggaaggcggtgcgggtggtggagtacccgggcgccatccatggcttctgcttgttcccggagctcgccgactccggcgagttcgtggaggagatgaagctgttcgtccaggagcatagaaccaagcgtgtgcagtag

SEQ ID NO: 55669 - DNA, 443 bp, Oryza sativa
  Clone ID: PAT_MRT4530_57654C.1
ggatcctcctatttgggggcgcccttttttttttttttttgttttttttctcttatttgttttcgggttgaaacctatctgactaatgctagagcttgagcgggcaagataccctcacaccattctaactttgatgcattcatccacagcaaagcctcactgcttgagccacaggtgaactctgaatgactagagcagtgcaaatttaaccggagcttggaccacccagagttgcagtaaaagatattgctatcgacaaatagcagttggcagcccaagtggatatgaatgtaacctttgtattcaaatgctaggggtttttaactagcaaaaacctgataaaaagatcaaaagggtgaaccctcatcggagctatcaagtcctcacccggtaactcttaggcctatgtgcgcagaacttcctgggacgctggaaactgaatc

SEQ ID NO: 55670 - DNA, 568 bp, Oryza sativa
  Clone ID: PAT_MRT4530_57655C.1
ccacgcgtccgatccaccccccacgcgtccaacaccccctctcgtccgcacgcaatttctagccacggccgcgtcggctactccgctcgtctcgtctcgtctctctgctctgctcgtcgactgccaccaccagtccaccaccaccttcggctgatacaagaagcgagggggaggtaggagagaagcccaccacagggtgaccccatcggccatcgcgacatcttcttcttcttgctcgcttggttggttgctaacttgctcgctctctccgcccaaaaaaaaaaagtttctctcctttgcttggcgtggcgttcttggatacagacagcgaggaaaggcgcccattttcgtactaagagtaatacaggttaagaggaggcaaagcggaggaggaagctactggaagtgtaataaaagaggagagggaaggagaggaaagtgttaatgtgccctgcctctctgcaagcgggcaagcgcgatagatatggatagacacgaaaattctgcaactgggataccaatccggcaccgaatcccttggttccttgcagcaatttgaccccccgag

SEQ ID NO: 55671 - DNA, 678 bp, Oryza sativa
  Clone ID: PAT_MRT4530_57656C.1
gcagggaaccaggtttattattgatgggaataatcacatttcatgctgatacaaaagaatggcgacagcataaggccgtgatacggtaacaacatttacactcatacgggtacatcagtttgtgcatttctgccctgggacgcttctgtccaaggcgcgcaccaaatacctcatcaattttcttccgtattgttcacttattctgcttagagcagaagttttctcaggaagtcttcggagatgctattctaaaaccatcatctccacagtactgaggagacatgaaaataccaggtctcctcgacggctctgagagtaatttacatgagttttgtttcttatgattcgattgctgcgacccttactggcttcattacttttacaatgttcctcatatgctcaaaccccatcagtatcactcctgatgaattctctggctgggatgaccattcctcaggtttcatcatagattttgtggcttttattaattccattagtgcattgttgacctcctctggtctttcatggcttactagatgcgcaccatgaagttcgaccattctagcaacaggaataagcctttctgcaagtcgtctcgcatgacataactgcgcaataatgtcagacctcccatgaataactgaaactagaaaaccggcagaccgaattgtatctagt

SEQ ID NO: 55672 - DNA, 2183 bp, Oryza sativa
  unsure (1)..(2183): unsure at all n locations
  Clone ID: PAT_MRT4530_57657C.1
gcgccacgcgtccacgcacggccacccatcgtcgtctccagtctccacccctcttcttcctccattggtggtgtacgcttgcctccgtctcagcttcgttttcagatgtctcctcgtcgtcgaagccgggagaaattaaccgtgcgtgtttgccatgatcgattgttttgtccagcaatttgagcgaacagtaaagaattactgagccatgtcagagtgtgttctgaacttcttgttggaagagcagcgaggcgctgtggatgaggatcgattttaatgatgaatccattattattggcttcgattaatccactcgagtgtggaagttaatgatgtcctcttaatctgtgacacacgtcacctggaacagcctttccacattcaaatttgggacaatttgcaacttcagagttcagacttcatgccatggaggagaaacgtccagaggtattccggctagttttataaggtcatgagataattatatagaatccggcagcagtttttcgagttgaaaaattgaactagaaattcctggagaggccacattttacgtgagagtgagacacggcggcggcggcaaaccccggcaggccggcaaagcggcagcggcggcgaggtcacctacaccgtccgatcggatacgcgcggntcagatcaggaagtcttcggagatgctattctaaaaccatcatctccacattacttattttttttttgcagggaaccaggtttattattgatgggaataatcacatttcatgctgatacaaaagaatggcgacagcataaggccgtgatacggtaacaacatttacactcatacgggtacatcagtttgtgcatttctgccctgggacgcttctgtccaaggcgcgcaccaaatacctcatcaattttcttccgtattgttcacttattctgcttagagcagaagttttctcaggaagtcttcggagatgctattctaaaaccatcatctccacagtactgaggagacatgaaaataccaggtctcctcgacggctctgtagagtaatttacatgagttttgtttcttatgattcgattgctgcgacccttactggcttcattacttttacaatgttcctcatatgctcaaaccccatcagtatcactcctatgacataaagaaagcttagtatgcagttactggcaagtcaattccacagttggtatgccggcatttccctcatttatccgttccatttgtgtgatggaggattgttctcctcgtgcatgatccaactttctcatcaagatattcccgtctgttttttttttgtttttataggagagctgctttttctttctggggtttcttgcccttaaataacggaatgcaagcgagagcatctgcccatctaacttcgggaagcactggaagccacctccagtaacattaagcaacgccaacgagcaaatcctgtgcggcgccatggctgccagcttgcaggatatcatcgcgcccatggaatggccgaatacatgagctttcttccaccccagatggtccatcaaggccagagcgtccctcgccatgatcaccgtcgagtagtaggatttgtgcgggagcacggagctccggccgacgccgcggttgtcgaagcagcagacctcgatgccatcgccgtcgtccccctccgccgccgcggcgtcgccggactcctcgtcgtcggcggccggctccagcgacccggtcagccccttgatctgcgggccccacgagtcgtgcgtccccgccaatccgatgacgaggagcaccttggtggcgccgcggccgaagcggcggtagaagaggcggacgccgtcccactcgtcgccgttctggtacctgtccacctcgcagtaaggcattgctcctcctcccaacaatttcctacagcttcgctctggattccggcgagaatggaggagtacgattactactacggttatgggaggagggcgaattaaggcaggtgaaaaatgggaaaaatatgagaggcggaggcggaggagcggtggtcgccgtgggggcgcgggttatttatagccgtcgtcggcgtcgccgcgaggaaggaggaggaacacgtggatggatgggctcgagctcgacgatgacacgcgtactacgcggccggtcgccgtcggctgagtcaaacgtggttgcgctcgcatcg

SEQ ID NO: 55673 - DNA, 921 bp, Oryza sativa
  Clone ID: PAT_MRT4530_57658C.1
atggctacggagcggaaaggaagattgaagtgcgccagatgggaacacgtgtggaagccttcgtaccgttttaaactcgaacagctgagcatgcttggaacctcaacggccgtgccatctatgatggttgttgctggctggacatccagtgggtacggtgcagccgctgaacgacgacaacaccaacaataccctggcaccagcaacaaccctcccctagatcgcccaaattcaacaaccatcccccagatcacgaaggaattgaaggaagaagtgttggaactgaaggccatgttgcagatgatggactcaatggcaaaggtggaagaaaggcgttcaaagcaggctgagagacgtagcgaagatgcggtgattggcacggtgctttctaggccagccgttgcacaatcaactccgcaccgcactccatcttccctgcgcccccgggcaaagcaccgtcttcaaggggccttaccacatgcgacatcaagcaaaacgaagccttacgtccatcgatccaatggctgcctcaacaacgtcgctccagtccgcggcggcgacgacgcagaggacacaggcgagcctccacctcgtgcttggccatggcaacggcagcgccaccaccatgctcgatggagtcggaggcggcaacgccgactgatgcggcggggtgggtctcattgcagtatctggttcgttggaggcgacgcaatttccgggagacgcggttcggtttctttgggcagcagcgcgatttcagggagaagaaaagaggtcaccgcgagtgcgacgcagctccatcacctggcgctggaggtgcggcttctgcaggcggtgggaccggcactggcgcgattccctggcgacccgagagggtgcgcgtcgcgtggcggcgcctcctcgtcccggatggcagcatag

SEQ ID NO: 55674 - DNA, 372 bp, Oryza sativa
  Clone ID: PAT_MRT4530_57659C.1
ccactgaggaccccatttttgttatggctgcccctgaaagggcagcggcactggttcaagatgcctcatcgctgaccacggagccgtcgcaagccatataaggcagagggcatgtgcctgccttgcaaaagcgagtagatgatcgaggaaccgctttaccgggggcggctgctgggggccaaaggggaactgaagaagcttattctgaccaaacaggataggctaacatgtggggaaaggtgccccacttgagggccttgagctgatcaccaacagatgtggctccatgtggcacactggctgacctactcggtcgatgacaaaagtaattacatcgggcaaactcggagtgcagcgagtcctcacacatgc

SEQ ID NO: 55675 - DNA, 271 bp, Oryza sativa
  Clone ID: PAT_MRT4530_5765C.1
atatcgccgccatgtctgatttggcgactcttcagagccccccctccatcccaaccaagcatttcagagttttctttcttctctgtttttgggggctatggaatcaccgccatgatgtaatttttaggggtatgcaaaagtctcttcccctttggtagccaaatgtttagatgaggcctccttatgggccgaaaggctaaatgtaagcgatcgtattgtggtttccgcctggaaggaaaccatctcttcctccctcagaacctcttccccc

SEQ ID NO: 55676 - DNA, 1049 bp, Oryza sativa
  Clone ID: PAT_MRT4530_57660C.1
atgtcggtgatcaaggattgtggggggcacaaggggtgcgagtgcgagaaggagaaggtgccccggcggctgtgctgggcgctggtggcgctggtgctcctgacgctcttcatcgtgctggtggtgtggctggcgctgcggccgcacaagccgcggttctacctgcaggacctgtccgtgctgtgcctcaacgtgacgccgccggcgtccgcctacctcttcaccaccatgcaggcgacggtggcggcgcgcaacgacaacggccgcgtgggcgtctactacgacaaggtggacgtgtacgcgcagtacaaggacgtggccatcacggtgccgacgaggctccccgtggagtaccagggccactacgaccagtccgtctggtcccccttcctccaatcgctcgaccacgtcgtcctcccccccaacctcgccgtcgccctcgcccaggacgagaccgccggctacgtcctcgtcgacatccgcctcgacggctgggtccgatggaaggtcggcacctggatctccggccactaccacctccgcgtcaactgccccgccctcctcaccgtcaacgacggcaagggcagctacggcgtcaactacggcggcggcgatggctacttccgcttccagcaagcagctgcatgcgccgtcgatgtctagctgtgtcttctttcttcatttcctcctcctccttctcttcttctttttaattagtttcacggcttctcttcttcttcttgcttaatttttctcaccggaatcaatcatctcatatcaatgaagaaaaaccgatcgatgatagtactagcttcttaatttagaccgtagttggtttggagctagtgtagcttggagtgaaagggaaaattggggtattctgaaaagatgcataatagacgtacagctgggagtagacgtgaagtgtctgcataattcgatttgcatttggcaataattatattccaatgtgagtacatcaataattaaaaaaaatgttcatatgtaaaaaaaaaaaaaaagggcgaccgctcgcgatctagaactag

SEQ ID NO: 55677 - DNA, 192 bp, Oryza sativa
  Clone ID: PAT_MRT4530_57661C.1
atgctggtggtggagctgggcgtgtggctcatcccgctcaccctcttcttcgtcccgtgccggcggatcgtgctcctcctcaagcagctccaggggttccaccggagcatgacgcggccgcggcggcgcgcctccgccgacatgctcagccgattctccgggctcaacgacaacatggtcttcgtgctctga

SEQ ID NO: 55678 - DNA, 202 bp, Oryza sativa
  Clone ID: PAT_MRT4530_57662C.1
cggacgcgtgggctgactcttggacatactcatggttcctcgtctaccttacctatcaacagcagctagctagactaactagctagagcagccatggtggctactgcactgaacaaccagatccacattgccgatgtccctgctggtggtgacggtgccggcgccgacgcgcgtgtcattgctggcagagagcaacaaggct

SEQ ID NO: 55679 - DNA, 546 bp, Oryza sativa
  Clone ID: PAT_MRT4530_57663C.1
atgaggagaaggaaggtgacaggatgcgcgacacctctccccacgctgcacccgctcgtcctggcgctgcacccgctcatcaccgcctctgcacgcgctcagccaggctctcgagcgaagctcaattcaggttccatggacgtcttaaacacccttccagttaggtttcacttcaatggagattttttggtgtctggtagggagaagcactatgttggtggaagtgaggcaatgtcttacctagatcaagataatatacctctgcctgaaatagtaggccatttatgtgaccactgcaaagttgctgaaggaacaatgctacatttgttgttcccagggaaagatcttaattctgagttaagggcactattggatgacagtgtgtgccaatacatgaatgattgtattgtgggtggaggggtggctgaggtgtatgcagatgcaccaattctagttgatctgtcatatgaggatgaaggaagtgactatgagttggagatggaagaggacatgggagatgaatcagatggaaatgagatagaataa

SEQ ID NO: 55680 - DNA, 711 bp, Oryza sativa
  Clone ID: PAT_MRT4530_57664C.1
atggcatatgaccctgataacccttgcatggatcttggtagaatataccctaacatggaggagtttagattggctatgaggcagtttgctatcaacaaagagtttgaattggatgtggtgactttgttgagggattatcatacctgtacatctagtagcatgaggaggaccactactgcaactagtaaatgggtagcttcaaaggcagttaaaattatgaagaataatccagagggttgtaggccatacattagtgtagactccacggctctgaatgagtggcttgagacataccatccattgaagtggatgagaagtgctttcaaccctgcaattaagtgtgactacatcaccaataaccttgcagagagcttcaataactggattaaagattacaaagaattgtctgtatctgaagttgttgacaatagcacaactcatgggaagtacattgtgaaagcttgcttgcagtattgttcatgtgaagaatggcagcatatagggaagccattccaacatgcacttgctttgattactgcacaacagagtagggatgtgaatattgaagactttgtgaatccctattacctagtgcagatgtttaaaaatgcatacaagagagtgattgaacctttggtgacagatcacaccggccagaagttgatttacctgggtactaagtgcaccacttccatgaaagactgctggtag

SEQ ID NO: 55681 - DNA, 735 bp, Oryza sativa
  Clone ID: PAT_MRT4530_57665C.1
atggagcagggcgggccctgcgacggcctctgtcgcttccggattcacctaggcatgagaggggactgcccgttgcccgctggggacggggttgatgctatggttgggaataggatatggtttgggggccttttcaccagctcaggtagaaggcgccaaatcaatgctgagaagacctttgagctgagccctgttcaggaagctctcagggctctgtggagtgcttcatttccggatgcagagctgtcaagcttaatttcagagcagtggaaggacatgggatggcagggcccaaacccatcgactgatttcaggggctgtggatttgtgggacttgagaatcttctcttctttgcaacaacatatccggcttcttaccagaggctgcttctgaagaaacaagggatgagagccacatgggagtacccctttgcagttgctggtgttaacgtctcatacatgttgatccagctgctggagctcaacgcagaacggcccaagtctttgccagggattaactttatcaaagtgctgtcagaacacgaagaggcatttgacgtcctgtactgtatagctttcgagatgatggatgcccagtggctggcaatgcgagcatcctacatgcagttcaaagacgtgctggaagcaacaaagcagcagctggagagagagctatctctggaggacgtcaatggaatccgtgacataccagcttacaaccttttgtacaagtag

SEQ ID NO: 55682 - DNA, 1161 bp, Oryza sativa
  Clone ID: PAT_MRT4530_57666C.1
gtcgacccacgcgtccgggggcaggaagaagggaagaattgaagaggctgaggctgttggattggaaaccgtttccaattctccatcctctctatcttcctctcttccttctcctccggtccctctctctctcccccctccatctccatctcctctcttgtatgtatttagcctacttacgtgtatgcatgtcaaaacaagacgaaataacaacaggcatgcatgtatgtatgcttattttgccgtgctagacggcttttgattcgtcttctttgatgggcattcatccctttcagctccaacccctacagttgatgctatggttgggaataggatatggtttgggggccttttcaccagctcaggtagaaggcgccaaatcaatgctgagaagacctttgagctgagccctgttcaggagcaacgtttgcaaaagctgaaggaaagactaaatataccttatgatcaaactcggagagatcatcaggaagctctcagggctctgtggagtgcttcatttccggatgcagagctgtcaagcttaatttcagagcagtggaaggacatgggatggcagggcccaaacccatcgactgatttcaggggctgtggatttgtgggacttgagaatcttctcttctttgcaacaacatatccggtacggcttcttaccagaggctgcttctgaagaaacaagggatgagagccacatgggagtacccctttgcagttgctggtgttaacgtctcatacatgttgatccagctgctggagctcaacgcagaacggcccaagtctttgccagggattaactttatcaaagtgctgtcagaacacgaagaggcatttgacgtcctgtactgtatagctttcgagatgatggatgcccagtggctggcaatgcgagcatcctacatgcagttcaaagacgtgctggaagcaacaaagcagcagctggagagagagctatctctggaggacgtcaatggaatccgtgacataccagcttacaaccttttgtacaagtagctagctaggggaggctcaagaaaacataaacagaaaccttcttgtaaattgcatatcagcatgcatgttttatgtactgcacccaagagagaaaaaggcagacttttacatttatacacaataattttattt

SEQ ID NO: 55683 - DNA, 856 bp, Oryza sativa
  Clone ID: PAT_MRT4530_57667C.1
agaaaagcgagaagagtgggaggagagcaggtagaagcagagcagagcagagagagagagagagagagagagagagcaagcgtctcctagggtttctcgtggcgctcggctcgatggcgatggcggtggtggcggcggcttccagggttcaggcgaggctggcggcgaggctcgcaccgcggcggctcctctcctccggcggcaaggtgctcggcgaggagaaggctgccgagaacatctacatcaagaaaatggaacaagagaagctggagaagcttgcacgccagggtcccagcccaggagagcaaggctcatctactcctgccgctgatgtgaaggccgaaggtggcccaactgctggtgcgtcgaccgtcaagaacaagaactacactctcatcgcaggtgctgttggtgttctaggtgccagtgccatagcgtggtatcgcctgtcaaagcctgagaagtcagaagaggttgcgaactaacttgggccttgctgatagagttcctgtccagtttctcctttcttttactcaccttatgcacctgcactaccttttggaactaaactgaggaaaaccatgtgactatttcgggggatgtaagtaacaccagacaaatgttagttttcgcgtagtttctaccatatgcaatctcatgataggcaagaaatttttgtgccgtttgaactcagttgctgggtgaggtataactgccttttttggagggtgatctttttgatctgtacggagtagaagattgtgccctttttgtcatagcaacattattatctgatgagagatatatatgaatggaatgaatcaatgaatgatctatatgaaaaaaaaaaaaaaaa

SEQ ID NO: 55684 - DNA, 330 bp, Oryza sativa
  Clone ID: PAT_MRT4530_57668C.1
atgagttcatcatggacgacgaagcagaacaagctgttcgagagggcgctggcgacatacgacaaagacacgccgggccgctggcagaacgtggcgcgggcagtgggtggtggaaagacggccgaggaggtgaagaggcactacgacaagctgcttcaagacctgcaccacattgagtcggcaggccgtcagggttcccaatacggcggcagcagcagcagcaaatccaaaggtggcagcagcagcggggagcagagatatcggaacagagactggaagcagcaaccagggctccatagtggtgccgtgaaaagagcctctcagtattag

SEQ ID NO: 55685 - DNA, 472 bp, Oryza sativa
  Clone ID: PAT_MRT4530_57669C.1
cggcagtcagatggcggaggcggcatcggacgaggagcagtggagggggcaggcggaggctatcaagcgtaagctggaggagctccgtctccaccacctatccgccggctaccgtgaattcgactccaagccggagacctctaagcatcgtaagaggacaggcgcgatgacgctgccgggcgccggagaggatgccccggtccggcggtgccgaccctgtagtcaacactactggtgaagcccaagtacgcgaacgagtcgcactattgaacgacagaggacaacgaggccttatggcaggaagaggacggatttgtccaatccattttacgcgaccgaggagcaaacggactacaggatcaacgctggtccagagctgaaagaagagcttgctgccgactactcattgttggtgaagcccatgcattagtcccatgtcacgtgtagggctgtgggtgagcctgcctacgca

SEQ ID NO: 55686 - DNA, 454 bp, Oryza sativa
  Clone ID: PAT_MRT4530_5766C.1
ctaggcagatatagaccttacacaggggggctctggtctgcatcaaggctttgcataactgctccgagctgaagggagcaaagatcaatggcaccaagatcggaggagggatgggatgaccaacctaccaccgcctggcttagaccgtcatggacagctgcctccagatagagatcgacaagatcattaaagccatgatgaccggtaagtgaccggagaacttctccctgatcatctactacgatctgcgcacctacctccagcaacaggaggtcaatggtcaggccctcaaccagcgtgatgatgctcctgagtgaagccatgtccgcgcctgtgctggtaggcactgcgcgataataccctgaggtgatgacgaataccagtttgagacgggctcacgtctgctactacgccggcaaggccacctacttcgcgtagtgattcgacactagtt

SEQ ID NO: 55687 - DNA, 270 bp, Oryza sativa
  unsure (1)..(270): unsure at all n locations
  Clone ID: PAT_MRT4530_57670C.1
ctttcttcgcacgcagttggcaccaactccccaccacttcgcttcgcttcccttccctcctcacctctcccgcgcgcgcgagtttaaccgcttaattataaccgcctctcggattagcgcggctataataccgcgcgcgattggntgattagccctaggcaacgctcgctaacacgccaccacctcggcttcgctgtttgctgtttgctgctgctgcttctagggttagggtttggggtggggaggggtngangcgcgtgggctggtggt

SEQ ID NO: 55688 - DNA, 249 bp, Oryza sativa
  unsure (1)..(249): unsure at all n locations
  Clone ID: PAT_MRT4530_57671C.1
ttgggtgangagccgttgaacgngccaactcggcccagtngatcacaacttgtccaagcctcaacgaagaactgacatggtctatggtacatctgatatagtcaattgttgttgtaaaattgttatagctctcgccccccttgttgtgctttccagctttgtagttttaacgtagcaacttctgatgagaggtaattctgatggcgtgtttaatttttcaccaatttaattgcttacattaagttggcc

SEQ ID NO: 55689 - DNA, 791 bp, Oryza sativa
  unsure (1)..(791): unsure at all n locations
  Clone ID: PAT_MRT4530_57672C.1
tttttttttttttttttcagtaanatgaaatatatagtatataagaattattattatacccatcaggttcgccatgtcaagcttatttttcaccgctcacacacacaccacaaggataagcctttaccggtacgacacctgtgcaatgaacacgccacgtcacacacatacacacggacacagatgctgactgggcgaatgacgtgtccgttttcgacagatcatcatcctcatcgtacatcgtctctcttatcttttctacgggttanacgtacgacgtcgagctcgagcaggtcagggcggatggtcctccacagcacgtaccctctcgccatcctgaactgccccgtgccccccaccaccgtcagctcccgcaccgccgcgccggtgtcgtcgcgcccgacgacggtcaccgagctgccggcgaacgggccggagctgagcacgacgttcatggtgaccatcaggtccatgctccccgtcgacgccacgatgtactgcccctgggcgcgccccagcaccgacgacgtcgccgcgggtccctccgtcagcacgtcgtccatcaccaccgtgttcccgaacatgccgcgcgggccccgcaccacctgcaccgccgacgcgcccagcacgtcgtgcatgtagaagtggaggtgcgccgacgccgcgtccgccaccggcggccccgcggcgagcgccgcggcgaggacgacgacgcagagcgggacgaacaccttgggcgccatttcaatcgggattagtccggcccccgggtcctctcttgcctgctcagc

SEQ ID NO: 55690 - DNA, 211 bp, Oryza sativa
  Clone ID: PAT_MRT4530_57673C.1
cgggaggcgctgattctgcacaaaacgcaacccgccaacgcaggcgctgaatcccactttatctcactgatattggtggttccgccagcatggctgcttccagagtcagagtcgacaacctcaacccccaagaaagaaatcgtagaaatgcaacgagaggagagattgtgatacatgctcagcgcaggcagccacagctacagactcaacc

SEQ ID NO: 55691 - DNA, 437 bp, Oryza sativa
  Clone ID: PAT_MRT4530_57674C.1
agcacaacaaagcagggttctcaccggagaggcattttgttttcaatttatactgcttgtatgcccaaatcgatatatcggatgtcactttaagttagtactttcacacattagtaaattactaaactaaaagagagaatcagtgtatatgagtctattggggcatcaactaattacactcactagactcggttgatgtacatcaccagctacatttgccatgggtatgtacatctgggcaatactgcatatatttgctcagagtcgccgtgccttgtatgtgctgccacaaacttaaaaccttcgacccctcctacatctacaaaactgcaccccggtttctttttcaagccaactctcttcatttcagtgctaatgtttgcagagtccttccatcttccaacaacggtatatacatttgacaaggagactcttca

SEQ ID NO: 55692 - DNA, 279 bp, Oryza sativa
  Clone ID: PAT_MRT4530_57675C.1
atggacagcgctggtgttgccaggaagtgtcccttgcttgcagtctgtgcagatggtgtctccaccggctcctggaggcgccacaacgccgtcaccaacatcgcaaccacctccgttggatctcatggagacaaggagaggttgctcgcccactctcatgctgccaagttttggcgggagtcgtcgccgcacgacaccctggcctcattgccaccttccatgtcgttccccacggttcacgaatgtcgtgcgcacccagttggcctccgactccaatga

SEQ ID NO: 55693 - DNA, 370 bp, Oryza sativa
  unsure (1)..(370): unsure at all n locations
  Clone ID: PAT_MRT4530_57676C.1
tgantgcggnatcatngnatttcactgttttatgtnggtaantgaagtcttcccntccggttcagaaggatgcaacggcaacagcactgccttgctccatcnccttgaaccctttngcttcgtcaacaccctcatcatccggggatcatcactggcctccacctggttgcgaacaantaaccggtaatgtnctncatccttaccacctattaatttcccccccatgaaccttttcccacgaaggggaatcaaacccccnaaccccaancccccatggattngggtgaatcaaagggaanntcngcccaatgctnccttcnaacccggcnattgctttngcngntcccctaccctngaaaatccggantgn

SEQ ID NO: 55694 - DNA, 564 bp, Oryza sativa
  Clone ID: PAT_MRT4530_57677C.1
atggagatgatcagatcagccagcccatttgcattgctgattgctctgagtggatctgaactgaactgggtacgattacatggcaccggtttttggcaatgtgaagagctgcagcaacaggagagaggcatgtggtttcaggctcccctgcaatgttctgatccctgcacggtggttttttcactgcttcagaaggatcagccaaaggaaggactgaaaggggagggaggggtaaaagttgatgtggttgagaagttgaggggtttgtttgcaaaaggggaggccaaaagaagggcacagtggctgtgtggcagaggtactgatgccccattactgggtccagtggacatattattgttgggcacaggccatgtgaaggcagagcaaagcatgatgatggcacacccagaaatgaggatagataagataacaaaagttctggtatttgttggtctggtgacaagaggtaaggacagcaagtacattgtaatttgcaacaagataaaagatgtacttctactctatctgttccaaaatataagtatttataacgatgatacatag

SEQ ID NO: 55695 - DNA, 277 bp, Oryza sativa
  unsure (1)..(277): unsure at all n locations
  Clone ID: PAT_MRT4530_57678C.1
gtttcctccacgagaaggacgacctcgtctctatccgccaccaccgccgccgccatcgcgggcggncnggcgctgatggtgtccgtggcgttcgcaagcgcagtacacgccggccacgccgntncnccggnggctgcagcngcgggtgcngcggcgggggcgacgcggcgggccgtacacgccggccacgcgggggcggcgggggctgcgcgtcggtgcggcggggccctggacatcnccactgggggcnaaggcgagggacaacgaaacacggcgt

SEQ ID NO: 55696 - DNA, 1063 bp, Oryza sativa
  Clone ID: PAT_MRT4530_57679C.1
cggcacgaggcagtaagaaagcaaaggcaaattaagcagctagctggttagctgctgctgcagggagaaagaggaattgggtttggaagaagctgcatgcatggcggcgggggcgacgctgtcggtgctcctcctcgtcgccggcgtggtgctcatgctcgtgctgcacgtcgtcgtcgtcttctgggcgctgcgccggggcgtgttcctgcgcggcgcgttccgggtggaggagcgccgggaccagcgggccgccggcctgacgcccgacgagatcgccgtgcttccctgccacgagcgcaaggaagacggcggtggcggcggcggcggcgagtgcgcggtgtgcctggaggcgttccaggcgggcgaccggtgccgcgtgctgccgaggtgcgagcacgggttccacgcccggtgcgtcgactcgtggctgcgccagagccgcgtgtgccccatctgccgcgccgaggtggaagtgtccggctacgccggcaagccggccgcggcggtggccgaggcaagtcaggcgaccacgctggagatcgttactgaaagattgggaggcacagaacgcctcgaggtctcaaatgtgtgtgaagtccatccgcttgattcggttgatcgcatgaaaggagacaactccaacgtcttcctcgtcgccggcctctcgctggtggtcgtcgtccatgtcctcgtgctcctatgggcgctgtggtggggatacggccgctcgcgcctcgccctcgcccgcgcccgcgtcgtcgggcagcacgacgtggcgcgcggcggcctctcggcggaacaggtcggcgagctgccgtgccacgtggtcaaggagggtgccggcgagtgcgcggtgtgcctggaggcgttccgggcgggcgaccggcgccgggtgctgccgaggtgcgagcgcggcttccacgcgcagtgcgtcgactcgtggctgcgcgtgagccgcctgtgccccatctgccgcgccgaggtggccgccagccgcggcaaggaaggtgacgcgccggtggccgaggccgcctccttggagatcgtcgccgaacgatag

SEQ ID NO: 55697 - DNA, 115 bp, Oryza sativa
  Clone ID: PAT_MRT4530_5767C.1
tttccccccccgggggtatagaatcataacaggcaccatatgcttatgttccaccaagctttatttgggtaccagagctcccaggtggcttgtggctcctctaatgaagattggg

SEQ ID NO: 55698 - DNA, 456 bp, Oryza sativa
  Clone ID: PAT_MRT4530_57680C.1
ctaaaaggcggcaaaacaatatatataacaataacattgataagttaagtacaagtcaatgtaagcacacggcagcaatgatccgttccacgcttccagcaaacttctaaaaggctatgtggtactctttcaaaggccggggctgggggtgatccaaacttcagaaatagggagataggtcgaatacccacgctcacaagaagggaaaacatccctcaaatatctgattttgaaagtcgtaaatccctacacctttccaaccttcccgcctagaaggaaaatgatcatcgttacacaagcaaggtgttgtgaagtagacacagttggacctaagctctggaaaatccctgatgggcaaacacaccgaatgattttgtccaacaaatatcgcatgctcccgaagggctgctgctgcaaccgcagatcttaatcttaccaatctgttattttttaacc

SEQ ID NO: 55699 - DNA, 540 bp, Oryza sativa
  Clone ID: PAT_MRT4530_57681C.1
ccctgcgctgacgtccgaatccccgcccactcgccgccgccgatgacagcttgcaccgcgcgagcggccggacgaggcaactctctactccagcgcgcaccctgccgggaagcagggacagacaagcacacaacacatggccggactgcttgcaccaacgactaccaggatcccgatactccgcccgaagataaccgccatcttttttttatgaccgaggccaaggagatgatgaaaggggctctgcgaccaagcatcccaccagacgtgaacagaccgtggaagaggggtctctggccacggatgggccggcgtaacaggctccccgctgcccaacgctggatcctcagaacacaacgtgggacgaccgcttgctcaaccacaactgcaggctcaacgacggaagatccattcggtggtcagccgctcggctcgctcgatgatctccacggagacatacagaagagccacacgctgactactatcaacgaaccctacaccgattctgacgctatcttggacgagctgacgccggtccag

SEQ ID NO: 55700 - DNA, 183 bp, Oryza sativa
  Clone ID: PAT_MRT4530_57682C.1
ggcacggtcggcacgagcggcacgagggaaaatctgctgccccgatgttcaagatcaatcttgcgcccaaattggtgcacacaagatggcacaattatgccgaagagcccaaaaatgaaatcaagctggaggaggccttgcttggtttttgcacttatacataccaacaaaatttttcagaac

SEQ ID NO: 55701 - DNA, 214 bp, Oryza sativa
  Clone ID: PAT_MRT4530_57683C.1
atgaaaaaactaaattgtgaatgtgatatacccaaaactgttgggttattttaagaaccaaagacatctagcagagttctggtgaaatagtaatgcgaaaatcaataggcggacaccgctcttcttccttaactggcacaaccgctcaagtgcatgccttcttcagctagaggtcaagcttcacatgttgctgcaccccacgatggtagtggac

SEQ ID NO: 55702 - DNA, 231 bp, Oryza sativa
  Clone ID: PAT_MRT4530_57684C.1
atgccggttgacaagcttgaatacaatgcggtgcacgatgaacggacacaatgttgggaggacttcgcaacgggcttcacaaggtcaagtgtgcaggtgtcgggattcgcgaagagtaatctagacatatacaaaagaagtatgaaacatgacaagagcaacaaggttatatcactagcaagctttcatgctattcagaagaagcttaagagtaagcaatccaacgcataa

SEQ ID NO: 55703 - DNA, 183 bp, Oryza sativa
  Clone ID: PAT_MRT4530_57685C.1
agtaaagtctatcaccggtctctaaacttgtaccgctgtgtcatcccggtccctaaactcgcaaatcgaccgttcaggttttcaaacttgttcgactgtgtcatcccggtccctaaacttgtagatcactcatttaggtcctccaacttgttcagttgtgtcacctcagtccctaaacttgga

SEQ ID NO: 55704 - DNA, 211 bp, Oryza sativa
  Clone ID: PAT_MRT4530_57686C.1
accaagctggacaacacccagtgtgtgggctgggcgtgttacatgtgcggatgctagggcttgctaaggctgtctagaggccccaagctgtatagtgtggggccctcgataacatgtgtgcccgtgccaataaatagccgggtatgtctgtacacccgaggcgtggacaaaacacaccggctggcccctcgtgaggcacttgtctctcacc

SEQ ID NO: 55705 - DNA, 1041 bp, Oryza sativa
  Clone ID: PAT_MRT4530_57687C.1
atgacgcaaatatttgtggagctatcaaagaccagcggctctagggcggttagaccggcggcggctctaggagatggcggcttgaaggacgatcagaccagccgatctacatcggttagaatgatggttaaggtgctgtcagactggcgtgagctctgtggccagacccaacttcgtcaggaacattgtcaagttagatggatttcctggagtgtaatatggactggtcagagtcggacccaagagcattgggatgatgattatcatataattactaatggcagaggttattcatggttttactttgatcaaagggaaggttggcaacttggcatgggcccacatgtcatattgaatcacatcatcctctttctctggtggttgagcgagcggacagtgggcgtggctaggttgctccgaccgacggctagacagcggcgggacgtggagcgaggcggcggcagcaacggcagcgggatcctccttcccccgtcgcggccccatccgccgcccgagcaagccccgcctcccctgtcgcgctcgcctgggcagggcgaggctgctgcggcggcggcaacggcggcaaaggcggcgggctgtggtacaatgccacggtggccggggtcatcagctacagccggatcgcatcgctgtcgggcgtctccgtgcaggacctcttcctctggtttcccgtccgtggcatccatgtcgacgttccttcctccggccccatctacttcgatgtcggcgtcgtgttcaagcactgggctggcgcacggtgaagggggtggccgccgcagtgccggtgtgttcgacctccgcgccgccgcgacggtggggaaggaggtcgacgttgccgccttgctccatgtcctgccgctctcgccgccgcctccgctgccaccggagcagaccgagctcgtcgatccgccggctcacgaaataccaagatctggcaggcctctgctcgggctgttcctgttggtgggaagcatctggagcagcagcacaccaaatcccctcacagagtgtcgaaactag

SEQ ID NO: 55706 - DNA, 285 bp, Oryza sativa
  unsure (1)..(285): unsure at all n locations
  Clone ID: PAT_MRT4530_57688C.1
gcgacccacgcgtgcgccacgcgttcgcccacgcgtgcatccactcttccacaaatatcaaatgttaagctttaatcgaatcttgtcaagaccttaccagattggtcatgcttcaagtaaagttacattacgtcaagtttggcaccgatgctaaatacatttccctatgttctatngatcgtaacctacacatattttggcatccgggagaagattatcaaatatacgactcatatccatctgaagaatgatgaaaccaattgtacttcatttcgcctgcttaaa

SEQ ID NO: 55707 - DNA, 909 bp, Oryza sativa
  Clone ID: PAT_MRT4530_57689C.1
atggggaaggaagaacaaccggttactaaggacgaatcatctccaaaggacgacatggacgttgacatggtgtgtatgttgcatatggagttttgtgctatggataaagccgaagttgctcaatttttagtaggtcctaaagatgcggtttttgagaagcccgatgaatcaaatcgtcatatgaagcctctttatctcaaagatcatattgatgggaagccggtctctaggatgttggtggatggaggtgccgccgtgaatttgatgccgtactcattgttcaagaagttgggacatggagatgatgagttgaagaagactaacatgattctcaatggtttcaatggtgaacctacggaggcgaaagcgagagagggagaagagaggacgagcggggcgccggccctccggtggccgaaacgcggcgacgtcggcaacataacatgttccccgtcgacgcgcatccggggacggcagaggtcggcagtggaagtgagatatgaagccggaacggcggcggcaaaagcttgctccggccggcaagcccggtggcgcgagggtttgtccggcaatgctccggtgagggagatcggcaatagccgggatcgaaggcggtggagagaggcggttcggaggagaaggtcgacgaagacacggctgcggcgacgtggagaagacaagcacgtcgccgatttcttagcgacgacggttggcggcggcgtgcgccgtgcacggcacgcgcacctggaggaaggcggctcggctgaattgggccggttatgtcgttatgcagagtgggtatctagtattgtcccggtggagaagaagaggagtgtgggttgtcatgacttttggattgaagaacgccggtgcaacatatcaaaggacaatgaatttgatcttccatga

SEQ ID NO: 55708 - DNA, 363 bp, Oryza sativa
  Clone ID: PAT_MRT4530_5768C.1
aagctttttttttttaggaatcaactaatttttaattcaaggtgaaatcgactaaagactgtgagagcaggcaatactatatgcttaactattttgcttattaggccttcttaggaacgccaaaggcgagcatcttgaataattcgaaagcaacagggatagaatattcaggcttgaacaaatggatcttggggacacgaccagtcataatatcagcccatttagcgaggaaagtggcacccttgcgactgacagcggcagtggcagcatccaagacgatggggtatttgtaagtgaattggcacattttcatggaccaagcgaagtcaaaactgaaagcgttgtatatgcgttgagaagctt

SEQ ID NO: 55709 - DNA, 360 bp, Oryza sativa
  Clone ID: PAT_MRT4530_57690C.1
atggatcatgaaccacagtacatatatgtttgggctaggaatcttggtcgtatggacatgatagcatatgggtatgattgggctaacgaaaatgaggtaccgccgctaatcaccgcccactcagccaatagcgacatcctctatgctgctctcttctcgtctcttccatatgctgcatcaggtcgtccatgccggccgtctgcactgtgccgccttctcatcgaggccgccgcgccgccgccgtcgcatcgagggtgccaccgggaatgtccgcatctagggttcgcgaccttcatgtccgtgccctcgccgccatctcttgctgcccttgcctctcgctgccccaaccctgcaatttag

SEQ ID NO: 55710 - DNA, 119 bp, Oryza sativa
  Clone ID: PAT_MRT4530_57691C.1
caacgacgatggccggccggacttccttttcctcacaacgactggttcccgccgcaacaaggcacaacaacggggtgttgcgagcattgcctgggcaaagcagcttgtcaagcagctct

SEQ ID NO: 55711 - DNA, 474 bp, Oryza sativa
  Clone ID: PAT_MRT4530_57692C.1
atgaagcaccagagtgcggcggcgtccatgtggccgcacatccaccagagtgcgctccggacgtcggcggcagtggcgaagctgtcgggggtgccggagggggccaacacccccctatccgacactccccctcccctggtgctttacgtaacaaggctaggtaggcagcaaaccctccgcgagtccgcgacagccgcggacagcgccgcctcggcctcggcgaggaacgcggggacggcagcctcgcgggcatcgagcgccgcgagggattcggaggtggaggcatccgcggcggctagggcatcgtccagcgacgcggagattcacgggatcttcctctggtgccccggccgcgggcgaggccgacacagccacagccgcagccagaacacgacgccgtcgaagctctgtgacgtcgacagagccgccaccggacctgtccggatcagggtcgaggtcgcgcgtgcgggctag

SEQ ID NO: 55712 - DNA, 3067 bp, Oryza sativa
  Clone ID: PAT_MRT4530_57693C.1
gggataagtgggtgatatcttccatgctcttttattacaagattacaactgcattaggaggtaagaatctcaacccccttcaatttagaggtacctatacaattactgcgattttgaaagaaacatagatctgctaaagaactaaaacatacatatatttagcccaaaatgatgcatagcaaggctagtagagcaagtaagataactatacaattagctattcctgacaagaattctgttgaggcacaccacaaatctagggagcaatattagagcttgcaatttgattttcatcttccatctggtgtcatgagctgggagaagatgttgcttggggtcagcccatcaaacttcacgctcgcaatgctacggtcagggatgctcaaagaaagtgtcgttgaagtggtagtagtcatgacgagatgcggcgtcggaagcaggcagcgtgggtgatcctagctagctggggcggcacgatggagagggcggtgggtagcagcgaggtgtcgacagcggagtcctttcggacggcggcggcctgagtgtcgatgtccggcgcaaggatcttgtcgaggagcaggtggaggtcgaccttggcgacagcggcggcccaggacagcagcgaccttagctctggcgcaaggctcttagcgaggaacaggcggaggtcaacccaggcggcagcggcggtgggctctagcggcggcaatggccctatgggcaacggtggcgccctgagaacgggcacaggactctcaatgaggagcaggtggaggtcggccccagcggcggcggggtcggtcgacggctcatctgaatgcagcctggccacaaccagcggcgacgtgctcgctgacgtcccctcggtcaggctgctactgtcctccgtgctctcctgcagctggagcgcaaactcgaggttccagagcacatcacccatggacggcctgtcgacgctgcgatcggccacacatttctccgcggtctcggcgaacttcaagaagcactggggagcgatcttccctttgaggagtgggtcaatgatctcgccaagaacacctttcttctggcaacgcagagcccagtctgcaaggctcacttgctccttcggaagtgatgggctcagggcgttgcgggcgcacaggacctcgaacagcacaactccgaaggagtagacatcagatttctcggtaagctgctgccgtcggaagtactcaggatcaaggtatccgaagctgcccttcaccactgtgctcacatgggtgttgtccacgtttggaccggccttggacagcccgaagtcggaaaccttggcaacccacttgtcatccagcaaaatgttggtggtcttgacatcgcggtggatgatggtttgctttgcacccgtgtgcaggtaatacagcccacgggcggcgccgatgcagatctccagcctctgcttccacgacaatggtgggttcttggtgttgtacaagtgttctcgaagtgtcccatgagccatgtagtcatataccaaaatcatctcattcctatcctcgcagtacccgattagagacacaaggtgacggtgtcggagcttggacagcatctcaatctcattctggaactcatggacaccctgctcagacagcgggttcccacgcttgattgcaactctagtgccactgtctatctctccaaggtaaacgttgccaaatccacctttgccgaggaggaaggatttgtcgaaattgttggtggcagcctggatttctgcaaacgaaaagtgccggcaaagattggctggcagcatcgagtggctccctgtgttggttgtctttcctgaggtggctgactgtgacttggtgaaatcagtgagaggagtccagcgtccttcatcagatttgccagtatcctttgctaccttcttctttcgtctacagatgatgcacaatccaacacaagcaatcaacaacacggcaaggccacccactgctccacctatggctgctggggcaacactctttgatttacctctactagatcccccattgggattcacaccaggctttggtggaagtggagggttgagcccagcaaggttatttcttccaaggtcctgtagcttgaagacctcaaggccatttagtattgcatcaaaatactctggtttgcttgaaagatcagggtgaagcgcgacccacaggtccgtctggccagaaccaaccgttgtgacaacatagttggtatatgttgttctgccaattcctccactccaaacaatgacgtccatttgattctgcgccgtctggttgttgatgtaaatgaaaaatgatctctgattcaccttggttattggatactggatctcacagaaatggaacctcaagaggtaggtgaaccccgcatcaaccggtaagatccatgtaagattgtagttcaggttgatctgtgcagttggccccattgaccttgctgttgcgtagactgcaactggtgcagtgtaatttggctcagtatttggatatttgatggtgacattaccatctttggagaaggtcaccccataggcagcaccatatatgtaaggagaatcattatcccaagaacgatagaatccagaatcaccttgcggagagatgggctgtcccccaacattgagccggtacatcgtttggagacccatcacaggatctatgccatattgcacattgtccccgccattggcagatgtaggtgtcggtgttgtgaagatgtcaggcgtgggcacaatctcaatcccattcacaaatgcataagacccgtttcgtgtggacggggcaaaggtgagttttaggatgcggcctgggctgacagggaaggaataggtgtaatttgaagtgaagaatcgagcagtcatgtaaggcacgggtgatgggagcgaagggtcttggtatgaagccctggctacattgcctttcaccgatggcgcaaacttggagctagcatccccatcccagctccgattgtagctatcaggttgcacaccagaggctccacaattcagaaagattggagcagaggccgtggaattgttatcagccgccat

SEQ ID NO: 55713 - DNA, 1867 bp, Oryza sativa
  Clone ID: PAT_MRT4530_57694C.1
atggcggctgataacaattccacggcctctgctccaatctttctgaattgtggagcctctggtgtgcaacctgatagctacaatcggagctgggatggggatgctagctccaagtttgcgccatcggtgaaaggcaatgtagccagggcttcataccaagacccttcgctcccatcacccgtgccttacatgactgctcgattcttcacttcaaattacacctattccttccctgtcagcccaggccgcatgttcgtgcgcctacacttctatccaactaattataatgggaaccttgattctgcaaatgcctactttggtgtcacaaccaacaatctgatccttttagacaacttcaacgcatcacaaactgctctggcaacaagctctgcctacttctttcgagaattctcggttaatgtcacttcaagcagcctaaaactcacctttgccccgtccacacgaaacgggtcttatgcatttgtgaatgggattgagattgtgcccacgcctgacatcttcacaacaccgacacctacatctgccaatggcggggacaatgtgcaatatggcatagatcctgtgatgggtctccaaacgatgtaccggctcaatgttgggggacagcccatctctccgcaaggtgattctggattctatcgttcttgggataatgattctccttacatatatggtgctgcctatggggtgaccttctccaaagatggtaatgtcaccatcaaatatccaaatactgagccaaattacactgcaccagttgcagtctacgcaacagcaaggtcaatggggccaactgcacagatcaacctgaactacaatcttacatggatcttaccggttgatgcggggttcacctacctcttgaggttccatttctgtgagatccagtatccaataaccaaggtgaatcagagatcatttttcatttacatcaacaaccagacggcgcagaatcaaatggacgtcattgtttggagtggaggaattggcagaacaacatataccaactatgttgtcacaacggttggttctggccagacggacctgtgggtcgcgcttcaccctgatctttcaagcaaaccagagtattttgatgcaatactaaatggccttgaggtcttcaagctacaggaccttggaagaaataaccttgctgggctcaaccctccacttccaccaaagcctggtgtgaatcccaatgggggatctagtagaggtaaatcaaagagtgttgccccagcagccataggtggagcagtgggtggccttgccgtgttgttgattgcttgtgttggattgtgcatcatctgtagacgaaagaagaaggtagcaaaggatactggcaaatctgatgaaggacgctggactcctctcactgatttcaccaagtcacagtcagccacctcaggaaagacaaccaacacagggagccactcgatgctgccagccaatctttgccggcacttttcgtttgcagaaatccaggctgccaccaacaatttcgacaaatccttcctcctcggcaaaggtggatttggcaacgtttaccttggagagatagacagtggcactagagttgcaatcaagcgtgggaacccgctgtctgagcagggtgtccatgagttccagaatgagattgagatgctgtccaagctccgacaccgtcaccttgtgtctctaatcgggtactgcgaggataggaatgagatgattttggtatatgactacatggctcatgggacacttcgagaacacttgtacaacaccaagaacccaccattgtcgtggaagcagaggctggagatctgcatcggcgccgcccgtgggctgtattacctgcacacgg

SEQ ID NO: 55714 - DNA, 588 bp, Oryza sativa
  Clone ID: PAT_MRT4530_57695C.1
cttaccgagaaatctgatgtctactccttcggagttgtgctgttcgaggtcctgtgcgcccgcaacgccctgagcccatcacttccgaaggagcaagtgagccttgcagactgggctctgcgttgccagaagaaaggtgttcttggcgagatcattgacccactcctcaaagggaagatcgctccccagtgcttcttgaagttcgccgagaccgcggagaaatgtgtggccgatcgcagcgtcgacaggccgtccatgggtgatgtgctctggaacctcgagtttgcgctccagctgcaggagagcacggaggacagtagcagcctgaccgaggggacgtcagcgagcacgtcgccgctggttgtggccaggctgcattcagatgagccgtcgaccgaccccgccgccgctggggccgacctccacctgctcctcattgagagtcctgtgcccgttctcagggcgccaccgttgcccatagggccattgccgccgctagagtcaacctcagccttgctcctcgctgggagcgtcgtgccggtgctcaagccattgccgtcccgggtcccggtgtcccgctgcccctag

SEQ ID NO: 55715 - DNA, 407 bp, Oryza sativa
  Clone ID: PAT_MRT4530_57696C.1
gggagatactccaccatctattcgcccccagcgaccagaaccgcccgccaccgggcatctgccccaacgacctatcgccacagaactctcaacgggtccgtggcccaaacggcatccgccgggggaagcccttcgaaccaaaatggaccccgcagaagcagtcttatgcgaggtctgcagcacaccggccagcaaggtacccgccgccggcggtggtggcaggtgttggtggagtggcggcgagggccacgagcggcaacggtggcgggagacggcacgtgggcggtggagtgtggtcggcggcggcagggcgaggtgcgagagtagcgtcggctgcggcagcaggcagggccatgcgcgtgcggtggcggaggcagtggggcgacaccaaccaggtgttcaactaa

SEQ ID NO: 55716 - DNA, 487 bp, Oryza sativa
  Clone ID: PAT_MRT4530_57697C.1
ccgtgcccgcggttctgggcggtcaaccagattcaccgtgattagtctcaccctagtctagtctaatggaattgaatagtctaggtggatggttgggcctgttgcaacgtggtgtagcgttggacagtggatggttaatattgattaattactacaactgtttttctgctttcaactactgtttataaatgctcgctttatgcaaaagaacctctatggctatcctttgataattccctgcatcatacccctattccggtatgacttgctgagtacggtgattgtacttagtcttgctctattttccccaaaccccagagtttgagtatgcgtcagatggttgtttctccgaggagtagactccgtccgtgccgtcgaatgaagataaaaccaaagcagaatccaggatggagatcgttacggaaacagagcgaggatcggctaaagtctgaatcggctgcaatcaggatcaccagagttcgagtcg

SEQ ID NO: 55717 - DNA, 1006 bp, Oryza sativa
  Clone ID: PAT_MRT4530_57698C.1
atggctagcggggctggcatgtgtggcggcggtcgcggctggtggctcggtggggttggcgcgggtggccgccgaggctgtgcaggtggtggcggtcgtggctggtggcaacggttgacgatggtgcaggcggtggtggctggcgcgggtggtggcgtgcatgcctttggaccaccagattcggcggctgcaaggcacgggtccttcagatccggcggaggctggctacaagatcactgtatccggcttcaacgggtggcggcaggaagcccagataaacggatgactccttcgagccaccgtgcagcggccatccatggtagcatgctaggatggaggaggcggagcccgtccgatccggtggcagcgggctcattaacgtcggtgaaggggagggccgcctccatcctcaaaccctactcgaggcgagccagcgataaagaggaggataactgtggtggcagatctagtggcggcgtgcatcgagagctccagatccggtggtggctgtcttcgatagcattagatccggtggcagcggtggttggtggtggggagaacaagactcggctccttcctcctctcaacggctcggctgaggacggcgggaagggcagcaatgacctcggtggcttccacctcttcggcgacgccgccgtcgatggcatcgacttctccacggcggtgggaggtaccgtgggggtggatccagcggtgggcgatgctcggctggctggggcgtgggcgatcctcgagacagtcaaggaggtggatccggcggtggctggcacaacgatgacgacggacgggctcctccaactccctcccctctcccagatccgacaggcgggcgggtcggggccacctggtggttgcggctcggctcgagcatgggcttcggtggggcagcgatgatggcaaccacggcagccatggtgacgtctgcatcgagctccctcaatcaccgacgcagctacatgatggcaaccggcgacttgaggattag

SEQ ID NO: 55718 - DNA, 431 bp, Oryza sativa
  Clone ID: PAT_MRT4530_57699C.1
ctggtaaattttcccatttcttttgtccgtaacaacagatcatgtaatctttgctggagtaaaaatctaaaaaaagaatggctacggaagctgcattgttttctgttgctaaagggactgacaactgataactacaatgacagaccaaagtttcgaatgatctatcttgaagagtataggcaagataccaaacctcttgttcaagaactgcatttgaacagtaacgttttcatgactagaacaacttcctagctctgctgtcagttctccagtctgaatcttgcatggggagatgttcatcagggtatggtacactgccttgcctgcgaagttagaacctttcgcattatgtactgattcttgctcagcatcaggaacaagatgttgtcaaaaccaagagacaccagacgacgatttcgggctatacatgg

SEQ ID NO: 55719 - DNA, 435 bp, Oryza sativa
  Clone ID: PAT_MRT4530_5769C.1
atgaggggatttttcccaatattgcatatcattgcaaaagtgaatgtaaatactaaatatttttttgttggacaggtggaaggcgcattcgtgcaagggatcggcttcttcacgaacgaggagtacgcgaccaactccgatgggctggtcatccacgacagcacgtggacgtacaagatccccaccgtggacaccatccccaagcagttcaacgtcgagctcatcaacagcgcccgcgttcacaagcgcgtcctctcctccaaagggaggcgatcaatcagggcggccaggaaggagttcgccggcgccggcggctcggcgatgactttccagatggacgtgccggcgacgatgccggccgtcaaggagctctgcggcctcgacgtcgtcgagagtggacccaaggactattctaggtcttatgacaaatgttaa

SEQ ID NO: 55720 - DNA, 204 bp, Oryza sativa
  Clone ID: PAT_MRT4530_576C.1
atggagggggcgcgggaggggaggagcgacgggagggagggggtggggacggataggaggtgggaggagatccaagtatatatccaacgattccaacctctgaggcaccgtggggccactggatcaggcctactcagtgacgacggtgaggaggaagcttgtggcgccgcggagaggcaatgggggcggtttcaagctcgatag

SEQ ID NO: 55721 - DNA, 481 bp, Oryza sativa
  Clone ID: PAT_MRT4530_57700C.1
ttgatgtctcgcaggtacacacctaacgtgctacttctaaccctctgaaaagaaaattcgggaaaaagaacccattgtatgggaaatacttcaagaagtaatgagggaaaatcctgtactgttgaatagagcatctatcttgaattgattaggcataccggctttccaacccactttagtagagggtcgtactatttgtttacacccaatagtgtgtaaaggtttcaattcggactttgatggaggatcaaatggttgtttatctacttttatccttggaagcttaggtggaagctcgtttacttatgttttcttatacaaatctcctatctcccactattagagatcctatttgtgtaccaacccaagacatgcttattggactttatgtattattgattgtaacccgtcgaggtatttgtggaaatagatataatagttgcggagactatccaaaccaaaaagtaaattacaataataa

SEQ ID NO: 55722 - DNA, 225 bp, Oryza sativa
  unsure (1)..(225): unsure at all n locations
  Clone ID: PAT_MRT4530_57701C.1
cancaaggtgtagtgacccacccacccaccccgatcccgccatgaggaagaccnccttgctcgatcnctgtgtgtattgcatgaaattgcatgtgtgtgtgctagcttcagtgtgcccgctcgatcccttagcctagctcaacatcacaattcgttttgtccgcatattactacatgcctcgaatgattttttttttnaaaaaaaaaaaaaaaaaaaaaaaaaaa

SEQ ID NO: 55723 - DNA, 2457 bp, Oryza sativa
  Clone ID: PAT_MRT4530_57702C.1
tggtcagttaagaaggtagccagactgaacaagccccagctggctgtcattgtggatatggcatttggtgcagttgcaatgtgctcgccgtgctgcagctacagctgcagcgtagcattcatcaaccagactgagctgacatgaatggtggtctccagagtaggtgaggtgagtgacgcccaggaggttattgaatgatccggaggagatggagatcctacctgcaacaactagcagcccatgcacaacacatgcctgtgcccatcggccatgtgtccaggaatcctttatttgtacaagcgaatctccattgcgagaatatgaggtggggtattccttactgcagggagttctctcgctttcagttccaggagaaaagttatacatttcttttggttttcccggggtagaaaagtatggcattgaccttccatttgtcttctgttttccatcaccatcaaaaggcgagcactcagacatcatgtagtaagaactgaggtgctcctgcctacatactgtaggcgtctcatgttgatttctgagataagacatggtgctgaaaccatgttggacaaagcaagcagacggggaataaggctgtgattgcgggctaggaaatgacatgaatggtgatagccttccatggggtgaaaaggaaggtggggtagtaacatcaggacttgacacaggcaaaggacagccttctatagttaagccttgcttcgcagctagtttagaaatctgtttctggtttagccctgttccataaataatgttccacagactccttagagattccctctggttatatattacttgatccctcatagccatctcaatttgaagctcggcattagtcatcccaagaagtctgtactgactgagaatgtggaggtaggttctgttgccattgttactggtggcttcctcgatcatatcttggagttgacgtttgcgactctcattcagttcaatatcctttctgtagccagcaccagcttcatcattgtcgcgtatgttgtcaagaataacttgtctccgtgatgttaatgcttgcagaacagccgaatccttatctttcacctgttgtcttgcaattgcatcatcaagatgctggagctccattcgattgcgcttattggtttcttcaagttcaaacagtgctttctgcagattaatgcgttcttgaacattctcgccagtttcctggctcaagatatttagccaagatagctcattgtctgcagctttttcagtaggttttacacttaactgatgctccttctcagctaattccttcttcaactgagaaacctcaacctggagattgtcaatcatccttttgtagtcttcaacatgggtgtcaagatgtccaatgtttttatggacatgtgtttttatctcctttgcacgatcagcatacttgagtgtattggtggtgtgatgatactgatcatcagctggtgatatcgtagcaaccataacagtacgagagttaccagagagcccatccttcaggattcgtgttaatttgctgtttcgatatggaacatatgcaagacctttcttgttttgcttgccaagggcattgatgcagttcgctagcgctagaagtgaacggttaatgttggctccatctctaagcttttgcccaaagttgtttgtttcagaggccctctcactgcccgcaaggtcaaccaacgcaagctttccacgaagaacctgactaccatattgtcctttttgttttcgcttcacagttatctccaggacagcatgtgaccgtgaagaagttgagtttgcttctgtgctctctgtcttgcgccgactgttgcctatgttcaagagttcaagaatcttatctgctgagtgaaccttaatgcttcttaaaccagcaaccattataccatgcacaggatcttcacgaagctccaggtgacctgacgatttttcaagcaaatcatagataacctcattgtacacttcaagatatgaacatgagacctcaaacgtatctttactgtcatccttctttaccagatcaaagattgtgcgaaagctcagaaccataagaccaggatcactatgggttccaaccattgtataagttttcccacttccagtagaaccataagcaaagactgtcgcattaaggccttgaactacaccagcaattgtagaagatatattcttatatacatcagttttaggcaacgcattggagcacccgggcgcatacacatgatcgaagctgtatcttctctccttggtcctgttttggatgagttcaaggtagtccttggacagatcagggtccagcacaacgacattcttatcatcaatgacttgtatgatatgccgcgaacgccgctgctcgctgtctgtcagtggcctgcacttcacagccacctgtagcgtggccgtctgcttggaagccggagctcggatgctcggcat

SEQ ID NO: 55724 - DNA, 555 bp, Oryza sativa
  Clone ID: PAT_MRT4530_57703C.1
cccccggtaggtatataaggccatgccgtcaacagacgaggtgcactattagactgggtaaggtggaccgcatgtggataaggtgccatgctgggacccactggcagcgccgatggtgaacaccacgaactatgcaggggcttctgaaccaagcccttatcgcggaagtcatggacacactcaaggttctgtacgtgagcattagcaccgagatctggtaccaaacccttatgacgcctgtccacatagacaggaaaattgaatttcctaattctaatgaggattcacgcgcccacattttgaacattcattcatgaacaaggagcttgttgcgtggcacagatatccagaagatacctcaggacattattgtggcttgaagagccgagctcaacgcaccctgcacagaagctggagtgattgctcttggtgacataacggtgcacgtaatacaagaggactttgagatggcccctacaacgtgatgaggagagacaccgacaacaacatgtacctacacaagctctgcaagtgactctgacgccttaatagcct

SEQ ID NO: 55725 - DNA, 996 bp, Oryza sativa
  Clone ID: PAT_MRT4530_57704C.1
atggcggcggtaccggaggtggccctgcggcacggcgccgggaggcccatgccggcggtcggcgtgggcacggcggattcggcggcgacgtcgccggagacgaaaaggggcgccgcgctggcggcgctggaggtgggcttccgccacttcgacaccgcggcgctgtacggcacggaggcgccgctcggcgaggccatcgcggaggcgacccgccgcggcctcgtcgcctcccgggaggaggtgttcgtgaccaccaagctgtggtgcacccagtgccacccgggcctcgtgctcccgtccctccgcgaaagcctccggaacctgcagatggagtacgtcgacctgtacctggtccactggccgatcagcgtcaagcccgggccaccgatgttaccggtgaagagagaggacgccgtgccgttcgacttcgagggcgtgtggcgcgcgatggaggagtgccaccgcctcggcctcgccaaggccatcggcgtcagcaacttcaccaccaaacacctcgacaagctgcttgccgtggccaccatcccccctgccgtcaaccaggtggagatgaacccggtgtggcagcagaggacggtgagggagtactgcgccgcgaagggcatccgcgtcgcggcctactcgccgttgggtgggcagaactggataggcgaaggcaacgacgtgatggaatccccggtgctcgcggacatcgccagggccagaggcaagagcatcgcacaggggcggatccagatcccgggccaggtgtcattgagatggattcatgagcaaggagtgaccccaatccccaagagctacaacaaggagaggctgaaacagaatcttgagatattcgactgggagctgaccaaggaagaccgtctcaagatcagccagatcccgcagaaaaagatcgtcacggctgcacgaatgttctctccggatggtgagttcgcgtcggttgatctatcagacatggaaattgtggaggagtag

SEQ ID NO: 55726 - DNA, 384 bp, Oryza sativa
  Clone ID: PAT_MRT4530_57705C.1
atgggcgcggcgttgcgatcgcggcggaggcagtggcgaacgtccccacgggtccccgtggcgaacgagctcgccaccacatcggactacctccgcccttcagcggcggccctcggaatcgacgctaatggcgggtgccgccgcaacgcgggttgggtccaagcactgggcaagctagagctagcggcgatgaaggacgacgccgatgggatgttgtcgcagaaagagaggaggacgttgccccctccttactacgcccaccgccgctaccccacccgtcgtctaccctccctccaccacccgctgtcgcgctcgctcgccgccactccgtcctctgtcgccggggaagcccccgttgttggaaagattttattgaaaggatga

SEQ ID NO: 55727 - DNA, 1230 bp, Oryza sativa
  Clone ID: PAT_MRT4530_57706C.1
atgaagccgcgggtttaccatgacgcgaggctggggctcgacaacaaacagtggcgcgtgcaggcggcccgtcggacaggagcaaaacagacggaagctttgcaagcgcgccagcaatccagcatgcagccccggccttcgattttttttcttcaccttgtcttcatcatctccaatggttcctgctctattgttgtcttccaagcctactctaatctgtggggcgactccactccacaggcaatccttgacggcagcgacgaaaccaacttcgacaagacagctcccacaaggaagatcttcagctctggtgtgggggaaaagagagcaagactgagtactacccactgtactcagcaagtcataccggaagaggagaagataaactatgtttttactactaaagaaaaatccttaatcaattttattgcgcaatattacccagggctgacgtcagcgaggggggaggcggcgccgacaggtgggccccgcttgtcagcggtacaaggggagagggagggggtgccgacatacgggccccaccggctgcagctcaaaaaggggaagggagagggaggcgccggccgggctcggcttggcctcaaggccgaccggccgaccaaagcgaggcggcagcgaggcacggccaccgacggcgatgaccggcggcgcgggaagcggcggcgacggccgaaaggcggcggcgcatggccggagcagcggcgtggctcggcactcacgggaagggggaggaaaggatgggagggaggccccaccagtgacacggcggccgaagcggaaggcgaaggcggcgacgacgacccggcgagaggaggggcggacgagcggtggcgacacctagaggaggggaggagaggagttagggatggagaggacgaccgcgatgaccaaagtggccggccggagatggatgaaaatggagagctcaccggcgagcgagggaaacggggcttcggggtgatcggcggcagccaagcggcggccgaggagcgggcggcactgacgagcacgacggcggcggtggcgtggcgtggcggcggctctagcggcggcggtgcgcggccggagatgggcggcggcggcggagctcggtggggcgactccactccacaggcaatccttgacagcagcgacgaaaccaacttcgacaagacagctcccactatgaagatctttagctctggtgtgggggaaagagagcaagattga

SEQ ID NO: 55728 - DNA, 1179 bp, Oryza sativa
  unsure (1)..(1179): unsure at all n locations
  Clone ID: PAT_MRT4530_57707C.1
cggccgcgtgggnaaatatttgctactctcaaaatctgactggaggaaatttggaagatgtacgtgtggagtgtgcaaggtttggagctgtgaaatccataaatgtcgtaaagtaccctgctagcagtgacaacactacaggggataccataaccgagtgtgaagatggatccaccaagattgagcccaaagaatatggtggcaatgtcagctgcactgagactggagtggaatgttctgtgttgaatcagagtacagatgttcctgatccttctatttgtgaggtccaggatcccgtagagcttgacacagattctattcccaagggtcgggaccacaaaaatcttgacacacgtggcgagtgtgatgcacctacagcaggagacgagaatactgatcaaggagtggaagctgatcagacagattctacggatgctcaagatgatgctcgtggaactatagagagagggcatgcagatgcagatccggcgtccttggaaacttcttgttccacagcacctggagatggagcggacaaatctggtagggagaacgagcaacaaggtggtgctggtgtgagtgaaagcaacacagagaaggcacctgcagttgatgctagagacaacgctttggcttcaaacaccagtgcgctcgaagctggctgtatacttgtagagttcttgcgcaaagaggctgcatgcattgcagctcattcactacatggacggcgttttggcagcaggattgtctctgcaggatatgctccacatgatctttacttacagaagtatccgaggtgatttccagtgctgagattcagatgtactctttttggggggaaagattggagtgtactgatggaagctaaagctttcgttgtcccagtgagttttcatcatggggaaaagattctgatgaactagcctcgtagttttggtcttttggatgcataggctgacaatctcgatgagttttcatcagaattgatgtatttctttatagaagggtaatacaggggtcagtagtcatagactcgatagttgttttttggggcgaaaacaatatggtacacgtgatcattatctgaagttgcagcttgtatttcttttgcaaccagggaaatatgaacattcccttgttcgaatagatcaatattgttcaaggcactctctctcaggt

SEQ ID NO: 55729 - DNA, 1734 bp, Oryza sativa
  Clone ID: PAT_MRT4530_57708C.1
atggcggtggcggcgccggggcagctgaacctcgacgagtcgccgtcgtggggctcccgcagcgtcgattgcttcgagaagctcgagcagatcggcgagggcacatacgggcaagtgtacatggcgagggagacggagacgcaggagatcgtcgcgctcaagaagatccgcatggataacgagcgcgagggcttccccatcactgcaatccgcgaaatcaaaatcctcaagaagctgcaccaccagaacgtcatccagctcaaggagatcgtcacctcgccagtccatggtaacaagtacaaggggagcatttacatggtcttcgagtacatggaccatgacttgactgggttggcagataggcctgggatgcgtttcaccgtgccgcagattaagtgttacatgaagcaactccttacaggccttcattattgtcacattaatcaagttctgcatcgtgatattaaaggatccaatctcttgatagacaatgagggtaacttgaagcttgctgattttggcctagcaagatcattttcaaatgatcataacggaaacctcactaaccgtgtgatcactttgtggtacagacctcctgagttgctgctcgggagcaccaagtatggaccagccgttgacatgtggtctgtgggttgtatttttgctgagcttctcaatggaaagccaatattgacaggaaagaatgagccagagcaactgtctaaaatttttgagctttgtggcacacctgatgagttaatctggcctggtgtcacaaaaatgccatggtacaacaatttcaagcctcaacgccaactgaagagacgggttaaggagtcctttaagcattttgacaggcttgctctggatcttttagagaagatgttaactctggatccagcacagaggatatcggcaaaagatgcacttgacgcggagtatttctggtctgatcccctaccatgtgatcctaaaagcttgccaaagtatgaatcttcacacgagttccagaccaagaaaaaacgccaacagatgcgtcaagccgatgaagctgcgaagaggcaaaagacacaacatcctcaaccacatggccgtttgcctccaattcaacaaacaggacagccccatcctcaaatcagaccaggccagccgatgaacaacccccatgcgccgatggctgctgggccaggccatcactatgcaaaacccagagggccaggaggctcaagcaggtatccacagggtgggaaccaaggtggaggatatccgaaccgcggcggacaaggtggtggtggcagctatggaaatgccccttaccctcaacaaggtcgagggccgccgccaccgtaccctggcagtggaatggccggaacaggtggcccaaggggtggcgttggtggtggctatggaggaggatcaaattatccccagcaaggcggcccatatggtccttctggcccaggccgagggtcaaattatccccaacaaggtggttctcgcaaccagcagcagtacggaaactggcagtagtacgttacctaaactcagcaacactatgccaattgtcttaaactctgatgttgatgctaacttgtgcttaatctattctattgggcattacattttgttagagcgtgtattgccctgaatccagtaggaattgtagcaatgttgttcgttttgattaaagaatgataagagatacacaaattgagcaacaagcaaattgtcttg

SEQ ID NO: 55730 - DNA, 339 bp, Oryza sativa
  Clone ID: PAT_MRT4530_57709C.1
gcacgagggtctcgagttttttttgttttttttttcttacaaagatttaattgcaacaagagtccaacggtacaattaaatctcagaccagacaaatggttaaatataaaaaatcatttgaatttgaagataaaccaccgcaagtcccttttaatcaggttgatccatccattgttcgcgcaacccatgcacacttggaggcatgcaatgaacactaccagaaaactaattttcgcaggcggccaaaaccaattttcgcaggcgagagagaggtccgccgacaccacaacggctgtgaaaatcgatgattttcgcagtcggggcaacggccctcttgcg

SEQ ID NO: 55731 - DNA, 675 bp, Oryza sativa
  Clone ID: PAT_MRT4530_5770C.1
atggcgttgtttgatgacgacgacgacgagttcccgcagttgaaggacaacatcgactgctgggttctgaaaagggtgtatacattcgtggaattgactgtgaaggccgtcagcctgtgtataagcgtatcgaagcttggagggtggaacttgactattctgagaagacctctcgaggatacttggatcatcattgagactgaattgaggaaagccagcccgaatgaatcattcattgtgagcaatgagtcatctacaaactgtgatgactacactgaagatggcagcagtggcagtagtgatgataatggtgataattatactgatggtaatgccagtgatgatggtactgaggcagtggaccatgacattgatgctacttttagaacaccttgtagggatcatataaagttcccttcagccccacaaattgagagagtaaaagatcttgctaggaaaaaggttaaagttactgatataaggaacaccgatgaggtttcaccagaatctgctgagctgtcaacaaaaccaagtagggaagaagggctggggctggggactttattagccccgttcttcggctcagggccggggtcggggttggcgacaaccgttggagtagaggaatgtggtgtgaagctgtggaagcttgtcaccactggagactgcaactaa

SEQ ID NO: 55732 - DNA, 1456 bp, Oryza sativa
  Clone ID: PAT_MRT4530_57710C.1
ttttcctctcgtctcgatgtcatcgccgccgccgccgccgccgccgtgtcctgctgcggcgtgcgacgacgggtggctctccctgtccgtctcgacggtgtcgggagagagcaatcaaaagcgcctcaagcgaggaggcggaggaggtggtggaggggtcggcggcggagcggtcgaggatgatgggtgccccctccacgacgaggtcctcctcctcgtgttcgcggaatgttcgctggagacagacgatctcgtccggtgcgccgccacctgcaggcggtggcgccgcctcgtcgccggcgacgcggagtacatctgccgccggaagccgccctcccgccgctacgtcggcgccctcgccgtcggcttcgtacagcagaggcggcaggagaactcgtcgtcttcttcgggcgcgccaccgccaccacggttcatcccgttgccctcctactcctccaggttcgccggcggaggcgagctcgacaaggtgttcgacagcggcctcttgagcaactcccgcctcatcgcgtcgcgcaagggcctcctcgtcctcgagctccgccgctcctcgcgcgccgcggccgtcaggctcgtcgtgtgcaaccccatgaccggggacatggccaccctccccatcctcgccgggaaggacaggcccgggcactacgcgtgcgcgctaatcaccttcgacgaccacgagggcgcgccggatcggctcggcttcgtccatgaccccgccgcgttccgcctgctcctcgtctacaagcgccgcaacttcacggcgtgccgatcctactggtcggacaccaaggcctgggatgcggagggcaagctgtccggtgccaagatcggcggcaggcgcctcggcgagatgaccggcgcggtggccgtccgcggctccgtgttctggctgctaaagaacctgctgttcgtcgtccgcctcggcgcgctgaaggctaccaccgagaccttcccatcaaaatggtgcagcaagctctgcttctgctacggcagcccggtgcagaaccgccagctcgccgtcacgccggacggccggctctgcgccgtgcaggtggaccgacacgtgacgagcaacaacaccgtgaggatcaacgtcatctcccgccacgacggctacggcccgccgacatgggagtgcgacaatgcgcgcgacgtggagctcaaccgcgtgctgcccatggcgaacgtgaggagggtttgcctgaggggcgtgtgcgagaggagcggggtcgtcttcctcgccatcggcaccgacttgtacaaccagcagccggacctggcgctctacgcgctggacatggacaagaaggaggcacggaaggtggcggcgccgccgggccactgccgccggttgtcgtcgagcttcttcggctacgagatggaccgtgtggcctacctcgcctccctctccggcggggagtccattgctagctga

SEQ ID NO: 55733 - DNA, 654 bp, Oryza sativa
  Clone ID: PAT_MRT4530_57711C.1
atggacgaagaggaggaaaagaaaaagaagaacaagcagatggatcaagaagatggaaccaagaagatgaaactaacaaaagaaaccaaactcccaggaacaatttcagctgcagaaacaaccaaggacatcaagttgcagaccaagaaaaaagaaccaatacagataaaagggaatacacaatcaaagacatgtataagagacataatcgagtctgaagaattaaaaatcaagaagacagttgaagttccaggatctcgttacctgcaggattttgaaaaaggcaaaaagtcagagacaattgaatcagagattggcgaaaataaagcacaattactttatgatcaatacatatttcttaatgaaaatgaaagactattggatcagtttgcaaaatatgaaacatggagttggtcatcggtactaatcagtccatacatctatgaaacgcaatgcagaattcagataaatttgcaacagatgctttcccttctctgttcagttcacaccagaattaaggcaaaacgtaacccatacaaattcaacaggaaaacatccccggtcagtttgagcactgagaaatgtttgccaatctgcaaccaaactcttggactggaatcccacaaacgaattgagccacatgccaacaagtag

SEQ ID NO: 55734 - DNA, 1757 bp, Oryza sativa
  Clone ID: PAT_MRT4530_57712C.1
atggccggccggatgcgaaaggcagtcaagctgagactgatggtgcgacctgatgctaagccagtcaagcaaaaactgtggagattcacaccagatcgaaaataggccatatgagaataattggacaaacttgtcaaggccggcttcatccgagaagtactccacccagagtggcttgccaacccggttatggtccgtaaagccaacgggaaatggagaatgtgcttggatttcaccgacctcaacaagccgtgacccaaggattacttccctcttcctcgaatagaccaattggtggcttcgatagccggttgcgagttgttaagcttccttgacgcttactccagataccatcaaatcaacatggcaaaagatgatgaggagaagacgccattcatcacaccctttagtgttttctgctacaccaagatgccttttggattaatcagcgcaagcaacacatatcagcgtgagatccaaggggctcttggtgaccaactcggatgaaatgttgaggcctacatcgatgatgtcgtggtcaagacaaagacgcgtgacacactaattgatgacctcagagaaacattcaataacctccgacgacatcgcctcaagttaaacctagagaagtgcacgtttggagtaccatctgagaagcaaaccctgagaagatcaaggccatcgagaacatgaaatcacccaccagactcaaagaagtgtagaagttgaccggatgtatagcagtacttagccgcttcgtagccaggatagccagaatgggagaacgagcacagcctttcttcgctttactcaaaaagcaagacaaattcgagtggactcaggactccgagaacgcatttctcgcgctcaagcgctacctgtcaaatccccctgtacttgttgccccacaacctaacgaagagctctatctatacatcgctgccacaccatattctgtgtgtactattatcgtcgtcgaaagggaaaaggtgcaacacccaacatactatgtaagcgaagccctccatgatgcaaaagccaagtacccacatattcaaaagctgctctatgttatagtcatgacatcaaggaagcttggtcactacttttaggcacacaaagtcacagttgtctcttcttttcccttgggagaagtcgtcaggaacaaagacgttattggccgcattgcaaagtgggtagtcgagctcagtcaatttgaagtccactttgtgccaagaacatccatcacatcccaagttctcgctgatttcgtagctgactagactattcccaagaatagaacaagcagccagactgataatgagacatggaccatggcattcgacggtgcactcaacaaccaaggagtaggagccggatttattttgacttctccaacaggagatcaattcaaacatgcaatccacctaaacttcctcacaacaaacaacatagtagagtatgaaggactcctcattggtattcgagcagccgttgcactcggggttaaacgattgattgtgagaggggactcagaattagtcgcaaaccaagtgtagaaggattacaaatgcaccaatcccgagttggctaattacctcgctgaagtcaagaaactagaacgaaactttgacggcatcgaggttccacacgtttatcgcaaggataacatcgaaccagatgacttagcacgacgggcatccaaaagagaacctcttgaacctggaaccttcttagatgccctgataaaaccattc

SEQ ID NO: 55735 - DNA, 1371 bp, Oryza sativa
  Clone ID: PAT_MRT4530_57713C.1
atggcgagctgtgggcagtggccggtggatctcgcggccgacgtagtcctcatcaccgtggaggtagtccacggcatcaccgtccgcatctccgaggtcctgctcgacatcggcctcgccgtagacctcctcgctgggcacgcgctcgacgtgggtctcctcgccgcggaacaccgtgcagctccttgtggacgagctcgtcgtcccggcgcccgccgccctcggggtaacccacggtcccggaagccccccgccgcgcggtggcgctccgcttggcctcggccagcaacagcagctcatcttccccaactcgctggctgcccctactcctccccaagatgcggtgaccagcagcagcaacaactcaccaagaccggagcagagcaccgccaccgcagatttcgagggaggccggggagctgctcgatcgcgtccgggcgcgcggacgtgaactacgccggggtggtgtggctcaaggcgcggcgggtggcggaggccgcgctcgtccgggcgctgctcgctatgtcctcatattcaactggtcatggccacaggcccaagaagaagctttatcaccgtgaacctggccttgacaaggccatggacctccaaaagaagcctgctctcctccttcgtcttcgggagctcatcttgtcccaaaagacaaattccatccttatacgttatcttgaaaaggaggttggctttgtccaaaaatggaacttcctttcacttatcaagcggcatccaaacatcttcttcgtctctggtggtagtgcctcccgtgagccaatttcagttacgctcactgagaaggccaaaaagatatccagtgaggagaccctagcacgagaactaatggagccaatcttggtgaaaaatctaaggaagctactaatgatgtctttggactgccagattcctatagagaagattgaactcatccaatctgaattgggtttacccaagaacttcaagagcaacttgattccgagataccctgaactattttcagttcgcgaggtgaagggattggaccatttgtgtttggagagttgggattcttcactggctgtcacagcccgagaagaaaaattgaattttgatggattccatatggactgtagagggattcctaaagatggaaatgtctttggtccttttgctttcaagttgaagtatccagcaggatttaggccaaatcggaagtatcttgaggaggttgtcaggtggcagaagttggcatttccatcaccttatctgaatgctaggcgtgtggagcctgcaacaccacaggctcggaagcgagcggttgctgttatgcatgagattttgagcttgacaatggagagacgattgacatctgattag

SEQ ID NO: 55736 - DNA, 414 bp, Oryza sativa
  Clone ID: PAT_MRT4530_57714C.1
atgcgggccccactggacagtgactcaagggagagcgaggggcgctggctggtgggccccaccgagcagcggaccaaaggggccggtccaccgtggaccaagtccacggggccgaggatggtgcgccacgtggcgccgacggggcaccacgcgggccatgggatggatggccacgatctgccgagaggcagatcaggcggctggggatgggcggcgtcaaggccagcccgggcatggcgcacggcaggtaccggcgaccggccgacggcagcgtccggcgacgcgggcaacggaacagacagcggcgcagacgtgacagcgcgcatgtggggagcggcggcgcgtgcggaagaggagaggaaggggagggaaggggtcctgaccagcgagcatagtggccggcgcgaaggatga

SEQ ID NO: 55737 - DNA, 318 bp, Oryza sativa
  Clone ID: PAT_MRT4530_57715C.1
gggaagttattcgggcgggttgcaccatctctagaaaacaaacatctaaaacatgtcctgcggggaagaggggcaagagaggagaagaagatagcaggttgaaaacggcacatgaacaagatgcggcaaggtgaaacgtagccttatacagccacagcgacagattgatcaagggcaatgactgcaacacggtgctgggcttccaacagcgacaagctagcaccacctactgttgaaatgtgggtcataacatctgcaactgccaccttttaaacaggggcggccgaatgacccacttcaataatggacgccacaccc

SEQ ID NO: 55738 - DNA, 1632 bp, Oryza sativa
  Clone ID: PAT_MRT4530_57716C.1
gcgaactttcatctttatatatgacgactcctcatggcctcctccagtactcatcaggtgccttctctgatcaggtgccagctgatgactctgctgaagaacatggggttaaggatcatgccatgcttgcaccgtttacagccgcatggcagaccgctatctcaccaccactggttattgagagatctgagggatgttacgtttacgatgtcaacgggaccaagtatctagatgcacttgcaggattgttgtctacagctttaggtggtagtgagcctcgtttagtcaaagctgctacggagcaattaaacaagttacccttctaccactccttttggaaccatacaaccaggccttctttggatcttgcgaaagaacttattagcatgtttactgccagggaaatgggcaaagtgttctttacgaacagtggttcagaagcaaatgactctcaggttaagatagtatggtattataacaatgcattggggaggccaaagaagaaaaatatcatttcacggacacaatcatatcatggaacaacattcatatcagctagtctatcagggcttcctaccttgcatcaggattttgatctgccaggacgttttgttctgcacacagactgccctcactactggcgcttccatctccctggtgagacagaagaagaatttgcaactagacttgccgataatttagagaatcttatcctcaaacaaggaccagaaacgatcgctgccttcattgctgaacctgtgattggtgctggtggtgttatccttcctccaaagacatattttgagaagattcaagcagtggttaagaagtatgacaacctttttattgtagatgaggttattactggatttgaaaggttgggaaccatgttcggatctgatttgtataacatcaaaccagatcttgtctccttggccaaggctctttcttctgcctatgctcccattggagcgatacttgttagcccggaaatatcagatgtgattcattctcatagtaacaagctcggtacatttgctcatggctttacatattctggccatcctgtttcctgtgctgttgctttagaggcgctgaaaatttatcgggaaagagatattcctggtcatgtcacacatgttgctcaaaggttccaggagggaatcaaggcctttgcagctggaagtccaattgttggggagacacgtggtgtaggattgctgatagcaactgagttcaccgataacaaatcaccatatgagttattcccttttgagtggggtgttggtgaaatatttggacaggagtgtaagaaacgtggcatgatggttaaggttcttggaaacttgatagcgatgtccccaccactgataataacccgtgaagaaattgataaactggtgagcatatatggagaagctctgaaggcaacagaggaaagagtggcagagctaaaatccaagaagaattagtcaacatatgtcatctatggcaatggcggcaaaggttgaaggcaatgatgtggtccctgcaccgaataaattccactggtgcttgttgttcgataatttgttgaaatattactgatgttgtgttaaaagccaattaaaaaaaaaaaaaaaaaaaaaaaaa

SEQ ID NO: 55739 - DNA, 423 bp, Oryza sativa
  Clone ID: PAT_MRT4530_57717C.1
atggcgcctctggcttggcgaagcagcggcgacggcggctccaactcgatgcgacggcgcccatggattaaggacaatattggaggatttcttggaccaataattcataaaagatgttacaagttaccagtgacaacgtcgcggaagaaggcggcgaccacagctctacccgtcgccgcgctcgaccgccaccgctccactcccgcgctcgcctaccatcgcttcacccgccacccgccgcccgctaccatgctcgcttgccgcccgccggctctcctcccgctgcctgccgcccgcgtccgctctcgcccatcgccgctccgctcgctgccagcctccctcactgaagaagagaagagaagagagaagagagaaaagagaagagaaggagaagaaaagagaagaaaaaagatgtgccgctga

SEQ ID NO: 55740 - DNA, 2309 bp, Oryza sativa
  unsure (1)..(2309): unsure at all n locations
  Clone ID: PAT_MRT4530_57718C.1
tttttttttttttttttttgaacaaaaacttttttgtgtttaatttattgatcagattgagaggtgcgcccgcacctcgcatatgcaggaatttcctcctgccctgcacactatcagtataaaagacgtataaacatatacatcagtaatacactttgtggcaaattatacattgccgtataaatctcccccttccctacgtacgtatatatcttccttctacatacaccccacgtacgtacacattaattaactccacgtagttattacgtagttggttaattaattaattatacgtgcgatgagaatacacccaaattatacccggcgaaatacgtcgaatacaatacacgaagaagaagaagaagaagaagaagaagaagaagaagaagaagaagaaaaattcaaaatacaagaaaagaaaaaaccaaagttattacaaggacgacgtacatacacgacgcgtgcagctaactggtagctagcttgcgtatgtncatgctgacgcatcgatcggtcactattagtggccgacggcgatggtctcctcgtcggcgagctcgatgccggcgtcggcgaggcgcttctccttgtagacgtaccccctggcggcgacggtgaagaggacgaggttgatggcgctgatgacggcgagcagccagtagaagtagtcgagcctgccgtcgtcgaggttgtcggcgagccagccgccgccgcgggcgccatggccggtgaccttgtggacgatggtgacgagcagcgtgctgaagaagaagccgatggcgcaggtgctgaggaagaggcccgtgctcatggtcttcatccccttggggcactcgcggaggaagaagtcgagctggcccatgtaggtgaacgcctcgccggcgccgacgaggaggaactgcggcatgaggaggaacaccgtgggcgcggcggcggcggcggaggcggaggcggtggcgcggtggcgctcgacggccgcggcgacggccatgccggcgatggagagggagaggcccacgaagacgcgctggagcggggtgaggccgtgcgggttggccgtggcgcggcgcgcgacggggacgacgaggcggtcgtagaaggggacggtgaggaggatggaggcgatgaggaagacggtgagggagcccgccgggatgaggaagccgccggcgaggcggcggtccatgagctcggcctgcgcgacggcgaaggtggtcatctgggcgtggatggtccagaacatgatggtggtcgcccagatggggagcatccgcaccacctgcttcacctcctccacgtccgtcctcgtgcacagcctccacttgctcgccgtcgccggcgactccgccgccgacctgtcgatgatcgccgcatggtccaggaaccggcactccttgctgtgtggcatcctctgcttgcccttgacgtcatggccggcggcggcggcgtcgtcgacgtcgtagagcatgtctgggtcggacggcagcggcagcgacctcttgctccaggcggcggcggtgacggcggcgacctgggtgagggggctccccaccagcttcttgaacctgtacctcctggtcccggagaggaacacggcgaggccggcgaggatgccggcggcgcagatgccgtacccccaccggcgtccgacgttgtcctgcacgtacaccagcacggtgacggcgagcagcgcgccgaggctgacgaagaagtagaaccagttgaagaagcgcatcatcttcttcctctcgccgtcgacgtcggactcgtcgaactggtcggagccgaagccggagacgctggacttgagcccccccgtgcccagcgccgtcaggtagagccccaggtagagcaccccgagctgcgtcccgtccgccgccacgcactccgcgctcgcccccttcgggtcgccgcacgccggcggccgcagccccggcgccgccgtggagatcgtgagtatcatcacgccggtggcctggacggcctcgaagatggcgatggtgaggtagcggccgaggtaggtgtcggcgacgaagccgccgaggaggcagagcatgaaggaggtgccgatgaagttggtgaccgtgttggcggcggcggcattgccgaggtgcatcgtcccggtcatggacgtgcaccaggttgacggcgatgcccagcgtcgtcatccgctcgttcagctccgccccgaggatcatcgccgcgcagccccacccgccggtggccgccctccccgccggcctccccttgtagtcccacgcgtccgtcagcgccttcccctccgccgccgtctccggcaacaccat

SEQ ID NO: 55741 - DNA, 107 bp, Oryza sativa
  Clone ID: PAT_MRT4530_57719C.1
gttaatattactgtcaaggtatccattctttacacgcataagaggcggtcatatactcaacataacaagcgggaacggcaagaaacgcgtaaacaggtcctccaaag

SEQ ID NO: 55742 - DNA, 540 bp, Oryza sativa
  Clone ID: PAT_MRT4530_5771C.1
atggcgaccaccgcctccctcctccctcctctcctcccggccccttcctcctccccccgccacctccacccctcccctcgccacctccgccccttgccaccgatccgcctcctccgcgccgcccgccgccgccaccccgacgccgtcgtcgtcgtcccggacgcccgcccctgggtcggcgacctctcgggcgccgccgcgtcctaccgggacggcagggaagaggacgacgacgacgcgggggaggaggatgacgaaaacgacgacgacgacgaggaccgcagcctggacctcctggtgaagttctcggtcaacggcgtgcttgttctcacgtttctatgggtcctaaaggggctacttgagagcctggagaccagccacagttgctggggcttggctcctccgctgatactaacagtgacatataatggaataacattatatgtccagagaacaaacattgtgcatgcttctgaatttcatgtatgtccagagaacaaatgggtgttctaccttcgttgtcattcgcttagagagtga

SEQ ID NO: 55743 - DNA, 1032 bp, Oryza sativa
  Clone ID: PAT_MRT4530_57720C.1
atgcaaaaaacacgtgaagctcatccgcacctagtcacggctgcaggagccgccatttgtgcaccggcgatagcagcaaaagccgccttaaccacgtcgccgaacgccgtagaacccgtcatagctgcctcgccgaccacggtgcggccaccggcaacaagaatcgatgtcaactccgtctcccatcgagtatcgcagggctcctcagcgtcaaggtggccgcggcggagacggcctcccgctgccgcccgccacgacctcccacggcggagacggccactgagaagcaaaaggagagctacgagggatggtggaggcgcaggcggcggcggcggaggtggcgagggtggtggtggaggcggagttggtagcggcagcggcggcgagggatgtggtggaaacgaccggtgattttgctgaccatggtcatgatgctgccagctttctcctccgtcgtcgtctgaacgtttacacgccacctacgtacgcctctatatatgcctcttcaaacgcctctcgcatcgttgcaaagttgcaccggtctcgatcgatcgatccaaccgatcaatacaccgccaccatcggtcgtcgccgccgtgctgctccaccgtcgagatcgatgggctggaggaagaggaacgacgacggcggcggcggcggcggcgcggccgtgccgagagggtgcgtggcgctgctgctggtcggggacggcggcggaggaggggaggagatcaggtggtggtggaggtgcgggcgctggggcagccgcgggtggggatgctgctggagagggcggcgggggagtacgggtacgaccaggagggcgtcctgcgcgtcccctgctccgccgacgagttccgacgagccctcgccgccgacgccgccgccggggctcgggatcgcgattttagcctgttttgctcgatctcactgaacatccactactcagactctaggcgcacgcacgcgcgtgcccagggagtgaggatggacaacgatggatcgatcgatgccccatcgagagtgggagtc

SEQ ID NO: 55744 - DNA, 201 bp, Oryza sativa
  unsure (1)..(201): unsure at all n locations
  Clone ID: PAT_MRT4530_57721C.1
ccacgcgtccgcggacgnacgaagagcncaggacgtaaagaanatcgtaaccntcctcaacnaggccgaggtgccctccnaggacgtcntcnaggtggtggtgagcccgccgttcgttttcctgccgcagtaaaggntttnctccggccggacttctccttcgccgcgcagaattnctggntgcgcaaagncggcgcttca

SEQ ID NO: 55745 - DNA, 875 bp, Oryza sativa
  unsure (1)..(875): unsure at all n locations
  Clone ID: PAT_MRT4530_57722C.1
ccccctacaccggggttttcgggacatacgcaaccgaaccctctttctggccaccccatcgaacgcgcgttcacaggggccacacacacattcgcataancatccctaccacaccgtngcctngaataccattaccaacccccacacgaagcctcggcaccggggttcaccacacattctccacaaccagcccagnaacttttcccccccatctccttcacacttccttggtcaccacgcacttgccgcccgccccgctctcacaaagttaccaactcctaacattaccccacgnaccattgcccacctccccctttctccanccccggtttcctgggcaacccatccacaccgccctccacacgcccatccgctgctactacttcacctccacaagggcccgccgcccccaggggttcacacgtttcggtccaacccaaccacactgggncaacgcaccgggtgtttcacacccggcacgacgccttccgctccgctgggaacacgccctacccttacttcggtacccaccaaaacacctaactgntacgnttgggtaacacgaacacgggcaccaaaaagacgcaccaggactgtttgccttaccacaatttgccaattttccaaagcaccaaaaacccccntaacaaccctcctacttggggtcacacgccccaccaattttgggcaaggggaaccaacagaccgttttccccattcccttctcccccggctgggccctccctccccccacaacccctgggcacttgtttttccctacacgcccacnaaacttgccgcatttacttcgggcaaattttctttccaaaggaacgnacacagcacagggcctttcaacgaacgggggcctcaca

SEQ ID NO: 55746 - DNA, 235 bp, Oryza sativa
  unsure (1)..(235): unsure at all n locations
  Clone ID: PAT_MRT4530_57723C.1
cactatccaagagctataacacgncatacacacgcgcgcggactctaaaccccttaagagccctcccctcttttttttttttttctaaacttttctcaccccatttaaaaacttggggccccttttaaaatgggtttaaacccacataaacaagttccttataattaatctcttcattcttctacatatattacaaaaatcttatacaaatttatcacaaataacacccatcaat

SEQ ID NO: 55747 - DNA, 567 bp, Oryza sativa
  Clone ID: PAT_MRT4530_57724C.1
atgaaccttgatgaggaatttaaacaaaataccccaagaggtagacaagctgcagatggacgagcccaacaggggagtaggttaggtgctcattctgctccacctgcttttaaggggaagtcacaagtaagtcagggaggaaaaactatgaagaaactagcttccaaaaaagactccttgctgactgtgatggaaggtacagagatatctattatcacttcagagaggaaggctccagaggtatgtgccaatatacctatggtgaaggaatgtaccaccatggtcctttggcaggaagagaacttgcaggaatcccaagaaatccaagatccagtggtgcaatctcaggaggatgttggggggtttgctgctgatatccttgtcttagagagctttcttttggatgatgataatgagaggtgccagataccaacagactctgacattgagagaatcagagaggaagaagaaaaagaagaagaggatagttttcaggaggtttcacacaagaagaagcacagggagaagagatctgaaccggcagtgacctccaggatgagtctttag

SEQ ID NO: 55748 - DNA, 603 bp, Oryza sativa
  Clone ID: PAT_MRT4530_57725C.1
agtttcttcctactctcgttttgtttcgaatcggggaggggagaggagaggagatgaaggaggcgacgtcgtcgggcggcggcggcggcgggggtgcgggggtgaacgacccgcggcagccgtcgacggcgaggcagtacacgccgccgaagctgtcgccgcaggacctgcccatcgactacgcggggttcctcgccgtcgtcttcggcgtcctcggcgtcatgctccggtacaaggtgtgctcgtggatcgctatcatcttctgcgcgcagtctctggtgaacatgaagaatttcgagaatgatctcaagcagttatccatggctttcatgtttgcagttatgggcttggtgacgaactatcttggcccccctcgtccaggcacaaagcgctaatcaggatgcacactatgcaactgtatgagagtatcacttgtatttttatgttccagaagctattggccgcgctcacatctctgaatttcatctgagcatgtagcaaatacagtaatacactgcctcaatcattaggggacaagaatatgtatgatcctcaataatttaattgtgcggtactggtgtagttcttctggaaaaaaaaaaa

SEQ ID NO: 55749 - DNA, 132 bp, Oryza sativa
  Clone ID: PAT_MRT4530_57726C.1
atggggcggcgcgtcatgaacgccgcgctgcgcgcgacggtgaacgcgggaaggcggcggcgcgcgctcccctacggcccatctccgccgtcacggtctccttcctcaacatcatcaagcaccgaggcttaa

SEQ ID NO: 55750 - DNA, 498 bp, Oryza sativa
  Clone ID: PAT_MRT4530_57727C.1
gggggagaggaaaaggtggatattcccaaaaaaacagggcaggtccggccacttcagggaaattggatttatcccaacccggttggggccacaagaggaccggcccccccaggtccccccgggggctaatcccgggcggaaaaccgaaatcgggggaaaaacccccgggtctgggggaaagccagacccctggtttgattatttttggccccccaaaaacaggggtattacgggtccctgagaaaaggtttccgaccaacgagggattattaccctggccctcccccaagaaccccctccccctcattattatgggggccagcattatcatcggcatcggcgtctcgggcagttgcaaaaagaggaaggtgccaacccgggccaaagggtcttctgggatttaagctcaaccaccccctcctggggggccttgagggcctccccatagaagcccaccaactcctcgacttcataagggggcattatcaaggggggggg

SEQ ID NO: 55751 - DNA, 454 bp, Oryza sativa
  Clone ID: PAT_MRT4530_57728C.1
atgacgaagatagcaggtgttcttattttagttcttgttatctgtccaactattacttccgctacccgaaaccccggggaggccgggatgacgaccttagtgacgacaaaatctggacatctctgattgcattccactatcctggattggtggttccgccaatctgcatcgaggacattgcaaagaaatgcgggtggaataatctgacccctgcatgcgtgatggaagagatggacagctgccactaaggcgaccaccggccactctccatcagtctcaggctgacaggctctcagccataataattaataagctgtaataaggggcctaattaatatgtactacttcatgcctctgattttgattgcaagcaccactagccatgcatgcatgtcgtatattctaatagaattaattaatggtaataatataagctagctaaaaaaaaaaaaaa

SEQ ID NO: 55752 - DNA, 579 bp, Oryza sativa
  Clone ID: PAT_MRT4530_57729C.1
atggcggctgtgccggctctgatcttcgccatggacccgggttctctcccacacatcttccttatgacagccatggcctcacacgacgcgcagaaactgcctccgcctctcagtataggtagcctcacgttctcctttagagttacaccacaagttgaccgtacaccagttcaatggcatcatatgcagcttgaggttttgaggatgatgaaaggtagatattgtgctaaatttattccaaatcaaaatcatcccttccccatcaggattgtcatgctatctgctctctccaagcacaatccaactatcgatgcaggtcaatatccacaaggtccttacatgcaatactcccttattgattccttcctcgcttatgaacaaaaaggactcagagctgatacattgagtgcggcaaagaggatggaggataatatgatgtacccaatcaaggaccaagaaaccatgctggcagtaccaatggacatgaacaggcagcaggatacagtttgctccaaggaaattttgcagcaccaaaacagtactatactggctagcatctcttgtttatttgcattatga

SEQ ID NO: 55753 - DNA, 4023 bp, Oryza sativa
  Clone ID: PAT_MRT4530_5772C.1
atggggtcagaggcggcggcggcggcgagggcggtggtggtggcggtgaacggggagaggtacgaggcggtgggggtcgacccgtcgacgacgctgctcgagttcctccgcacgcggacccccgtcaggggccccaagctcggctgcggcgaaggtggatgtggcgcatgcgtggtcgtcgtgtccaagtacgacgccgtcgccgacgaggtgaccgagttctcggcgagctcctgcctgacgctgctcggcagcctgcaccactgcgcggtcaccaccagcgagggcatcggcaactccagggatggcttccacgctgtgcagcggcggctctccggcttccacgcctcacagtgcggcttctgcacgccgggcatgtgcatgtccatctactccgcgctcgccaaggctgacaaggcatccggtcgccccgcgccgccgacggggttctccaagatcaccgccgccgaggcagagaaggccgtctccggcaacctgtgccgctgcactggctacaggcccatcgtcgacgcctgcaagagcttcgccgcggacgtcgacctcgaggatcttggcctcaacgccttctggaagaaaggcgtcgacgacgagcacgctgacatcaacaagctgcctgcatactccggtggcgccgccgtctgtacgttcccggagttcctcaagtcggagataaggtcgtccatgggtcaagcgaatggtgacacttcggcggtggtggtcaccggcgacggctggttccaccccaagagcgtcgaggagttccacaggttgtttgactctaacctgttcgatgaaaggtctgtgaagattgtggcatcgaacaccggctccggagtgtacaaggatcaagacctccatgacaagtacatcaacatctcgcagattccggaactctcagccatcaatagaagcagcaagggcgtagagatcggagctgtcgtgtctatctcccaagccatcgacatactgtcggatggaggcgcggtgtttagaaagatcgctgatcacctgagcaaagtggcctcgccgttcgtccggaacacggcgaccattggaggcaacatcatcatggcgcagaggttgtctttctcgtcggacatcgcaactgttcttctcgctgcaggatcaactgtcaccatccaggtggccgccaagaggatgtgcatcactctggaggagttcttgaagcagcctccatgtgattccaggacattgctggtcagcatctctatcccggattggggttcagatgatggcatcacctttcagacgtttcgtgcggctcctcgtccacttggcaatgctgtgtcatatgttaattctgcattcttggcaagaagttcagtggatggatcatcagggagccatctcattgaggatgtttgcttggcattcggcccctttggggccgagcacgccatcagagctagggaggttgagaagttcttgaagggaaaattggttagtgcaccagtgatacttgaagcagttcgtcttctgaaaggtgttgtttcaccagctgaaggcacaacacatcctgaatacagagtcagcttggccgtcagttatctgttcagattcctgtcttcccttactaatggcttggatgagcctgaaaatgctaatgttcccaatggttcatttactaatggaaccgcaaatggtattgttgattcctcgccagagaagcactcaaatgttgacagctcttatttgccaataaaatcaaggcaagagatggttttctctgatgaatacagacctattggaaaaccgatcgagaaaacgggagctgagctccaagcttctggggaggcagtgtatgtcgatgacatctctgctccaaaggattgcctctatggggcatttatctacagcacacaccctcacgctcacataaaaggtgtaaacttcagatcatctttggcttcacagaaggtcatcacagttatcactttaaaggacattcctaccaatggaaaaaatattggatcatgctccccaatgctaggagatgaagcgcttttcgttgatcctgtttctgaatttgctggacagaatattggtgttgtgattgctgaaactcaaaagtatgcctatatggcggcgaagcaatctgtgatcgaatatagtactgaaaatcttcagccaccaattctgacagtagaagacgctgtccagcataacagctacttccaagttcccccatttttagctcctacgccaattggtgagttcaaccaagccatgtctgaagctgatcacaagatcatagatggggaggtgaaacttgaatcccaatactatttctacatggagacacagacggccttagctatccctgatgaagataactgtataaccctctatgtgtcggcgcaactacctgagattactcaaaatactgttgcgaggtgccttggcattccatatcacaacgtccgtatcatcacgagaagagttggaggaggttttggtggaaaggcaatgaaagcaatacatgttgcaactgcttgtgctgtcgccgcattcaagctgcggcgtccggttcgaatgtacctcgatcgcaagacagacatgatcatggcgggagggcggcatccgatgaaggtaaagtactccgtcggtttcaagtccgacggcaagatcacgggtctgcacgttgatctcagaatcaactgcggaatatcgccggactgcagcccggcgttgccagtcgccattgtcggggctctgaagaagtacaactggggggctctctccttcgacatcaagctctgcaagacgaacgtctcgtcgaagtcggcgatgcgggctcccggcgacgcgcagggctcgttcatcgccgaggccatcgtcgaacacatcgcgtctactctctcagtggacacgaacgccatcaggaggaagaacctccatgacttcgagagcctcaaggtgttttacgggaatagcgccggtgatccttcgacgtacagcctcgtcaccatcttcgacaagctggcgtcgtcgccggagtaccagcagagggccgccgtggtcgagcatttcaacgccggcagcaggctccggccatctccggggaaggtgtccatcatgaacgacggctccatcgccgtcgaggtcggcggcgtcgagatcgggcaggggctgtggacgaaagtgaagcagatgacagcgttcgcgctgggccagctctgcgatgatggcggcgagggcctcctcgacaaggtccgtgtcatccaggccgacaccctgagcatgatccagggaggcttcaccggcgggagcacgacctccgagactagctgcgaggctgttcggaagtcgtgcgccgccctcgtggagaggttgaagcccatcaaggagaaggctggcacgctaccatggaaatccttgattgcccaggcaagcatggcgagcgtgaagctgacagagcacgcgtactggacgcctgaccccacgttcactagctacttgaactatggagctgcaattagtgaggtggaagtcgatgtgctgacgggagaaaccaccatcctgaggagcgacctcgtgtacgactgtgggcagagcctgaatcctgctgtggacttgggccaggtggaaggcgcattcgtgcaagggatcggcttcttcacgaacgaggagtacacgaccaactccgatgggctggtcatcaacgacggcacgtggacgtacaagatccccaccgtggacaccatccccaagcagttcaacgtcgagctcatcaacagcgcccgcgatcacaagcgcgtcctctcctccaaagcgtccggtgagccgccgctgctgctggcgtcgtcggtgcactgcgcgatgagggaggcgatcagggcggccaggaaggagttcgccggcgccggcggctcgtcgctgacgttccagatggacgtgccggcgacgatgccgatcgtcaaggagctctgcggcctcgacgtcgtggagagagatctcgagagctttgctgccaaagcctag

SEQ ID NO: 55754 - DNA, 1373 bp, Oryza sativa
  unsure (1)..(1373): unsure at all n locations
  Clone ID: PAT_MRT4530_57730C.1
atggcggcggctgcggcggcgccgtcgtcgtcgacgtcggggtcgcccggcgcggcggcggcggcggctcggccgacgatgccgtaccggtcgcggttcggcgacacgacgctgacgaaggtgttcgtcggcgggctggcgtgggagacgccgtcggagggactccggcggcacttcgagcagtacggcgagatcctggaggccgtcgtcatcgccgaccgcctcaccggccgctccaagggctacggatttcttaagcccccaccccctcctcctcctccacctccaccaccaccaccaccaccacgcgctcgaactaatcttcttcctcgtcgcgcaggcagggcctcccctggggcccagttccaggccccaccgccagcgttccagggcccaccttacatcgccagggggacgccaccaccgccggcccagatgatgccccagccccagcatcatggtccacctgcgaccatctaccacccttcccagtcttggtactggtacccacctgactatcaataccaacagggcctgatgaattctcaagtgttgcagagctactatgctgccgccctgcaggctcaggctcaggctcaggctcagctgtatggcatggcggcatcgccaacggcaccatcgccctaccagtacttgggctacatgccggctccggcgccggcggtgactccaactgcagtgctcccacctgcacagcagcagatcacagggccgccgccgccgttcgtccagcagccggcacagcatgtcacagcgccgccgccgttcgtccatcatccaacggctgctgcgcagatccaaggctcttttgtacccctgccttcgcttcctcacaacttcaggcttcagctcccccctaatgcaatgtcaatactgcctcccaccccaaccgctttgcaaccagctgatctgcaggctgcccctgcagcaactggagcaacaaacccaaacaatactccgacaggtgcctgaaagccattctgaagataanaaagatttattcagggtccaaagaatccaaacacacaccctgtcaagctgactgctatctggggcngagaaagtcagaaagaaatgcgcgcgaaaaagcgatgcccngtgtttgccatgctgcgatcgatgctggtgcggaccaagttattggccntctgtgaacngtgctctgctggatgatgntgacccacatgactgccaaaanaacnttgaaaccccgtntgcattgcgttcantttgtggtgtttggtgcntgcgttaccntgttgcnatagcttttgtttttttttttggcgacgtggctgtgccaatgtacagccattctggattctgggatttcatacccacccaaaaaaaaa

SEQ ID NO: 55755 - DNA, 231 bp, Oryza sativa
  Clone ID: PAT_MRT4530_57731C.1
aaagagaagtttttttttgtaaataaaattagctttcaacatacactctaaaggtgtaatgaattaaagcccgccacatagtaaggtgggcatgaatcacgatgggcaatcaaatagcggggggcatttcatagcctgtgcgagatatagtgatgatggagacctttggactgtgcggatgtgtggccgtcggatctaaaaatatcttttctaccgaccataactggactc

SEQ ID NO: 55756 - DNA, 356 bp, Oryza sativa
  Clone ID: PAT_MRT4530_57732C.1
tatgtatatatgaaacactaatatgtatggtgtacttttattctcaagttaactgaacattgtcgggttccaattgcaaaactaataaatttagtatgctaacgcaggatgtaggtctagaatatacaagggacagctcagttactggacaattgttgttttcttcccggtataaatcactgtaagaaaaaacgaagacaaatttctgaggtcttcacgcaacacctcaaggttgttatgagccaatatgagcttctgaaggtcaactccctggattacaaaaggtagctagattgccaaatagccggagagggcaataccataatttttgggggaaagctaccttttgaattaat

SEQ ID NO: 55757 - DNA, 1818 bp, Oryza sativa
  Clone ID: PAT_MRT4530_57733C.1
ttgcgcatctgcatccaaaaccaaacccaaactcgtcttctccaccggagcagagcagcggcggcggcaatggacgccctcctcgtggagaaggtcctcctgggcctgttcgtggcggcggtgctggccctagtggtggccaagctcaccgggaagaggctccgcctcccgcccggccccgccggcgcgcccatcgtcggcaactggctccaggtcggcgacgacctcaaccaccgcaacctgatggcgctggcgcggcggttcggcgacatcctcctcctccgcatgggcgtccgcaacctggtggtggtgtccagcccggacctcgccaaggaggtgctccacacccagggcgtcgagttcggctcccgcacccgcaacgtggtgttcgacatcttcaccgggaaggggcaggacatggtgttcaccgtgtacggcgaccactggcgcaagatgcggcggatcatgacggtgcccttcttcaccaacaaggtggtggcccagaaccgcgcgggttgggaggaggaggcgaggctggtggtggaggacgtccgccgcgaccccgccgcggcgacctccggcgtggtgatccggcgaaggttgcagctgatgatgtacaacgacatgttccgcatcatgttcgaccgccgtttcgacagcgtggacgacccgctcttcaacaagctcaaggccttcaacgcggagcgcagccgcctctcgcagagcttcgagtacaactacggtgacttcatccccgtcctccgccccttcctccgccgctacctcgcacgctgccaccagctcaagtcccagcgcatgaagctcttcgaggaccacttcgtccaggaacgcaagagagtgatggagcagactggtgagatccggtgcgccatggaccacatcctcgaggccgagaggaagggcgagatcaaccacgacaacgtcctctacatcgtcgagaacatcaacgttgctgctatcgagacgacgctgtggtcgatcgaatggggaatcgcggagctggtgaaccacccgagcatccagtcgaaggtgcgggaggagatggcgtcggtgctgggcggcgcggcggtgacggagccggacctggagcggctgccgtacctgcaggcggtggtgaaggagacgctgcggttgcgcatggcgatcccgctgctggtgccgcacatgaacctcgccgacggcaagctcgccggctacgacatccccgccgagtccaagatcctggtgaacgcgtggttcctcgccaacgaccccaagcggtgggtgcgccccgacgagtttaggccggagaggttcctggaggaggagaaggccgtggaggcgcacggcaacgacttccgcttcgtgcccttcggcgtcggccgccgcagctgccccgggatcatcctcgcgctgcccatcatcgggatcacgctcggccgcctcgtccagagcttcgacctgctgccgccgcccgggatggacaaggtggacaccaccgagaagcccggccagttcagcaaccagatcctcaagcacgccaccgtcgtctgcaagcccatcgacgcctaggtcgatcgatcgacctactcaaatcaatcatgtgctgcgttatcctaaaaaaaggttgtatttttgtttggggggggggggggggtggtagttatgtgtgtgttctgtgaggcaggcacctgttgttgtaggtttacttaacttttttttttcttatacttgttggttcaaacttaattattggtaatctatactgcccaaacattgcaaataaaaaaaaaacccaaaaaataaaaaaaacacaaa

SEQ ID NO: 55758 - DNA, 750 bp, Oryza sativa
  Clone ID: PAT_MRT4530_57734C.1
atgcggccggcctctcccgtcctcgctggctgctgcgctcctgcttcgttagctcgctgctgggcgagagagaagagaagaactgaagaagctgtgagcagagccgatcaggaggaggaggaggatcggaggatgaaagggcggcatagcggcaaggcggcggcggcggcggcacggtccatggccggtgggagcgagaggggcggcgtggtggaggaccctaggctggtgaagcaggttcgggagctgaggaggctggtgccctgccgccgcgagccgtgcgggctcggcgagctgttccaggacgcggcgagccacatcgaggacctgcaggtgcaggtgaagctcatgcggatgctgctcgagaagctctccgaggagtgcggcggtggcagcgctcagcaagggtgtggcggtgagggcacaacagcgacgagcgggatgattccagcgatgatggcgcggggcggccgcggcggggagggagcgagcagggagcggtggcacgaaggaatgtgcacggcggaggacaccgagtgcaccgaggatgaggaggaggaggaggagcgcgagaaccccgccgccctagtggccaccgagccccctgctcctgccgccaacttcctcagccttcgcgaggtcgccacgggcgcggccggcggcaagtccaagaggaagaagggggtcgacgccggagcgctcgaggccagtccaaaggttgttgagatgcgggcgtgccagtcagtttga

SEQ ID NO: 55759 - DNA, 570 bp, Oryza sativa
  unsure (1)..(570): unsure at all n locations
  Clone ID: PAT_MRT4530_57735C.1
ccccctgccgtacgtaagccgttgcggtttcagtgggctgtaatcaccggtgtgcatacttgttcagtgcgaatcgacgcgtgtgcttgcatgccgtgacaaacaaacggaaacaaacaaactcgatctttccaggctccgatccatgagtttcataaccaaacaccatccatgtgcatgtaccgggaacctgacggtaaagatacaacttggctcatctgagaagagaaccaaacatgtcctatatatctgcagtcagttgtgagagattattacaacgctgaataccatcacatctttccgataatacatggtgcgaaaaagaagcttccctacaacacacttcgtcgtctcaccgncacaaccacacatgtggttctgattgggcgcgcattccgcttttaggtaggttcagaatccagttaagggcttgttcggttagctctcaatccatgtggattgagcgggattggatgggtttgaatcccaaacaactcanacttcttcacaattttttcaatcccatccaatccatgtgtatcgggaataaccgaacaagccctaagatgg

SEQ ID NO: 55760 - DNA, 1736 bp, Oryza sativa
  Clone ID: PAT_MRT4530_57736C.1
aaacataattacatatttgccaccaaaaacgattggaacccagcatacctaccatcaaactcacagcatagactaacaccgttagagtttggttttcatgaaagtgaggacaaggatgcccctccccaggaaattgcaattctaccactggagcatacaacctgttgaaatgaaaattggacggtgcgacggttcgtgtaaaccccgacacggacaggccatcacaaatgcggaaatgccagcgatcagatgatccgatccccctccccactcctccacgtgggttctttttttttgttgtacacctcaagttttcacatctaaagtttatacacatgcgcgtgtgaccaatatattgtctagatatgatggatggataatagccgtctaatcattgttattgcaccgaacactgagaacaaggctgccaaaatatgcacaagttgatggagcggtacgtaatagtcatgggtgaatgcatgcacatgtgctcgtggactagaaacatgaagctttccatcgccctggcctgcttcctcttcttcctcgcggcggcgaccaccgcctccgcgcagtgcacgttcgagatcctcgtcaagaccgacggccggaggaacgccggcaccgacgcccgcgtctcgctgcaggtgcgcgccgccagcgggccgacgctgacgatcaccaacctggagtcgtggggccagatggccgccggccacgactacttcgagaaggggaacctcgaccggttcaggggcgccggcgcctgcatgccgtcggagccctgcaacatggtgctcacctccgacgggtccggcaacaagcccgggtggtacgtgagctacgtgatggtgacgcagctcgggcaggggagcctcccgtcgatgacgcaccggtgggcggtggatcagtggcgccgagcggaggggctgcggcattggcgcagcggcgccatgatcatcgaggtagctgcctatagctccatcgaccagtgttgtctctgcgtgcatcagcatgtgctggggctctcggcggagtctcggaatcggcgccgctcgtcggaatccgattccgatttccaagtttccccacgcaatgcccatatagccccaccagccgcctgcctcggtacgtatctctctcgagtctcgacccaccgcgtattccaatccatccaaccgtcgccttctgggttgcctgcttggttttccagccagcgccatggattcacgctcctccgtcaaacggtgagtcctccatgcgcctctggttcgaggaatctcgacgatggcaaccttaccgatgtttactttatctaaaataattggattattcatgtgacaacatgcatataatctaaaatactctttcaatctcattccctgtctcgcatgaccaagtctacacaaaatagagtcattgagcactcttctcatcattgcaactttcttgtcttctcccctaccatgcgaaccatccatctcttcacggagttcgatgccaacacccaggacgaacgtggcgtgcacgtgttctgccccatcttcctttgtcgcaaggagtttggcatttgctatggttgtggacttatgcaccctagaactgatgattacgttgcaggtcgtaccaacatttggactcccagtcttgctactgcaatggcgctccttgaaaagatcaattgctgcaggcggcggcacatcttcatacttagctttgcttccgaaactgcatgc

SEQ ID NO: 55761 - DNA, 603 bp, Oryza sativa
  Clone ID: PAT_MRT4530_57737C.1
cggacgcgtgggtgctcatcacctctccatctttagtttgaagtatctcagttttgcgattctcctcgctgttcaccgcgaataatcaagcatcgattgacgacgacgatggacgaaccatcgcagggcggtgaccagaagctgtcggccatggagcatgtcaagaaacgccatgaagagaagggcttcctctatgcctgcttgttcatgctgtgctgctgcttctgctgctacgaaacctgcgagcactgcctcgagtgcttctgctgctgctgcaagaaggacaactgatagagatcaagatcgatttcctggatttgttagcgaattgttcgtcgaaataataaaaggctagcttggtgtgattcttctcggttttaatttgtgtgttaactatgcgttaaccgtggtgagctagctaatagttatgtactccatgctgtgactatgagtgagcgagtgaattgcaggtggattgtggttgtaagtttgtaagctggatttctgatttttcatgtcagttcattgttgtagtacaaattcttgtgtaaacataagtgtaggtgattcatgttgcaaaaatccagttatttcttctgcttg

SEQ ID NO: 55762 - DNA, 1620 bp, Oryza sativa
  Clone ID: PAT_MRT4530_57738C.1
atggcagagacgggcgaccagcacggtccagtgatcggcatcgacctcggcacggcgtgctcgtgcgtggccgtgtggcagaacggccgcgcggagatcgtgaccaacgaacatggcgggcgggccacgccgtcgtacgcggcgttcaccgacacggagaggctcgtcggcgacgcggccaagagccaggcctcccggaaccccaccaacaccgtcttcgctacgaagcgattgatggggagaagattcagtgacgcgtccgtgcaggacggcctgaagctgtggccgttcaaggttgtcccgggccgtggcgacaagccgatggttgccgcgagctacaagggcaagcagaagctgctcgccgcggaggaggtcgcgtccatgctgctctcaaagatgaaggcagaggccgaggcctacatcggggggccagtcaagaacgccgtggtcacggtgcccgcgtcgttcgacgtcctccagcgccgggccaccaagcacgcatgcgccgtcgcggggctcgacgtcctcggcgtcatccacgggccagcggccgccgccgtcgcctttggcatccacgaaatcgcgggcgacaagaatgtgctcgtctttgatcttggaggcggtcataccagcgtgtcactcctcgccgtcgcgtccggcaagatcgccgtcagggcgaccgccggcgacccccaccttggcggcgaggatttcaacggccgcatggtcgaacacttcgtcgctcagttcaaggcagagcacaagaaagacgtcggtcgcaacgcgagggctattttgaggctcagggcggcgtgcgagcaggcgaagaggacgctctcgtcggcgagctgggccgccattgagctcgaacgtttgcacgatggcgcagacttctactccaccattacgcgcgaccagttcgacgaactcaacctggacctgttctgcaagtgcttggatcccatcaagaagtgcctcacgggcgccaagatggacaggagcagcgtggacgacgtcgtcttcgtcggcggatcaacccgaatccctcgcgtgcgccgtctgattcaggacctgttcgacgggaaggagctccgcaaggacatcagctctgacgaggcggcggcgtgcggtgctgccaccatggccagtctcggcagcgacgacagcttggtggacctgttcctattcgacgccacgccgcactcgctcggcgtggcggcggccggaggcgccatggcagtgatgataccaaagaacaccccgattcccgtcatggcgagggagaatactatctccatccagcccaatcacaagaaaggccacaagcaagtgagaacactctcctctgcgagatcgaaacttccgggggctcacagcaaagcaaagcccggagtgaagctctctgtgtctgtgtgcttcagcatcgatgccgacggcgtcttgacggtctctgcgagggacaaggtgaacgggcataagaaccagatgagggtcatggaacagagtcagctgagcaaggaggagatcgagaggatgactatggaggcgaaggagtacatggcagcggatgaggagaaggagaggatcaaggcgaagaatttgctcgaggaattcttgtag

SEQ ID NO: 55763 - DNA, 506 bp, Oryza sativa
  Clone ID: PAT_MRT4530_57739C.1
ctacagcaccagcaccacgaaacaaaatcagacctaaatccaccacccatatttgcttacaaggaacccaacaaaggacaaaagcccaagaacaacagttcagtaccatacggggcaaaattccaacccaccacaaccaccatcagcagaaagacgacaaaggggcctatgaacccaagcggaggaccccttggacaaacaccttggtgccccccgagagacggagcgcccaggcaagcccgccgggggaggaccaagccgacggaggactggaacaaaagggaggagaaggtgggctccggggggaatcgggacgagcggggcggccccagcggggaggcccctcgaagatgtccgttgaggcaaggacgcgagaagggcaaggcccttttacgcagagccgatgtcgggggggacctgcttgagcaccttgaagaggagatcttgcagggccccgagctattcttagaacttctcctcccagagcggcccttcttcccctcgcc

SEQ ID NO: 55764 - DNA, 513 bp, Oryza sativa
  Clone ID: PAT_MRT4530_5773C.1
attgaaacggagaggagctgtgcggatctcggactcaggatttttatttacgggagtacaatacaggaatcggattgttgatcttggttaggtggaaggcgcattcgtgcaagggatcggcttcttcacgaacgaggagtacgcgaccaactccgatgggctggtcatccacgacagcacgtggacgtacaagatccccaccgtggacaccatccccaagcagttcaacgtcgagctcatcaacagcgcccgcgttcacaagcgcgtcctctcctccaaagcgtccggtgaagccgccgccgctgctggcgtcgtcggtgcactgcgcgatgagggaggcgatcaatcagggcggccaggaaggagttcgccggcgccggcggctcggcgatgactttccagatggacgtgccggcgacgatgccggccgtcaaggagctctgcggcctcgacgtcgtcgagaggtatctcgagagctttactgccaaagcctagagatagatgatgatggtt

SEQ ID NO: 55765 - DNA, 269 bp, Oryza sativa
  Clone ID: PAT_MRT4530_57740C.1
tgttgtttaaaacataaggaaggaaagcacatttaatggcaccactacgggcgaataacagcgaacactttatggtttgatcacggaatattttgctccactgagcaccgggcacacgatagctagctcatctacaacataccgagtttctttttaggaggtaaaacggtacgagtctcacagggtactaaaacgtaagctgctattactagatacgaagtagcattttttaagccgcaaacaaaatggatacagagccggcttcaggg

SEQ ID NO: 55766 - DNA, 573 bp, Oryza sativa
  Clone ID: PAT_MRT4530_57741C.1
atggatggatcaatgttcacttgcacaagagtagttaatgagttgacaaatgaacggggtaatgactttgtggtttggtacgttttgactacagcgtttagtatccttcctgcatctattcttcgtggggaaaaaaatgtccacttcaggcaacgagcaaagggtggatttgggtcttcaattggcattataactcatgagctgtacctcaagataacatgcccatgtttccaacggcgctgcacctgtagggggatgtaccaaatgtccataaatgaaaacgtacaaccacaaggaccaagctttttggagatgttaggccaagtagattggttgttcagtcaaccacctatcatgcaaccacaaataacaggaatgtacactgccgaccaaatgatgggatatgccggcagcacgctgtcctacggagaaccatgtagctacggtggggggtcgtcaacagcacaacacgagataggaccatcgcagcttgatgaaccgcctccaataactcaaccgacccaagactacgggtacattaatttcagcggtgttgaggtggcacatatatag

SEQ ID NO: 55767 - DNA, 384 bp, Oryza sativa
  Clone ID: PAT_MRT4530_57742C.1
atgggcgcgccttcgctgaccgagcacggcgtaaggcaagcgcgatgtggccacgggcgcgtaccacgaacagcggtaattgtgcaggtagttcctacggccagcgtgcctggcgctagagcagctgctcacctcaaccgcgcgcggagtgccatcggcgccggcggcatggcgcacaccggtggagcccgcgtagtcgtcgcctcctccaccgccgccttagaagccgccgccgccgccgcctcccggtgcaagaagcagaggagcagtagaggcggcgccaccggccccgccgccgcgggccgcgggtggtcgccgcccgccgccgccgccgccgacgagagggtcgtccccaccggctccaaccctcttcacaaccgatga

SEQ ID NO: 55768 - DNA, 375 bp, Oryza sativa
  Clone ID: PAT_MRT4530_57743C.1
gacaaaaagcaatccaactttccaagaattgataactgaaaatttgaagcaaacatatttagatgctgtacacattaaaattctgagacaacttgcgggtgtggtattacaatgaaatggcagataatttacaactcctgcagatttggcaacctggaggtccctatccaactcagttccatccccctatgcaggtaggggttcttccaaaacttttgttttttctgcagcttctggtctctctggtgccttagtgggtacatcaggaagctcaataacctcgtcaatgtcttctgcagcctcagtgacagcaggtgtttctgatttctcctcaggccgtacttcaataactggagcatctggtagagactcaac

SEQ ID NO: 55769 - DNA, 972 bp, Oryza sativa
  Clone ID: PAT_MRT4530_57744C.1
attgccgagaccgccaggaaacttggtttgctgataattgctgatgaggacatcaagggcattacatgtccacacaagccagagggatcaatgtttgtgatggtaaaattggatctctcttacttggatggcttccatgatgatatggacttctgctgcaggttggcaaaagaggagtctgtgatagttttgccaggtacaaattccataaatgttcaacctcttgctgacgaaggagtctgtccgtgggaacatggtcgccgccatgagcgtgcccgtgccgtcgagccactggagcttgtcggcgtcaccgagcgcgcggagatgcacaggagcaaggtgaagctgtccggcgtcttgcacatgggcttcaagcccgacaagtgcaagacggcgctgcggatggcgctggcgcggatcaagctgctgaggaaccgcaaggaggtacaggtgcggtcgccggtgagcgcggagaagacagccacgccgccgtcgcgcctgccgggcctctcccgcgcggcgacgaagagcgcacggcgccactcctccatcacccggttctacacgcgcacggcgccgccgtcggacgcggcgcggacggccatctcgtcgcccgcggcgctccccgccacggacgccgccagccgcagcccccacgttggccacgtcggccgcgctgcccctgccgcagccgagcgcctgcagcacctgcctccgcgtggtgttcccggtccccgcggcggcaaggacgtgccccgtgagcggcaggcagaaggcgcgctgcgccgcggccagctgctaccgacggcgacccctctcctgccgctcctctccctcgccgccgcgccgcgcgccgctactctccgccgccgagctcgccatcgcgccggccgtctctccccctctcccgctaccgccgcccctgcttcgatgccggccgcctcacgccgagtctgccgccgtgcctgctag

SEQ ID NO: 55770 - DNA, 326 bp, Oryza sativa
  Clone ID: PAT_MRT4530_57745C.1
tccgctcgcggagcgtagtagcgagaatagaacgtggggagggcatagcgatggctccgatgaagctgtacggctcgacgctgccttggaacgtgactaggtgcatgtcggggctggaggaggcctgcgccaatgacgagatcgtgccactcgagttctccaaagtctagcacatggcccgcgagcacctcgccagaaacccctttggtcaggtgccgagtttgcaagatggagacttgttactctggcaatcacgtcctttctgcaagtagtgtatgccgcagcaacaaccacagctgtagaaggatgtcgatctttaggagtca

SEQ ID NO: 55771 - DNA, 369 bp, Oryza sativa
  Clone ID: PAT_MRT4530_57746C.1
ccatggggaacgaaaaattttataacacttttcacagagctggttcagtttttacagagattttatttgcaattcctaaatttcaagggaggtttcaccttttcgggtttaatagaaaaaaaagacctgaaaaaccttgcccaaacttaaaagaaaaaaaaaactttcctgtaaatgtttttggttctcagggtcctataaagcagcaaatggctgatttcaactggcataatttagctggggcagttagcacaaaaacccggtggggggcctttttttacaatcacattcatccatgtcgcccacaaagcaaacaacaggctaattggatggcccaatttcatgcaaaaaaaaaaaacttttttttcc

SEQ ID NO: 55772 - DNA, 430 bp, Oryza sativa
  Clone ID: PAT_MRT4530_57747C.1
aaatctatataaccggagctaacatataataaactcgcgttggcctgacccaaccacatatagccctaccctataccactctaacatcacgtcacatatagatcatgtgaaacacaaacataagccaagcacggccggtaaaatcaaaactacgataaacaaactgcaaacacaccaaacaaggatggagacattatataatcacagatcaacaatctaacaatgctatatatgacgatcactgcttaactgccaccagacttctttcaacccgagggcttgtaagccataaaactcatgagctgcacctgcctcacgttgtcgaatcctatgataccgacgaatgcattagggtacgccttcttggcctcctcgaactccttgagcacctggctggcgtcagtgcacccaaacatgagcagctttcaca

SEQ ID NO: 55773 - DNA, 105 bp, Oryza sativa
  Clone ID: PAT_MRT4530_57748C.1
atgacccttttgttcagcaccaaatcgtatggcgctgaacttaggcacctcagcgccacgtcaactggcgctgaatgccgtgccaccgtggatatatgggaggct

SEQ ID NO: 55774 - DNA, 1560 bp, Oryza sativa
  Clone ID: PAT_MRT4530_57749C.1
atgggcaccggacgcaagcctgtcgacggcgatggcgacggcgctgcatcagccgtcgtcttcctcgtgccgttcccggcgcagggccacgtaaccccgatgctccacctggcgcgcgccctcgccgcgcgcggcgacgtcgcgcccaccgtcgtcctgcccgatttcatccaccgccgcgtcgtgcgggccggcgggaacggcggcggaggcggcgtggcgctcgcctccttccccagcggcatcccgggcggcgacgacggagacggcgatccgggcttcgccagcatcgtgcacgccatggagaaccgcatgcccgcgcacctggagcgcgtgctcatgctcatgcgcgacgacgacgacgaccgccttgcagctgctggacggagggcagcgtgcctaaccgtcgtcgtcgacgtactggcgtcgtgggccgtcccggtggccacgaggtgcggcgtggcggccgtggggttctggccggcgatgctggcgagctaccgcgtcgtggcggccatacccgagctcatcgacagggggctcgtctcggaatacggtattcccatattggcaaacggattcaacaaaaaccagggccaagtaaaagcaaacctccaggctgaaatcatcagcttattccccgaagaactagagctaagcaccacagatttgccatggctcgtcggcgacgcggcgacccagaaatcaagattcgccttctggctccggacaatggagcgcgtgaagaccctccgctgcatcctcgtcaactccttccccggcgaggccatcgccgccggcgccgaccagcaacagccattgccgcaggaccagcaaatcctccaagttggaccattgctagccaccatcgtcactgatcgagcaaaaggcaacagcaacttgcggtgttcgccaatgaagacgacgaagaacgacaccagcacgtgtcaggcagacgacagaaccagctgcatggaatggctcgaccagcagcgtccaggttcggtggcgtacgtctcgttcgggacatgggtcgcgccgatcgcgccgggcgagatcaccgagctcgccgtcggcctggaggccaccggccggccgttcctgtgggtcctcaaggacgacccgtcgtggcgagccggcctccccgccggatacacggatcagtactccggccgcggcaagatcgtcgcgtgggcgccgcaggaggacgtcctcgcgcacggcgccgtcgggtgctacctcacgcactgcggctggaactcgacgctggaggcgatacggcacggggttcgcatgctgtgctacccggtggccggcgaccagttcatcaactgcgcgtacatcgtcagggcgtgggggatagggatcaggctgcgcagtgccgaccgtggcgaggtggtggattgcgtcgggaggatcatggaaggcgaggacgggaggcgcttgcgggagaagctggatgagctgagggagagggttatggcgggtgaggcattgtgcgtagcaaagaggaacattgaggaattcattcgtgggattagtggacagagattacaatag

SEQ ID NO: 55775 - DNA, 425 bp, Oryza sativa
  Clone ID: PAT_MRT4530_5774C.1
ggggttttgggatccgttggctcgtggggtggggggcggtgcggtgcggctaccgcgccgagcccacgctgagatctgagccaccaccgcgcgatggatggatgattcgtacgtttgtttcagttgagcttttgatttggtttttggtttggggtgctcggcttcaccattaccatcacgagatttgtgatttgcttcaatctggggcgccttcacacacgctcgcgcgtggctgcttggatgctcatccatggctgtgcggccgtggtggggggctggaaccctagatcagagcaggtttaatagtacagcagactaatggctatcagccaaatctggtgagaaaattgcacatgtaccatctgaagaggtgatttgctggaatggcatgactttaactggcattcgatgtaatgccattcact

SEQ ID NO: 55776 - DNA, 591 bp, Oryza sativa
  Clone ID: PAT_MRT4530_57750C.1
atgcatatcatcactttcttcgaccaccatactagatcagctgcccctctaactcgctctccatcaatagctagatttggacccttttatttttcttacaagaagaccattgcactcacgccatttttgtgctccaactgcgtgttcgtgcactcaacgccaatgcaatatatatatacatgcgagtcttgtgttgtgtgcgtacaagaatacgtactccctgtatcttatattccaaaatacgtacgtgtacggcagtacagtacatacgtacttgtccatcttattgagcgaacgttggtccctcacgaacttatcaatgtcgacacacttggacgcattaatttgtcacgtagcattcgaagaaatataagtaccattttaaataataatggaagtggtataccaattgaagaaatacaatgcacgatcatcaaatataatacctcaaaaaaaaatccttgcaatatctatcagaacccgacgtcctcatcggcaaaaagatattgcaatgccagctgccctctactacaacaagggctcaatcattcgcagcctcctcgtactttaactatacttaataaatatcaa

SEQ ID NO: 55777 - DNA, 2052 bp, Oryza sativa
  Clone ID: PAT_MRT4530_57751C.1
atggtggcgccgcgccagtgcgccgacagtggcggcgatggcggtgatgatggcgacctcctcgaacgcgacgcgccgctgcggctggcgctgtccgtgctccacgacctgctcggcgtggccgccttcgccgcgtcccacccgctccacgccgcgtacgcgctcttcttcgcgcgccacctcctcgcgctcgcctgcttcttctccccgctcctcgccaccaccgcgctcctcctcgccgtcctcgtcaccgtcgccccctgcgccggcgcccgccgcgggggggactcgccgccggagccgtgctcgctcgggtggaccttcggcattgccgtcggcgcgctccgcgccgagctcaggccggacccggacggcgctggcggtggcgccgtcgcgctccttgcccagctctgctccttcgtcctcggccccggcgacgccgcctccgtgctccgcgtcggcgagatcatgggtgagctctgcgacaccggcgattcttgcctcattctagaacacaagccagccgtgctgttcgaccacaccgagctcgagctcccatggcatcaggccgccattgacgcccaaatctccatggatcaagaggttcttgacgagatcaaggacggaatcgaggagaagaaggtcgttctcgaggatctaaaccagctaagtgctccgcatttttcttcagagaattgttcatcgaggagcgacacgtcggtgcaagacattcagcgacagagctttggttcgtcatcagatggcgatgggttcagtgatggcgttgaggagaagagactggagtgtgaccctgtctcagtggagatcaagaaatgcgagcctcccgcgaaatcgctttcttcggtttctcggagaatcttgcagtgggaggcgcaggcttctggcaatttcaagaaagttcttgatgaaatggaggagaattcggtggatttcagtttggagaaagcctcgttcctggatttcaaggaatgcaacaaattggatggtggagcttacactgaaaaatgcgaagttgaagaaattgcttctgttgcagagtctggcatgcaccaagaagaacaagtattcaaggatgtgaaagaatgcgtgcaatctgaagctgaaacctgcactgagaaatgcagcaaggaccagcaatctgaagaaagcgtagtggtggttcagtctgaagaagaatggcaagaagagaacctcaaaattgttcttcctgagccagaaatgcaagatcaggagtacaaagatgtggaacctgtcaaagaattgcaggatcaggagtacaaatttctgcaacctgaagaagaagaagaacagcaagaacaagattctgaaaatgatgcacaacctgaagaacagttacaagagcaagattgtgacaatggcgtgcaacctgaagaagaagaagaatcgcaggagcacgagatgcgactgcaagaatcgcacgatgatcaggaggaggagttcaaggacgcggcggaccaagaatctccaagggaggatcccctccggccgtcgacgtcgatcgcgcggcgggtgcactcgcggacgtcgtcggagcacctcctcgtcgtcggcgaggggtcgccgcggaaggagaaggagtggaagcggacgttggcgtgcaagctctacgaggaacggatgcagctcaagctccgccgcgaccgcgccgtcgtcgagtcgtccagcgacaacatggacatgctctgggaggcctacgaggtcggcggcggcggcggcggcgccacctccaccaagggcggcgccagcaaggcgaaacgcaagcaagaacgagccaccgtcgaacgcaagcaagaacacgcgaccgccgacgaggaagacgacgacgacgacggcgacgaggaggaaggctcggtgaggcagctctgctgcctccaggctctcaagttctcgacgaggaagatgagcttcggcggcggcggcggcaagccgagcctggccaagatctccaaggtgctgaggagggtggccgcgttgtcgaggtccggatcgcggcgaagcaccaaaggttga

SEQ ID NO: 55778 - DNA, 478 bp, Oryza sativa
  Clone ID: PAT_MRT4530_57752C.1
ggggaaaaaaacccaaccacataaaacggtttaaggggccaacccccccgaaaaaccgggggaattccaggggtccccccaaaaaaaacaggttggggatcacggcttttagcccacagaaaatttcccccccccaggaaagctgggtccccccacaggaaagctggattcaacaggggggggagggaaaacaacccttttttgggaagcaggggcccccaataaatgggaacactcaagaaaccccctattgggaatcctagctttggaagaggtttagaataattcccccttccaggggcaaaaaaaaagggggaccccccctttttaacacagaaaagaacttgcttattaggggacccaaaaacaaaaaaaagccttgcattttttttttttggtggaaaaacaacctttttaaaaaaaaaaaggagccttcgggggggggcacccttcccccgggaaaatgggccttcatttt

SEQ ID NO: 55779 - DNA, 3021 bp, Oryza sativa
  Clone ID: PAT_MRT4530_57753C.1
ctctcctcttctcctctccacaaaaacatttctactgcttgctcgcgtccgattccccacctccctttccttgccttcctcgctgcctcctcctcttcctcctccgtctccgctagggtttccgcgccgccgccgccccgatccgagatgccgccggccgccatggctccccctcccccgccgcagggctcctccacaggggatccgctctacgacgagctgtggcacgcctgcgcggggccgctcgtcaccgtgccgcgggtgggcgacctcgtcttctacttcccgcaggggcacatcgagcaggtggaggcgtccatgaaccaggttgccgacagccagatgcgcctctacgatctgccctccaagctgctttgccgtgtcctcaacgtcgagctcaaggcggagcaagacaccgacgaggtctacgcgcaggtcatgctcatgccggagcccgagcaaaatgagatggcggtggagaagacgactcctacgtccggccctgtgcaggcaaggccgccggtgaggtccttctgcaagacgctcaccgcgtctgacaccagcacgcacggcggcttctctgtactccgccgccacgctgatgagtgcctccctcccctggatatgacccagtcgccacccacacaggagctcgtggccaaggatctgcacagcatggactggcgcttccgtcacatctttcgcgggcaaccgaggaggcatctccttcagagtggttggagtgtgtttgtcagttccaaaaggcttgttgctggggatgctttcattttcctcagaggagagaatggtgaactccgtgttggtgttagacgagctatgaggcagctgtccaatgtgccttcttcagtcatatctagccaaagcatgcacctgggagtccttgctactgcatggcatgctatcaacacgaagagtatgttcaccgtctactacaaacctaggacgagcccttcagagttcattataccatatgatcagtatatggagtccgtcaaaaacaattactctgttgggatgaggttcaggatgaggtttgaaggagaagaggcaccagagcagaggtttactggtactataattggcagtgagaatctcgacccagtgtggcctgaatcaagttggagatccctgaaggtgcggtgggatgaaccatcaactattccgcggccagatagagtctctccttggaaaatagagcctgcttcatcacctcctgttaacccccttcctctttctagggttaaaagacctaggccaaatgctcctccagcatctcctgaatctcctattcttacgaaagaagctgctactaaggttgacactgatcctgctcaagcacaacgaagtcaaaacagtacggtcttgcaaggtcaagaacaaatgaccttgaggagcaaccttactgagagtaatgactctgatgtcactgctcataagccaatgatgtggtctccatccccaaatgctgcaaaagcccaccccttgacatttcagcagagaccccctatggataattggatgcagttgggaaggcgtgaaactgactttaaggatgtccgttctggctctcaatcttttggtgattccccaggcttctttatgcagaattttgatgaggctcctaaccgtcttacttctttcaagaaccagtttcaggatcaaggttctgctcggcacttctctgacccatactactatgtatctccacagccttccctaactgttgaatcaagcacacagatgcacacagacagtaaggagttacatttctggaatggccagagtactgtgtatggtaattcgagagaccgaccacagaatttcagattcgaacagaactcatcaagttggttaaatcagtcatttgcccgacctgaacagccaagagtgattagaccgcatgcatcaatagctccagttgagttggaaaaaacagaaggcagtgggtttaagatttttgggtttaaagttgatacaaccaatgctcctaacaatcacttgagctccccgatggctgcaacacatgagcctatgcttcaaactccatcatcattgaatcagttgcaacctgtacaaactgattgcattcctgaggtatcagtaagcacagctggaacggcgactgagaatgagaaaagcggtcagcaagctcaacagagttcaaaagatgttcaaagcaagactcaggttgcttcgacgaggagttgtacaaaggtccataagcaaggcgttgcacttggcagatctgtggatctttcaaagttcagtaactatgatgaactcaaagctgagctagacaagatgtttgaattcgatggtgaattggtgtcttcaaacaaaaactggcaaattgtttatactgataatgagggtgatatgatgcttgttggagacgacccatgggaagaattctgcagcattgtgcggaagatttatatttacaccaaggaggaggtccagaagatgaattcgaaatcaaatgccccaaggaaagatgactcttcagaaaatgagaaaggtcatctgccgatgcccaacaaatcagataactaggttcagtgaagcgagatgatacaagaggtagatcgcatggagtcttgagagagagatgccattctgcgggtcccagtcaagtaaaccccctgatgtgttggtgatcacccctgcccccccttttgcttatctgatggctgatgcaatgcaaaccctatggctttagctagtatgagatgtagactgcctattgtttatccttttgttcctttttcttctcttggcagaaagatttagggccaagatttatcattattgctattgcccctctcaactcctcccaactctctgatgtaaatatttatctacgtagccagccacccagccagaagtagagcagtagtagtagagttaccccctaccttgtattaaccagcagcctattcccccggataaatttgtgtaagctctgtagctcgagataaaaaaaatggcgatcgaacgaac

SEQ ID NO: 55780 - DNA, 2532 bp, Oryza sativa
  Clone ID: PAT_MRT4530_57754C.1
atggctccccctcccccgccgcagggctcctccacaggggatccgctctacgacgagctgtggcacgcctgcgcggggccgctcgtcaccgtgccgcgggtgggcgacctcgtcttctacttcccgcaggggcacatcgagcaggtggaggcgtccatgaaccaggttgccgacagccagatgcgcctctacgatctgccctccaagctgctttgccgtgtcctcaacgtcgagctcaaggcggagcaagacaccgacgaggtctacgcgcaggtcatgctcatgccggagcccgagcaaaatgagatggcggtggagaagacgactcctacgtccggccctgtgcaggcaaggccgccggtgaggtccttctgcaagacgctcaccgcgtctgacaccagcacgcacggcggcttctctgtactccgccgccacgctgatgagtgcctccctcccctggatatgacccagtcgccacccacacaggagctcgtggccaaggatctgcacagcatggactggcgcttccgtcacatctttcgcgggcaaccgaggaggcatctccttcagagtggttggagtgtgtttgtcagttccaaaaggcttgttgctggggatgctttcattttcctcagaggagagaatggtgaactccgtgttggtgttagacgagctatgaggcagctgtccaatgtgccttcttcagtcatatctagccaaagcatgcacctgggagtccttgctactgcatggcatgctatcaacacgaagagtatgttcaccgtctactacaaacctaggacgagcccttcagagttcattataccatatgatcagtatatggagtccgtcaaaaacaattactctgttgggatgaggttcaggatgaggtttgaaggagaagaggcaccagagcagaggtttactggtactataattggcagtgagaatctcgacccagtgtggcctgaatcaagttggagatccctgaaggtgcggtgggatgaaccatcaactattccgcggccagatagagtctctccttggaaaatagagcctgcttcatcacctcctgttaacccccttcctctttctagggttaaaagacctaggccaaatgctcctccagcatctcctgaatctcctattcttacgaaagaagctgctactaaggttgacactgatcctgctcaagcacaacgaagtcaaaacagtacggtcttgcaaggtcaagaacaaatgaccttgaggagcaaccttactgagagtaatgactctgatgtcactgctcataagccaatgatgtggtctccatccccaaatgctgcaaaagcccaccccttgacatttcagcagagaccccctatggataattggatgcagttgggaaggcgtgaaactgactttaaggatgtccgttctggctctcaatcttttggtgattccccaggcttctttatgcagaattttgatgaggctcctaaccgtcttacttctttcaagaaccagtttcaggatcaaggttctgctcggcacttctctgacccatactactatgtatctccacagccttccctaactgttgaatcaagcacacagatgcacacagacagtaaggagttacatttctggaatggccagagtactgtgtatggtaattcgagagaccgaccacagaatttcagattcgaacagaactcatcaagttggttaaatcagtcatttgcccgacctgaacagccaagagtgattagaccgcatgcatcaatagctccagttgagttggaaaaaacagaaggcagtgggtttaagatttttgggtttaaagttgatacaaccaatgctcctaacaatcacttgagctccccgatggctgcaacacatgagcctatgcttcaaactccatcatcattgaatcagttgcaacctgtacaaactgattgcattcctgaggtatcagtaagcacagctggaacggcgactgagaatgagaaaagcggtcagcaagctcaacagagttcaaaagatgttcaaagcaagactcaggttgcttcgacgaggagttgtacaaagcacatgaagttttttcttctcgtagttgacatgctgaagttctcgttttgtaaatttcttgcaaaatctcagttttatcccctttgtggtatggtccataagcaaggcgttgcacttggcagatctgtggatctttcaaagttcagtaactatgatgaactcaaagctgagctagacaagatgtttgaattcgatggtgaattggtgtcttcaaacaaaaactggcaaattgtttatactgataatgagggtgatatgatgcttgttggagacgacccatgggaagaattctgcagcattgtgcggaagatttatatttacaccaaggaggaggtccagaagatgaattcgaaatcaaatgccccaaggaaagatgactcttcagaaaatgagaaaggttcagtgaagcgagatgatacaagagatggagggagtactccagaaagctgcctctactag

SEQ ID NO: 55781 - DNA, 352 bp, Oryza sativa
  unsure (1)..(352): unsure at all n locations
  Clone ID: PAT_MRT4530_57755C.1
cgtcgtggaagtccgaatgctgtagacttgataaggttgcaagcatttgagccaattcggagtgtgaggtctcagcctggcaaaacttgagtctttcaatgtcttcaatgaattgtttcaagaccgaatatctgttgtccgccgagtttttgaacctaaaagccttcttcttccccattacactaatggtgcatctctagtatatatcatccaagggagaagtataacagggcncgacttttccaaggctgtcctgagacctacagcagcagttccaacaatcagggcaagcccaattgaccgaagtcaaagccaaagccataagttcaagggatgaacatcanaagattca

SEQ ID NO: 55782 - DNA, 804 bp, Oryza sativa
  Clone ID: PAT_MRT4530_57756C.1
gatgagtacaatgctatgctagtgaatcacacttgggagctcattccgaatacacccgacactaacttcgtcacaagtttaagatgatggctctcttgacagatataaggctcattgggttctatgtggcttcacacaacgtcttggcattgacttcgatgagacatttacgctgattgtcgaaccagcctccttcagctctcggcttgggcccattcacctccccgccgttaagaatgcattattgcatggtactattcaggagaatttattgctctcaaccggtcggatttgtggatcccaccatgcttgacatggtttgtcgtctgaacaagtccctctatggattgtaacaggccccccggtcatggtacagctagtttgccaacattctgctttctcttggcttcacagaggctaagtctaatgcgtctcaatttgcttatcatcgaggtttttctgtgatctatctattactatatgttgatgatattgtccccatatatagctttctttggtgacctcctacggatgattatcactgctcttcagtctgagttctctatgaaggatcttggcaaattccatcactttcttgggataagtgctcgtcctaccgacatccatctcagtccgtgttagtattgtcttgaggtcctagaacatgctggcatgactggttgctatagaatcgaattacaagaactaagccaaccagagaggggagggtgaatggttggtatacccaaaaaccgaaaacttttagcggaaataaaagttaccctcaatttcgatgagatcggt

SEQ ID NO: 55783 - DNA, 1437 bp, Oryza sativa
  unsure (1)..(1437): unsure at all n locations
  Clone ID: PAT_MRT4530_57757C.1
atggagaagggtgtaaacccagcgtttatcgaccgacgccaacacccaccgagagntggggggtttaggatgccgccgcccaaccctaccntgccgtacagggaggattgctggagcgagggcgaaacggaggcgctggtccgcgcgtggggaagccgctacgtcgagctcaaccgggggaacctgcggcagaagcagtggcaggaggtggccgacgccgtcaactcgcggcgcggggcggccgcgcgccgccgcccgccgcgcaccgacgtgcagtgcaagaaccgcgtcgacaccctcaagaagaagtacaaggcggagcgcgcccgcgtcatgccatccacctggtccttcttccccgagctcgaccgcctcgtcgggcccaccctctccgcctccgcctccaagaggccctcgccgtcgccgtcgccggtgccgccgcccccttacttcgccatgcccatccatccttccgcggtgaggaagcccccctcgccttcgccgtcgccctctccgccgcctcctatggcgttgccgctgcccagctaccgtcgcgggtctccgctccccgccgccgctcttatccagcaggaggccgcggctgcagccgctgccgcggtgtctgattcggaggactctgaaggccctggcgataacaacaatcacaacgcgcagcggtcaccgtcgcaatctgtgtcatcgcgctccggcaatagcaacaagcgcagccgtcaggaagttgatggtggtttcagggagctggcaagggcgatcgaggcatttgcggagatgtatgagcgtgtggagagtgcgaagcaaaagcaggcactggagattgagcggcagcgaatagacttcctgaagcagttggaggtcaagcgcatggagaactttgtggatgcacatgtcaagcttgccagggcaaagcgcatcaagaagcatgcagggactgcacccgatggtattggcgcagcggaattggtttcctctgtcgctgcgctgcctttcctctccacctccacctacatatgatgctgaggagatgttgaggtaaaaaccgacctagcatttttgttttcaattaatgttgttgtggataatagataattgttcagttataatattataaagctgtagttatatatatgtgctttggatttgctggcatatagtcctgtgggatggggatgctgtgaaatgatgtttttatttattgatgataagattggtatgcttcaggaaaggttgtttttgtgaatattatgtgtctgggccaggatttttaatccccccatataatccccgtatgcaattgaatttcaatagttagaagtttaacattgcatttgttcctggtagtgagctgctctaattgttagattttgtatcattaatccaatcatgaatgatagcatgacacatatttggtcttttggc

SEQ ID NO: 55784 - DNA, 1659 bp, Oryza sativa
  Clone ID: PAT_MRT4530_57758C.1
atggcagaggaaagagaaagcttcgagagtcagtgggctccttccgacgtaacggaggagaacctaaaagagatggtggcgcatggtgttcttccagcgaaggaaatcatcggctggcgtccggcatgtgacgaagcattcccgaccccggatacacacgagcttaaagagcaaggtcttcaaggggaacaaataactcggcatttcattaagagccagctggcacctattaaggagagatcccgcactgccttcgaattcgatggcaagaatgaccccaaccgtgaagatccagagtctcttgagttcaagatcatgaaggagaggatgtacaaaattttctcaaccggtattgtggttagctattcgtaccttttgccagtggtgccatataatgccttcaaccctcctccaccggaattttctctaatgaaatctgatcctccaatcgctcaacgccgctctccccgccaacaagctggccaggccagtggcggaccaaaaatccagactgttgctcagccaagcagcccaaagccaactaaccagccaggctctcggaaaaggaagttagttctgagcgatgacgaaggtgacaacgttgggaaagctggcagcaaagagtcgactgacaaggagactggttctacaactgccaaggaaaccgagccgactgaagaaaaccacccgactggcagccagtcggcgaccgacaatgtagaaactgggaaagtgcccccgactggaaatcagtcagcagaagttgagaccgatgctcaccaagagcgtccgattggagaccagccgggtgttgaaccaaataaagacatcccggagacagagagacaaacaagcagccctccttttaataacaccaatgttggttcagagaccagtacttttgacaaagtacaagggccagctcgccctcctccgaagagaattcatctcaggaatgaagcaaaaactgcaacccttgagaaactggtcggtcatcttggaaccctggaggcaacccgagcccagctccatgaaaccagagagctagccaggaagactgaacacgatctcagggatcgaatcgctgagcttagtggatcatccaaagctgccaagatcactgagctagaaaagcgaatcaaagctctggaaaaagataagggtgaactaaccaagaagagggactcggctctgaaggatgttgaagatcgcaagatcaaatctcaagctcaattcgacgttctagtcaacaagatcaagaaacttgagggagctagggatgaggtcgccaatgctgctacaccactcatccaagccatgttttttaacaacaacggtccgagttcattcaacgctgttgaaatctttgacaagctgataactgctccgaatgtgtgtttcaaaaatatcaaagaagctggatgtatgggagcgagcatggtattggcgatgaccaagtctttgtacccgaagatcgatgttgacactgtcgacggctttgcggacgggacaagcgaagaagatgtccttgatcttattaatgatgctcagaaagccgcggataagattgctgtagatgtcatagaaatattccaagataccaatcttggtccgacaaaggctgatgtatctgatgatgaaagaactgagtctaattga

SEQ ID NO: 55785 - DNA, 1690 bp, Oryza sativa
  Clone ID: PAT_MRT4530_57759C.1
ttgcgtgtatatgaatttgatcgaaatggtgtttcattcgttttcaccattacattattttttttctgcgtaaagagcaaaagtaaatgtttatatatgactttgcgagtcctctgatttactccacatagtagcagattacaagaaacaaaggctccacgtaatatatagctggaattccttttccaaatgtaaaagtacagattttttactccattgcctctctttctcattatccaacagccggcgttgtatatacatcgaagtccttcatctgccctcaatggcatcatggcatgtgccacaggccaatgtcagccattggatcatcatctcctcctcaattcctccatgccaagacagtgaatgtgccagtgttcatccaataagcagattggctcagaggattagtgacagagatcaggtaatgctacaatgtgttcctctgccctacaaatttccgtgcaacaccgaagatgagagccttggtcaacagcccttgatcaagagtgcaagccagagcaacagctccaccgagcacaaggaaccttgctactcggtttttcgcgggtttctcttctgcttccacaatatctgactgatcgtcgttggattccaatccacgaacaaaattgtcaccgaccttggtattgatatgcgccatcaaggcactctgagacaatggctccccagcagctctcgctttctgataggcccgaagtccaggttcgattctctttacacacccccacattccctgccgaatgccaatctttgcaatctcatagggaatacccatgtcctcatggtggaacaggagaacctcacaagccgtcaatccactgttccctcttcttgattccactggacggatgcaccagcttgaatagtatacatctactctacgaggtttgttacgacgtgggatggatgagcatggcacaccctttgtaacacaatagtatgcacctcccagtttccatatccgacgctttgtaacacaatagtatgcacctcccagtttccatatccgacgagcaatgatgtactccctgtcactacaaaagaaggggaatatcatgtcaagataatcaaccttgcggacccaatgcactttcatcgtgcctgttgtctgacactcttccaaagtcttatgatagataagcatatcatcccacttgttggacatccggaattgatcgtcgccgaagaagtccctcacctcctccggatttgcattctcaaatatagtactactctggtattgtggaggtccagtctgtggatccctcctccatgcctggtaggtcatggcgggcagcgccttctccatcatcttgatccatgccgggccgccatccctgccctccactagcctccagaggttcatcaggtcatccttccccaccgccagctgctcgttcgccatctccgacgacccaagcagggaggagtcgtcctcctgctgcggcggcggcgccgggccggcggcgccgacgtactgcgcgagcggggcgcggatgcgggcggggagctgggtcctccagaactccagcgtggcgaacgtcagcggcgcggggtggctgtcggcggtggcgactaggccggcggcccagcgcgggcgccacgcccagccgagcaggaggccgaggagcgcggcggcccagagcgggccggccagcacggccat

SEQ ID NO: 55786 - DNA, 1720 bp, Oryza sativa
  Clone ID: PAT_MRT4530_5775C.1
ggagaccaacaaatcgaacactgtaccgtagtcaattagactgcagggattaacccttgtgaagtacagtattttcagtcaccctagcctctagtgagcagaaaaggattcggattttacagtcccctaccgaaatagttacccttatttcacaaacctacccttaccatgtcacaattttacagtacaatctcttctactcaattttagtttacccctttcaccacaggatcacataattaatgattttttttgaggtgaaagtgaaaaaaagagagaaatactgtagttcgagtggaacaccggagaccggacgtcagaactccggcaagaactccgtcaactcctcctcctccggctccggcgaaggctcgtgaagcttgttgaaatactctaccacgctgaacccctcgcacgcggcaatgtcgtcggccggcggcgggatgtacggcggccgggagagctcgccgagcaagtcccacgcgactccggcgaagaacgggtgggcacggacctcgtcggcgccgccggcgaagccgagcctcttcgtgggctccttgtcgagcagcctcgcgatgaggtcggtgagctccggccaccgccgccgcgagtcggcggagaactccggctcccggaggagcacgttgcggaacgtctccttccggctccgcccccggaacggcgtcctcccgtacgccatctcgtagacgagcacgccgagcgcccaccagtcgacggcgaactcgtgcccctcgccccgcaccacctccggcgccacgtactcctccgtgcccacgaacgagaatgacctctcgcacgcggcggcggcgccgccgctcgcgctcgcggccgagcagaagctcgcctgcttcttgccgcggcttaccggcgacaccctcgccgacttcgccttcttgaggtggtcggcggcgccgccgccgccgtcgcttctcttgaggaaccaggccaggttgtgggtgtactgcccgggcgacgacgtcgatgtcgtcgcggccaccgacgactcacttctcgcgaagattcgcctcagctggctccggccatgtccctgcagctgcggcggcggcgacgacgtggccgagcacgacgacgacgaggtggaggtggacgcggagggggagacgggcgggagcagccgggagaggtcgaagtcggtcagcgtgacgtggccgtcggcgcggaggaggacgttctcgggcttgaggtcgcggtacgcaatcccggcggcgtggagctcggcgagcgcggagacgagctcggcgacgtagaacctgatggccgcgggggagaagacgcggtcgggctgcgcgtggcggagctcgttgaggtccccgccatggcagtacggcacggcccacgccacgaggtcgcccgtctcggcgcgcccgagcagcgacgggaggtgcgggtgcgcgagcccggacagcaccgacacctcccacctcgcccgccgcgccgcgtccccctgcctcgccgccgacgcgacgacggacctcttgtcgaagaccttgagcgcgtagtagcacgccccgccgccggcggcgtcgtccgccgccgcggcgacgaggaacacggtgcccatggcgccgcggccgagcacgcggacggcgcgcacggcgtcgaggtcaatgtccgccatgcgcggctgctgctgctgctgcatgggcgcgcgcgcgcgcgctctgtgtgtgtgcttggg

SEQ ID NO: 55787 - DNA, 333 bp, Oryza sativa
  Clone ID: PAT_MRT4530_57760C.1
atggccgagaggcattgtccttttgtgtggaatatgctaaagagcatgtcaacctctgttccagctacgatcgagcgttttataatagacttctccgagctcaatggagctggacggggcgccggcaagacggagcggcaaggcgccgacgacgacgaccagatccagcgccaggatgcacggatccggtacccctatggccggatctgctgcttccgggcggcggcgacccgggtcggcaagtcgcggcgtcggcggcgtggaggtggcggtctgcggcggaggtggatggcgacggtggcggcggaggctggtgagggcgacgacggctga

SEQ ID NO: 55788 - DNA, 395 bp, Oryza sativa
  Clone ID: PAT_MRT4530_57761C.1
gagagggaccacccaaaacatcaggaggagatttgtcgatctgagccttcgagctaagcccagggatgagagacgggcgcccggctagggaggctacacgctgtcttgacagagatggctgatgccaggatgtctgctagaactggaacaagagctcgtgtgtgcacacttatcaaaggattgcagccgaatgaaccacgggttatttttaagtaagaggctgatgttaaaccaaagttgttagcgggtgctttttgaccagtctgatttatgagccgtccaacctttgttgtactgtattgacaattgaactaaaaatttttggacctaccctgcacagtgtgtagatgaggagtgtagattcataatgtattatttttattatagtttttttc

SEQ ID NO: 55789 - DNA, 150 bp, Oryza sativa
  Clone ID: PAT_MRT4530_57762C.1
atgggcatgggtgttgccgccttggcgcggtgcgaggtggagacgtggaggcagcgggagcgtttcgggctgtcgaacagcccccgttcgataggctgggctgtcgaactgccgcagttcgacagggtcgcgttctccatttatttgtaa

SEQ ID NO: 55790 - DNA, 986 bp, Oryza sativa
  unsure (1)..(986): unsure at all n locations
  Clone ID: PAT_MRT4530_57763C.1
cttccttcacgagagggaaaaatcgtcggggaagagcagcgagagatggcggcgagggcacgggcacattcccggcggcggcctcgatgcgcgacggcagcagcgcggcggcctntgatgcgcgatggcagcagctgtgggctcgaggcggcaggggcctcgatgatcggcggcagcggcgagctcgatgcgcggcggcgcggggggcggcaacggcggcttctcctcttcctcctttctgctgtgaatggtgttgacggccggggacggcacggcctgcggcggccctccttttcctcctttctgctatgaattttgttgacggaaccagcaacgaatggctgtctcgttgtcctttctgctgtgaattaagttgcaggatttgctgaaccaaatgtaaatggctaaatggttgattaccagcttactcttgaattgcagagtttcgtattgatgaataaaaaaacaaggttcagaaattggatctgctgtaaataatatcgattcatgagaaaatctcgtgtactttgagttacgcattgtttttttcctcctgaatccttcctctattcatattaaagttacaaactgaaattgggaatctcctcctggtatttctctgttcagattaaagcagcaaactcaaattgggtgcctccgagcaaggcaggctcgatgcacgatggcagcggcacggcggcctcgatgcgcgacggcatcagcaggctcgatgcacgacggcggcaacagcctcgatgcgtgacggcagcgtggcggcctcgatgcgcgacggtggcggcggcgcggcggcctcgatgcacgacggcggcaacaacctcgatgcgagacggcggcgcgatggcctcgatgggcgacggcggcagatggaagagaggagacctcatttttgttagcccgatcataccccttcctcctcctccaatgatccccctctccctcctcgccgtcgtcctcgtcttcggcat

SEQ ID NO: 55791 - DNA, 433 bp, Oryza sativa
  Clone ID: PAT_MRT4530_57764C.1
gtccttaccaacggctttataaaatgttttttaaaaaaatttaaactttaatgacttgctttgttgaaccctggttacaaaaacccattaaaaaggattatcacaagaagccccccccaaggcaaccccataaagatccccaaaaatgacccccggtagcccccccggggggcttccggtgaactaaaaaaaaggctaaaaaaaaaaacgaggaaaaacacaaacaagggcccataggactttaggaagggctacaagcgtaaaagcccccccccagctccaaacccccctgggggcacacaaaaaggttggtcctatttaaggccctgggatcaaccccccgggggatgcatgacataaacggtgaattccaactccggaacccaccccaaaaaaaaatcggacatgggggggggcggggactaatttctcc

SEQ ID NO: 55792 - DNA, 831 bp, Oryza sativa
  Clone ID: PAT_MRT4530_57765C.1
atgcctacagatgatgccacggcgacgggcaacggcgacggcgccgctccccgtccggcagccgccgagccagcggcgccgctgtcgtccgtgtggacgcggcgggacgaaaagctgctggagatgctgctctggcgctggcagctggacccgcactgggaccggctcgccgcggagctcggcggcaagacggcgacgcaggtgttcgaccggtacgtgtgcttggccgacgagctgaggctcgtcatggcggcgccggcggtggacacgccgcccgcgtgggacgtgcaggacgaacgggaggccgctgtggcgccactacccgggttggaggccgacgcggcggccggcgccggagagtcagcggaggtgacggccattggcatcgctgccgccgcttctccgaatgcagctgctacgagcgctccgaccatcggcggcggggtggtattgaaatctagagagctgaaaaatccgcggaagacgaggatggccggcggcgggccaaggaagaaggcggagatgtggaccagggaagagcatagccaattcttgcacgggattagtacgtacgggaaggggaattggaaggcgctggcgagcgagttcgtgaagaccaagagctcgacccagatcgcgagccactaccagaagttctgcatcagggaagagaagaggaggctgagcaagtgcaagcgggcgagcatccacgacatcgtcagcccgacgacgacgacgtccgcgcctgaatctgccggcgccggcccgagtgcaccaccgtgcgcgctgatcgaaagcggtgcgctgattgcaggcgacgatgacgcatga

SEQ ID NO: 55793 - DNA, 198 bp, Oryza sativa
  Clone ID: PAT_MRT4530_57766C.1
gacttaggcgtgtaaaagttcaacccgccgatgagatgctgtcttgctccgagctgccacacgtatgctgatgcccagatcacgagagtaactaatgtgacgatcttactgtatgataatgtgaagaaagattcgccctacacccttcccttttttccataaaatacaatacatctagacttatctccaaaaaaaaaa

SEQ ID NO: 55794 - DNA, 627 bp, Oryza sativa
  Clone ID: PAT_MRT4530_57767C.1
atgggtcagcggctcgggagagagaggaaggggcgccggcacgtgggccccactggcagagacacaaggcgggagggggtgcggctaacaagcaggccccacgggcgcggctccaagggggggcgagacgccggcctggcccggcatcaagccggccggcctgccatggcaagggcggcggcgcgcgcgtcgctggcgacggcaaccggcggcggaagacggcggcgcgaaggcggcggcgcatggccgaagcggcggctcgacccggctcggctaggagggagagggaggggaaaagaggaggagggatgcctcaccgtgagttggccggtgcggggaaggacgacggcgaacggcgatggcgacgaccggggaacgacggtgaacggcgatgacctccgagacaccctaagagagggaaattgagagattagagggagagagggagtccacggcgagcggaaaccgtggccgatggcggcggttatggagagactcactggcgcacgaccgaagcggcctccgatggcggaactcggcggaggaggggtggacgaggtggagctcggcctcgcgaacccgacggcggcgacggcgcggtgcggtggcgaccctaacggcggctag

SEQ ID NO: 55795 - DNA, 214 bp, Oryza sativa
  unsure (1)..(214): unsure at all n locations
  Clone ID: PAT_MRT4530_57768C.1
aagccagaaatggttttattttgggatcgagggagtttttgtttccgatctaataaagatgagaaatccgttaatcagaataccaccacggttaagtccctaaaccattagttgggaaacgaataaaatcattatttgcaaaacatcatcttcttcttcatctttctagngtacacaacaccaactcgatcatcatctcgtcgcactaaaccca

SEQ ID NO: 55796 - DNA, 2813 bp, Oryza sativa
  Clone ID: PAT_MRT4530_57769C.1
atgtcggactcggagctgtcgcagagcacggtggtgttcgggctccacctgtgggagctcgtcggcatcggcgtcggcgcggcgttcgtgctcctcctcgtcctcctctcgctgctctgcctcgtcgcctcacgccgccgccgccggcggcgaggggtcgccgtggcgacccccgtgctccacctcgccaccgccgtcgcgccgcccaagcaccccggcaagccgcccaaggacatccaggaggtgccctcccgcgccgccgccgccgccgcggcgcccaaggcgcagccggcgcaggtaatccaggcgccgccgccgcagccgccgccgtcggaatccatccagatcgagacgggcaaggagcaccgcatcacgttccgggagcagcagcatcagccgccgcagccgccgccctaccaccagcggagcgggggcccctcgtcgcgcggcggcagcggggagagccgcggcggcggcggtggcggcggcggcggcggcgcggagcccggcgtgcccgaggtgtcccacctcgggtggggccactggtacacgctcaaggagctggaggacgcgacggccatgttcgccgacgagaaggtgatcggcgagggcggctacggcatcgtgtaccacggcgtgctcgaggacggcacgcaggtcgccgtcaagaacctgctcaacaacagggggcaggcagagagggagttcaaggttgaggtggaagcgattgggcgggtgcggcacaagaacctggttcggctgctgggatactgcgccgagggtaaccaaaggatgcttgtgtacgagtatgtcaataatggaaacttagagcaatggctccatggtgatgttggtcccgtaagccctctcacatgggatatgagaatgaagattatactaggaacagcaaaaggcttaatgtatctgcatgagggacttgagccaaaggtggttcatcgtgatgtcaagtcgagcaacatcctccttgacaagacctggaatgctaagctttctgattttgggctagcaaagcttttgggctcagagaggagttatgtaacaaccagagttatggggacatttgggtacgtagctccagagtatgctggtactggcatgttaaatgaaactagtgatgtctatagttttggaattcttatcatggaaataatatctggtcgggtaccagtggattacaacagaccaccaggggaggttaatcttgttgaatggctgaagacaatggtgagcaaccgaaactctgaaggggttttggatccaaagatgactgagaagcctacttctagggcactgaagaaggctttgttagtagctctgcgatgtgtagacccagaagcccgtaagaggccaaagattgggcatgtcattcacatgcttgaagttgatgattttccctacagagatgaacgtcgcggtggcaaagctccaggtcaagtgaaatcgggagaaataccgccagttgaagctggtgatagcagcgggaacaatacgccaaaagaaacaccaaaagagactccagagtggcatccagctccaggcaagctcaccagcagcaagcaagaacccagacagacatgcagtgcctactactcctatgaaggaggccagcggtgggcggagcggcggcggtcgagcacagcgacgggtagagcagcggtgggcaagcgcgtcagcggagcggcggggggctacgggcgtgcacgacggctagtagagcagcggggggcgagcgcggcggcggtgaactacatctccaagagggggggtggaggaggccaccggtgccgtgtggtgcacggtcaccccgaccgcaacccgtccttgtcatggtcctccccttcatcgacaagcctcctgaagtcgaggtccatctcgaggagctcccccatcatcccgaagaagaaccgcaatgagatctgcaagtacctcttccaagagggagtgctgtatgccaagaaggactacaacctggcgaagcacccgcagatcgatgtgccgaacctgcaggtgatcaagctcatgcagagcttcaagtccaaggagtacgtcagggagaccttctcctggcagtactactactggtacctcaccaacgatggcattgagcacctgcgcaactaccttaacctgccatctgagattgtgcctgccacactcaagaagtctgccaggccacctggccgcccatttggttctggcccacctggcgaccgcccaaggggcccgcctcgctttgaaggggacaggccaaggtttggtgacagagatgggtaccgtggtggtcctcgtggtgctcctggtgactttggtggtgagaagggtggagctcctgctgagttccagccatcctttaggagctctggtggcagacctggctttggccgtggtggtggcggaggctttggcgctggcccgacctcttcctcgtccatggagtgaaaggagctcaggattcttgtcgcaggagacattttagtattcaagttttgcagtggtgtttgcagtacagatcaatagcgtaagcacctatgttgaaaccttaagagcatgcaatgcgtaatagttcctgggtgttgatggcttgagagctttatcccaaaccctctgtagaagccaatgccaatggaaatatcgttcagctactcagcaatcaagtttttcctccccaatttttatgtactaagtgataattcttgtcaaattcattgatttttgaggtaaaagttgatgagcggtgcttagataaaaccttccatgtagcaatatatctgcttttttccattgtgaggcat

SEQ ID NO: 55797 - DNA, 983 bp, Oryza sativa
  Clone ID: PAT_MRT4530_5776C.1
ctgcagcttggaagaagcgcgcggggcatttcttgcgtgccgatcacctacgacgtgaggctccggacgactctggggaaggtgtccatcatgaacgatggctccatcgccggcggcttcgagatcggtcaggggctatggacaaaggtgaagcagatgaccgcgttcgcgctgggccagttgtgcgatgatctcgacaaggtccatgtcatcctcatccaggctgacacactgagcatgatccatcaaggagaaggctggtaccctaccatggaaatccttgattgcccaggtgagtattaagccttgtaaatgtcctttttaaaaaaaagaaatccaattcctgtgacatcttcgtggctataatttccttctttctattttcaggcaagcatggcgagtgtgaagctgacggagcatacgtactggacccctgacccgacgttccctagctacttgaactatggacctgcggttagtgaggtggaagtggatatgctgacaggagcaaccaccatcctaaggagcgacctcatgtatgactgtgggcagagcttcaatcctgccgtggacttgggccaggtcaaaggcgcgttcgtgcaagggatcggcttcttcacgaatgatgagtacgcgaccaactccgatgggctggtcatccacgacggcacgtggcgtggacaccatcctcaagcagttcaacgtcgagctcatcaacagcgcccgcgatcacaagcgcgtcctatcttccaaagcgtccggtgagccgccgccgctgctggcgtcgtcggtgcactgcgcgatgagggaggcgatcagggcggcccggaaggagttcgccggtgccggcggctcggcgctgactttccagatggacgtatctctgcggcctcgacgttgtcgagtggtacccagggtggccaatttgatcgggtctcaccgaaatgccgaaatttcgaaaattttggtccgatattttaaac

SEQ ID NO: 55798 - DNA, 373 bp, Oryza sativa
  Clone ID: PAT_MRT4530_57770C.1
aagaacgtggagaagaccagcgttcgccttacgaggatggcagaatgactccatttgccccctttgtcgtaggaaccaggaaacagccctccacctactagggggatgcagatacatgaaaagaatctggacggcactagcggaatgaacagcatgcggccagcttaggacaacctagtggcaaaacgccttgacgctgcttgagtggtgggaggccactgtaaataccaaagatgcgtccaagaaagcgtggcggacccttatgttgctagtggtctgggagatatggaatggaaggaatcgtagtaccttccaacaaaaggagctcccgtcaactagccttctagccaagatcaagggtgaataaaaaaaa

SEQ ID NO: 55799 - DNA, 264 bp, Oryza sativa
  Clone ID: PAT_MRT4530_57771C.1
atggtggaaatggccaacgagccacctagcaggcggtggggtgagcagcatcagcggagaggtaaaggaagagcggcgcaggcgggagggggagcggcggagaggagggagagctgctgcggcggtcagagaaggggagttatgctggagatagtggagaaggggagctgccccgggctggatccggccgccccctcgtcgcttcgcccaatgccatcgccgctccgcccagcgtcgtcgccactcggccacctctccacctag

SEQ ID NO: 55800 - DNA, 1618 bp, Oryza sativa
  Clone ID: PAT_MRT4530_57772C.1
tcacttgggagtagtagatgccaatgaaagaggtgcagatttcaacgagtagtgcagtaaggcaagcagcggcttgcggcgcgcggctccggcaggtgtcggcgtcgactgccgcgcttgcggctgcttggcgacggctacagcaggctgcatcaggctgcggagggtgtcggcgttgagtgcggtgggctgcggcgtcggctgcttcaggcggtgtggtgggtggctttccttcctgaagccgtcctcatcgtcatcatctcgtcccccctcttcccggcgcggcggttgctctccagccatggccgccgccgccgccgccgccgtcgcctgcggcatgtctacgtccttcctcatccgcctctcgccttcgccgccggcgtcttcccacgtgcctctccctcggtctccggcttcgtcggcgcgcccgcggcgagcgtcttccgtctccctctccaccgcgcctaggccgagggcacgcgccgccggctccgactctccctccaactttggaggtcaaacatcactgatgccaccattcagccttatgcttgatgaaggctctagatctaaaaagccatatagatggcaaagggtgttgcttaaagtaagtggggaggctcttgctggagatcacacagaaaatattgatccaaagatcacgatggcaattgcaagagaggttgcttctgtcaccagactaggtgtagaggttgctattgttgttggtggcggcaatatcttccgcggggcctcttgggctggatgtagtggactcgaccgctcatcagcagattacattggcatgttggctactgtgatgaatgccatatttcttcaagcaacaatggagagcattggaataccaacccgtgtccaaactgcatttcgtatgtcagaagttgcagaaccatacatacgccgaagagctgtcaggcatttagagaaaggaagagttgttatatttgctgctggtacagggaacccattctttacaactgatacagctgctgctcttcgttgtgcagaaatcaatgcagaggtagtacttaaggcaacaaatgttgacggtgtgtacgacgcagaccccaagcgtaacccaaatgcccgccttcttgaggctgtgagctaccatgaggtgcaaacaagagacctctcagtaatggacatgactgccattacgctatgccaagaaaacaacattcctgttgtcgtgtttaatttgcaaaaacctggaaatattgcgaaagctattgttggtgagaaggttggcacgtttataggctgcacaaaagatcaggaccagattgtggggaatgcactggatcaagaaagaagattggtgaacgagttatgatttcactggagctctctgtcgctagctgtgtagctgcattgcctattgcttggtaacatgtggatctctagagtttttaggctagaatagcttatccaaatcctggttccttgtacaacctttgagcaaaaataaaaaaaccaatggtaacagagattttccagctgatatagctgctatgttgtcatactatgtacaatggaatctagagcaatctgataaatcacatttatatcttaaaaaaaaaaaaaaaaaaaaaaa

SEQ ID NO: 55801 - DNA, 253 bp, Oryza sativa
  Clone ID: PAT_MRT4530_57773C.1
agacggccagcatgagcgccagtaccggtgtgttatagcttgacgtctacttcacgacgcccaacgccacaactatagacgcctccgtgccggtgtcgacgctggacggtggtggcataaccgggtctgcgtcctcggttaattggttcgcggcggggcgacaggtggggtggttgattgcgtgcgttatggcgttggtggtggagttggttgggcatggtttttggtgggtcgtgtagatgatgttcacctg

SEQ ID NO: 55802 - DNA, 1348 bp, Oryza sativa
  Clone ID: PAT_MRT4530_57774C.1
cccacgcgtccgtgaaaatccagcaactgatgagaataatctggaacagaagcgtgtgcctgtgtcaattgatgtcccagatccggacttctatgattttgataaagatcgcacagaaagaacttttgacaatgatcaggtgtgggctacatatgacagcgaagatggcatgcctcgtctatatgcgatggtgcagaaagttatttcaaggaagcctttcaggatccggatgagttttcttaattccaagtccaatattgaactgtcaccaattaactgggttgcctcgggtttctcaaagacgtgtggtgatttcagggttggaagataccagatttttgaaacagttaacatcttctcccacagagttagctggagcaaaggcccccggggaattatcaagattgttcccaagaaaggtgatacctgggctttgtaccgaaactggtcttctgattggaatgagcttacacctgatgatgtgatatacaagtatgagatagtagaagtgattgatgatttcactgatgagcaaggtgtgactgtcattccattgctgaaagttgccggtttcaaagcggtcttccataggcgcacagactctgatgtggttagaaggataccgaaggaagagcttttccgcttctcacatagggttccttctcgactgctcactggggaagaaggcaataatgctccaaaaggttgccatgaattagaccctgctgctactccagttgaccttcttaaggttatcactgaggtcaaggaagttgccacgacagaaatttctgaatagtacccatcaacctggatccctaaaaatgccatgccaaaaatgcactaactgggtgatgatcagcattatttggctcttagctctatcatgtgatctaacttctagctgatgacttggactatgttaccagggtaaacagctaatgttgaaaactcctgaccattaattttttaaggcttttctatgtttaattttattttaatacggtatcgcatagaggaaaatataaccagggtgccacttatgatgatgaggccagttgccaaaggcatggcaatcctcattgcttgctaagaggtgtcactcttccttactttgtaaggtacggtagttctgcatacgagcttactagacagctgctgggcttctcactgtatccagtctgtaatctgtactcatttacttaatatgttgtatttccttaatccatagtattcttagctataccttttcaaattcagtgattgttgaacactggggagtgattctgaatgttaatcccatatgtagttgtggacactggtaccctaaaaaaaaaaaaaaaaaaaa

SEQ ID NO: 55803 - DNA, 896 bp, Oryza sativa
  Clone ID: PAT_MRT4530_57775C.1
gcgtacgtagccgatgctgacgcccgagactctgaccgaatcgcagccggacctcggcacgatcgagacgacgatcgtcttgtggccgtcggcgccgatatcttcgagcaagtcggagatgccgaacctcgccaccgtctttctcggagaacgcttcctctcctcgcggtggaccccgtgtggcgtcagcgcgacgcgacgtcggcgttctcgggcgcgttcacgaacacgtcgaacttaacgtacgcggagtggtcggggacctcgatcccctcgatgacaggcgcctcctcctcggcgtccttctccttgcggctcctcgacgtcttgggcctcgtcaaggccacccgcacggtcttgtccagggtccccggcagggcgccggcgggtcccgtggacggcttggcgttcagccacggcagggggccaacgtcctggtacgtgtaccgcagcgcggcctcgtcgagggagtcgcggacgcgaacgcggactaggcgggcctcctcgtcgtagaacaggaaggtcgcgtcgagccagtcggggtcggtgaagtcggtgtcgcgggggaagaggccgtggcgaatgtaccacatgcggtcgacgttgccgtggtgcgcgaagaacaccgggtcgcgcgccgccgagtagaacatgcccatgtcctcgccgttcggctgcctcgggtcgccggtccagttgtggacggtgttgtgcagcacgaactcgacggtgcccgcccccggtttcggctggtcgccggcgctgtacggatgtcccatgaacagctctttcttcctagcccccgaaatcatctggcggtacatgatcttgaggttctgatcgatcagctgatcttccgggatggttgggtcagcgccgagcagctcgaggccatc

SEQ ID NO: 55804 - DNA, 435 bp, Oryza sativa
  Clone ID: PAT_MRT4530_57776C.1
atgaccattttgttcagcgccatatcaattggcgctgcatgccgtaccaccgcggataggaggctgagttggtgtgccaacgtgcattcaacgccgtgctatttggtgctgagatgcaaatggatacaaacacggatagagtcagatcttaggaagcacatggacgtcttcgatcagttggtcaaggatctaaactatttagatgtgaaactggacgataaagacaaagtcataattcttctgagctcacttccaacgcctcatgagcatgtggtgactaccatgacatatggcaaggtaaagcatgacaatgatacggggacgtcgaagggcaaggagaagagggtgatgcgcccacggctcaagacgacgggcgcaggacgagagagtcccaaccggcggcggccgtggtcgtcgtgcgagacctcctactag

SEQ ID NO: 55805 - DNA, 413 bp, Oryza sativa
  Clone ID: PAT_MRT4530_57777C.1
tttggtgtttttttttttttttgggttttttttttttttttttttttttttataaaagccacaatgacttccaacgatccaaacgtatttcacaaacagaggcaacggaggcagcccggggaaaagcaggaaacgccccgtgcacagatggggtccatgcaaggtccttaaggcccctccaagccccccgtgaaaggccccaaaattactgcaggaatcacccaaagccccccgatacccccgctataccgagggccccctgtggacccaaggggaacaagccctccagaaaaagaggcccacctggaacccgcccggcctagcaggccgtacaaaacctaccctggctcaccggaaacaaagcaaagggggcaacgaatgtttgccccgtctgaccagagcgactaccccaa

SEQ ID NO: 55806 - DNA, 474 bp, Oryza sativa
  Clone ID: PAT_MRT4530_57778C.1
tcgccagaatggcgttggacgatcccccacgggacggatggcatcctatccatcggccgccattcgtacctttttgtgctatgggatgacggaccgggacctgaaggtgccgcagcagatcgacgacagatgtagaaaagccaccgttgcagaaacactctatcttaccctgcactcagacaacacccaagtacggaatccatttaacaggctgtccctcaacgaccccacaccatcacaacaccaggggcaacacgttaccctataccagtaacatagggacacatgacactgctagggcccctctgcccacaggggcaaaggagagtttttaccctaacgcttgacatggtcacaaccataggggaacgcggacctaaccacatgtggcccgacctgaaacccgcgtaaccgcgcgccattcgtttttagcaggctgcaactgctctgggaactctgcggctgaacccagat

SEQ ID NO: 55807 - DNA, 1730 bp, Oryza sativa
  Clone ID: PAT_MRT4530_57779C.1
cagcaagcatatcaaagccatcagcacaactgcggaaacactgagacctgctatcactcgttcaacttggttaagcacagtttgacatccatagtttgttccatctggccttttacctaccccgcatttgcacaaatagtttcctggtatgttctggcacatcccatgtctgcagggatatagctctttatacttgggatcctccttgcgcaacttgctctcttcgttgccttgacagcctttgggaagataaggattcccttcatatccttcagagcatttgcacaggtacccttggctattacttgcttgcacacacttgctgtttgaactgacacaggcatagtctttgggcaccttcttcccctctgggcaggagccattcctgatggcccagtcatggatgacaggaacacctctgttggccctcccattgacaaacctgaggtgcccaacgaggtcttgctgcctgaagctgtaccatccggcctccacaagcatggcgtagaagcatgggttgaattcccacaccgcgctctggttcatcaccaagatcgctgcgaagtccttcaggtctgggatgatggtggtctcgcagcagcccatcccagtgcagggagcaccgttggatgtgctgttgatgctctggcagtaggagtagcagccagccacatatagattagagttgctgtgcatgtagccaccaatgatgccgagggtatggcatccgatggccatgaagcggttgcgggtggtggaagggacgaacggcgtaccctccagggtgaaccctgtggtatggttctctggtatggtggtgtttgatgagaaacagatgtaactgactggaccgtaaacgcgcacctcgccacgctccagggagatgtcgatgacctctgtttctgataggaggtctctaaccataggccgtggtggctggaaggtgtcgttgcaggtgatggtgaagtagctgctcaggctggtcgcagaacaaccagcgccgatgccaaatgggtaagggatggatacatttccgcacttgccagggcagcctggcaatgaaattgcaggttcagaggtggtggttgatatcgccattgcatggaagacgatgagcatgaggagaacggatgcttcttgcatggttgcggagttggaggtatggtgatcacttgctagttgctgtggcactatttttgaacctacttgttcgtacttctgcatcttccatgtctctttattatgtgattatatactagagtactagactgggacaggtgatactagctcatgctactgcaacttccatgtatctctattatgtgattaactatactagacttggacatgtaataacgttcatgcttatgtaagttccacgttgctttagttaaggggaaaacgatgaaagcttcagctaattaatcagctcctaaattttgggcccatataaagccccccccccctatggtttccgaagttttgaaattttaaggttccgttgtttttccaatgtatccccccttatttgtattgggtcaaaaaaaaaatttcttttccccaaatagtcattgtccgactccaattaaccccgaggcctgaatatccccgccaattagggtatgaactctgaaattgggtatgagttttgagggggatatcttcctctgaattttttcccccccttgtaatttatagattatacttttaacagtgatcaggagccccgt

SEQ ID NO: 55808 - DNA, 635 bp, Oryza sativa
  unsure (1)..(635): unsure at all n locations
  Clone ID: PAT_MRT4530_5777C.1
ccggccgggaaggccctgctgcacgctgctgctactcctccctccacctctctatactccctgcaaaaaactgcgagccctcgcctcgcagtcgcaggcaaaagcgagaaagttggcaacctgccactgccaccagcaagagcaacgaggacggaggagaggagagaaggagcagcgctactatcgctacctcgaccaaacgacacgcaacaaagcagcaaacaacgatcgatatacacacacacacgtcgtggtacaagttcatgcattgcatggctatctcatcatgctgtggatctcgtctgccaaagtgacagggagagcagtaatgctggttgctggatggatggattgggatatgggggtggtcagtggtggtgcagtacagtgtagcgctgcaataattgcagagatttgcagttgcttgcacagcatgcagcatcctaaaaagtgttgtgccatgtacggacgatcctaccgaaagggctgtgtggggagaccggctaggtgcacttatactgcgttgtacacagtacactcattagggttgttaatgctaaacatcanagctatgcttaataagttttgcataacgtactattaagcatatgcttaataaataaatggggttcatc

SEQ ID NO: 55809 - DNA, 337 bp, Oryza sativa
  unsure (1)..(337): unsure at all n locations
  Clone ID: PAT_MRT4530_57780C.1
cgcgtcaatacgactncactcatagggcgaattgggtaccgggccccccctcgaggtcgacccacgcgtccgcccacgcgtccgngaggatnntggtttcctgaataaactacaccacctaatgatgtagtcgtagaattgtgaattaagcaacatcagtgacagaagtgcatggtgtgaattttaagcaatttaatgatggaaacttctcctacttggcagtatgttatggtgacataaaacaactgtttaacccatttttatcccctggtctgaatgaactttctttcagtatgcataatcgcactacctgctcatgtaaaaaaaaaaaaaaaaa

SEQ ID NO: 55810 - DNA, 600 bp, Oryza sativa
  Clone ID: PAT_MRT4530_57781C.1
atggcgtccaggccggcgagctccactgcgaccacggcatgccgagctcagatttgttttcaagggattgactctttcacttcccctttttttgtgaagtctgggggctgcggattttgggagtggtgtgatgataaggcagaaccatatatgaagcagctgttgcttgatttgaggaatgctgtgtggtctgcacgtgagcaagtgaatggcctggaggctgcacttcgggacaggacagtagcccagcacaacttgcagtctacccccaagaaagaaagcaatgaggttcagggtctgagagctgctgtagagaagatggaagctgcaaattgtgttttagttgataggattaacaaacaacagacatctgttctactagaatttgtaattgcaaattggaatgaatgcaaaattgtggttttgtttgagatgacagttaaaaatcagccatattgggtgactgggaatcaaggcatgttatggcagttggagataatggaaacagcaaaagtgatgataaataatgacatatattgccacatctggaacccattgtatctgattacatcagcaagtaaacaagagtggtggcagtaa

SEQ ID NO: 55811 - DNA, 324 bp, Oryza sativa
  Clone ID: PAT_MRT4530_57782C.1
atggagaagaagcctgaaggcgacgcaattgttggcctcctgaagctccactcctcaaccacaaacacaaatacacacatctatgctgacgtggcgagtggggctcacatgggcgaagatggaggcaacgatagcaccacccgtgccaatgaggagcgctacctcctctccttcgatgaccccatagtcgccgcccactcctatgccatcacctggacccctgccaccgtcatcttctacgtggacggcaccgtcatcttctacgtcaacggccaccatcatcttctacgtcgacgaccaccatcttccacctccgacctttga

SEQ ID NO: 55812 - DNA, 342 bp, Oryza sativa
  Clone ID: PAT_MRT4530_57783C.1
atggccgttgacatcgcccctgccgccgctgacgttgccccgcacaccagcaatgccaccccgcatgccaccgatgccggatccaccatggacaccatcccgcttaccaccaacactacctcacacaccacagacgccagatccaacgtagacatcatcccatatgcgaccgatgttggatccaccgcagatgttgccccgcttgccagcgacgctggatccgtgctaggagccgccgtcgctgcttcccgaccgccactgatgccgcctcgcatgccacagatgggaggtggagggaccgcggagacgggagatggaggggaggagaggctgagggggtga

SEQ ID NO: 55813 - DNA, 714 bp, Oryza sativa
  unsure (1)..(714): unsure at all n locations
  Clone ID: PAT_MRT4530_57784C.1
agactgtgcaaaaaaagggcttgggcagtgaaaccagtgaagggntgattctgtgctgtnctttaatcttcagcctgatggcacaccagacccgcttagcctccatggaagctgcccagttatagagggcgagaaatggtctgcgccaaagtggattcatgtgcggtcttacgacaatgcatcaagcatgaagcaaagtgaagaatgttctgatttgagcgagaattgcgcggcttgggctgcatcgggtgaatgcaataacaacgcagtctacatgattggaacggaagatgcacccggtcagtgccagaagagttgcaatgcttgcagtttatagaacatttcgcatttggtagactcacccggtctagttggtttggatttgacaaatttgcagacggtgagcttagatggttttacagttcttttgtttattttgggtgaggtgtgtgttccaaactgccaatagccattagttggatacattttgttgttactgcaaatgctgaagacagtgttatgtaactcactgttgtgcagttcagagtgtcatgctggcaggcaactacctgttccccctttattttttttgttgtcttgcttcacagtggatttcagaacagaaaactgtgtcagcttgtctcgatgataaccaacttgtttggccctttccacaatatagaagccactttgtgctcaaaaaaaaaaaaaaaa

SEQ ID NO: 55814 - DNA, 281 bp, Oryza sativa
  unsure (1)..(281): unsure at all n locations
  Clone ID: PAT_MRT4530_57785C.1
acactcgtcgagcaacgnagagtaccaacccatccacctcttccccttcttcctctcgcttccgncaccaaccccttcgcgaaccttctagaaccccccaaaaccctatccatggcggcaccctcctctcccgggccgctgcgtcgcgcgtctccctccgcggcgccgtcgaccacatactgcctctccctccccaagnaaccctccttctntccntctanngtctcgcacaccatcgctcgtctcggggggnagagcgatggcggcgcgcnagaggcgcg

SEQ ID NO: 55815 - DNA, 323 bp, Oryza sativa
  unsure (1)..(323): unsure at all n locations
  Clone ID: PAT_MRT4530_57786C.1
ctnnnttnnnnnntttttttttttttttttttttttttttttttttcgggtttttttaacaacccaggcttttcctgggatccaccatcggaagtttaacctaacatgtcacattctacatgcaaaatcggttggtgaagaaaaaggccccccaaattggggttccccattctagttgtccagtccattccaagaccctttgtttattgttcacaacatttctacttgagttttaacacataatcacttttcctgcaaaataatgctaaacggttttgttccatgacctggggccctttaagggatccctttacaaggaattt

SEQ ID NO: 55816 - DNA, 303 bp, Oryza sativa
  Clone ID: PAT_MRT4530_57787C.1
aattgcacttttttctcttgatcgggataaagggcaccctttttttttctcgcaacatttacatatgcacccaatattggcaacacggtcacaccatcatgatccataggcaagaggtacgttcatgtgcaaaacacggaggccagatggtagaagtgacaccacgttccccaacgagttggtgtaggcctggtgtacgaaacccgcagcgagcatcggatttctggcggactgagctcgagcttcaacatccggtgattgaccccttgacgctgactattgtgtgacgccaacagatcccta

SEQ ID NO: 55817 - DNA, 4826 bp, Oryza sativa
  Clone ID: PAT_MRT4530_57788C.1
atgcagaggaggtggcaggtgtgggggaagcccgacgggagcctcgtctgggtacccgcctccgacgggccgccgccaccggcggcggcggcggccagtgaggcgccgcttcctcgtcccgatccgcagccggctgcgacggagctgggagaggcgcgatccggcgatgcgattcccgaagctttggataagctggttgctgctgatggaatggccgaagcgatcgaggattcagggaaaggtgcggtgttctgcactgggttggggggatcagttgccgtcagcgagagggctgtagagagggccaaggcattggttggggaggtcgcggaggagataagtaatgagagaaggcaaccatttggtgatggttctaatttggagtgcggattgggagaaagtaatgtttcatttaaaggtggtgtacataaagatagtttgtctccgatgttccaaaccggatcgggtaaaatggtttcactgagcaagggctcaattcagaaggctagagctgttttagaaggaaatgccgagaattcttctgtcattgctgtacagtctatgttccatactggattggttaggccagacccagtcagcaggagctccactgataatgcaatgactgttttggagggacaaacaaatccaaaacaaggagatgtggcagatgtgtatgacaaggaaaattttccattgttccaaactggttcaggtaaagctgtatcggtcagtgtagcatctatccagaaagctaaggctgtcctggagcaaaataatacaggacatggagatactaatgtctccaccactacttttcaaactgaaacaccaacgtctgttctgatgagtggtggcctgactatgaatgatagatctgttacacctgaggggggtgtttcaatgcaaggaaattttttggaggctgatggtcacttgccattatttcaaactgggttagggaggtccatttcagtaagtaaaggctcaattaagagagcaagtgcacttctggagccaaggaacattacaaaagaactggaagatgaagctcactcagatgatggctgtgccactccaatgttcaaaactggatcaggaaggtctatcacagcaagtgaaaattctagaaagaaagcccacgttgtcttagagggcgaggaaccagtaaaaaatgtaaataatgacactggagaagccattgctccaatgctccatgctggaatgcagaagtttgcaccccaaaatagaaactcaagtcataaggcgatcaccctcatggagcaagggagctctatgaaagaagaatacatagaccgtggaaacgaaccaccaatgtttcgaactggatctgggaagtcagtcttgattagtcacagctccgtgcagaaggcaagggcggttctggaggaagaaggcaatatgaagaaagaaaatcacaaacaacttagcaatgtggacaaatatattccgatctttacttcacctctcaagacaagctatgcaaggactgtacatatatcttcagttggtgtttctcgagctgcaactttgttgggtttggaggagaataccctttcaacacaacttttaggacatgtgggtgataagctaggtacaaagataactgttgagagggaaaattcagagcaccagtttggtgtagcatcagtcagtggaatttctggtggctgccctataagctctggcccagctgaaaaccaagtacttatggatccacatcagcattttgcattttctaaaacaacgttctctgattctagtgagcaagctatcaggttcagcactgctggcggcagaacaatggctatttctagtgatgcacttcagcgtgcgaaaaatcttctgggtgaatcggatttagaggtttcaccaaataatttattaggccactcttcagcatctgcttgtaaagagaatatacaaaattcaactggtctgcgaaaagaaggtgaacctgatttattgaaaagtagggggaacagcaaaactgagccagcacaattttccattccagcaaaacctgataggaagcacacagattccttggaatatgctgtacctgatgccactttggctaacggaaactccgtcaggcttcatgcggcaagagattttcatcctatcaatgaaattccaaagatatccaagccttcttccagatgttcatttggaactgaaaatgcaagtgacactaaagataaggctcgaagactccaaatgccatctggaccattgattgacatcactaattacatcggtacacattctgttaatactgactacctggccggtgagaagagaagatttgggggaagaaactccatatctccctttaaacgtcctcgttcttccaggtgcactatattcttcacattgttaacttataactcttgtgaccagacagaagatgtaacagatgaagtgaagctcatggatgcaaaaaaggctgagaagtacaagtttaaaacagatactggtgcagaagaatttcagaagatgcttcttgcctgtggtgcttcattgacatacacaactaaagaatgggtcagcaaccactacaaatggattgtttggaagcttgcttcattggagagatgctatccaactagagctgctggcaaattcttaaaagttggtaatgttttggaagagctgaagtacaggtatgacagagaagtgaacaatggccaccgctcagccataaagaaaattttggaagggaatgcttcaccatctttgatgatggtgctgtgcatttctgctatttactcttgtcctgacctaaacaacagtaagccagaggatgatagggcacatacagacgacgacaacagtgagaataaaagcttgagacctgctaaaaggaacatgtctacaaagattgaactaactgatggatggtattctctagatgcgtcattagatctggcacttttggagcaactagagaaaagaaaactttttataggacagaagcttcggatatggggagcttcactatgtgggtgggctgggcctgtgtcatttcatgaggcatcgggtaccgtcaaattaatgatccacataaatggcacctatcgtgcaagatgggatgagactttggggttatgcaagcatgctggagtcccactggcattcaagtgcataaaagcttcaggtggcagagttcctaggacactggttggagttacaaggatttatcctgttatgtacagggagaggttttctgacggtcgttttgtggtgaggtctgaaaggatggaaagaaaagcactacagctgtatcaccagagagtgtctaagattgcagaagacattcagtcagaacatggagaacactgcgacaacactgatgataacgatgaaggggcaaaaatatgcaaaatgctagagagggcagctgagcctgaaattcttatgtccagcatgagttcagagcagctgctgtctttctcatattatcaagaaaagcaaaagattgtcaggcaaaatgaagtagctaagaaggttgaaaatgctcttaaagttgctgggcttagttcaagagatgttacaccatttttgaaagtgagggtgacgggccttatcagcaaacactccgccacaaaatctggctgcagggaagggttaataacaatttggaaccctaccgagaagcaagtacgaccatttttcacccctcgtaaagcagttgaattgtcacattttggtgaagtgccacttacaagcgaatttgacattgcaggtgttattttgtatgttgggaatgtttatttattgaacaaccagaataggcagtggctctttttgacagatggatctaaatttatctctggagaaaagtatgaagagcaagatgactgtcttctggcagttagcttttcttccaaaaccactggcgaggattctgcattcttcaattatgccctttctggacatatagttggttttagtaatctggtcaagcgagataaagaccagatgaggcacgtgtgggtagctgaggcgacagagagctccacctatagtctctcccacgagatacctaaaaaatcacatctcaaagaggctgccacttctgctgaaaaatgggcttcaaattctcatcctatgattcagcatctgaaggaaagagttctgcaaatagttggtgacagtggtggctgaagtactctgaatggtgctgctcgtagaacagttttgtttcaggactcgaccagaatgaagcctatggcagtggatgctcgttgtcgactagacaactgacagtcttgataaatgctgcatggcatacgaatgatggatggatacgacggacgtgattggcacgtggagggacagatcagcggatttggacacgagatatcctgctggcgaggaaatggttagactcccaccacgacatcatcctgctggcgtttgagcgtcccaagtttcaacatggagcgtcatgctgccctcccaatcccattgaacacgcacatctgctcgtcgttcgctatgagcctatgaattatagattacgagcatctggtgtctgctgcctatcctgacttgtaattatccggtgtataaagttgtgtatggaggcttagtttgatcattttgatatttctacagccattttacatgcgtttagggaaaaaaaatagtaatacgtgctatagctaagttattgatactcaattctcaaattggagaacagccctgacgcaattatatggttgtatttctcactccaatatccaattggggaaaatgtctgttgtttaaatttctatgatattttagacttcccagat

SEQ ID NO: 55818 - DNA, 760 bp, Oryza sativa
  unsure (1)..(760): unsure at all n locations
  Clone ID: PAT_MRT4530_57789C.1
agaatcacctagctctccctcctcccctccgccgccgccgccgccgccgccgcttcgcctccttcctatgctgccttccgcgcggagctcagctgctcgtggaggcagagccgtgcccgtctcatcccctgcccgtgcaagcagctaggtaggacgatttgagcgtggtgttaggccgaaccgctgaaggaagattgctccactgttgactgcattaggattcaatccttgctgctaaatgtattgcttatattcagcaatataatgttcagcagcaagaactggatcttaatatagtcgatagtggaagaacggtaacatatgtggtttgcagcagatgcttcgcatacatcttgcaaatgggttgttacaggctctctggaatcagcattcaccattcaggaacatcttgcaaatgggttgttacaggctctctggaatcagcattcaccgttcaggaaccaataacgttttgtactgccaagtgccaactattatttcctttgttgttattgcttaaaaaagatggttatacgagtcacaggccatattttatactggcaaagtctttttttcgtatttttctccttggatgagaatatcgcctttccttgctgaaccgttacctggttgcaacaccggaacattgcattcgactcagctaatggtacacatcagtttttgacgggatgtctgtatgtgcgttcaacattaatttcccctgtatggntcaactattaccatggtactaattactacc

SEQ ID NO: 55819 - DNA, 4281 bp, Oryza sativa
  Clone ID: PAT_MRT4530_5778C.1
atggggtcagaggcggcggcggcgaggccggtggtggtgacggtgaacggggagaggtacgaggcggtgggggtcgacccgtcgacgacgctgctcgagttcctccgcacgcggacccccgtccggggccccaagctcggctgcggcgaaggtggatgcggcgcatgcgtggtcgtcgtttccaagtacgacgccgtcgccgacgaggtgaccgagttctcggcgagctcctgcctgacgctgctcggcagcctgcaccactgcgcggtcaccaccagcgagggcatcggcaactccagggatggcttccacgccgtgcagcggcggctctccggcttccacgcctcgcagtgcggcttctgcaccccgggcatgtgcatgtccatctactccgcgctcgccaaggccgacaggtgctcgtcccgtccctcgccgccgccggggttctccaagctcaccgccgctgaggccgagaaggccgtctccggcaacctgtgccgctgcaccggctacaggcccatcgtcgacgcgtgcaagagcttcgccgccgacgtcgacctcgaggaccttggcctcaacgccttctggaagaaaggcgccgacgacgagcgcgctgacgtcggcaagctgcctgcatactctggtggcgccgccgtctgtacgttcccggagttcctcaagtcggagataaggtcatccatgggtcaagcgaatggtggcgctccggcggtggcggtcaccggagacggctggttccaccccaagagcgtcgaggagttccacaggttgtttgactctaacctgttcgacgaaaggtctgtgaagattgtggcatcgaacaccggctccggagtgtacaaggatcaagacctccatgacaagtacatcaacatctcgcagattctggaactctcagccatcaatagaagcagcaagggcgtcgagatcggagctgtcgtgtctatctccaaagccattgagatattgtcggatggaggcgcagtgttcagaaagattgccgatcacctgagcaaagtggcctcgtcgttcgtccagaacacggcgaccattggaggcaacatcatcatggcgcagaggttgtctttcccgtcggacatcgcaacggttcttctcgctgcaggatcaactgtcaccatccaggtggccgccaagaggatgtgcatcactctggaggagttcttgaagcagcctccatgtgattccaggacattgctggtcagcatctctatcccggattggggttcagatgatggcatcacctttcagtcgtttcgtgcggctcctcgtccacttggcaatgctgtgtcatatgttaattctgcattcttggcaagaagttcagtggatggatcatcagggagccatctcattgaggatgtttgcttggcatttggcgccttcggggccgaacacgccatcagagctagggaggttgaggagttcttgaagggaaaattggttagtgcaccagtgatacttgaagcagttcggcttcttaaaggtgttgtttcaccagctgaaggcacaacacatcctgaatacagagtcagcttggccgtcagttatctgttcagattcctgacttcccttgctaatggcttggatgagcctgaaaatgctaatgttcccaatggttcatgtactaatggaaccgcaaacggtagcgctaattcctctccggagaagcactcaaatgttgacagctctgatttgccaataaaatcaaggcaagagatggttttctctgatgaatacaaacctgttggaaagccgatcgagaaaaccggagcagagctccaagcttctggagaggcagtgtatgttgatgacatccctgctccgaaggattgcctctatggagcatttatctatagcacacaccctcacgctcacataaaagatataaacttcagatcatctttggcttcacagaaggtcatcacagttatcactgcaaaggacattcctaccggtggagaaaatattggatcatgcttcccaatgcttggagatgaagcgcttttcgttcatcctgtttctgaatttgccggccagaatattggtgttgtgattgctgaaacacaaaagtatgcctatatggcggcgaagcaagctgtgatcgaatatagtaccgaaaatcttcagccaccaattctgacaatagaagatgctgtccagcataacagctacttcccagttcccccatttttagctcctacgccaattggtgacttcaaccaagctatgtctgaagctgatcacaagatcatagatggggaggtgaaacttgaatcccagtactatttctacatggagacacagacggccttagctatccctgatgaagataactgtataaccctctatgtgtcggcgcaactacctgagattactcaaaatactgttgcgaggtgccttggcattccatatcacaatgtccgtatcatcacgagaagagttggaggaggttttggtggaaaggcaatgaaagcaatgcatgttgccgctgcatgtgctgtcgccgcattcaagctgcggcgtccgattcgaatgtacctcgatcgcaagacagacatgatcatggcgggagggcggcatccgatgaaggtaaagtactccgtcggtttcaagtccgacggcaagatcacgggtctgcactttgatcttggaatgaacggcggaatatcgccggattgcagcccggtgttgccagtcgccattgtcggggctctgaagaagtacaactggggcgctctctccttcgacatcaaggtctgcaagacgaacgtctcgtcgaagtcggcgatgcgggctccaggcgacgcgcagggctcgttcatcgccgaggccatcgtcgaacacatcgcgtccactctctcagtggacacgaacgccatcaggaggaagaacctccatgacttcgagagcctcaaggtgttttatgggaatagcgccggtgatccttcgacgtacagtctcgtcaccatcttcgacaagctggcctcgtcgccggagtaccagcagagggccgccatggtcgagcacttcaacgccggcaacaggtggaagaagcggggcatttcttgcgtgccgatcacctacgacgtgaggctccggccaactccggggaaggtgtccatcatgaacgacggctccatcgccgttgaggtcggcggcgtcgagatcgggcaggggctgtggacgaaagtgaagcagatgacagcgttcgcgctgggccagctctgcgatgatggcggcgagggcctcatcgacaaggtccgtgtcatccaggccgacaccctgagcatgatccagggaggcttcaccggtgggagcacgacctccgagactagctgcgaggctgttcggaagtcgtgcgccgccctcgtggagaggttgaagcccatcaaagagaaggctggcacgctaccatggaaatcccttattgcccaggcaagcatggcgagtgtgaagctgacagagcactcgtactggacgcctgaccccacgttcactagctacttgaactatggagctgcaattagtgaggtggaagtcgatgtgctgacgggagaaaccaccatcctgaggagcgacctcgtgtatgactgtgggcagagcctgaatcctgctgtggacttgggccaggtggaaggcgcattcgtgcaagggatcggcttcttcacgaacgaggagtacgcgaccaactccgatgggctggtcatccacgacagcacgtggacgtacaagatccccaccgtggacaccatccccaagcagttcaacgtcgagctcatcaacagcgcccgcgatcacaagcgcgtcctctcctccaaagcgtccggtgagccgccgctgctgctggcgtcgtcggtgcactgcgcgatgagggaggcgatcagggcggccaggaaggagttcgccgctgtcggcggcggcaccggaggctcagatcaggtgacgtcgttccagatggacgtgccggcgacgatgccgatcgtcaaggagctctgcggccttgacgtcgtggagagatatctcgagagctttgctgccaaagcctagagatagaagggttctttggcttagctttgtataaacaccaacaataatctgcgcctggatttgtgttgatgtggtatatatgtacagaacaaaaggtgtttttttgggaaaaataaaatcatatggatggtattgttctatcaaaaaaaaaaaaaaaaagctatccaatgaaaaggaacaaaaaaaaaaaaaaaa

SEQ ID NO: 55820 - DNA, 851 bp, Oryza sativa
  Clone ID: PAT_MRT4530_57790C.1
tcataggaacgctttgccttgggctgggctgcgcatgtccggccggcgtccggttttctccttttcgtcgccgtcgccgtcgtcgtcttcctcgccgccgccgccgacgcgagttccctcggtcgggcagggcagatcgagggattgatctgaggtatttcccgtctcgatctggagacgaaccaccgtggtggtatcaattatgatcaacatcatcaatggggatgctatcgctgaagcggctcatggctaggcagcggcagcgggagtggcgccgacgtcgtcagaaggcgcagaaaccccgcgatggatcgattgcttctgaaagaaagggtaataattatcaatgtggtaaaagattaagatattcatggccaaactttccagagttgccaatcccgcggtcgattcggaagctgttctcgacgaggaagaaccaccataggaccaaggctttgaagacgaagaaggaggatatgatccaaccgcagaggagtatctttaggagcacgccaactatgaagacttttagggtttcgggcctagttcccaaaccgtgcctgtggaataagttaatcacttaggtgtctagcctagcgcttagtcgttaagtcgccttccgttgttcgcttccgctctgtttttgtcacttttgttattgtctttgttgtcgtattgatgtcgatctcaagtctatccatgatggcaacttacgtaaggaccatcctagtaatgtaatattattagattgctcatgctcacttatattctgtgggagtgagcggtcgcttcggtatcttgacatcaatggttgttccttggttggcctttgcttgagaagcctaacaaag

SEQ ID NO: 55821 - DNA, 1582 bp, Oryza sativa
  Clone ID: PAT_MRT4530_57791C.1
acgaggcttctccaactttcttttttctcttcttcttctcctccattccattccatttctcctcacgctaccgccacaggtgtccgcgccgcgagaggcctcgggctcggctggtggtggaagaatcggatcaggagaagcaaaccaagggatagaaattcctccccccagaagatctctcatccccgtgcgctgctgctgctgtgtcgtcgtcgtcgtcgggagtggggagcgagcgagcgagctggtctgtgtccgtggtgattggacaggacatggtcgggcggatggagcggcagtcggcgtcgtcgtcggcgtcatgctccccctcctcctccgccgccggcacctcctcctcgtcttcggcctgcgggggcaagaagcggcccgacatactcaacatgatccggagtgcaacatgccttaattcgtcatctaccgataccggcaaggggaggagtaagcagtcaagcaacaaagtgactcatggattccacttggtggaagggaaatctgggcatgacatggaggactaccatgtggcagagtacaagtatgacaagagccatgagcttggtctctttgccatttttgatggtcacttgggagacagtgttccaagttacttgaaagctaaccttttctgcaacatactgaaagagcctatcttctggactaaccctcaggaagcaattaagaatgcataccgctctacaaacaaatatattttggagaatgccaaacaacttggacctggtggttcaacagcagttactgctattgtcgttgatggaaaggatatgtgggtagcaaatgtaggtgattcaagagctgttgtgtgtgaaagaggtgctgctaatcagctcactgttgaccatgaacctcatacaactaatgaaaggcagaggattgagaagcagggtggctttgtaacaacatttcctggtgatgttccccgggtaaatggtcagcttgctgttgcgagggcctttggggaccaaagcctcaaggcgcacttgagttcagaacctgatgttaggcatgtaccaataaattcaagcatagagttcgtcatacttgccagcgatggactatggaaggtaatgaagaaccaggaagccgtcgatcttgtgaagtcgatcaaggacccccaggcagcagcgaagcgactgacgaccgaagcgcttgcgaggaagagcaaggacgacatctcctgcatcgtcatccgattccgctgctgaacacccgcttcgcaacattgtctctgcgtttctcttcgttccgattgaatttgtgtggtggtgctgaaaaaagatggtttacctatagtatgtagctgttgtgaacagaccctagagatgagatatgttagcaaggacaaaactggagatgttcaaacttgtgggttcagtagcgagtagtgagtgtgtgcagggtggtggtgggcggtggtgattcgtctgtgcatacatacaccagcataaactgttttatcaatcgaacggggcgtgcaggttgttgccgttgtgtaaaaacaatatagcttaaaattggctgtgagttgtgaaatggtagtagtccc

SEQ ID NO: 55822 - DNA, 793 bp, Oryza sativa
  unsure (1)..(793): unsure at all n locations
  Clone ID: PAT_MRT4530_57792C.1
ggactaatcacaatcacatacatacccgtatctccttcaggcacaatacttgtagcacaaggctgtcaagactaaggattccaaagtgttaacacatctaatagatcacgtgggggctatttcagtacacgctgctaataacatctaatacatgtaggaggtatatattcctcagtgtactacaaaggaagaacagatctagtaggtcataaataaggcaactattacagtatagttctagatttccagttatgctacacaatcaggcgagttagggcatacaaatatataatcagtagtaggtctgtgactgcttgagtactagctaacaattttaaaaaccttggtatttgtgatatttgttagataggcaatcaaagtcaaatgtatgtaggaaacagaaaattttaatcaaacaggccaaattcatatctgaaggatgttcctgattgtacattgaactgctcacccccctcgatctatgcatttatttcgcacacgcacagatataaacactacaagaaatatatctgatcatctgaaacaagtttcgctagaccaaatcattaaacttatctaaagccaggctattgcacaactggatttaagtagaaagttggcaaacaagctagtacttaccgtcttatgcatgcaacgtagattccttatgcacctgaatttctccttttcaatttatacaagtctcaatcacanaagggtatatatataactcgatgtggggaaagtcgcagttatcggatagcatgatttggtattgtaatggcagtaatta

SEQ ID NO: 55823 - DNA, 328 bp, Oryza sativa
  Clone ID: PAT_MRT4530_57793C.1
gggtaaaaagcccactatttttttatttggggtcgtttttaacaagcagggggatctttgcgggctaggggccaaatggtgaaatcctttttacaagggcctctacaacagggggggacgaaaggtggtaccacgggttaatggtaaagaatagaccccataggcttaagatgaaaacaattccatgtgaccgccgccagtatggtgacatagtacacccatttttggaaagcgggcacaagtacatcactgggacactttcaaatccacctaaaggatgtgcaggcatgtcccattcgtttgaaaccatatttattggatttttaag

SEQ ID NO: 55824 - DNA, 183 bp, Oryza sativa
  Clone ID: PAT_MRT4530_57794C.1
atggcgctttctggcaacttcgcgctcctagatccgatggaggcagcgacgacggtccagctcaggattgggggtgggccaagtgatgagtggggtaggggcatgagaaggggggagcgcctcggcgatggtgacaacggtggcgaaggagttttcccatttgagttgatctctagattgtag

SEQ ID NO: 55825 - DNA, 252 bp, Oryza sativa
  unsure (1)..(252): unsure at all n locations
  Clone ID: PAT_MRT4530_57795C.1
ttgggtgttggtggtggnggaacccacacattagttgttgaaagaagaggaaaggaccttgacgattgaacactgtacgtttaaacgataaacgcaatcataagatattatcagaataaagatataaccattattgcacaattttaaaatataaaaatacaattactatgggacagaggtagtacatgtatttatctgacactggtataaatatactatggaatatctcaccattaatggcggcaaagtata

SEQ ID NO: 55826 - DNA, 257 bp, Oryza sativa
  Clone ID: PAT_MRT4530_57796C.1
caagccactccagcttggaaatttactgcgtcactaattactgtagctaaagagatcacacgaaactgacaagattgttaccacaatacactctctaccaaaatagtcaaagattcatagacctagaaacacactgtgttggatagaagcccacacggacagaccataggatcggagtactaattgaccattgtccaggcaccaggcaagaaccctgaccctctctagtacttgtcaccctcatgacccttgtaacc

SEQ ID NO: 55827 - DNA, 321 bp, Oryza sativa
  Clone ID: PAT_MRT4530_57797C.1
tttatggatgcaaccagtcctgcctggacaaacacgagatagctagctagctagcaaacaatggcggcggatcatgaattgctagctgcatcagaggacctggtggaggtggtggtgctgggcatggtgtctgcacatagtatgcacaaactcgagggggcgaacaacacgactagccctaacgcggtggacatagtgtacaaggagatgaacaggagttaagcgagccgactgagcttgccgaccccgagctgaggatcttcttactggactgttacctggcccgatagaagggggacatcctgctggccaactatatga

SEQ ID NO: 55828 - DNA, 510 bp, Oryza sativa
  unsure (1)..(510): unsure at all n locations
  Clone ID: PAT_MRT4530_57798C.1
agcaggcacgccagcaggagccgggacccaatagagcggncgacccacgcgnncggactagancaagaacgcgagcggccggccaanngcggggnggggnnccnccnnnacnncgcgcccacccacnnnccncccaaagccaagaccgncgncnccgnaccgcagcgggagccccnngnccngggcggccgccangcgccccngggcaaaaccgcccgcggnaaacacggagcacncccgaaggngaccacggccccgccgccnnaaccccgaancccggacccccgggcacggccccccacccacgaccgcccncacccccaggggggagacggncccngccngaccccgcagccacgcgccccagcaccncngnccaacngcgggcnggcnccggcgggaggcgccacncgggcagcgccaaagaagcggcgcaagaagagggngcgggccagcccggcggggcagcngcccagccgcnnccaacagnaccagcagcaccggccgagc

SEQ ID NO: 55829 - DNA, 317 bp, Oryza sativa
  Clone ID: PAT_MRT4530_57799C.1
acccctcacaaaccactacatatgggggcaatctttaagaaagagttacccacacccacattctctctcttataatttttttcctcattctccatctcacttttttcattcttacactcattattccatatttccctactatcttttcatcatatgatctctacaatattctacactctttattatcatctattccatacttttaaacttcgaataatcttctctttttttctattaatcacaataatctttaattatttctatatattttttcccttcatctaccttctcattttttttacactatattttttttt

SEQ ID NO: 55830 - DNA, 423 bp, Oryza sativa
  Clone ID: PAT_MRT4530_5779C.1
atggccgttcacagtgtatctagatgtgtcattctccctcgtctagccaactcaaagattcccctccagatccgccccgccgagctcttggaaggccgcgccggcatcggagccggagaggagaggggagaggcggccgctcgtcgctggcgccgccagatccgctccaccaagctcccgggaagccgcgccggcaccggaggagagaggggagagcttccgccggcgccggaggggaggggaagccgctcgtcgcttggtgtcgccagatccgccccgctgagctcccgggaggccgcgccggtaccggaggggagaggggagaggccgccgctcgtcaccgacgtgaggggggctgattggggcgaccacctcaacggcggcgacaagcatgggcggcatcacgaatctagagggatcgag

SEQ ID NO: 55831 - DNA, 333 bp, Oryza sativa
  Clone ID: PAT_MRT4530_577C.1
atgcagctcaacccgaaagtaagaactcgtcgaaacaaaacgtaagttaaagggactctatccatgtttggcaatcattgtgaagtacatcaacctaacccgacaacatatgccgtgtcatattgtcggattcagctcaatcagctaaccctgtccaacttagactttgccgatcctgatcacagccgattcagactttagccgatctttactctgtttccgggacgatctccatctcgaactccgtttcgattccttcttcatctccgatactcagattaccaaatttggtccaatttctcttttctttttttgtttgtgggcaagtctaaa

SEQ ID NO: 55832 - DNA, 345 bp, Oryza sativa
  Clone ID: PAT_MRT4530_57800C.1
tggtttctttttcttcatcgcgctactatcctatactttttgctgtcgatctgctgatgggtgagacagagatccatgtactccagtgcgacggaggtatgaacctaacaaggtcagagatagccaactgaagttggatggcactgattgttttctttgatacatgcatccaatccatatagtacgaatgctctctctgaagaagcatgtatgaacaacaggatcatgctagcaaaagaacttgcttaagacttatcatcagtgctcgcgagagcgaggaggatgtgacagccagcacgcttataactgaagcatagaacagtggacggagtcttggaaaacgct

SEQ ID NO: 55833 - DNA, 1049 bp, Oryza sativa
  Clone ID: PAT_MRT4530_57801C.1
ggaagggcgatgagaacgcagcgggcgggtgcagcctcattgtgtgggacaagctctgcctgccgtttcacagtggtgggctgggtatcaaagatctgcggctcatggttgtggccatgcgtactcgatgggcatggttacggagggcgcatctggcgcgtccctggactaatatggcgccaccacttgacaagaaggtggcacactgtttagcagccggctgttccattatattgggcaatggggagcaggctttattctggaccgacaattggatgcctggcaaaggctcgatttctttatgcccattctcttttcttttgtccaagacaagaagagatcggttgcgaagagcttgcaggacaatagatgggtggatgacattagaggtggcctgttagctcaagctctagtggaattttttgcgctttgggatttagtctctcccctaattccagagcaaggtgcaagcgatgtgttttcttggtggctatcagcgaatggcaaattctctgtcaagtcggcatattccttgctttccaccggccgcacatgatgcatcattggaaagaccattgcgaagtccagtgctccagaaagatgcaagttcttcatgttttgtgcaatgaagggggcctgtttaacaaccgataatcttcagcgccgtggttggcacctcgcctccatctgtcatctctgttccagggaggaagagacgtgtgcccatatctttcaaggctgctcctatacccaggaggtgtggagcgatgttagggggcggttgggccttcgttgttcattgccggcggtgaattttccttcttggtagtgtgatgcttgcaaaacaatcacgaagagggataggagagcgttcgatgcaggcgtcatcttggtgacttgctgatttggaaagatcggaatgcccgtgtctttgaggggcgtgcagcgttgccggtgagcctttgtgccaccattgaggatgagtggaagtcatggcaagaagcgggcttgaccgtatctgtcacaggtgtttcgtaagttcagggtgc

SEQ ID NO: 55834 - DNA, 1835 bp, Oryza sativa
  Clone ID: PAT_MRT4530_57802C.1
atggcattctcaaatagaagctacacgctaaaccttttgcaatttaaaatgatagaaatgtcatttgtccctctacttatcttccacctccaggctcggtgcaacaattggggtgggaggcggagtcatggagctgatagggtcaacgagatgatggtagatcccttaagtcaatatcatgtgtgttcttcagtgataaggcatgcactatcactaccacctaccacattggagctccacaaaggacagttggtacatgagcatgatgagaaaggacagccaacactggagttccgtgagaccaggaacttgaggaggttgtggctacataggagcttgacgaggacaatgatgcatgggcttgaagagatcacaacgcgagagctggatgaggacgacaacgtggaagctaaaggaggcgggcgggccggcgcgggcgcgggtgcggccatggacgtggacagcgtcgagtgcctgtcgctgccggactcctcctcctcctccggcgccggcgccggcggcggagggggtgggggtgggggtgggggcgtaggcgccatggatgcggcggacgacgtcggcctcgcgctgcacgcgcacggcgcgctcctggcggccgcggcggccgcgcgggcggcggcgtgctccaagggagggggagggggaggcgcggcggccgggagcggcgtgcacgagctgctcgagtgccccgtctgcaccaactccatgtacccgccgatccaccagtgccaaaatggacacactctgtgttccacctgcaaagctagggtgcacaaccgttgccctacatgcagacaagagcttggtgatatcaggtgtttggccctggagaaagtagctgaatcgcttgagcttccctgtaagtactgctctttggggtgcccagagatcttcccatactacagcaagataaaacatgaagcgcagtgcatgtttagaccatacaattgcccttatgctggttctgagtgtgctgtggtgggtgatatcccttatcttgttgcccatttgagggatgatcacaaagttgatatgcatagtggttgcacattcaaccatagatatgtcaagtccaacccacgagaagtcgaaaatgccacctggatgctgacggtcttccactgtttcgggcaatacttctgcctgcactttgaggccttccagcttgggatggcaccagtctatatggcctttctccgtttcatgggtgatgaaaatgaggcaaggaactatacctacagccttgaggttggcgcaaatggcaggaaaatggtatgggagggcaccccccgaagtgtccgggacagcgaccggaaggtgcgggacagcaatgattggcctcatcatccagaggaacatggcgctgttcttctcggggggcgaccgaaaggagctgaagctgaggatcaccggccggatctggaaggagcagcagaccccagacggtgcctgcataccaaatctctgtagctaagcaatcacaacattcagaagaaacaaagaaactcaactccactttgcggccggataacatctatcccgttgccatgtcttactgtttttttgtatgctccgaggcaacgccttcatgttgtacctttgctaaacaaacattaggagggtaggacgctcttgtaaagtaaaatgtgtgtatatggcaccccatatcttacaggttggctgatcgagcgttcaagctctctgttgtcttcagttcggctggatctgaaactgcatttttgcttcctgttattaaattgtgaattccattagtcccaaaaaaaaaaaaaaaaaaaaaaaaaaaaaaaaacaaa

SEQ ID NO: 55835 - DNA, 322 bp, Oryza sativa
  Clone ID: PAT_MRT4530_57803C.1
atatactatttttttgatcgcgagcggtcgcaaagaagtttgtacctttatttataactgatcacgaacagaatcaccacctagtgtgatacttgaggggttttattttactctacgccaattctaaatttcaaatacattattctgaaggctagctttcggactcaatccataatcctgggtagcattgttgttgaaaaataagaacgaaggaaccgggctcttttcccctgttgttcttgaagcttctgacttgctcccttgagaagcgatacccattagagactactttatctggcaaggcgctgaataactgaatttt

SEQ ID NO: 55836 - DNA, 1618 bp, Oryza sativa
  Clone ID: PAT_MRT4530_57805C.1
ttttttttttttttttttttcagagctaagcatcatttgcattacttccaatatatcagtgaacagcacaaatcttttccttgtccctcaacagttgctaaaggatgaaagaactgcacgagactgattctcttatacttgatacaatggatatcctgagttgctgtggcaggaatgacgacttctccagatgtaggaacatcatatgcctcactagaagtgtgtgatagcgtcataggtccccatcgttaattagtcgccagagaaagatcgattgctgcgcagttgggtaaagcgagcaagtgcgtccccgataccgaacaaatgtgagatcgcggcagcgatagtgcccgctgctattgacaaatactgttgacagagcgagcgcgatgaacatgccggatcatttctgctctaacgttcgactttgatatcactcaaaaatgggggcaacattgctgctctggcagcagaatggagcttgtgacaataacttactaaaagatgcctccacatagacagcctctgctccctcctgttttaacaaagcagctgcactagtaattgttcctgctgtgtctatcatatcatcaaccatgatggcgaccttacccttcacatcaccaattaagtgcatgacctctgacatgttgtgaccctgtcttctcttatcaacgatagctaaaggggcatcagataatttcttagcaaatgcacgtgctctgacaacaccacccacatcaggagaaaccaccacaagatccttagatattgtcttactggcaaggtaatccagaatcacaggctgtccatgtatatgatccacaggaatatcgaagtatcccaatgcttgagtggaatgaatatcacatacaattacacgatcactcccagcttctgtaagtaaattagcagaaagtttggcagtaatggcctcacgtccttgagcctttctgtcagctctggcatacccaaagtatggaatgacaacagtaatagacctcgccgacgcccgccgacatgcgtcgatcatgacaaaaagctccataaggttttcattaacaggggagcaggtgggctgcaccaagaacacatcgcaacccctcacactctcctgcagctgcacgtagatttccccatcggcaaaacgcttgatgaggaccttacccaggtctacacccaagtaagaagcaatttcctgcgcgagggggcgattggccgtgccggagaagatcttcaacctggaatcccgcccatcggtgcgcagcgcggcgagcctcgcctcctgcgcgggcgcccgcggcgtccacaccgcggggggcgcgctcctcggctccgccacccccatcctcttcttcgtcttcccttcctcctccaccaccaccctcacctgctcgctccccatcacgcacctcggcgtgcgggcgcggagagacgccgcgggggaggagaggcggcgggaggagacgaacggggaggaggagagcgccgccgccttggccgccatggggggaggaggaggaggtgggattagggtttttgcgggagggtgagggtttgtgggcgttggagctcgcggggaacggacggggaggagaggaggtgggtgaagagaggc

SEQ ID NO: 55837 - DNA, 799 bp, Oryza sativa
  Clone ID: PAT_MRT4530_57806C.1
catgcacgccgccgtcagctggtgattctccagaggatccgccctccttttttttttttttcaggggtaagcatcatttgcattacttccaatatatcagtgaacagcacaaatcttttccttgtccctcaacagttgctaaaggatgaaagaactgcacgagactgattctcttatacttgatacaatggatatccttatttagtcttgtcaccaaaattgattcctacgcagatgggcacaaccatcaggtgccttctccacaccacacaaatgtggcatcgcggtagccatagcatccgccgctattgaaatatgctgctcacagagccatcgcgatgaacatgccagattgtttctgccacaaggttcgccattgagagcactgtctactgggggaagcatttgtgctctggcagcagaatggagtttgtcacaataacttcctcaaagatgcctccagagagcctttcaatcgcaggagggctgcaaagacagtgctagtgggaaaaagtaggtgtggtaaacgacttacttttatgcctacaaaatagtgcaggaatacaaaaggacaacaatttttgcaaatgaagtaagtggcaacacatcctgctattattttgaagtcaaattactgtgcggtaccatgtaaaaagacatcatgcatgttgatgctaataaaattcaagacttcaattgaggacttgaggtcccttcctaaatcaaaatagccagaaaaacatatgctgatatgtgggacacagattcatcggacgcgtgggtcggcccgggaattccg

SEQ ID NO: 55838 - DNA, 2565 bp, Oryza sativa
  Clone ID: PAT_MRT4530_57807C.1
atgctccgcctcctccgccacgctcgccgccactccacctcctcctcctcctccgccgccgccgccgccgtgcccctcacctcgccggccttcgccgtcttcggcgccaacacgggcgtcggcaagacgctcgtctccgcgggcctcgtcgcctcccttctcgcctccccctccccttccccttccaccgtcgcctacctcaagccgctccagaccggcttccccgatgactccgacgcgcgcttcgtcttcgaccgggcccccgcgctcctccgccgcctccgcctcgccggcggcggcgcctccacccgcctcgtcgcgtccaaccacaccctcttcccttcccccgccgtggatcccctccccgagcgccaggacacggtggtgaactacggcggtgaggagggggtggaggagaaggcgctcgtgtgcaggacggtgtacgcgtggcgggagcccgtgtcgccgcacctggcggcggagagggaggggatgccggtggaggacgaggaggtcaggtggctcgtggaccggtggctggcggaggaggacgggggtggggaggtgtggaaggtgctcgagacggccggcggcgtcgccagccctggcccttctggcacgctccaatgtgatctctatcggtcctctaggttacctgcagttcttgttggagatggtcgtctaggtggtatttcatctactttatctgcctacgaaactctgttgctcagaggatatgatgtgggctcagttattttggaagatcgtggcttgtcgaatgacagattcctgctctcatacttgagaaagagggtacctgtgcatgtcctgccaccaattcctgaggatcccaaagacgacctaactgattggttttctgagtcatcctcagcttttagttcacttaaagatagtctgcaatcttttcattcacgaagagttcaaaggctaaacagtatgcagagaaaatcaaagtatttgttgtggtggcctttcactcagcatgatcttgtacctgtagattctgttacagttattgattcgcgttttggtgagaatttctcagcatacaaggttaaagacaaaacgattgttccccagtttgatgcatgtgctagttggtggacacaaggacctgattctaacttacagattgaacttgcaagagatatgggttatgctgctgcaaggtatggtcatgtgatgtttccagagaatgttcatgaacctgctcttcgttgtgcagaacttttgcttggtggtgttggtaaagacaatggatctactgcaattgaaattgctttgaagatggcatttcgtaaatatgcatgtgaccatgggattatagtggacagcgaaaaagatatcagaagtgaaggaagtgttcattttaaggtccttgctttaaatggttcctaccacggggatactttgggtgctatggaagcacaagctccatcagcttacacatcttttcttcagcagccatggattttaacatcattaactcttattcatgcagtaatacaaggtgcagggggaatgcatttgatagatccccttttccagagattacttgtcaaagagtgtaaaaatcgaaaaattcctgtcatatttgatgaggtatttacaggattttggcgtctcggtgtggagtctgcttcagagttgcttggctgttttcctgatatctcttgttatgctaaattgatgactggtggcattgtaccattggctgcaactttagctacagagcctatttttgaagccttcagaagtgactctaagctaacagcactcttgcatggccattcctataccgcgcatcccatgggctgtaccgcagcagtaaaagctatccaatggtataaagatccctccaccaattcaaatattgatcttgatcgtatgaagctgaaggagctatgggatagtgcactagtgaaccatttatcgtccctgccaaatgtgaaaagagtggtgtccttaggaactctgtgtgcaatcgagctaaaggctgagggatcagatgctgggtacgcatcactttatgcgagttccttaatccgacaacttcgtgaggaggataacatctacgctcggcccctgggtaatgtgatataccttatgtgtggtccatgcacaactcaagatagctgcactcgccagctcgccaaagtgcatcgtagacttcaaaagttgaattgagttcgccactaacaatagtgagcagaataatgaggtatcagacagtcccataaaataaaagggtttgtgtccatgccattataattttcgcgttgaattgagtttgccaataatatttaatgagcagaataatgaggtgtcagacagtacccgtaaaataaaagggttaattgtatccatgatattataactttcacggttttgaaatatgtcattactattgacataattggaaccatataaaaggtggggtgtgagacatgctatctggttatggtcacacgaagcccgggccatctgtaagggggggggaaaaaaaaaacccgagactagttctctctctctctctccctgtgc

SEQ ID NO: 55839 - DNA, 690 bp, Oryza sativa
  Clone ID: PAT_MRT4530_57808C.1
cgtcagagctaagcatcatttgcattacttccaatatatcagtgaacagcacaaatcttttccttgtccctcaacagttgctaaaggatgaaagaactgcacgagactgattctcttatacttgatacaatggatatcctgcgtcgagttaacaggaaaacactatttagtgggtgcaagaacaaaattgatcacacgatacatgtgtgatgcctacacggcactacaaccttatttagtcttgtcaccaaaattgattcctacgcagatgggcacaaccatcaggtgccttctccacaccacacaaatgtggcatcgcggtagccatagcatccgccgctattgaaatatgctgctcacagagccatcgcgatgaacatgccagattgtttctgccacaaggttcgccattgagagcactgtcaactgggggaagcatttgtgctctggcagcagaatggagtttgtcacaataacttcctcaaagatgcctccagagagcctttcaatcgcaggagggctgcaaagcagtgctgaagacagcatgtgtgctacaagcatagacagcctctgctccctcctgttttaacaaagcagctgcactagtaattgttcctgctgtgtctatcatatcatcaaccatgatggcgaccttacccttcacatcaccaattaagtgcatgacctctg

SEQ ID NO: 55840 - DNA, 293 bp, Oryza sativa
  unsure (1)..(293): unsure at all n locations
  Clone ID: PAT_MRT4530_57809C.1
ctcctctcctcaccctcccgcaaaaaccctaatcccacctcctcctcctccccccatggcggccaaggcggcggcgctctcctcctccccgttcgtctcctcccgccgcctctcctcccccgcggcgtctctccgcgcccgcacgccgaggtgcgtgatggggagcgagcaggtganggtggtggtggaggaggaagggaatactaagcataggatggaggagggtgttttgtatactagaagctcagtggcgataactcgactgggccagtcccatgggatctgcccggaat

SEQ ID NO: 55841 - DNA, 279 bp, Oryza sativa
  Clone ID: PAT_MRT4530_5780C.1
ctcttggatgccgctcgccgacgccttcgttggtgccggcagcagcggggacggggacggcgcggcggcgggggcggggggttgcgccttcgtccctagcgtggagcttctggacattgtgcaacacccgatctcgggctacggggtgcttgtggcgcttatctttagccccgacgaccgttcgatggtctttctgtacagtcccgacggtacgctttaccggaatgtgtacgtctttgaccccgtgcagaggcgccaggagctcctttttgggccccc

SEQ ID NO: 55842 - DNA, 1062 bp, Oryza sativa
  Clone ID: PAT_MRT4530_57810C.1
atgggttgctgcttctcggtgatcgacgacgacggctacgagcacgacgacgccgtgtcgggctcggtgaacgaggtgccgagggtgaccggcgtgcaccagttcacgatccggcagtacagcggcgtcaagggcaagggcgtcggcaattccgtcctctcccggaacttcaccgtcgccggccgcgagtggttcgtccgcttctaccccgacggctacaacagcgacacgtccgaccacgtcgccttcttcctccagtccctctaccggccatcgtgcggctccgtgtaccacgtcgagttctccttcgcgctgctcggcggcggcggcggcggcggcgccgtactccacgacgtgcggatcgatcgcccgtgcaggttcgacaaccgcaacaactcgtggggcatccgcaagtacatcgcccgggagcagctggagggcgccgccctgggcgccatccacgacgacgcgctgacggtgcgctgcaccatgcacgtcatccagcgccgccgcggcgccggccggcccgtcgtcaccggcgccggcggccccgtccgcgtgcccgtgccgccgtcgtgccacgccaggaacgccatggagttcctcctcagcggcgacgccccgttcgacctggagatccacgtcggcgacgcgacgttcggggcgcaccgcctcgcgctcgccggccagtcgctctacttccggaagctcctctacggccaggtcgggaacgaggcgagctcgccggcgatccgcctccgggagatgagcccggaggcgttcggcgccgtgctccactacgtctaccacgacagcctgccgccggaggcgaacaagggccggaacgcggctgccatggcgcgggaggtgttcgaggccgccgacatgtacgccatggagaggctgaagctgatgtgcgcgagcaacctgtgccgcttcatcggcgacgacaccgcgagcggcatcatggagttggcaaaagcgcactcgtgcgatccgctcaagaaagcgtgcgaaaattacatgaaacgcagaaggattccattcaaccctgatagctga

SEQ ID NO: 55843 - DNA, 279 bp, Oryza sativa
  Clone ID: PAT_MRT4530_57811C.1
cttttggaaggtttatctgaagctaagacgttggggctgataagtgaacatggatcgtttattttgaaaagggatttgaaatggtgcccaacatttaccaagctaaagactttgttactcaatgaatactggtgtgtgcccgatgatttcagtgcactaagttgcattcttttacgtgcaccggttctggggaatctcattcttcagatctattccctgggacttatatcttagaatgaatatcaaaggaaactgcctttcttcgtatcgattactttt

SEQ ID NO: 55844 - DNA, 355 bp, Oryza sativa
  Clone ID: PAT_MRT4530_57812C.1
aacatgtgactatgatgcgctcatgaaacacagtatcatatatcagtaatatacatgcatatatggacaacacatttagaataaactgaaatctacacaaatggaacaggcaatagaacttttggtcatgacagacaggacgtgggaatcagataacgtgcattactttttatttcattctaaggaatgaaaccacatggtgaatgaatccttccttcaagacatgcatgaaatgccttatacagactgtttgcattggcggatcattatttctaccagccttaacttatagagggcggtgagataaccacgaccgcttggaatccattacacgctaagcttgatagacaatgga

SEQ ID NO: 55845 - DNA, 3358 bp, Oryza sativa
  Clone ID: PAT_MRT4530_57813C.1
atgtcccagctcgtgctcctccgccgcatccccgtccgccgccactgcggccccagcagcagccgcctcctcagctcggccgccgccggggcaggcggcgtggggcggcggggaccctaccagcagcagcagcaggaggaggaggagagcaaggcggtgaaggtgtccgtgtggtgggacttcgagaactgcaacctccccaacggcgtcaaccccggccgcgtcgccccgcgcgtcaccgccgcgctccgcgccgccggcatccgcggcccgctctccatcaccgccttcggggacgtcgtccagctcgcccggccgtcccaggaggacctcgtcgccaccggcgtctccatctcccacgtccccaacagttgcgtccgctctcctttccccacttcgatccccccctgcggtggaaagaatagttctgatcggtcatttatggctgatcttgtctattggatcgcacagaatcccccaccagcccattttttccttatatctggggataaagactttgcaaacattttgcatcgcctgcgaatgagcaactataacatactgcttgcttctcctggtactgctaccaccagtgtactctgtagtgcagcaacaatcatgtggccctgggaagctctagtgaaaggggaggatttctcacctaaacgttttaaccacccacctgatggtttagctggttcttggtatggtcactataaaggagccctggatgatccctttgtagacacagaacccgaggaactcgttgtagtaccatctgatctcaagcatggttcaatccccaaatatgtggttaatgcgatccagcaggtactaaaatcatatcctaatggagtgaatctgtcagacctccgactagagcttaaaaagaaaaatatttatctgggaaatgatttttttggccacaagaagttctcttgccttctccaatcgctgccaaattttgtggaatttattagtcctccagttggtgcaaaccagccatgtgtagttgcagccaacagaaaattgatgggtcctgacaaacaaaattttgagagttcaactgaaagtaatgtcggggacaataacttgaatcgagcaatacacaatgacaagccacctccactccctgtgtcgacttctttttctgaaaagaatgctaagaccgaaaattcttctcaaaatattgccaagaagctgcagactgcaagcgagaatccacctacatttgctgtcttatcttcccgatcagatgtgttacctgaggatcaaaaggagcacccagctgccaacttgaatgcacagatagaatcaccagaggaccacaaggaagttgatcctacgactgcctctggaattccctcttcctcaggggtggaagacaatgttaacaaggaagggctattcaaaaggatctggctattgtggaaaggccctgagagtgccaagtctgaagtttcccatcttgaaagtacttccactgtagtggttggtgatgcccaatctcctcagcaagagcataatgctaatgagcatcggagacttttgaagagagtctataaaaaatcttgtcgaaatggcagcacagacggatctgacagtgtgacaacaggcagtgcatcaacttcatctcatgatgaccgctctaaaaagttaaagcatgtggatgatatgagatcattagaaagggatacatcaaattcagaaccatgtgatagatctgtatctgtttccgtggacaaagctgagaaaggagatggtatttccaaaatggataagggtttatttagctgggtaacagggtggttgaaatttggaaaatcagatgcagataatgttacagccaatagaaatgtgattgatgaagcaagcacagactcactaaaaggacctgaatccttgaaggtttcagcttgtggaagtggagaagaggaggttcatgaaatattcacaaaatctttcttctgggatgttttgcagcaacagctatcaaagccccttggttctgagcttgtttcaaaagcaaagacaagggaggagttagtgcatcaattgcacaaattagattgttggcctctgaaaggcctagctgagaaagatctccatcagctggtgaatattttagtttcagagaagaaatgggttgaagaaaccccttccagcattttcaagcttcgttttgctcagaagcatggatatgagctagaccctcaaaagcttggatatccagaccttaagtccctgttgcagattatgcctggtgtgagagtaaaatttccaagggttctacctgcagaaaacggaaatggccaagctggcagcaagggcaatggaaatcaaagtaatggcgatgactttgtttgggaggaacttggtcctgtatctgctaccactgaaactgtgcaaactgttgacaaagaaatgtgctaccgtcctcctactctttcagatgatgatttttcagaggatgagaaccatgcagaccagcagcctagaaaagaggctgaagcaagctcgctcctccaaattattgattcctggcacaatagtaaggatgtctctagcaaaaaaactcaagacattgatgggcttgttgattgttcaaggagtgaccatggctatcttgacaatctgaccggaggaaatgcaccgaagcctacaaggccacagcataaacagtactctttcgtgtcagactcggaagaagatacagagaagggtaagctagttgagagcgtcttgggcagcttgcaaaaagcacggacctcaaagttgcacaactgaaatctgttgtatgcatcaatgctgacttgctgctttcatccccaaattgcagcattagcgtggtaacattctgaaagcagagtgttccttgttgggatgaatcatacaccaaacaaaatggcactcctagggttatctgtcaactgtaggttcagctgctataatatcggcaggagtcatctaacaaagtagcattcttttgttctccccagttgagggagaatgcttatgtcatatgtttaattatgtctagagttctagagttataataaggaggaattctggaacctgaacgctgggaagtttttaaccaagatgttataaaaaaaaaaaaaaaaaaaactcgagactagttctctccctagtgccgattcgagaattttgagaaatcattcttctcgtgttgtgttgaggagtgatctaaggttacagtagatgcctttctttctgagtagtgtcaaccatagacaattcttaatgagttggatgtatgctttctttttcgaagctaagtggtttaacagtaacaatgtattgttcattctagtattatgaattttcctttactctc

SEQ ID NO: 55846 - DNA, 340 bp, Oryza sativa
  Clone ID: PAT_MRT4530_57814C.1
tctgataagcttcccagctcgcgctgccaaggaggggagggagaaacgcatcaccgcgactatttttctactctgctctctgctcgtgaaaattggattgcgccatatatacacggctcttgggggcccggagcgtccgcatcgatcagcattgggctctctgaggaggagaagttgctgtggagatggtgctgatgctttcttgatctgatgacggcgagcacaacatcagtaacagacgccgggggcgcgttcgcggccgctaagacttctactagagtcgactgcacagggagggggggcatgagctagggttcactacggcggaccatagccatcc

SEQ ID NO: 55847 - DNA, 398 bp, Oryza sativa
  Clone ID: PAT_MRT4530_57815C.1
accacacgtactacctgatcgagtacatgctgctgtccaagcgggtgcccagcatggagttcatcaaggaccgatagaactaccgagagaaccactactacgatggatactactatagcatgtactggatcatgatgaagctgtgcatgtacgcctgcactgacctcaccgagctgctgaaggagatcaaggaggacaataaggcataccctcatataatcgtctgtatcatcggctggcacaaccagatgatgatgcagatcatcaactagatcgcctacaagcacgagtgctgtgaggagtatgccggcaactaaatatatatcctcatatataggctcatttaatagttcatgattgattcgatgatgtctcccaccttgctaggtgtgttatca

SEQ ID NO: 55848 - DNA, 961 bp, Oryza sativa
  Clone ID: PAT_MRT4530_57816C.1
gacactatagaatactcaagcttgcatgcctgcagggcgtgacacctcttcctcgaatagaccaattggtgaactcaacagctagatgtgagttgttaagcttccttgatgcttactctggctaccaccaaatcagcatggcgaaagaggacgaggagaagacagcgttcatcacgccattcagcgtattctgttatgtcaaaatgccgtttagactgataaccgcgggaaacaccttccagctcacggtccaaagggcacttaatgaccagcttggaaacaatgtcgaggcctacgtccatgacattgttgtcaagacaaagacaagcgagtcattgatcgatgacctccggcaaacgttcgacaacctccgacgatatcgtctcatgctcaacccagagaagtgcacgttcggagtaccatcgggcaagctccttggattcctcatctctggaagagggatcgaagcaaatcccgagaagatcaaggcaatcgagaacatgaagtcgcccacaagactcaaggaagtccagaagctaactggatgcatggcggcactgagcaggttcgtcgctatgatgggagagcgaggacaacccttcttcgcgctgctgaagaaacaagacaaatttgtgtggacacaggaagccgaagatgtgttcatcgcactcaagcgctacttgtcaaatcccccagtacttgttgctccccaacctaatgaagaattattcctctatattgccgccacaccatattctgtgagtaccgttattgttgtcgagagagagaaggtgcaaagaccggtttattatgtcagtgaagctctccacgacgcaaagacaagatacccatatatccaaaagctgctttatgcagtaatcatgacatcgagaaagctacgccactacttccaagcccacagagtcacggtcgtttcctccttccaccttggagaagttgt

SEQ ID NO: 55849 - DNA, 393 bp, Oryza sativa
  Clone ID: PAT_MRT4530_57817C.1
atgggggacctgtgggcaaataatgttggtcaacacttggttggcactcacaatggtaaagtaagggaaaatccaccggccgagtttattaagattgatcgaattgaagtaggttacaaactcaacaccaaggttgttgaggagtcaaagggagcaggacgaggcgggcgccggtcggccgggccatgcacaccggccggtcaacgcgcgctgcgcgcgcacgcatgcgcgacggagcacccgcggatgcgtactcgcgtcagcgtcgacgcggccggcgtgaggaggacatgtcgcgctctctatctgtgccgctacgaccgcttgcgggagacggggagtagcatagcatcagcatgggcgccagacgccagtggcttcgtactttcgtaa

SEQ ID NO: 55850 - DNA, 3907 bp, Oryza sativa
  Clone ID: PAT_MRT4530_57818C.1
ctatagggcgaattcgagctcggtaccctttgatgcggcgaggtggggaggtgagcaggggctgcatgcctgcaagataattaacaacccaaggggtgtgcgccctagggcaaccctaggacgtccctaagcacatttattccgcacgggttctcatcgacggaggcaactccattaacctactcttcaccagcaccttggacgcgatggggaccccacgaagtgagttgacgcccactgatcaacccttccacggaattactcctcactcatcgtccaagccactgggcaagattacgctacctgtgacttttggccaagcaaacaacttccgaacggagcagatcacctttgatgtcgctgagtttgacacaacatataatgccatcatcgggaggactgcactcgcgaagttcatggccgcatctcactatgcgtatcaagtgctcaagatgcctgggccgaagagaacaatcactattcaggaaaacgcgaagctggcggtgcagtgcgacaaatggagcctcgacatggtcgagcatgctcccaacccgcccgccatagctgagccacccaagaaagtgaacaaaaccaacaagacgtcgaagccagacagcgcaatcaagatcgttctgctctccagtgccaaccccgataggactgaactcgcgctcatcaccttcctccgcgacaatgcagacgtgtttgcttggcagctgtccgacatgccgggggtccccagggaggtgattgagcacaaactcatggtgcgaccccgatgccaagctagtaaaggaaaaactgcggagattcgcatcagatcggaaatgagccatatgagaagagctcgacaagcttctcaaagctggtttcatccgagaagtcctccacccagagtggctagccaatccaatcatggtgcgtaaggccaacgagaagtggaggatgtgtgtcgatttcaccgatcttaacaaggagtgtcctaaggatcattttcctcttcctcgaatacaccaattggtggactcaatagccggatgtgagttgttaagctttcttgacgcttactccggctaccaccagatcagcatggtaaaagaggacgaggagaagacaacattcatcatgccattcggtgtattctgctacatcaaaatgccgtttgggctgataaccgcgggaaataccttccagcgcacggtccaaggggcacttaatgaccaacttggacacaatgtcgaggcctacgttgacgacattgttgtgaagacaaagacaagcgactcattgattgatgacctccaggaaacgttcgacaacctctgacaatatcgcctcatgctcaacccggagaagtgcatgttcggaggaccatcgggcaagctcctcggattcctcgtctccggaagagggatcgaagcaaatcccgagaagatcaaggcaatcgagaacataaagtcgcccacaagactcaaggaagtccagaagctaactggatgcatggcggcactgagcagattcgtcgctaggatgggagagcgaggacaacctttcttcgctctgctgaagaaacaagacaaatttgtgtggacacaggaagccgaagacgtgttcatcgcgctcaaatgctacctgtcaaatccccctgtacttgttgctccccaacctaatgaagaattattcctctatattgtcgccacaccatattctgtgagtaccgtcattgttgtcaagagagagaaggtgcaaagaccagtttactatgtcagcgaagctctccacgacgcaaagacaagatactcacagattcaaaagctgctttatgcagtaatcatgacatcaagaaagctacgccactacttccaagcccacagagtcacagttgtttcctccttccccctcggagaagtcgtgagaaacagagacgtcgtcggctgcattgcaaaatgggtagtcgagctaagccaatttgacgttcactttgtgccacgaacaactattaagtcccaggtcctcgccgatttcgtagctgactggactatgctcgacaacaggtcagacagtcagaccgacagcgagacatggacaatggcgttcgatggcgcattcaatagccaaggagcagggacagggttcatcttgacatcaccttcgggagatcagttcaagcatgcaattcacctcaacttcagggcgaccaacaacacagccgagtacgaaggactactcatcgggataagagcagcagccgcactaggagtcaagcgattaatcgtgaaaggggattcagaactagtcgcgaaccaggtgcacaaagactacaagtgctctagccccgagttatccaagtacctcgcagaagtcaggaagctagagaaaaggtttgatgggatcgaggtccggcacgtatatcgcaaggacaacattgaaccaaacgacctagcacggcgtgcgtctagacgagagccactcgaacctggtacttttctggacgtcttgacaaagccatcagtgaaaaagcaaatgacgaagatagcacagttgtccccgacattagctcgggggctataggggcagaacacgtcattgccgacatcgagaccacagaggactggcggaccccgctcatcaagttcctgagtaccgacgagttgcccgaggacgatgcagaggccgagaaaataacccgacaagccaagatctattgtatgatcggcaacgatctgtacaaaaaggtgccaaaaggggtacttctcaaatgcatctcgttcgatgacggcaaacatctcctcctcaacatacataaagggatgtgcgggtcacacgccgccggtcggacgttggtaggaaaagctttccgacaaggttttttctggccaaccgcgcgtaaagacgcttgcgacatggttcagcggtgtgaagcctttcaatttcatagcaaacacacaagactaccggcacaagcgctccagactatccctcttacatggccgttcttgtgttgggggctcgacatactcggaccattcccacgaggacagggcggctacaagttccttttcgtggcgatcgacaagttcaccaagtggattgaagcgatgcccacgggggaaatcaaggctgacgacgccatcaagtttatcaaaggatattctgcagatacagattgcctcaccgcatcataatagacaatggctcccagttcatcaatgccgacttccaggattactgcattggattgggagtcaagatttgttttgcctcggtttctcaccctcagagcaatggacaggtcaaaagggcaaacagcatagtactacaagggatcaagacccgagtctacgacagattcatgtcacacgacaagaagtgggtcgaagaactcccctctgatctatgggccgtgcgcaccacaccgacaacgttcaataaggagacacccttcttcctcgtgtatggctcataggctatgctccccacggagctacggcatcagagcacacgagtacagaagtactctgacgaggaacaggagaagcagcgaagtgacgatgtgaatctactcgaggaacatcgagaaagagttgttgtcagagcagccagctaccagcaggcccttcgccgataccatgagaagcgcatcagagcacgcacacttttgatcgacgattacgtcctccgacgggttcaaagccaagcagggcgtaacaagctctcacccaagtgggaaggaccatacacgatcacgcaattcttgcggccaggtaaagactacagtctaagtgttccttcccggcgatcccttaccacgacgacacctagagttgaaacctatcctcatgtccctttacgccatcctgacaaggcctctgaggaacctaagggaacttcggctggggacgcctag

SEQ ID NO: 55851 - DNA, 115 bp, Oryza sativa
  unsure (1)..(115): unsure at all n locations
  Clone ID: PAT_MRT4530_57819C.1
aancagatggacatcgtatttattcgactatttacatgcccatgtttattacantgatgtgnntgaagatgatanatnnntgatacatngngtngaaatantggcgtgtccatcg

SEQ ID NO: 55852 - DNA, 176 bp, Oryza sativa
  Clone ID: PAT_MRT4530_5781C.1
aaaatttttcacaaatcatgttttcagaaaatttgtccttaaagtctgaccatttggcttatcctacagtcgagatggctctgataccaacttgtcacgcccggaaattcactagtaatttccgaacttatttgtgcataaaatccccatccaggaatcagccgaggtacacaaac

SEQ ID NO: 55853 - DNA, 540 bp, Oryza sativa
  Clone ID: PAT_MRT4530_57820C.1
atggcagagatgacaggatgtagatcatgcggtgacgagcagcaagagcatggatctgcattcgaggtcaccgaactcgatagtgttggtgatgatgatgaggatgatgctgccgacatccagcaaaactcattcgcgttgtgctcgtcattcagcaatgtgaagcgctcccgcatcacaaactttatcttcggcggtggggacgatgccgatgttggttttcccatgcgggtgctccacccgcccggagccagggtcgaggagccgaggccgccggtggtggaggacaaggagcccaggcacccgtccgtcgccgctggcaactctcgcttgttgcagcgcgctaccacaagatccgatcgtcacgagggcgctgccgagcaccccgtcacggattctgccatcgccaagttcccaatgctgactcccgagcctgctaccgaccgcccccgagcccatcgctctcgatccagccagtcgccggtcgctcgttcaccaatgccgctcgggtcgtgcgaccccctctcgacacaaccgtaa

SEQ ID NO: 55854 - DNA, 342 bp, Oryza sativa
  Clone ID: PAT_MRT4530_57821C.1
atgtccaccgtcgtcgccgccatggccgtcgtggctctgctgctcctgatggcgctggtgccggagatggcgctggctgatgctgccggcgaggggaggaggcagcagccgccgcgcccgcggccgccggcgttgctggtgccgttcagggcgcggtcgtcgtcgccgcaccgccggcagcagccgccgccggcgttattccgcgggcgggcggcgaacgggtgcatgccgagggggttccgcgtgccgccgtcggcgcccagccggtacgccaactaccacaccctcgacgccggcctgtgcgacgaccacggcggcggcggcggtcgccggaagccatga

SEQ ID NO: 55855 - DNA, 1138 bp, Oryza sativa
  unsure (1)..(1138): unsure at all n locations
  Clone ID: PAT_MRT4530_57822C.1
atgaagagtaggaagagctatgggcacttgctgagcccggtgggcagcccgccgttggacaacgagtccggcgaggcggcggcggcggctgcggctggcggcggcggctgcgggagcagcgccgggtatgtcgtctacggcggcggcggcggtggggactcgccggcgaaggagcaggacaggttcctgccgatcgcgaacgtgagccgcatcatgaagcggtcgctgccggcgaacgccaagatctccaaggagtcgaaggagacggtgcaggagtgcgtgtcggagttcatcagcttcgttacaggcgagggcctccgacaagggccaccgcgagaagcggaagaccatcaacggggacgacctcctctgggccatgaccacgcgtggggtgcgaggcctacggggggccgcgtcaagtcctacctcaaccgctaccgcgaggccgagggcgagaagggccnactggctcggcggcgccggcggcggccaccagggagcgccacggcgagggcggttgttgagacgcggcggcggcggcggcgccgatggcgtcgtcatcgacgggcattacccgctcgccggcggcctgtcacactcacaccatggtcatcagcagcaggacggcggcggcgacgtcgggctcatgatgggcggcggcgacgccggcgtcgggtacaacgccggggccgggtcgacgacgacggcgttctacgcgccggcggcgacggcggcgtcagggaacaaggcgtactgcggcggcgacgggtcgagggtgatggagttcgagggcatcggcggcgaggaggagagcggaggcggcggcggcggcggcgagagggggtggtttctgaactattttccttttttctcaagtggcatgccaacatggcaatatagggtgaaaatggccctctttgctgccatcgccgtgagggtgagcatgagggtgggtgtctaccacccgacagctgccctggtgttcgaccgcctcctcgttggcggcttgcacgatgataatggcagcatgagttacatcgtcggtgtccacctttccctcattgtcgcgctctacacggcctggaggatgctgttgtactgccctttttcactaccgtcgctccggctccacgcatga

SEQ ID NO: 55856 - DNA, 379 bp, Oryza sativa
  Clone ID: PAT_MRT4530_57823C.1
atgctgatcagagcgtgcattatgacaccttagctgctctaaatcaccgcagagtaaggccatgatgtggaccatgacaaccaaagataccaaggaggacaactctgctctcagacctattgcaccctgaggagagcctatgatctgagcagcgcatgaaaaaggatactgcactgacactatgcttcatcctaatgactgagcggatatgtaaacatttgctgaaagaattccgggcatgagggctcagagctaaccgagatcactaataaccatatgcagctgtgctagttgcctgagatgaagcacgtggtaacaaggagctagctgttaatgctgtgcacattatgctgaaaagccatgagagcaacaccactga

SEQ ID NO: 55857 - DNA, 1041 bp, Oryza sativa
  Clone ID: PAT_MRT4530_57824C.1
atgtcttcctcctccgtgcaaacctctccctcgccctcgcatgaagtcgacgccgaaactgacgaggaactctacaagcagttcaccgactcggtgtcctcctggccgagctcagaacccatgcccttcctcccgctctaccgccacgacaaaggctggtacagtagcctcatgcctatggtcggtgcgatggtcgccgacgcgcggttcgccgcgcgcccctccgacatcatcgtcgccaccttgcccaagtccggcacgacgtggatcaaggcgctcctctacgccacggtgcaccggagggagcaccccgccgacgccgccgccgaccaccctttcaactccctcggcccccacgagtgcgtcaacttcctcgagtaccagctctacaccaacaacagagtcccggacctgggcaggctgccggacccgaggctgttcgcgacgcacgtcccgttcacgtcgctgccgagcgccgccgcggcgtcgggctgcaaggtcgtgtacgtgtgccgcgaccccaaggacaacctgatctcgatgtgggacttcgccaacaagttcagggcccgtgaggggcaggagcccatgtcgccggaggccatcgccgagctgttctgcctcggcgtgtcgccgtccgggccgtactgggaccacgtcctcggctactggggcgcgcacgtggcgcgccccgagcaggtcctcttcttcaggtacgaggagatgaagctcgacgccgcggcgcacgtccggaggctggcggagttcgtcggcctgccgttcagcgcggaggaggaggaaggtggcgtggtggacgccatcgtcaggctgtgctcgttcgatcacatgatcggcctggaggcgaccaagagcggcaagacggagctcgtggtcggcacggcggcgaatagctcattcttccgtcgcgggcaggtcggggactgggcgaaccatctttcgccggagattgcacagcggatcgacgccataaccgaggccaggttcaatggttccggtctcaggccaagtggcactaaatga

SEQ ID NO: 55858 - DNA, 388 bp, Oryza sativa
  Clone ID: PAT_MRT4530_57825C.1
atctttttgtcttttacccccttttttttttttttggaaagggggggctgttttttattgggcccagggaaaccccaccccaattctcaagctgggagggtaaaaaaatccacattacagttgcaacacaacgggggccatccagctaacaaagaggcaagacatgtatttaggcgaaacatacagtccaacacaacagctggaaaacaagcccaactaactcattacatttatttcatcccatggtgatccacgaaggatgtatatacccggacggaatttccccagtcctcaaagagatgattaagggggtgggggcggctttttcacgaaggcatatcatggtgacgaacaacccttttttaacgggggggaatgttaggcccaa

SEQ ID NO: 55859 - DNA, 531 bp, Oryza sativa
  Clone ID: PAT_MRT4530_57826C.1
atggctgtgaccgtgagcacaacggtgaatttcgcatgggtgcatcagggcaatgcacgctattcacgcatcaaacctagggcagcgtccacctcctcttccatgcacaactgcaacagttgctgcggcggcgaagctcagctcggtgcctcggaccacctcccccgtggtcaccgccgccgggaggccgactgccgcatcgggcgatcgcactgcggacttggtggcccgcgggcccccaatccaggcaaggtgcgggacgcgacacgcctcgggggcgcctcggtgcccctccaatctcggcctcggtggcgcggcggccactttaccactgcggatattcgcgagaatgtgggccccggccccaacgccgcgctgcaggcggccggcgcggcggcggcgcggcggtgccgggggctgcgcggaggcggtagctgcgaggcccagaatcaccctgatcggaggaggaaggacgccgatagggcctttgagagcgcggcacaggcagtcagtggcgccgctgctggatag

SEQ ID NO: 55860 - DNA, 189 bp, Oryza sativa
  Clone ID: PAT_MRT4530_57827C.1
atgctcagggacatgatgacgtggaagaaggaggagcccgagaaggaggaggcggcgcaccgcgcgcgaatgctcaccgcgcgtctattccagtggcgctttgccaacgcccgcatggagaaggccatggcccgcgccgccatcaccgccgagagttcatccacaaagcgcatggatataccattgtag

SEQ ID NO: 55861 - DNA, 519 bp, Oryza sativa
  Clone ID: PAT_MRT4530_57828C.1
ctaagtgggaggaattgtcggcgggttgtcgtttctctcagtcgttgttgtacctctctcgttcccgatgatgattgggccagtcgacattggtgtaatggtatagaccggaaagacaatggatccgacttgagtccacaccagcggtgtcgaggtagaagctccttgatcgatgctggcggtgacattgttgtcggaaagtcttgaagtcatactggtagatccttgagcaccaagtctgcctacctggcgcgccactgtcgacgagtgatactcatggaccggatgaatagagtattggggtacgttggagcaggggtcgacgagatcgtagtcgagggattcgacaagacctcccggcaagtcggctccacgtactcctgcttcgtaaactttggtgggtgtgttggcgatgagattcgatgcccttcgcctccccctaggggtcccgagcggtctggaatacattccaaaaacagaagaaggtaaggcagcggagttaaggcagcggcacgccat

SEQ ID NO: 55862 - DNA, 2268 bp, Oryza sativa
  Clone ID: PAT_MRT4530_57829C.1
atgagggagatcggcgtcttcttcctcagcccggagtccggattgtggttgtcaccgttgccatgccgatttccgccgccgcggggatatcctctgcatcatcgtcactatccaggcctacccgtacctcgtccgagattcggtccgaagagcctacgacaccccagccaccaacgacgccgtctcctccacggttcctccgctggctccagtgacaaccgcacctccgccgacgaggaccgcgcctccgctgacgacgccgtcgtgccaccgctgactatcgacaccgacgccatcgccacgcttcacaatcaagccatcgccgtcctcaacgtgaaggcgctcgtccccgtcaccctcaacctcgacaccgacaactgctcccataggcgtggtctcttcgttgtggcgctcggcaagtttgctctcaccgagcatgtcttctccgatgttcctcgcctcaaccaagccgactggacgcagatggattgcgtcgttctcggatggctttacggttcaatctctgccactctcatgcaggaagtcatctctcccaccacgaccacccgctcagtttggcgtgatctcgagctgcacttcctcgacaatggcgagcggcgcgctgtcaacctcaccgctgaggtccatcatctccagcaaggtgatctctccataggtgactactgccgccggctcaaggtcctcactgacaaccttgccgacgtcggcgagtccatcaaggaccgctccctcgtcctcatgctcattggcagcctcaacgacaagttcgacaaccttcgctccctcctgccgctgcaagtcccgttccccaccttcgccaaggcccatgcacagctcctcctcgacgagctcacaaaaggccaccggccagccggcaccgccatggcgctcctcgccgcttcctcgaccaacgctcacccggcgacctcctccaacacctccaacagcaactcccgcaacaacaatcatcgtcgcagccgcggcaatggtggtggtggcagtggtggcggtggcggtagtacaggcacaagcggtggcggcggcaatggaagcagcagcgcccagggcaacgctggcgcccaggcagcacctcgggccaaccagggttggcccactgctttcaatccatggacaggaagcatccacatctctccccaggccggcccagtacacggctccaaccactgctccgccaaatccagttgcagcacaagcacagtcccctttccagtggactgggtcctcgccagcgcgtacaacacggattacccaaccaaggccgagatcgtcagggagtttgacaactcctccgcccgctccttcttcctcaccaacggggtctccttgcggatgtcttgcccccacacctccccacagaacgctcctattccggcgcctattggacatcgctcccgccttccccgttctggtccggcggcctgcgagtccgacaaacctaccactccggggtggggggcagcctcctctactcggccggccggcgcgccgactgagccagcctcgcctgttgggccgtcctctcttgctcggtcgtcggagttctccatgaaggatcttggcagccttcaccacttcttaggcatttctgtcacacgacagtcttctggcctctacctcagtcagcggcagtactgtcttgagattctagagcatgcaggcatgactgactacaagccgtgctcgaccccagtggatacaaatgccaagttgtcagctattgttggtgctcctgttgctgatcctaccgactaccggagtcttgttggcgccctgcagtacttgagtttcaccaggccaggcatctcttatgccgtgcagcagatatgtcttcacatgcacgacccgcacgagccgcatcttgccgctcttaagcgcatcctgtgctatgttcgcggcaccattgacttcgtcgtccaccttcggcgttccactacggtgctcgaccggagccctatcccgaaccgaactcctcccgagtcccaacacagccgcctcccacctagaccgcgttgtgtccgcgtcgcgcctcttccgtacgtcgctctgcactgcgccccgcgtcgtgcccgtgcgctaaatgccgcgcatcccttccctcgcgccgcatccatccgctcccagtcccaggctgactgcgccactccctctcgtgcgccacttcgtcgcgtctcgcaccaacatcatgtccgcaccgtgtccaaccctgaaccggaccagctcccatga

SEQ ID NO: 55863 - DNA, 1128 bp, Oryza sativa
  Clone ID: PAT_MRT4530_5782C.1
atggcggcgtgcttccgctgcgcgccgtccgtgacggcagcgtccgtccccgcggggcccagccatcttcctcccgacgggacggcgttgtccttcgccgtgcacgacgccgtgaccgcctcgacggcgaggatctcctcctccgccatgctgcagggcacctggccgacgaacagccgcaccctctcgccgtcgctatcctccgcatctccgaccatcacccgcgggacgaggcggttccgcgccgccggcgaccgccgcgtcgacctggcgtgggacctcacctgcacgcgcttcccaggcttgggttcacccgagccttcccgtggtgccgccccacagacgcagcaattgtgcggctggaacagcggcgccggcctcttctcctcctcttcctcctccggtgagtatagatggacggactacgtcgatgttgtgcgtgcatgcatgctgcaatcttggcgtctcaatttcatgcatggatcttacgaaggtcgggggaggacggcgatgatggcgtgcctcgacgtcgagatgccattcctgcgggggatcgacgtgaactggccggcgccagcgggggagacgacgacggtgcgggggcggggggggaggggggcagctgcagcgaggaggacgaggagcccggcgcgacctcccccaacattacggcacactctccagccggcaacaacgacgaggactccggcggtggcggcggatctcgtgtaccgcagccggggcagggatgggagcagcagcagcagcagcaggagggagaagagaagagagaagagagaaaggagaagaaaagagatgaaaataagatatgcagctgacatcttggcggtgcgggcgtggaggccggtgtccgagagcgtggagacctcgggttccatggagttgttacgcgccacggtgtcggcatacctcttccacgccgtttttctgtcgccacccccagccccaccgaacatgcatcctagcacgcccccagccctgcgtgcacgacgacgcaatccccacccagccgctgcggccctggaggctctgtcttccacgctgaaggcagcagccgaaggcaccaccgaggtcgggggagaagaagatgatgaagatgaagcgtga

SEQ ID NO: 55864 - DNA, 2371 bp, Oryza sativa
  Clone ID: PAT_MRT4530_57830C.1
tgaaggattacccaaccaaggccgagatcgtcaggtgcaatagttccggtgacctctatcctctcccggcagatgcgtactcttcggcggcctctgcacgtgcctttgtcactacctccaccaacattgacctttggcattgtcgtcttggccaatttggtcatgaggctctcattcgcttcgcacaggcgtctgtcatcccaccacccagagtcaccacctctttatgttatacttgccaattaggtcgtcatgtgtgtcttcccttccccactagtactagttgggccaaggcaaactttgatttagtgcattgtgatttgtggacatcacctattcctagtgtgtcgggatttaaatattatcttgtcattctcgatgattgctcgcattatgtgtggaccttcccacttcgctttaaatccgatacattttctacactatctcatttttttgcctttgtgaagacccaattcgccacgaccattcacagcatctagtgtgacaacggtagggagtttgacaactcctccgcccgctccttcttcctcaccaacggggtctccttgcggatgtcttgcccccacacctccccacagaacggtaaggccgagcgtatgcttcattccctgaacaacatcacgcgctcctttctttttcaagccaaccttcccgcacaatactgggttgaggcccttcacaccgccacccacctcatcaaccgccacccaactaagaatctacaacaccgcacacccttttttgccctctgcggtgcccacccatcctattcccaccttcgcgtgtttggctgtaagtgttaccccaacctgtccgtcaccgccccccacaagctagccccacgatccattccgcgtgtgttcctcggctatcgcctccaccataaagggtatcagtgtttagaccttgccactgacagggttatcatctcacaacatgtggtgtttgatgagacgtcctttccgttagccgaaatgactaataatgagattgctattgatttggagtttttggaggattttacagctcctattccggcgcctattggacatcgctcccgccttccccgttctggtccggcggcctgcgagtccgacaaacctaccactccggggtggggggcagcctcctctactcggccggccggcgcgccgactgagccagcctcgcctgttgggccgtcctctcttgctcggtcggtcggcgcaccgactgggccggcctcgccagctgggccgtctcttgatttgttgacccaaccaaacccgacttggtgtggcgcctcaacaagtctctctacggcgtcaagcaggccccccgggcatggtacagccgatttgccagctttctcctgtcacttggctttgttgaggctaaatcagatacgtctctattcatctaccatcacagtgctgataatacggtctacctactgctctatgtggatgacattatgttgacagcctcctctgatgctctgcttcgctggaccatacggtcgttacagtcggagttctccatgaaggatcttggcagccttcaccacttcttaggcatttctgtcacacgacagtcttctggcctctacctcagtcagcggcagtactgtcttgagattctagagcatgcaggcatgactgactacaagccgtgctcgaccccagtggatacaaatgccaagttgtcagctattgttggtgctcctgttgctgatcctaccgactaccggagtcttgttggcgccctgcagtacttgagtttcaccaggccaggcatctcttatgccgtgcagcagatatgtcttcacatgcacgacccgcacgagccgcatcttgccgctcttaagcgcatcctgtgctatgttcgcggcaccattgacttcgtcgtccaccttcggcgttccactacggtcgacctctggcctcccaggccgaagaaaccatggccggccgttgccgcccacgtcccaccgaatccggcgccctcccgctcgcgccctcgcgcccaaaccgagtggaatcggctcccctccattcctcctgtaacaccgtcgctctgcactgcgccccgcgtcgtgcccgtgcgctaaatgccgcgcatcccttccctcgcgccgcatccatccgctcccagtcccaggctgactgcgccactccctctcgtgcgccacttcgtcgcgtctcgcaccaacatcatgtccgcaccgtgtccaaccctgaaccggaccagctcccatgagcccgcgccacgccaggcaggtccgcgactcgaccccggtcaagccgccatctccttcagccgtcgctccaagagatgaggaacgaagccgattggataagcgcgtcgccat

SEQ ID NO: 55865 - DNA, 452 bp, Oryza sativa
  Clone ID: PAT_MRT4530_57831C.1
acgacaggaacggcaacggcgcgctgttggagagctccagcgagcggcgcagctcggcctcgcgcggggagagcgggagaaggcgcgacgggctcgggaaatttggggaaatgggagaggagagcacgaggatcgtttttatgggctcggggtggtgagatcgtggctgtggagggtggaatcggccggcaacggccgacgacgtgggtgacattgtgggcgaagtggggactcgatttggcgcaaaaaattgcggaaaagtgggggatttggtggaggagatggaggggaaccgatttcactcggtttgggcgcgagggcgcgggtgggagggcgccggattcggcgggacgtgggcggcaacggccggccatgggcggcttcggcctgggaagccgaaggtagtaggaggacctgacaaattgttgaacttatttttattaagtaaacca

SEQ ID NO: 55866 - DNA, 379 bp, Oryza sativa
  Clone ID: PAT_MRT4530_57832C.1
tttgttttttttttttttttgttttaccatatccacttggtcttgcatatttggtttttgaacggaatcgggctatttcatatttcgggtgaattacatcatatgcacgcttacatcaactattactatcacggaacccagcgccgcatttaattaccttgacgagcaagatcgctgccctttgttacagggctagaacacagggcccataaagccacgccgggtagcgtggtgcaccaggggcattaaccccaaggatgccctaaggttccttcaccaaattgcattccagaatcatctccaaagatttcggaaagagctggcttatgccaaacatgataccccctgaagccaccggcttaacagcgggcatggatac

SEQ ID NO: 55867 - DNA, 468 bp, Oryza sativa
  Clone ID: PAT_MRT4530_57833C.1
atgtcacacgggtcaacgaaagtttttctcatggcatacagcggtcggcagtccccttctccaggctccggcgagggatccctcgacggcggttccgcctgcctctctgacccttgttgcatacggctggaggtcgtcggtgccaaggtggagaaagtctcgtcatccggccatgtcgctagcgtcagggcgaagggcctctgcctggtggacgcccatgccacctcgatcgatggcttcctgaagatggaatcattggggtcgtcggctggctcggccgagcatgatcaccacagggtccgtgtcaggcgtccactggacgacgacatgctagccctcactgatgaccaccccgacgcgtcgcgcacgctcctggtatcgcgcaccatcgccaccatgagcaaacaccagctgctcgtgtggattaggccgaagcacaacccatgccataaacctggtccaacctga

SEQ ID NO: 55868 - DNA, 339 bp, Oryza sativa
  Clone ID: PAT_MRT4530_57834C.1
atggtgcgcgataccaggagcgtgcgcgacgcgtcggggtggtcatcagtgagggctagcatgtcgtcgtccagtggacgcctgacacggaccctgtggaagccatcgatcgaggtggcatgggcgtccaccaggcagaggcccttcgccctgacgctagcgacatggccggatgacgagactttctccaccttggcaccgacgacctccagccgtatgcaacaagggtcttcagccggtggccggttgggagggaagtactcgtaccagagaggcaggcggaaccgccgtcgagggatccctcgccggagcctggagaaggggactgccgaccgctag

SEQ ID NO: 55869 - DNA, 735 bp, Oryza sativa
  Clone ID: PAT_MRT4530_57835C.1
atgccgccctcccggaccaaccaccacccgccgcgcgtgccgcccacgtgccgcgcgacgagggaggacgcgggaacgcgtgggccctggaggaggagaggaggaggcacgacggcctgggcgcacggcgacggctccggctccagcgaggcgaggcggcgacggctccggcgaggcgaggcggcggcggctccccttctccaggctccggcgagggatccctcgacggcggttccgcctgcctctctggtccaccggccaccggctgaagacccttgttgcatacggctggaggtcgtcggtgccaaggtggagaaagtctcgtcatccggccatgtcgctagcgtcagggcgaagggcctctgcctggtggacgcccatgccacctcgatcgatggcttcctgaagatggaatcattggggtcgtcggctggctcgttgctatcatgcttgttttgggtttatgaggtacacagggccgagcatgatcaccacagggtccgtgtcaggcgtccactggacgacgacatgctagccctcactgatgaccaccccgacgcgtcgcgcacgctcctggtatcgcgcaccatcgccaccatgagcaaacaccagctgctcgtgtggattaggccgaagcacaacccatgccataaacctggatgggagatggaggatagaggatcaaagatcaagctaggtagaggggtagtcaacgagaacaatgggaagggctag

SEQ ID NO: 55870 - DNA, 1899 bp, Oryza sativa
  Clone ID: PAT_MRT4530_57836C.1
atggcgtccgatctatcccaatcacttcattttgatctaagtgatttaagtatatgccgacataaggaatacatattgttaatatctacagccgatcgagatcaaatcaactggcacgctcatacatccgaaggcgagttttggacctgcactggagttaagcagatctcccaggccgccgtgttcgattttcacgtcaacacgcttttggcacgcccggtgggacccattagaagtcagacaacaaccttcctcatggccgagaagctgccaccgtcgccgtcctcggctagtccagcgtctgttaaagaggcgatccagaagctgggccttagtgatgttaatgaaggaaacgtcgtgactgttgacccggaaaagttcacacctgaccaaaagagggacttcgaagcaatgatgcagcaagcacgagatcaattcttaaaatcattcacacagacccgcaaaggaacattggttcagaagtacaaggttaaggtagttcctgatgaacctgagaccagtacctccaaggaaggagaaggaaagagagccccagaatcggcccagccaagtgacaaaggtgctgccgatcgtaacaactctcaaggtaacaactctcaagggacctgtggagttcaaggtgatggtgttcatgggctacaaggagggaatcctaaccaagatgttgagacaccgcaagatttcttcaacaatttccaagatcgggttgattatgccgttcacaatgctttgatcaatcaatctggggtactagtcaataccctgtcaaatatgatgaaatcgatagccgatggatcgatagctgagcatcaggctgcaggcccagtttatttgcaaggaggtgtcttcccgaattgtcggcctttgatcactggcgctcaaccgtttgcacaaccagttcctcccattgcatcttcagctcagccgacggtaccaccgttgactcctttgcctgctccagcagcatcggcacctggtcagccgattcagctgttgacgagagaacagccacagcatactgggcaggcgacaaatcagccgacacaagaccagccgaattaccagaactaccaggggggcaatttgaattatcagtatcgacctccttccccacaagtccagtatcagcaaggggggctggctcaacctcagttcactcgtcagtataatcagtacgagccgatgcagcagccatcacaaggagcagctcagcaacgaccatgggccgatgtaattgctgatgtgatgagggaacagtttgggctcaggccaaaggaaactgggtggtttgaaagacttcctcttcctaaccgatttaaagttccggattcctccaagttttcagggcaagatggtgtatcaacttatgaacatattagccgatttttagctcaatgtggtgaggcatcggctgtggatgctttgagagtcagcttgtcgcaccttatacaagaggtaacattgcatgaacagaggtttgcggaagcaagaaagaacgccaagaaggttaatcatgtgtatccttatatgtatggatcggatgacgatgatgatgactctgagatagctgtagccgaatgggtaaggagtaagaaggttataccatgccaatgggagaagcattctgggaaggaagagagatatgattttgatatcaccatggctgatatgatttttgatctgctgctccgagaaaagcaaatccagcttcctcctggtcatacgattccatcggctgaggaattaggcaaaaagaggtactgcaaatggcataattctgggtctcattctactaatgatgcaaagttttcagacaacagattcaggtggccattgaaggaggcaagattaagtttgatgattccaaacggccgatga

SEQ ID NO: 55871 - DNA, 276 bp, Oryza sativa
  Clone ID: PAT_MRT4530_57837C.1
gaatatgccgtgggcgccgccggaccacccgcgcctcctagagttagaggaggcaccgctggtatgcacagcttcaaatcagccccaaatacagcagctccaagccctacccagcgcacaagccacggtagcaaagcgagcagcggcactgagggcgtcggcgaggggagcagcagtagcgatggagcaagcaggttctcgatgattgacggagcgagcaacggctacagtggagctggtcgcagagtgccggcgggacgtcggcgaagcaagtga

SEQ ID NO: 55872 - DNA, 261 bp, Oryza sativa
  Clone ID: PAT_MRT4530_57838C.1
ctcgtgagatgacacgatcataccatctcagtctataacggtacgcgaacggtcaaacagagataccattacaatgtagcagcacgcacagacttcatgaacacatagaggagggagacgatgatggattgaccatagctagagctatcttagtcaatatttggcccttattatcgacgcccaactgggatcacatccaagttatgaacttacaatatttttatacgatgatatggagcatggaaaaatactacataggtc

SEQ ID NO: 55873 - DNA, 354 bp, Oryza sativa
  Clone ID: PAT_MRT4530_57839C.1
atgagtgaggacaaagtgcctgggagagtcgggacgttacaatttgggaacaatttcccgatcggtgacattgttcccgagtgcgcacaatgtgcagaaaagacttgtgttggtttgcgattactgtcgctggtcgcacaagtgaggacaaagtgtgcagaaaagacttgtgttggtttgcgattactgtcgctggtcgggtctgggagagtcgggacgttacaattttcggaaggcctggcactcgggaacaatttcccgagtgcgcacgagcttgggagagtcgggacgttacaatttgggaacaatttcccgaccggtgacattgttcccgagtgcgcacaaaggttctga

SEQ ID NO: 55874 - DNA, 1931 bp, Oryza sativa
  Clone ID: PAT_MRT4530_5783C.1
ggattgtcacagttgtatttggtgttactggtgaattttcagcaacagaggactaaacatcagaaagctagcaagttacaacttttcagatagccagattacagtttggcaatccgttgtgaaatatctgcttaatggcaaccacatgcattgcaatgacctaactgcaacagcttgagcttcacctgaacgccgagaggaaaaaagcaacatttttattcacccgtgcatccccgggccgccgctctgtgttctctgttcttctgttcttctcttgtttttttcgtctttttgcgaatcttgtatatatttatgtataatatgtatgtaaatctcagggcgaaaatttggggtctgcccgacactttgcaagcctcatgggtggtagcagctcttcatctacacatccacaacaacccagctcatgatcagttcatcacttgagctctcaacagctcaatcttccctgtatacatggccaacactaccatcctcctcagagtttctgaatccattattggccattttgcatcgatgcgcaagccgaaaatcctccaatctacctctctgtctagcaagattccacgagcacgatctgtcgatcattttcggacatagccttccgacttgtcatcatcctcgcagcagctgtcgccggcggtggccgccgagacggccacccctgagccggagagctgaaggggaccttgaggtgatccggattgagagcagcttacttcctgagaagcccagagatcaccaacaagtacaatcgaatggctcgctgaagctgtgcctggtgatttccggttgtgcagccgatacttctggagatggcttttcacttcgtcgttggtgagcccatcaaccttcatcacctccctgatttgctttggagtagcaacttgggggccaccgagctgctgcaaggcggcgacgaactgccggtgaagctccggcgaccagcaccgcctcgacttcctcgcctgctgctgctgctgctgcgcctgagcctgcaagctaagcgccgccgggacgggtgacggcacggcggtggcaaagcttgacgcgacaacgtgccggtggtcatcgccggcggcggtggcagccgccgccgccgccggaggaggcgacctgtgggaagccggaggcagcaacggcatagcgggtcgtagaaccaccctttcctccctcctaaagtacggcggcggcgcgacggccctcgacgacgactcctccgcgccgccgagcaacctcgacgccggcgaggtgctcccgctccgtcggtcattctcggaatcggcgtcgctgccgcggctgtccacccagagctgcgcggtgctcatccatttcgtcttgtcgccgtcctccgccttcgcctccgcgtcgtcgccgtccttcctcctcttcccggcctcctccttcatcagctcgatcacgtcggcgaggaggcgggcgcagagcgggagctcgcgcctgaacatctcgatcttgcggcgctcctcctcgaggctcctgatgcacgcctccacccccgtcgcctccttggccgccgccgccgccatcctcacggcgctcctcgccgcgaacatcttcaggtccaggctcaaatccagccccatcccgatctcccccacgtccagccccatgtacaacaacaacaacaaacaaaactctctctccctctctctcgaatctttgcaacaagaacaagaacaagaacaagaactggaggaagggtcgcggattggagcggaggaggaggagaaaggcggtggtggtggtgggtgagggggatctggaagctgcgcggcgatatatagacggggaggtgggaatctgcgagctggaccgcaggatttgttcgtctctctctctctcgcgcgcgcgcggaggcgaagcgagaccgcgcctgcagcccggggatccac

SEQ ID NO: 55875 - DNA, 347 bp, Oryza sativa
  Clone ID: PAT_MRT4530_57840C.1
ggtagcccttttaactatcagttactttatgagagacagccgatgtgccgttacatacgctccccatccaccttgaaaaccattcttgctcgaggaaaaaaaggcaaacgcccagcagacagcccacgccacgaccggagcacctttgcggcccgagagggccaccgcgcaccggacgctgagccccccgcccccccggaccgacgccggtaggcagccccacgtggagcccacccgcacacacccaccgaggcgggtacaaccacaccagcacactcaacccatgacacgcgccccggacacaagcgaacaactacccgaaggcccccacagacgaagggcaacgc

SEQ ID NO: 55876 - DNA, 860 bp, Oryza sativa
  Clone ID: PAT_MRT4530_57842C.1
gtttgtgtagcctgcaacacacaagttgtattgggggtcgggcccgagggtgacgtggccacccctccctctgtctccccgaggggtcggattttcccgtccccgccccaacggcccgtgagccatccacaaccactagacagatccgaaagacccgcccagcacgccacacacgacttcaacccaaaacacccccccccccccccttttgcgatgtttttggggccactgaatcccaagccccttccccccatcccttcccccccccccaaacccgcagaaaccactaaaacgcatccccctagggaccatcaccccccaccccccccccacacaaaacaaccccaagtaagctccccccccccaagaaacgcagcaccctcccctcccggaatcttcatcccaccccaacctagagcgaaagaagcccccccccgaacccaccgaccgaatccccccccccccaatccccgaacccccaagcaccccgaaaaaccccccccccccaaacacccccgaagaaggaccccccacagcccccccccccccccgttcccgtcaaaaaaccccgatccccaaaagccagtaaagccccctaaaaaatcccccatcaaaccccccccccccctccccccaaaagcaacccccccccacagaaccgtcacccccccaaccgagcaaccaaaacctccctcccccctccccccttgcggactccgtccccctgccaatctcccaatccccccaccacccgtccaccccacgccaccccacgtctcccccctcctgccccatcccccgccccaatctctagtgatttcgatgccctacgtctttcacggcccccccccgcatcgccc

SEQ ID NO: 55877 - DNA, 2955 bp, Oryza sativa
  Clone ID: PAT_MRT4530_57843C.1
atggggtcggagcgcgcggagctggcgagggtatgcggggggcgcaactggtccaaggccatccgcatcctcgacgcgcacctcgcccgctccccgtcctccatccacgacctctgcaaccgggccttctgctactcccagctcgagctccacaagcacgtcgtcaaggattgcgaccgcgcgctggagctggacccggcgctgctccaggcctacgtgctcaaaggcaaggcattgtctgcattagggaaaagagaggaagctttggctgtttgggagcaaggacatgaggttgctgttcgtgatacaatggacctgaaacaattgcttgagttggaagaattggtttcctctgttaaaatctgtgagacgatcgagtgtgaagaccgtgtcgtggatgcatcaccatgtgataccaaagttgttatatccgaagatcgtgttgttgacacatcatgcactgcaactacaatggctgatacaaaaactgttgtttgtgaagaaaacatcgggaactctggagttatatcgaatggtgctgtgatattggctaatgataataaagcggacaacaataaagaatgcagcagtccaacaaaagatacaacagggacacatcatactcccaagaaaacaacaaagccagataagaaaagcaaagcaaaaggtagaaaagaaataaacagccaaatcgaagatgtggcagatagcataagttccggtgaaactgtagcagtagatcaaacactatttgcttcaaaaatatcaaaatcatcaaaatccataagcttggatttccgcctttccagaggcattgcacaggtgaatgaaggaaggtatgaccaagcaatatccatttttgatcagatactgcgagaaactccaacatatccagaggcactgattggaagaggaacagcttatgcatttcaaagagaattggattctgctatttctgacttcaccaaggctgttgaagacttgactaaagcattggaatttgaaccaaattctcctgatattttacatgaaagaggaattgtgaacttcaaattcaaggactacaatgcggcagtggaagatctctcaacatgcgtgaagcgtgacaagaaaaacagttctgcacacacctacttaggactaactctttcggcacttggggagtacaaacgtgctgaagatgagcatctccttggcataaaatatgatgagaacttccttgacagttgggctcacctatctcagctttaccttgatataggttgtccagagaagatgttgaataatgttgagaaagttcttcaaattgatgtcagctttggaaaagcataccatctacgtggaattctctaccatggaatgggtagacataggagtgctatcaaagatctgtcggttgctttaaaacatgagagttcaaatatagagtgcctatacttgcgtgcctcttgtcatcatgcgattggagagtacaaggccgcgatcaaagattatgatgatgtcctcgacttggagcttgactccatggataaatttgtgctacaatgtttggccttctatcagaaggaaatcgctctgtatactgcttcaaaggccaatttagagttctctcagtttaacattgatgatgatgttgacccactgttcaaggaatattggtgcaaacgactgcatcctaaaaatgtggctgaaaaggtctatcggcaaccaccgttacggatctcactgagaagtggacgccttaacaagcaagacttcaaattcacaaagcatcagacaactcttatcctagctgcagattcaattgggaagaagatacaatataattgtcgtggcttcttgccgaatcaacgccagtaccgaatggctgggttggctgctattgagattgcccagaaagtttccaaagcatggcgctttctgagaaatccaaagaacaatgcaaagttagttaggagaagggataagcttaacgcgtgccagaacaggggagggtattgcagcacaagtactttgtctggatcaccaacatccagtccaaatgaagacaggatttcctctggaatttctctctcctggcatgatgtctataatattgctgttaaatggagacaaatttctgaaccttgtgacccagttgtttggatcaataagctaagtgaagagttcaattctggatttggttctcataccccgatgcttctaggccaagcaaaaataattcgttactatccatattaccaaagtgttttggaagctgcaaagaatatcatgcttgacttgaaatatgtcaataatgcggaggatcgtgcaatcttccttacagatattgaaaagttgaagaagatagaagttgcatcgtcgtgctcggagttgtaccatatagttggtgagacctactgggtctctactagatgcgacagcattgcatttcaggggaggcgtcttgaagggacaagaattaccactcaaaacatgggcaagacaggattcgactttgcaatacgaacaccttgtacaccatcaaggtgggaggaatatgatgaagaaatgtctgcagcttgggaggccatttgcgaggcatattgtagtgacacgaacccgacgcgtgaccctgatatgcttgatgctgtgaaggcagcaatattgcgtatgacatattactggtacaacttcatgccgctttcaagaggttcagctgtcgttggttacgtggtgttgcttggcttatttctggcagcaaacatggatgtcactgctagcatccctcatggggttcaggtagattgggaggccattctgtctcaagatcctgacacatttgttgataaaatcaagccctggctgtatccatcaataaaaacaagcaggaacctgaaagactatgcagatgtcagcgtggcattcagcaccacaggatcggttgtagcggccttaacttgtgttgacacatga

SEQ ID NO: 55878 - DNA, 816 bp, Oryza sativa
  Clone ID: PAT_MRT4530_57844C.1
tcacgtcgcgggggacgggatggggtagctcctcctcgcaccgtcgccggcgccgcggccgctcgcgttccagtgccggtcgtcctccggtggctgctgccgccgacgaggccgcgtgcggagaggcgcggccatcgtcgcatcgaacttggcatcatcgtctggtgatgccggctcgtcccagtcggcagcggcggtgtacgtgctggcgcggcggggcttgctcctcggcgtctcggcgctgccgctcctccgcgctagggaagccgcggcggcggccgcggtggccacgcctagcagcggggatctcgcctctcctttgcaggagtttgttgaattccgttctcgttttgtgtttctcctagcagggcgtgcaggggtgggaggtgggctgcggcgcgagcaacagcggcgggcgtagctaggtggcgagcagcggcaggcgtagctaggaggcaagcagcggtgggcgcggctaggtggcgggcgtctggtggtgacgccgtggccatccacctccccgttgattgtttggttcttgatggcttcttcaagtgggagtggggggagcacggtgtcggcggcaggggagtcggtgcggcggtcgtggatgtggaagcagcgccaccttgacgacctcaccgagcaggtggcccacctccgtgcgagaacgcgcacgtccctaatctctgtcatctccaatgctgcagcctcgctgccctcccgaaccaacgccttccacttctcgccggcgtcagagctgccgcgggggacaccgccgcgcctcgccacgcgtgtgggcgggggcgaccgcat

SEQ ID NO: 55879 - DNA, 346 bp, Oryza sativa
  Clone ID: PAT_MRT4530_57845C.1
gatttgggacgcgacaccagcggcgtgcgggcgcggcagcggcgtcgggaggccagcggcgtgccgtggcgtcgcggaggcgtgccatagcggcccggcggcgtggcaagctcgagggagggcggcgttcgtggcagtggcgacgtcgtcatcggcggcggcggccgcgtcgatcgtcggccgtggagagagagagagagatcgagatcgagatcgatagaaatcgagagagagagaggcagcggcggctctcaccaagaagtgcggcggcggcgtctgcggcggaggcggcgaggaccaccgagcgacggcgagagacgatggcggtgtcggcgcgggattgccc

SEQ ID NO: 55880 - DNA, 360 bp, Oryza sativa
  Clone ID: PAT_MRT4530_57846C.1
atggccgtggtcaaagtgccacgtaggacaaaaccgggatcaaaaccgccgagggacctcggcccaatccccgggaggaaggccagcgggagaaaattcaacgggccaaatcttcttgtccatttggaagcctacaagacgatgccaccgagcctcctccagcgagatgctctcaccggtcctccttattcggtctacccctaccgctctatccctctctccttagatcttggtctaagaagtgaagtaatggaggaggccacctaccgaattcggccgaaccccctagcaccgttggatgcagggtttcttctggatggcgtggatcactccccaatgacggttggagagcaattctga

SEQ ID NO: 55881 - DNA, 1866 bp, Oryza sativa
  Clone ID: PAT_MRT4530_57847C.1
gaaactttcctcgtcggcgaggagcggcgagatcccccgggccccggccatggaggggctcctgtccaagctccggagcctggacgcctaccccaaggtgaacgaggacttctacagccgcacgctctccggcggcatcatcacgctcgcctcctccgtcgacatgctcctgctcttcgtctccgagctccgattatatcttcatgcggtcacagaaacaacactaagggttgatacctcaaggggagaaacacttcgcataaattttgatgtcacctttccagcccttcagtgttctataataagccttgatgcaatggacatcagtggacaagagcaccttgatgtgaaacatgatatattcaagcagagaattgatgtccatggtaatgttattgcaactaagcaagatgcatttggtgggatgaaggtggaacagcccctacagcggcatggcggcaggcttgaacacaatgagacctattgtggctcttgttatggtgcggaagaatctgatgagcagtgttgtaactcgtgtgaagatgttcgagaagcatacaggaaaaaaggttggggtgtatcaaatccagatttgatcgaccagtgcaaaagggaaggcttccttcagagtataaaggatgaagaaggagaaggatgcaatatttatggtttcctggaagttaacaaggttgctggaaatttccactttgctccagggaaaagcttccagaaggcaaatgttcatgtccacgacttgcttccattccaaaaggacagcttcaatgcaggaaaattattgtttccatgtgaacattctttctttaatattccaactggatgcaacattcatcatatggaatgtaccaatacttcatcaaggttgttcccactgtctacacagacataaatgaacacattattctttcgaatcagttttctgtgacggaacattttagaagtagtgagagcggtcggatacaggctgttcctggagtatttttcttttacgacctttcgccaattaaggtcacattcacggaacagcatgtgtcatttttgcacttcttaactaatgtttgcgctatagttggaggcgtcttcactgtttctggaatcatagattcatttgtataccatggccagagagcaatcaagaagaagatggaaatcggaaaattcaactgaatattgaatgtagccttcctgttggtactacccacaactcattccattttcaggacttacttttgaagaactattgtcacagtagggggcgaggccgctccaagttcaaaaaacgccagtgaaccaacccactaatatttctcatatgctttctgctctgaaactattgattcccgtgcatagtttataaccaactggtcatcaaagtacaagtgacttggctgcttgcttccagcagaagctacctgtaaaggaaatggttcatctggttatactgccctggggcaaacggagcatttcagagatgctcaattttgtacaccataccaggaaacattttgtgtaagctgcatttttttttcttttgttgtaaatcggtgactccgtgttaatgagctcttgcttctttgtagaacagaaaattttcctgactccgtgttttatacatcatattcttttacttacctgtagctttcacatgctaggtaaaagaatgtgtaattatttcgaggaaaagtttcttttctcccttgctccccgttctctacaaagtttactgtaatcggtagaagtcaatgaccattgtattagatataaagtaaccatgtgacggtgtggatggtatcccataatgaatgcacccatgtcttttgctccgtccgtcataaaaaaaaaaaaaaa

SEQ ID NO: 55882 - DNA, 281 bp, Oryza sativa
  Clone ID: PAT_MRT4530_57848C.1
ccccttcccccgcaactcctcctcctcctcctgccacgcggagccaacgacggaaacagatctaggtacctgaagtatcagtgatgatcacgctacagatgactagacgtgcaattcttttccgcgttcatgaaaaaaaaacgctacagatgacacagtgatcacgtacgccgtgcctcagcgccttcatgaccaatataaacgcatatatatgcatgcaagtaaatatatatgtactgtaaatcaagtatatcatgcaagaagatatataagtctggcag

SEQ ID NO: 55883 - DNA, 1263 bp, Oryza sativa
  Clone ID: PAT_MRT4530_57849C.1
atggctgacaagaccctccgcgagctcgctgctccctctgctgacaatgtggccattgggccgcagatcaacatgggagatgtggatttcaacttaaagtccagcctcatcactatggtgcaggctagcccgttctgcggcaagcctaacgaggatgccaacgctcatctgcagcagttcctggagatctatggcacgtacactataaagggtgtcagtccagacaccgtcaggctgaggttgtttccgttttccctcctcgggagagcgaaacactggttttacgccaacagtgctgctgtcaacacctgggacaaatgctctatgcgaggtatgcacaccgtcaaggagacggaattacttactgccaagctggacctcctcatgaaacgattggacgaccacgacaaacggccacaaggcaccgtccaggccttggattcacacgttacgtgtgaggtctgcgaccacacgggtcattctgggaatgactgcccagaaacccgtgaggaggcgatgtacatgggcaacaacaacaacggatatcatcgacaaggaggtcaagggtggaaccaaccacgcccgtatcatcaaggagaaacccagctagctcaattggcttcattagtccctgcaaatgaaactgggaggattccagggcaacccgacacctccgttgaaaatgtcaaggcaatcacgacgagggaaggaactaacgggattgcaagagaagcatcatccagtgagtcggctgacaaagaggttcagccagaaaagactgtgccacaggagtactgcaacacacgattgctgccgtttcctcaacggagtaggaaaccgtcagtggacgagcagtttgctcgttttgttgaagtaatccagaagatccacatcaacgtgctattgttggatgctatgcaagtgccaacatatgcccgttatctcaaggatatcctcaacaacaagagaccactcccaacaacggaggtggttaagctgacagagcagtgcagcaacgtcatacttcacaggctcccggaaaagaagaagaatccggggtgtcctacgatcacctgctcgatcggtgtacatcagttcgaccaagccctatgtgatcttggagccagtgttagcgtcatgccaaaggacgtctttgacaagctcaacttcacggtgttggcaccaacaccgatgcgcctacaactggctgactcgtcagtctgttacccggcggggatagtggaggaaaatatatttttataa

SEQ ID NO: 55884 - DNA, 635 bp, Oryza sativa
  unsure (1)..(635): unsure at all n locations
  Clone ID: PAT_MRT4530_5784C.1
ggacaatacccaccgcgattcncgagggagaataacggttccntccgggccaaacgcaaccttcgcttggnttttggccngggcccgaaccgccgagggtngggggngntccgattngaaaagtcgggtcctgttgacngggnnaacntccgcnncgccgccgnagcacagccggggcggaagaacgacaagacgcccaccaccacaatggcctccacgccgccgcagccccccggcgggcggcggacgaggcggcggcgtcgtcgctgctgctgcaagagctggaggagttgatcggcgcgtcggccttcccgaacattggagagctgggggatgatctgattctgacctcgatttctcctctctttttttttctcccataaaatttcagggttttttttttggtccgtccgatgcgaggatcggacggctgcgggttgtcctccccttagccaagctgatgatgatgtcgtagccaagtagcgtagcactagaaaccaaatcagcctctctctctcgctctctttttctcatggggtaattattactcctttctgtttgttgctcatcattgccttcatttagttaacgagtttaatgatatgcttaattagttctaaaaaaaaaaaaaaaaa

SEQ ID NO: 55885 - DNA, 312 bp, Oryza sativa
  Clone ID: PAT_MRT4530_57850C.1
cacattatattatgctgttgcatactttaattctattacacacgatgattaactttgggcgggcaagggctacatacctactgaaggagaaggaagggatagaacgcatcccattaaagaacccctattgggggggaagaaccacccgtatataaaaaaaagctttaaccggggctaacaaaggcccttggaattgccagccactagcggtacgctcttgcacacgggcacggacttggaatagaccacggtgatggaggcctgcacggcggttatagggacggcgccgacctccaagaagagccccaccct

SEQ ID NO: 55886 - DNA, 1600 bp, Oryza sativa
  Clone ID: PAT_MRT4530_57851C.1
cacccatccatctcctccaaccccaagatccccacccaaatccacctccggcggcggcggcgatggccggcggcgagtacaccccggccgacgctgaggcggacctcctcctcccgccgccggcggggtcggagccggacgagccggcggcgcggccggcgccggcggacacgctgggcgtcgcctacgccatcttcttcaccctcggcaccggcttcctcctcccgtggaacgcctacatcaccgccgtcgactacttctcctacctctacccgggcgcccccgtcgaccgcgtcttctccgtctcctacatgctcgcctgcttcctcccgctcgtcctcatcgtgctctgcttcccgaaatccagcgccccggcgaggatcaacaccgggatgtcgctcttcacggtggcgctcctcgtcgtccccgtcatggacgccgtctacgtcaggggggtccccgggctgtacggcgcgttcgacgtcaccgttgctgctacggtgctttgcggcgtcgccgacgcgctcgtgcagggtggggtcatcgggttcgccggcgagctccccgcgcggtacatgcaggctgtcgtcgctggaactgcaacatcaggtgtacttgtctcagtattgagggtaattaccaaaggagtatacccgcaagatgccaatgggttaaggaaaagcgcaatcctatacttcgttgttagcattgttgtcatgatcatctgcatagtgtgctacaatgtggccgacaagcttccagttgtcatttactacaagaacatcaagaagagggctcagaaggcagaggaagatggcgggatgtctggatcagcctggagatcaaccttgtggagcattgttgggagagtgaagtggcatgggatagggatagctctcatctacgcaatcacgctctccatatttccaggatacatcacagaggacgtgcactctgaggcgctgaaggactggtacccaatcatgctcatcactgcctacaatgtgttcgatcttgttggcaaatcacttcctgccttctacttcctcgagaatgcaaatatcgctgtcgctgggtcgtttgcacggctcctgttttaccctctcttctacggttgcctccatggacccagtttcttccgcaccgagatcccagtgaccatcctgacatgtcttcttggattcaccaatggatacctgacctgcatcctcatgaccctcgcgcccaaggctgtgccaatccaacactctgagacagccgggatagtcatagtgctgttccttgtcgctggcctggtcgttggttcatttgttgcttggttttgggtcatttgatagtcctagtcctgccatcctgtgtatccatgtcagtgtatcatagtgccatgctcaagctcactctttatttgttatttgctcatttacacaccaaacggccaagggtatgtaatttgttagtgtcgcctagacaaaatactggtgctaatgtctgtaatttgctattcatggaatgccatcctctgtccatagtaacattcacagctcaaaaaaaaaaaaaaaacgttttcatgaattttctacaaaaaaaaaaaaaaaaaaaa

SEQ ID NO: 55887 - DNA, 630 bp, Oryza sativa
  Clone ID: PAT_MRT4530_57852C.1
atgctcaccggagggggagggccgccagatgcgggatgccggccgggcggcggccgccggccgccggggcgggacgcgcgcgccgacgcgcgtcggggaggccggaggcggtgcaaccgcaacggcgcctgccaccggcacgaggggcagagcgccgtcgcgccgtcgcggcctcacgggatgcgggagcggtggcggctgcatcgggcgtcggagcgacggcgcgtgcacgtgcgactaggagtagggatggcaatttctccgacgggggcgggccgcgggtcgccggccgctgcactttcgctgcgtctccggctgctgcaactttgccgcgtgtcgccggctgttgtgccttcgtcgcacgtcgccggctgcttcgcctttgttttcatcgcgcgtcgccggcttctgcacctccgccaaatctccgcgacgctggcctcctcgatgagccaccgcgtcttggctgctacagtcctggggtcgaggacggggccgttcctgtccaacccggccccgccgcgccccgttgccatccctaactgggaggccgggaggaggctagtaggaaaggcaattctgggcctacctggactaccctctgggtacgtccctgtggtgtactgctag

SEQ ID NO: 55888 - DNA, 228 bp, Oryza sativa
  Clone ID: PAT_MRT4530_57853C.1
cgatgggtgacaaaggcagaagcaagaacgaagcctgacgaggtggtgaattcagaagcattcacctggagcataattgaaatgttactccctccgtttcacaatatttggaaggaacgaaatggtcgagtcttcgagggcgtggcaacatcgtcttctttgctctgcgcagccattgaagatgaatgggagtcttggaaggcggccggtctgttaacggcgctgtga

SEQ ID NO: 55889 - DNA, 540 bp, Oryza sativa
  unsure (1)..(540): unsure at all n locations
  Clone ID: PAT_MRT4530_57854C.1
gcaggattcggacgaggtnttttntntttctnttttatttttttttttttttttttttttttttttttttttttnttttttttaaatatntntanccgganctnccatntttttcattcccatntgccncncccaacaacatntnttcntagcaaataccactcttacntcnantcaaaaaaaaatcnggtnaaacaaaaacaaaancnaancncggncggtnaaatcnaaaaacaanaaacaaactgggaacncccnaaacanggtgggaaacctcctcnaatcnaaaatnaacaattnaacaaggntntttntnanaanaangggttntttgccnccaaantccnccaacccgggggcttnttngcnaaaaaactnataaactgcaccngcctaactttntcnaagccnatnatncggacaaatgcntcngggtnccccnncttggccncccccancnccttgaacccctgggtggngtctgtgccccaaacttgggcantccccntggtccantacctgcccccctattttccgggg

SEQ ID NO: 55890 - DNA, 386 bp, Oryza sativa
  Clone ID: PAT_MRT4530_57855C.1
accttatattacagggtacggcaaaaacagaacaccggttccttgtaattgtagtgcacaaaatttgaagttacacatggttgttcatacgctacaaatgataaattcattccccctgaaacatcgaagtagcgactcaaaccaaacaatggtcccaatttgaaacatttcgagctcctggtaaacgttcaattggaacttgtgatgccaaactcgcccaacagcaatcttaagctagcaagttcacccatccacccaaactcaggcccccccccacccgtccgacccagacctgacccaacccggtcgaattccagactccgccaacacagagagagaaacctaacagaggcggctgcctcctctggggaggaggaggggaggga

SEQ ID NO: 55891 - DNA, 390 bp, Oryza sativa
  Clone ID: PAT_MRT4530_57856C.1
acttaagatttaactgctttatttgagccactaaaatgctgtcagagtaacaaagcagtcagtgaaaaggcgaaaaaatgacacgcttatcataattgccttttccccaaaccttttacagtatgagtcaatttaattgcttgagacatttaaagcgtcaggaataggcattgctttccataaagattaatatgtcctacttgcacatgccagtatatggggttagcttctgacaccttaactaactaatgacacgtccatccattttcaccagaaaaatcttcatccttgtcggtactctaggaattcacattgattaaccaatcttccttgcatttataacaggacaggtgcattccacaagtgcgaacaatttttgttcttgaaacg

SEQ ID NO: 55892 - DNA, 203 bp, Oryza sativa
  Clone ID: PAT_MRT4530_57857C.1
gggaatacaaacaatatggtgagggggcaacaaacaaaacaaaaaaaaaagaaaaataaaaagcaaaaaaaaaaaaaaaacaaaaaaacccaaaaatttaggcctcgcgaacaaaaagagaaaatataccatccggtagcataaagaaaaaaccatgttacagctaaaaaatgcaatgactttggtaaattgaggaaggttca

SEQ ID NO: 55893 - DNA, 801 bp, Oryza sativa
  Clone ID: PAT_MRT4530_57858C.1
atgacatttggaatatcatattcgctattccgaacattcagaagtccgcctcaaggcaccaaaggtgatggagagaactacatgctgaactcgaaggtgaacgaggagctggtggcggcggcgggggtggaggagggggacgtcgtgctcgagatcggcccggggactgggtctcttacggccgctctcctcgatgccggcgccaccgtcttcgccgtagagaaggataagcatatggccacccttgtgaatgataggtttggatccacagaacaattgaagatcattgaagaagatatcacaaaatttaatgtccgctcccattttcttcctttcctggaggaaaaatcccatcacacgagaaaatatgccaaggtggtgtcaaatttaccattcaatgtaagtactgaagttgtcaaacttcttctcccaatgggagatgtcttttctgtcatggtgcttttgcttcaggatgaaacggcattgcgctttgcagatgcttcaatacaaacaccagagtaccgacctatcaatgtgtttgtgaatttctactcagaaccagaatacaagttcaaagttgagaggacaaattttttccctcaaccgaaggtgaactctgctttcaatgggaagcgcaagatgcttcgtaaatcactccagcacctgtgttcttcctctgagattgaggctgctctggccaacattggtcttccagttacagttctgttagctgacactgccagtgctcgcccgattttctccagtcgttgcacggccttcaggcttcagttgcaacaatag

SEQ ID NO: 55894 - DNA, 439 bp, Oryza sativa
  Clone ID: PAT_MRT4530_57859C.1
tgtgtttttttttttttttgggtttttttttttttttttttttttttttttttttttttttttttaaaaaggcaaacagttcctgcctacattcccttttttgataaataaaaaaacttacaaaacccaactgaaatccaaaattccccagggaaaccgggccccaggggggggccctacccatcccggaggggtttatataaattactagcaccttttcttgggggaaaacccaaaaaagcaaggggatccccgattaaccaaggaaaaaaagagggtttgtttttacctgtttaagctggggggatctcgccccccccccgggaaattccctggtggaggtccttgggggccttgccccccacggggcaaccccccttgacccaggggccgggggtcttcttgggggggccggccattttcttggccatggacctgg

SEQ ID NO: 55895 - DNA, 493 bp, Oryza sativa
  Clone ID: PAT_MRT4530_5785C.1
gaaaacataataattggtgattatgttttttttgttttttatttttaaatttttttttaatttttttttttttttttttttttttttttttttttttttttttttttttttttttttttttttttttttttttttttttttttttaaaaaacaatttaaaacaagattttttttttaaaaaaaaattgttttttttttttttggttgaaaaaaattttcggggaagaaaaaaaaaaaacggggttgcaccttcaaaatttagaaaggggggtttaattttaattgggggggggggaaaaaaacttggattggggggttaaaaaacgaaaaaaaaaacgggttttccctcggccggggggatgcacacaaaattttgcacaacgccttttggaacgaaaagattttttttaagggagatgctttaaattctgggagaaaaaataaaaaaaaggtgtttgggggaaaaagtgttttcttaaaaaattcccaaaaa

SEQ ID NO: 55896 - DNA, 289 bp, Oryza sativa
  Clone ID: PAT_MRT4530_57860C.1
aaaaaaagcccatcgggggaaagggacccttcctttacaaacaaagacactcaaaaacgctgaacaatgggtacccctcgaaagacttggccaaaaaaaagtttacacggggccaaaaaaagtattgccccgaaaaaaaaaaattgcccttttttaggttaccaccccttttatttcacataatattggtcgccaaaattttttccacactttaccccttccgggagatgaggaataagaccaacctacataatgggaaggtctccaacacgatcaattttgtggggct

SEQ ID NO: 55897 - DNA, 492 bp, Oryza sativa
  Clone ID: PAT_MRT4530_57861C.1
ttatgcttcaatacaaacaccagagtaccgacctatcaatgtgtttgtgaatttctactcagaaccagaatacaagttcaaagttgagaggacaaattttttccctcaaccgaaggttgatggtgctgttataagctttaagctaaagaattcaggggattatccaccagttggttctcacaaaggtttcttttcaatggtgaactctgctttcaatgggaagcgcaagatgcttcgtaaatcactccagcacctgtgttcttcctctgagattgaggctgctctggccaacattggtcttccaaccttctgatctgttgttggatgattttgtgaggttgcacaatcatttgacaaaagcatgaatatttggtgccttcctaatgctcatggaactatctgttggtttgccggctgccctctaagcatatcgcctaagaaattttgtccccatagtatcactaccgactgcaggttcttgtagctgacact

SEQ ID NO: 55898 - DNA, 1491 bp, Oryza sativa
  Clone ID: PAT_MRT4530_57862C.1
atgcggtgggcagacgacggcggcgaaggcgacgacgacgacgatctccggctgccgggcgccgggaggcgttcgccgtcgctcggcatcctggcgttcgaggcggcgtccacgatgacgaagctcctgtcgctgcaccggtcgctgtcggagaaggaggtggcgaggctgcggtcgaacaccatgcgggcggccggcgtggagtaccttagctcgaccgaccaggcgttcctgctccggctggcctgcgccgaggcggtggcggcgctggacgccgcggcggcggcggtcgcgcggctcggcgcgcggtgcgggctcgacttcgccgggccgtacgcgagcctcaaggccggcgcgcccgacgcgcggctggaccagttcgtggcgaaggggctcaaggtgaaggccaagaggatggagcggctcgtcgccgccacggcgaagctctgcgccgagatggaggcgctcgacaagctcgaggcggcggagcagaagctcgcccgacgtgggtggggccgcctcagcgtgccgatcccctcgccggccgccgccgccgtcgacgcggtgggctccgactcgctccggctgggtatcagggcgcagcgcgccagagtgcggcggctcaaggaggaatcgctctggagccagagctacgagaaggccgtcatcctcatggcccgcgccgcctgcgcggtgttcgtccgcgtctgcgtcgtcttcggcgcccacgtccccggcctgcccccgccgctccctcccgccgaagccgtccacagccgcctctccaagcttctgctccacccaatgtcggcggcggcgcagcccaggtcgttgtcagggcccatccaacgtcgagacgtgccgctgcgcatcgagatgagcagcaactcgtgcccgatcatacgctcgcattgccagcagccatggcagacgtcgccgccgggcgtcgactggaggaagctcctcgagccgccgccgggcacggtgggcggcgcggggctggacctgcagtacgcgaacgtgatcaccaccgcggagcggctgctgctggagacggaccacgccgaggggcggcagcgccacgaggaggcgcgcgccgagctgtacgcgatgctgccgtcgaagctgcgtgcggccgtgcgggcgaagctgcgtggatggtggagggagcgcggcgccgcggcggcggtggcggtggagctggacgcggggctcgcggaggggtggaggtcggcggcggggcgcatcctggcgtggctggcgccgatggcgcgggacacggcgcggtggcacgcggagcggagcctggacaggcagcggcggttcgaggtgggcggcggcggcggcggcagcgcgcgggcgtgggcgctgcagacgctgcggtgggccgacgcggagaaggcggaggcggcggtggtggaggtgctcgtcgcgctcagctgcgtcggctggtacgacgagcggcggcgggtcgcgtcgctccgtttctga

SEQ ID NO: 55899 - DNA, 126 bp, Oryza sativa
  Clone ID: PAT_MRT4530_57863C.1
atgtcctcgggtgacaaggcttctggacccttggcctgtcttggatctgacaaggccttatcggctttgggcgtccccagccgaagatcccttgggttcctcggaggccttgtcgagacggcgtaa

SEQ ID NO: 55900 - DNA, 369 bp, Oryza sativa
  unsure (1)..(369): unsure at all n locations
  Clone ID: PAT_MRT4530_57864C.1
gcacgaggttttttttctttacccggttatcgaatatcacaaactcatgaataacctgagcttatatggcccataatctactaacattatacatatcatggaaagcttctgcacaaatgggggagcctgatcagcgacctgtgaaggttattgacaaatgacagacagtcnacaccattagtagatgggtgaacagttgtctcctgagaacctgnaggatattgcttggtaccatgagaatgctcggaacacccaactgctcgtattattgagantgaatcatactggtctaaatgacagaatgcgttgctttgtctccggacttatgaacatgtgggtgctatctcgagcacgtaatcagtaacgaca

SEQ ID NO: 55901 - DNA, 597 bp, Oryza sativa
  Clone ID: PAT_MRT4530_57865C.1
gcgtttgcgcaaattaaaccgtcctcttctgccatctcgtacgtcgcctccttcctccaatcccggattcccggtgatcaaagcgaaagaagcaggattgttcgagcgagatgaatccggcggccatggcggcgctggggtcgaagctggcgacgctggggtcggcggcgcgggaggcggcgagggtggcggcgaggcaggggtgcgcgtacaacaaggcggtggtggaggggagcaggcagctgcagtcgagggcgtgcgaggcgacgaggagcgcggccaagcacgggcgcgcgttccacgaggagctcatggagcggaacaagcgctacgtcatcgacccgcccaccatccagacgtgccaggagctctccaagcagctcttctacacccgcctcgccagcatccctggccgttacgagtcgttctggaaagaggttgatggcgcaaagctcttgtggaaaaacaggaagaatctaaatctaaaggccgaggatattggcgttgcaacattgtttggtattgagttgatagcatggtttgctggtggtgaagtcgttggtagaggatttactttcacaggctaccatgtctaac

SEQ ID NO: 55902 - DNA, 207 bp, Oryza sativa
  Clone ID: PAT_MRT4530_57866C.1
atggtcactctgttcttcggcatgttcgaggcggtcggagaggaagcccgtcgtagcctgtggcaaggagctagccgtcatcctcctctccgcgctgccaagaagatcgcgacactcagctctgcgccaccgcggggctcgtcgccatcctcgctgctcgccatccacctcgtcgccgtctccctcttctccgccgccttgatctag

SEQ ID NO: 55903 - DNA, 842 bp, Oryza sativa
  Clone ID: PAT_MRT4530_57867C.1
gcacgaggatttttcctggatagggcgcgttccaaacggccggccaacggccactcacttcggctggctcccgtgccgccaccgattcctccaacaacgcaaagctttgcaaaagctctagcagaaaaaagggccataagcaagaagaagccgagcagcagcagcagagcttagcagcattccatggcgatctcctccgtcttcctgcgtccatcgctgttctcttccccgccggcggcggcggcggcttcctctccccggcgacatgcagcagtgctacgcgtcacctcgagcaagaggagaccactcttctcaagggcggcgacgtcgctgacggtgagatgcgagcagacggcgaagccaggcggcggcaccggcgccggcgccgccgacgtgtggctgagccgcctcgccatggtcagcttctccaccgccgtcgtcgtcgaggtctccaccggcgaaggcctcgtcgcgaacttgggcgtggcgacgccggcgccgacgctggcgctggtggtgacgtcactcgccgccggcctcgccgtctacttcatcttccaggccggctcccgcaactgaagaaacaaaccgaactgaatcgctgaaacatccaagaacttgacatctcaacatgttcttctcaactgatgatgagaattaagattattatctctgggatcggactagttcttgcaaatatacaagcatatatagaaatgatgattgatgacatacacatcttgtttgtactttgtacctctgcttgagtctgcatcgatcagcaacctaccttgctggcctgagtggcctactaccagctgcaattataattgagtttgttc

SEQ ID NO: 55904 - DNA, 273 bp, Oryza sativa
  Clone ID: PAT_MRT4530_57868C.1
atggctgcaacgctgatgaagaaaccaagagtgactgcagatgaagatactaagtatagttggccacatcgcctgagtcccgacgacctggcccaaggcatgagaatttggcccgacctaggcaccgcccgacccgctagggtcaagcccatgccgacccgcataatgggttgtcgtgccttcgagccaacccggcatgacccaagtcttattgggccatgcctgggccatgggtgcagcccgtggacaggcaagggccggctcggcgtgtag

SEQ ID NO: 55905 - DNA, 294 bp, Oryza sativa
  Clone ID: PAT_MRT4530_57869C.1
atggacaaggaagggattgaggagattttacatgaataccctcatgacggtgacatctacaggggtaaccaatgtctattgagttatgggcctgctaacagcttcctcggcctgccccaagcaagtggcgaacaaccttctcggaccgatcccgagcgaagctgcatcccgctctaccgaaaggggatgccttcatacttcgccatgagcttcgccatgtactttgtcttcatgcatcgccatgggcttcgccttcatccagacttggcttccggtcattttatagatccctga

SEQ ID NO: 55906 - DNA, 1762 bp, Oryza sativa
  Clone ID: PAT_MRT4530_5786C.1
tcgtggcctatggtaagtaatttctagaaaaatctctgggggtccaattgtcacgccctgataaattcatcccgaaataaaaatcattttgccacctccccgccgtcgtcccctctcccgtgccgccggccgtcttcagccgcccctgccgccgcgttagcacgccggccagctgtgccgtcgcctcctccagcgtcgcagccgcctcctctccgccggccttccctctgtttcccgcgaagacctccggaagtgcatccccgccggcaacagtggcgttgccaccactgttccgcctccggccgcctctgccgcgtcccctgtgcgccggccgacgtcgccaccacctctcccggcaccggaacgccatcctcttccccggccaagccacggcatcgcccgtatttcgccggaacgccgttgcgcgcgccgcctctccctcggtctcgtctccggcatcgcagcggcaaggtcgccctcggcctcgtctccccttcgaccgaacccctccgcggtccatcctcgtcatctctattcgttctcgtcgtcgacgtcccgtcggtcgcccggctcgtcgtctcgcggcgccgcctccgtcgtcggcatcgcagtggcgtgttccacgccatcctcgtcttcgtgcagccgctgtaggctgcccacgtcgcctcctcgccggccccggtcgtcgtcgtcgtcgccctctcgtcgttcccggttgtcgtggcgttcgtccctccgtcaagccattctcgttcgtcgtcctcgcttcgtcaagtgccgcagccccatcatcgtcttcgtcctcgcctccgcgtcgtcaagcctcgtgccggccgtgtctcgcccgtgtaccggtgtcggtagtcgttcacgtgtgcgggtggtgaccgtgtagtgtccgtgttagtgtgtccgctcagtagccgcgtggtttccacgtgtgcagcccgtgtggtgtctagtggagtccgtttgtcggccactcgcctcggttgacacacggggtccgcttccgtcgacccgtggaccgtctccgtgtactcggttttctttttatatattgttattgcttctttataggcttgtagctttgcttgtgtgcttcgcgtagcttctgtcgttccggaggttcccgaagcgtggttcgcggccgtcgccgaaggttcggaaggccgttctctctctccccctctattcaaaacccccaaaatggttttaggctgggctcgaggtgcgtggttgggtttggttagtcgtacctcgggtactataaggattaagctcgggcctctgttgcaaagcactaccgtacttccatatgtctagtgggtaaggcttagtttgtggctcagtctggttataaacaaaagtacacggatggagatggacgaagtcgggggtcgatggacatctctaggacaaatgacggctacacgagctgcggcccggtagtcgagatgtcatggcacagggctggtgtcctgctgctaggggctcagtcctgcctacctgtccggggggttccggccgtaggtggggttgggtcggtactcttgtctatggctaggatgggttggaaactatgtcacgtcttccgtccgtataccgtggtggtatgtggcacatggttacacgtgatgtacacctctgatcaggcacttatgggtgtgtcttgttgagtacggtggttgtactcagtcttgctcaatttttcccaaacccagaagaggagcccctggatgatgaaggctttggtgtt

SEQ ID NO: 55907 - DNA, 398 bp, Oryza sativa
  Clone ID: PAT_MRT4530_57870C.1
gtttgtgttttttttttttttttttttttttttttttttttcacaaaatcatattatagtactttatcaccagctattttgttttaaaaacatttcattattcattatttgttttgatcactatctcgttgcatgcaacacaaaaacggggggagcctactagctatgaggcaagccagctaagcctaaaactggccggcggcaaaaatgctgcactgttggggctcaacccggcacatcgacggcagttgccccccttactgcctcgccctggtaaacctaacacgggtcatccccggctgctgctgctgctcaccgtaaaagccctcctccgacgaccccttgccgtagtacccctggtccaaaaacgaccccttgccggcgtagtactccgacga

SEQ ID NO: 55908 - DNA, 3427 bp, Oryza sativa
  Clone ID: PAT_MRT4530_57871C.1
atggcggagacacgcaagttcttgatgcccaaccagcccccggatatttcgcagatggtgctggaggctaggaagcgatggttgcgacccactgaaatatgcgaaatactctcaaactacaggagtttctctctctcgcctgagccaccaaacaggcccggaagtggctctctttttctatttgaccgcaaaacattaagatacttcagaaaggatgggcataactggaggaagaaaaaggatgggaagaccgttaaagaagctcacgagaaactaaaagctggcagcattgatgttctacactgctactatgctcatgtagaggataatgagaaattccatagaaggacctattggctgttggaagaggatttcgcgcacattgttcttgtaagctatcttgaagtcatgggtgtaaagcaaagttttagtcgtgctaaagaagaaattatgccgttatctggtgctgatagtccatcgtgttcaaattcgattactagtcagaaccagatgaccccacaaataatggatgcagctgaaagcccaattagtgggcagatttcagagtatgaaggtgctgaaccagcgaaattcggtgcagcagataattgcccagcaagctccagatacaaccctctcattgagatgcagcagcctctggatggaatcgtgatggataacattttatacccttcttcttcagccatctgtaaccaagtttcaggttatcatggtgaattgccaccaggaacatctaatctaaatggtcatacattttctcacagtgacatagctagaatgtttgatgattccagctctgggctaagagacatttccagaaccctgtttgattcaatgccttacgatgagcatttctcaggatatgcaaatggattcatggagccaactcttcattcttctttttccatgatagaggctaacaatctggaggatagctctcttctggagacatatacatctgaagctctttacactaacaacctcagccagaaggaagctgatgcactaagttttgctggcatatcatcgccagaggtgaatggtaataaatatactgaaggaagcaccaagcatccgctcctgaagcaattgtcattagatctatttaagattgagtcttctggtttaaagaaacatgacagcttttcaaggtggatgagtaaagaacttggagaggtggttgatttgggtatcaaatcaagttctgatgctctctggagtagcattgagattgtgaatgctgccgatggtcctagtgcaccaactaatgaacagttagatgcttatgcagtgagcccttcacttgcgcaagaccaactattcagcattcttgacatttcaccaagctgctcatatattggtttgaagacaaaggttctggtaactggtacattcctggcaagtaaagagaatgtggaaaattgcaagtggtcatgcatgtttggggatgttgaagtaccagctgaggttttagctgatggttccctacgctgctatgcaccagaacatcaatctggaagagttcccttttatgtgacatgctcaaacaggatcgcttgtagtgaagtgcgagaattcgagtaccgggattctgatgctcagtacatggagacatcacattctcaagccaatggtataaatgaaatgcatctacaaattcgtcttgagaagctactcactttggggccagatgacaatcaactgcttgtttgtggaaatgaaaaacttgagttaatcaatgctataaactccctgatgcttgatgagaaatggtcagatcagggatcaccatccggctctaaagatgttgtcaccccaaggaaccaaagtttaaagaaattgatgaaagaaaagcttcattgttggcttatctataaaatatatgattgtgagaagggcccaaatatactgggaaaggaaggacagggtataattcatttggcggctgcactgggcttcgattgggctataagaccaatactagttgctggtgtcaatgtgaactttcgggatgctcatggatggactgcacttcattgggctgcgtcttgtggaagagagcgaacagtgggcgtccttatagcaaatggagctgcagcaggtgcattgacagatcctacttctgaatttccttctggaagaactccagccgatttagcctctacgaatggacacaagggaattgccggttttctcgcggaatctgctttgacaagccatctgtcagcacttactttaaaggaatcaaaagatagcaatgcggatgaagcatgcagattaacaattcctgaagatctccctgaaatgaattatggtcagcttgctgtacaggattctcatgctgaatcattaaaggattcattaagtgctgttcgtaaatccgctcaagctgcagctaggatattccaagccttcagggtggaatcattccacagaaagaaggtcgtggaatatggagatgatgattgtggattatctgatgaacacacattttcacttatttctcttcaaaaggtcaaacaagggcaacatgatacacgtttgcattctgctgctgtacgtatccaaaataagttccgaggatggaagggaagaaaggagtttatgatcattcgccagagaattgtgaagttacaggctcatgtgcgaggacatcaagtgaggaaaaactataaaaaagtagtctggtcagtaggtattgtcgagaaagttatattgagatggaggagaaagggacgtggtttgcgtggctttcgacctgagaaacaattagaaggccagacacaaatccagcctgcaaaaacagaggatgaatacgattacttgcaggatggcagaagacaggctgaaggcagactacagagggcactggaccgggtgcgctctatgacacaatacccagaagcaagagaacagtaccgtaggcttacaacttgtgttgctgaaatgcaacagtccaggatgatgcaggacgagatgctaagtgaggcagctggtgctgacggaagtgatttcatgaatggactggaggacttgatatgcagagacgacccccaaatgtctgccatttggtgaagtcgaagttgttacatcagttaggctgatcattgccttgttcattgccatattagccttgtaaattcttccgcttgtatttcactcactgcttaatatctagctcatgctgttagtattatgtaactctgtgcactgatcataatagaatatttctctcctgtatgttacagataagttaagctgtaaattcttgtgctagatgttcagtgctcaccgttcgactctatatagcgttatacctaataccatgcgacttctattaaaaaaaaaaaaaaaaaaaaaactcgagactagttctctctctccctcgtgccgaattcctgcagcc

SEQ ID NO: 55909 - DNA, 1273 bp, Oryza sativa
  Clone ID: PAT_MRT4530_57872C.1
gcacgaggcgcatttcgagatgcccgcggcggcggcggcggcggcgcgcggcccgctcctccatctccggcggaacccggcgccacgccttgccgccgcccgccgctccttctcctcttccgggatgcggtgcgtcagcgcggccgcgggcgcgggcggcggcgggagggagcggcggtcgtcgccggcgttcggcgggctgctgctcgacgccgggggcacgctgctgcagctggcgcggccagtcgcccagacgtacgcgtccctcggccggcgatacggtatgagcaagagtgaggagagcatcaaggagggattcaagcgggccttctccgcgccatggccaaagacgctcagataccagggagatggacggccgttctggaggattgtggtggcagaggcaaccgaatgcaccaataatgattatttcgaagaagtatatgagtattacgctcatggagatgcatggcgtctgcctgctggggcttacgaaacactgcgtgatctaaaggatgctggagttaagctagctgttgtatctaacttcgacacacggttacgaaaattacttaaggaccttcatgtctcggatatgtttgatgccattgttgtatcatcggaggttggacatgaaaaacctgctccagagatcttcaagagagcattagatcaaattggcgtagaggccagcaaggcagtacatgttggagatgatgaaactgcagacaaggcaggtgctaatgccatagggcttgagtgctggctgtggggacaggatgtgaggacattttctgagatacaagaccggattctaacaagatttccacaatgacatcatagaaacctcaccgcaggtgatcttcacaggctttctttttttttctctccaaagcttcgttgtcatgaccaagaggcgccaacttttgtaatgtattaagtcaaatatcactagcattggattatcgatgtatttgcattttgcaaaaaatgagcgctgttgtgacgaacaatttggctataaattgtggtctcatgccattattgatccccctgaaagttgttatgtttgtgtactgttgactcgatccaacgactaactttttttatctccatgacatttacatgtgtcaaaaccataggtggttaaatttgtatatatttacaaacttgtaaacgtcatttgacagcagggtaaacaggcagtagattttcttaaaaaaaaaaaaaaaaaaaaaaaaaaaaaaaaaaaaaaaggggggggccttcgtgc

SEQ ID NO: 55910 - DNA, 1039 bp, Oryza sativa
  Clone ID: PAT_MRT4530_57873C.1
ctgcaggaattcggcacgaggatcaccacctcccctgtaactcccatttccagcttcacacattcaccagcctcactctcacaactcatactcctccttctgaacctatcttgtttgtcctctggaagttgagtagaggaagagaggaacagacaacagaaacaagcaagcatcttggtggttgttttggatacatatacaagcagggtgcaagtgcaagaattggtgatctgaatcctgaatcaaagttgagggaatcactaggatcaatcaatcaattccaagaggcttagctgaagcagatgatgaggatggacaagcttgtgaggcaatgtgacatggaggtgatgaagatggccatgctcaagcatgaggagaccttcaggcagcaggttcatgagctgcatcgcctgtaccgaattcagaggcagctgatgagcgacctgaccatggccgagctgagctccggccaccgccgccggcagcctcgccggagcagcaagcaacctcgccgcgcgctgaacctgcagctccccgccgacgagtacatcgtcagcgccgacgccgccgacgacaacgacgacacggccgagctggacctcactctcgccgtcggcggcggccgcagctcccgcaagtgcaacgccgccattgccgccgccgccgccgccgcaggtggctcctcccccttcgcctccgactgctccggcagcggcctctcgtcgtcgccgtcgtcggccgagtactccgacggcgccgccatgttcctccacgcgccgccgcccatgccgccgccgtgccagcgtgcaatggcgttcgacctcgccatgggcgacgccatgaagcagcagcagtcgccatggctggttcagtgccagtatctcagcctcaggatgacatgaacagcaagagcaagctcaagctcaagctcaagctgtccatgatcacactgtgctactactactctagcttaattatcttgtgtttgtagaagaagaagagaagaagaacacgaagaagctagccactagcttaatca

SEQ ID NO: 55911 - DNA, 3060 bp, Oryza sativa
  Clone ID: PAT_MRT4530_57874C.1
atggcggcggtggaaggagaggttgaatcgctgacgacgagggtggcggagctcaccacaagcctcaactccatcctgggatccctacaaggtatggagaagtggattccggcggtggatgaaggcatcaaggacctgcgtcaagctgtagaacaagttgcctcgcgggtgaccacgctggaggcaaaggcgccggcgacaactatgccggtgactattccgcccgttgggcacggcgcagctttgaaccaccagggagctgcaactggtaccccagtggaccaggggcgcgccctggtcaagggtaagctgcaatttcacaactcgccagttcattttgatttgggggattgctctgaaaaagggatgggaggattgcagagtcctggaaggtctagtggatctaggttacccaaaactgatttcccaaaatttgatggagacaacccaaagctatggaaaactaatagtgagaagtatttcagtatgtaccaggttccttatgaaacttggtcatcctttgccacactccactttgtagggaatgcagcgttatggttacaaacctatgaggagttgcactgtgtagagagctggccagaattgtgtgtagtagtgcatgggaagtttggtaaggacaagtaccaacaacatttagaggagttagaagggttgagtcaagttgggggagttgatgagtattatactaaatttgaggagttgatgcatagggtcttagtttacaacaagagatatgatgagacattttttgttactagattcatggggggtttaaaaactgagatcaaaacaactataaagttacacaaaccaagaacggttgatctgacattatctttggcaaaaacgcaggaggaattattgctggagagtagcaggaagaactactccaaagaaggatacaaggatgcttacaagccggtgattaaacctgtttatcaaggcaaagggattctgggagcatcaccagaggaggctaagaagcctgaggagaaacccaagtgggaggaaagatttgacacactgaaggcagcaaggagagctaggggagagtgcttcaagtgtggagaaaagtatggcctagggcacaagtgtcctaagtctgtacaattacatgttttggaagaattgcttgaagtgctccaattgcaggaggatggttcccaaggtgatgatgaagaagaacataaaagtgatgaagagctagttttgtctgagtttgctgtggctggaaccatgggaaggaagacgattcgatttcatgggatgatacagaaacaacaactgctgatactgctagattcaggtagttccagcaactttttagcagagaatgtggtgaacaagttgggacttcagtgtgaaactgtgccagcaactcaggtgaccattgctgatggtgggaaaatgcagtgcaatcagcttgtatctggtgtggaatggtggtgtcaggggcatactttcaccattgattttaaggtactgaatttggggggatatgacatgattctgggtatggaatggttagaatcattcagtcccatgtggatagattggagaaggaagaggatcagattcacatatatgggagatagggtgtcactaaatggagttaaaccaaacctctcccagaccacaatgctatctgttaagcagttgaagggcttgcataaagatggggcaatatcacagatggtgcaactttgtgcaatagaggaagttcctgatattaagcaagagttaccagcagcagttgagcttgtagtgaaggagtttcaagataggttcaagaaaccaactgagctgcctccacaccgccagtttcaccatcacataccactgcttccaacagctaaatcggttactaagaaaccttataggtatgcccctcagcagaaggatgagatagaacaacaagttgtacagatgctacagcagggaattattcaggccagttctagtccttttgcttcccaatgttgctgggggctcaatgacataacagtaaagaataaatatccaatgccagtggttgatgagttgctagatgaactagcaggggctaaatggttcactaaactggatctaaggtcaggataccatcagataaggttggctgaacaagatgaacataagactgccttcaggactcatcaaggtctatatgagttcagggtgatgccatttgggcttacaaatgcaccagcaacctttcaggggttaatgaacaccatattcactgctgccatcagaaagtttgtgctagtatttgtggatgacattctaatctatagcaggactctctctgaacatgtggagcatttgagatgggtgttcactctgctaagacagcatcaactctttatgaaggcaagtaaatgctcttttgcacaacaggaattggagtatctgggccacataattggggtcagagggtattatagaaagttcattcaaggttatggcctgatgacaaaacctcttacaaatctgcttaaaaaagaagtcaagtttgtttgggaggaaacccatcagcaagcatttgagtctgtcaagaaggctttaaccacagctccagttctagcacttccagatttctctcaggaatttgtggtggaaattgatgctagtgacaaggggataggggcagtgcttatgcagcaaggtcatccattggctttcattagtaaagcattgggggtcaaagcgcaagccatgtcaacttatgaaaaggaatgtttggcaatattgttggcagtcaataaatggagaccatatttactgcactctgcatttgtgattcaaactgatcacaaaagcctaacacatctgggagagcagcagttgaacacatcaatgcagcataaagcttttgtcaaattaatgggcttgcagtacaagattcgatacaaaaaaggggtagataatcaggtggcagatgctctttccaggaaagttgaggatgaagaggtgctggtcatgtctattagttcaccaaaatggatggagattgtaactgaaggttatgagtgtcggtga

SEQ ID NO: 55912 - DNA, 226 bp, Oryza sativa
  Clone ID: PAT_MRT4530_57875C.1
cacacgcttcggcgatagctaaaagccggggactgccgtaggggacggaggtcagcgggccaccaacttagcagcgtctgattcaacgaaaggcatgggcaacggcatcaaaacacggcactaggtccactctcctaaaaaaaaacccccccggccattagctgagacgcacgtcagtaagtatgatctacctactccatgccggtccgatagcactgcactattg

SEQ ID NO: 55913 - DNA, 180 bp, Oryza sativa
  Clone ID: PAT_MRT4530_57876C.1
atgtcgccgttggacaggggcacagccctgatgggcctgaatgcccccctgattcaatgcttcatcgtagccacgtctcagggtgaacagggcagccagaggcaggggaacgtggtgtcgcgcggctcgtccgtctccggtctccgcgcctatgttgtccggcgttcgggggaggagtag

SEQ ID NO: 55914 - DNA, 206 bp, Oryza sativa
  unsure (1)..(206): unsure at all n locations
  Clone ID: PAT_MRT4530_57877C.1
cccagatggctgccccaactaagttagaaccggcaacgagtatctaattacccagcgtgcacgagtntcactatacttggtacatctatactggtatctgagtggaagacacttaattgattcatntaatttactggttcatttctggtactatgttatgtggatccntttatgatcgaatgtttttaataaaaaaanaaaaaaaa

SEQ ID NO: 55915 - DNA, 388 bp, Oryza sativa
  Clone ID: PAT_MRT4530_57878C.1
actagtggatccccgggctgcaggacattcggcacgaggttgaagcacaaggtgggttgtgttcccgacctctgcgctaggagcgtgcaaccaaattgcattccatgaatctaattaattttgcctttatattggcttgttattttcaaccttgattggcatggtccagcatagtagtagttctttaaatttcacaaatacaaaaaggtaactactgtttttcttgatattgttgtctgattgctcttatgttgtcccccttgactttttcttccatccctgagcaagcaaatcaatgatgtgttgaagaatattatcattgtgctgcaggttcgtggtacctaagtggtccttatgtgtacatggatcaatttgctgatgataaaaa

SEQ ID NO: 55916 - DNA, 183 bp, Oryza sativa
  Clone ID: PAT_MRT4530_57879C.1
atggtgcagcaggcaacggctctcaccgaagttgtcaccatggtaggagagattgccaaagaaggggattacggtggagacgacccacatgtcgagcagagccccactagtgaggtcctccctattgacatcgaagtagtagtcatgacgagggactcgacggatacctccggcaaaaggtga

SEQ ID NO: 55917 - DNA, 174 bp, Oryza sativa
  Clone ID: PAT_MRT4530_5787C.1
tcggttatatatcattcgacacccatggcaaggcgggcttgtagatctgccgcgtgtgagacgctcatccactcactatacttgcattaatcaccatactacactgactgctacagcggacataaccatcctctcaacaacactacagacatgcatataaactacaatttacac

SEQ ID NO: 55918 - DNA, 358 bp, Oryza sativa
  Clone ID: PAT_MRT4530_57880C.1
tttcagcctttgtttttttttttttaattcaatcgagaattaactcttcattggctcaagtttgcgctatggtggacaatctcagataaccagttcaggtctcataagcaaaggacctgtctctagataatctcttgcatccgtgaagatataaatgtattagaagtgtgttcctggtctcttcaaatgcacatcagcaaaaagcctccaaccatgatatttcaaagaggtttatggattatattctggttctctcggcctgatatcattgaatctgttagtaatcatcactcttttgtaagcccatgtgattatctaattgttaatgagatacattccctgaaaaatttcaccttat

SEQ ID NO: 55919 - DNA, 435 bp, Oryza sativa
  Clone ID: PAT_MRT4530_57881C.1
atggagcacagaggcgacggcgcggctggccttgcggggtggcgcgtcgggcgtggaggaagctgccatcaccgccgccgccattgctgctggtggagccgtggacggagtagaggaggagatcgtgaagctgttcgtgaggtaggtgcactgcccaagcacatgatggaggcggagctgctcaccacattccagaaggtggcaatcgtcgacgaggtcaccatcatcaaggacaagagacctcttgtggtgtggatccgtacacccagatcaaggatctcgacctccaagctcccgtattgtcttgttctgtgttttgattttaggttctacctccaagctcctgtgttgtcttgttctgcgtttgattttgggttctacctccaagctcctgtgttgtcttgttctgcgtttgattttgggttctacctctaa

SEQ ID NO: 55920 - DNA, 475 bp, Oryza sativa
  Clone ID: PAT_MRT4530_57882C.1
gggataaaagcaaaggtttttttttttaaaaaccctggccccctttaggaattggggcaggattcctttatgaaatccccttgttgataaatgatcctttcaatttttttggggatccttccaaatttttatggaaacccccccacttttaaaaaaaaaaaaaggtttttttttagggttaaaaaaaaaagggaaggcctgcttaattttaagttgggtattaatgcaagaaaattaaggctttaataaaagtttttttcgaaagtagcagctttctttcaaaaaatttttttgcagccggggaaaaaaaaaaattattttattttcaggaacaaaaggaacacccctttaaatttgggccacattttcaggttttgaaacccaaaccgccttttttcccgtttttcaccgcctttttttttttttaaaaatttgcttttttggatggaaaaacaagaacaaaggttttgggggg

SEQ ID NO: 55921 - DNA, 1699 bp, Oryza sativa
  Clone ID: PAT_MRT4530_57883C.1
ggcgaagctctcgccacgcgctcgcgtggacgacgagatgatggccttcggctcgctgctgctctcgccgccgccgccgccgccgccgccgccgtccctcccgctaccggccagaccctccgccgcgtcgtacctagtcgcggtacgccgccgccgcccgccggagcctcgctgccgctcgcaggagatggcgtccagcggcggcggaggaagctccggggggctcggctctgagggggaatccgctgcggcttctgctatcggttccctggacctcgacggcgctgccgcgtcctcggacaaccgacctgttatttccgtaactttgagtgcaggggaaacatctagcaatggagattctgagaggtggcaaacgagacaacatagtacagatgatatttccaggagcaagtccaagccaagatacatcaaagcatttggggtagatttgtccgccgataatgtggctgttgctatcgtttatttcgtgcaaggagttttgggtcttgcgaggcttgctgtgagcttttacttaaaagatgatcttcatcttgatccagcagagctatattgtttcgatttccattgcagtgattccatccctctctttggatatcgaagaaggtcttaccttattctatcaggactcctcggagctctttcgtggagtttgatggcaacaattgtggatgataaatacagtgcagcactctctattattcttggatctctcgcagttgccatcgctgatgttgtggttgactctatggttgttgagagagctcgtggtgaaccacagagtacatctggatctctccagtcattgtgttgggggtcatcagccattggaggagttatgagtgcatacttcagtggttctctagttgatacttatggcgtaagatttgtctttggtgttacggcatttttgcccctcatgacatctactgttgcagttcttgtgaatgaaaagcgtttgcctttgggagaaaatgctacctcatcttcagattcagggttaattgagagctctaaggagcacattatgcagatttggagttcagtaaagcaacccaatatcttcctacccaccttgttcatattcctttggcaagcaacaccacaatcagattctgccatgtttttcttcatcacaaataagcttggattcactccagagtttctagggcgtgtcacgctcgttacatctattgcatccttggtcggcataggagtatataattcatttttgaaggaagttccattgagaaaaatcttttttgtgactacaatatttggttctgcccttggaatgacacaggttcttcttgtcactgggctcaatcgagttcttggaatcagtgatgaatggttctccattggtgattccttgattatcactgtccttggtcaggcttcctttatgcccgtgttggtgctggctgcaaagctctgccctcctggagtggaagcaactttgttcgccactctgatgtccatttccaacgctggaggcgtcaccggtggtctgttgggggcaggcctgacgcagttcttgggagtcaccaaagacaacttccaaaaccttgctcttctgattgtcgtgtgcaatctcagctccctgctgcctctacctcttctgggcctcctcccggatgaatcacccggtgtagataatgagcaaacaaaagtcgattga

SEQ ID NO: 55922 - DNA, 464 bp, Oryza sativa
  Clone ID: PAT_MRT4530_57884C.1
gccatgttaggtcgctctcgatttcgatttactccaactccaccgaaagagatagccaagtcggctctgataagtgtagaggagatggccggttctaagcagaccgaccgtatgtacaccggcggtaaggcctctaggatgcagctcgctaccatagtagagaggaagtctgttacgaccaccggcggggtgaagaagccccaccgttacatgccggggacggtggcgctgcgagagattcgcaagtaccagatgagcacggagctcctgatccagaagctccgcttacagctcttggtgcgagagatcgcgcatgacttcaagaccgtccttctctttcagagccacgcggtgctcgtcctacaggaggccgtcaaggcctacctctttggtctgtttgaggacaccaacctatgtgtgatgcactccaagcgcgtcaccatcatgccgaatgacatctagct

SEQ ID NO: 55923 - DNA, 1762 bp, Oryza sativa
  Clone ID: PAT_MRT4530_57885C.1
ggtcaagccacttccacgttatcattaaactgaacccaatttccgaccagcggcggtgaaaacatgaacccagtttctcctccactcccgaagttggaaaatagatttcggttcagacacctcgactgcagctttcgagacaacctccgatgacatcaccactccatcctaaccaccatctctgcctcgaatccactcaacaatccgctcctcccctgaaatcatgaagaaacgcccactatcttcagtgccaccactcggctgcgctctcctcggtccaccttcgtctgcaagcttgaaccctcctctccggccggccggacagctagcggggagtccgttgagtgatggtgatggaacgagtggggatcgggggagctcaagagcaatgtacatcttcttggcgctatcggcggctttggtgatggagaccatgagacgcatacggtctcatcatggacatcggcacctcttgaaaccaattgccgtcgtcaccctaggggaggccgccgggtccgccctcccgtcgtcgctggcggcagatccgtgcgagcggggggcggagagacgacgagaatcgtgtgagaggggaagagatcgccggatccgcacctcccatcaccacccacgaaggatccgcgcgacagtggggaggagagacgacaggatccaagcgaggaggagtgaagccgcccacaggatccgtgcaggaggggaaggggtcgccggatccgcccctcccgtcgccgacgatggcggatctgcgcgagaaggaggcagagaaactatgggatccaggcgaggaggggtgaatccgtctcaatacggaaatgcaccatcgaagaagctaaatgcaatagcaggtggtggcatggtggatctggttggcaacgacggctttgagcaggagtggctgctggcgatatatgaggaggatggagaaattcctaactcatcctatgaacaccccactttggcgctggccggggcgcgccgccacctccgcctcgccgagtccaaagcgtcgggcggcaccgcgaagctggaggagctgctcgtcgaggagacgtggctggaggcgcttcccggggagctgcacaaaccttacgcgctcgagctctgccgcttcgtcgcccacgagaggttgcatagcccggtgcccgtctacccgccgccgcatttagtcttccacgcgcttcacgccaccccgttcgaccgtgttaaggccgtcatcatcgggcaggatccataccatggacctggtcaggcgatggggttgtctttctcagtaccagaggggatcaaaattccttctagcttagcaaacatatttaaagagctgcaaaaagatctaggttgcaccgtgccttcacatggaaacttggaaagatgggctgtgcaggtcgtcctgaaagcgacgagtgaagccggaactgtttttggctcagctccagctccagaaagggtgaagctggagctgaagctgtgccaaacagtcccttcctttgaaaccattagctgttactgctggtgggtagatctctctcctgtggcactcaggactacagtggggcagcggccagcggcatgggaaggccaagcgtccgcgtcggcgctggccgctatcaagcggtcgggtggcggtccaccgcgcgagatctcccccgcgatcctgcgccatgccaacgccaacgccaacgcccatggtctggccatgcaacgatgttcagtcatggaggcctcaaccgtagcacgtgcctag

SEQ ID NO: 55924 - DNA, 947 bp, Oryza sativa
  Clone ID: PAT_MRT4530_57886C.1
atgcggccgccgtcgccgccgcggccgctggccttcccgacgctggactcgctggcggcgttcctcggctcgcgcctgccggcgtcggcgctggcgtcctggggcacggcgccgggaaccaagaccctcctcaacctcttcctcgagctctcacagggggagtgcgtcctcatctccgccgccgccgccgcggcgccgccatcgcagcagcagcagcagcatcccgtcgtccgcgccgtccacgtcgccagcgtccggatccgcaacgggcgcggcgcgctgctgatggagaccgggcagctcctctccgacggcacgctccgctcccgcggcgggctccgcccgctgtcggagaagatgcgccccggcgagacccccgaggccgcggccgtccgcgccgtccgggaggagctcggcgagcgcgtccgcgtccggatcctgggcggcgaggaggcccgcgtggaggagcgggactcggcgtcctacccggggctccacgccaggtacgttctccacgcggtggacgcggaggtggtcgagggcgtccccgaggacggcgagttcgacacggaggagggcggggagcacgaggacgaggtcgtcgtcgatggagccgccgccgccatcaccgtgaagcgccattactggaagtgggtggacgacaacgacaacgacgaggaggatgtcgccggcgccgaggagggcgcgcgccagagcgcgcactaggaagcatcagacatgcatctcggctggcaatttttaccttgcaaaattctgtaacttcgttcgtgtcgaccaacgattcggtgtcattttcgtgttgtgatcctctcctgctgctgtcaaaatatggtgcccaattgtttcacagattgattactgtgtgttattgttggaataaaaagcgaattatccatcttttctcattagcttaaaaaaaaaaaaaa

SEQ ID NO: 55925 - DNA, 195 bp, Oryza sativa
  Clone ID: PAT_MRT4530_57887C.1
atgctctcctcgcgctcgttcctggccagtggccaccacgatgcgccgatcgggagcaccggccgccgcaccatatcaccaggagcagacgccacggagttcgtgctgctgcgcacctctagccgaagcccgaaggccgaagcagctgcagcgtctgtacaagagaggacaggagaagaagaggaggaggaatag

SEQ ID NO: 55926 - DNA, 747 bp, Oryza sativa
  Clone ID: PAT_MRT4530_57888C.1
atggctcttccgacggcgaccgttgccagcctcccggagctgcgcgccctcgtccgggaggtggtcggggagtgccgcgtccaggtacgctccgtcgcggcgctgcgggacgcccccgagatgtaccttgccctctccgccctctccgtcgactaccagtggcaggtcgaggacggcgacctcgagcgcctcgccgacgtcgccgagctcgcccgcgtcctcgacctcatgctcaaggtccacatcccgcagctcaagctccagctcgtcgacgtcgacctgcggcgcgggctcctcaacgacctcgtcggcttccgcgtgaggggttctctcgccatccacgcgctcacccaggacatggcggacgatgtccttgctgccagccccatgcccaccgccggctccggtgccctgcttcttcagacgcactcccgtctcacggagctcctgctggaccgcctcctcctccactccatgcaggcgcgggctctcgcactcaggattggtcatccgatctcgacgagtgtgcaggcgctcgacgagcttctgcacaacgacatcgccaacggcgtgcgagcggaccgtctccctgaggcgactccagatagtccatgctgcgagagtagcaatggtatcaaaacctcgccgttgagagctcggacacacatgctaaggtggggcaagcccctgatgcttaacctgtccgccgtccagcagcggttgagtgcgaccagccagctgaagtaa

SEQ ID NO: 55927 - DNA, 1123 bp, Oryza sativa
  Clone ID: PAT_MRT4530_57889C.1
gtcgagccaattttttttatgttttttcttagggaaaactaaaactaatacactagttaatcatgtaagaatagtcaaatatctgtgacaatctagcacaagcgaagtgagcaagtaatccaagtaaacatcaaataagtcaacattagtctactcctcgtcgtcatcgccgtcgacctcctcttccgccgccgccgtcgccgccgccttccctctactcatccaccactgtctcctcctcctccactgtctccttccccttggccttcttctccagcgccttcaccaagctggcgaggcaggcggcagcctcgtcggcggcggctgtggcgcacttgcgcatcaggtgctcggcgacgtcggccggggtgatcttgatcctggcgtcctggaggagcgatcgcacgtcgtcgaacaggtggtgggcgtcgatggcgaggtagttcttggccaggatcttgaacgtctcgaagcagcagtatgacatctcgatgtgcttgtccatgcggcctcgccggatcagcgccgggtccagcttgccgacgtggttggtggtgaacacgacgatgcgctcgccgccgcacgccgaccagagcccgtcgatgacgttgaggaggccggagagcgtcaccttgctcgcgctctcgtccttggcggcgtcgacgggctcggcggcggcggcggcggcgtgaggagacctcttcttgcgcttgccggtgaggtcgacggagcagtcgatgtcctcgatgacgatgatggacttgcccttggtctcgatgaagaggcggcggaggtcggtgttggtggccacggacgtgagctcgacgtcgtagatgtcgtagtcgaggtagttggccatggcggcgatcatggtggacttgccggtgccgggcgggccgtgcaggaggtagccgcgcttccacgccttgccgatgcgggcgtagtagtccttcccgtcccggaacgcgtcgaggtcgtccatgatgtccttcttcttggccgggtccatggcgagcgtgtcgaacgtcgacgggtgctcgaacgccacgtagctccacgccgacttcctgtaccggtcgccgccggcgttggtgaacagcttgcggcggcggttgcggagcat

SEQ ID NO: 55928 - DNA, 6279 bp, Oryza sativa
  Clone ID: PAT_MRT4530_5788C.1
atggaatctatagatgggaagaatcctactcgggcagaactgggtcgttggcgtatcgtatagggtctgatacctccgagttctatgaggagacctcctcatctgcgatataaaagggccccccggggggtttagacatcgaatctcagagccaacacaacctccacagcctacgaaatccttgtaccaacgtaccccaataccctctatatccggtctacgggtatcatccgtcgacagtggcgcgccaggtagggggctttggtactcaaggttctactactatgtcatctagcttcgtcgacaacaacgttagcaccagcctcagccaagtactccctgcttcaacaatgctggtatggactcaagtcggcgaaatcgtcttcccggtttacaccacgacgccgatctcaaccggtcctccaatgaccggagacgagaacgcagtggctacaaaccaaggcgattccatgtcgaaaaatcctcccatcgagacggagaacggaatatcgatggcatccaagctcaagaaggattctgatatggccaaaccttgtccttccgacatgaaccatgagccaacaaagatgacttccgaagccacaaggtcttggtgtcctatccacaaaaccaagaaacacactctgcaagattgatgggttttcctcaacgtccgtgctgaaattcgcgcctgcaaagaacgtggaattcagcgtacttctccaactcgggatgtctattgtcctattcacaagacaaagaatcacgacctctcgagctgcaaagtctttctcagtgccatgaaagctcagtgtcctaagtcatacgtccccatcagggataacggcaaggaacaaggagcgactccaacttcagatcgattcgttggggtaatcgatatcgatcctcacgaaccatcggtcttacatctcctcgaggactatgggtcatcgacaacgagtgcgccgcgggaggtattggctatcgatgacatcggcacgtcagcgcacgccaacacagaagcggggaatcaatcgactactccagcccagcacatcagggccgttcaagcgatactgagggaaactccttacgatcctgttctgaacgttgacctcgagcgttggacagaacgactacgggaatcggtgactaacctcagcaacgcgtttgaagaagccgctaccgcagcacaccaggagcagccaccaactagcgaggccaatggtgaagatccggaacggagggaatcacctcaacaagctaccccttctcctcgcggcactggcgatcttcgagatcaaatcaacggccgctgggaagcacgacgcacacgagacaacgtgaatcgctctcggcgtcatgtctcttcatggcgccatgataacggaaatcgaggagaccgctcaaacgaggaccgggaccacaacaaccaccacaatcacaacaatcgcgaacgacgggtgctagacaatactggtcatggccgccgccgtatcgacgatgatgatggagatcggcgccgagacaacagcggaagacgacgacaggattcctgagatccaggccatcatcctcgtaatcgtatgccggaaccaagcgacccatcgtcatcgtcatcatccgcgtcctcctcatcgtcagacagacatccacaaggacacacgaccaccggcaacccaccacccccaacgctgggtgtagggctttcggtcgttccctacgtgatgtccgatggcctgaaagattccgacccggagcaatagaaaagtatgatgggagcaccgacccagaggagttccttcaagtctactccacagtactctatgctgccggagcagacgacaacgcgttagcgaactatttaccaaccgcgttgaagggttctgcatgttcatggctgatgcatcttcctccctactcaatctcttcgtgggcagacctgtggcaacaattcatcgtcaatttccaaggaacatacaagcgccacgcgatcgaagacgacctacacgcgttgacacagaattcgggtgaatcattgagggaatatgttcgacatttcaacgagtgcagaaacacaattcctgaaatcaccgacgcttctgtaattcgcgccttcaaatccggtgtcagagatcgctacactacccaggagttggcgacaagacgcatcacaaccactcggagattattcgagatcgttgagcgatgcgcccacgctgatgatgcgctaagacgcaagaacgataggccgaagaccgggggagagaagaaaccagccacggacacatctgagtcaagcaagaagaaaaatcgcaaaaacgggaaaaggaaagctcaagcggaagtcctcgcagcagaatacgcgaaccctcccaaacgcatagacccacaaagcagcgacacaaagaaatcatggtgccctatacacaagacggacagacattctctggaagattgccttgttttcaaaaagtcgctcgagaagcacatggcatttgaaaaaggcaagtgagtacacgttgtcgagacgaacgaagagacagctcctcacgaaccggactcagcgtatccagacttcgacctccacgtctcacacatcttcggcggttccacaacgacgatatctgatcgtggtcgaacccactattcggaacatcaaggtagcgcgagttctcattgacggtggtagctcaatcaatcttcttttcgccaacactttggacgcgatgggaattccgcaaaacgagttgataccaactgatcaactcttccatggaattactccccaatcatcgtccagacctttgggcaagattacgttgcccgtgactttcggccaagccaacaacttccacacagaacatatcacctttgatgttgctgaattcgatatagcttacaacgccatcatcgggagaactgcacttgcaaagttcatggccgcatctcactacgcatatcaagtgcttaagatgccgggaccgaagggaacaatcactattcaagggaacgcaaagctagcggtgcaatgcgacaagcgaagcctcgacatagtcgagcaaacgcccagcccacccgccacgactgagccacccaagaaagtgaccaagacaaacaagacgccgaaaccagacggcgccatcaagattgttccactctccagtgccaaccccgacaagaccgaacttgcgctcatcaccttcctccgcgacaatgccgacgtgttcgcttggcagccgtccgacatgccgggggtccccagggagatgattgagcacaaactcatggtgcgacccgatgccaagccagtaaagtaaagactgcggagatttgcaccagaccggaaacaagccatacgagaagagctcgacaaacttctcaaagctggcttcatcagagaagtacttcatccagagtggctagccaatccagtcatggtgcggaaggccaacggaaaatggagaatgtgtgtcgacttcaccgacctcaacaaggcgtgccccaaggatcactttccacttcctcgaatagaccaattggtggattcaacagccggttgcgagttattgagcttcctcgacgcttactctagctatcaccaaatcagcatggcaaaagaggacgaagagaagacagcattcatcatgccgttcggggtattttgctatgttaagatgccgttcggactgataacagctggggatactttccagcgcacggtccagggtgcacttagcaaccagcttggcaacaatgtcgaggcttatgtcgacgacatcgttgtcaaaaccaagacaggcgactcattgattgacgatctgcgggaaacgttcgacaacctccgacgatatcgcctcatgctcaatcctgagaagtgcacgttcggagtaccatcgggcaagctgctcggattccttgtctctggcagaggaatagaagcaaaccccgagaagatcaaggcaatcgagaatatgaagtcgcctacaagactcaaggaggtacaaaagctaaccagatgcatggcagcactaagcagattcatcgctaggatgggagaacgaggacaacctttcttcgctctgttgaagaaacaagacaaatttgtatggacacagaaagccgaagaggcattcattgcactcaagcgctacctatcaaacccccttgtacttgttgctccccaacctaatgaagaattattcctctatatttctgccacgccacactccgttagcactgtcattgttgtcgagagagagaaagtacagcgaccagtttattacatcagcgaagctctccacgacgcaaagacaagatacccacagatccaaaagctgctttacgcagtcatcatgacatcaaggaagctacgccactattttcaagcccacagactcacagttgtctcctctttcccttttggtgaagttgtgagaaacaaagacgttgtcgatcgcattgcgaaatgggtagtcgagctaagccagtttgatgtccactttgtgccacaaacaaccatcaagtcccaggtactcaccgacttcgttgccgattggactatgccagataacaaatcagacaaccaaggcgacaatgcaacagggacaatggcgttcgatggcgcactcaacagccaaggagcaggggcaggatttatcttgacatctccctccggagatcaattcaagcatgcaatccacctcaacttcagggcgaccaataacactgcagaatacgaaggactacttgccgggatacgagctgcagctacacttggggccaagcgactaatcgtcaaaggggactccgaactagtcgcgaaccaggtacacaaagattataaatgctctaaccccaagttatccaagtatctcgcagaagtcaggaagctagagaaaaagtttgatgggatcgaggtccgacacgcctaccgcaaggacaacgtcgagccagacgacctagcacgacgtgcgtccagacgagaatcgctcgagcccggcacttttctcgatatcgtgacgaagccatcggtgaaagaggttagcagcgaagtcagcccgaacacccccgacattagctcggacatcaccgaggcagaacgcgccgttgccgacatcgaaaccatagacgactggcgcatcccactaatcaaattcatcagcagcgaggagttgcccgaggacgacacagaggccgagaaaataacccgtaaagcaaagatctactgtatggtcggcaacgatctatacaagaaagcgccaaacggggtacttctcaaatgcgtctcgaccgacgacggcagacacctcctcctcgacatacatgaaggcatatgtgggtcacacgccgccggtcggacattggtcggcaaagcttttcgacaaggctttttctggccaaccgcccttaaagatgcatgcgacatgtaaacacacaaagctacccacgcaagcgctccaaactatccctctgacttggccattctcgtgctgggggctagatatacttgggccattcccacgaggacagggcgactacagattcctattcgtggcgatcgataaattcaccaaatggatcgaagcagtacccacgggggaaatcaaggccgacaacgccatcaaattcatcaaagggatattttgcggatacggactaccataccgcatcataactgataacggctcccagttcatcagcgccgatttccaggactactgcatcgggctgggggtcaaaatatgcttcgcctcggtctctcaccctcaaagcaacggacaagtcgagagggcaaacggcatagtactacaagggatgaaaactctactatgggctgtacgcaccacaccgacaacgtctaataaggaaacacccttcttcctcgtgcacggctctaaggccatgctcccaggcgagctacaacatcagagtacacgagtacagaagtactccgacgagaaccaggaggggcagcaagatatcgatgtaaatcttctcgaggagcatcgggaacgagttgccgtccgagcagccagctatcaacagaccctccgccgttatcacgagaagcgcatccgtgcacgcatactttcgatcggcgactatgtcctccgacgagttcaaagccaagcagggcgaaacaaactctcacctaaatgggaaggaccttacacgatcacacaagtcttgcggccaggcgcattcaaaatcgcagacggcgatggtcgcgaattagcaaattcttggaacattgaccaattacgtaaattctatgta

SEQ ID NO: 55929 - DNA, 557 bp, Oryza sativa
  Clone ID: PAT_MRT4530_57890C.1
gggggtcgggttttttttttttttttttttttttttttttttttttttttttttttttttttttttttttttttttttttgaggggaaaccaccctttattaaagaaggaaaacaaagggcccaaacaaagagctttttaaccaaaacccaaactggggttagaagggggcccccaaacaacaaaagaaactggggacccggcccctaggaggccccccaaaagggacaaaactttggagcaaccccaccacccccgtctttggcaactgggaacttcttaatggggggggacccttgaaaaagaaacccccccagggccccccaggcgggcccacatgggtttcattctttccccaaggttgggggccaacaaaccccccaggggaccactttggtcccctacgggtcttttcggaaaattaaactcttcacgcggaaacgggaacccgccctttaatggcaaggtttcaacgggcaattttggaacttcttcaaacaaaacaacagctgggggaggggcttcatgggctggcgggggggcaacttctggttgggc

SEQ ID NO: 55930 - DNA, 564 bp, Oryza sativa
  Clone ID: PAT_MRT4530_57891C.1
atggaggaggagtggggggtgccctacccggactgtgtcttggacaacgccggcgctggcttcgtgggcggcgccgccgccggcacgctcgcccacctgttcacgggcctccgcgacttcccctgcggccgccacctcgccggcgccgcccaggccgtccgcgacggcgccccctgcctcgccacccgctgggccgcccgcctcgccgtctacagcgccgcctgccacgccctgtcgtcggcgaccgacaggcacgacgacccgctcgtctccgtcgccgccggcgccgccacgggggccgtcgcccgcttgcgccacggcccgctcgccgtgggccgcgccgcgctcgtcggcgccgccacgttggccgccgtggagctcatgatcagggatagcgtggaagagcacgacgatgacaagccccgtagaaaccagcggcctttgccggcgaagaccaaggaggatgacgtcatcctgcggataacgccggcgattgaccatttcccggtgcctgacccatttattgctgcctctagaggtagcctcctccggtttcggggttaa

SEQ ID NO: 55931 - DNA, 347 bp, Oryza sativa
  Clone ID: PAT_MRT4530_57892C.1
ttcaaccaaaactaggccgtcggctcagcgccaagcgcattggcgctgaggttggctgtgtcagcgccaacgggactggcgctgacattgtgccaccgtggcggccgggccgatcccctagctgacgtggcagctacctcagcgccaaccgcttcggcgctgatgtgcccaacctcagcgccaagtaagttggcgttgaggccggtgctagcaattgatggcactttcttaaccggtaaataccaaggtacattgctcacggcaataggggtcgacgccgggttacatcttgttcccttagcgtttgctatgtagttgtcagttccctcagctccatcacttgccat

SEQ ID NO: 55932 - DNA, 233 bp, Oryza sativa
  unsure (1)..(233): unsure at all n locations
  Clone ID: PAT_MRT4530_57893C.1
ctaatttataaaanacacttccaatcatntatatggagatactanttaagnatgcgataccgaggantgaanctnncggnngtagagtggatactagtacaatcaccgaactactccanagctnaactccagagaggagggacnactcaaaagagaaacagaggatcctctggagttgtctggctagggcctcgggacgcgtggatgctagcttctcctatggtgagacgact

SEQ ID NO: 55933 - DNA, 318 bp, Oryza sativa
  Clone ID: PAT_MRT4530_57894C.1
tttatttttaaattgcattgactcatacgctaaggttaaactgatatgccttagatggcctattttgaagtgtaaactttggcgataggattgaaagagatgcaaatctaaagcataatatttgacatcgaatcattgtctgattactgtatacacgcaggtaaggcaataacttttatccggatgttggtagaatctgtatggagcttgttattgaagagaaagaacctcataaatattctctgctcatgggatcatctatgcatatgccataagaggtacttgattaatatgagttcatttatactaagaatggtt

SEQ ID NO: 55934 - DNA, 298 bp, Oryza sativa
  Clone ID: PAT_MRT4530_57895C.1
gaaaggggcaaaccccaacttttttaagtttctgaattcggggtgggtcattttaaattcattaccgcgggtaccaatctgggcaaaatttggtccttggtgccatgaaaagagagaaacccccacaatgggggttgatccattacacacggcggtaatacaccgggggggagcacacccaccaatcatactcatatgggcggtttttattgcggactaattttgcaaggggcccttccgggtgaaaatggccggggccaaaaagcctcacatggcgaaaatggcaggggggccatta

SEQ ID NO: 55935 - DNA, 590 bp, Oryza sativa
  unsure (1)..(590): unsure at all n locations
  Clone ID: PAT_MRT4530_57896C.1
aaaatangttcggnngnanggggggnntggggggnaaaaattnnaanaggaaangtagancctgggtaaccccaggttgaaataaacntcaataagggaaanaaagggggttccccgncggggcgccgtttttggaaaangnnatcccccggggcgcngaattngggnaggggttaaaaaaaaggngnnaaacaccaatttcgcaagntcgntcagggaaaanagttttttnaangcaaaaaggnagttagtggaatngnangcccattttcagggttaaacaagngcaacaattaaggtnanttttgggcaaggttttgtcaatgtttcaantcaagaatcngcaaagttcaanccaangaagctnacanctgntntantgcngcttanncctccatttatnaganttatttgngatgtaatgcaagaattnangncctgtcattgtagttgccaganttaatggcanattgangcantcaagaaaaccatttgggagtttnggntccnaaaanaaaaaaaaaaaaaaaaaaaaaaaaaaaaaaaaaaaaagaaaaaaaaaaaaaaaaaaaaaaaaaaaaaaaaaaaaa

SEQ ID NO: 55936 - DNA, 1185 bp, Oryza sativa
  Clone ID: PAT_MRT4530_57897C.1
atggaaccgtctgtgagaagggagcgcggcgccgtcaagaagccgacgatctcgtcgccgttcgacgccgtcagtgaggatctcctccgactccctaacatggcgtcactcgtcaacgccgccctcgcctgcaagcgctggcgccgcgcggcttccgaccccgccattttccggcgcttcttcccgctccgccgccccccgctcatcggcttcatcctgaccgaccgcggcgactccgtcccctacagctgccccaaccactacttcgtcagcgccaccacccgtaagcccaacctggcgtccgccgccgccgattgcgacatcttcttcgaagacgtccctgatatcgattcgggcgagcaacgcggcggtggctacttcgacgagtggcgcctccgcggctgcgacggcggtcgcctcctcctgtcccgcggctgcggcgggtttgactcgccgtctacgatcccctcgcgcggactgccatcttcttctccgccgcaaaacttccatgggtcgttcctcaaggtcaggtacgcgattgtcgtcgacgacgccgacgcctcgttccgggtcatcggcatcgacggcgacatgttcttcgccgtcttctcctccagcaccggtaaatgggccttgttcgaccacacggcagacctgtacgaattcacccgcagcgacggcatgcccgccggccggttcgtgtactggcggtccaacaacaagaagtgcagccaccatggagtggacggtcaccgtggcgccgtttccggtggggtagtcgtactgcatcgccgacttggcggagcacggccggctgtgcctcgtgtccagcaaggaacaaaaccttcagctctgggtccgcagcggcagcagcaatggtggatggagatctcgctgttggatcagttcgggtacttgaagaagctgcggcgtgaggagtggatgaagagggtgcgtgtcctggcagcaaaggctggttatgtctacatggagttctggtccatcaggaagcccaattcctatcttctcgtcctcaacctgaacaccatgaagctggacatcatttgcaacgatgcggacgagcctttcaggggtcctgcacttccattcttcttccgtttggcacctctggcaccaagcccggatgataccaacgatcttcacgttccatctgcatctgcttga

SEQ ID NO: 55937 - DNA, 466 bp, Oryza sativa
  Clone ID: PAT_MRT4530_57898C.1
atgacggcgcaacagacgggctggttgatggcgcagcggacaagccggcagaggtcgacatcatccagtgaaaacggaggaaacagcgtgaagtttctcgaaggtgacgtccgcgcgtccaactttggtcacgtgttcctcggccaaatccagggcaagcggcgtgaggagcgagcacttgcgcacgttgtggagtctatatccaagaaaagctgccagatgagagagggagttccagcaagccgctgcgtcatccccgagctcatcccacaggagagaggggggatccggcgcctctccgcccggggtcaccgccgcttcgaccacctctccgcccgggcgccgccacttcggtcgcctctccccgcacgcggtgccgagctcgtcgctcgatttccgccgacaccccgacggggaaggtggagggatagcccggcggagatgaggaggaaaagtggcgccgacg

SEQ ID NO: 55938 - DNA, 708 bp, Oryza sativa
  Clone ID: PAT_MRT4530_57899C.1
atgagcccgctgccgtctcccgttacacctccctcccctgtcctacagtgcggcagtggtctgggcggagaagtcagcagtggtggtggtccgggaggagaatgcggcggcggtggtccgaacggagaaggtcgtagtggaggagagtgggtggcgggcacggcgcggagggccgccgcgggagagcgagctatctgccgtgtgtggcaccagccccgcatccgccaccggcatcccagccacccgatccacctcctccaccacgcgagcaatctccgccgctgccaccggaccgcctggatgagctccgcctccaccgcccactacacggaaccaatgctaattagccccagatcggagtgcatcgaagacaggaagctgcaacagactgcagtctccaactccaagaactcgatccgtacctgcatcatacgctactccgtgtgggggaggaaaaaggaaatgaaaaagaaaggcgacggcaacgctcgtcgagaacgaggcccaagccactctgccaagccatcgcggaagcttgtctcagggccctgcgtcgacaccgatatgcagatggaggctggcaaggagggaggggattcggggaccgagaccgaggcgatggggaggcatgggggcagcggatccggcgatgacgaggacgattgtggccatgaggagggtggcggcggcggcggcttcttgggttag

SEQ ID NO: 55939 - DNA, 422 bp, Oryza sativa
  Clone ID: PAT_MRT4530_5789C.1
cctctgccgctactcctcccccttcccgacggcgccgctccatctccccatcttcctcccgaccgtccttcccttcctcccctctctcacctccatcgcacgacggatccgacgacgttgaccgcggatggatccgaccgcggtggtggcggtcgaggacggatccggcggcggcggttcccgccgacccctctcggctccctcccgcggtggatctaacggcggcggcggcatcggcgccatccccggcgtggcgacgcgaccaggagcggcggtgggcttgggagccggtcgtggcggaaagcggcgatgccgacgacgacaatgacaacgacgatgacaacagcgacgacgaggcggctagggttagggtttggattttatttttgatttgggatgttgattttgtggggattgttgat

SEQ ID NO: 55940 - DNA, 396 bp, Oryza sativa
  Clone ID: PAT_MRT4530_578C.1
atggcggcgagcccagctctcgcaccaacccgcacggtgccggtactgccgccgcgcgggccgtctcgccaccggaacgccgcggcaccgccgtgtcggcctgcgacggcgcggatcggcgcgtctccaggcgacggcgcggccgcggcagcagcggctgcggtggagcagggcagtcggagcgaggagaaggataggaagcgatgcctgcggtgcgggagcctgtatctcgacgaggacaactcccccaccgactgcgccttccacggccacgtcacagttttgaaaggaggcaccacgtttgccgtgggggttagaaatttccacattaatcggagaaaaaagaagaaaacgaaaagtagagtccaagtagaaatacaatttaaaaatatctga

SEQ ID NO: 55941 - DNA, 692 bp, Oryza sativa
  Clone ID: PAT_MRT4530_57900C.1
gcacgaggcagcatcaacctacgcagtatccgacttctgaagagctgagcattgggaagatcaaggtgagggcgtttgatttaggagtgccatcaaattgctcgccgtgtgtgggaagattactatgctaagggcgacgcggtggtctacctcgtggatgcctacgacaaggagaggttctccgagtcgaagaaggagctcgacgccctcctctcggacgactccctggccaccgtccccttcctgatcctgggcaacaagatcgacatcccctacgccgcgtcggaggaggagctccgctaccacatggggctgagcaacttcaccaccggcaagggcaaggtgagcctcggcgagtccaacgttcgccccctggaggtgttcatgtgcagcatcgtccgcaagatgggctatggggatgggttcaagtgggtgtcacagtacatcaagtagggtgttgttggtttttgctggaaaaatgttgaggtagtcttcatagttcatactcctgtttcaccttaccacagagatgattttaggagggagctagagctatagctagcaatctggtcatggtggttcatggttcttccggtacatatgtggtggaagcagcgaaagactgggatttgtgctagatttttcttcagttaattaaaaagtgtgacttttaaagaaaaaaaaaaaaaaaa

SEQ ID NO: 55942 - DNA, 483 bp, Oryza sativa
  Clone ID: PAT_MRT4530_57901C.1
atggaagccaagggagtagtggtgatcacccttgtgctctcccttgcagcggctgcaggtgcggcccgcccgaaagaaaccacgatgggtttgacccgccgtggattggcgtctgagccgatgacgcacctacacttctacttcaacgacaagttgtatgtcatggatgacgcgctgaccgaggggcctgaacctgagtcccagcccgtgggccgggcccaagggatgtacatgagcacgggcctcgccaagcttggcttgcttcaggtcatgaacctggtgttcacccatggcccctacaacggcagcgtggtcaccgtgctcggccgcaatggtccctttggcaatgtccgggagatgccagtgatcggcggcaccggcactttccgtttctcccgaggctacgcccagttgaagacgcacaccttagacctcaagaaaaacgacgccatcgtcgagtataacgtctacatcatgcactga

SEQ ID NO: 55943 - DNA, 177 bp, Oryza sativa
  Clone ID: PAT_MRT4530_57902C.1
atgggagttagcatcccgactgtgggcggtggagcagacatgcgacaaggtggtagcaacatcacggaagacgggggagggctcgccagcgccattgccaccttctggtcagccggcaaggccaggaggtggcgcatggggtggtggagtcccttctccatgtccaagttggggtag

SEQ ID NO: 55944 - DNA, 489 bp, Oryza sativa
  Clone ID: PAT_MRT4530_57903C.1
atggcctccttgaaggccctggagccgcgaatcctggcgtcctacccactacgggagagaggacgaatggtgagctacacgcctttggcatggtgcccttcttcatcccggaacgaggaattagaagcttctacttctactcgcagcaacgatgacgatgacgaggactcgactcaggtgacggtggcatcctggagatccccgagctgccggccattggaagactacagtgagcccctgttccgcaacctgatcaccttcgagcagacgcgccccttcacgccgggccacgtcaccgcctacgccatcttcatggacagcctcgtcacctcgccggaggacatgaggctgctgctcatcatcagcagcgtgctggtgaaccagatgaacggagagcgggatgccacgacggggttcttcggccgcctgtgcaccgaggcacacctagacgctgaccgcaactacctcgcggcgtcatccacgaggtga

SEQ ID NO: 55945 - DNA, 161 bp, Oryza sativa
  Clone ID: PAT_MRT4530_57904C.1
ggatatgagcgaaaacataaaacatttaatggaggtcattttggttccgtcacgtttccgttattttgcatttttacagggaacgatcagactcagttttggagttgagcgggggagattctcgaggggattcttttgggcgacttggattttcgtccttg

SEQ ID NO: 55946 - DNA, 446 bp, Oryza sativa
  Clone ID: PAT_MRT4530_57905C.1
gcacgaggcctcgtgccgaattcggcacgagggcggcggtccggccgccagatccggcagggcgaggggaggcgcggtggcggacgacggatctggaactgtggcgcggtggcggccgatggcaggaggggaggcggccgaggcccgacggcggcagcggtctccacctccgccgcctctgccagcgacgcctccagccgcgcctccgcctccgccctctgccagcaagtcctctttcacccatgtattttatcttgttgttcttcatatttgttctaattattgctactgtgatttgatgattctgagtcctatggtgattgagattcttgtgattttgtattgtgattgggacaactgcgatgtgaacaaagaagaattgtgacgatttttttgatttgtgaatgccaaatgcaatcggtcgaaatgaattgtaatggtaacct

SEQ ID NO: 55947 - DNA, 591 bp, Oryza sativa
  Clone ID: PAT_MRT4530_57906C.1
catgagcacagatgttcactgacaacagaagttgtgcactgcattttagtgaaaacataagcgtccataacattgttttgaaaaaattgacttatggttacacaatattgctgcaatcaacttatttcaagacaagtaatcaagcatataagtccttacatttttgacatttaggatcctgactccttgggagtttttgcaacaattgagatagcatgaagtcctgagttcaactcatcagtcaagaggtcatacaccatcctgtgacgcttcacaaggctctggccctcaaacttaggcgaaattaccctgatgttaaaatgcgtctcatttgcattgtccttgacagctgtatgcccagcatgcttgtaaggaacatcttcaatgtcgatcgcactggcctccaaagaagactgcagcttttgcctcatccgagcagctcttgaaagcatagcactagtgcctcgtgagctcatcattgatacagttcgtctcacagcagctatacgttttccggcgccggcgtactctcgcccggatcggggtagcagcaggcggagcgacggcggtaggggggaggagatacctgac

SEQ ID NO: 55948 - DNA, 546 bp, Oryza sativa
  Clone ID: PAT_MRT4530_57907C.1
atgtggaggccaggacgagtgcagcgcgacgggacggagatcgatgaccagccgcgtgatctccagctgactccgcatgcacgacctccccgtgcactaggccagtgctgcacgcttgctggtgtggtctgctccgccatgctggcctcctcgctgcagcctcagccggccctccacatcgagctccgctgcctccgccagttgcactggcctctgcgccgcaagcgacaccgcactcgcctcgcccgaggccgtttccttggcacctccgttgtcgacgtcgcgacctccgcgcgaatgcatgtgggtgcttcgcccgcggcgagcgcagtaccgcagcgtgagatcgcggcaaccgagcgagaccgcagcggcggtcccggaggcggagtcatccggggccttgatgcagacacggaggtgatgcagcggaaggtggctcgcatgaggccgcgcgtgtccagcgtcatggcggagttcggcagaattgtgcgaggccacggcagtacctctcggaggcggagccgtggtagaccttgcacatga

SEQ ID NO: 55949 - DNA, 1473 bp, Oryza sativa
  Clone ID: PAT_MRT4530_57908C.1
atgaccgtcgcttcctccgacgaggcgtcccggtcggtgctgcggccggcaccgcccttgaagtgggaggacgaggaggctcacggttcgtcgccgggagaaggaggcgctgctggttgggccgtggatagcggggaccaagaaaatggtgcggatttggggccggtgatcgctgtggaaggacttggtgggctcgtcccacaacccgaggtggccgtcgtggccgtcgagttgctgcctcagttggttcaagaaccgggcaaagtttccccaagaatccatgaaaaggcgaattctggggagggtgagaatggcgatggcaagtatcgtgtcgtctacacagctggccgccgcaagaggtgtctcatctcgccgggaggcagcgacggcgacaggatcacacctcgcgacctcgccgtcgcctttcacggccaagaggcaggccaggtggctccagaagctgccaccgccgcaatcgccgacggtgctggtgtcgccgtcgattccgtgctcaccaaaatgcaagaactggtgaatcatggttcatgtggcaatggcaagaacaatgtccgaaaatccaggagaatccacatgaagcaagctactgccgtgcctgtttccgatgagctcaagaatctccatagccaagaagcagaggctgcccatggcaagatcaccgatcaatctgattgcgagattaagaaggagcctcgtgagagttgcatgtcctctattgttggttctgatgacagccacatcagtggcctgtccatcaggttgcaaagcttggggatcaacatcaccagtgtgacaccgatcctttcaaagaatgtatctagtactgactgccatcccaaccaggcccggctgttgctttcgcgccacgcggtggagggctcgccgcttctggggatgctcacaccgttggaggatgcccttgtgcacagttcagggctaccaatcgaggtcgttgacagatatggctgttcctatgacatgttcctgaggtatctcgactccaccacttcctacagacttattgtacagtggaggaatttcttggaaatgagccacatgatcccaggtgatttggtgaagctgggtgcgtttcgcttcgaggggcagcttgcgctgacattgttgcattatgggaatgccggtaaggcgaagaaggtccttgacagaaaacttaaggagaagaaggtggagtcaaactccactgtgacagagaaaagcaaagagttgacttccagggagacagaggaaagcaaggaggagttgacttccaggaagacagatgcaaatgatgcggagagtgcttcaatcgtgatgctgatgcatgctcttcgacagataaacaatcagtcagtctccagtcgtggtgaccattttccacacgaggaacagatgctggaagatgacctgaagattgctctgtttgctggtgacctgaagatgaagtttttgtgctag

SEQ ID NO: 55950 - DNA, 1657 bp, Oryza sativa
  Clone ID: PAT_MRT4530_57909C.1
tattgtgtctgctctcagcataagcatgcattgcatggtttcgaggcccatgtcgtcgccggcgcagccgcccccgacgcggccgccggtggccgccccgcaagcgcaattgcgcaatggaaggcctagaatggatgcaaaggcgagatctcagttgcttccacgctattggcctagaataacagatcaagagctacagcacctatctggagactcaaattctgttattacccctttgtttgagaaaatgttaagtgctagtgatgctggacggattggtcgtttggtgttgccaaagaaatgtgctgaggcgtacttccctgcatggatgcaaaggcgagatctcagttgcttccacgctattggcctagaataacagatcaagagctacagcacctatctggagactcaaattctgttattacccctttgtttgagaaaatgttaagtgctagtgatgctggacggattggtcgtttggtgttgccaaagaaatgtgctgaggcgtacttccctgccatctctcaggcagaagggcttcccttaaaagttcaggatgctactggtaaggaatgggtgttccagttccgcttttggcccaataataacagcaggatgtatgtattggagggtgtcacaccttgcattcaatcgatgcagttacaagcaggcgatacagtaacctaaaattgacaaaggtgcattaccacaaaaggaagggccaggaacttcaagttcctccccactacctgtcaagagaaaggcaacttctgttggtccgaagatcaaacggttccacatggacagtgaggaatccatggaattgaagataacatgggaggaagctcaagaattacttcgtcctcctcctaaggccccttcaattgttgttgttgatggccatgagtttgaggaatatgaggagccaccaatacttgggaggaggacatattttgtgacagaccaatcaggtgagaatcatcaatgggctcaatgtgaggattgctctaagtggcgtaaactgccggtggacgcccttttgccctctaagtggacctgctctgacaataaatgggattctgaaaggtgacctgctattttagaaccattcagccttttgtatgctgtatttatgattagctacaatagaaaaagtgctgcaaaaaagaccaaagggaaggtagatactgacaatattgatgtttcagatgggctggacacactcgcaaatcttgcaattcttggtgaaggtgaatctctcccttcccagccaaccacaaggcatccccgccatcgccctggctgctcatgcatagtctgcatacaaccacccagcggaaagggaccaaagcacaaacagacgtgcacttgcaacgtctgtatgacagtgcgacgccgtttcaggacgcttatgatgcggcgcgagaagcgccagcagtcagagaaggactctggggtgcctcgcaaaagagagccaggtcaatccagcgagccagttccacaaacaacaagaggacctcctctcctgtcaagaaccagattgacctgaacagtcagcctgagcgggaagacgacctcgagatcgtgaagttctcctccgcttcctccgcctccggcgccgtcttcaccacctccggcaccgtcacctccacgggaa

SEQ ID NO: 55951 - DNA, 438 bp, Oryza sativa
  Clone ID: PAT_MRT4530_5790C.1
aagtttttgaccggaataaaaaagttccaaaagcttcaaaacaagatttttggacaaatggagtgaattgggtgcgttcgtggcaaaaaataacttcgtgatccgcgcggtgaacatttgtcaattaatgccaatactggcatatattggcacacgtgggtgcgaagtttttgatcggaatgaaaaggttcaaaaagcaccaaaataagatttttggaaaatttggagtgtattgggtgcgttcgtggcaaaaaaaatcacttcgcaattcgcgcggcgaacttttttcaattaatgccaaaattggcacacgtgggtgcgatgttttttcaccagaatgcaaaagttcgaaaagcaccaaaacctgatttttggacatattggagtgtattgggtcacacgtggttgcgaagtttttcaccggaatgcaaaagttca

SEQ ID NO: 55952 - DNA, 894 bp, Oryza sativa
  Clone ID: PAT_MRT4530_57910C.1
aatagatccagaagggaagctggtcatgggatttcgaaaggcaacaaatctttctgcagaacaggaccaacctacaaagcctgccaatggtgtactaccccctccagaagcaaataataaagttgttgtcccagattctagtcctaatgctgctgtacctcgaccaattaaagtcaacacagagagcaaaagttccagccctgtggaacaagccactgcctgtaaaattgacaaaggtgcattaccacaaaaggaagggccaggaacttcaagttcctccccactacctgtcaagagaaaggcaacttctgttggtccgaagatcaaacggttccacatggacagtgaggaatccatggaattgaagataacatgggaggaagctcaagaattacttcgtcctccttctaaggccccttcaattgttgttgttgatggccatgagtttgaggaatatgaggagccaccaatacttgggaggaggacatattttgtgacagaccaatcaggtgagaatcatcaatgggctcaatgtgaggattgctctaagtggcgtaaactgccggtggacgcccttttgccctctaagtggacctgctctgacaataaatgggattctgaaaggtcttcctgtgattctgcccaagagataaatatggaggagcttggcgaaatgattcctatcaaacctggtgctgcaaaaaagaccaaagggaaggtagatactgacaatattgatgtttcagatgggctggacacactcgcaaatcttgcaattcttggtgaagggtgaatctctcccttcccagccaaccacaaggcatccccgccatcgccctggctgctcatgcatagtctgcatacaaccacccagcggaaagggaccaaagcaca

SEQ ID NO: 55953 - DNA, 204 bp, Oryza sativa
  Clone ID: PAT_MRT4530_57911C.1
atgccagggggaggggttggggttggtctggtggaagtggaacggagccgctttgctgtgaggcgccttgctcagggtgttcggcgaaatgcccgagaggctgtccagttccggtcgggcgccgactgcggccgtcgaagatctcgtggaggtgggctcgtcgaccaggcgactgaggggccatgcttcgtgactccatgctag

SEQ ID NO: 55954 - DNA, 361 bp, Oryza sativa
  Clone ID: PAT_MRT4530_57912C.1
ggatgaacacgaacttccattgaaaatgcgaagttgcttcatgctgaatacaagcggagtacagcacatatataatcatccaaaaagagaggaaaattctctaaaaactctcacgcctgtggctgacacagaaacatggtacaatcaccaaacgtacaccagcagcacaagaaattaggatcccttggcgtctggggtctgaaattgcacacaaacacgaggagcctctgatcctgagcgcactcaccgccaatcagatcatttcccagacaaggtagatgcagggcctcaacctgaacttacccttgctgaccagttgggccgaccaacatgctgtccccaccaactaacattggtgcat

SEQ ID NO: 55955 - DNA, 372 bp, Oryza sativa
  Clone ID: PAT_MRT4530_57913C.1
atgcgaatggtcctgtcacggcctctttccgagttcgagttcgggtcagatgaaggtttctctgaggagggataccacaagcacggcttctacctaccttttttacgggagggggacccatgctacttagaccggaccacgatccgtatcttcgcccggaagctaagcagtcgtccatccttgagtgggacccagcgccgccccccgcctgacacgggggacagccccggagctccggatgatgcttcgatgggacgcagcatacctgcccccactccgccgggtacaggggcaatcgtgggagcacagccgcccgtccgatcggctgtgaccggcgacaggccggtcacagcctggtcatgccagattgac

SEQ ID NO: 55956 - DNA, 1780 bp, Oryza sativa
  Clone ID: PAT_MRT4530_57914C.1
ccccggccgggccctctccgggcctccgctccccgtgtctccccccacctcgccgactcgcgccttctagaatcttcgaatcgcgatcgcctcctcccacctcggcccagcaacgagctccctcccatggtggcctccagaggatagcgggagagatcggaatcgtagggttttgggggaggcggcggtgggggagatgagcggggaggtggaatgcagagtgtgccacgcgaaggtgcaggtgccgatggcggcggcggcggtgtcgaaggcgtacgacatccaccggagctccgtgtcgtcgaggcagcgcgcgctcaacgtcctcctcgtctccggcgactgcgtcctcgccggcctacagcctatattggtgtacatgtgtaaagtggatgggaagttcaaatttagcccagttagtgtaaacttcttgacagagattacaaaaattatatttgccatcatcatgctatgcatccaggccaggcgcctaaaggtgggagagaagccatttctcacagtttcaacattcatgcaggctgctcgcaacaatgttcttcttgcagttcctgctcttttctatgctatcaacaattacatgaagtttgtaatgcagctatattttaatcctgcaacagtgaaaatgttgggtaatctcaaggttctggtgattgctgtgctcctaaaggtgataatgaggaggcgtttctccacaattcagtgggaagcccttgctcttttgttgattggtatatcggttaatcagctcaaatcactgcctgaaggttctagtacacttggtcttcctgttgctgctggtgcctacctatacacattatttttcgtaacagttcctgcattggcttcagtttacaatgaaaaggctctgaaaagccagtttgataccagtatatatcttcagaacttatttctgtatggatatggtgcaatatttaatttcctagggcttgtgatcactgccatcatccaaggtcctagtagctttaatattctggaagggcattcaaaggccacaatgtttcttatttgcaacaatgccgctcagggcatattatcgtcatttttcttcaaatatgcagatacaatattgaagaagtactcatcaacaatcgccacaatctttactggagtagcatctgctgtgttgtttggtcatactctgaccataaattttgttcttgcaatatcaatagtaattatatctatgcatcagtatctctcgaaccaaattaaggatgaagttccgagcagtaaaattgagatgggtgatgctcatgagcacagatcgaaggaatctgtagtcgtcaacgtgtctgattctattgctactgaggctaaatataggaatggtactgatgagaggcagccacttcttcctgtttgatcctctattcctgagagctgccaactgatacaattcagcttggttccacaccaaggagaagcagcatacatcttaccaacacagtcctcattagagaagtagagagttgaaagcttataatggtgttcatagccttctttttgacctaatgttcgccattttgagttaactgtggcaagaacacctctgcatatctaattcagtggcgcaaccgaatcgtgtgagtttactgatatagagtagcggggggatgaaggataccttcagcgttgttgcgtgtgatgagatcacacttacaaagcttgaatcgaagcagcattcatccattccattcgtttgtgttggttttgtaagatagcagcagcaatatgttcc

SEQ ID NO: 55957 - DNA, 334 bp, Oryza sativa
  Clone ID: PAT_MRT4530_57915C.1
gccgccgccggcgcgtgcctgcgccggccgctgctcccgccgttggcccagaagcacccggcggtcgtcgcgtccgccgccgtgccacccgccatcttcgccgccgccgtcgtcgccggctccgacttgcacctcggtagcaccagtggccgcgccgacgagcacctcatgtcctcctcgtcgtagtcgtcgtcgtcgtcgacgtcttcctcttcttcttccctcacctcctcttgctcttgcacggatgccatctcttcttgcctctcctcgtgctgcgcttccgccgccgccgacgccttctgcgacttgcggggagagggcgcggcgatct

SEQ ID NO: 55958 - DNA, 2187 bp, Oryza sativa
  Clone ID: PAT_MRT4530_57916C.1
atggctcgccgccgacgccgccgccgccgcgccgcgccgtcgccgacgtcggcgctggacggggacgacatcctgcgcgagatcctcgtccgcctcccgacctcgccgtcctccctcccgcgcgcctccctcgtctgcaagcagtggcgccgcgtcgtctccgacccggccttcctccgccgctaccgcgcccaccacggcgagcccctcctcctcggcttcttcgccgaccactgcggctacccagtcttccgctccatccacgacgcccccgaccgcatcccgcccgagcacttcctcatgccgcgcgacaagggcgccgggcgatgcaactgggacgtcctcggctgccgccatggccgcgtcctcgtctacaaccggacgcggaacgagatcaccgtgtgggaccctgccaccggccaccgcagctgcgcggccgccccgccggagctcggcgacgacaaggagaagatcgtcttcaacggcgccgccgacgtatggggcgatctcatcacattagagtgtcctcctgtgtatgatacatgcttgcccagcaccctcattggatattcgctctactggttgttcagtggcgaggaggagggcatactggagtttgatctgggtaggcagagtctagctacaatcgagatgccatctgaatttctgcattataattcgcatcgcagcttccagattatgccggcagaggatggtggtatttgccttgccattctgtcataccagatcatggaattgtgggagaggaagatcagctctgatggtgtcggtgtcgccgaatggacgatgctgaagaagattgaattgggcgtgatcctagggctcggccatatggggggatggcaaaatttaatagtggcatatgatgaagactatcagcttatttttgtaaggacgatcaatggtgtcttcatgatccaccttgagtcaatgcagttcaagaatcttggaaaagacaacttcgacggcatccttcatgcatacagtgctttctgcaccgcagtgggtgatttgccaagagccgagagaagagttggtaccatctccgaaattatgggatttgatgaggatgacagcaactcagcagatcctccgaagggagcaggaacagtagaaggcaatgctgccgcaccctcatgtgaaactatacctgatgaaggaatggtagataatgaaaacctggactatgtttggaatcatggagaaagaattggtgaaggatttaaatgcaagtactgtaaaatgaccaggaaaagtggccgtgggacgcggctaaaggagcatcttgcagggaggcgtcacaatgtcattgcctgctcaggagtgccaccaaaagttaggaaagctatgaggatttctttgaacaaagtaaaacaaaggacaaaagcagcgaagaaccgtcgagcaaaaatgaagaaaccaaacacgcaaaacatggttcgtcatggtgtccacaataacagtaaggaacaacaaatgcaaatggcaaagcaattgtcattagaggaatttcactatcggcagaaaatggagaagagaggcagcacatttgagtatggtggtggaagtgacagcagaagtgctccagatgcctgctgtaacgtcgcaggcagctgtgtaggtggaggtgtcgtattgccacaaccatccagcaaaacaaggctcaaacttcatggcatggatgcagatgatgtgtaccgtggggcatcggcacaaactgaaattggcacatcagaactaagaaaagcttgggcagaatggtttcacaacaatggtattcctggaataaaagcagattgcccatatttccgtcgtgccatggagctgacacaacagcttggtttcaatgtggctgttcctactggtgccgaaatagatggcgcttatcttgatgccgatgaagaagaaataaatgttgatgccatcaatgctgaaaagtcatgtgaagcagttcttgatatgcccttgatcacatggaccaagaaacacattggcaagaaccacaaagccaataagaaatatcatgaaatggctaatacactaactcaagatcttggatcacctggaagcaagcgtaagcgcgttgaagttaaacaggggaaacagcccatgaacaacaaagaagagttcatgggaagtgatgatatgtccaacatgccaaggtag

SEQ ID NO: 55959 - DNA, 1056 bp, Oryza sativa
  Clone ID: PAT_MRT4530_57917C.1
atggccggtcacatggaagccaggcggcgggggggagcaaggcggcgacgcggtgccggcggcgacgacacgggagcaagggagcaaggcagcggaagcagcctcctctccgtgcgacgacgcgggagcaggggagcaaggcggcggcggcagcgtcctctccgcggcgccgctagccgacatgtggtaaggagagaaaggcggcagcggagggagcaagacaacgacgcggcggtggcgggagagcaaggcgtcggcggcgggacaatgggagggcgctcgcctcactcactaggccgaccctgtgcttccccactaggccgctgccgcctcagcctcctcctcgccgtgctcacctcaccaacgccgcgcgcgaggaggcccacgccatcacatgcgccgtgtcccgcgtcatcgccgcgcaccctggcccgttccctcgccgcgctcccgacacggccgtgctcccaacgccgcctgcttccccaacctctgcgacctcggcttctccctcatcggcatcaccaaccaggacatgcacagactccagcctccccgcgcctcatcgccaccgacaagccgacgccgacgccggcctccccgcgcctcgccaccaccgacaagctgaccccgtgcttccccactaggccgccgacgccgccaccaccgtcgctgtcgcggcgccgccctcatcctctcccgctcgccccggctaggttgcagataaggcttcagcttgagcagattgcagtcacatcggcgcggccacgcgcccggccggccggccggttgcagacttgcagttgtagcatcgtaggcgaagcaaatggcagagcagcaggagcaggggacaaggaaaaagcttggccagagagacgtgcttattcttggctcttggctcttgctaaaatttcaggaatgagggaattcttggttgatttgaggagccaggaggaacctgttgttgctgatcctaatggaaggcatgggactcaaattcagaacaagaacagccaccggaagcacaagatcatttgcaaccaagaccaaacatga

SEQ ID NO: 55960 - DNA, 147 bp, Oryza sativa
  Clone ID: PAT_MRT4530_57918C.1
atggagggcaacgggatccgtgaagaggcagaggtggatgacaacggggaaggaaccgtggaagatggtgccctagcgacggtgacatcaaagatgagtcatcccatggaaggagcaaccatggagggcgacgacaacattgactag

SEQ ID NO: 55961 - DNA, 168 bp, Oryza sativa
  Clone ID: PAT_MRT4530_57919C.1
atgcgggcacgcgaggacgagaagattgaaaggcatcgatatacaagtgctcatttgtgcgagggagagggcttgagttcgtttccaatcgtgcccccatcaattcgactgttcaatggcttctggtaccttgaggacgacaatggcggtgtctcggagtccctctag

SEQ ID NO: 55962 - DNA, 1704 bp, Oryza sativa
  Clone ID: PAT_MRT4530_5791C.1
tagtgtctagcgctgcctccaccgagagacccgactgtgtgcctataggtgtcacgtcctgataaattcatcccgaaataaaaatcattttcacccctccccgccgtcgccctctctctcccgtgccgctggacgcctccagccgcccctaccgccttgcctgagcgccgcccggtcgcgccgtcgcctcctccagcgtcgccgccacctcctccaccccggcctgccctccgtttcgcgcggtgaccgccggaggcgcgttcccgccgtcgcccagtggtgttgccgccactgttccacctccggccgccactgtcgcgtttcccgtgcgccggccgacgtcgccaccacctccctcggctccgcgacgccgccctcatccccggcatcacctcctcctcacccgaatttcgccggaacaccgtcgcccgcgccggcttctccttcctcctcagcggcatctcctccggctgcccttttcgccatgcccgtgcgtcagccggccctccgcggtccatcatcgtcgtctccgatcgttctcgtcgtcgacgtcccgtcggtcgcccggctcgtcgtctcgcggcgccgcctccgtcatcgtcatcgcagcggcgtgtcccacgtcgtcctcgtctccgtgcagccactgccggctgccctcatcgcctcctcgccggccccggtcgtcgtcgtcgtcgtcctctcgtcgttcccggtcgttgtggcgttcgtccctccgtcgagccgttctcgtccgtcgtccgcgttcgtcaagcgagccgccgcagccccatcatcgtcttcgtcctcggctccgcgtcgtcaagcctcgtgccggccgtgtctcgcccgtgtaccggtgtcggtagtcgttcacgcgtgcgggtggtgaccgtgtagtgtccgcgttagtgtgcccgctcggtagccgcgtggtttccacgtgtgcaggccgtgtggtgtctagtggagtccgtttgtcggccactcgcctcggttgacacacggggtccgcctccgttgacccgtggaccgtctctgtgtacccggttttctttttatgtattgttattgcttctttataggcttgtagctttgcttgtgtgcttcgcgtagcttctgtcgttccggaggttccagaagcgtggttcgtggtcgtcgccgaaggttcggaaggccgttctctctctcttcctctttcaaaacccctaaaacctgttttcggtggggtttgggtgcatgccagttgtgggaagtagcaccccggccactataaggattaagctcgggcctctgttgcaaagcactaccgtacttccacatgtctagtgggtaaggcttagtttgtggctcagtctggtcataaacaaaagtacacggatggagatggatgaagtcgggggtcgatggacattccccggcttttcctgggacggggattaatacactagcgttcgggaaaaggcaattttcccggtcgcgacaatcagagcaacctagggctaggagtagaggtgcgtggcatacctgctctccactccacgtcgagggcgccgtcgaactggccgtgctggtgaagtttcccgccgcccggccgtcgccgtcgccgtcgccgctgacggccggatccagattctccggcagcatcaccagctggctgctcgccgccggtcttggggaagcggcggcgtcgcggagagtgga

SEQ ID NO: 55963 - DNA, 340 bp, Oryza sativa
  Clone ID: PAT_MRT4530_57920C.1
cccacgcgtccgcttctccatgaagcttacctacaggactcctgaatatgattactataacgaggaaactttggtgtccgaagctaacgagtcaatagcagaaagcgaagttgcaaaccacccaaaaaaacaatgggatgatgattgctcttgggcagagtggtattctgctgaggatccagtcaaaggttttgagttgactgccatttggggagagagagtgtttgaagagacccttgagatggctgaggtggaaaatgcttcgtcatttgatgctgatcgttggcttcttcacccaattgtatctccatacatggttgatgattctattggaaagttt

SEQ ID NO: 55964 - DNA, 248 bp, Oryza sativa
  Clone ID: PAT_MRT4530_57921C.1
gtgccgctgcgccgccgccctcagtgccaccgcgccgcgccgtgtgccacgccgagcgtcgcctcgccgtcgccgccgcccagcccgagggagttgcggatccgagcgagggtcaagacccgcaggactacgagcaaggcaagtcatcactattctttgaacacgttgatcccatttacaaaattattttgtttactaataaaattgcatgcaatgatgaacatcctacttgtgattatgccatgcct

SEQ ID NO: 55965 - DNA, 317 bp, Oryza sativa
  Clone ID: PAT_MRT4530_57922C.1
cgacttcgttttctctgctttttttttagcaccggcgacaatacaaaatctacactagattgagagcaagcgccgcccaaccctcaccggggattgctatcgcctgcaggctcacttaaataacacgctggggattcacaacagagaggagagagagaaccttgaacagagcaggccacttggagcgacatacccacccggagcgcgtttgtggccgcccgcgaaaccataaccggcaccatgttgcttctcagccctgcttataacctgtcgagggacacggtggaagcacaacggtgacatgatactggccaatg

SEQ ID NO: 55966 - DNA, 189 bp, Oryza sativa
  Clone ID: PAT_MRT4530_57923C.1
atggcgaatggcgatgtcgacccagggccggccctgggcctaggccggtcatcaggcgatcggttaggaggcaaggagcgcgtcgattcatctgccggcccacaccgcgagtcccgagaagaaacaaagcgccagagcgtcacccgcgccgcgtcgcttcgttgtctcatcgccgcgccgatgccctag

SEQ ID NO: 55967 - DNA, 575 bp, Oryza sativa
  Clone ID: PAT_MRT4530_57924C.1
ctcttttcccagaagaagaaaaaagaagggctgcgactcattcgaagcgcgcatctcgtctcgtcgaagcgagcgaaaccacacgcggcgcgtcgatcccaacaccaccaacgcaacccctacccatggcggcggcgggcggcggcggcgcgggggcggccggaggcgggaaggtgtcgttcaagatcatcctcacctccgaccccaagctccccttcaaagtgtttagcgtgcccgaggcggcgccgttcaccgcggtgctcaagttcgccgccgaggagttcaaggtcccgccccagaccagcgccatcatcaccaacgatggagttggcatcaacccacagcaaagtgcaggcaatgtgtttctaaagcatggctcagagttgcgcctcattccccgcgatagagttggagcattggctgcgcctttctagattctatagttataattgagaaacttaacagaataaagtcgatgttgggtgcttgcttgcttgtataatgtgacaagttgatgataatttatcgacagtttacctggtattttcaaaaaaaaaaaaaaaaaaaagcggaaa

SEQ ID NO: 55968 - DNA, 400 bp, Oryza sativa
  unsure (1)..(400): unsure at all n locations
  Clone ID: PAT_MRT4530_57925C.1
ctgtcgctgctnttaggaacacctgtgataggtggnaaatcctgactcgaacgacataggctccactatgtctcaaggccaaacagntcaagccgaggtacaaacaaggccatgtggcgtgccctacaaacaagggcgagagcaactgccaagaaggcacccgccaaggaggaaagagggaggacnacgaaggaggaantcttgacaaggtcccaagtcccgagtcaaattgatgaaggatgacgaccgaggggcaacgaagagggattgaagacggatgaacgaagttggacccttcccaggtgggaccaaagaatgggggaaccaaccaaagaacgctaaaaggccggccagggccttcccttaagggagcccttatcccaatgcaatccaatgcatt

SEQ ID NO: 55969 - DNA, 663 bp, Oryza sativa
  unsure (1)..(663): unsure at all n locations
  Clone ID: PAT_MRT4530_57926C.1
ccggccgggcctgcactcaccttccattcttctcctgctaagctccagagaaagcttctcctcctctttcgcaaaccgtataaaatctcgcctctgaaatcgagcccgatccgaggcttccgcggatggtgctcacgatcatggaggccaaggggaaggatgcatgggggctactgctcgtgctcctccttggccagctcgtcgccttctccatggccgtctccagcttcacctcctccctcattgccacacttggggttgatgcgccgctcacgcagtctttcttcgcgtacttgttgttgaccttggtttatgtgccaatcctcttgaaacgacggcaaaagctgcagataccttggtattggtacctagccttggccttcattgatgtccaaggaaattatcttgtcgtcaaggcgtaccagtactcgtacatcaccagcgtaacactgttggattgctggactgttgtttgggtcgtcatactcacctggtatgcattgggcacaagatattctttctggcaaattgttggggcagggacctgtgtggcagggattgctcttgtgctcnttttagattcaaaatcagcagatggacaagatccgagtaaaataccacttctaggagatgcccctgtccttgccgcgacatattttttgc

SEQ ID NO: 55970 - DNA, 742 bp, Oryza sativa
  unsure (1)..(742): unsure at all n locations
  Clone ID: PAT_MRT4530_57927C.1
ggaaaagggtggagaaaccaagagggggcgtcgcggagtcggagtcggagacgncacggcgagctccgcggcggcgatggagagctccctgggcggctggccgtcctacaacccgcaaaacttcagccaggtcgtccccgccgacccctccgcgcagcccttgaatgtcgtaccagccacttacattgcaacacacaggacgggtccacctcccggtcaagtgataacaacagaccccaagaacatcctgttgaggcatttttatcaaaaatccgaggaaaagttgaggccaaagagagctgcaccagacaacctgaccccacagaacaacggcaaacaaccaagaggccctctctctgatggtggtggtagccaggcaactgcaagtggtagaagctaaaacgcagctgttgttctctccggcatctcttgtgctgctgaactgacagcatgcatgtcatactacctgtatgtatgtgtgtgtgcttgttcaggcatatgcttactagtagtgtcatcatctctcttgtgtgattgatcaaaagagctccccatgcatgtacatacaccctcatcctcagtgtcagtgcggcacctttgatacggaactagcactattgcagtcttttatgccgacactagcacaacttgatgaaaccatttttccctacataattgcctcagcgtcagctttccaaaggctgaaagtgatcaaaaaaaaaaaaaaaaaaaaaaaaacaaa

SEQ ID NO: 55971 - DNA, 935 bp, Oryza sativa
  Clone ID: PAT_MRT4530_57928C.1
ttagcttctaccacttgcagttgcctggctaccaccaccatcagagagagggcctcttggttgtttgccgttgttctgtggggtcaggttgtctggtgcagctctctttggcctcaacttttcctcggatttttgataaaaatgcctcaacaggatgttcttggggtctgttgttatcactgaaatctggagatagttcagtggacaggcctgaaagcaaccaggatgtttggtggttcggcctggccttgaccgggaggtggatccgtcctgtgtgttgcaatgtaagtggctggtacgacattcgaccaagggctgcgcggaggggtcggcggggacgacctggctgaagttttgcgggttgtaggacggccagccgcccagggagctctccatcgccgccgcggagctcgccgtgacgtctccgactccgactccggcgacgccccctcttggtttctccacccttttccagcgaccatggattcgtggaggacaaatgcatacatatatacataccctatccgtataaccacctttaaaagtatgtcttaataatgacaaagtcaccacaagcttctcgcactcatcgaatgtgcaggtaaaaacgcattcgaggattggaccggtatattttaaaattgataaaatcatcaccgacgttttcctatcaacgtatagattgtctatcacttttgttcggtgaggccttcgccttcttgggtccgcttctttcttgtggtgggcaacacgctcttcggttgtttctgctaatgaagtcgaagctgcttgctgatgggggtgcggcgacgctcggcaatgatgacatgttgcagtctcttccaaggagctctggtgctggccgtgtgaaggaagttgctcttcgtgttgctgcagttgtggagtcggcgctgctaggtcgcttgggcggctag

SEQ ID NO: 55972 - DNA, 3761 bp, Oryza sativa
  Clone ID: PAT_MRT4530_57929C.1
atggtgacggccacggtggtggcggcggcggcagtggaggtggaggcgatgatgaagagattaggaaggggtggggattttaaggaatatataactgaccacataaatcccaagtccccaactaagcgctgccatataccaaacatgccatacatccaggaaggcgaagagaaacttatttggaacttggaagcggcggccgtcgatcggaatggcgagccgaggagaggccagcaccagcgccaccagcagcagcagcagcagcccggcgggtacggacgcggcggcggcggcggccgcgggcgcggccgggacggggcgccgtactcgggtggtcgtgggcgcggtcaggacggatcgtaccctggcggccgcggtgggggctatggcggtggtggtggtggaggtgggccgccgtactatggcggaggaggtggtggtggtggaggaggaggaggccaagggcgtgggtactatgatgatggcggcgatggccgcgggtaccagcggggcatggagggaggcggaggccgtggaggttatcgcggggacggcgatggtggctacggacgaggcggtggcggttatcacggggacggtgagcgtggctacggccgaggcggtggcggtggcggtggaggcggcggcggctatcgtggggatgacgagggtcgtagcagctacggccgagcccgtggcggtggcggtggcggtggcggctatcatggggacggcgaggctggatacggccgtggacgcggcggcagggactacgatggcggccgcggcggcggaggaagaagaggaggacgcggcggcggtggttcgagctaccaccagcagccgccccccgatctgccccaagctccggagccgcgcctcgccgcgcaatacgcccgcgagatcgacattgccgcgctccgggcgcagttcaaggggctgaccaccaccacccccggcgccgcgtcgtcgcagttcccggcgcggcctgggttcggcgccgccggagaggagtgcctcgtgaaggtcaaccacttcttcgtcggcctcaagaacgacaacttccaccactacgacgtggcgatcgcgccggatccggtgctgaagggcttgttccgcacgatcatctcgaagctggtgacggagcggcggcacaccgacttcggcggccgcctccccgtctacgacggccgcgccaacctctacaccgccggcgagctcccgttcaggagcagggagctcgaggtggagctgtccggcagcaggaagttcaaggtggccatccggcacgtcgcgccggtcagcctgcaggacctgcggatggtcatggccggctgccccgccggcatcccgtcgcaggcgctgcagctgctcgacatcgtgctgcgcgacatggtgctcgccgagcgcaacgacatggggtacgttgcgtttggtcggtcttacttctcaccggggctcggatcgagggaactcgacaagggcatctttgcgtggaaggggttctaccagagttgccgggtcacgcagcagggcggacgcgtgggtgcagacatgtcttcgactgctttcattgaacctggtcgggtgctgaattttgtagaaaaagctattggacgtcgaatcactaatgctattactgtgggatattttttgaacaattatgggaatgaattgatgaggacccttaagggtgttaaggttgaagtcactcaccgaggaaatctacgcaagaagtaccgcattgctggcttcaccgagcagtctgcagatgttcagacgttcacatcatctgatggtatcaagactgtcaaggagtatttcaacaaaaaatacaatctgaagttagcttttggttatcttccatgcctgcaagttggcagcaaggagagaccgaattacctgcccatggagctttgcaatatagttcctggacaacgatacaagaaccggctcagtccgacacaggtttccaatctgattaacataaccaacgatcgtccttgtgaccgtgagagctccattcgtcagactgttagcagcaaccagtataacagtacggaacgcgcagatgagtttggcatagaagttgactcttatcctactactttaaaggctagagttttgaaagctccaatgctgaagtaccatgattctggaagggtgagagtatgcacgccagaggatggggcgtggaacatgaaagacaagaaagtagttaacggtgctacaattaaaagctgggcatgtgtcaacttgtgcgagggtttggataatcgtgttgttgaagcattctgccttcaattggtcagaacgtccaaaataactggactggactttgcgaatgtgagccttccaatattgaaagctgatcctcataatgttaaaactgatcttcctatgcgctatcaggaagcatgcagctggtcgagggataacaagattgacctcctacttgttgtaatgacagatgataaaaataatgccagcttatatggtgacgttaaaagaatctgtgaaacagaaatcggtgtattgtcacagtgttgtcgagcgaagcaagtctacaaggagaggaatgttcagtactgcgcaaatgttgctcttaagatcaatgccaaggctggaggaaggaactcggtatttcttaatgtagaagcaagtttaccggttgtttcaaagagcccaactattatatttggtgctgatgttacccatcctgggtcctttgatgaaagtaccccttccattgcttcggttgttgcttccgcagactggcctgaggtgaccaagtataattctgttgttcgtatgcaagcttctcgtaaggagattatacaagatcttgatagcattgttagggaacttctcaatgcattcaaaagggactccaagatggagccgaagcagctcattttctacagggacggcgtaagcgagggtcagttccagcaagttgtagagagcgaaataccggagatagaaaaggcttggaagtctctgtatgctggcaagccacgaattaccttcatagtggtgcagaagaggcatcatacaaggctgttccccaacaattacaatgatccacgcggcatggatgggactggaaatgttcgtccaggcacagtagttgatacagtgatctgtcaccctcgagagtttgatttcttcctgtgcagccaagccgggatcaaagggacaagccgtcctagccattaccatgtgctgcgcgacgacaacaacttcaccgcagatcagcttcagtctgtcacaaacaacctgtgctacttatatacaagctgcactcgctcggtgtctattccacctcctgtttactacgctcataagctcgcattccgcgctcgtttctacctcacccaagttcccgtcgccggtggagatccaggtgctgctaagttccagtgggtacttccagagattaaggaagaggtgaaaaagtccatgttcttttgctagtcgtccttgtgcccccctgaaactgaagcctggagccagccggcaagctctggaaatgctctgaataatcaaacttggaagaataagcacctgcccaggttgccattcgtttccatgtggcatggaggatggcatcctgaaaaggatattgtcatgtttgtgtggtttttaaacgacattgaagtttatctccggtgttactatctcagcactttggatgttttattttgttatgtctgaagatatagacacaaaacttcatttttatatctgaaaaaaaaaaa

SEQ ID NO: 55973 - DNA, 1142 bp, Oryza sativa
  Clone ID: PAT_MRT4530_5792C.1
atgaatagagtacccactagttggggttttattttcctggggtgaacaaggccgaggggaggggcgcgcggaccgggtccacgggagtggggcccacgcggcagcctcacggtccacggtggaccgggtgcacgcggcttgcgccggccggcgccgtgggtcccacgcgtcagccgcacccgagggcgcgggcggctgacggccgggccccacatggcagccacggggcgcgcccgaaggcggcctcgccggcacagccgacgggaggcgacgcgcccgcgccccgatggtcgccggcggcgacctccggcgcgacggagcggcggccgagagaggggagggaagggggaagtgaaacggcggtcctcggctcaccccgggtcgacggcgacgacgggaacggcgaccgaagcggagagaggcggcggcgcggctcgggtcgacgaggacggtggtgctccggcggtcggcgggcggaacggaggagtggacgaggtcgacgaggacgtggcgaagccgaaggaggcgatgccgaagcgggaggaggtccggggcgacgacggcggcgaaccgaagctcggcggcgacggcggagagagaggacgacggcgcgagctcgattccggcggagagagagagcggcgagtggcggaaacggaggagggaggcacggggagtgcttaaataggggtgggagtgagagagggcggccggagaggaatgaaatcggcgcggcgatctcgggctccattgatgcgccggcgaagatttcgggagggattccaaacgaatccgagggagagagagggaaaagaggggggaaagagagagggaatcacggggagtgatttccccctctttattgcgcgcggggacggcgggaggcggcggaattcgcggcggcggcggcgctagggcacgggcgcggcggcgggagcggcgggaggaaagggatgacaggtgggccccacccgtcagcgagggtggcgggcgggcccacccgtcagcggcacgcgcgcggggaggaggccgattgggccgcgggggagaggagagagagggagggaggtgggccgagccggcccaagaggggaagggggggaaaaagaatttttagggtttttctttttataaaatcattt

SEQ ID NO: 55974 - DNA, 642 bp, Oryza sativa
  Clone ID: PAT_MRT4530_57930C.1
atggccacaacaaccaccgccgagtttatgagccatcatcctttcgtcctcgttccgccgtacgacaacgtctcgcgccatcagcagcggagagagacgatggacgcagcggcagcgagaaaaacgcgcgcattactactacccacgtgtggcgcgcggagcagaggcgagtggcaacagcaacgtctcactagccgacagccgggcggccggccggaaggttttctttggatcacggcctcaccgcgcgcatcgccgtctcgtcgtggcgagcgcggggcgcgacggttggcgcgcgcgggctccgtcccgtcctttgtcaccgccgcgagaggcgcctcgcaccggaaccggccggccccgggcccgggctgcctgcctcgccctgtgcggatcgtacgcctgaatcagcgtggcgggaaaggtaaggacagggttgatcccgcggtcgatgtagccagccagggaagacgacgaggtctggtggtttccgcgcgcgccgaggcggcctcacacaagtcacaattggcggggaacgatgggtggtggttcgcgaggggccgcaccctcgtactgtctctttggaacaaagcgatcgccatcgtggccgaccggtcgagagcgaggcagcatcatcagtga

SEQ ID NO: 55975 - DNA, 397 bp, Oryza sativa
  Clone ID: PAT_MRT4530_57931C.1
gccattgggaggggcgagcaggaggcagcagccagggagggtttgagtagcatggaggagttctgggggttctacctgacccatcactccaagcgctggacccggcgaggagacttccttggcacgcctcccgtgctctcctgctcgctcctcaggggcggctactggcgcccttgccactacataacggcccgtgctgggtgactaggtcgtggggcacattcacttattaggggagggcaacctgccaatcacatgcggccacccccactggactttcctctgcgacctcacgatgctaagcctgattctcactggcacgcatagactgcgagctaagatgagtccaactccagaccactgacgactgcctgggtgcacttgcacaccgagactg

SEQ ID NO: 55976 - DNA, 6247 bp, Oryza sativa
  Clone ID: PAT_MRT4530_57932C.1
cagagtccacggatggaaggagtcctactcggacagaactgggtcgttactgtatcgtgtggggtccgatatctccgagttctacttggagatcaactgacccgcggtataaaagggaccctccgggaggacctaaggcatcgaatgtcaccaccaacacacccaccgcatcctacgaaatcctcgtaccagcgtaccccaataccctatatatccgatctacgggtatcccccgtcggcagtggcgcgccaggtagggggacttggtgctcaaggttctgctactatgccatcaagcctcgtcgacaacaacgtcaaccccggcatcaaccaaggagtttcaacttcaataatgctggtgtggactcaagtcggcgaaatcgtcttcccgatctacaccacggtgccgatctcgactggtccatcaatgaccggaagcgagaacgccgtgcttacgatcccagacgcctttatgtcgaaggatcctcctgcggaagtggagagcagaacatcgacgacgtctgagcccgagaaggacccaagtgcggccatatctcgtcctcccgacgagaatgacgagccgacaaggacaacttccaaggtaacaaggtcctagtgtcctatccacaaaaccggaaaacacaccttgcaagcttgctgggtttttctcgacgtacaagctgagatccgtgcctgcaaagagcatggaattcagcgtacttctccaactcgtgatgtctattgtcctattcacaagacaaagaatcacgacctctcaagctgcaaggttcttctcatcgctatgaggacgtcatctcctaaggtccagcagtcacaaatatctcttagagaagcggacaaggaacgaggagcgacagttatctcagatcgattcgttggggtaatcgacatcgatccccatgagccattggttctacacttgctcgaagaccaggcctcatcatcaacgagtacaccacgtgatgtattcgcgatcgaggggaccagcacttctgcgcgcgctaacacagaagcggaggatcaattggctacaccggcccagcacattaggaccatcaacacgatacttagggaaaccccttatgctcccgttctgaacgatgacctcgcacagtggacagaacgactacgagaatcagtggccaacctcagcaacacgttcgaggaggccgctgccagggtcctattcaatggcgaattgcctgagcagcgagtatcacctcgtcaagccacccttccgcctcgaggcaccagtgaccaccgtgaccatctaaatggccaccgagaagcacgccgcacgcgagacaacgaaaatcattcctaacatcatgtctcttcgcaacatcgcgagaaccttgataatcgccacaaccgccgtgaacacgataatcgcgaacagcggatgccaggcgatactggtccaggtcgccgccgtaacaacgacgacgacaaagatcaacatcgggacaataacggcggacgacgacaggattctcgagaacccgtccgccatccctgtaatcgtacaccggaaccgagtgactcatcgtcatcatcatcatcatcatcgtcttcgtcatcagatagacacccacggaggacacatgatcgccgacaacccactgcccaggcgacggatgtagagctttcattcgtgccctgcgagatgtccaatggccggagaggtttcgaccgggagcgatagagaaatacgacggaagcaccgacctggaagagtttcttcaggtctattccacagtactctacgctgccggagcagacgacaacgcactggcaaattatttgccagcggcgttgaaagggtctgcacgttcatggctggttcacctcccgccctactcgatatcttcatgggcagatttgtgacagcagttcatcgccaattttcaaggaacatacaagcgccacgcgatcgaggacgacctacacgcgttgacacagaatccgggcaaatcattgagggactacgttcggcgctttaatgagtgccgaaatacgatccccaagatcaccgatgcttctgttatccgcgctttcaagtctagtgttcgagatcgctataccacccaggagttggcgacaagatgaatcacaactgctcgtaggttattcgagtttgttgatcgatgcgctcacgtagatgacaccttgagacacaagaacgacaagccaaagacagagggagacaagaaaccagccaaggacacaccagagtcaagcaagaagaagagtcgcaagaatgggaaaaggaaagctcaaacagaggtcctcgtggcagaatacgcggacccacccaagcacccagacccacaaggcgatgacacgaagaaaatatggtgcaccatacacaagtcggacagacactttctggaggcttgcttcgttttcaaaaaggcactcgcaaagcaactagcgttggagaagggaaagcgggtacgtgtagtcgagaaggccgccgaagcagctactcagtactcagactcgacatacccagactccgacctccatgttttgcacatcttcggaggttccatggcggtgatatccgatcgtggtcgagcccactattcggaatatcaaggtcgcacgggttctcatcgatggtggcagctccatcaacctactcttcgtcagcaccttggacgcaatggggatcccacgaagcgagttgacgcccactgatcaacccttccatcgaattactccccagtcatcgtccaagccattgggcaagattacgttgcctttgactttcggccaagcaaacaattttcgaacagagcagatcacttttgatgtcgctgaatttgatacagcatacaatgccatcatgggagaactgcactcgtgaagttcatggccgtatctcactacgcataccaagtgctcaagatgcctggcccgaagggaacaatcactattcaagggaacacaaagctggtggtgcagtgtgacaagcggagcctcgacaggtcgagcacacgcccaaccctcccaccacagctgagccacccaagaaagtgagcaaaacaaacaagatgccgaagccagacggcgcaatcaagatcgttccactctccagtgccaaccccgacaagaccgaactcgcgctcatcgccttcctccgtgacaatgcagacgtgttcgcttggcagccgtccgacatgcccgggtccctagggaggtgattgagcataaacttatggtgcgacccgatgccaagccagtaaaacaaaaactgcagagatttgcaccagaccggaaacaagccatacgagaagagctcgacaagcttctcaaagctggcttcatcagagagattctccatccagagtggctagccaatccagtcatggtgcacaaggccaacgggaagtggaggatgtgtgtcgacttgaccgacctcaacaaggcgtgtcccaaggatcacttccctctccctcgaatagaccaattggtggactcaacagctggttgtgagttgttaagctttcttgatgcctactccggctaccaccaaatcagcatggcgaaaaaggacgaggagaagacagccttcatcatgccgtttgatgtattcatgccgtttgatgtattctgttacgttaagatgccgttcgaactgataaccgcaggaaatactttcctacgcacggtccaaggagcacttaacaatcaaattgggaacaacgtcgaggcctacgtcgatgacattgttgtcaagaccaagacaagcgactcattcattgacgatctccgggaaacgttcgacaacctccgacgatatcgcctcatgctcaatccagataagtgcacgttcggagtaccatcgggaaagctgctcgggttcctcgtctctggaagagggatcgaggcaaacccaagaagatcaaggcaatcgagaacatgaagtcgcccacaagactcaaggaagtccagaagctaactggatgcatggcggcattgagcagattcgtcgcttggatgggagaacgaggacaacctttcttcgctctgctgaagaaacaagacaaatttgtatggacacaggaagtcgaggaggtgttcatcgcactcaagcgctacttgtcaaatccccctgtacttgttgctccccaacctaatgaagaattattcctctatatcgccgccacaccatattatgtgagtaccgtcattgtcgtcgagagagagaaggtgcaaagaccagtttactatgtcagtgaagctctccacgacgcaaacacaagatagccatagatccaaatgctgctttatgcagtaatcatgacatgaagaaagcaacgccactacttccaagcccatagggtcacagttgtttcctccttcccccttggtgaagtcatgagaaacaaagacgttgtcggccgcattgcgaaatggatagtcgagctaagccaatttgatgttcattttgtgccatgaacagccatcaagtcccaggtcctcgcagatttcgtagctgactggactatgcctgacaacagggcagacagtcagaccgacaacgagacatggacaatggcatttgacggtgcactcaatagccaaggagcaaggacagggttcatcttgatgtcaccttcgggagatcagttcaagcatgcaattcacctcaacttcagtgcaaccaataacacagccgagtacgaaggactactcgctgggataagagcagcagccacactaggagtcaagcgactaatcgtgaaagggtattccgaactagtcgcaaaccaggtgcataaagactacaaatgctctagccccgagttatccaagtacctcgcagaagtcaggaagctggaaaaaaggtccgacacgtatatcgcaaggacaacatcgaacctgacgacctagcacagcatgcatctagacgagagccactcgaacccggcaccttcctggacatcctgacaaagccataggtaaaagaggcaaacggcgaagatagcacagtcgtccccgacatcagctcgggggctacagaggcagaacacgtcgttgccgacatcgagaccacagacgactggcgaaccccactcatcaagttcctgagtagtgatgagttgcccgaggacgatgcagaagccgagaaaataacctgttaagccaaaatctactgtatgaccggcaacgatctataacgatctatacaagatggcgccaaatggggtacttctcaaatgcatctcatccgacgacggcaagcatctcctccttgacatacacgaagggaactgtgggtcacatgccaccggtcgcacgttggtcggaaaagcttttcgacaagggtttttttggccgaccgccctcaaagacgcttgcgacatggaaacacacaatgctaccggcgcaagcgctccagactatccctcttacttcgttgttctcatgctgggggctcgacatactcggaccattcccacgaggacagggcggatataggttcctattcatggcgatcgacaagttcaccaagtggatcgaagcgacgcccacgggggaaatcaaggccgacaatgccattaagttcattaaagggatattctgcagatatggattgcttcaccgcatcataacagacaacggctcccagttcatctgtgccgacttccaggattactgtattggattgggagtcaagatctacttcgcctcggtttctcaccctcaaagcaatggacaggtcgaaagggcaaactgcatagtattacaagggatcaagaccctcctatgggctgtgcgcaccacatcgacaacgtccaacaaggagacaccattctttctcgcgtatggcttagaagccatgcttcccacggagctacgacatcagagcacacgagtacagaagtacaccgacgaggatcaagaggagcagcgaaatgacgatgtaaatctactcgaagagcatcgagaaagagttgccgtcagagcagccagctaccaataggcccttcgccgataccacgagaagcgcatcagagcacgcacgctttcgatcggcgattacgtcctccgacgggttcaaagccaagcagggcgtaacaagctctcacccaagtaggaaggaccattcacgatcacgccagtcttgcggccaggtgcattcaaaattgtagacggcgatggtcgcgagttagcaaattcttggaacattgatcaattacgtaaattttatgtg

SEQ ID NO: 55977 - DNA, 850 bp, Oryza sativa
  Clone ID: PAT_MRT4530_57933C.1
gatgcgccaccagggctacgtccaggttgtgacctccatggctccgacaggtgcttcttccccgggcttccggggctgctcggggggcggcgccagtacctggtgctcggtgcgttgctctggctgctctgcagagtgcgggtcccttgagctccgcctctgccggtccccgctcggccgctcgtgccgcgaaagctctccctcccctgcttctgtgccgcagcagcaacggggaagggtgaaggaacaacagtttattcaaaaagtacaagaaatgcttatggaggaagagcagcaacgtatacatattgcacaaggacttccatggacaacagatgaacctgagtgcttgataaagccaccagtcaaagaaaccaccgagcctgttgaccttgttctgcacagtgatgtacgagcaattgaacgtgcagaatttgatcaatatgtgtcagaaaggaacaagttcgctgagcaactaaggctggagagggagcggcagcagaagctggaggaggaagagatgatcaagcagctcaggaaagagctggttcctaaagctcagccaatgccgtactttgatcggccgttcattccaaaaagtagcacaccagcattatcttaccatttgcacaagttactaatactcagttctatctctggtttgttctccaaaagatctgcaaaaccagcaacagttccaaaggaaccaaaatttcatcctcggccggaaaaacagtcatgtttatgtcgacagcgatgcatggacaccggaatgctgatttcatcatgtcttcatgatcagtcgactgtacttgctgagaaatccaaggcattgccacgcatgttctag

SEQ ID NO: 55978 - DNA, 162 bp, Oryza sativa
  Clone ID: PAT_MRT4530_57934C.1
gatctactgatgatggtatgctcttctcgctaaaaagattcttgtcttttggaggacgtaggcacaattacccttgcgctttccctcgaagaacagtggcctatagaaaaaagtgtgttttgatacaaaccccaagggcaataatgcgacggttggattttt

SEQ ID NO: 55979 - DNA, 2305 bp, Oryza sativa
  Clone ID: PAT_MRT4530_57935C.1
atgaagtacgtgctggtgaccggcggggtggtgagcgggctcgggaagggcgtcacggcgagcagcatcggcgtcgtcctcaagtcgtgcgggctccgcattacctccatcaagatcgatccttaccttaacacagatgctgggaccatgtccccgttcgaacatggtgaggtttttgtgcttgatgatggtggcgaggtggacttggatcttgggaattacgagaggtttcttgacattaaactaaccagggacaataatataaccacaggaaagatctaccagtccgttcttgaaaaggaaaggaagggggaatacttgggaaagactgttcaggttgtcccgcatatcacaaatgccatacaagagtggattgagcgtgtcgcaatggtacctgtagatggcaaggagggaccagctgatgtttgtgtgatagaacttgggggtactataggggatattgaatctatgccatttatcgaagctttgggccaattctcatatcgtgttggtcctggtaacttttgtttggtgcatgttagtcttgttccagttctgaatgttgttggtgaacagaaaactaagccgactcaacatagtgtccgtggattaaggggtcttgggctcacaccaaatattttagcctgtcgcagtactaaggaactggaagaaaatgtgaaggagaaactctctcagttctgccatgtaccggcagctaacattgtcactctgtatgatgtttccaacatttggcgtattcctttgttgctacgggaccaaaaggcacatgaagccattcttaaagtgctgaaccttgatagctttgctcgggggccaaagttggatgaatgggtcgcaagagctacgttatttgatgcacttcaggatactgtgaggattgctatggttgggaagtatactggtctatctgattcatacctctctgtgttgaaggcactcttgcatgcttctgttgattgccgcaggaagcttcttgttgattgggttgcttctactgatctcgaagactccactgccattgaggcgcctgatgcttataaagcagcatgggatttactgaagggtgccaatggtgttttagtacctggtggctttggagatagaggtattcaagggaagattttggctgccaagtatgcccgtgaaaacaatgtaccatatcttggcatatgccttggaatgcaacttgctgtggttgaatttgctcgaagtgtcatgaatctccctgaagcaaacagcacagaatttgatcccaatgccaagaccccatgtgttatttttatgcctgagggttctaaaacacatatgggtggcacgatgcgcctaggatcaaggaggacatttttcgaggttgctgattgcaagtctgctaaattgtatggcaatgtcagttatgtagatgagaggcatcggcacagatatgaggtgaatccagatatggtgccagagtttgaaaatgctggacttcagtttgttgggaaagatgagactggaaggagaatggagataattgaaatccccaatcaccgatattttgttggtgcacaattccatcctgaattcaagtcaagaccttcaaaaccgtctccactctttgtcggactaattgctgcctcatctgggcaactggatagattgctgcaaggcagctgcaatggccacgtggtttctactaaacattctctgagcaatggtgcttacacatctacagtacaccaaaatgggcacgcaaagaagcttgccaatggtctttccaatggaacatattatcccaatggaaatggcgtgcatgcctagttcttcagtaggtggcctaaggatttacacattccctttttgctgtttctattgaattgcatcagttttgtcgtggctggcctcgttaatctttggtcgctcgaggaagaaaaaatgttcttgtgctcgatgcggactgtgcgaaggatggtgctcgttcggtgggtttttgaaggaaccgggctgaatctcattgaaggtgtgagattgtggtttgcgtgttcgtccctacccttttctgtaagccaaggggggcagaagtgggtaagaagagttctcatgctgtatatctggaaagaaaagaaatgctggatgtttttgttctttttgcttgataaatgctgcgctggaacagaggatattgatgttaggcagtttgtactttggcagttttgtgcttttgcaaacaagttaaacgttttttgcattactgtaccagattgtctgccaattttgcgtgattattctcataatactggatattctg

SEQ ID NO: 55980 - DNA, 425 bp, Oryza sativa
  Clone ID: PAT_MRT4530_57936C.1
cccacgcgttcgcccacgcgtgcgtccacgcgatcgcaccaacaaacaaatgaggaagaaaaacatattcacttctagcgattgactgactgatcatcaacggctagcaaggacgcatgcttcgtggcggtactcatggccggcatggaggacatttccgtggcgcagctgaaccagtcacatatgaggttcatggacaggcaactgcatcggcatgtgcaggacagcccggtggacgcgtgcctgctggtgctcgaccggcaactaaccgtccggcagaggctccagccgatgttacgcctgctgggcgcactacggcctgcggatgcagtgcttccagcaactgcaagacccgagcctggagtgccgctgtgccgacattctcctgatggtgaggaactacgaggagagcatgccgatgcccc

SEQ ID NO: 55981 - DNA, 360 bp, Oryza sativa
  unsure (1)..(360): unsure at all n locations
  Clone ID: PAT_MRT4530_57937C.1
aaccctagtatctcgtctccatcctcctgcctcctcgcgctaacccctgaaacgccaaatccccctcccaagggcggacagcgccccgcacaagggttcgagcagcgctcactggctcgcagtgtaccgtggggaaccctggatcncgcgcgtgancggctgcgggagactcgaggtacgagctttccgcgtgtcttgggagtctctgacggagttgtatcgggcttgcctaagaaantaaccaccagagtctttggccttctatctgacctttgactgaaccgccagggcatgcaagacagatgcaccattcgtgatcttaagatgggcacagaactggactggaggggcttgagcctg

SEQ ID NO: 55982 - DNA, 278 bp, Oryza sativa
  Clone ID: PAT_MRT4530_57938C.1
gtttgacgtgcgggctgggaaactgactgggatagtcaatgatataggctattctggcggcattgcttgcatcatgacatgcattgaggaggattaaaatgatgattaagatgggtattgagatggtaatagggctgaggaaaggctgatggatgttatacttcaagatactttccagaaagggggccacagaggggatgccgctggtgatgcagttgctgtggaatgtgctaaggattgttttgcttgtgcttgaacttgtgttggaattaagaggt

SEQ ID NO: 55983 - DNA, 471 bp, Oryza sativa
  Clone ID: PAT_MRT4530_57939C.1
ttatgtcctgctgttcgcattgtaagcattcttttctcgtctgtcgtctcccgatcgaccgtgttcgtgtacgctaccgtggtgaccaaccagccgctctctgtgcagtgcatgggcgagttgtgtctcctcccaactctttttcctctcattgagagggcctgaacctgtctaaatcctttgtctccgcatccatccacttttaggtctcgtgcgctacccccttttattattgccgaattcatgtttcgacagttggcgcgccaggtaggggctgcgtcgagttttccgtcgagaagtgcgatggaactttgtgccggcatcatcggtgctactcttgtctttggccgtgatcctctcaacaaaagggcagggtcttcgtcgccaaaaattctatctggatctggtcaatcaaccaggagattaatcaccgatcgaatcgaaaatcatgcgaagatcaccgttggttga

SEQ ID NO: 55984 - DNA, 435 bp, Oryza sativa
  Clone ID: PAT_MRT4530_5793C.1
tcaccgctcgctctcgccgtcggattcgtgctcgcgccgtgctcctctctctccgccgtcgccgccgaactccgttccgccgccgccgccgctccggacctcctcccgactcggcgccacctccatcggcttcgccgagtggttgccgactccgtccgccgctccgcttcgcccgccgactgccggagcaccgtcgccctcggcatcccgaaccgcgccgccgccttcttccgcttcggccgccgttcccgtcgtcgccgtcgaccggggtgagccgaagaccgtccccctcgcttcccccttccctcctctctctcgggtgccgctccgccgcgccggtggtcgccggcggtgaccatcggggcgcgggcgcgtccccctcccttcggccgcgccggcgaggccgccctcgggcgcgccctcgcggttccacat

SEQ ID NO: 55985 - DNA, 440 bp, Oryza sativa
  unsure (1)..(440): unsure at all n locations
  Clone ID: PAT_MRT4530_57940C.1
ccggccggacagaaagagttaagcatgttgaaaactagagatcctgtcctgaatcactcggcgcctaggagtcatcgcagcaaggttggtccgcgtcggggaccgtgcccgagcctgataggtttcatcgcccatcactacaacttggcgcactgcatctaccgcaagtaagagaatctggacacgatcgaggttgtcagctttctgatatcatctacctgcggctcctcttctggtgcatccgccggtttcatcaatggcccaancgatctgtttcaaagtacccgaatatctgttgtccgccgagttattgacactagaggcctactactaccccattacactaatggggcatctctagcatatatcatccaaggcagagggataacagggccgactttcacagggtgtcctgagacctaccagcagcagctccaaca

SEQ ID NO: 55986 - DNA, 394 bp, Oryza sativa
  Clone ID: PAT_MRT4530_57941C.1
atcgtgttcaaacgcgcacgtggaagcgtgggtgccaatcgtagacggcgttcatgcctaaggacgaatacttttctgtcagagttggctcgtaggaagagtctctaatcacacttttcagcctattgggtaggctccaatttccagcaccaactaagtcactgaaacctgcacttatgagccaatcggttcgatgtggctactctatcatctcctaggttactagagaccgatgaaatcccttccgccggagtgactacacgggttgctgctagaaatgcatttaaagcatgaactgacggaattgaaatccatagagcttatggctatatgctcgaaccggtccttaatgaccttgccaatgaacgttctgaccaattatggtcaaagctta

SEQ ID NO: 55987 - DNA, 359 bp, Oryza sativa
  Clone ID: PAT_MRT4530_57942C.1
tgttgtttggagatatctccatactttggatggtccagatgtaccgactacaaaaaatgcattggtttgggttgtattgtttcaatatattccaaggttgctacggattttccctgtgaccaaagatttgaaaaggacggctggtgttttcattgaaactgattggcttggtgctgcttactatcttctatggtttatgctggctggtcataatgttggtactttgtggtattttttgaccatagagcgggaagattcttgctggcgctcgaactgtcatagcaatgatggctgtaataaaagctacctgtactgtagtgataatcatactggcaactataccagtatgattatcactc

SEQ ID NO: 55988 - DNA, 384 bp, Oryza sativa
  Clone ID: PAT_MRT4530_57943C.1
atccaagcacagttgcacaccacgcatacataatacaacatcattagtaactgggacaaaatggcaagagacaacacacggtttaaccggtggatcatagcccacattaaggggtttggtaaaagaaatgaaggtcttgcgttgaccgataataatgcatgcgcatgcaggtaagtaacacgagcactggaatttattcgggggcttgttatctaaaacgagcgatgatacggggtccgggggccggcctgcccgagaaaagaaggccccctgcggcggaggcggcggccgccattatttatcaacccgggcccacgtagtggttgcccacataggccattccctgcaggttgggctggctgggcaccacgcggaaggggaaca

SEQ ID NO: 55989 - DNA, 173 bp, Oryza sativa
  unsure (1)..(173): unsure at all n locations
  Clone ID: PAT_MRT4530_57944C.1
cccacgcgtccgaagnaactgataaatcaaaacaaaatatagctggcatatattcactagtagtgattaagtagctaattaatttggaggtctgagaaaatatatatactagtatagttgatatacagttacatgaaagatgataaatggaaatgggaccaaaattttacaat

SEQ ID NO: 55990 - DNA, 358 bp, Oryza sativa
  Clone ID: PAT_MRT4530_57945C.1
cccacgcgtccggacgggaaggtgcagcgcacgtttgaggcgctggacggcatcctcgagagggtgatcgacgatcaccgtcgccgccgtgaaggcggccggcgtatggacgacgacggcggcggcgatcaccgggatttcgtggacgtgttgctcgacgtgaacgagacggacaaggacgctggcattcagctcggcaccgtcgaaatcaaggctattatcatggacatgtttgtagggggctcagacactacgaccacgatgatggcatggaccatggccgagctgatcaaccacccacgcgccatgcgcaaagcgcagaacgagatctgggcagtcgtgggcaacactagtcatg

SEQ ID NO: 55991 - DNA, 1812 bp, Oryza sativa
  Clone ID: PAT_MRT4530_57946C.1
gctcgccccacgcccgcgtgcccgcacacaatggccgtctcactcctccccgccgtccttgtagtcctcgccatcgtcgcgccgctcctgtacctcgtgctgcttcccgccgtgaagtacacgacgagaaatggcgctgcgaggtgggaggacgacggcggtgatggccggcgccgccggaggctgccgccgtcgccgcgggggctcccgctgctcggccacctccacctgctcggcgcgctgccgcaccgggcactgcggtccctcgccgcggcgcacggcccggtgctgctgctgcggctcggccgcgttcccgtggtggtcgtgtcgtcggcggccgcggccgaggaggtgatgcggtcgcgggacatggagttcgcgagccggcccaggatggccatggccgagctgctgctctacggcggccgcgacgtcgcgttcgcgccctacggcgagtactggcgccaggcgcgccgcatctgcgtggtccacctcctcagcgcgcgccgcgtcctctcgttccgccgcgtcagggaggaggaggccgccgcgctcgtcggccgcgtccgcgccgccgccgccgacgtcgtcgtcgacctgtccgacctcctcatcgcttactccaacaccgtcttgacgcgcatcgcgttcggcgacgagagcgcgcgcggcggcggcggcggcggcgacagggggcgcgagctgaggaaggtgttcgacgacttcgcgaggttgctcgggacggagccgatgggggagctcttgccatggttctggtgggtggacgccttgagggggatagacgggaaggtgcagcgcacgtttgaggcgctggacggcatcctcgagagggtgatcgacgatcaccgtcgccgccgtgaaggcggccggcgtatggacgacgacggcggcggcgatcaccgggatttcgtggacgtgttgctcgacgtgaacgagacggacaaggacgctggcattcagctcggcaccgtcgaaatcaaggctattatcatgctgatatgcttcttgcttcacggacacgagcaggacatgtttgtagggggctcagacactacgaccacgatgatggcatggaccatggccgagctgatcaaccacccacgcgccatgcgcaaagcgcagaacgagatctgggcagtcgtgggcaacactagtcatgtcaccaaggaccacgtggacaagctgccctacctcaaggctgttttcaaggagacgctccggctacacccaccactcccgctcctcatcccacgagagccaccggcggacacccagatcctgggttacaccataccagcgcacacgcgggtggtgatcaacgcgtgggccatcggccgagacgcggcagcatgggggcagcaaccggacgagttctcaccggagaaattcctcaacagcaccattgactacaagggacaggacttcgagctgctaccatttggcgccggtaggagggggtgccccgggatcgtgttcggggtgtcagccatggagatagcactcgcgagcttgctctaccattttgactgggaggcggcggcaactgatcacaggaggaggggcagccaagcatgggcgttgccagtagacatgagtgaggtcaatgggatagctgttcatctcaagtatggtctacatgtcgtcgctaaaccacgtatgccttaacttgagaaaagatgttaccatctgcagttcaactaataggaccctggttatgtattggttgattaacttttgaggatatgggatatcctatcaatgtagacctcactcgagcagattgaatcgatc

SEQ ID NO: 55992 - DNA, 516 bp, Oryza sativa
  Clone ID: PAT_MRT4530_57947C.1
atgagagaactcacccacctgcatatcagcgtttttgaggtgaacgaaagtgatttcgaagtcctcggaagaatgcctagtcttatcgttctcaatttgacttcggcgtcttccgcacaaaggatctgccacatagacatatatgatgatggatttcggagtctagaggtgttctggttcaggtgtttggatgacgggtggctcaggctacggttctggggtgcagccatgccgcgcctccgaaggctcaggctttacttgagggcgaatggacttcggcttcacggcaactatttcggaatgcgcgacttccgttccctcacgcgagtccatgtcaccgtcgactgtcgtgacgcgactgttgtggatgtggaggaagccgaggctgccatcacatcactagtgaaggataaccccaacgagcccggcgccagagtggctggcgccgtcgttcaacaggacggcgccagcctctttggcgccgtcccaccgccgacgtggcggggcgatgctgag

SEQ ID NO: 55993 - DNA, 402 bp, Oryza sativa
  Clone ID: PAT_MRT4530_57948C.1
gccccgcaagcgcgatgtccctgcctgctctccggcccattcgttaataggggcagcggtgccgcgccagccgccggggagcttaggccaccgcgcgctgaagccggcggggagctcgccggcgacggttccgagaacagcagtcgttgggcgatgccgtcgccctcgacctcgccggcggacggcggtagcaccgcgtcctagtccgacctccccaccggcagcagtgtgcggcggcctgagctctccggcggccggcgcggcactgctgtccctatcaatgaatgggccagagaacgagaaaattacattgcgctgtggggcctgagacaaaggacgggactgaaacggttgttgtcgtcggatgcgcaaggaacggcgatccatggtcgaacgtccctt

SEQ ID NO: 55994 - DNA, 950 bp, Oryza sativa
  Clone ID: PAT_MRT4530_57949C.1
atggttaaaatagttggttcaccgatcgatttaagtgaaaagcaaagaggtacacttaagtacctattcctttttgattgtccaattgctctacttgaaatactgctgttgcggtggggaggatataaaacacctgagttgagaattgtcttgcgtggtaacctcataagggtaccaggagaatttgtcgggatgagagaactcacccacctgcatatcagcgtttttgaggtgaacgaaagtgatttcgaagtcctcggaagaatgcctagtcttatcgttctcaatttgacttcggcgtcttccgcacaaaggatctgccacatagacatatatgatgatggatttcggagtctagaggtgttctggttcaggtgtttggatgacgggtggctcaggctacggttctggggtgcagccatgccgcgcctccgaaggctcaggctttacttgagggcgaatggacttcggcttcacggcaactatttcggaatgcgcgacttccgttccctcacgcgagtccatgtcaccgtcgactgtcgtgacgcgactgttgtggatgtggaggaagccgaggctgccatcacatcactagtgaaggataaccccaacgagcccgtactggagctcaccagaaaactggatttttcacattttggtccttttgaaaaacttatttcgcaaatagatccctacaaaaacttatcccaaaaatggtcctttttagggcgccagagtggctggcgccgtcgttcaacaggacggcgccagcctctttggcgccgtcccaccgccgacgtggcggggcgatgctgaggaatggaggcgagcacgagctggcgccctcctccctaaggcgcagcaatgggcgccctcctcctgccacgtcggttcgcgtgcgccacggtggcaggaagaccgccagagacgggcgccgtcccgttggatga

SEQ ID NO: 55995 - DNA, 809 bp, Oryza sativa
  Clone ID: PAT_MRT4530_5794C.1
ccagccaatccgccgccgccaccttgccgcgccaatccgccgccgccaccttgccgcgccaatccgtcgccgccaccttgccttcgcccactatcctcatcctcgacggcacggacgaagcctactccttagaaaagccaccatctgacgcatactcaaactctggggtttggggaagatagagcaagactgagtactacccactgtactcagcaagtcataccggaataggggtatgatgcagggtataaccaaaggatagttagagcggttcatttgcataaagcgagcatttatcgacagcagttgaaagcggtaaaaccgttgtaataattaatcaatattaaccatccactgtccaacgctacaccacgatgcaacaggcccaaccatccacctgaacacgacattctagaaagaggccgtgacaggacccttcgcataacccgctctaaccaaacacaccacacctcaggtttcaaccccactcctcgcaaggcagcgggcagtcccctctcgtgcctaggtgaatccggaagccgcataggccgtcgcagggcccatccaaactccgtcacgcccacccttgcaatagagcatttgcaatataggatcaacatgttcaagtgacaagcatgacttgccttgctctgctgctggaggaacctcggtgactattttgaagtacaccggagcgtcgtatgaaccggaatctagcgacatacaaggcaaacattgcaaacaggctataagactactgaaacgaggaacaaaaccatttttaatggattctacacatttttcttgat

SEQ ID NO: 55996 - DNA, 274 bp, Oryza sativa
  Clone ID: PAT_MRT4530_57950C.1
cggacacgtttgtgtaatttaacagcaaaaagcaatgcccccaaaaaggggcatgcgggggcagaggccgaagagaacagcacccacagccgccacaccgaggaggagatcaacgcacgcaacacagtaccaaaaacagggaccaggaaagctacccggcgcgcgcgccgaatttacacccagcgctgggaacccgcggggggcgacgcgccccggctaggcgccatagccggtgtccacggacccacaggggagtccagctggacggcgcagc

SEQ ID NO: 55997 - DNA, 323 bp, Oryza sativa
  unsure (1)..(323): unsure at all n locations
  Clone ID: PAT_MRT4530_57951C.1
ggacggcggaaaagatctcccgntctcgtcgtctcctccgctccctgcggcaagacgagccgcggctgaacaggggaggggcgccgatctccatccagcgagcagagcagcggaggggatcctgatctgtggtgggagaagctcttctcttaatttcagagtatacaagtaacagtttgttgtttgttccccccaaaaaagtttgggggggttcaactgaacccaccctccatgtcccaagttggatccgcccctgcaatctttgctcctgctcaggaccaactggttgctgatcgattgcggaagtaaggatggacgtggan

SEQ ID NO: 55998 - DNA, 533 bp, Oryza sativa
  Clone ID: PAT_MRT4530_57952C.1
tgcgaggatgcccatgctcctcttcctcggcgtgtactcgaggagaggttttcatggaccgtccacggtggtgacggattgttcctgaagctgagacgctgcgccaccaacattgagctcacgtttctgcggggagcgatgccgatgctcatgctgtcaaattcggcgtgctggcgtgcagggaggatggtgctgccaatgacgtcgttggcttggggaacctgtcaatgctcgagacggttggtgtttacatcaactgcaagggtgcaacggccagtcaggtgaagcaaacggaggtggctttggagcgagagattgatgcccaccccaaccgtctcgcgtcaatggcttcgctatgtgattaaatgtggagcatttgttatagagttatatatacagccacagtatttacattttctatccatgattgaacttcattctgggaagaatgaaaaaaaatccgtacgtgcttaaatttaatttgatcttccttggagggaaggttttgcattttgttcaaaaaaaaaaaaaaa

SEQ ID NO: 55999 - DNA, 135 bp, Oryza sativa
  Clone ID: PAT_MRT4530_57953C.1
atgtcacaggtgcaagcagtcaaggaaaaaacgagcaatgatggcgtcagatatgactacgcgtcgctgggcctcgttgttgtttacttgtttgcttgcgtactgtgctttctgtacactgaggccagaggctag

SEQ ID NO: 56000 - DNA, 521 bp, Oryza sativa
  Clone ID: PAT_MRT4530_57954C.1
ttttgttacataatagctaaagcagagataacagtgttcaaacccaataatcatctaaatgaaataaatggctgcaataaagaaaagtaaacctaacagttcacaatattgtggtggcgaacatagggcaaagaaagcagcatcgttatccaaaacttgttaaagatcttttttcaattaagaaatcacagaaaacaattttataatgcccaaaatcgtgcgagtttacatttcctacataacaaacattatgtcaaaaaatgcatataagacagaattatgcggtgtttgtatatgattgcattgcatggaaaggaaacatggtgagatgaaaattgacaataccattctctaggcaccaacataagaggaaaaagaaggcatatttgcaaaaaagtactaatgtctacaggataaagggtattcaagaaaaaaactatcatgcggaattttattttgggagacaaaaggatagcataggaggtaaattgcaaagcattggtaaatcatgcatagcaatg

SEQ ID NO: 56001 - DNA, 245 bp, Oryza sativa
  Clone ID: PAT_MRT4530_57955C.1
ccttatcttatgagcaagaagctcatctcctcctccggtctggtggcatttcatggccaccagcgcgcgaccagactcctcaagacctccttcgctggcgcgcgcctccccgccgccgcccgcaaccccaccgtctccgtcgcgccagacaccggcgggtccatctgcaactccatctcgcggacaatggccaatcccccctactacctcaacgccatcaggttcagcctcatccaggagcccca

SEQ ID NO: 56002 - DNA, 316 bp, Oryza sativa
  Clone ID: PAT_MRT4530_57956C.1
gcaggcgaggactacacagatcacatgcaagccactggtgagcagtgacagtggtgcatgcatgttcacaggcagacggtgttcaggcagtgggcagggacagcatgacgggcagatcgacaacatgggcagatcggcgagtcgctggggtacccgcagcgcagctcaccaccttcgtgtcgctcatcagcatctggaactacctggggcgcatcagccaccagggttcgcgtcggaggcgctcctggcgcgcaccgctgccgcgccgctttagagatccaagcgtaaacgcgtgcatgccacgtcatagctcttc

SEQ ID NO: 56003 - DNA, 348 bp, Oryza sativa
  Clone ID: PAT_MRT4530_57957C.1
cttctgcttcggagtaagggctgctcgcatatcgggccctccgcgcgctctactccgagtgaagtcaccaccctgcgtaccacaagctccggagggacctcctcgaagaaggatgcagacgacttcacccgggcgggggggtgggggggggggggcggagctttctcaacsatggtgagccacagagatttacttcgctcagccggagccggagtagtctcaacggtggcttttcttttagtaaagctgcggagatttacttcgctcggctggagccggagcgatctcgacgcaagcttcgccacggagatttacttcgctcggctagagccggagcggtctcaatga

SEQ ID NO: 56004 - DNA, 335 bp, Oryza sativa
  Clone ID: PAT_MRT4530_57958C.1
ataatgccacgtaggataaagaatcggtcaagactgtcacgtaggcgccatgtcagctgaaaccatcatgtttgaaggacatgaatcatacccgggcgcaatagttgagggagccaaaatatactgttttcctttcccttttaggcttgacccatcttccttttcttttgtagagcggcccaaatccgaaagggtggggagatcagatgggcttttggggcccacattatcattttgtctttttagaatggtttttttcgaatcagttcgatttaaaatttacaaagtttacaagggttaaaaaaaaaaaataagggcgccgccggacgcggggg

SEQ ID NO: 56005 - DNA, 802 bp, Oryza sativa
  Clone ID: PAT_MRT4530_57959C.1
ggacgagggcgagatgttcgcgagcaggccggcggtgcacccggtggaggcgccgccgccgccgccgccgccggatccggcggagcagccgaggggggtgctgatgaaggacctgcccgggatgcccgggacggcgggggggctggggctccgcctcgcgcagttcgccttcgccgccgtcgccctcgccgtcatggcgtccaccaacgacttcccttccgtcacatcgttctgctttcttgttgcggcagccattttgcaatgtctctggagcttttcactagcaattgtggacatatatgcactgcttgttaagcgttgcttacgaaatcgccgggctgtttgtctatttgcaattggtgatgggatcacagcagcactgaccttcagtgccgcatgtgcgtcatctggcatcaccgtgttgattgataatgatctagacctatgctcggaaaatcactgcgcaagttttgaaagtgcgacagcaatggcgtttcttagctggggatggcctgttttgcaagtgttcaatgtggaactcagtaaaagtctcttaagcaagccacagcaccactacataacaagggttgtgcctaatttccatggtacatttcagttgaaagtcgttctgaaagaaccactgaaattggtggagaaccttctatcgtcggctgacattcttgtgtgcaatacccatccatggctactggccaagagttctgcactcaccagggccaactgtggtgccgtaatctaccacactgacccatccgtagatggcactcttcttttttcccattga

SEQ ID NO: 56006 - DNA, 273 bp, Oryza sativa
  unsure (1)..(273): unsure at all n locations
  Clone ID: PAT_MRT4530_5795C.1
aggcgcgccactattaaccccttcgtcccctctcctcttcttctacctcgcgaccacttcactggactacactaccacctctctctcgctctctctcgcggccatggcgtcgtacaggttgctcgtnatcctcgtnttctncgcgctcgtngccttggccgccggcgacacctacccggcggactgcccctacccatgcctgctgccgccgcccacgccggtcaccaccgactgtccgncaccgccctccacgccgtnttccggctactcgta

SEQ ID NO: 56007 - DNA, 501 bp, Oryza sativa
  Clone ID: PAT_MRT4530_57960C.1
gaagtaaataaaagagtcttggaaatggaaagttcaacttcttcaggtaattactacatgggtttactatttgtataatagtacacactttagattccatacacttagttttattctcatctcctttttttggtttaagatgtgtttgatctaacgtcatgtagattgtattctaaatatcttctaagcccaaatatcttttgtggatctacttttgctggctcatagctatgtcctgcacttcttaattgaagatgcttcctgggaagtgtttgggtgaacagatgggcacctgcctaccttatttagacctctgaccctcaggctacatccagatctgtgcgtgtagacgcgttcaagtagtgagttaatggttcctattgtttcctcatatagatttttttacttttctattgtaaaaaaaaaacacttttcaccccctgtatataggaaatgaataaattcttttcatttatagtgtaaaaaaaaaaaaaaaaaaaa

SEQ ID NO: 56008 - DNA, 5019 bp, Oryza sativa
  Clone ID: PAT_MRT4530_57961C.1
atggccgagcaaggaaaagcgcacgacctctctccgagtgtgagcggcgacgacggggagccgaatccgcgccgtcgagctcgtactcccccacctcctccgcgccaaagccctaagcagggggaggcgcttgagagggtcgacaaatccgtggcatcaccagtcgcaggtgatgcaggagaacggcgagatggggagcgtcgcctcctcgtctacggcgacggcagcacacctcagggtgcgcttcaggctgctggcgcgctcctacgacacccgcctgtcgtccatgacccggagtctccagcccaacgatggctggaagacgtggccaacttggtcatgacggcacagcagcgcctgggtgcgggtggacggtccgccaccaccaggacctccggcgccgctaccaccggctccgtgtcatcaaggcggagggcgcggcgagcggcggcggctgcacgtcattcggctgccactccctcgtctacaccgtcgactcgggaggatcagcatggggagccggatgcccgcctcaacatcgggcgccggcgtaatagccggcgtactccccgtgcaacggagggcgcctcctcgtccagagtgtctcctcgacacggacgtgaagatcagccctccgtgcccccggccggtggtgttggctgtagagcctttgtggcgagtcttcgtaatgtccgttggcccccaaggttccggcccaccatcaccgagaagtacgatgggagcgtcaaccccaccgagtttctccaggtctatacgaccgggattgaggccgctgggggtgacgacagggtcatggcgaacttctttcccatggccctaaaaggacaggcgcggggttggctaatgaacctgccacccgcgtcggtccactcctgggaagatttgtgccaacagttcaccatgaactttcaaggcacatatccgcgcccaggtgaagaagcggacttgcatgcagtacagcgaggcgatgatgagtcgcttcgctcgtacattcagcggttttgccaagtccgcaatactataccatgcatccctgcacacgcggtgatctacgcgttcagggggggtgtgcggcacaaccgcatgctcgaaaagattgcctccaaagagccccagactaccgcagagctttttcagctcgcagaccgagtggctcgtaaggaggaggcctggacctggaactcctccggttccggagtggtagcttcggccgcccccggatccgccgctcagacagggcggcgtgacaggaggaggaagaagaggccggaccgttccggcgacgagggtcatgtcctcgccgtcgagggcgctccacgggccactcgaaaggggaggcctgcgagcgacaaaaagaatgaggctggtacacccagcagggagcgcctcgccggcaggtggtgctctgtccacaacacctccctccacgatctcgcggactgtcgtgcggtcaaaaacttggccgagcgaacgaggaaatgggaggaggacaggaggcaggaacgccgtgagggcaagtccccggcggttccttccggcaaacggcgaagtgaggccaagcagaaggcccccgctgttgacattgatgatggtgatgatgacctaggtttccaagaacctggggccaccattgccaccgtcgatggaggagcatgtgctcacgtctctcgccggagcttcaaggctatgaagcgagagcttctggccatggcccctacccatgaggcgatgcgtcgggcgcggtggtcggaggtcgctctcactttcgaccagactgaccacccaccgtgcattgcccggggagggcaggttgcgatggtggtttcccccaccatctacaacgtgaagttgggacgtgtcctcatagatggaggagcggctctcaacatcctttcccccgcggcctttgatgctatcaaggccccggggatggtgctccagccgtctcaaccgatcatcggtgtgacgccggggcacacgtggccattaggtcacatcgacctaccggtcaccttcggtggacccgccaacttccgcacggagcgggtgagcttcgatgtggcggacctcagtctgccctacaacgcggtcctagggagacccgcgttggtgaagttcatggcggcggtccactacgcctacctccagatgaagatgccgggccccggtggccccatctctgtccgtggcgaccttaaagtcgcgcttgcttgcatggagcagcgcgcggaccgcctcgctgctgcgtccaagcccgagggtggtgacgagaggcttggcccctctgcccccaccgccccgaggcagcggatggccacttgcgacgaggtcccggaagacgcgctcgtctccttcctgcgggcaaacgctgacgtcttcgcatggagaccagcggacatgcccggggtccccagggaggtgattgagcaccgtctcgccgtgcggccgggcgcaaggccggtccggcagaaagtgcggcggcaggccccggaacgtcaagccttcatccgcgaggaggtggcgagacttctggaggccggattcatccgtgaagtcatccatccggagtggctggcgaacccggtggtcgttcccaaggcgaacggcaagcttcggatgtgcatcgactacaccgaccttaacaaggcatgtcctaaggatccttaccccctgcctcgcatagatcagatcgtcgactccactgcggggtgcgaccttttgtgttttctagatgcatactctggttaccatcagattcgcatggctagggaggatgaggaaaaaactgcgttcattacccccgtaggaacctattgttatacatcaatgcctttcgggttaaaaaatgcaggtcctacttttcagcgtactactcgaatttctttgggtagccaaataggacgtaatgttgaggcgtatgtcgatgacttggttgtaaaaacgcgcaaccaagagaccttactctcagatctagcggaaacttttgagaacctccgctccgcccgcataaaactgaaccccgataagtgcgtgtttggtgtacctgcgggcaaacttctcgggtttttggtctctgcccgaggcattgaggccaaccccgagaagatacgagctatagagcggatccgcccccccagcaaacttagggacgtgcactctcccccggttctagtcgccccggagccaaatgagcccctgctactttatttagcagcgaccccccaagtagttagtgcagcgttggttgtggagcgcgatgaggacaatcctcattctgcgcacccccactctgtgccgacttggcccgggagcaggcagggaggagaggcccccgagccgaacggtggcctaaggcccctgatgaccggagtcggccctctccccgctcgtcagacggtgctgggcgcccccgaccctcaggaaggccccgaggccactgcggggaggccgcacctatggccctctgaccccgaggctaaccctgtaccgattcgacccgggagagagcagggagaagaggcccccgagccgaacggtggcctaaggcccctgacgaccggagttggccctttgcccgcttgtccgatgacgccaggagcccccgacccccaggacggccccgaggccactgtgggaaggccgctcctgtcgtcttccgaccccgaggtcatcggcgcagaagatgggtgcgccccgaggggccactcggacgaagaacgccccgggggtgcggcccctagcgaagaagatcggcctcgccgaaaggtgcagcggcctgtctactttgttagtgaggccctccgggacgccaagacccgatacccacaggcccagaagatgctttacgctattctgatggcctcgaggaaactgcgccattatttccaggcgcatcgggtcactgtggttacgtcttaccccctcggtcaaatcttgcataatcgagagggtacaggacgagtggtaaaatgggcaatcgagctttctgagttcgatctgcactttgaaccacgccacgctatcaagagccaggccctcgccgatttcgtggcagagtggaccccggctccagagaccgcctcaatacccgaggctagcacggacccctcacagctgcctcaaaccgcccactgggtgatgcagttcgacggttctctgtctctccagggcgccggtgcaggggtcacgttgacctctccgaacggagacgtcctcagatacttggtccgtctcgactttcgagcgactaacaatatggcagagtacgagggactccttgccggactcagagtggcagctggactggggatccgccgcctcttggtattaggcgactcccagctagtcgttaaccaggtctgtaaggagtaccggtgctctgacccacagatggacgcctacgtgcgccaagtacggcgtatggagcgccattttgacgggatagagcttcggcatgtgcccagacgggataatatgattgccgatgaactctcaaggctcgcgtcctcgcgagcccagaccccaccgggcgcctttgaagaaaggcttacccagccgtcggcgcgacccgaccccttaggggagacggatgcgcctgaccggcccccgaggcccgtcggagtccaggcctcgggacccgaagggagcgttcctagctcccttagattgattgcttggatctctgagatccaaacgtacctcacagataagactctacctgaggaccgcgaagggagtgaacgcgtacaacgcatttccaaacgctacgtgttggtagaagggaccctctatcggcgcgcggctaacggaatcctcctgaagtgcattcctcagaaacaaggcgttgagcttcttgctgatatccatgagggcgagtgcggagcccattccgcctcgcgtaccctgagcgtgtcagtttcacgccaagcaaatccatcagccggcccaggccctgcagatcataccactgtcatggccatttgctgtctgggggcttga

SEQ ID NO: 56009 - DNA, 719 bp, Oryza sativa
  Clone ID: PAT_MRT4530_57962C.1
atggctcgggtcggggctagtgcctggggagatccgcatgtcgagactggccaggccgggaacgtggtgaccgagggttcagtgccgtcgcccgtggccagccgtacggagcccggccgggggacgccgatcactcgatacggaccctcccacattggctctgctggtagccgcagctcggagggccgcgcgccgccttcgttcttccaagtagtcgaggtcatctctacgaagctgatcttgatcagcctcgcagtacatggtggcccgaggagacctcagggtgagctcagatgggagaaccgcttctgcgccgtagacgaggaagaaaggcgtttccccggtcttggttttgaggcctttaaggatttctgcattggcgcgctccacttggccattgcttctgggggcctgggccggctgatggatttgcttggcgtgaaactgacacgctctgcatcgccggaccagatcgactgcgtcattgagagctgtcggccaataaaatccttgacgaaaggccttgccaaccagggtacgcgaggcggaatgggctccgcactcgccctcatggatatcagcaagaagctcaacgccttgttcctgaggaatgcacttcaggaggattccgttagccgcgcgccgatagagggtcccttctaccaacacgtagcgtttggaaatgcgttgtacgcgttcactcccttcgcggtcctcag

SEQ ID NO: 56010 - DNA, 590 bp, Oryza sativa
  Clone ID: PAT_MRT4530_57963C.1
ctattcttcctcttggtcactccattttaactcccggagatgatgcaagtgctcacaaatcttcacgaagtcaacaagaagcactcacacaaactcgaatccacaactctttgttgttggtatttcttatgaccacagaaaaatccacaagcgcacggaataccgctgtagcacttcaccttcgggtgaccctaaaaggatatcgaactcaggggaggattactagcgtgggattcagggctgtcaccacctgtcgtctacctctgacaaatccgtgtgatacagaacaaacaaagaagaagttttccgaacccggagcggagtgtaccgatagctccggtactcctccagaattcctcctacgaagctacactcgtcgaggtagaagtcggatgggcgccaaacttccgggcactcctccagagctttccctcactctctatcaatctctaatgtacaaaagatacaatagagcctcttataatttagctcaaagttgtgtgttggaaatgagagtgagctactccttttataggcaagtatgacagttatagcttatgcgaaatgtccaaaataccccggaaccgcca

SEQ ID NO: 56011 - DNA, 5478 bp, Oryza sativa
  Clone ID: PAT_MRT4530_57964C.1
atggccgagcaaggaaaagcgcacgacctctctccgagtgtgagcggcgacgacggggagccgaatccacgccgtcgagctcgtactcctccacctcctccgcgccaaagccctaagcagggggaggcgcttcagagggtcgacaaatccgtggcatcaccagtcgcaggtgatgcaggagaacggcgagatggggagcgtcgcctcctcgtctacggcgacggcagcacgcctcagggtgcgcttcaggctgctggcgcgctcctacgacacccgcctgtcgtccatgacccggagtctccagcccaacgatggctggaagacgtggccaacttggtcatgacggcacagcagcgcctgggtgctggtggacggtcagccaccaccaagacctccggcgccgctaccaccggctccgtgtcatcaaggcggagggcgcggcgagcggcggcggctgcacgtcattcggctgccactccctcgtcgacaccgtcgactcgggaggatcagcatggggagccggatgcccgcctcaacgtcgagcgccggcgtaatagccggcgtactccccgtgcaacggagggcgcctcctcgtccagagtgtcacctcgacacggacgtgaagatcagccctccgtgcccccggccggtggtgttggctgtagagcctttgtggcgagtcttcggaatgtccgttggcccccaaggttccggcccaccatcaccgagaagtacgatgggagcgtcaaccccaccgagtttctccaggtctatacgaccgggatcgaggccgctgggggtgacgacagggtcatggcgaacttctttcccatggccctaaaaggacaggcgcggggttggctaatgaacctgccacccgcgtcggtccactcctgggaagatttgtgccaacagttcaccatgaacttccaaggcacatatccgcgcccaggcgaagaagcggacttgcatgcagtacagcgaggcgatgatgagtcgcttcgctcgtacattcagcggttttgccaagtccgcaatactataccatgcatccctgcacacgcggtgatctacgcgttcagggggggtgtgcggcacaaccgcatgctcgaaaagattgcctccaaagagccccagactaccgcagagctttttcagctcgcggaccgagtggctcgtaaggaggaggcctggacctggaactcctccggttccggagtggcagcttcggccgcccccggatccgccgctcagacagggcggcgtgacaggaggaggaagaagaggccggaccgttccggcgacgagggtcatgtcctcgcagtcgagggcgctccgcgggccactcgaaaggggaggcctgcgagcgacaaaaagaacgaggctggtacacccagcaaggagcgcctcgccggcaggtggtgctctgtccacaacacctccctccacgatctcgcggactgtcgtgcggtcaaaaacctggccgagcgaacgaggaaatgggaggaggacaggaggcaggaacgccgtgagggcaagtccccggcggttccttctggcaaacggcgaagtgaggccaagcagaaggcccccgctgttgacattgatgatggtgatgatgacctaggtttccaagaacctggggccaccattgccaccgtcgatggaggagcatgtgctcacgtctctcgccggagcttcaaggctatgaagcgagagcttctggccatggcccctacccatgaggcgatgcgtcgggcgcggtggtcggaggttgctctcactttcgaccagaccgaccacccaccgtgcattgcccggggagggcaggttgcgatggtggtttcccccaccatctgcaacgtgaagttgggtcgtgtcctcatagatggaggagcggctctcaacatcctttcccccgcggcctttgatgctatcaaggcctcggggatggtgctccagccgtctcaaccgatcatcggtgtgacgccggggcacacgtggccattaggtcacatcgacctaccggtcaccttcggtggacccgccaacttccgcacggagcgggtgagcttcgatgtggcggacctcagtctgccctacaacgcggtcctagggagacccgcgttggtgaagttcatggcggcggtccactacgcctacctccagatgaagatgccgggccccggtggccccatctctgtccgtggcgaccttaaagtcgcgcttgcttgcatggagcagcgcgcggaccgcctcgctgctgcgtccaagcccgagggtggtgacgagaggcttggcccctctgcccccaccgccccgaggcagcggatggccacatgcgacgaggtcccggaagacgcgctcgtctccttcctgcgggcaaacgctgacgtcttcgcatggagaccagcggacatgcccggggtccccagggaggtgattgagcaccgtctcgccgtgcggccgggcgcaaggccggtccggcagaaagtgcggcggcaagccccggaacgtcaagccttcatccgcgaggaggtggctagacttttggaggccgggttcatccgtgaggtcatccatccggagtggttggcgaaaccggtggtcgttcccaaggcgaacggcaagcttcggatgtgcatcgactacaccgaccttaacaaggcatgtcctaaggatccttaccccctgcctcgcatagatcagatcgtcgactccactgcggggtgcgaccttttgtgttttctagatgcatactctggttaccatcagattcgcatggctagggaggatgaggaaaaaactgcgttcattacccccgtaggaacctattgttatacatcaatgcccttcgggttaaagaatgcaggtcctacttttcagcgtactactcgaatttctttgggtagccaaataggacgtaatgttgaggcgtatgtcgatgacttggttgtaaaaacgcgcaaccaagagaccttactctcagatctagcggaaacttttgagaacctccgctccgcccgcataaaactgaaccccgataagtgcgtgtttggtgtacctgcgggcaagcttctcgggtttttggtctctgcccgaggcattgaggccaaccccgagaagatacgagctatagagcggatccgcccccccagcaaacttagggatgtgcagtgcgtcactggttgcatggccgccctaagtcgtttcatatcaaggctgggagagaaggcgcttcccttgtttaagctcctcaagcgctcggggccgttcgtttggacggaggaagctgaacatgcccttactcagttaaaggcatatctcagctctcccccggttctagtcgccctggagccaaatgagcccctgctactttacttagcggcgaccccccaagtagttagtgcagcgttggctgtggagcgcgatgaagacaatcctcattccgcgcacccccaccctgtgctgacttggcccgggagcaagcagggaggagaggcccccgagccgaacggtggcctaaggcccctgacgaccggagtcgaccctctccccgctcgtcagacggtgctgggcgcccccgaccctcaggaaggccccgaggccactgcggggaggccgcacctatcgccctctgaccccgaggctaaccctgtaccgattcgacccgggagagagcagggagaagaggcccccgagccgaacggtggcctaaggcccctgacgaccggagttggccctttgcccgcttgtccgatgacgccaggagcccccgacccccaggacggccccgaggccactgtgggaaagccgctcctgtcgtcctccgaccccgaggtcatcggcacagaagacgagtgcgccccgaggggccactcggacgaagaacgccccgggggtacggaccctagcgaagaggatcggccccgccgaaaggtgcagcggcctgtctactttgttagtgaggccctccgggacgccaagacccgatacccacaggcccagaagatgctttacgctattctgatggcctcgaggaaactgcgccattatttccaggcgcatcgggtcactgtggttacgtcttaccccctcggtcaaatcttgcataatcgagagggtacaggacgagtggtaaaatgggcaatcgagctttctgagttcgatctgcactttgaaccacgccacgctatcaagagccaggcccttgccgattttgtggcagagtggaccccggctccagagactgtctcaatacccgaggccagcacgaacccctctcagctgccacacaccgcccactgggtgatgcagttcgacggttctttgtctctccagggcgccggtgcaggggtcacgctgacctctccgaacggagacgtcctcagatacatggtccgtctcgactttcgagcgaccaataatatggcagagtacgagggactccttgccggactcagagtggcggccgggctggggatccgccgcctcctggtgttaggtgactctcagctggttgttaaccaagtctgtaaggaataccggtgctctgatccgcagatggacgcctacgtgcgccaaccggcccaggccctgcagatcataccactgtcatggccatttgctgtctgggggcttgatatcctgggaccgttcaaacgggccccgggcgggtttgagtatctgtatgttgcgatcgacaagttcactaagtggcccgaggcttatccggttgtcaagatcgataagcactctgctcttaaattcattaagggcatcacggcccgttttggagtgcctaaccgtattattacggataatggcacccaattcactagtgaactcttcggcgactactgcgaagacatgggcatcaagctctgcttcgcctcacctgcccaccccagaagcaatggccaagtggagcgcgccaatgcagaaatccttaaaggcctcaaaaccaagaccttcaacattctcaagaagcacggcgattcatggatcgaggagttgccagcggtgctctgggcgaaccgaaccacaccaagccgagcgaccggggaaacgcctttcttcctcgtctacggcgcagaagcggttctcccatctgagctcaccctgaggtctcctcgggccaccatgtactgcgaggctgatcaagatcagcttcgtagagatgacctcgactacttggaagaacgaaggcggcgcgcggccctccgagctgcgcgctaccagcagagcctgcggcgctaccatcagcaccacgtccgggcccgatcactctgcgtcgacgacctcgtcctacgccgcgtccaaacgcgtgctggattgagcaagctctcaccaatgtgggagggtccgtatcgggtgatcggtgtcccccggccgggctcggtacggctggccacgggcgacggcacggagctgccaaacccgtggaacatcgaacaccttcgtcgcttctacccctga

SEQ ID NO: 56012 - DNA, 6054 bp, Oryza sativa
  Clone ID: PAT_MRT4530_57965C.1
atggccgagcaaggaaaagcgcacgacctctctccgagtgtgagcggcgacgacggggagccgaatccacgccgtcgagctcgtactcccccacctcctccgcgccaaagccctaagcagggggaggcgcttgagagggtcgacaaatccgtggcatcaccagtcgcaggtgatgcaggagaacggcgagatggggagcgtcgcctcctcgtctacggcgacggcagcacgcctcagggtgcgcttcaggctgctggcgcgctcctacgacacccgcctgtcgtccatgacccggagtctccagcccaacgatggctggaagacgtggccaacttggtcatgacggcacagcagcgcctgggtgctggtggacggtccgccaccaccaagacctccggcgccgctaccaccggctccgtgtcatcaaggcggagggcgcggcgagcggcggcggctgcacgtcattcggctgccactccctcgtcgacaccgtcgactcgggaggatcagcatggggagccggatgcccgcctcaacatcgagcgccggcgtaatagccggcgtactccccgtgcaacggagggcgcctcctcgtccagagtgtcacctcgacacggacgtgaagatcagccctccgtgcccccggccggtggtgttggctgtagagcctttgtggcgagtcttcggaatgtccgttggcccccaaggttccggcccaccatcaccgagaagtacgatgggagcgtcaaccccaccgagtttctccaggtctatacgaccgggatcgaggccgctgggggtgacgacagggtcatggcgaacttctttcccatggccctaaaaggacaggcgcggggttggctaatgaacctgccacccgcgtcggtccactcctgggaagatttgtgccaacagttcaccatgaacttccaaggcacatatccgcgcccaggcgaagaagcggacttgcatgcagtacagcgaggcgatgatgagtcgcttcgctcgtacattcagcggttttgccaagtccgcaatactataccatgcatccctgcacacgcggtgatctacgcgttcagggggggtgtgcggcacaaccgcatgctcgaaaagattgcctccaaagagccccagactaccgcagagctttttcagctcgcggaccgagtggctcgtaaggaggagccctggacctggaactcctccggttccggagtggcagcttcggccgcccccggatccgccgctcagacagggcggcgtgacaggaggaggaagaagaggccggaccgttccggcgacgagggtcatgtcctcgccgtcgagggcgctccgcgggccactcgaaaggggaggcctgcgagcgacaaaaagaacgaggctggtacacccagcagggagcgcctcgccggcaggtggtgctctgtccacaacacctccctccacgatctcgcggactgtcgtgcggtcaaaaacctggccgagcgaacgaggaaatgggaggaggacaggaggcaggaacgccgtgagggcaagtccccggcggttccttccggcaaacggcgaagtgaggccaagcagaaggcccccgctgttgacatcgatgatggtgatgatgacctaggtttccaagaacctggggccaccattgccaccgtcgatggaggagcatgtgctcacgtctctcgccggagcttcaaggctatgaagcgagagcttctggccatggcccctacccatgaggcgatgcgtcgggcgcggtggtcggaggttgctctcactttcgaccagaccgaccacccaccgtgcattgcccggggagggcaggttgcgatggtggtttcccccaccatctgcaacgtgaagttgggacgtgtcctcatagatggaggagcggctctcaacatcctttcccccgcggcctttgatgctatcaaggccccggggatggtgctccagccgtctcaaccgatcatcggtcacatcgacctaccggtcaccttcggtggacccgccaacttccgcacggagcgggtgagcttcgatgtggcggacctcagtctgccctacaacgcggtcctggggagacccgcgttggtgaagttcatggcggcggtccactacgcctacctccagatgaagatgccgggccctggtggccccatctctgtccgtggcgacattaaagtcgcgcttgcttgcatggagcagcgcgcggaccgcctcgctgctgcgtccaagcccgagggtggtgacgagaggcttggcccctctgcccccaccgccccgaggcagcggatggccacatgcgacgaggtcccggaagacgcgctcgtctccttcctgcgggcaaacgctgacgtcttcgcatggagaccagcggacatgcccggggtccccagggaggtgattgagcaccgtctcgccgtgcggccgggcgcaaggccggtccggcagaaagtgcggcggcaagccccggaacgtcaagccttcatccgcgaggaggtggctagacttttggaggccgggttcatccgtgaggtcatccatccggagtggctggcgaacccggtggtcgttcccaaggcgaacggcaagcttcggatgtgcatcgactacaccgaccttaacaaggcatgtcctaaggatccttaccccctgcctcgcatagatcagatcgtcgactccactgcggggtgcgaccttttgtgttttctagatgcatactctggttaccatcagattcgcatggctagggaggatgaggaaaaaactgcgttcattacccccgtaggaacctattgttatacatcaatgcccttcgggttaaagaatgcaggtcctacttttcagcgtactactcgaatttctttgggtagccaaataggacgtaatgttgaggcgtatgtcgatgacttggttgtaaaaacgcgcaaccaagagaccttactctcagatctagcggaaacttttgagaacctccgctccgcccgcataaaactgaaccccgataagtgcgtgtttggtgtacctgcgggcaagcttctcgggtttttggtctctgcccgaggcattgaggccaaccccgagaagatacgagctatagagcggatccgcccccccagcaaacttagggatgtgcagcgcgtcactggttgcatggccgccctaagtcgtttcatatcaaggctgggagagaaggcgcttcccttgtttaagctcctcaagcgctcggggccgttcacttggacggaggaagctaaacatgcccttactaagttaaagacatatctcagctctcccccggttctagtcgccccggagccaaatgagcccctgctactttacttagcggcgaccccccaagtagttagtgcagcgttggctgtggagcgcgatgaagacaatcctcattccgcgcacccccaccctgtgctgacttggcccgggagcaagcagggaggagaggcccccgagccgaacggtggcctaaggcccctgacgaccggagtcggccctctccccgctcgtcagacggtgctgggcgcccccgaccctcaggaaggccccgaggccactgcggggaggccgcacctatcgccctttgaccccgaggctaaccctgtaccgattcgacccgggagagagcagggagaagaggcccccgagccgaacggtggcctaaggcccctgacgaccggagttggccctttgcccgcttgtccgatgacgccaggagcccccgacccccaggacggccccgaggccactgtgggaaggccgctcctgtcgtcctccgaccccgaggtcatcggcacagaagacgagtgcgccccgaggggccactcggacgaagaacgccccgggggtacggtccctagcgaagaggatcggccccgccgaaaggtgcagcggcctgtctactttgttagtgaggcccttcgggacgccaagacccgatacccacaggcccagaagatgctttacgctattctgatggcctcgaggaaactgcgccattatttccaggcgcatcggatcactgtggttacgtcttaccccctcggtcaaatcttgcataatcgagagggtacaggacgagtggtaaaatgggcaatcgagctttctgagttcgatctgcactttgaaccacgccacgctatcaagagccaggccctcgccgattttgtggcagagtggaccccggctccagagactgtctcaatacccgaggccagcacgaacccctctcagctgcctcacaccgcccactgggtgatgcagttcgacggttctttgtctctccagggcgccggtgcaggggtcacgttgacctctccgaacggagacgtcctcagatacttggtccgtctcgactttcgagcgaccaataatatggcagagtacgagggactccttgccggactcagagtggcggctgggctggggatccgccgcctcctggtgttaggtgactctcagctggttgttaaccaagtctgtaaggagtaccggtgctctgatccgcagatggacgcctacgtgcgccaagtacggcgtatggagcgccattttgacgggatagagcttcggcatgtgcccagacgggataatatgattgccgatgaactctcaaggctcgcgtcctcgcgagcccagaccccaccgggcgcctttgaagaaaggcttactcagccgtcggcgcgacccgaccccttaggggagacggatgcgcctgaccggcccccgaggcccgtcggagtccaggcctcgggacccgaagggagcgctccaagctcctttagattgattgcttggatctctgagatccaaacatacctcgcagataagactctacctgaggaccgcgaagggagtgaacgcgtacaacgcatttccaaacgctacgtgttggtagaagggaccctctatcggcgcgcggcaaacggaatcctcctgaagtgcattcctcaggaacaaggcattgagcttcttgctgacatccatgagggcgagtgcggagcccattccgcctcgcgtaccctggttggcaaggcctttcgtcaaggattttattggccgacagctctcaatgacgcagttgacctggtccggcgatgcagagcgtgtcagtttcacgccaagcaaatccatcagccggcccaggccctgcagatcataccactgtcatggccatttgctgtctgggggcttgatatcctgggaccgttcaaacgggccccgggcgggtttgagtatctgtatgttgcgatcgacaagttcactaagtggcccgaggcttatccggttgtcaagatcgataagcactctgctcttaaattcattaagggcatcacggcccgttttggagtgcctaaccgtattattacggataatggcacccaattcactagtgaactcttcggcgactactgcgaagacatgggcatcaagctctgcttcgcctcacctgcccaccccagaagcaatggccaagtggagcgcgccaatgcagaaatccttaaaggcctcaaaaccaagaccttcaacattctcaagaagcacggcgattcatggatcgaggagttgccagcggtgctctgggcgaaccgaaccacaccaagccgagcgaccggggaaacgcctttcttcctcgtctacggcgcagaagcggttctcccatctgagctcaccctgaggtctcctcgggccaccatgtactgcgaggctgatcaagatcagcttcgtagagatgacctcgactacttggaagaacgaaggcggcgcgcggccctccgagctgcgcgctaccagcagagcctgcggcgctaccatcagcgccacgtctgggcccgatcactctgcgtcgacgacctcgtcctacgccgcgtccaaacgcgtgctggattgagcaagctctcaccaatgtgggagggtccgtatcgagtgatcagtgtcccccggccgggctcggtacggctggccacgggcgacggcacggagctgccaaacccgtggaacatcgaacaccttcgtcgcttctacccctga

SEQ ID NO: 56013 - DNA, 399 bp, Oryza sativa
  Clone ID: PAT_MRT4530_57966C.1
atgggagtggtgctcgctacggaggctctcttcatggcggcggtggcactcggcgtgcttttgggcgcgcacacccatcagagacgctccttgatcgtcggcatcctctgcgtcatctttggtaccatcatgtactcctcaccactcaccatcatgagtcaggttgtgaagactaaaagcgtggagtacatgccgttgctgttgtcagtggtgagcttcctcaatggactctgctggacatcatacgcgctcatccgcttcgacatcttcatcaccatacccaatggtcttggcgtgctctttactctcatgcaactcatcctcttgagctgcaaggacgacgacatcaatggcagcactgccagccatgtcataatcaatatcacgaaggagccataa

SEQ ID NO: 56014 - DNA, 971 bp, Oryza sativa
  Clone ID: PAT_MRT4530_57967C.1
atggcttcagctccactcccacaggcagctcaactggggtataagccaaacgtcttctccttctggatcctttttctttaattgaggttgattgattattgcaagaatgagcatatgacatactcaacaagccacacagcaaatatgcaagtgcacaaggattccgaaggatggcataatatagggttcatttgcgaagacaacatttagcaaacatttaagagaacgcactcacgaaccttcgcaacgacggaaacgacaagcacgacgacaaacgacgaacgatgacggccggcgacgaggaggacggcggcggcggctcggtcggcggtggcggcggagctccggtgaccggcgacgacggggagagggcggccgaggttcctcacctccgtgcgcacctaacggcagcgaggggaagcgacggcgacggcggaatcgacggcgcgacctcgccgaaggttggccggcggcggcggcgggttgggtggtgtggcggcggcgctacaaggcacgagagaccacgggagagggggcaaacgaaagaggaggactagggggtgctttatataggcttggattgaagagatcggactccaaacgagaggaatcgaagccggaaaacaaaaactcggttttggagataaactcgaaaacgagtttgatttggataaaatacccaacgatttgctccgattcttgggggaaaagatagaggagaacgagaggatcaaaacccctcaaaaatccggaagaaacggggtcggattggagcggatttggaggcggaaaggcgacgcggcgcgcggctcgggctcagctaggcagccggctggaggcgaagttgttatgatcaaagaacaggaactctcggcagcatcaaagtcaatttccggcagtcgtgcagactacagtatttttgcgaaagcagttgcaggctttacagttcatcaatccggggatcctctaga

SEQ ID NO: 56015 - DNA, 6222 bp, Oryza sativa
  Clone ID: PAT_MRT4530_57968C.1
atggccgagcaaggaaaagcgcacgacctctctccgagtgtgagcggcgacgacggggagccgaatccacgccgtcgagctcgtactcccccacctcctccgcgccaaagccctaagcagggggaggcgcttgagagggtcgacaaatccgtggcatcaccagtcgcaggtgatgcaggagaacggcgagatggggagcgtcgcctcctcgtctacggcgacggcagcacgcctcagggtgcgcttcaggctgctggcgcgctcctacgacacccgcctgtcgtccatgacccggagtctccagcccaacgatggctggaagacgtggccaacttggtcatgacggcacagcagcgcctgggtgctggtggacggtccgccaccaccaagacctccggcgccgctaccaccggctccgtgtcatcaaggcggagggcgcggcgagcggcggcggctgcacgtcattcggctgccactccctcgtcgacaccgtcgactcgggaggatcagcatggggagccggatgcccgcctcaacatcgagcgccggcgtaatagccggcgtactccccgtgcaacggagggcgcctcctcgtccagagtgtcacctcgacacggacgtgaagatcagccctccgtgcccccggccggtggtgttggctgtagagcctttgtggcgagtcttcggaatgtccgttggcccccaaggttccggcccaccatcaccgagaagtacgatgggagcgtcaaccccaccgagtttctccaggtctatacgaccgggatcgaggccgctgggggtgacgacagggtcatggcgaacttctttcccatggccctaaaaggacaggcgcggggttggctaatgaacctgccacccgcgtcggtccactcctgggaagatttgtgccaacagttcaccatgaacttccaaggcacatatccgcgcccaggcgaagaagcggacttgcatgcagtacagcgaggcgatgatgagtcgcttcgctcgtacattcagcggttttgccaagtccgcaatactataccatgcatccctgcacacgcggtgatctacgcgttcagggggggtgtgcggcacaaccgcatgctcgaaaagattgcctccaaagagtcccagactaccgcagagctttttcagctcgcggaccgagtggctcgtaaggaggaggcctggacctggaactcctccggttccggagtggcagcttcggccgcccccggatccgccgctcagacagggcggcgtgacaggaggaggaagaagaggccggaccgttccggcgacgagggtcatgtcctcgccgtcgagggcgctccgcgggccactcgaaaggggaggcctgcgagcgacaaaaagaacgaggctggtacacccagcagggagcgcctcgccggcaggtggtgctctgtccacaacacctccctccatgatctcgcggactgtcgtgcggtcaaaaacctggccgagcgaacgaggaaatgggaggaggacaggaggcaggaacgccgtgagggcaagtccccggcggttccttccggcaaacggcgaagtgaggccaagcagaaggcccccgctgttgacatcgatgatggtgatgatgacctaggtttccaagaacctggggccaccattgccaccgtcgatggaggagcatgtgctcacgtctctcgccggagcttcaaggctatgaagcgagagcttctggccatggcccctacccatgaggcgatgcgtcgggcgcggtggtcggaggttgctctcactttcgaccagaccgaccacccaccgtgcattgcccggggagggcaggttgcgatggcggtttcccccaccatctgcaacgtgaagttgggacgtgtcctcatagatggaggagcggctctcaacatcctttcccccgcggcctttgatgctatcaaggccccggggatggtgctccagccgtctcaaccgatcatcggtgtgacgccggggcacacgtggccattaggtcacatcgacctaccggtcaccttcggtggacccgccaacttccgcacggagcgggtgagcttcgatgtggcggacctcagtctgccctacaacgcggtcctagggagacccgcgttggtgaagttcatggcggcggtccactacgcctacctccagatgaagatgccgggccccggtggccccatctctgtccgtggcgaccttaaagtcgcgcttgcttgcatggagcagcgcgcggaccgcctcgctgctgcgtccaagcccgagggtggtgacgagaggcttggcccctctgcccccaccgccccgaggcagcggatggccacatgcgacgaggtcccggaagacgcgctcgtctccttcctgcgggcaaacgctgacgtcttcgcatggagaccagcggatatgcccggggtccccagggaggtgattgagcaccgtctcgccgtgcggccgggcgcaaggccggtccgccagaaagtgcggcggcaagccccggaacgtcaagccttcatccgcgaggaggtggctagacttttggaggccgggttcatccgtgaggtcatccatccggagtggctggcgaacccggtggtcgttcccaaggcgaacggcaagcttcggatgtgcatcgactacaccgaccttaacaaggcatgtcctaaggatccttaccccctgcctcgcatagatcagatcgtcgactccactgcggggtgcgaccttttgtgttttctagatgcatactctggttaccatcagattcgcatggctagggaggatgaggaaaaaactgcgttcattacccccgtaggaacctattgttatacatcaatgcccttcgggttaaagaatgcaggtcctacttttcagcgtactactcgaatttctttgggtagccaaataggacgtaatgttgaggcgtatgtcgatgacttggttgtaaaaacgcgcaaccaagagaccttactctcagatctagcggaaacttttgagaacctccgctccgcccgcataaaactgaaccccgataagtgcgtgtttggtgtacctgcgggcaagcttctcgggtttttggtctctgcccgaggcattgaggccaaccccgagaagatacgagctatagagcggatccgcccccccagcaaacttagggatgtgcagtgcgtcactggttgcatggccgccctaagtcgtttcatatcaaggctgggagagaaggcgcttcccttgtttaagctcctcaagcgctcggggccgttcacttggacggaggaagctgaacatgcccttactcagttaaaggcatatctcagctctcccccggttctagtcgccccggagccaaatgagcccctgctaccgggaggagaggcccccgagccgaacggtggcctaaggcccctgacgaccggagtcggccctctccccgctcgtcagacggtgctgggcgcccccgaccctcaggaaggccccgaggccactgcggggaggccgcacctatcgccctctgaccccgaggctaaccctgtaccgattcgacccgggagagagcagggagaagaggcccccgagccgaacggtggcctaaggcccctgacgaccggagttggccctttgcccgcttgtccgatgacgccaggagcccccgacccccaggacggccccgaggccactgtgggaaggccgctcctgtcgtcctccgaccccgaggtcatcggcacagaagacgagtgcgccccgaggggccactcggacgaagaacgccccgaggggccactcggacgaagaacgccccgaggggccactcggacgaagaacgcccctgtctactttgttagtgaggccctccgggacgccaagacccgatacccacaggcccagaagatgctttacgctattctgatggcctcgaggaaactgcgccattatttccaggcgcatcggatcgctgtggttacgtcttaccccctcggtcaaatcttgcataatcgagagggtacaggacgagtggtaaaatgggcaatcgagctttctgagttcgatctgcactttgaaccacgccacgctatcaagagccaggccctcgccgattttgtggcagagtggaccccggctccagagactgtctcaatacccgaggccagcacgaacccctctcagctgcctcacaccgcccactgggtgatgcagttcgacggttctttgtctctccagggcgccggtgcaggggtcacgttgacctctccgaacggagacgtcctcagatacttggtccgtctcgactttcgagcgaccaataatatggcagagtacgagggactccttgccggactcagagtggcggccgggctggggatccgccgcctcctggtgttaggtgactctcagctggttgttaaccaagtctgtaaggagtaccggtgctctgatccgcagatggacgcctacgtgcgccaagtacggcgtatggagcgccattttgacgggatagagcttcggcatgtgcccagacgggataatatgattgccgatgaactctcaaggctcgcgtcctcgcgagcccagaccccaccgggcgcctttgaagaaaggcttactcagccgtcggcgcgacccgaccccttaggggagacggatgcgcctgaccggcccccgaggcccgtcggagtccaggcctcgggacccgaagggagcgctccaagctcctttagattgattgcttggatctctgagatccaaacatacctcgcagataagactctacctgaggaccgcgaagggagtgaacgcgtacaacgcatttccaaacgctacgtgttggtagaagggaccctctatcggcgcgcggctaacggaatcctcctgaagtgcattcctcaggaacaaggcgttgagcttcttgctgacatccatgagggcgagtgcggagcccattccgcctcgcgtaccctggttggcaaggcctttcgtcaaggattttattggccgacagctctcaatgacgcagtcgatctggtccggcgatgcagagcgtgtcagtttcacgccaagcaaatccatcagccggcccaggccctgcagatcataccactgtcatggccatttgctgtctgggggcttgatatcctgggaccgttcaaacgggccccgggcgggtttgagtatctgtatgttgcgatcgacaagttcactaagtggcccgaggcttatccggttgtcaagatcgataagcactctgctcttaaattcattaagggcatcacggcccgttttggagtgcctaaccgtattattacggataatggcacccaattcactagtgaactcttcggcgactactgcgaagacatgggcatcaagctctgcttcgcctcacctgcccaccccagaagcaatggccaagtggagcgcgccaatgcagaaatccttaaaggcctcaaaaccaagaccttcaacattctcaagaagcacggcgattcatggatcgaggagttgccagcggtgctctgggcgaaccgaaccacaccaagccgagcgaccggggaaacgcctttcttcctcgtctacggcgcagaagcggttctcccatctgagctcaccctgaggtctcctcgggccaccatgtactgcgaggctgatcaagatcagcttcgtagagatgacctcgactacttggaagaacgaaggcggcgcgcggccctccgagctgcgcgctaccagcagagcctgcggcgctaccatcagcgccacgtccgggcccgatcactctgcgtcgacgacctcgtcctacgccgcgtccaaacgcgtgctggattgagcaagctctcaccaatgtgggagggtccgtatcgagtgatcggtgtcccccggccgggctcggtacggctggccacgggcgacggcacggagctgccaaacccgtcactcgtgctcaaccttgccctcgggggctcggttcggtcagctaaaatcgccaagcggggcccagaaccgagccgtgccccggggcatggtgaactccgggggggaatcggcaaaaacccacaatcgggtcacccatacccctcggtcaccacgttcccggcctggccagtctcgacatgtggatctccccaggcactagccccgacccgagccatccaagggcacgaacccttatttcaagctaagacgcaaaaggaccacggcacagatcatcctcatctc

SEQ ID NO: 56016 - DNA, 1476 bp, Oryza sativa
  Clone ID: PAT_MRT4530_57969C.1
atggtgtccccagacttgatccgcaacatggtgggcatagtcggtaacatcatctcctttggcctcttcctctcgccggtgcccaccttctaccggatcatcaagaataaggacgtgcaggacttcaaggcggacccgtacctggccacgctgctcaactgcatgctctgggttttctatggtctccctatcgtccaccccaacagcattcttgtcgtcaccatcaacggcattggccttgtcatcgaggctgtctaccttaccatcttcttcctcttctccgacaagaagaacaaaaagaagatgggagtggtgctcgctacagaggctctcttcatggcggcggtggtgctcggcgtgcttttgggcgcgcacacccatcagagacgctccttgatcgtcggcatcctctgcgtcatctttggcaccatcatgtactcctcaccactcaccatcatgagtcaggttgtgaagactaagagcgtggagtacatgccattgctgttgtcggtggtgagcttcctcaatggcatctgctggatgtcatacgcgctcatccgcttcgacatcttcatcaccatacccaatggtcttggcgtgctctttactctcatgcaactcatcctcttgagctggtaagataagaatcaagataagaatcttgagctgccaaccgtcgcccctgtcgccaaggaaaccagcatcgtcacccctgtcagcaaggacgacgacatcaatggcagcactgccagccatgtcataatcaatatcacgaaggagccataagcatgtgaccaataaatcagcacgagcaaccatgtccataccgtctagttcagagcattgcgcaaaatctcgccgttgcagctcgccactgcctccgccgtgtcgccgcagccactgctgccgcttgccgccgcggccctgttgctgctgctgctgccgccgctcgtcgcggcgccgtcgcatgaacgtgttcggcaggtggcgaagcctagtgacgagtcgtgtcaccgaagcgcggtgaagctcggcgagcgacggcgaaccgaggaatcccaggagctcgcaccgcgtctcacccggcgcaccgtcggccacaagcgcgagcgccacatggaaggagcaagcgccccatggaaggacagcgccgctgacgaggaggttcaccgcgccatgctgttcccgccgctgtccctgctgccgcgcgccgtagcttgctctgccgccctcactgttgccgctagctccgccgctgctcgctgctgccactcgcgccgccgtccccgctgctcctgctgctccaccgccgtcgtcgagcaagaagaaaggagaaggggaggaaggaagaagaagaagagagaagggcaatttggtccaaaatttattggaaatgcatctaaggggtaagcagtggcatatcaggcccaacattagcaaaaccctaatccaactccccttttcagccttctccat

SEQ ID NO: 56017 - DNA, 283 bp, Oryza sativa
  Clone ID: PAT_MRT4530_5796C.1
tctacaggccctactccacgtccaagtcggggtagaaaccaaaggaaacccgaaacatgccttcccgagcaagaaaacttcgagacccaacgaaacacagtcggactcggacctgccggtcagatcagccacacaccgccggtctgaccggccctcaaccggtggtctgaccgcccaacacacggcagtcagaccggcccactcggaggaaaccggtagacttccaaatttagtctcccctctaaatccattaagaattttgacagagtctcccctgtaaata

SEQ ID NO: 56018 - DNA, 405 bp, Oryza sativa
  Clone ID: PAT_MRT4530_57970C.1
gtcatacgggcggtgttggatgctctgtgagttgccgatgtgagggtcgttagaatgcttgtgggaggacggagggagtgacactggtaggcatacaggtagctaagcgtggatgcaaacaaaaggacggaggcgtgaaggaagaaaccactgatgatgatacgcatcttgatatctatcaagatagcttcaaccttactcctgctgatagtgtgcttgcaacacctccagctgcggattacagacccttggttgctcttccacctgtgagctccaagaagccatcatcgacgacaaaacttggtggatatcctgctggacttgaaggacacctgaaatgtcacattctactctctccattagtaagctactcagaaatgatgctcggggatgggacatcaaatg

SEQ ID NO: 56019 - DNA, 1011 bp, Oryza sativa
  Clone ID: PAT_MRT4530_57971C.1
atggtcgccgccactcggacccgtcacagggacagaacacaagcgctgcacgtgttcggctttgtcgccgccgccggccaacccaatgctttgtcgctatccagcaaacttcggcagcacgacgggaggacagtggccagtggagtccacgacggagggccgtggacggcggcccccgcgccttggacgccggccaacgcgacgggagggcagtggccggcgacgccccaccgcacgccgcctgcacgcgacaggatgggcatcgcaagtggcgtgtgcaacgggaggacagtagccggtggcgcgcacgatgagatggcagtgaccggcggcgctctcgacaggatgggatgggccggcggcgagcgcgacgggaggccggtggccggcggcgctctcgacgggaggggatgggccggcggcgcgcctcgtgccagcgcgtggagaggatggggagaagagaagggattggattcgatcttatttgctaggattgccaggggcattttggaagaggtgctccacatcttcatcggaggagcaaaaaggacaacgagcggatgctgctggagcggcggttgcagctggcgggggccagagtggcagtggcaggcgctggagcaacgacggtggcatgcgagcgagggttggagcggcgacgagcgctggagcggcaacgactgcgtgagggcgagggcggcggtggcggtggcgtctggcggggaccgaagtggcaacggccggcgcgaggcgggcactggagtgtccaccaccccctcccactccgcctcgccacctccatcctccatctccgtctcctccgccatcgaattccacacgctctactaccacatcaagacaacgaagagggtcaggtggataaggcgcgaggtgcacaggcgtcatggcggaggcagggatgacccaggcaggaaggggaggggccatcacctccgtgttgcaaagatggagaggacgaggacgtccttcctcgagcaagctgcacagtag

SEQ ID NO: 56020 - DNA, 228 bp, Oryza sativa
  Clone ID: PAT_MRT4530_57972C.1
atggtggggctcatcggcggcgacctccccggtggccgtcgtgctacacggtatcagggccggattagtggggcgaaaaaaaaatccagcagctcagtcgtcgtcgattcgctcccggcgtcaatccgggccggacaagtcaacaagccccgttccacatctcccgagccagccacacccgtccgatctcgcgtcgcgattcgtgcaattccgaccggcaaaggccac

SEQ ID NO: 56021 - DNA, 666 bp, Oryza sativa
  Clone ID: PAT_MRT4530_57973C.1
atggccggcaaggcgaagacggagggcgtcggggcggaggagctggagtgtggagaagccggaaggaggcggctgccggggttggcaaccggcatcaagggaggaggaggcggcggccagggagctccgtggggcggcgctcgcgcggggccggtctggctgtgtgcggcaacggccaagatcggcggcaagggtggggagggaaggcgcagaggcagtgatggcgatggaaaaggcgaaggtcggagtggaccgagccggcagagcgcaaggagcaaggtggtggatgtgatggacggcggcagtagggcccggatgtcgaaatcgacacaggggaaggagtacaaggagggcgttggtgatttgggagcacggtgcaggagggaggccgtcaccaaccctgccggggaaagaaacaacattgcgacaaatggaaagggtttcgagacttccattagcttagcaccaaagcgcttagcgaaaaggaaggacgtcgatcgcaggacatcctttaggtggaacgacttaattgtggtattccgccgattcaagggaaggacacggtattgcaataatctaggaaggttgagaggacaaagaagggatattatcctgagaggtggttctggaaaaactaccaggttcgagtatttccagatactatag

SEQ ID NO: 56022 - DNA, 495 bp, Oryza sativa
  Clone ID: PAT_MRT4530_57974C.1
gtccgtcttgctcctcctcgccgagagcttgcacctcgtcgtctcctctcccccgcgcacatctaaccctagggttacggtgttagagcaggctcgcaccgctggcgatcaagaggaccaaggcggagaagaaggcggcgtacgacaagaagctctggccgcttctcgacgagtacaccaacgtgctgatcgacgacgtcgacaacgtcgggtccaaccacctgcacgagatccggaagggcctgatgagcgactccatcgcgctcatggtgaacaacaccctcatccgccggtgcatcaaggagcacgccgaccacaccgtctacagggagctcctcgagctcatgcccctgctggtgggaaacgttgggctcatcttcaccaagggtgacctcaaggaggtgcacggaggaggttgacgagcacaaggttgtagctcctgctcgtgttggtcttgctgctcctgacgatgtggcggttccccctgctgacact

SEQ ID NO: 56023 - DNA, 489 bp, Oryza sativa
  Clone ID: PAT_MRT4530_57975C.1
atggggaagagaagggatcgcgttgcgtcacgtggagaaatttccaccagccacccaaggccgcgtcctacggcccaagtgcgagtatgggccataggaaagtacaccgaaggtccctcaacttgtcatcgagttacaaaatcgtcctccaagcgcaaaaatagctggcgggaggaggagggcgtcggtggccggcggccggtgacgggcgtcgcggcgacggtgatggcggcgacggccgacgcgacggcggtgggtggagcggcgggcgggcggcaggaaggggcggcgcgcgggcgggcggttgggaggagcggcgcgcgggctccccccccggccgccgcccacgaggcccacgaggcagcggaacggcggcgacgactcggcatcgtcctcgttggaggtgagcgcggcggccccaccctcgtcgaccgcgagtcgcgcgcagccgccggggcgctgaagaggtaccccgccgcggcgtcgtag

SEQ ID NO: 56024 - DNA, 438 bp, Oryza sativa
  Clone ID: PAT_MRT4530_57976C.1
aaaggagatcactaatgactatgatgatacacaccacatgctggaaagtgaagaccatgatgcctcgtgatggacacccttcaccactcgtacctgtcattattggtaagattacacaagaattcttggactcactggcccaattcactataaagaagctaatctaaatggcaaatgatcaatgaactgttacctgtggcaatgcgccatacctaactggtaatgaaaatttttctaggcttgatcttcttttgttaatcttgccttgcctttttgactgatcccactcccattgcttgtctccagatcactcccccattggaacaaccgaaaccacacgggcaacttgggatgacgattacgacgatgtcggggagaagcaagccgcttcttgggttccatatcactgcctccttcactaacttggtgggctcgacc

SEQ ID NO: 56025 - DNA, 297 bp, Oryza sativa
  Clone ID: PAT_MRT4530_57977C.1
atggcgtcatctattagaatacgaaggagtattcattctgctctgcacaacgaagagctcagcctaccacttgaccatgggtggagcagcgcgacaggaccggggagctggaccaatgcaagttggctagtttgtgggggcatcgacggcaggatgatatgcgagtaccgcggcagacagaatgacagcagtggcgtcaggtccaggacggtgattgtgacgtcgtcgttggaaccattaaccatccccctgactgcaattgccgtcattgccaacctcaagtctttgctaacctga

SEQ ID NO: 56026 - DNA, 307 bp, Oryza sativa
  Clone ID: PAT_MRT4530_57978C.1
atgtggattcgccggggtggtgtcggggaggacccctgggcttcctggcacacttggaggtctcccgacgtggctgatccccacgggctgggtgatccggttgctgaagaagatgaagtggatcctgctgacgaggagttcttccaggagcaagttaatttggagcgtcacgggctagttccggtcgggactagttcggggcgtgacaccaagtctctgcgttatctattgggagctccggacaaatctatgtcggaggagatagagtgcgacagtagctcctgctttgctttgctagatcgaggag

SEQ ID NO: 56027 - DNA, 152 bp, Oryza sativa
  Clone ID: PAT_MRT4530_57979C.1
aaactcttcataaaaatattattaagacattggggctattgtctattgatcacactgtcattaaattatgcatcatatgtagttcaactccccatcaggaaaaattcaaggtgtttcatttcttgatattacttaatacatcatttacatat

SEQ ID NO: 56028 - DNA, 613 bp, Oryza sativa
  Clone ID: PAT_MRT4530_5797C.1
gccggggcgggaaacggtccggggggacgacggcggcggaccggagctcggcggcgactgcggagagagagagcgacgtcgcgtgctcgaatccggcgaggaggaaggcgggcgagaggcggaaacggacggaggaggtgcggggagggtttaaataaggttggaagggggagagggtggccggggaggaaggaaaccggcgcggcgttttcgggctccatcaatggcgccggcgggattaggggaggggttccaaacgaatccaagggagagagggagggaaaattggggggaaagggagagggaatcacggggagtatttccccccactttattgcacgcggggacggcgggatgtggcggatttggcggcggcggcggcgcttggcgcgggcggagcggcgggagcggcgggaggtcggggatgacgggtgggccccacccgtcagcgagggtggcgggcgggcccgcccgtcagcggcgcgcgcatggggagggaggccgactgggccgcgggggagaggagagagagagaggggggagagagatgggccgggccggcccaagggaggggagggggacttttagagtttttctttttataaaacttttt

SEQ ID NO: 56029 - DNA, 808 bp, Oryza sativa
  Clone ID: PAT_MRT4530_57980C.1
gcactcgcggcgagcttgtccgttgagaggcggcgaggttgcgcccgaccaccgcgcgatgtcaaccctgatcatagccaagatgagggccggtactaggggctcggccactcgagcttgactcccggggcgaggttgtgcctgaccgccggtgagctgcgacgctgtgacgagcttgatcccgactgcatgaggcgtagtgagtgcctcaaccagtctctcatggcgcgcatcggcgcatcaacgtcggggaggagtgagtgagaggagtgaagatggggaggtgtgtggtcataggagtgcgaaggtcaacgccgatgggggaaggacctgcggtcgccagatccggcgaccccacctctcgcaggcgatagatcggccggctcccgttcctcccaatgtgggatctgcgcgcctacgacgagcagctgctcatctcggtccgtgcctcatcgaagtgaggaggcacttgctctgattatgtgttgacgaggacggcgcaggcgcgcagcccggcgtccggcggtggctgcttccgtggcctcaagtgacgctgctgaagctgacgatctgggcatccggcatatcaagctgcagcggaaccggcggtgagcacaaatctgggagtcgcaatcgcatcccccagccagccgacatgcacgatttctgcagcttcaattcctcatccttcaccgcacatcttcctccaaatccctctctctctcttctctcctctctgccgagtaaaccgtcatcgagagaacattagttagctcttgagaaaatccagtttcatgtgcgtatttgt

SEQ ID NO: 56030 - DNA, 319 bp, Oryza sativa
  unsure (1)..(319): unsure at all n locations
  Clone ID: PAT_MRT4530_57981C.1
tccggatccgaatccaaaaccctccctcccanttgaatgaggttcttgggccaaatgaattttggaaattggctttctttggttctttggttnttcgntctttcgntctttcggtctttctttctttcttgaatcccatggtaacaattttgcccancccaattcggttctcccatttggttaccaggttacaaaagacagggttgaatggtgaaattactaattgcccgcccaaatttttttctttctttctttgtacctcgatccaattattactactagagttcatcttgcacaaaaaaaaaaaaaaaaaaaaaaa

SEQ ID NO: 56031 - DNA, 228 bp, Oryza sativa
  Clone ID: PAT_MRT4530_57982C.1
atggcccccggagctcgatccgccgctcgacccggctccacgaggaagtcgaggtccgcatcgaccgccgccgaggagctcaacgtgacggcagcccctcactctgttcttgtccgccgacaatgcccgacgccagatccggctggtggttggacgcatctcatcatctacttcgccgacctcgacctctcaacaatggcgatccgggaccggggagacagttggtga

SEQ ID NO: 56032 - DNA, 2508 bp, Oryza sativa
  Clone ID: PAT_MRT4530_57983C.1
cgggcccccccttgagtttttttttttttttttttcttttttttttttttttttttttttttttttttttttttttttttgttcaaattcaacagtccatattaatatgataaacttgatgattaagcacttcaaattcaaagtcaaagcaatctctttagcatataaaggtacaaaaacaaacaacacagctaagtctagaaaagagacaaaagagtcaccgagtgagttaagcccagcatggtgtaccaggaatgagatccgcctatacaaactaaatcccactcgcatggtaacaccctaaagagtaagaggcacactttgcacctactatatatgatgatagagcatcagctgcccccatctactgacaactctaggggtataaaccaccggacatcaaacctatacggcccctgccaacacaaggggcacgctaagttccatttatttggacaacagtaagagctggtgcatcatggtgaaggatacagcaccagccggtatgactgacagtacatatctgctatcatcatcagccccttcagtaggaaccacggtgagggtaagaattaccctgcccaccccttgctcccatgcttccataccctctgccaccgtagtatgacccacgggcgcgaccgccgccacggtaaccacgccccccaccacgatagggctggcgatgccttgggaaatcaccaaaagtctctgtatctagtttgcgctgttcggaaaatcttgacctcccgttttgccctccacgtccaaatgttccactagtgagggaatcaaaaaagtcatccttgacataaacaggcttagcagctagctcaggattttctgtttcctcatcctccaggtcttcatcaaacacatcatcgcccagctcaccatctttgtcccttgaatgggatttcttaccaagatgaccccagacttcatctttgttaaacttctcattcatggccatgaaatcaaattcttcagtaaaatttgttactgactgcgaaaacgcgctgcctctacctcttccacggcccctgtagtggtgattgctgtgtgaaccagctccattgtacttttgaggtgtttgtttcggcaatggcaatataggctcattattttcaggaagagcacgtgacggtggatcaggtagcaatggttctacaaccctagtttttgattcaactgccttgaaatctttgctgctcatctgtaaaggtgtctgcatggactgagatgatgaaagcatcgatggagcattctgcagtagttgacctgatgatgccaacaaaggtacgggcatatccatatgggctgagctagatgaagcaacagtcgaagaaactgcctgtgacactgattggtatgccaatgttgaacctggaatatccgcagtcttattgctcacaagcgaactaaaattatgtggggccattgcactactttcagcaatggatgttggcaggctagctaaaggaagggtggcgcccacagatggaactggaggagtaaacaaaggacccatgttcggcagaaggggctttgaagtttctggagatagtaagttagcagaagaaggtgctgttgtagtgggcaggatacctgaggaagggccttgggtagtaccaggtggttgcagcaaggggggctgcagttctgacagtttttgtggccctgacgatagagtgggattcaatcctgcatattggagaccctggggaactgataatcctggctggagcaaaggaggttgctgcaaatgaggtggaagcccaccaggtggataatatccctgccaatacattgggggaactgaaaggcctgatgcatttccagcagaaggtggagcagaggatccccatggaacactcccaggttgatatagaggaatattgctctgaaaacttggcctctgaagcccatattgagctgcctgggagctgaggtctggcaatactgcacttccagcagaaggcaaacttgaagaagccgatgctggctgagagtagtgcgactgtattatggcaggatcattgtgcggggcagctggttgtggtggtggcggtggaggtggtgatgacttaacttgcaaatccttgatatcacttccccggaaaagtatgtactcataaactttggtgctagcaggaatttgcactccatctttcttgcgcccttcggttccaaatgatcgaacattgcgcaagccgatgctggactcctcggtgttgatgttgtagaggatgccctcgtacctgatctcgctcttggatgtcaaactgatgaggctcccgatgtacgagtccggcgaggccgccgccccgccgccgctggagccggccgcggcggggggccccgcggaggaggaggtcgacgacgacggtggggcttccgccgccatggccgccgcgggcgcgggtgtgggcgagggccgggagctagggttagggatgcgatgcgatgcgaaagagggagaaacgaaaccctaagcggctgatccgt

SEQ ID NO: 56033 - DNA, 284 bp, Oryza sativa
  Clone ID: PAT_MRT4530_57984C.1
cccacgcgtccgctattattcaactgataggcgagactgcagtactgtatatatctcaacctgcaccatggactaaagtggagcgtaatatgtagatgcatctttcttaaggacatacatgagacagtgtgactatgatatggtctgagccattatggatttgagagtgagaacttgtgacttgattggggattactgccatatggttgcatttataggccattcttcatttcataatatatttaagagtttcttgtctcagtcacaaacttatttttctaggt

SEQ ID NO: 56034 - DNA, 333 bp, Oryza sativa
  Clone ID: PAT_MRT4530_57985C.1
atgatgcggcggaggaggaagggagaggagacagcgaccggcgtgggccccgcggtgggtggagggcctgtctcgctggcgcgtggggtcccccgcgacaccgggcggggaggcgaggaggcgaggggaaggcgagcacgcgacgcgggcgaaggcgaggactcggcgtacgtgtggcgtgtcgtggcgagacgaggcgcgaagcgtgtggatccgagaggggggatcgttccacgccacggcaccgcgacggacgcggcttacccaggtccccccaccgacgagggatactacgactgcaactttaggagttacagtgcagccgatggataa

SEQ ID NO: 56035 - DNA, 429 bp, Oryza sativa
  Clone ID: PAT_MRT4530_57986C.1
atggctcagcgtccctgtgtggacgtccggcgcagccacaagtggctggacaatgccggcactaccgacggccaacggcagagggcttcttcttcagtgtcggcttgggctcccagtggatgcatcggtcggctgaacttgtcagaccaccaccatcgcacgccgactaaatcatttgcgctcgtgccaggggccgacaactgcaacacgactactcccccttcttcccggccgacgcgatatgcggcggagtggggggataggccacggcactcgcagcgaaccggagccggagaggcgggtggggacgaggcggagattggtggcgacgctggcgacaaggaccacgccgggtcgtgcctatgcggcttgggggcgacaatgacccaggcgactccagatcggtggcggcgcgatggtgacggttag

SEQ ID NO: 56036 - DNA, 642 bp, Oryza sativa
  Clone ID: PAT_MRT4530_57987C.1
atgaaatcagcacagcaggctcaaccaaagaaacaattatcagcaatgatccaacaaccatacattgtttacaggggaggggagaggggaacacaccacagtggcggagaagagccactggacgagagccgcggtgaagaagtgagagccggcctgacgccttggtccttggagctccgggcgacgatgacagacgacggcgttggcgttggcggagtcggcggcgggcgacgagggtggcgaccaacgaggggacggccgtggcggggcgggccgtgtagatccaggcgctggagggcgacggcggcggcgctggctggcggacggcggtggatccggaggcggcgactgcagcagatagggggaagagggggagtgaggattcagcctatgctgtgggttctcggtacggagtgtgttgtcatgcacgtcaataaatggacaaagaatgatagctacctcaagaaactggcagatgccatgaatggtgtgctgccaatgcctggcatgaatctggccgggactgacgtgccaactccaggagttaccacgccggctccggctagggacgagtgcctggagactctcatcattccgatgggacggggcgagacgagtgtcaggccgcctgttgccacctaa

SEQ ID NO: 56037 - DNA, 246 bp, Oryza sativa
  Clone ID: PAT_MRT4530_57988C.1
ccgggtcatctcttattactattggaggttgccgtctcctagacggcttgtggaggtgttgcccggtgacctctccgaggagattgtgcaggaggcccggcgccggttgtgagtggtttggagttcaccaccttcgaagtgaaggaagaactacccctagtgattgaggtttgggtagtcctctccgtggatcggctcccaccttgcccaccccttgacgaagggggtgtgcggtggcttcgtggt

SEQ ID NO: 56038 - DNA, 1287 bp, Oryza sativa
  Clone ID: PAT_MRT4530_57989C.1
ccggccgggacccatcccctccgcgcatcccggccctaaccgccgcacccatcactcccctcaccatcgctggctgtctccctttccaccttgccggccgccgattcccctaaccgtcaccatcgcgccgccaccgatctggagtcgcctgggtcgtcgtcgcccccaagccgcataggcacgacccggcgtggtccttgtcgccagcgtcgccaccaatctccgcctcgtcccctgcctcgccggtcttctccgagaacccacgacctcgcgtccgctgtctcctctgtcgctagatcgctatcctcttacgtaccacccgcctctccggctccggttcgctgcgagtgccgtggcctatccccccactccgccgcttatcgcgtcggccgggaagaagggggagtagtcgtgttgcagttgtcggcccctggcacgagcgcaaatgatttagtcggcgtgcgatggtggtggtctgacaagttcagccgaccgatgcatccactgggagcccaagccgacactgaagaagaagccctctgccgttggccgtcggtagtgcctgcattgtccagccacttgtggctgcgccggacgtccacacagggacgctgagccatccatacaggagcagacgtggacgcactgacggtggcagtttgacaggctcagcctatttgacgcatggggctctcatctctatggtgtagtgcgcatgaagggttgtagctgctggactataccatgatgataatctgaagggaaaagaaagagccaagggatgttacgtgtttgaattagagggaacactcattggctttatcatttaaaagcattttgcaaggcatgttcttctcaattgataaaagtgagcagtgcaaatattttggttgagtccctcgcgccgccaaggatcctgtgccatctgctccattgcaccgccaccggaaccctctccaccgtgctgcgaacaaggaaatcattgcttgattccgttccttcaaccattacagttcaaatgcaaaattatgaaattagtggatgtgattgtgaatgatagtgtcacgtctcttatgtatgtgcatcccaatatcaatggctattatgcatctcttcgaaagttactgaaatagagagaaattataaaataaaaatgaatatatacttgctgtttaattttcctccctcgcactatagcatacactactcagaaaattgaaaattaaaatgaatgccaagttattgtttcacactgattttagactcaatctatatgtttctctaact

SEQ ID NO: 56039 - DNA, 5612 bp, Oryza sativa
  Clone ID: PAT_MRT4530_5798C.1
ctacttgttggacgttgtcggtgtggtacgcacgacccatagtactgatggaagttcctcgacccacttcttgtcatgtgacatgagcctgtcgtagacgcgggtcttgattccttgtagtactatgccgtttgccctctcgacttgtccattgctctgagggtgagaaaccgaggcgaagcagatcttgactcccagcctaatgcagtaatcctggaaatcggcactgatgaactgggagccgttgtccgttatgatacggtgcggcaatccgaatctgcagaatatccctttgatgaatttgatggcattgtcggccttgatttcccccgtgggtgtcgcttcaatccgcttagtgaatttgtcgatcgccacgaataggaacctgtagccgccctgtcctcgtgggaatggcccgagtatatctagcccccagcacgagaacggccaagtgagagggatagtctggagtgcttgcggtgatagccttgtgtgtttactgtggaattgataggcttcacaccgctgaaccatgtcccaggcgtctttgagggcggatggccagaagaacccttgtcgaaaagcttttccgactaatgtccgatcggctgcatgtgacccacagatcccttcatatatgtggaggaggagatgtctgccgtcgtcggagaagacgcattttaggagtaccccgtttggtgccttcttgtatagatcgttgccgatcatacagtagacttttgctttacgggatattttcttggcttctgcgtcgtcctcgggcaactcttcactgccttcgccgcttgcctctttcactgatggccttgtcaggatgtccaaaaaggtgtcaggttcaagtggctctcgtctggacgcacgttgtgctagatcatccggttcgatgttgtctttacggtatacatgtcggacctcgatcccatcgaaccttttttctagcttcctgacttccgcgagatacttggataactcggggctagagcacttgtaatctttatgcacctggttcgcgactagttcggaatcccctttcacaattagtcgcctaactccgagtgcagctgtagctcttatcccggcgagtagtccttcgtactcggctgtgttattggtcgccctgaagttgaggtgaattgcatgcttgaattgatctctcgaaggtgatgtcaagatgaatcctgcccctgctccttggctattgagtgcgccgtcgaacgccattgtccacgtttcgttgtggatttggttatctgacagctgggacttgatggctgttcgtggcacaaagcggacatcaaactggcttagctcgactacccattttgcaatgcggccgacaacgtctttgtttctcactacttcaccaagagggaaggaggatacgaccgtgaccctgtgggcttggaagtagtggcgtagctttcttgatgtcatgattaccgcgtagagcagtttttggatctgtggatatcttgtctttgcgtcgtggagagcttcgctgacgtagtagactggtcgttgcaccttctctctctcgacaacaatgacagtgctaacggaatatggcgtggcggtaatatagagaaataattctgcattaggttggggggcaacaagtacaggtggatttgataggtagcgcttgagtgcaatgaatgcctcttcggcttcctgtgtccatacaaatttgtcttgctttttcagcagagcgaagaaaggttgtcctcggtctcccatcctagcgacgaacctgcttagtgccgccatgcatccgattagcttctgtacttccttgagtcttgtaggcgacttcatgttctcgattgccttgatcttcccgggatttgcttctattcctctgccagagacgaggaagccgagtagcttgcccgatggtactccgaacgtgcacttctctggattgagcatgaggcgatattgtcggaggttgtcgaacgtttcccgcagatcgtcaatcaatgagtcgcttgtcttggtcttgacaacaatgtcatcgacgtaggcttcgacattgttttcgagctggtcgctaagtgcaccttggaccgtgcgctggaaagtgtttcctgcggttattagtccgaacggcatcttaacgtagcagaataccccgaacggcgtgatgaatgctgtcttctcgtcgtcctctttcgccatgaaaccggctgttgagtccaccagttggtctatttgaggaagagggaagtgatccttgggacacgccttgttgaggtcgatgaaatcgacacacattatccatttcccattggccttccacaccatgactgggttggctagccactctggatggagtacctctctgataaaaccggctttgagaagtttgtcaagttcttcttgtatggcttgttttcgatctggtgcaaatctccgcagtttttgctttactggcttggcatcgggtcgcaccatgagtttgtgctcaatcacctccctgggtacccccggcatgtcggacggtttcttgggtggctcagctgtggcgggtgggctgggcgtgtgctcgaccatgtcaaggctccgcttgtcgcattgtattgccagcttagtattccctagaatagtgattgttcccttcggtcctggcatcttgagcacttgatacgtgtagtgagatgcggccatgaacttcgcaagtgcaattctcccaatgatggcattgtatgctgtatcgaattcagcgacatcaaaggtgatctgttccgttcggaagttatttgcttggccgaaagtcacaggcaacgtaattttgcccaatggtttggacgatgactgaggagtgattccatggaagggttgatcggtgggtgtcaacttgcttcgtgggatccccatcgcgtccaaggcactggcgaagagaaggttgattgagctgccgccgtcgatcagaactcgtgcgaccttgatattccgaatagtgggttctaccacgatcagatatcgccctgggatgatagcagtcttggggtggtcctcttctgagaatactatcttctgttcggaccacttcatcttgggcgcagcctcctccgaagatgtgcgaaacatggagatcggagtctggatatgctgatcggagtctggatatgctgagtctgattcctgagtaaccgcctcagcgtccttctcgaccacacgtactcgcttgcctttttccaatgccatgtgttttgcgagcgactttttgaagacgaggcaatcttctagagagtgtctatctgacttgtgtatagggcaccatattttcttcgcgtcgctgccttgtgggtctgggcgcttgggagggtccacgtattctgttgcgagaacttccgcttgagccttccttttcccactcttgcgatttttcttcttacttgactcaggtgcgtccttggctggtttcttctctcctctggtcttcggtttgtcgttcttgcgtctcagtgcgtcgtcagcatgagcgcatcgatcgacaatttcgaataatctccaagtagtcgtgacgtgcctcattgccaactcctgagtagtatagcaatctctgacaccggacttgaaagcgcgaattacagaagcgtcggtgatttcggggattgtatttctgcactcattaaagtgtcgaacataatccctcaaggattcacccgggttcgtggagtaaacctgaaggaattcttctgggtcggtgctcccatcgtatttctctattgctcgaggtcggaatctttcaggccatcggacatctcgaagtgaacgaccgaaagctctacacccggcgctgggggcggtgggttgtcggcgatcatacgtccttcgtggatgtctatctgatgatgaggatgaggaagatgacgacgatgacgatgggtcgctcggttccggcgtgcggttacgaggacgtcggccgggttctagagacccttgttgtcgtcgcccgttgttgtctcggcgccgatctccatcatcgtcgtcattatggcgacgtcctcgaccagtatcgcccagcaccctccgttcgcgatcgtcgtgatcgcggcggttgtgacggttatcatggcctcggtcttcgctcgaacggcctcctcgatcttcgttatcgtgacgccgtgaagagacgcgatgtcgagaatggttctcgttgtctcgtgtgcgtcgcacctctcggcggccattcaggtgatcgcggagatcaccggtgccgcgaggtggaggggtggctcgatgaggcgattcccggtgttcaggattttcaccattagcatcgccagttggtggctgttccgggtgtgctgcagcagcggcctcttcgaacgcgttgctgaggttggtcactgactcccgtaaccgttctgtccatcgtgcgagatcgttgttcagaacggggtcgtagggagtttccctcaatatttcgttgacggctctgatatgctgggccggtgtagtcacttgattctccgcttccgaattggtgcgtgctgacgtgccgacatcgtcaatagccaatacctcacgcggcatactcgttgtcgatgaaccatagtcttcgagcaggtgcaagactgatggttcgtggggatcgatgtcgattaccccaacaaatcgatctgaaatcggcgtcgctccttgttccttgtcctcatccctgagggggatgcgtgactgctggaccttaggaggtggcatcttcatggcgctgagaaagaccttgcagctcgagaggtcgtgattctttgtcttgtgaataggacaatagacatcacgagttggagaggtacgctgaattccacactctttgcatgcacgaatttcagcatagacgttgagaaaaacccagcaggcttgcaaggtgtgttttctggttttgtggataggacaccaggaccttgtcacctcggaagtaatcctcgtcggctcgtgattcctgtcggaaagacaaggcttggccgcactaggatccttctcgggctcggatgtcgtcgacgttccgatctctgcttcggcgggaggatccttcgacatggagtcgtcccgggttgtagccactgcgttctcattttcggccattggcggaccagctgagatcagcactgtggtgtaaaccggaaagacgatttcaccgacttgagtccacaccagtgttgttgaagtaggaactccttggttgaggttggtgttgacgctgttgtcgacgaagctagatgtcatagtagtagaaccttgagcaccaagtccccctacctggcgcgccactgtcgacgggggatacccgtagaccggatatagagggtattggggtacgctggtacgaggatctacgtaatacgacatcaagcaaacaaaagacagggattatactggttcaggctccttggtaggtaatagccctaatccagttggtctgggattatatgatggaaataacagattacaaagggaataacagaactcgataataccgacgagatcgtagtcgagttggctgtggtagatgtgttggcggtgagattcgatgccttaggtcctcccgggggggtctcttttatatcgcgggtcagttgatctccaag

SEQ ID NO: 56040 - DNA, 1816 bp, Oryza sativa
  Clone ID: PAT_MRT4530_57990C.1
cgggcggcggcacaacaactaccacccccactccgctccttccttccttcccgcatttggatttacccccaaatcttctccaagtccaatcgacctcatttcattcgattcatcgatcgctcggcgcggcttagggtttttggcggcagcgatggcgtcggagaagcacttcaagtacgtcatcctcggcggcggcgtcgcagcgggatatgcggcacgggagttcgccaagcagggtgttaagccaggggagctcgccatcatctccaaggaggccgtggctccttatgagcgccctgctctcagcaagggatacctctttcctcagaatgctgcaagactcccaggatttcatgtgtgtgtcggcagtggaggagagaggcttttgcccgaatggtactcagagaaaggcattgagttgatcctgagcactgaaattgtcaaagctgatcttgcctccaagactttgactagtgcagttggagcaacctttacatatgagattttgatcattgcaactggctcctcagtcatcaagctatcagattttggtactcaaggagctgattccaacaacattttatatctaagggaagtagatgatgctgacaagctggttgcagctatccaagcaaagaagggtggaaaggcagttattgtaggaggaggttacattggtctagaacttagtgctgcattgaagatcaatgattttgatgtcacgatggtgtttcctgaaccttggtgcatgcctcgtctcttcactgctgatatcgcggctttctatgagagttactacactaacaaaggagttaagatcgtgaagggtacacattggtctagaactgatgctgatgctgaagatcatgtcacatgatgtcacgatggtgattcctgtaccttggtgcatgcctcgtctcttcatggttgtgggggcggctttctatgagagttactacacgaacaagggagttaagatcgtgaagggaacagtagcggttggtttttatgctgatgtgaatctggagtttacgctgtcggtgatgaagaatggcactgtgatgaagactgatattgttgttaggagtgtgggacacattccccatgctaggaagtctgcagagcaggctgtaaaggcaatcaagggaaaagagtccggcgagtccgttgtggagtatgactatctgccatacttctactcccggtcattcgacctgggatggcaattctacggcgacaacgttggcgacaccatcctgttcggagacagtgacccgacctctgccaagcccaagttcgggtcctactggatcaaggacggcaaggtgttgggtgccttcctggagggtgggtcacctgatgagaacaaggccattgccaaggtcgcgaaaactcagccgcccgttgccaacatagaggagctcaagaaggaaggcctccagttcgccagcaaaatatgagatttttgtagttttgatgtacatttccacatggtactccccctattggttttctgattgtgatgcgtctgtactctgtactcctcttaaatatgggcacttgctatagctgctgagatttgaataaagaagttttctactacaaaaaatgagattattgtagttttgatgtacatttccacatggtactccccctattggttttctgattgtgatgcgtctgtactctgtactcctttaaatatgggcacttgctatagctgctgagatttgaataaagaagttttctactacaaaaaaaaaaaaaaaaaaaaaaaaaactcgagactagccccctccccctcgcccccagcccg

SEQ ID NO: 56041 - DNA, 1653 bp, Oryza sativa
  Clone ID: PAT_MRT4530_57991C.1
caaatcttctccaagtccaatcgacctcatttcattcgattcatcgatcgctcggcgcggcttagggtttttggcggcagcgatggcgtcggagaagcacttcaagtacgtcatcctcggcggcggcgtcgcagcggtctgtgccctctctcttttttcgcttgcgcctcccaaatttgcaaatcaccttccttccgtccttctcgccctgccgccctgggaggggagtaggctgcgggagttcactgcaagatcgatgtgggattcattcgcttggatccttttatttgatcttggtctgttccggatatggcgtcggagaagcacttcaagtacgtcatcctcggcggcggcgtcgcagcgggatatgcggcacgggagttcgccaagcagggtgttaagccaggggagctcgccatcatctccaaggaggccgtacttttacttactggaaccatacctgttcttgttgtggctccttatgagcgccctgctctcagcaagggatacctctttcctcagaatgctgcaagactcccaggatttcatgtgtgtgtcggcagtggaggagagaggcttttgcccgaatggtactcagagaaaggcattgagttgatcctgagcactgaaattgtcaaagctgatcttgcctccaagactttgactagtgcagttggagcaacctttacatatgagattttgatcattgcaactggctcctcagtcatcaagctatcagattttggtactcaaggagctgattccaacaacattttatatctaagggaagtagatgatgctgacaagctggttgcagctatccaagcaaagaagggtggaaaggcagttattgtaggaggaggttacattggtctagaacttagtgctgcattgaagatcaatgattttgatgtcacgatggtgtttcctgaaccttggtgcatgcctcgtctcttcactgctgatatcgcggctttctatgagagttactacactaacaaaggagttaagatcgtgaagggtacagtagctgttggttttgatgctgatgctaatggtgatgtcacagcagttaacctgaagaatggcagtgtgcttgaagctgatattgttgttgttggtgttgggggcagaccgctgactactctctttaaaggtcaagttgctgaggagaaaggtggaattaagaccgatgctttctttgaaacaagtgttcctggagtctatgctgtcggtgatgtggccaccttccccatgaagatgtacaatgagttgaggagagtggaacatgttgaccatgctaggaagtctgcagagcaggctgtaaaggcaatcaagggaaaagagtccggcgagtccgttgtggagtatgactatctgccatacttctactcccggtcattcgacctgggatggcaattctacggcgacaacgttggcgacaccatcctgttcggagacagtgacccgacctctgccaagcccaagttcgggtcctactggatcaaggacggcaaggtgttgggtgccttcctggagggtgggtcacctgatgagaacaaggccattgccaaggtcgcgaaaactcagccgcccgttgccaacatagaggagctcaagaaggaaggcctccagttcgccagcaaaatatga

SEQ ID NO: 56042 - DNA, 510 bp, Oryza sativa
  Clone ID: PAT_MRT4530_57992C.1
cccttaggtccgaaggatgggcaaccccgtgtgaattgtcaaccaccaaatgtgtgggtcttcagccttgtggttggaaaaaaaagcacagtgggcgcggaaagctttacccggtgtgctctggggattgtatggacctggaaaccgcacgttaaagtcaagaaatgccaaacgcttgacgcaaaacccagggcgccatatggccgcccacaacacgccaccgccaccagaccacaacgtttaggggcagcaaagcacacacaacaaggggcaacagtgcgcacacacaggccacaacgccgggcaccaggcaagacgcagcacagcgcacagcccagcactgcagaagctgcccacatgtgccgcaacaggcagccaggcctggaatgccacagtggcagcgacttaatacgcgcggggcattgtaagtggcagagtgccattctgccacgatccactggagatccagccccgcttcgcacggattcgtaaaaaaaaaaaaaaaaaaaa

SEQ ID NO: 56043 - DNA, 145 bp, Oryza sativa
  Clone ID: PAT_MRT4530_57993C.1
atgccgtccttcgcggctgccgggtcgatccgatgcttcccgggtcctcctcgatcgctcgctgatatcgcatgcatgcacgcacgcagcctctgcgacgccgtcccatcgctgatgatccgggccagccggccggccggccggc

SEQ ID NO: 56044 - DNA, 492 bp, Oryza sativa
  Clone ID: PAT_MRT4530_57994C.1
atagtaaagcccggtgcccgctgccggaccgattccagtttcgacccacacgcccgctttcgattaaaaagaacaggagaattatccccacttccagagtccaaaccatacccgtacatggcggacggccagcttgatccggccggcacgcgcggcgctagtactcctcctgatagcgctgttcttgtgcctcaccctcgcagtccactgggcgggctttgacatccgacgaccttgactaagcccacgccgacccggacttggtagacgacgaagaccaccaggggttggacgttgagctaacgccgacgacgcgcatatcgatcttcatttcaaatagttgcccaaccggaatggccaaaagcaacaccacctgcggtgcaaactaatagcccgatcctgaacccggcgctgaccccgccgaaccccaccccgacgctcgatctctgggacgaggacgagttctagggcattcctgtcccggaagcgggc

SEQ ID NO: 56045 - DNA, 429 bp, Oryza sativa
  Clone ID: PAT_MRT4530_57995C.1
atgatgatcgtgctgccatcatatttctccgtgaggttggggggaaacttcgggggccaacggacttttgaagactcgcttgaaaggccctgcaactggcgccctccccatgcgggccgcccagtgctcgtccctgtgttgctcaatgttgattcgagcgtccctcctcgtagaggccaccatgacgtccccggcttcccgagatcctcgatgacgttggggccgtcgaccacctcgaagtcagggccgaccgacgggccctccttcttgctgacgaggaaagagcggtgggttacgcgaggtaccagaggcggcgggtcggccacccgcagcctgctaccgctgggcagtggtgaccaggttggtcatgttgtccaaccatcgctggacaggggtctccggctccgaatttatggggggatgccgtag

SEQ ID NO: 56046 - DNA, 1367 bp, Oryza sativa
  Clone ID: PAT_MRT4530_57996C.1
atggtcgaggtcctagaggaagaagtggtggcgcacacccctactccctccgggagtgacgatgctagcgggagccgcggcccccaccaccgtcgcaacaactctcccactcctgcccaccgcgacccccccacagagggaggaacctctccccgccgccgcgcggggagaaaccgcgcagtgtcggggcacggggccgcctgacatacggcaacggcggctcatcccgaggcgcactttaggcggcgggagcccttctacggcatccccccataaattcggagccggagacccctgtccagcgatggttggacaacatgaccaacctggtcaccactgcccagcggtagcaggctgcgggtggccgacccgccgcctctggtacctcgcgtaacccaccgctctttcctcgtcagcaagaaggagggcccgtcggtcggccctgacttcgaggtggtcgacggccccaacgtcatcgaggatctcgggaagccggggacgtcatggtggcctctacgaggagggacgctcgaatcaacattgagcaacacagggacgagcactgggcggcccgcatggggagggcgcctcctcatccggagtgccccgcttcttcacgcgaggcggcccgcccctcacatttaccccttggagggaccagttgcagggcctttcaagcgagtcttcaaaagtccgttggcccccgaagtttccccccaacctcacggagaaatatgatggcagcacgatcatcatgatgcggggggcgacgactaggtcatggcgaatacttccccatggctcttaaaggtcaggtgcgcggctggcttatgactcagccccccgactccatccactcctgggaggacctgtgccagcagttcattacgaactttcaaggcacgtatccccgcccaggagaggaggcagacctgcacgctatacaacggaaggacgacgagtccctccgctcatacatacagcgcttctgccaggtccgcaacactattccctgcataccggcccacgcgggcgtttatgtgttctagaacggcgtgcgacacaactgcatgctagagaagattgcctccaaggagcccaagaccatcgccgagcacttcgagctggcggacaaggtggctcgaaaggaggaagcgtgggcctggaactctcccggcaccggcgcggcggctgcagctgcccccgagcccgttttcccccccccccaagggggaagaggaagccggcccactctgatgacgagggccacgttctttgcggccgatgggccttttgggccccgtgcaaagaaagagccacccgcaacaagccgagctcaaccttaccgaatggagctgggcaggaaa

SEQ ID NO: 56047 - DNA, 451 bp, Oryza sativa
  Clone ID: PAT_MRT4530_57997C.1
ggctttgttttgttttgctctcggctttatatatggcatgggtactgatgatataatggggaggaacattaactgacttctgataacttcattgaaacatgtttaactcatacatttattccgcctagctgaataaaggctccatgtcataatgaaagttgacggcaaccatgcatgcagttatgtagacaagtaattcgtcctgtgaaattttaatcaagtattcatttgcttggatgaatattgttgaggaatattgctatatattccacatatttgatttactccagctgcttgctggctatttcttagagaaggggattattttacctccactgtacatacaactgaatatatgctacattgttaacttagcccttaaataatataatctgaacatgggggatatggagatctagacttgaggacctaacatactacttaggacact

SEQ ID NO: 56048 - DNA, 711 bp, Oryza sativa
  Clone ID: PAT_MRT4530_57998C.1
atgaggcggcggcgacggcgaccggcgagcgcgcttctcagcgtcatcctctccaagtttctaccgcgtggcgccgcggcggccaagaaggttggcgggaagcggcagcagcagcagcagccggctgcggcggcggccatcggcgaggacgacatggaagacgaggaggaggaggaggaggagaagcagctgagccccgtctccgtgctggagcagagcccgttccagccgccagcgtcgcctgcctactcgaaaaaggccatagtcatcttcagggagctcctggcggcggcctacacgccggcattacccgaccaccccgtcaacaaccacacagcaagctcgccgtcgacgagctcctcctcctcctcctcctcctccgccgccgcctcacgctactgggaggaggaggagaagctcgaggcggagatcgccaaggtgcacggcctcatcgccgccgagatggcggccgggtggagcgtgtgccccgtcggcgacgcgcggcggcgcgtcggcgccgagctcgccgccgccgtgctggagtccctgacggaggaggccgcggcggcgctgatgctgacgtggagcaacggacggccgcgatgcgatgatgacgacgacgacgacgccatcgacgacgatgcgagcgccgggtggtgcttggagagcagcggcgtcggtgacgggagcgaggaaaacagaggaggctag

SEQ ID NO: 56049 - DNA, 462 bp, Oryza sativa
  Clone ID: PAT_MRT4530_57999C.1
gggggcggaaataggggcccatttaaacaaaaaatcctaattaaccatccacccccaggggcccctcccaggaaaaagaaaaaaaataaactttttggggccccaaccataaccaatactccaaaaaatttgaaaacgcaggctgttaaagccataaacggaacagtcatttaaacagttcccaagtccaaaacacacgatttaaaaagttcattttattatgaaaattaatccggccaccaacacccttaaagcggccctgaaggaggacggcgcgggggcttccccgtccccgaaacctaaaacgggggcggcggcggcggcgggggcggaaccctccaactccagcacctttatggcctaaaaaaccttgtcccggaaagtatctggaaactctacgaggttaaaaacttaagttttggccagctaaagcagaatcccagccaccttaaaagctttttc

SEQ ID NO: 56050 - DNA, 540 bp, Oryza sativa
  unsure (1)..(540): unsure at all n locations
  Clone ID: PAT_MRT4530_5799C.1
tggttgcggattcggcacgagctcgtgccgaattcggcacgagcaagaaagcataagcaacacaagggattaactcatcactcacttagctaattaaatcttcgaccatgtcggacaagtgcggcaactgcgactgtgctgacaaaaaccagtgcgtgaagaaaggtnccagctatggcgtcntcntanttgaagccgagaagaccacttcnaggangtcgccnccggcganganaacggggggtgcaaattgcggcaccanctgctcctgcaccgactgcaagtgcggcaagtgaaatcncnaagcaaccgaacactcnccgccggngagtccctaccttaattaagtccccnataaaaacaccntatgantgtggtttgtgtgtgtgctgattattgccgaattnaacccctgtgttatcgattaattaancacctggncgcttccgcgactatgcctgtttcaacgtatgaatttgtgtgatgtgacgtacccggctantctcatgaaattanccancctgttttcntgtggtttgc

SEQ ID NO: 56051 - DNA, 228 bp, Oryza sativa
  Clone ID: PAT_MRT4530_579C.1
atggaccgccgtgttgccatggaggatggatgcagaggcgccttcgggggacggggatggggagggctggaggagcaacttagcgcaaatggttatgcaatgcaaaaatttagttttgcccttctacttgctcaatgcacacaggcggagaggaggcactacggcataggaactctagtacctcacggaatagaaaaaagagcctccacgttcgctctcacggcctag

SEQ ID NO: 56052 - DNA, 280 bp, Oryza sativa
  unsure (1)..(280): unsure at all n locations
  Clone ID: PAT_MRT4530_57C.1
cgccgtgacagtggctggcggcggnntgnccttcaaaatgaggttacataactgtttatatgtgagcagctccgaaatgtgaactgggaccatcctaatgcttctacatttaacagtgctagagaaatctgctgatctgtgtgcaaacggcggaaacaaaaaccaacatatgtatatttttcagcctggcgtgagagagtttcagtgcatatgatgcaactttggctgctattcaacgtgtcacttctttggcatgatgcataatcagctccaggaactg

SEQ ID NO: 56053 - DNA, 957 bp, Oryza sativa
  Clone ID: PAT_MRT4530_58000C.1
atggcgaccctcctctcgccgtcgccggcgtcgggaagcagcagcagcagtgatggcggcggcgcccgccgcctttcagagctgctggaggagcagcaggagcccttttccctccacctctttctcctcgacaagggctgctcccccgccctcctcgacgccgcctgctggccggccgccgcgcgggcgatgaggcggcggcgacggcgaccggcgagcgcgcttctcagcgtcatcctctccaagtttctaccgcgtggcgccgcggcggccaagaaggttggcgggaagcggcagcagcagcagcagccggctgcggcggcggccatcggcgaggacgacatggaagacgaggaggaggaggaggaggagaagcagctgagccccgtctccgtgctggagcagagcccgttccagccgccagcgtcgcctgcctactcgaaaagtaagcaaacgtgtacactcacctcgcgtctccttcgtctccggcgcggcggcgccattgctgccgccacgtggatagctcagagctcactcgctccacgtacttcgtccatcgcagaggccatagtcatcttcagggagctcctggcggcggcctacacgccggcattacccgaccaccccgtcaacaaccacacagcaagctcgccgtcgacgagctcctcctcctcctcctcctcctccgccgccgcctcacgctactgggaggaggaggagaagctcgaggcggagatcgccaaggtgcacggcctcatcgccgccgagatggcggccgggtggagcgtgtgccccgtcggcgacgcgcggcggcgcgtcggcgccgagctcgccgccgccgtgctggagtccctgacggaggaggccgcggcggcgctgatgctgacgtggagcaacggacggccgcgatgcgatgatgacgacgacgacgacgccatcgacgacgatgcgagttga

SEQ ID NO: 56054 - DNA, 1053 bp, Oryza sativa
  Clone ID: PAT_MRT4530_58001C.1
ccggccggacccaccgtcgcctcggggaaaccgcgccagtgagaaggcatcaagccgtcaagcacggccagctactagccatggtgacgacgcgggggatggccgcgacggcgtcggctgcggaagggtacgagagggagagggaggcgaggatccaggagaacatggagcggatgcagaagctggggatacgtgatcttgccaaccgcttcaaccagtccgcgaccggtttcgccggcggcgggagctggagcgggagcgatcgctggaggcggaaggtgcctgtgacggcgggacccgcatccccatcgcctgctcgtcggtcactcaggctgaagagcctagatcctgttaactactgcgagattcggacaagaaagggcaaggatgttgaaggtggaagctctgttccaattgaggttgggtccgaggaagaagttaacgcagaagatgctgctccggtcgctaaggaggatcagggccattcagaggctatccaggatgaagatgctgaccaccaccaagtgaatgaccccgctgatgatgatggtgacgaggatgacagggagtctgtggtgacgtctagttctcaggattgtgaggttaatctagaagacattattgggtgtgccacttcatctaagccggctggcccaaagaagagaaagttgatcgaacgaaaccctgactatgtgttgcgagagctagcttgatcaggtcccgttccaacagatcatgaacagcctgatcttatgagcatgacagtctctttttggtgcccgtgccccgtgaacgatctgtcagtatcttttgccgaggaaagacaggtttattggaccagtgtgtttcagttcatttgcacgtacgtgctgtgtgttagtgtcatcatcgttggctaggcaattgtggcgcacgctcttttgctcgaaacttttatggctgtgccaactgccaagtatggttctgcttgatgatataagcttataataatgctctatgaatcacaataggctacatatatattcagcctaatgctttaataaaaaaaaaaaa

SEQ ID NO: 56055 - DNA, 418 bp, Oryza sativa
  Clone ID: PAT_MRT4530_58002C.1
acgccgccagacattgatatcagaaattagcctagacaaacccaatctggtgcctgcggaggctgtaagagggatctagcgtcatctctgatctcaacgagttcgtattcgaggagtaagactaccctatcatcggctacctgttgatgaataaagcgtaacaccggcttcacccaacaggagtagggctattacctgtcagataaggggcctgaacctgtataaaaatcattctctccatctcttttacctcaatctcgcatataccctggtaccaacgatctccataccatctaaataccatagtcgtgacctcaaatatcgacaatgttgtgtagcacaaagaatatccagatcatatgcagatatgggcctacactcttcaaaggcttcaagggtaccatctcacatcaaatat

SEQ ID NO: 56056 - DNA, 282 bp, Oryza sativa
  Clone ID: PAT_MRT4530_58003C.1
atgcagccgatgaggacctgcgcggcctggggtcctcgccaatgtgccgccgctgctcccgtcgacgctgacgagggcttcatgtacagctccgaccatgatgtgtacaacagtacaagggcaagtggaggatggacggcaacaatgggggctagagaacatcgcaaaaatgacatattctgcacacccgacggcctctacgagttccttgtgatgcccttgggcctcacgaacacgccgacaacattccaagctctgatgaacgaggtgctcggtgaataa

SEQ ID NO: 56057 - DNA, 1200 bp, Oryza sativa
  Clone ID: PAT_MRT4530_58004C.1
atggcgcgccgcctcttctccgccacgagagcgctactccgagccgttccatctccgtctccttcttcttctgcggcggcggcggccgcggcggcctcgctcctgccgctgctgccctgcaagcggcggaggaagctccggaagaagctgagcagcccgcgcgtcgcgccgatcgagccggaggccgcgcgccgcgtgccggagctcgacgccgtcctcgaccgcgaagccgccttccggttcctcgcccgcgcgaggtcgttcctggcctccctcccgccgccgcaccggatccccctcgcggaggccgggaagctgtaccgcgagctcgggttcccccgcggccgcagcgtgtcccgcgccgccgcgcgccacccgctgctcttccacctccccagggtggactccgtcccgcacctcgcgctcacgccgctcatgtgctcgctcctggaggaggagcgccgcctgcacgaccagctcctcccgacgagggtgcgggccgtccggaagctcctgatgctcgccgaccaccgccgcatcccgctcgcgaagctccaccactgccgcgcggtgctcggcctaccggacgacttccgggaccgcgtccgcgagttccccggcgacttccgcgtcgccgtcgaccccgacggccgcgacgtcctcgagctggcgcggtgggacccggccctcgccgtgagcgcgctggagcgcgacttcgtggtggacgagcgccgggtccggcgcacgttccgcttcgccgtcccgcacagccggtcgatgccgctggacgcggaggacgccgaccgcctggacgcggcgaccacgttcccgctggtctcgccgtacaccagcggcgcgctgctgaggccgtggacgccggaggcggagaagtaccgcgtcggcgtggtgcacgagttcctcagcctgacgctggagaagcgcgcgctgatccaccacatcttcgagttcaaggaggagctcggcctcacgcggcacatgcacgcgtcgctgcggaagcagagccgcgccttctacctcgccggcacggagatgaactgggccgtgttcctcagggacgcgtacggcggcgacggcgatctcagggagaaggaccccctcgtgctgttcaacgagaagctgcggcgctacgcgtgcatgaccaagatggattccagtgagagcattgctactgcctactag

SEQ ID NO: 56058 - DNA, 307 bp, Oryza sativa
  unsure (1)..(307): unsure at all n locations
  Clone ID: PAT_MRT4530_58005C.1
ancgtacnnaaatgngnanctccaatngaacnatgacccnatatnaanganctantaacggaaggtnattantgcntatcagggctcannngaaggttccncctnttctccnncngaaaaaaacnncaggggggggncggaacccantnccccccaaaangaatgggaaaaaaacccccggccnncattttacaanatcttnantgagaaaacnaagctttcnccaaatnaanngcnnttgggggantcnnccggnnnncagncgggnttntaacaaaaaangcccnncccattgcccccccccccc

SEQ ID NO: 56059 - DNA, 684 bp, Oryza sativa
  Clone ID: PAT_MRT4530_58006C.1
caggtctgcagcgaactccctgctgcaagaaataaagaagctaggaggcattgccattatgcatacattgatggcctgcctccatcaaactgaacctgaacacagggttttagcagctaatcttcttctccaattggatatgctggacaaaccagatggtaaaagtgtattcagggatgaagcaatggaagtcctgttggattccctatcatcccaagaaaactgcaccgttcaggcattagcagcatctttcctttgtaatctaggaggaaattattcctggtcaggggaatcatatactgctgcatggctcgcaaagaaagcaggactcacatcaacatctcacagaaatatgatcagaaatatcgactgggttgatccttgcctgcaggacacagaaataggtccatggagcagtaaatctgcacggacaattatcagaacaggagtaccagttctccgtgctttggccaaaggaatacaaagcaaggcgaagggaacctcgcatgattgccttgtatgtgctgcatggcttggaagcgagctggctgctctcggtgaaaataacatgagatattctgcttgcgagatcttgttacatgacatagccagacacttgcaccccaggtttgagcttgatgaaagacttctagcatgcatgtctctctacacttacacctctgg

SEQ ID NO: 56060 - DNA, 542 bp, Oryza sativa
  unsure (1)..(542): unsure at all n locations
  Clone ID: PAT_MRT4530_58007C.1
atcatgaactaccaactcaataaatagtctctcatttcatccaattacattcgactttacaagtttaatgtattctacatgaagtcagtgagattttgtacagtttggaattcctttgaagaatattgggaatttctttttctccaccagtcagtttgaatggggtgggtgagaaaatgcattaaataaacgccgcatttctcacccgccctctctttccctcttctggtccgtcatggaatatagtacattggattgggaagcttgaaggagcgagcgctcgtggagaaacccaacaggtcgctccattgatcgccggagttgcctcattgtacagcttcaagctggaggggatcgccggcgcctcccccctctccacccacttgtcgaattcccggtggtcgaacaattcgagcccgtatccgtggtcggcgtantaggggaggttggagaggagcgtctcgtcgacgtcgaacacccacgcgttgcggccgtcgtccccgacgcgggcggtccgcgcgtacgcggaggccttccgcgcg

SEQ ID NO: 56061 - DNA, 2188 bp, Oryza sativa
  Clone ID: PAT_MRT4530_58008C.1
cctctctctcctctccttttttcgatttgagaaaaaaaaaatttgctcgccttctccttccctcgcggcgaagacaacggagcccgcggcgatggaccgcatcgccggccgcctcgccgccgtagacggcctctactacccgaccaccttcctcctcgccgacccgccgccgtccgccccggaccgcaaggccgccctcctcgcgctcctctcccgcgacgccccgctcttcctcgagcgctacggcgggtcgctgtcccgcgacgagctcgccgccttcgacgcgctcgccggcgactacgaggtcggctggcacctccgccgcctccgcgcggcctccgaggggggcccctccgcgtcccgcgtccgcaaccgccgccgcgcctacctcgaccgcctggtgcgcgagggggagtacttctccgaggaggctatgcgggagcgggagccatacctgcaccacgagtaccttggcaggttccaggatcccacgggacgggccatggcgaggccgggggagcggtggtccgagacgctgatgcggcgggctgaggaggccgtgatcgttgagaagattcgaggggagcagattaggagaggggttgatcccagcgagtgggtaggtggtggcgctgaggaggccatggaggagcaggaagaggaggaagaagaagaagaggaggaggaggaggaggaggaagagagcgaggaggagcaaggcatggacatggaggagaaaggaagaggtgccgataattcttccgagaatccgagtgtgactgaggtggttgactccaacaaaactgcaggggcttccaagcaaacattatctgctgaagatatggaggatcaacttgaacagtttaccagcttgatgcaacagaagttcctgtccggtgaagactctgagcatatggactactctcggatcgataacgacgagatgctggatgaccattggtcaaaagaagccaactatgatgcggaggagaaaccgacctcgtcctccaccccacccatctccgacgccgcggaccccggcggccgctcctcctttgctccattcatcgccatgacgcgccacgccggcgcccgccgccggggcggcgccggcgtcgtcagcctcatcgtcgtcgtcgtcgccgtcctctccgccgctgcaatcgccgcggagggtgtcgatgctgcggtgttcgacgacgcgcacctcctgccgcgcccgctcgtcatcgagctgcctacgacgacctcgtcgtcgtcgccggccttggcggaggagggggagggggaggcggtgccggcggaggtgaggtgcgcgagctggaggctggcgggggaggcgaacaacctcgcgccgtggaagtccctgcccgaggagtgcgccgcctacgtgcgggagtatctcaccggcgtggcctaccgctccgacctcgaggtcgtcgcgcgggaggcctccgcgtacgcgcggaccgcccgcgtcggggacgacggccgcgacgcgtgggtgttcgacgtcgacgagacgctcctctccaacctcccctactacgccgaccacggatacgggctcgaattgttcgaccaccgggaattcgacaagtgggtggagaggggggaggcgccggcgatcccctccagcttgaagctgtacaatgaggttcgcgaccttggaatcaaaaccttcttgctcacgggccgcagcgaggggcaccacggcgtcaccgtcgacaatctcaagaagcagggcttccatgattgggacaagctcatactaagggcgccagctgatcgcaagaagacggcgacgatatacaaatcggagaagaggaaggaaatggaagaggaggggtacaggatcctaggcaactccggcgatcaatggagcgacctgctgggtttctccacgagcgctcgctccttcaagcttcccaatccaatgtactatattccatgacggaacagaagagggaaagagagggcgggtgagaaatgcggcgtttatttgatgcattttctcacccagcccattcaaactgactggtggagaaaaagaaattcacaataattcttcaaaggaattccaaactgtacaaaatctcactgacttcatgtagaatacattaaacttgtaaagtcgaatgtaattggatgaaatgagagactatttattgagttggtagttcatgat

SEQ ID NO: 56062 - DNA, 1573 bp, Oryza sativa
  Clone ID: PAT_MRT4530_58009C.1
aaaaaaaaaagaaaatgtcggccaggaactggaatcactatgtcaaaaagcactgtttctttggacaactagttgttattacgtgacagatcctgaaatgtctaagggatactgattttattgcccagaccgtgtgaaagctaaaaatgtcgtattcttagaaaataatgaagtatgggggagcttacacaaaagggaaattaatcttgagtaaattcgggctaatgttacacaggaaatctaagagaaaaatattccaattaatttgatacctcctattgtacctgtgactcaaactgtgtggtagcaccagtgaaaattctggtgataccgactctgttgaaaataataatgaattaaataatgacactaaaaaaaacttctgagacacataatgagaaattccacaagaacgttctcaactgctagtgatcgaaaatgaaccacttagaatatcataacgggagaggagatctgacatcccaaattattatgaggtttattaaggtgaaggtatagggaagatagatgatcacagctcatttaaagaagcgataacaagtgaacattcattcaaatgacttgaagctctggaagatgaaaaaaaaatccatgagtcaatggactttgggacttagtagaaattcatagaggagccaaaatagtaggctgtaagtgggtctacaaaactatgcttgactttaaagggaaaatcaaaagattcaaggcaagatttataacaaaggttttttttttcacaaagagatgtaatagtttataatgaaacattttcccctatctctaagaaagagtcatttagaattgtcatgtcactagttgctcataatttaggactctattagattaatgtaaagactgcattccttaatggttacttgcattagaatgtatacatggcacaacccaatagttttgttctggaaggcaaggactatttggcttgcaaacttaagaaatctgtctatgaacttaaacaagcgtcaatgactagcatttgttaatggaatgcttggcaggttaatttcagattccagaattagatcactaaaagaccttaaaaaaatgtaggtggcgaccggaaggtcaccgctaccctgctactgatcgccagcaaacccttcaggatcaagccggtaactttatccacacgactactatgattatctcccctacaccgacgatcacctgagtggttcaagggacttcgtactctacttccactccggccactccggccgacggcattatagaggaaatgaccagaatggcaccaatggcttccaacgatgattttaatgaatctagatagatatatatgtctagattcattaacatcaatatgaatgtggaaaatgctagaatgacttacattgtaaaacggagggagtagattacaatatctcggcatattcttgagcagctccatggtgtcgtgcccggcgtccgggaagaggcatctctggagccccacgtcgctgaacgcaacggacaggaacaccaccgccgtgaagaaggcgtgaagaccgtccagccagttcagcttcatcctctc

SEQ ID NO: 56063 - DNA, 1094 bp, Oryza sativa
  Clone ID: PAT_MRT4530_5800C.1
atgggagagggaggagtcgggcgggaggaggacgacgaccgggtgggtggcacccaccggtccacgcgatcagcgcgcgtgcggcgcgcgtgcgcgggagggctgcggctcgggttgggccagggcaggcccaggcgggaggaggataggagggagtgggccggggaggagaggagggaggggcggcccgagaaccaaggagaatttaacgaaaattctccgggccacattcaaatttttcttgacgtgacactcttcttgcacaagctgccgattggcttggatagttgcttcaatgtccttccgctcccgccgatcggctatccgttgcttaggcctttccagcttgaattgatgttgctcaacgaggtgaaggaggaggaggaggctgaaaagacaaagggaatcaaggtgagtggtttacccttgaaaagtgagcaggggcagcaagagttggaggagtttgcttggaaattcccgaatataattccaagcagaatgtgcattaaaatccccgtccaggaccggccggggtacacaaacgacaatgttgacattcagatccaccgggaacaccactccacaggcatcctcgacggcacggacgaagcctactcctcggagaaacctccatttgacacatactcatactctggggtttcactcccactcctcgcaaggcagcgggcagtcccctctcgtgcctaggtgaatccgcaagccgcataggccgtcgcaggtcccatccaaactccatcacgcccacccttgcaatagagcatttgcaatataggatcaacatgttcaagtgacaagcatgacttgccttgctctgctgctggaggaacctcggcgactatttcgaagtacaccggagcgtcggaggaaccggaatctagcgacatacaaagcaaacattgcaaacaggctataagactacttaaatcatttattgcgcaatatattccaggctgacgtcatcaaggcggggcgcggcgctggcaagcgggacccgcatggcagtgactcggggagggcggtccacggcggatcgggtccacggaccgggaaggagcggcgcgccacgcggcggc

SEQ ID NO: 56064 - DNA, 414 bp, Oryza sativa
  unsure (1)..(414): unsure at all n locations
  Clone ID: PAT_MRT4530_58010C.1
ttgggganatgaaatgtaacccacgggntnntgcgacgtctttngtgncgcaatgtttcaattaacggagtcccaccgggtcnatggtccggcttctggagccatttgggtggtttagcaangcccagcaactgacacgaaaaaananncctccnaanngtcnttccttccntagcaagnactngnncnnttccgtttgaatcancncaaaancggtcngcttntnagnttnntgncnttnnncccntanttacacgnnngcatntngaaaaaggcncaatttncttcttgttgcatctgncgtcatacgtcgtcgtantatgcttngngttcatgtccattaattccgtaaccgccgnnagnannaaataantgcgtttgtnctgcacacagaaaaaaaaaaaaaaaaaaaaa

SEQ ID NO: 56065 - DNA, 189 bp, Oryza sativa
  Clone ID: PAT_MRT4530_58011C.1
atggaagcaccactgaagactggcttctccgaccttccacccgatcctgggcgatcccggatcgacaagccgacgattaaaagcagcgccctgccggcagctcctgacctctgttcctatgggagaaagaaggtgcggccttcgtccccgttcccttccatgacggccttcttccactcattttattag

SEQ ID NO: 56066 - DNA, 295 bp, Oryza sativa
  unsure (1)..(295): unsure at all n locations
  Clone ID: PAT_MRT4530_58012C.1
gacgatggaatatgagtccttggacatgtgacaggaatctctttaaaaggaaacttgggcaccctggctcgctcatctgacaaacttacgatgttttttttttttttancccttgttttccgtgggggggggggggggttncaaaattggcttcncctatctacaaaacggggggggggggctatacatgctcnagaacatactgaactatgtagtgtacatagcgggctttgttgttccatttgtgaagcacaattgagtatagccgaactgggtgaatgtggcgcgttgcggt

SEQ ID NO: 56067 - DNA, 459 bp, Oryza sativa
  unsure (1)..(459): unsure at all n locations
  Clone ID: PAT_MRT4530_58013C.1
ttctcctccactcccatgagagagacgctggaactgatggatgccggcggccatgggaaccccggcgacgtcgtatcggcggcggcgtacacagcggaagggccgtgcccgtacttcgactttcctcggcgttcggcgtgtagccgccgtcgcccggcggcggcgagccggagatggatcgatagtgttatccacatggatatgttgttagagaagaagctgagattaatatttgttgttaattaatgatcaatcgtaattaattaggcgtcgcatcttaattgcatgcatgcactagatcaggccaaaagggtagctagggacatgcatgcatggccactagtgattaaggagaggatgaatgaaaccccccttaccaactttgcccaaataagttttntttaaaaaattcaatttcctatatgaggtgaatcgattaattaaaataaaaaaaaaaaa

SEQ ID NO: 56068 - DNA, 306 bp, Oryza sativa
  Clone ID: PAT_MRT4530_58014C.1
ttaaatgggatcaacatgctcaaagggttgtttgggaactgtgtgacttgccttgagcttccgcaaacgcttcggaaccttcctcaacggaaacgctctcctccggaacgtcggaaacgtcttgcccttcttcttcatttccccttctgtctctttcatccccttccttcgctccggcgaggttcttgggctccggtgagctccccacctcgcactcctccctccttcgctctgctccttacctccccggcccctgctccattctgctgcggccaacaccggcccctgccttttcttttgtggcat

SEQ ID NO: 56069 - DNA, 433 bp, Oryza sativa
  Clone ID: PAT_MRT4530_58015C.1
ataacagtaaactttttcagaaagtgtcaaagaaaggaactagtgtttatccatggaatgggactgctgttgaaaagcataagctttctgatctgaatcataatttctatatttctgtgagtgaattgcagactcacgtcgttccaacaccactctggtcaatatctcttatgcattattaagccatgtgcgtttgatctgtacaatcagtcattcattctataaatacccacagtctttcaatataaattctccacactcgcaatatttaatctaggtctaagaaacttataccatttgttgaatcttttcatacatccagattataacagcctatggcgagcacattttgatagtaatcttatatttatcgcttcatcttcaaaagattctatttttattggacgtctttctctccttgataaactatttt

SEQ ID NO: 56070 - DNA, 432 bp, Oryza sativa
  Clone ID: PAT_MRT4530_58016C.1
gcctagggtgggctcaagcacgcggccatggcgatctcgcgccgcctcctcctctccctcttcctcctccgcgcattctcctcgcttcccgctcaggccgcagcgagaggcgcctcccatccctcaggtaccagcggaaattatgggtcatttttgcgcaacctgcttcaggataatcccatgataacggaggaattggtccgtggatatatgagcaactcggaacttgagattgctgcgcatgccattggaagccgctatcctaatatctccaggatatacagcattggaaagagtgtgaatggcgtcacattgtgggtgattgaaatatcagacaagcctgggcaaaaggaagctgaaccagcattcaagtatgttggtaatgtccatggtgatgaacctgctggaagggaggctcttataaagcttgca

SEQ ID NO: 56071 - DNA, 885 bp, Oryza sativa
  Clone ID: PAT_MRT4530_58017C.1
catcagccgccgcagcatctccctcccgcggcggcggcggcgacgtctagccacagcagcacggtcgagtcgtggggcgtcacggtcgccgccgcggccgcctccgccggagctctcgggctgccgccgccgcgcaacggcggcagcaaccccgccgccgacgaggactgccgcagctactgcggctcctcttcctccgtgctctgcgaggacggcgcctcgggcgccggcgacgaggccgccgccccgcgctgctcgccgctgccgttcgatctgaacctgccggcctcgtccccatccgccgccgccgccgccgaagccgacgagatggattggcgctgcgacacgctgctccacctctagcctgcacacgaccagccgtctccagcaatctccggcgaactctagcctacgacgaccacgaccacgaccaaccagcaagcagcaagaaccgacgaactggtactggattgctgtgctccaatccaaccatcgccattgctgctactgcgaagaagctctctaccatctcctccatagacacggataattatttcttctttttttctttttgttttcgttttcttctatctctttttcaccactcaggatttgatactcctcttatgtgataatgtgaataactttatcatgtaaaccgtgagtaaaattcggtatttccgccgcctctctcgtgcatctctgtatccaaaagggggatgctgctgctgctgctgctttcagttgtaccaatagatagaaaatggtagagaagatgagaaaatttggttcaaaatttgtaacgtaaacgttatcggaatacactgggattagaaagaaaaaaaaaaaaaactcgagactagttctctctctccctcgtgccga

SEQ ID NO: 56072 - DNA, 2044 bp, Oryza sativa
  Clone ID: PAT_MRT4530_58018C.1
caaagggaaatacccaattatttaacattgcccaaaaaaaaaggacttactatctttggaatattttcctcccaaaaagttcttaacataatttgaacaaagaaatgagattcagctaaatggctgtgccaattaaggaatcagaagggtaagccgacgctactgctgattcagcaggcatcaccgaattctgtacagtgaaaatcaatgaaaaacaaagggtaatgctagcttctcaacatgaaaatatgttgccacagcaaaagatggcaaaagggggctttgtctcctcttatcattaagaaacatcattatgtactcattagacttatacagcaattggccgtttcggtgaatgtctgtgaatcgtgaatttcgatgttgtttttctcttgaagagaacatacagtgcgatgataatgagcaaaacaaatagatacagctcgaggcgagctccctgcacatgaaacaacttgtcgtcgtcacatgggcaacctaagtcattacggaccacttgtccattagctccatctcgatctaagatgaagtccaagctcacagccttctcctccaccacaatacgtgtagcttttgttcggaagccctccatagatgccatgacttcatagttctcaccaggtgcaagcattcgatggtaatcgccataagtcctgctagcccttatctcagaaccgataccctttatcgtcagggagcctggtataggatgacctgtatctgccgcaaatatccttccatgaactcccgtctgtataaagttataaaccttagcagggtcataactctgacaatctaagaattctctgctcctccaactcaaattccccttcacaaggcttgcagcaagattaagcatactcatcctattctgttcccatatgacaggaagctcagctgcctttggccattttacgtcactaatttccagggttaactcaaagcaacctccatgtatatagttccagtcttgcatcccaccatagattggataccagaatgctccatttgtaatccctcctttaaattctttgctcaaagacatgttatagtgcgattgactataaactgatgccatgtaccggaatgtcttatcatcaggacatccataatactgtttgctttgatctctagacccatcccatggataatttgcaacaagagcacccccatgcaaactagcggaggcagtgaagtgttcttgttttacccagttcataatagctctagtttcaggttgtctgtagttaatttcatcgttgttggtgaaaaattggtcaggaaaatctctgttgaggtcaacattgtttgcattaccacgtcttctaagagcaaatccatcagggttcatcgttggaagtatatgaagatgcatgtttttcacaataagagttgccaagggatccttcaaatagttatcacacagccaatttgcaagctttataagaacctcccttccaacaggttcatcaccatggacattaccaacatacatcctacacttgaccaatgtagctccgagtgcgtgattgggctgcattgatttcctagtgccaactgtgggggaagatgtcaggtgaaccttgaatgctggttcagcttccttttgcccaggcttgtctgatatttcaatcacccacaatgtgacaccattcacactctttccaatgctgataacatgatcgtgcaatccctcaaagagagaataaataataggtaagcaaagtttgaatgtatgagcatacaggacataaaagtgagagataacactgtatatcctggagatattaggatagcggcttccaatggcatgcacagcaatctcaagttccgagttgctcatatatccacggaccaattcctccgttatcatgggattatcctgaagcaggttgcgcaaaaatgacccataatttccgctggtacctgagggatgggaggcgcctctcgctgcggcctgagcgggaagcgaggagaatgcgcggaggaggaagagggagaggaggaggcggcgcgagatcgccat

SEQ ID NO: 56073 - DNA, 480 bp, Oryza sativa
  Clone ID: PAT_MRT4530_58019C.1
atggcgcggccaccaggcttccagagctgcggctgtggcatccgctccggcaaggcggcggcgcgaccagccgccatggcccaaaggggcaggcgcgcagcgcaggaagagcagaggcagaggcagaggcagggtgaggattctaccattaaatgcacaatgacacaatttgaggatcagtttagcactataaaacctgatgggattcaagtcagatgccataagcaattttgcatcatcagatgctcaacagtacccgtgcccccgcgcgccgtcgtcgccgccgccgtcgtcgccgccgccgccgtcgagaccgagggagccgcggatccaggtgaaggccaagacccgcaagacctcgagcaaggcaagtcatcactattccttgaacatgttgatcctaattgcgaaattgttttgtttacaaataaaattgcatgcaatgatgaacatcctacttgtgattatgccatgccttga

SEQ ID NO: 56074 - DNA, 2055 bp, Oryza sativa
  Clone ID: PAT_MRT4530_5801C.1
gctaactgcttcccgtcccgcaggaccccgagaccggcaagaagcatactagcacgctacgaaaccccccttctcttcgtccccaaattgcactacaaaaaaggccgcccctttcttctctcctcgtccttatcaccaccaatccgatcctcttctcttctcttcttccccacatccagttcgattctcatctctcccacaacaaatcacgccatggatccctacaagcatcggccgtccagcgggagcaattccaccttctggaccaccaactccggcgcccccgtctggaacaacaactccgccctcaccgtcggagagcgaggccctatcctccttgaggactatcatctgattgaaaagcttgcacagtttgacagggagcgtatccctgaacgtgtcgttcatgcaaggggagccagtgccaagggattttttgaggtcactcatgatatttctcacctcacatgtgctgattttctccgtgctcctggtgttcagaccccagttattgttcggttctccacagtcgtgcatgagcgtggaagccctgagacattgagggatccacgtggttttgctgtcaagttttacactagagagggtaattttgatcttgttgggaacaatatgcctgtcttttttatccgagatgggatgaaattccctgacatggtccatgctttcaagccaagtagaagatttcttttgcacaccacccagagagcctgcacatgttctccttcctctttgacgatgtaggcatcccactcaactacaggcacatggagggttttggtgtcaacacctacaccctaatcaataaggatggaaagcctcaccttgtcaaattccactggaagcctacctgtggtgtcaaatgcctgttggatgatgaagctgtgactgttggcggcacctgccacagccatgccacgaaggacttgactgattctattgcagcagggaattacccagagtggaagctttacatccagactattgatcctgatcatgaggacagatttgacttcgatcctcttgatgtcaccaagacatggccagaggatatcatccccctgcagccagttggacggatggtcctgaacaaaaacattgataacttctttgcagaaaatgaacagcttgctttctgcccagcgataattgtccctggaatccattactctgatgataagctgctccagacaagaattttctcctatgctgatacccaaaggcaccgtcttggcccaaactatttgatgcttcctgtgaatgcaccaaaatgtgcataccacaacaaccaccacgatggctccatgaatttcatgcacagggatgaagaggttaactacttcccttcaaggtttgatgctgcacgtcatgctgagaaggtccctattcctcctcgtgttctaacaggctgtcgggaaaagtgtgtcattgacaaggagaacaatttccaacaggctggtgagagataccggtcatttgaccctgccaggcaagatcgttttctccagcggtgggttgatgctctctcagatcctcgtattacacatgaactccgtggcatctggatctcctactggtcgcagtgtgatgcgtcccttgggcagaagctggcttcacgtctcaacctgaaaccaaacatgtagatcggccaggaggaatccagtggtggtgctatgttggacagtcaaacatgaactgtaatgtgtcgaccagccgtagtcgtgaataaaatgtgatacggtgatatgtatactggtgacgcaagttgtgaaactgtatctggaatcctgaaaatatgccttgctgtgtcttgggaaagagataataaagactgatacagtgggtgctatatgtttgaacttgtttatacatctgccatctcttgtttgcctttgtgttaagatggctttagagactggaacgaacaaccagctgtttgcctttgtgcctttgtgttaagatatttctcggtcaacccatccctggataaagcaggattcaactaaaaaaaaaaaaaaaaaaaaaaaaaaaaaaaaa

SEQ ID NO: 56075 - DNA, 550 bp, Oryza sativa
  Clone ID: PAT_MRT4530_58020C.1
aagagctatgacgtcgcatgcacgcgtacgtaagcttggatcctctagagcggcgcgcctgctcttgccgccattgcacttgggcttctgggcaggggtgctgggctgagcgacgggttgagcaggctggggcttggaggcctcaggctgggcagtctcgggctgagtagcaggggaagaaggaaccggggaagaggaagggctggaagtagcagggctaggtgtggcaggagactgagcagcgccgccgcgtaccagccttgtagacagactgggcagggaaggggtagtccttggtatccgccccaaacgctgaagttccaggaggggtcggtcttcttgtagctaccggggaacttgatggtgtccttgggaattgcgttgccgccaccagtaaccttgatctgagcacagccatagtagaactcagcttggccgtcgtgagctccgtgaacaccgacgtgctggggacggacgaggtactcgccctcagcaaggtcctcagggacagtgaactcaatgttgttcttgtcccaagtgcaccaggcgt

SEQ ID NO: 56076 - DNA, 681 bp, Oryza sativa
  Clone ID: PAT_MRT4530_58021C.1
atggcttcatctctaacgccgagccccgccacgtcacgtgcaatgcatcaggagaggctcactaatgaggaggtcgacgagatgattcacgagaccgatggtggcagcttttcagatcatgggcatatgggcaatctgttaagcatagcagcgtacggcttgatgctaggctttttcctcgttggtgtgcgggtggaatgtattttcagctccgaaggcccacctagtgctcttcctccgctcggccgcgcccccgttacaccggcactgccgccgccaggccacgccccgctacacgggtgcgccgctgccgctcgcgacacccctccggccgaccacttgttattcggccacgtcggtctcgctggcgtggcagagttatttggctacgccactttgactgacgtatcaaggcaaaactgtcacgcccgctacagagctatgaccggaagaaagaggaagaaagcaagtgtgacatgggaagtggagggggtacacggagctacggagaggcgatttgagcgaggaagctccactaccacgtacggcggcaagccggcaatggagccggccaatccggcgagcgccataccaggcgagagatgctcctatcgacgaggcgccgttgcatctgagccgagaccgcacaggagacaggaccgtcgcaccgagtcaacgggc

SEQ ID NO: 56077 - DNA, 249 bp, Oryza sativa
  Clone ID: PAT_MRT4530_58022C.1
atgaccaagcagtgctggcactctatcaacaggaaggtgtttgcttgtgatagaacttccttggggacaacagtggcgtgtgctctcagcagagaagcaggtgggaagggagggtgggtcaaggtgcttggggattatgtcagcctgctctttatggggaaggggttggtttatgcgttaggaggagtgataggaggcaagggaaggtgcttcaataaaacagtgcatacatttgggatggaagcctaa

SEQ ID NO: 56078 - DNA, 1251 bp, Oryza sativa
  Clone ID: PAT_MRT4530_58023C.1
atggagcgagcagccgatgaggaggcggcggcggaggctctccgcgcgaagattgagctcctgcgacaggcgatgcagagcagcgaagctatgcaaaaggaggctgccgtgataggcactcgcttgaacaaccacatggtcgccattgacgaggccatgcgccctgcccataagaggacgtacaacgcgtgcagggttcatgacaacatcaggaggagcctcacggcggccggggcgatcgtgcgccacctcgaccttgtaagggaggcagaacatgtgatattattggacagaccaaacgaggatcttaatgcctatcttgaggcgattgataagttgactagtgtcgaatacttttttacttccaagataagatgtagagttggtaatgatgttcacgaacgtgttaacgaattgctttctaaagcaatccatgggttggagaatgaattccacaggctgttaaccaaatgcagctatcaatcatcaataaagcagatctttggagatccctgtgttgaagatgaaaaagatactgatgtggtctctcaaattgttggtgcaatacatgctctggagaccaatctagctatgaaggcaaagcaatacaaggaccttgctctggggcacctctttttgatgaacaacatccattatattgtcaagtatattggcagatcagaattgaaggatttattaggtgctgattggattgaaagacaacgaaggattgtgcaacaacatgctactcgatatagaagagttgcttggctaaaggtattggagtgtctatcaactcaaggtctcacttcatcagtaggctcttcaattgatgtcactcaaggaagttttagaaatattaagaacagtacaacctccagatctgtgatcaaggagagattgaaatgtttcaacatgcgatttgaagagatttgccagaaacagatgaactggggtgttcctgacagagatttacgagattccctaattcttatgattgctgaaatattgttacctgcttatagatctttcctgaaacactttgggcctcttgttgagaacagccacagcgctttaaaatatatgaagtacactccagaatcacttgagcaagctcttggtaatctatttgcaaagaagttacgaagtgatcaggtgttctccttgcatttgtttgctgcctgcattgtgcatgtttgcattggacggacatactctttctctaagcctggaggttcagaccaagtctaa

SEQ ID NO: 56079 - DNA, 259 bp, Oryza sativa
  unsure (1)..(259): unsure at all n locations
  Clone ID: PAT_MRT4530_58024C.1
ancctgtattcncctgttcatggtgaataatcatgtgccatttatttgganccaaaattttggatgcaaataggtgtttttagtgttaagctagattggtttcgtagttgaataccacaactagaacatacaggtagcattgtgagttggccttttgtgactgtaaattttccaggtgagcagttcatgtagttagactatagcttcaagatgaatgacactgtttgcagaaaaaaaaaaaaaaaaaaaaaaaaaaaaa

SEQ ID NO: 56080 - DNA, 2285 bp, Oryza sativa
  Clone ID: PAT_MRT4530_58025C.1
ctccggccccctccgccatccaggtccctccctcccctgcctgaaccccctgacgccatatcgcggagcgcgcaacttccagagccgcagcggcgtgagtcgccgggacgtgcagtggcatggagacccttgcgcagcgcgcggcgttgctgcgggagtcgctgcagaagagccagtccgtgaccgacgccgtcgtctccatcctcggctccttcgacagccgcctctccgcgctcgacgccgccatgcgccccatccaggtgaggacgcacgccgtgcggacggcccacgagaacatcgaccggacgctgcgctccgccgatgtcatcctcacgcagttcgatcgaactcgagaggcagagcgtgaaatacagaaggggccacatgaaaatcttcaaggttttctagatgcagttgatcggttgagaagtattgagcgtttctttagctcaaataggagctaccgaagcagtgatggtgtgcgttctgatatgttggaaactcgtgttagtgcattcattattcagtaagatgaattccaaaagcaattgactcagcgcagctttggagaggcaattgctatgagtaaaagatcaccagagaagctgtttgtgctgctagacatgtatgaaataatgtgtgaacttcaagcagatattgacaccatctttgttggagaatcatgctctcaaatgcgtgagtctgcattgagtttgacaaaatgcttagcacaaactgcacagaagactttcagtgactttgaagaagctgttgaaaaggacgcaacaaagaatattcatattgatgggacagtgcatcctttgacgagctacgtcttgcaatgcctctctggtcaaggtttgacttcatcaggaggtagtggtcaagtaggaagtgagggaggcaatagcagtggagcttcaagagctgcggtcaaagagaggtctttcaatgtgctatttgaggagatttatcaaaagcagtgtggctggtctgttccagatacggagttgcgtgagtcactaagacttgcagttgctgaaatcctgttgcctgcatacagatctttcctaaagcgctttgggcctctcatcgagaacagcaaggcacctggaaaatatgtcaagcacacaccagagcaagttgagctactgcttgccaatttgtttgaaggaaaacaagagcacccctgccacatcggcggggggaatggcttggccgccacgctggcagccgatgaggaggcggcggcggaggctctccgcgcgaagattgagctcctgcgacaggcgatgcagagcagcgaagctatgcaaaaggaggctgccgtgataggcactcgcttgaacaaccacatggtcgccattgacgaggccatgcgccctgcccataagaggacgtacaacgcgtgcagggttcatgacaacatcaggaggagcctcacggcggccggggcgatcgtgcgccacctcgaccttgtaagggagatctttggagatccctgtgttgaagatgaaaaagatactgatgtggtctctcaaattgttggtgcaatacatgctctggagaccaatctagctatgaaggcaaagcaatacaaggaccttgctctggggcacctctttttgatgaacaacatccattatattgtcaagtatattggcagatcagaattgaaggatttattaggtgctgattggattgaaagacaacgaaggattgtgcaacaacatgctactcgatatagaagagttgcttggctaaaggtattggagtgtctatcaactcaaggtctcacttcatcagtaggctcttcaattgatgtcactcaaggaagttttagaaatattaagaacagtacaacctccagatctgtgatcaaggagagattgaaatgtttcaacatgcgatttgaagagatttgccagaaacagatgaactggggtgttcctgacagagatttacgagattccctaattcttatgattgctgaaatattgttacctgcttatagatctttcctgaaacactttgggcctcttgttgagaacagccacagcgctttaaaatatatgaagtacactccagaatcacttgagcaagctcttggtaatctatttgcaaagaagttacgaagtgatcaggcgaagtcagcgaacgaggtagcaggctccaagccttattcatcatctgccatagctaaagcgcatggaaaccacgagggcatatttccgaatgccaacttggagcgcagctgcacagaggtggtcaaacgtaaaaactag

SEQ ID NO: 56081 - DNA, 1567 bp, Oryza sativa
  Clone ID: PAT_MRT4530_58026C.1
gcgagcagccgatgaggaggcggcggcggaggctctccgcgcgaagattgagctcctgcgacaggcgatgcagagcagcgaagctatgcaaaaggaggctgccgtgataggcactcgcttgaacaaccacatggtcgccattgacgaggccatgcgccctgcccataagaggacgtacaacgcgtgcagggttcatgacaacatcaggaggagcctcacggcggccggggcgatcgtgcgccacctcgaccttgtaagggaggcagaacatgtgatattattggacagaccaaacgaggatcttaatgcctatcttgaggcgattgataagttgactagtgtcgaatacttttttacttccaagataagatgtagagttggtaatgatgttcacgaacgtgttaacgaattgctttctaaagcaatccatgggttggagaatgaattccacaggctgttaaccaaatgcagcaaacctgtagatcttgagaatattttcaactgtctatcaagtcttaatcggcaattgtcaagtgaggaccttattggcccatcagccgtaatatctgactatttattcgaacaggttgatgcaatctttgagggtaatgcatgctctgaaaaccagaaatctgcccttactttaactaaaagccttgcacagactgcgaaaaagacaataggtgatttcatggaatacattctgaatcactcggtgacgagtacgactgttgatggggctgtgcattatatgaccagctatgtcactgattatatcaagtttctttttgactatcaatcatcaataaagcagatctttggagatccctgtgttgaagatgaaaaagatactgatgtggtctctcaaattgttggtgcaatacatgctctggagaccaatctagctatgaaggcaaagcaatacaaggaccttgctctggggcacctctttttgatgaacaacatccattatattgtcaagtatattggcagatcagaattgaaggatttattaggtgctgattggattgaaagacaacgaaggattgtgcaacaacatgctactcgatatagaagagttgcttggctaaaggtattggagtgtctatcaactcaaggtctcacttcatcagtaggctcttcaattgatgtcactcaaggaagttttagaaatattaagaacagtacaacctccagatctgtgatcaaggagagattgaaatgtttcaacatgcgatttgaagagatttgccagaaacagatgaactggggtgttcctgacagagatttacgagattccctaattcttatgattgctgaaatattgttacctgcttatagatctttcctgaaacactttgggcctcttgttgagaacagccacagcgctttaaaatatatgaagtacactccagaatcacttgagcaagctcttggtaatctatttgcaaagaagttacgaagtgatcaggtgttctccttgcatttgtttgctgcctgcattgtgcatgtttgcattggactgacatactctttctctaagcctggaggttcagaccaagtctaa

SEQ ID NO: 56082 - DNA, 2301 bp, Oryza sativa
  Clone ID: PAT_MRT4530_58027C.1
atggagacccttgcgcagcgcgcggcgttgctgcgggagtcgctgcagaagagccagtccgtgaccgacgccgtcgtctccatcctcggctccttcgacagccgcctctccgcgctcgacgccgccatgcgccccatccaggtgaggacgcacgccgtgcggacggcccacgagaacatcgaccggacgctgcgctccgccgatgtcatcctcacgcagttcgatcgaactcgagaggcagagcgtgaaatacagaaggggccacatgaaaatcttcaaggttttctagatgcagttgatcggttgagaagtattgagcgtttctttagctcaaataggagctaccgaagcagtgatggtgtgctcaaccatgtgaatgccctcctttctaaggcccttgtgaagatggaagatgaattccagaagcaattgactcagcgcagcaaacctatcgagcctgatcgtctttttgattgccttccaagtacgcttcgaccatcatctgaatctcatcctgaaggtggaaaaaaccaatcacattctgaaaatcagcaaaactcggaagcagctgtatacagcccccctgctcttattgagccaaggttcattccttttctggctaaattagcacaacagttggtacaagcgggatgccaacaacaatgctcagaaatatacagcgaagcccgtgcctctgctttagagtcaagtttgaagagcttgggtgttgaaaaactgagcaaagatgaagtgcagaaaatgccatgggaaattttggagtctaaaatagggaattggattcacttcatgcgaattgctgttaaacttctttttgccgcggaacgtcagctttgtgaccaggtttttgagtgcagtcaatctttgagggataagtgctttgctcaaataactaggaatagtttggctacactactcagctttggagaggcaattgctatgagtaaaagatcaccagagaagctgtttgtgctgctagacatgtatgaaataatgtgtgaacttcaagcagatattgacaccatctttgttggagaatcatgctctcaaatgcgtgagtctgcattgagtttgacaaaatgcttagcacaaactgcacagaagactttcagtgactttgaagaagctgttgaaaaggacgcaacaaagaatattcatattgatgggacagtgcatcctttgacgagctacgtgattaactatgtcaaatttttatttgactaccagtcaactctaaaacagctcttccaggagttcaaaagggaagatggaacaggttctgagttggccactgtaaccatgagtatcatgcaggctttacagaataatctggatgcaaaagcaaaacaatacaaggatccagctttgatgcacatatttttgatgaataacattcattatatcgtgaaatctgtccgcagatcagaagccaaagatttattgggggatgactggattcaaaggcatcgaagaattgtacaacaaaatgcaaatcattatagaaggattgcttggtcaaaggtcttgcaatgcctctctggtcaaggtttgacttcatcaggaggtagtggtcaagtaggaagtgagggaggcaatagcagtggagcttcaagagctgcggtcaaagagaggtctttcaatgtgctatttgaggagatttatcaaaagcagtgtggctggtctgttccagatacggagttgcgtgagtcactaagacttgcagttgctgaaatcctgttgcctgcatacagatctttcctaaagcgctttggtttgtcaaatactcaagagttcttgtccctggagcttatgagacttgtaatctataggcctctcatcgagaacagcaaggcacccggaaaatatgtcaagcacacaccagagcaagttgagctactgcttgccaatttgtttgaaggaaaacaagagcgtacttgattggggtatgtggctgcttaatatacaccagcgacgatgtgatgtcattctctgtaaattgggaccctggtagcattgcttttgtttgtgtagcgctgctgctcagaaccgttgctatgtgcacctttccttgctggggtgcatgatttgtatagatactgtcctagttgccatttattgtttttgttgatttggtaggtgctaggttcgttctgatatgttggaaactcgtgttagtgcattcattattcagtatcagcagtgtgcaataattgtccaatgttaatgcaacctctagtgcctccattttgcagttgcgggagtatagtcgcaactgtttcccac

SEQ ID NO: 56083 - DNA, 411 bp, Oryza sativa
  Clone ID: PAT_MRT4530_58028C.1
atgtggtacctgataattataggtatctggtacctaataccatgcacatggtacccatggatactggatggcctgatacttgtggataccaggcctaatactgaggtatcacgacgactgatgcctgatggagaaggctgtggcgcagacgctgaaggtggtgaggtccggccggaagtcaacggtgaccatctccaagaacacgcgctgcagcaacttcatcttcaagttgatggcaaagaagaggaggtagaggttctagagcaggttgtcgccggcgttgcggcagccgaggcaccgggaccgccggcttcttctgcttctacagtggcagcggaggatccacctgcgctcaccggcaaggaggcggcaggagcagcgggcaaggacggcggcacaagtggctcatga

SEQ ID NO: 56084 - DNA, 288 bp, Oryza sativa
  Clone ID: PAT_MRT4530_58029C.1
atggagctcaccgagttgtcatcgtatctacatcacaggaagagaaaaaacggcccggatagtgcggtgagttcttcctcagatcctgcatcggaacttggtgacatggagaacaatgagtttctggtttattcttatgtcagcaagaaattggataatatcgagaacctccttgacaagatggaaactttgagaaaagaaagtgatgaggctgatgcaaggttcgctcagcttagaccatacaaggcgtttgcatgtgtctcaggtcatactcgtgaggatttttga

SEQ ID NO: 56085 - DNA, 2694 bp, Oryza sativa
  Clone ID: PAT_MRT4530_5802C.1
tcaacaatttgccaactcgcgaccatcaccatctgcaattttgaatgcgcctggccgcaagacttgtgtgatcatgtaaggtccttcccatttgggtgagagcttgtttcgccctgcttggctttgaacccgtcggaggacgtagtcgccgatcgaaagtatgcgtgctcggatgcgcttctcgtggtaacggcggagggcctgttggtaattggctgctcggacggcaactcgttcgcgatgttcctcgagtagattcacatcgacgtttcgctgctcctcctgatcctcgttggaatacttctgtactcgtgtactctgatgtcgtagctcgctagggagcatggcctcggagccgtacacgaggaagaagggtgtttccttgctagacgttgttggtgtggtgcgtacggcccatagtactgatgggagttcttcgaccaattttttatcatgtgacatgagcctgtcgtagacgtgggttttgatcccttgtagtactatgccgtttgccctttcgacttgtccgttgctttgagggtgagagaccgaggtgaagcatatcttgactcccagcccgatgcagtaatcctggaaatcggcgctgatgaactgagagccgttgtcggttatgatgcggtgcggtagtccgtatctgcagaatatccccttgatgaatttgatggcgttgtcggccttgatttcccccgtgggtactgctttgatccacttagtgaatttgtctatcaccacgaataggaacctgtagccgccctgtcctcgtgggaatggcccgagtatgtctagcccccagcacgagaacggccaagtaagagggatagtctggagtgcttgcgctggtagctttgtgtgtttactgtggaattgacaggcttcacaccgcccgtttggcgccttcttgtatagatcgttgccgatcatacagtagatttttgctttacgggttattttctcagcttctgcatcgtcctcgggcaactcttcgctacctatgaatttaatgagtggggtgcgccagtcgtctttggtttcgatatcggcaacggcgcattttgcctctgtagcccccgagctgttgttgaggacgactgggctatcttcgccgcttacctctctcactgatggccttgtcaggacgtccagaaaggtgccaggttcgagtggctctcgtctggacgcacgccgtgctagatcatccggctcgatgttgtccttgcggtatacatgtcggacctcgatcccatcgaaccttttttccagcttcctgacttctgcgagatacttggataactcggggctagagcacttgtaatctttatgcacctggttcgcgactagttcggaatcccctttcacgaccagtcgcctaactccgagtgcagctacagctcttatcttggcgagtagtccttcgtactcggctgtgttattgttcgccccgaagttgaggtgaattgcatgcttgaattgatctcccgaaggtgatgtcaagatgaatcctgcccctgctccttggctgttgagtgcgccgtcgaatgccattgtccacgtttcgttgtcgatttggttgtctgacctgttatcaggcatggtccaatcggctacgaagtcgacgagtacctgggacttgatggctgttcgtggcacaaagtggacatcaaattggcttagctcgactacccattttgcaatgcggccaacaacgtctttgtttctcacgacttcaccgagggggaaggaggatacaactgtgaccctgtgggcttggaagtagtggcgtagctttcttgatgtcatgattaccgcgtagagtagtttttggatatgtggatatcttgtctttgcgtcgtggagagcttcgctgacgtagtagactagttgttgcaccttctctctgcttagtgcagccatgcatccggttagcttctgtacttccttgagtcttgtaggcaactttatgttctcgattgccttgatcttctcgggattttcttctattcctctgccagagacgaggaaaccgagcagcttgcccgatggtaccccgaacgtgcacttctctctctgatgaaaccagctttgagaagcttgtcgagctcttctcgtatggcttgttggtgcaaatctccacagtttttgctttactggcttggcgtcgggtcgcaccatgagtttgtgctcaatcacctccctgagtacccctggcatgtcagacggcattttcgcagccaccaccaccaccgacgaggcgacgatgccgacgccgccgacgcggacgacaccgatgacgccggccactggccacaccgccgacagcctcaccaccaccgatgcacgatgcctcgccatgtcgaggctccgcttgtcgcattgcactgccagcttagcattcccttgaatagtgattgttcccttcggtcccggcatcttgagcacttgatacgcgtagtgagatgcggccatgaacttcgcgagtgcagttctcccaatgatggcattgtatgttgtatcgaattcagcgacatcaaaggtgatctgctccgttcggaagttatttgtttggccgaaagtcacaaacaacgtaattttgctcaatggtttggatgatgactgaggagtgattccatggaagggttgatcggtgggtgtcaactcgcttcgtgggatccccat

SEQ ID NO: 56086 - DNA, 1301 bp, Oryza sativa
  Clone ID: PAT_MRT4530_58030C.1
tcccctgtgattgtcatggatccaagttatcgacgacggtcacagaatgaagatgagttcatgctttttgttctccctaccatcgaaggagattcgtcacaaccatcatctagtaggaaaccgatgcacacatcaaaactttcaggggcttgtcgtgttaatgaaatcttaacaggtcatcagagcctaagcaaaaggaattttcgcatggaagttaatgtttttcgagctttagtcgataagttgcgtgagaaacaactacttgctgatgcaagagatgtctcagtagaagaacaagttgctatattcttgtatgcactagcaaaaaatgcaagtaatgagaccttgcaagatcagtttcaacacagcgggcaaacaataagcaagtattttggggttgtgcttgatgcagttacacaacttacatgtgtatatatacggccacctttcctacacccccatcatatcttgagaagaccaaaatttcaccccttttttgagaattgtgttggctctattgacgggacacatgtaccaatgatacttccactagaccagcaagaaccataccggaatagaaagcaaacaatttctcagaatgttatggtagcttgcgacttcgatctgaaatttgtacatgtacatgccggctgggagggatcagcttcagacgcaagagttcttcaagatgcactaaaccatggttttgaagtacctcctggtaaattttttcttgtagatgctggttatgcaaatacaacacagtttctagcaccgtatcgtgggacaagatatcatttaaaggaacagggcagagctaatcaaaagccacaaaattataaggagttattcaatcttcggcatgcacaactcagaaaccatatagagagagcaattggtgtattaaaaatgagatttcctatactaaagaccggctcacaccacccagctcgtaaacaagttgatatttcggttgcctgttgtgttctacacaacttcatacgcctgcataatggagatatggtgtggccaagtaattgtcgtttggagattgatccagatcatattgttgatgtgccaaatggagacgaggggaatagaaaacgagatgacatggcacaacggatgtggaaccattacgtagcacgaaggaaataatatattgcatttgaccaccatggcattcaaggtcaattactagtcttgtactccaagtttgtcacattctacttaatgaagtaactacttgcatgcactccctctaagcaaaagtacatcctactactatctgcttcacaaaa

SEQ ID NO: 56087 - DNA, 510 bp, Oryza sativa
  Clone ID: PAT_MRT4530_58031C.1
atggcagggctcggcgcagtgcatgtcgtcgctattagcgccgcaccgtggggaatggggagttgccgattattttttttccctctcaaacttgatcatgggtgggaggataagggctcgcagcagtgcatgtcgccgctattaacgccgcaccgtggggactggggattgccgattcttttttttcctctcaaacacgatcgtggatgggaggataaggattgctctgcagaagatatgatgaagcaaaccgcaatggatgaaactacaacaatctacgaaccagagcaggttttcaaacaaaataagccccaaaaacaggctgaagcattcaacatccaaggcagctatctgagtctatccagtagggacgctgagcatttgcttgacctgccatcacaaggagaagaaatatttgaaccaccaaagaccaagaatatggacttgtttgatgaattcaagacagcatctaagcaaggggcacatataaaattatcttctttgcaatag

SEQ ID NO: 56088 - DNA, 2430 bp, Oryza sativa
  Clone ID: PAT_MRT4530_58032C.1
atgagagatacagacttcaaatttgtgaaagttgacgcgattccttcttcagtttttagaagatgcaacatgcgaaccatgtcagtacgacgtgctgaatttttctatacgtataatgtatacagtttacataacgcagtaacacaatttcctgatcttacacttctaaccgtctgattcctagttccaatcgatcaacatcgtaaggcaacagacaacactagtgattcaatcgatcaacagctcatcagaccttgtacagcatgccgatctcaactcgctgttgcagaggcatcccaagaaccggcagagccgaccggcagatcccatgcaagaactcatagaatccgagcatgatcttatcaaaccagccggcgtcctcgccgacgtagaacctcatcttgccccggacgtgcaccacgccggccaacctcgccgcctccagctgcgccatctcttcctccggtgaccggcggccatcagtgtccatctggatgtgccattgcaggcagctcgtgacctgcgcggcgaggtcgtcgccgccctcgaggctgaggttgtcggcgtagccgtactgaacggtgcagccgtacaccccgtttggtccaagcctgtttatcaggatccttttgctttgatcaactttggcgacgagcagggacctcagggtgacaaaaattgtgaccgtgtgcagtgagctcatgttcttgatgtaatggctgaggattggagttagcccgtcctgtatgttgctgtagaagaagcagaggccagggaccctctgaacctcaggccttgccaagagctcgccgaggtgctccaagctcactttgtttgtcatctcgtactcaaatttcctttgccgaccgtagtaccagccgaacatgatcattgcaagggttatggaaaccgcgaaaggaagccaacctccttcagggatcttggtgaaaactgcactgacataggccccttccatgatgaagaaggggacgaagtacagcccagcaagcacaagtggtgttctccatatgatgatcatcacaagggtgagtaggactgtagttatgagcatgaccatgatgaccacaacaccgaaagcattccctatagccttgccaccaccaaatcctagtataacaccgacacacagtaccatgagaatgtaattgatttctggggagtaaacctcgccttctttgtgttgcgacgtgtgcaccactttaacacgagggaagtaatccaggacaactgattgcttgatgacagagaatgtcgcggatattaaggattggctcgcaacaattgctgctagtgttgcaacgacaaacattggccagtaaacgggacgaggaacaaatttatagaaaccatcaccaaagtcattgacattgtttataaggtatgctgtttgcccagcataagtgagcaccaaagaaggatatatgctagacagaaatgctatctgaatagcctttttgctgaagtgcccaagatctgcgaacatagcttcagcacctgtgatgcataaaacagtcccaccaagcagttgccaaccttgccttttatttctcaggaagaaatgaacaatataatacggtgaaatggctttgaagatgccaggatagtaatgtacaatactgtataagccgataattggagtggtgaaagtccatgctgccatgattggagaaaacagaaagctcacttttgaagtcccatacttttgcaataagaataagccaatgagaattgctgcagaaagggcctccacaacaggtttgctaacagtaggaaatggccctcttatcccatcaattgctgatagtactgaaatagcaggagtaagtatgccatctccaatgagcatgcacatcccaagtactgctacgaataacaaaactcttcttgcagttatgctctgttcaaagaactttcccagcctactaggccttctggctattgcagactgactgtgaagcagtggatcttcttctgcatacacccttttggaaggaaggatgcctatatcagcatgcctacacaacaaagaatacatggcaaatgtaccaccttcaccatgatcatcagcattgagagctatgcatacatacttgaccacaccaattaaagtaagagtccaaaacattatgctgtatatccccaggtagtcagcttctgtgggagatgacaagttcatagagggataaacgtagaggggagaagtgacgaggccaccaaaaacaacaccaagagtcttgtaagcaaggaatagatccttccaaacattgctatcatcggtctccctgccggccgccggaccgccgccttcgccgtcgctgcggggtcggattgaccccgcctcgagatccatactgcagctaccgtgtttcattcacataacacttttcagtttttggatagccctctccg

SEQ ID NO: 56089 - DNA, 438 bp, Oryza sativa
  Clone ID: PAT_MRT4530_58033C.1
atggggcggaggactgccgaggagggctggcgatggcggcggcctccgggagcgggcggcaacggcggcaagcctatggcgggcggcggcgagacctggggcgtggcgagcggccgacggctcgggagcgagctctccggcctcgggccggggaatgggaagaagagggatggccggagtcctcatctcgcgtccacgcacgcaccggcctccgacgcgtgcgacggcgaagagacgaaggcaagaggtgggagcggcggcaaggcgtcaacaatggcgcggtggtcgcatgaccagcgtccgcgctttggccacgagcggctgggaccatggatgacatcggcggtggggctgcctctctcggccttggaagctagcggcgtggagcggcggagcggtagcgcggcagggcacgacgcatgcggcgccggggtttga

SEQ ID NO: 56090 - DNA, 1185 bp, Oryza sativa
  Clone ID: PAT_MRT4530_58034C.1
ttagactcgggtagtagcacgagtagcctccccgtagctagctggcgccgccccgacctttgccgtcgctcgccgtgtgctcgccgctgtcgccgcccgagctcggaaacgcctctcgtcgccggcctccctcgatgcgtttcctcctaatccggcgcaagggacggattcccgtagccgcgtagatgctctcgccgccgggaatcggcccctcgtgacctcgtcgccgttttccccttttctctccgccggtggccgccgccgtcgagctccctccggcgaatccgagccgttggctcgtctcccctcgtatcgtacaaccacccggtgtgctcgctttcgcctgtatcgccgtgattcgctccgccgctcgccgccgccgcccgccgtccattcgcggccggcgtcttcgtcttgctccagccggcccgcgaggcagccacgtaggcgccacgtcggtgccacctcggcacaaccgagtcggctgacctggtcagccgctccctccgttccaccctccccgtgcgcgcggtccaccgcgagccgtgaggctgcgcgtgggcccgccgcacccgcgtcccccgcgagccgcgcgcgtgcgccgcgccccgcccaaaccctagtgccgcgtcgcgtgctccctccacacggtgaaccgtgccgccgacaagcgggtcccacccgggaccacgcaagtttcggagcccgaagacccgcagtgcgaggattttgaggatcaagctcaagatctcgagcaaggcaatggcgagcggccgacggctcgggagcgagctctccggcctcgggccggggaatgggaagaagagggatggccggagtcctcatctcgcgtccacgcacgcaccggcctccgacgcgtgcgacggcgaagagacgaaggcaagaggtgggagcggcggcaaggcgtcaacaatggcgcggtggtcgcatgaccagcgtccgcgctttggccgcaagcggctgggaccatggatgacatcggcggtggtcgggaaaaaggggaaacgaagagggaaaggagggcttgacccttgccgaaacgggaaaaggaggagggagaggggagtgagacaggggctgcctctctcggccttggaagctagcggcgtggagcggcggagcggcagcgcggcagggcacgacgcaggcggtgccagggtttga

SEQ ID NO: 56091 - DNA, 1156 bp, Oryza sativa
  Clone ID: PAT_MRT4530_58035C.1
atgggatcaactttaggagtcgacgactttgccttccctctagggctggtctaacgcttcaataacttcgacttcatcaccgacgaattcgccaacatctctcttctcgattcggattcgaaccagtcagagagggatcgtgaccactcggtgtcgtttggtttgccaaacaccgtcgagatctactccaaggttttcttctccgggttggcctcgaactactcaggggaatcatctacatcagcatgcctttgtggactctccaccagagccaccacgcattcttagatcgccatgcgagttcctttgctccttgccgatacgttcggttccagatccatttccccccggaggtcccgatctgaacaagctttggctttacccggattgggcttcagtgaggtgttcgtcatgctccaaccactttgatcctgttcaaatatggagattgtcgactttcttagctcctctgaggactacgacgatcacaccactaaaagcatgggaagttcggagttcaatgacgactatacccccacttctttttggtgtattcatggcagatacagtcgacgaggaagctcaagcatggctagccagcgaagcagaggaagaacgcataaggcttgaagaggagcgcaaacacagggaagaagaagaacgcaggaggcgaaatctagctcatgtctgatgagccgctcacaatgcaattatctagacccgagtcgacaacaccaacgtcttcgtcacgcctcaacagaacgcggtcacggcaattaccctgttcgacaccatcatcgacaaggctccaaccaatgtgacaccaatcatgaataaagtcaaggccatgatcgccaccactgtgcccatggatgctggaggcagccgttggcctgatgaatctaccgtagaaacaccagtcggaacccatctcccacctcttcattccagagattattgggtccccgaacgcagtagagggcatattggatctaatttgcatgttctcaacagcgaaagccgacaccaacacgacccgccaagccgccaccgccgcgggaggccgacgacgaccaccggattcaggagagggagccaccgccgccgacgcagaaccagcggctccagctgcagctccgcggggacggacagagcc

SEQ ID NO: 56092 - DNA, 1831 bp, Oryza sativa
  Clone ID: PAT_MRT4530_58036C.1
atggagctcctccctaccgtgaggcggagggaggcggtgcgggcggcgcacgtgcggcggatcgaggcggcggcgtggttgggggcgaggagggcgacccggagggaggatgcggcggcgaggtgcgcggcggccggggaggtggtggggagcgccgctggggtcgggaggagcgccgggatggaggtggcaatcgccaccgcggcggtcgtggccatgggtacggggaaccgcgtcctctacaagctcgccctcgtgccgctccgcgactaccccttcttcctcgcccagctcgccacgttcggcctttgcgatgggtgcctggtgttgggggtccacttgtctgggagaataactggacgagattttttgcttgttaatatctcaattcctgtacggctatgcgctttttttctggtgggtggtcgagctcgtgagctggccttccaggcctcttggaggctttatcagcagcatcagggatggctgctggagacgtatcttgtttggcagcttcttttatctgctatttttttgaagaggcgctatagaataaatgagataactggatgctttcttgtgacggttggtgtaataataactgtagcaagtggatctagtgctggtgcttcattaaaaggtactggaattttgtggccactgctcatgataatatcgttctttctccaagccgctgatacagtattgaaggagataatatttctgaatgctgccaagaaattgaagggtggctcggttgatctttttgtcgtcaactcatatggctctgcttatcaagctcttttcatgtgtctcttgttgccattcttgtcaaagttatggggagtgccattccatcaactaccaacatacatcagagatggcaccgcctgctttctgaacatgggatcactatcttctggctgtgaaggggcaccactattaccactactatttgtgttggttaatatgggcttcaatatatcacttctacacttactaaagatttcttcagcagttgtatcttctctggcctctacattttcagttccactgtccatctacgccttcaccctaccgttgccgtacatcggtgtggcgtctactctccctcctggctttgttgcaggcgccatgtttctagacgggacaagaaccagggagaaaagaaggagcatcatcacgacggggatgaagagcaagaatggcggcggcggcggtagcggcggcaacaccaatgggagccacaggaggatcaccgccgccgccgccatcaacatcatcaggacgctcttgtccatcttggcctcccctgcagctgttgactggactgcctcctccggccggaggctcaccggttgctccactctccggtgttcatccgtcgacttgtgggtcccttctctgggacgtcgaggattcaggtggtccccgggggtgcggcagggaggccatgaccccgacaagcatcgcgtgatggggatctagagtgcaaattgcaatgcctcctggcaattggagaaaacaccggccaatccggttgctggatttcagtatggctcaactcagtatctgattgaaaggtcgacttgggtatgagtttttagacttggcaaaaaaactcgtgttttataatttaattctagaagatagcttatgcataggtgggtatatttaattgtcaaagcgtgtcagtgtaatacaattgttcaatctttgttttgatatgtgctaggatgcacatacgtgagtgttgtattggcgtaaaagtgtactagcatgatgcgtgtgtctcacttaacactcgaaagaatccgatcaattttagaac

SEQ ID NO: 56093 - DNA, 1089 bp, Oryza sativa
  Clone ID: PAT_MRT4530_58037C.1
atggcgcttgacaccctgtgcagcgccggcggcgacgtcctcatctacgacacgttcaacgcctccgccgcggcggcggcggcggttgtgccgccggcgagcttcctcttcgggaataataatgccggcggcgcggcggggacggagacgagggtgcaggtggcggccggggcggtgccggaggtggaccagctgctgaagcaggctcagcagccggggaggaggaagcggcggcggcgggcgaggagctgcaagagccgggaggacgccgagagccagcggatgacccacattgccgtcgagcgcaaccgccgccgccagatgaacgagtacctcgccgtgctccggtcgctcatgccggagtcctacgtccaccggggcgaccaggcgtccattgtcggcggcgccattgatttcgtgaaggagctcgagcagctgctgcaatccctcgaggcgcagaagcgcacgctgctgatgcagccgccgccgccaccgcagcagcagcgggagcccaagtgtgatgccgcggactccacgagcgcggccgatcaggagactccggcggcggcggcggcggcggcggcggctgatggaccgccgttcgcgcggttcttcacgtacccgcagtacgtgtggtgccacaacccggcgcaggacggcggcgggggcgggggcgcggcggcggagaaccgcgccggagtggcggacatcgaggtgagccttgtggagacgcacgccagcatccgggtgatggcggcgcggcggccggggcagctgctcaagatggtcgccggcctgcaggcgctccggctcaccgtcctccacctcaacgtcacggccctcggctcgcttgccctctactccatcagcgtcaagagattccatggcggaaaggccattgcttcccttggccccttgggtgtgttctttctctgtgctctgtatctgtggtacagtactacagtggtggaggaagggtgcggcatggcgacggtggacgacatcgcagcggcggtgcaccacgtgctctgcatcatcgacgccgaggcggcgtcgcagatgctgctcgccggggaggcctccggttag

SEQ ID NO: 56094 - DNA, 537 bp, Oryza sativa
  Clone ID: PAT_MRT4530_58038C.1
ctacgccttgacgaagagggtgtactcgacgatggtctcgccggacttgaagccggagtcgacggtgcgggcctcggcgtaccccctcgccatgcggaacttgccggagccgccgacgacgctcatctccctcaccggcgacatcacctcgttccgccccatgatcgccaggctgctgccgttgtggtcgccggcggtgaacacgaagttcatgtccatcaggaggccgatcaccctctggtcggcgaacgtgtacgtcccctgcgcgcgccccaccacctcccccgccgccgccgccgccggcgagctcgtcagcgggtcgtcgatggccaccaccgcgccgaagtaggtcgacgacgcgttcgtcgacgccgcctgcgccacccggatcgccgtcgggttcggccccgccaccacgtcgtgccagtacaccttgatctttgtcatcccggcgccgccgccgccgccgtcgtccatcgcccacgccaccgccgccacgcacagtaacagaagcagctggagagccgccttcgccat

SEQ ID NO: 56095 - DNA, 213 bp, Oryza sativa
  Clone ID: PAT_MRT4530_58039C.1
atgcagctcgacattgttgccttcctgtgcagggtgaagcaacaggtcctcatggaccgtatggtcgagctcgtcagcgtgctgacagccacaagctcgagcctcgaggatggcatccggttggcgttcattggaggaggaagaagagaaaggagaggggggctggaggtggaagaaggagagggcacggctggcctcaagtcaaccatgtaa

SEQ ID NO: 56096 - DNA, 246 bp, Oryza sativa
  Clone ID: PAT_MRT4530_58040C.1
atggcgccggtcatcgacaccaatgcactcatgcaattcctcttttcagtttctttattttacatcccggacctcatgattgattggatcgacccactcacaaacaaatcaacattcaagatcaaggacacaacaacatctttcgttgaggaaaagaaaaacgagctagagaaagccaagagcaaattaaatgtgatctcttccaataaaatttgtgatgttccaatggtggagtacgcaaattaa

SEQ ID NO: 56097 - DNA, 1670 bp, Oryza sativa
  Clone ID: PAT_MRT4530_58041C.1
ggcctttttttttttttttttttttgcatgtcaagccatgaacagttagatttagaaccttcccatgtcacagttcaactcagaacaagattattcggtgatcaccaccgctgggcagctaaaaacacaactttgccgaccaacgaaggcagcacagcactcagcataagcacacatgaaaggaatgacaaggaaagctccgagtgtaaacaccaaaaatctattgtaaagctcacaggaccagtacttaaacggcatggtaaccaattggcaagcatgaaacagtaacgacagggaccgatgaagaaattccatccctctttacatccatgttgaaactcggaagtaaaagcataagaagcagttgaatctggagctcaggtctcaggagcaacggctggtggcggtggcggtttatgctggagaagaggggagagtgccttgaccacaatgctcatgcttggtctaaactcagactcgtattgcacacagagtgccgccaccgctgcgagcttggcaaccccttttgggggatactcgcccttcagtctcgggtcaacgcattgtttcacagtgtcctctgtcaaacgaggtgttgcccatgtaaccagactctgctgacccctaggcattgtgtgatctactggtttccttcctgttagaagctctagaagaacaactccaaaactatatacatcacttttctgagtcaactggccagtcatggcatactcgggagcatgatagccgaaggttccaaggacacgagttgagtgcaaacgagcagccatatcaggagactgatttgaaggattgaaatctgcaatttttgctttgtagtcctcaaatagaagaacattgctagagcgtatgtcccgatggactatagaaggttggaccttctcatgaagatattctagccctttagcagcatcaatagcaattctcactcgctgcatccagtcaagtgctgggccaggttgtgcaccagggacaccctttcttccatgcaaaatatcatgcagagaacccatcgtagcaaattcgtaggccactaggcgctgatttccttccacacagtaaccaagcatttccacaaaattttcatgtcttaatcttgacacaatggacacctgtgtcaaaaaatcattatcaacctcaggttctgttgaagcatcaagctttttaacagcaacttgctttccgttgtctagagtagcataatacactcttccatatgatccttcaccaactaaagcctttgaaccaaaattatcagttttctctttcagttcatcaaatgataattctggtacttcaatgggaggaggtgcttttgtgggatcatcacttttgggagcaaaaccatttccttctttctcctctgggatgtcaggaaattcattttcgtgttcacgatatggtgcgtgaaacacccaagcaagtgaactatcattttcatgttccatttttatgttcttttctgggtttctgccgttcatcctacgcatccgcctgtctaattctatgcatggccaaccagactcatccgtcacaccaattgaatcatcatgttcagtgtctaccgctacctgatgaaccaatgacacaaaccaaaaggaaatcagaaacaagaggtggcctccgggaatcaacaaaaacatgaccat

SEQ ID NO: 56098 - DNA, 399 bp, Oryza sativa
  Clone ID: PAT_MRT4530_58042C.1
atggagttgctgaggagcatcagctactgcattcctctgcctcagatggagtcgctagggatgttggcggagtatgcagcggcgaggttacatctcggcgagttccgcatgccgccaccacgacagcagcagcagcaacaaggtcagaccgtgctcgatttctcccaagacacgcacggcgcgggtgcaggcggcggctccggggtgttcggcgcgtgcagtgctgggttgcaagagagcgcggtgggcatgttgttgttccccttcgaggacttgaagccggtggtgagcgctgtggctggcgacacgaacagcggcggtgatcatcagcacgacgacggcaagaaccaaggtggcgatggcggcgtcatcggtggccatgagaccacagggttctag

SEQ ID NO: 56099 - DNA, 324 bp, Oryza sativa
  Clone ID: PAT_MRT4530_58043C.1
gggaacaaaaaagtaaattttttaattgaattcccagggttaaacccttttgacatgctttcagggtcaaaccccaaacattctaaaaaaagctccccccgcccaaccccaaagagaaccgatttttaaaaaaaagggactggccaaaccaatgatccctttttgaaaaccaaaagtccaaaaaacctttactggtttccgcacattttaccagacacaatcaggtaaacttttagctttcctatgaaaccccctccaagtcctaaccaaaagccacggggaaacctccaagggaacctcaaagggtcttgaattgccctgatt

SEQ ID NO: 56100 - DNA, 192 bp, Oryza sativa
  Clone ID: PAT_MRT4530_58044C.1
ctaagggttggttggtttacttgagcgtgtaatgactggaattagtaccccggaagtttatcatcacttgtttggtggatgatttaatgcagatatcactgttatcattacatttggacatttaaaggtagtagaatgccaagaggaaaaggtatttcatgtgtgccttcgtaaaaaaaaaaaaaaaaaaaa

SEQ ID NO: 56101 - DNA, 2151 bp, Oryza sativa
  Clone ID: PAT_MRT4530_58045C.1
tcaaggtgaatcgtgatccgccgatggctcgacgtcgacgacgacgcgtgggtcttgccggtatatgtacctgctcgcccagtagaggtagttgacgaagccaagcagcccgacggcggcgacgacccagtagaagaggtcgaggcggctggtgttgagggtggcgccctcgagccacccgccgccgccgccgccgccgtgccgcctcgtggccctgttcaccacctgcaccagcagcgtggcgagccacgacgagaggccgagctcgcaccagaacagcgccgacgcgatggacttcatgccacggggcgcctcgctgctgaagagctcgaggaggcccgggaacgacgtcacgtcggagacgccgagcaggaagaactgtggcgccagccagaacagcgacatctgccccgccgccgcggcgtcggcccgccgcttcctctccacgacggcggcgatggccgacgccaggatcacggcggcgaacccggcgccgacgcgctgcaggtgggtgacgccgctggcgtagcccgtgcgccgccgcaggagcggcacgaggaagcggtcgtacaccgggagcagcgccatctggaacgcgctggggatgatgaagagcgtcgccggcgagacgtggatcctccccagccgggtgttggtcaagccgccctgctgcacggtgaaggtgaagaggagcgggttcgacatgtagccgatcagggagctgatgaagacggggagcacgcggagcacggcctttgtctcctccacgttcttcgtgttcagtagagcctccttgctcagtgcttctttcttcctgtgcttcttccagcttctcaggaagttgaagcttcttccttcgggtacatggttgcggtacaaagggagaccagcagcaaccacaagcagcccaagcaggatcaggaacgcgcacaccccaaacccgacatcccaccctttgctgttctccagccaaactatgaggatcaatcctatgaaacccccaaaggagattccgaaggtgtaccagttgaagaagctggactgctggcgggactcggaggggtcttcatggtcgaactggtctgctccgaggggcggcatacaagcacgcatgaagccatcgccaaaagcgctgatgtacagcgcgtagccccttttcttgttggcatatctcctagcccagaatgcataattgataaatgccaccagctcgaaggttgccaataacaagaagaagcgatcaaggcgtgtcctgttgaagtttgttccatctaaccatcctcttccattgtctccaagccttgtcattctgttgacgagctggacaaaggcacatcctgaccaggctgctattccgaccagaagagactgcactgctggtgcaatatgctttgcttcaggtgcctcgctctttatgaactgaaccagcccaccaatatatgctatatccatgatgcttagcaggaagaactgcatcaccagccagaagacggacattgggacaccgtcagctactaatgttagcccttgctgctccacgaccatcaacctctttgcttccaccaacatggcaatgcatgctgccattatcccacacgcagaggcaacaccgatgtgctgcagaggggtgataccattggtgtggcctgtgaatatcctcagcagtggtatcaagattctcgtcatgagcaatgtgaagggcaagtaggcgaatatgcagctgatgaagattggaagcatccgagtaatagcctctgttttctcatcaactcgagtagtgcaaatatttttgctgtcacatttgtcttccccgtcctcatctacatgatctgatgtactgatctcttgcagctcaataacatgaataacagcagcctgcctcttctttgatgatgtgacaagaacctgcaatattctagttagaggacttccattgagcttgcgcattccatagaaaggcagtccactggctgctatgagcagcctcttctcgtagccatcggtgatcgccatcccggtggatgcgcggccgatggccggtagctggtggcagcgatcggagagagcggggagaaatccggcgaccggccggaattccatcatctccacggagaagctaatgggggtgaagagaccggagggcaagggcat

SEQ ID NO: 56102 - DNA, 1257 bp, Oryza sativa
  Clone ID: PAT_MRT4530_58046C.1
atgcgtgcttgtatgccgcccctcggagcagaccagttcgaccatgaagacccctccgagtcccgccagcagtccagcttcttcaactggtacaccttcggaatctcctttgggggtttcataggattgatcctcatagtttggctggagaacagcaaagggtgggatgtcgggtttggggtgtgcgcgttcctgatcctgcttgggctgcttgtggttgctgctggtctccctttgtaccgcaaccatgtacccgaaggaagtccgctaactcggatactccaggttcttgtggttgcattcaagaacaggaagcttcaacttcctgagaagctggaagaagcacaggaagaaagaagcactgagcaaggaggctctactgaagtaactgaaatagcttctcaaacaaacagtagtctgaaattccttgacaaagcttgcatcaatggaggcaaagacggggcctggtcagtctgcagcacgaagaacgtggaggagacaaaggccgtgctccgcgtgctccccgtcttcatcagctccctgatcggctacatgtcgaacccgctcctcttcaccttcaccgtgcagcagggcggcttgaccaacacccggctggggaggatccacgtctcgccggcgacgctcttcatcatccccagcgcgttccagatggcgctgctcccggtgtacgaccgcttcctcgtgccgctcctgcggcggcgcacgggctacgccagcggcgtcacccacctgcagcgcgtcggcgccgggttcgccgccgtgatcctggcgtcggccatcgccgccgtcgtggagaggaagcggcgggccgacgccgcggcggcggggcagatgtcgctgttctggctggcgccacagttcttcctgctcggcgtctccgacgtgacgtcgttcccgggcctcctcgagctcttcagcagcgaggcgccccgtggcatgaagtccatcgcgtcggcgctgttctggtgcgagctcggcctctcgtcgtggctcgccacgctgctggtgcaggtggtgaacagggccacgaggcggcacggcggcggcggcggcggcgggtggctcgagggcgccaccctcaacaccagccgcctcgacctcttctactgggtcgtcgccgccgtcgggctgcttggcttcgtcaactacctctactgggcgagcaggtacatataccggcaagacccacgcgtcgtcgtcgacgtcgagccatcggcggatcacgattcaccttga

SEQ ID NO: 56103 - DNA, 285 bp, Oryza sativa
  Clone ID: PAT_MRT4530_58047C.1
atggactacgccttaaattgcaagccttatgcaaataagtttcactcaaagtcttatctggtactagaagactacccttcgggtggacgtataagtcgtactccttggtctcttattaagcttcctagaagattcacccaaaatctccatagactgcgaccaacagtcaagctcacaaatgttcccgacagctcggtaggaattttgatgtgggaccaaaaccatctgaaagtagactccataagctttccaacaaatactaatgggccccgaaattccttctag

SEQ ID NO: 56104 - DNA, 535 bp, Oryza sativa
  unsure (1)..(535): unsure at all n locations
  Clone ID: PAT_MRT4530_58048C.1
ccagtataatgacaatngataaatantaaaaatccancatcatcaanttacaaatacntnaactgcaaaactggcaaanttaacaacaaaatgatcgtntntatantaccactcttatnccacttgtctcaccccacaaacaaacaaatacttctnagggacaancaaaggcaattacttcncaaaataaaataaactcantntcanctctccactctccagggatacnggtaaatacaantttnccaatcagtgagcaatcaaaaacncttgcttggtnttggagcagcagcaccaccaaaacccgtcccgccntcntnttcatcgnnangggntcccatgccttgcccccggtgttcnctgcattccatcntgtttggaactttnccccccgnggntggaaccgttcccnnttttggacccttgcttncnaaaaantgccccctntgccaaatncngggaaacnnnttgccaattcccngggcccgggggntncccttttctnaacnncnccccngggggganccnttttttn

SEQ ID NO: 56105 - DNA, 783 bp, Oryza sativa
  unsure (1)..(783): unsure at all n locations
  Clone ID: PAT_MRT4530_58049C.1
caatcctttctcccttctgtgttccatccctagtccccacgccggcgccgactcccgatctcgcaaggccaccgtgcgtctgccgcgtcggcacccgtgcagggttgccgactcgccacgccctcgcccgcgcagggccgccgggtcgccgcgcccgcgctgtcacgtcccggcgcgcccgcaccggcaggtcccggtgcgcacgcccagggccgatgggtcgccgggccgccacgtcccgggggcggcccaccaggggcaaggggaaaacgaccaccaattgctagatggggcccagggtaaggcttcacaactcccggggaagggaggggtcacagaagaaaaaaaactgcacggagggggagggggggaaaaaacattgccccgggtggaatttaaaggggaagggaggagggggaaaaaaaatcatccagggaagagggggatggggggtggaacacaaccacaaaggaaaaccccgaaagcaaaaacttcgtggggagggggaagggggggggaaaacgctcgacaaggaatcccagcgtcttttttcgtttcgaaaaaaaaaaaaaaaaaaaaacattacctagaaccaaaaaaccacaaaaactaaaaataaaatcaaaaaaaagaattaaaaaaaaaaaaatttaaataaaacngttaaaaaaaaaaaaaaaaaaaaataaaacacacaaaaanaaataaaanaaattttaaaaaacaaaaanaaaaaaaaaaaaaaaaannncnnnnaaaaaaaaaaaaaaaaannaaaaacaa

SEQ ID NO: 56106 - DNA, 460 bp, Oryza sativa
  Clone ID: PAT_MRT4530_5804C.1
atattgccaggtgtatcagctgcactaccactagagtttgtggtggacgcgttgctgcaacgtcattggttggaacatgttttatctactaagacatgtttagaactataatcccgagcctgcttcttgactgccaataagggtttcattggggtctcagccgatgaggtatctggatgttacatcagcttataaggattgcatccgattggtttctattggattatattgttgctttcttgcattatcatcagtcgtttacctttatattgttatttacacatcaagcgtcaaaatctacatcagaattatagccgatagctcaaaaccctattactatcggctgagtcaaactgactggcacgcccgcatctcatcaacctttggtcctgcactgaagctaagcagatctccagggcctcctcccttctatgccactggttcaagtttaccctcactt

SEQ ID NO: 56107 - DNA, 369 bp, Oryza sativa
  Clone ID: PAT_MRT4530_58050C.1
atgtgggaaggcggctcgccggagtgggcaaccgaggccagtcggggctgctcctcctcgtccgcaaggagcgacgcgctgttggggaccgaggcgctgctccaaacatcgatctccggcaccgctccatggtctgcgagatcgaggaaggctcgttgtcagcttcgtggccggctcgtcgttagcttcgtgggcggcggtggtgccccgggcgcggaggcggcgtcaggcggggaggaggcggcgcagcgtcgggcgtggtcggagaagggtgcggcgtggggcgaggaggaggcgccgctggcgtcgggcgaggagggcggcacggcgtcgggcggggagggcggcgatcggccggccagagggtag

SEQ ID NO: 56108 - DNA, 2514 bp, Oryza sativa
  Clone ID: PAT_MRT4530_58051C.1
atggtaaaagctgtgatgtgccaattattttgtcatgtactcaatggtctactacacgttgggccagatagtgggctgcagaagaaatgggcttggcccaggtcacatgccaggggagcaagtcaactagcagcactacaaatatatgcccttcagccaaggaatagggcattgatgaagaatcaacacaacgaaggcattcgcctcgtctcctctttccggctgctttttgtcggccccggtttcaagagactgggaaaccacatgtgttcacagtaccagctccccaaatcggtggtgcctgaatactgcccctctctcgatgacgatggtgtctgtaaaacagcttttgagcttatatttgcttttgacgaagccatttctcttggaaataaggaaaaagtaacagttcaacaggtcaaagaatattgtgagatggatagtgttgaagagatggatgaagaagatgcgggaattgtgagaatggtggatgttatgaagcgaaagttccaagattattggaatatttcatgcttaactttgtctgttcctgtgattttagacccatggtttaagtattcatatgtgaaatttcgctttgtgcaagcttttggagatgtggccaataataagttgagcgaggtcaagaaggcaatcgaacaacttttctctgatcattcaccaaaagtgaacgaccaaaacaatgaattgactggtggaagaactgatattgaagcaggcattttgcaagagaatgcacttctcttgagatggtcttatcacaggaagaaggtgtgtaacttgtggacttgggctgtaaatagctcagggaccgacaaagtggttcttgctgcttctatcatctcaaagtcaggaaaagcacttgtttctagacagtatgttgacatgactcgcataaggattgaaggattacttgcagcattccctaaacttgttggaaatggaaagcagcacacttacattgagactgaaaatgtccgttacgtttaccaacctattgaaggcttatatcttgtagttatcacaaacaaacaaaatctgcattcacctcttacaactaagggtgtcatatgtcgagagcttgatttatccgttaatttttatgaatgttgttatgcttttgttgtttcctatttgttggcaactatccacagtcatggtctccttaaccttaacaatgtaaaggtgcctgaatactgcccctctctcgatgacgatggtgtttgtaaaacagcttttgagcttatatttgcttttgacgaagccatttctcttggaaataaggaaaaagtaacagttcaacaggtcaaagaatattgtgagatggatagtgttgaagagatggagtacaagcagatgatgcaagagaaaatcaaggaaaccaaagattttatgaagaagaaagttattgagattgagaaaaccaggatggagaaaggcaaacataacaaaggaggatactcatcaatatcaggtccccaggtgattgaaaaatctttcaatgacatgagcattagttgtactggatttggaagtggttctggattaggtggattgaacacagatacagacacatttactagcaggcccaaaggtcgtacatctggaggtactacaggtgctggtaaaggcattggaatgaaattaggaaatacaaagaagacgaaccagttcttagaatcattgaaggctgaaggtgaagtcattatggaagattttcaaccatgttctcttcagtcaaggtcatcgcctctaccaccgagtgatcctgtcacagtggctgttgaagagaaactcaatgttgcagtgaaaagagatggtggtgttaataattttgatgttcaaggaacacttgctctgctggtccttaatgatgcagatggattaatcctgttgcagattgaaagccaagatattcctggacttagtttcaaaacacaccccaatatcaacaaggacttgtttaacagtcagcaaattctgggggcaaaagatcctatcaggcctttcccaagtggtcaaaatgaaactcctctagtgaaatggagaatacaggggatgaatgagtcatctttacctctatcagtcaattgctggccatcaatattaggaaatgaaacctacgtcaacatcgagtatgaagcttctgagatgtttgacctgcacagtgtcatcatatctatacctcttcctgcacttcgggaggctccacgtgttagacagatagacggagagtggaagtatgattcaagaaactcggttttggaatggtctattatccttattgatcaatcaaaccgcagtggatccatggaatttgttgttcctccagctgatccatcaatgttttaccccatatccgttggattttccgcatcgaatactttcagtaatgtgaaggttactggaatccgccctttgaatgaaggtagcaaccctccaaagtattcgcagagggttcgtttggttgctgataattatcaagtggtttaa

SEQ ID NO: 56109 - DNA, 228 bp, Oryza sativa
  Clone ID: PAT_MRT4530_58052C.1
atggtggtggcaagacggcgggataagggtgtggaggtggataagttatttcttggcaaccgtcgctgcaccggaatagggacagggactgcaaggaagaggcggaaggaggaggcagtggaaaagcaggagaaggaggttgaggaggaggcacaatggcagtgctccatcatgaagcaagtatggtacctcatagatatcaggttgatacttgagcatcatgcctaa

SEQ ID NO: 56110 - DNA, 390 bp, Oryza sativa
  Clone ID: PAT_MRT4530_58053C.1
atggcgacacgggacagcggcggcgatgctcagctacggcacccggcagcggcggcagcggctgcgcggctagggcagcagcaacggcgcacggcggtggcgcagcagggcggctcggctgcagtggcagtagcggcagcggcgcggcggcagcgggcggcggtacacggcacgacacacagcagcggcggcgccttggccggcagcggtgctagggtttaccgcggtgacacaacaacgcgacaaacactcggtcatgcggttagggttaacgctaaacgatcaagacaccatctaaataaagaagggttggaaaagatttctcaccgaggaaaacaacggcaacggcaagggtttggaacagcggtgacggtaaccctgcgaggatga

SEQ ID NO: 56111 - DNA, 732 bp, Oryza sativa
  unsure (1)..(732): unsure at all n locations
  Clone ID: PAT_MRT4530_58054C.1
ccacgcgtccgggcgcgatcaggaggaagaggaggagagggagccctagccctgcccccagccggcgcaggcggtcgctagggttagggtctccccccgcccgcgccttccttccttccggccttttcccgtcccctcacctgcggcgtgtgcgcttttctcggcctcgcggcggcgcggcgcggcgcgagccaatgccgtgtgtctgagtctgacccgttgattcttggcggattgatctggaggtgggcttgttggggttgctgtggtagccgggagggaggggaagcggcggcgtttgtttctgaggatatttttggtgcgagatccggcggggcggcgagatgcagcaggatcagcgcaagaagagttctacagaggcggattttttcacggagtatggcgatgcaagtcgatacaagattcaggaagttattggtaagggaagctatggggtggtgtgctcagcgatagatgtccacactggagagaaagtggcaatcaagaagatacacgatatctttgaacacatatctgatgctgcacggattctccgtgagatcaagcttctgaggctgctaagacatcctgacatagttgagatcaagcacattatgttgcctccatcgaggagggatttcaaagatatttatgtagttnttgagcttatggagtctgatcttcaccaagttataaaggctaatgatgacttgacgaaagagcattatcagt

SEQ ID NO: 56112 - DNA, 3128 bp, Oryza sativa
  Clone ID: PAT_MRT4530_58055C.1
ggtatccctagccctgcccccagccggcgcagggggtcgctagggttagggtctccccccgcccgcgccttccttccttccggccttttcccgtcccctcacctgcggcgtgtgcgcttttctcggcctcgcggcggcgcggcgcggcgcgagccaatgccgtgtgtctgagtctgacccgttgattcttggcggattgatctggaggtgggcttgttggggttgctgtggtagccgggagggaggggaagcggcggcgtttgtttctgaggatatttttggtgcgagatccggcggggcggcgagatgcagcaggatcagcgcaagaagagtcccccgcctgctcgcgccggacgaggccccccccctcctctcgctctcgcgccctcccccccgtggccccgcgccgccccttcccctgtccccgtcctcgctctcgtgctccgcgcgcccgggccccgccccctcccggcgcggccggccccgcgggtgaggccctccccccgcccccgccccccctccttcccccccatggccgtcaagatgcggatcggacggcgaagagcaatccagcagggtattgctgaggggggattcgagtggcggcgcgtttggggttgtcgcgaggcggattcgaggggggcgctgtgggagttggtctggggggagagatctgtaagggagcggaatgcagcaggagcagcggaagaagttattgcgttgttcatcatggacgaaatgtgcgatccagctagcaatctggagtatgtggttgaaaaggccaaatgcgatgtgcaccgaacgagctctgcggaggagttttttacagagtatggtgatgcgaaccggtacaggatccaagaagtcattggtaagggaagctatggggttgtgtgctctgccattgatttgcacactagacagaaggtggcgatcaagaaggtgcacaatatctttgaacatgtctcggatgctgcacggattctccgtgagatcaagcttctgagactcctaagacatcctgacattgttgagatcaagcacattatgttgcctccgtcaaggagggatttcaaagatatttatgttgtttttgagcttatggaatctgatctccaccaagttataaaggctaatgatgacttaacaaaagagcactaccagttcttcctttaccaactactccgggctctgaaatacattcatactgctggtgtttatcaccgtgacctgaagccaaagaacattttagctaattccaactgcaaactgaaaatttgtgattttggactggcgcgagttgcattcaatgatactccgacaacaatcttttggacggattatgttgcaacaagatggtacagggctccagagctctgtggatccttcttttcaaagtatacaccagccattgacatttggagcattggatgcatctttgctgaggtgctgacaggaaagcctttatttcctggtaaaaatgttgtccatcaattagatttgatgactgatcttctgggcacgccatccatggatacaatttctcgggtccggaatgacaaagcaagaaggtatctgagtagcatgagaaagaaagatccaatcctcttttcgcagaagtttcctagtgcagatcctttggcgttaaatctcttacaaagactattagccttcgatccaaaggaccgtccaactgctgaagaggcattgactgatccatactttaaaggcctttccaaaattgatagagaaccatcatgccagccaatcacaaaactggagtttgaatttgagcagaaaaaattgtctaaggaagatataagggagctgatattccaggagatattggaatatcatccacaattgcagaagaactacagaaatggaagagagagagcaacctttctctacccaagtgcggttgatcagtttaagaagcagttctctaatcttgaagaaagcaatggaagtggctcagcaattccaatggaaagaaaacatgcatcgcttcctaggtctactactgttcactctactccaattcctcccaaggaacaacctcttgcggcctcattgaagagcagcaggcctgtctctgatgaaccttgtaaaaacccctgggtcatgggaggattttctggaaatattcccacttcttctcaggtttcacaagtggcaaaaccagtggcaccagggagacctgttgggtcagtatttccttatgagactggaagcaccaatgatccttatggtccaaggggaccagtgatgagttcagggtatcctccccagcaacaaatctcacaagcatatggttatcatcaagtgcctgcaaggatgaactgtgttgaacaatcacaagccatggatgcttataaaatgcattcacagtcacagacgcaggcctatgcttatccgaacagcaaagtcacggctgatgttgctctggacatgagaggatccacgttccatcattcagcaggatcaaagaacggctcgttagatagaatggtaacacagactgacagtatacacaagatctcttaacggtattgttgctgccgcgacttccggcatggcgttggtactaacagaaaggttggtgctgtacccatcagcacctcggagagatgtattagtagtggctaacagcataaattgattggcatatattggatttcgttgctggattggctcctaattatttaccagccaccagtaataaacggagaagtttgcctggaagatggtcagatggatgaggacgactattagaggtgattcagtttgacctcttccacttgttgtttcacctgatcagctaaggtacaattgtctttcttctctgtgcaccagacaaacaacagagatgtacccagcgacgtgctctttcttgctaaattacaaagtactacatcacacaggtcaggaccagtggcttgtaatctgagcatattttaggcgccaattgtatttctagggtgaggggacaaaagggaaaggaaggaccactaaccttttcctcttttttttttctttttccaatgttgtatagagatgtttctcatatcaaaagtgctacatcagaatgacttgagaaagatataaagcagacaattgcgcggttt

SEQ ID NO: 56113 - DNA, 759 bp, Oryza sativa
  Clone ID: PAT_MRT4530_58056C.1
cccacgtgggctccacatgtcattctcagccccccaccctctttacatctccagcggacggcggcggcctgtgaaggatggcggtgaagatggtgttctccaactcggcccagaacggcggcaacgcggatgctccagatgccgccctcagggccatacttcctcttgagcacctctagcacgatgtgcgacggaagcagctcgtttagattcccgaagaccgacgcgaactcagctggaaaccaccaacacggaaggagcctgtctggtcggaggtcgggtcgagccatcccgatgtgccccgtagcagcagcaacatcatcgacaccattgctggcaccggcggagggggggggggtccttgggctcatcgaagccatcatctccggggggcttgccttctgccagccaccgcgagatgtcgggtgaccgtagagccgtgagcgttgaggtcaataccgccggtagccatcaaccgtctagatctcgcgggatgcaccggattccttcgcccccaccatcgtcggagggatgggctcctcactcttcggcgagtcggcgcggcggcggaaagaagctcgcacgcccatccaccatcgtccttggtgagtcttattgcgacaatgtgccatctcctccgcctcttcctatcttctccaggcgcaccatgctcaatggcaacatggctaccatagctcgctaggatagaggccgaggtggagctcgttggatagaagcgtcgatagaccttggcagctg

SEQ ID NO: 56114 - DNA, 200 bp, Oryza sativa
  Clone ID: PAT_MRT4530_58057C.1
gagagtgctgggcttatcagctcagaagtgagagggaagaagaaactgagtttgatagtttttgataaggaaaaagtatatttggactccctcaactaccgcctggagtatgattcatatcctccaaccataaaaccagatatatcggctcctccaactatcaaaaccagtacaaacaatgtccctcgatggttttcgag

SEQ ID NO: 56115 - DNA, 2747 bp, Oryza sativa
  Clone ID: PAT_MRT4530_58058C.1
ttagggtctccccccgcccgcgccttccttccttccggccttttcccgtcccctcacctgcggcgtgtgcgcttttctcggcctcgcggcggcgcggcgcggcgcgagccaatgccgtgtgtctgagtctgacccgttgattcttggcggattgatctggaggtgggcttgttggggttgctgtggtagccgggagggaggggaagcggcggcgtttgtttctgaggatatttttggtgcgagatccggcggggcggcgagatgcagcaggatcagcgcaagaaggtgggctttggttttggctcgggagatctctctctcttggtttcgagcgttctttgcttcggtgtgaattggttccgtgctcttccgcttgccctgccgtttctgtgcgagcaattgagatttgcatcgagttctacagaggcggattttttcacggagtatggcgatgcaagtcgatacaagattcaggaagttattggtaagggaagctatggggtggtgtgctcagcgatagatgtccacactggagagaaagtggcaatcaagaagatacacgatatctttgaacacatatctgatgctgcacggattctccgtgagatcaagcttctgaggctgctaagacatcctgacatagttgagatcaagcacattatgttgcctccatcgaggagggatttcaaagatatttatgtagtttttgagcttatggagtctgatcttcaccaagttataaaggctaatgatgacttgacgaaggagcattatcagttctttctttaccaactactccgggctctgaaatacattcacactgctaatgtttatcaccgggacctgaagccgaagaatatattagctaattccaactgcaaactgaaaatttgtgattttggactggcgcgagttgcattcaatgatactccgacaacaatcttttggacggattatgttgcaacaagatggtacagggctccagagctctgtggatccttcttttcaaagtatacaccagccattgacatttggagcattggatgcatctttgctgaggtgctgacaggaaagcctttatttcctggtaaaaatgttgtccatcaattagatttgatgactgatcttctgggcacgccatccatggatacaatttctcgggtccggaatgacaaagcaaggaggtatctgagtagcatgagaaagaaggagccaatcctattttcgcagaagtttcctagtgcagatcctttggcgttggatcttctacaaaaactattagcattcgatccaaaggaccgtccaactgccgaagaggcattggctcatccatacttcaaagggctcgcaaaagttgagagagaaccatcctgtcaacctatcacaaaaatggagtttgagtttgagcgtagaagagtgacaaaggaagatataagagagttgatattccgtgaaatactggaataccatccacaattgctcaaagactatatcaatggcaccgagagaacaacctttctatacccaagtgctgttgatcaatttagaaagcaatttgcccatcttgaagaaaatggtggaaatggcccgattagtacagtactaagtttaactttcaggtctactattgttcactcaactccaattcctgccaaggaacagccccgcattggcccatcaagggataaaccatctgatgaaccctatagcaatccccgggaatttgacagattttctggcaatgccccgaggacctcacaagctccacaaagagtgccaacagcaagaccaggaagagttgttggtccagtattgccttatgaaaatggtgccacaaaggattcctatgacgcacggagattggcaatgaactcagggtatcctccccagcaacaaatccctcaagcttatggttattatcacatgccacgcgtccggtcagcttgttctgagctgtcgcaggccgaaaggtatacgctgcaccagcaggcctacacttgcgcaaacagtgccactgtgactgatgttgctctggacatgagagcacccccgttccatctatcaggagggccgaaaagcgattcgtccgaaaggttagcagcagagacaaacctatacacgagatctctcaatggcctcgctgctactgctgcgggagtggcagcaagtgcgcacagaaaggtcggtgttgttccctacggcatgtcgaggatgtattagtgcccaaccatggcacatcctgcatgcccaatgggagctctgatgctagcttgcggcgaagcattgggaacaaagtggcagttcaagctagtttgggcaccaagagcacagggcaatccaaggttgacgacgatgcctaagaagttgcattggtgccctgctgctcctgttcctgcttgatcaggaaccaccaccggaggtgtcaaaagcttttcaactctctattcgctttaggcaaatcagcttgtatctgcctgtgtgtgtgtaagaaaatgtgcccttcgttgcacacttgaagggggtagtccagtggcttgtaatctgagcatattttaggcgccaattgtatttctagggtgaggggacaaaagggaaaggaaggaccactaaccttttcctcttttttttttctttttccaatgttgtatagagatgtttctcatatcaaaagtgctacatcagaatgacttgagaaagatataaagcagacaattgcgcggtttaccgtagcttcatattacgcattt

SEQ ID NO: 56116 - DNA, 288 bp, Oryza sativa
  Clone ID: PAT_MRT4530_58059C.1
atggccatacaaccggggctaaatacggaggaataccctcccgagggaataccctccaaccgtcatttggatgcaatcctggacgtccacgctgaaccctgcatccaacggtgccaggatggggaagctgaccgtccccgccccctagcggaaaaactcccccgttccctgtccctatccccgcacacggggcgtggttttctcccgtccccgtccccgtgcgggtactggacacccgctgggttcctcacccccgacggtgagaaggagaagcgtctgccatgctga

SEQ ID NO: 56117 - DNA, 299 bp, Oryza sativa
  Clone ID: PAT_MRT4530_5805C.1
cttgtttttttttttttttttttttaattgaaagcggcaaataatttaatatcaaaattttctgatcgagaattgaagactcgatcatgggcccaggtcggagagcagaccccttagaccgacagacggtctggtgtttccactctcctttctgcggggggggggggtcctccatttttttcctccccattctttcctcctttgctggggccctctaaaaatatgttcttccccccgccgctttctcctgttgtacgtgtgtgatctgccggtgttggccggccgcgtgctgggccggg

SEQ ID NO: 56118 - DNA, 1045 bp, Oryza sativa
  Clone ID: PAT_MRT4530_58060C.1
gcggtgttcaatctgtgtatgtttgagcaaatgtctagtttaaagattaactttaacaagagtgtgttttttttgggaagcgctagtgagaaaagtgaaatttatagcaacatgctaacatgtaaactgggcatattacctatgaaatacttggggtatactaatagataacaaaagaatatataacaaggattgaaaacctgctgaaaacaagatggaatagaattagaaactagggtgctggcaggggaagatgctggcaatcattggtagactgactaaaataatctctagcttaagtagcattccatgttcatgatgtctttttatcctggtgccacagggagtgaaaaataagatggattatttaaggtatagattcttctggcaggaggatcagagaattaagaaatatcgtctaattcaattttagaaagtttacagacccaaaaagcagggaggctggggaaatggctatggaaaatgatgaatgaagagggtttgttgcaaagtcttctgaaggctaaatacttaaaaaaaaacacccttaaacagtgtgttttcaaacctggtgtttcttttttctggaatgggttcatgagcattaaagacgattttatgaaattctgttccaaaaagattggtaatggtgaagatacccttttctggcaggaaaagtggctagagaattcatcacttgttgagatgtatctagaattgtacaatataactttgtcaaaaattaggatagtagataaagtttttaagggcgggctggataggctacagtttaggagagacctgatagaaggaaaggctgttgcctggggtaagctacagagggattgtgaaaatgttgtccttaacaatgagaaggtgcattaatgtgggacttggataagagaaaatgtttctctgtaaaatctttatataataattcacaattacaatgtctaaacttcccctttaggaaattatggaatttcaaaatccctgttaaagctagagttttacctggctgttgactaagaatatcatatttctt

SEQ ID NO: 56119 - DNA, 655 bp, Oryza sativa
  unsure (1)..(655): unsure at all n locations
  Clone ID: PAT_MRT4530_58061C.1
aattcggcacnagctatcattaacttcacattctcctatcttcaattcacccttgctgttgctttccaaaaaagaaannnnaaagcccagaaggctgatgcatcgcagcttgctctgccataacattccctgcaaaggaaatatggaggaaagatagaagcaccatgtagatacttatgttatcttcacctttgcccccttgaagagggaacaagtgtggtgaagtcaagaaatgctagaaagaggtgagctgtgtcttgctctgttgttttgacctcatgagcattccagttactggagggctcattgagtgtgctctgttttggtttggagaggccttctgttgaaaggccccactgtttgaagtaacatttgctgcctcaagccatgggtagttataggggatagatatgtacgaaactttcactagctttactgtcttcatagaagcagtttagttagtctatactagctcagagtaaaaatgatccttttactttgcctgttgtgcttcacatgtctttttttttttgtaactaatttgacttgtaacatagttttgctctgctgttgttagctcgcctcccaggttaagagaaaggggtatgattttgagtaaaaaaaaaaaaaaaaaaaaaactcgaactagttctct

SEQ ID NO: 56120 - DNA, 939 bp, Oryza sativa
  unsure (1)..(939): unsure at all n locations
  Clone ID: PAT_MRT4530_58062C.1
agtacaactactcgacacactcccgagagacaccaacaccacacacacgnacgcgacacacccccccagctcctcccccttcttaccgctgaccttgctcctgacacttgacctcaatcaacatagagcatacacgcaacagagattcagtccatatcatatccagccagaggcagaagcaccatcanctagaggcagagcccaatgagatagagccaatacatacaaagcagcagcaagcatgacgcaacatcaagacactgacgggttcacgaggancaagagcaagtagccacgcagaggacaggtgcacgagaccaagccccagcataggaacagcaatagcncagagcacagatagcatcagaaccccgggcacgcatcacccaaagccccagagacgacgagtatcccaagcccagactgatatccagcacagcacacagagagcagcngcatcaaaacacatagcagagactagcaaaatagcctagcacaagccaaagcatagcaaagagaacagatagacagcccaagcagacaatagcacaagcaatagcaagcacaagcacnanncacaagcccaagagacatagagatagacagaganagcnnaacagacagagacagaccgccaatagcccaagactagcccacacaaagagaacgcacacaaggcatagaatcagatcagttcagttccgttccgggacgttaccatancagagccagagcagacagggngagatcaagatccagatcaagnnaacacccaaaaagagagataacccctaaccacggagcccgaacgagggggggggttcccgaatcacgcaagaacagaggaacagagggggccctaacccaataaccaagagggcaagaacagcccacagccaaaagcccaaagcccacagcccccggagagggaacattgac

SEQ ID NO: 56121 - DNA, 114 bp, Oryza sativa
  Clone ID: PAT_MRT4530_58063C.1
atggcggcagcgatgggtggcgatgggcaccgggttgcgcccgtcaccaagttcggcgatggcaacacgctcaacaccctgccatttcagaacgccgtcttctacgtccggtag

SEQ ID NO: 56122 - DNA, 229 bp, Oryza sativa
  Clone ID: PAT_MRT4530_58064C.1
tcaccgtcttccacaaaggctcccgctgtgccccctgcagcttctttacctcactcatgctcatgctgctcctccacgtcctctacctgtcctaatccccttcgtcgctgcattgggttcctccaacccacttgctctcttttgcatgcctctaacaattggtcaacccaacccttccttccatttcaccttattgggttggtgggcaacgctgaccacctcctcctga

SEQ ID NO: 56123 - DNA, 321 bp, Oryza sativa
  Clone ID: PAT_MRT4530_58065C.1
atggtgccctggccgtcgatgttcttcgtcgtcggtgcgaggccctgcgcgccgatgggcgggagccagtgcagctgcctcgccgtggggcttgtgtcgctcgcgcgcgcgtaccatatatacatggcgtctcaagccgacgatctcatcctgaatgtttgccgcgcgtgcgcgagcgaccgtctgccgtgccacctcgatcgagaaccaaccgtcgcgcccactgccgtgatcagcatcgatcacacgtacgacgtgtcctcgcgcccgaaccgcaccttcgaaaacgccaacgcgttccgctggccggtggcatcgtag

SEQ ID NO: 56124 - DNA, 315 bp, Oryza sativa
  Clone ID: PAT_MRT4530_58066C.1
atgaccctttacagttacagggataattcgggcctgtttggcacagctccagtttcagctccatcaaaactgggagtggagttaggtggagctctttcacaaaatgagttggagctgtaccaaacaggcccttccattgatctgcgcctgaagctgctctttgtgcatatccttgagcacctgcctcttgctttttgcccaggactacctttgtgtgatccgcaggacaggttcaattatttggttttcctattagtcctgcacaatgtttcacagcacattggtgtgggcaattttggtagccttgccttctaa

SEQ ID NO: 56125 - DNA, 328 bp, Oryza sativa
  Clone ID: PAT_MRT4530_58067C.1
tttttaataattttaaccttttctctttatagttattgagggttaaaattatgttcaaccagaatatgcacataccggcaaaagcggttaattcccaaagtcgtgaacaactacaccaccaaaattggaaggtcaccaagcccaaaagtaaaaggggtacgatccacccaacgtactcgaaaaaacattgttaaggcccttttacgaacgaacaaacggaagacgataccctcaatacggggaaagacaaagtaaagctcaaacgcatcgggcctttgcacgcaaaagagtgaagccactgctcaaatacacaggtacaggttgagtg

SEQ ID NO: 56126 - DNA, 636 bp, Oryza sativa
  Clone ID: PAT_MRT4530_58068C.1
atggctaccgtcttcccctacaggtggagtagaaccgagcacctcactctgcgcccgccctgccatggcggcgaccctctggatgcacaccagcctctaccatggatcctcctcgacgtccgcgcctacatcgccgaccgccggaactccaccaccgccgccgccgatctcggcaacggccaccatctttaccgccccaccgccgctggtatcctacatctgtgcctggtccatttgacgaacaagctcctgcctaagctggagggtcgaccggccatggcaaagctgcaggttgacgcctctgatgagaaggcggtggtgttggcggttgacatggccaacaaaaggcttcaaacggtgtctgtgtatgacgccgagaggatcgtcgacgactttgattactcctacacgcagtctaccatctcccaatatttcactacagctgcaggtgtaaagggaaacctgaagagacctttgaaatttcatgcgcaatatcctcacaagcggctgggtgaaacaatcagcaggagcgataatcctatggacttgcatgagccattgcaactggatattggatttggtttgggaactaaagacgaaactgaagacagcgataatcctatggacttggaatag

SEQ ID NO: 56127 - DNA, 1446 bp, Oryza sativa
  Clone ID: PAT_MRT4530_58069C.1
atggctaccgtcgaccgctatatgtggaataaaaccgaacacctcactctgcgcccgccctgccatggcggggaccctctggatgcacaccagcctctaccatggatcctcctcgacgtccgcgcctacatcgccgaccgccggaacgccaccaccgccgcggccgatctcggcaatggccatcgaatcgagatcaccatcttcaccgccccaccgccgcaggtctcctacatctgcgcctggtgcccgaccggcgaccccgcccggatcttcgccaatgagcccctcgtaggctgcgtcaacgccgacctcgtcttcctccgcctctacagcgaggtagtctacgacctcgtctaccgcgccggtggccgcccttcgctcacgctcatccgggaccccgtcgacgtcgacgccgccagcttacagagggattacctgcgttcgctccacaacattgccctcctccgtcgtgctctctggatctggacctccatcgagtcacaccatctacggcagcttacaaactctgcctctacgagtccaccatccatggcgatggcaacggggaatccacatctgcaacgtgctcgcccatggctgtcctggaagttacctgccactgccgccagagctcaccagctctcgaatgagcttctttgccgggacattgccatcgttaatggtcttctcaccattgtcggactgcgtactttctttgattcagacactgattgctggtcctgggatctgtccacatggagcaaaccggtggctcatctggacaacagcaaggactggcaaaagggcttcatggtagattctagtgacatcacggtcgacgccacttgttgcaacgtcgagctcctgcctaagctggagggtcgcccggccatggcaaagctgcaggtagctcttcctacgctcagcttgacggatgctaatgttgtgtacgtcatgggcaaggttgacgcctctgacgagaaggcggtggtgttgatggttgacatggccaacaaaaggcttcaaatggtgtctgtgtatgatgctgagaggatcatcaacgactttgattactcctacacgcagtctaccatctcccaatatttcactacagctgcagtcaaatgcaactgcattttggattctagattgccttcatatgaaaattttcttgtcagtgcacgctatatcaagaacatacacataaacaaagttttctttttgtcatactctcatagggcttgggatgaagggttaggtgtaaagggaaacctgaagagacctttgaaatttcatgcgcaatatcctcacaagcggcggggtgaaacaatcagcaggagcgataatcctatggacttgcatgagccattgcaactggatactggatctggtttgggaactaaagacgaaactgaagacagcgttattcctatggacttggaatag

SEQ ID NO: 56128 - DNA, 394 bp, Oryza sativa
  Clone ID: PAT_MRT4530_5806C.1
gggtaaacattgatcacaggccaagatattaactttttttagggggagaaattacacccaattacactggcaacaatgccagaaagaccactcccacgccaaacaaaaaaaaaggctgtgggcacacaggaacgaacaccctacagcaccagaggcagtgcaatgcaccacacacgaaaaagggtaaacatggacctccatggattatacgcatgattatgaaacatgaggcagctttcttaaagctcgaaaatcactacaggactgataaggcattaaaccagttctaagggttccagctaagtcatcaaaaagaaaaaagaaagaaggcaccggggggccctcacattcccccttgaaagtgaccagatgcacaaaatgcttacgatcggta

SEQ ID NO: 56129 - DNA, 547 bp, Oryza sativa
  Clone ID: PAT_MRT4530_58070C.1
aacttaattttgaagttgattttgaaatacttttaacgtaattttttttaatgttgcttttaagtcgctacgaacaaatctacaaaagttttacttataaattaattttaattttctaataagtcaaataaccacttttggaccaaatggccaaccgatgggacctttgtggctaatctgaatcccgtgatacgtggtccgataatctgttcacatttttcacgtaggcgcatcggacggtgagaacctgtgcatttttgcgcaaatgtgcatattgttctatctcctgcgcgcgctcatcagtattcagtatccgtcactccgtcgaccagttcacaagtcatcttctgtgcctttgcctctctgtcctttaactgaaaacccaaaatcaaatcaatcaatccagccctgcccctcctttcgtttcgggatcccctttccccgctttcctgatgcgagaccgaattcctcctccccatccggatccggctggtcaccgttcgtgcgtgcgtctagtacggagatcagcacggcgaaaaaaaaaaaa

SEQ ID NO: 56130 - DNA, 1245 bp, Oryza sativa
  Clone ID: PAT_MRT4530_58071C.1
atgcgtacaactgtcggagcttcattattccctcgacctccacatcacgccgcacagttagctctcgagctctgtgtgatcctagccgctccgccgccacccctctcggatgaggcttattcagaattcttgcaacttcagggggttctggacaccttgaacttacaatcagggatgggggatgcttggaattttatctggggctcagataagtacactgctaagaaattctataagttaaattattcttcattgcaaccccccagacccatgatttggctatggaaaacaaaatgtgtcatgaagatcaaggtctttgcctggctaatgttctgtgatagacttaatacaagagatatgctggatagaagatattgtgccaaagaagatgatgatctcacatgtgttttgtgcaatgcgaactgcagagagacaagactgcacctcttctttttatgccctttcagcatcaggacaatggcagaagtgcatgagcaagaacttatagaaactgcaattactatccacgataatgactgcattgatcaactaatcaatttgatgactaaactgaagataaatgagaagccggaattctattcacatgcctatcaacggggagaacgttgggaatatgatatgaccgtgaagatcaatcctccacgagattattgtaccctccagaatgtggattatcatgaacaaccagtaaaagcaactatgtccatctggatggaagccgtggatgatatgtatgaagaagctttggaacatatggacatacaacgtaaacgtttggaggaagctgaacacagagaagctgttctcaaacacaaatatcgtatacttcatgaattatatgaggaaagggaaaaacaaaattctatcctcaatatttgtgttgcaggagcagccttctgtcttcaccaaattccaagtatgggtagtgatgacgaagacgatgaaggtggtatggaaggacatatctcaccagtacgtgaaggtgaaccacatgggccaaaccctcaggataatggtgaagaattttacaaggtttaccaccatcaccaccaccgttgtatcctattcattctgatgacgaagcagaagaaatgcattcagccatggatatcagtgaacctagccaagaacctaaaatactcaggccaaatcgggtgtttcatatcaataaccaaaatactgccccaatttggactgaatctccagaggaagaggaagatctag

SEQ ID NO: 56131 - DNA, 954 bp, Oryza sativa
  Clone ID: PAT_MRT4530_58072C.1
atgactaaagccgatgattatcagcaagtcatggactgcgggataatggcagaagagcatgagcaagaactcatagaaactgcaattactatccatgataatgagtgcactgatcaactaatcaatttgatgactaaactgaagataaatgagaagccggaattctattcacatgcttatcaacggggagaacgttgggaatatgatatgaccgtaaagatcaatcctccacgagggaggcttttctacgtctcaatcatatttaccaagacaggttgcaacactctcagctattcttatcatcctatgcgagagccgggcgaagactattgcaccctccagaatgtggattatcatgaacaaccagtaaaagcaactatgtctatctggatggaagccgcggatgacatgagcagccttttgtcttcatcaaatcccaaatatggtagtgatgacgatgatgatgatgatgatgatgatggtatagaaggacatatctcaccagtacgtgaaggtgaaccagatgggccaaatcctcatgataatggtgagggagttttacaatgtttaccaccatcaccaccaccgttgtatcctattcattctgatgatgaagcagaagaaatgcattcagctatggatatcagtgagcctagtcaagaaccagaaatactaaggccaaatcgggtgtttcatatcaatgagttaaatactgccccaatctggactgaatctccagaggaagaggaagatccggaagaacgagagcttgagacacaagaacatctttctatacatactaatgatcaagaaaataatgaagacccttactcatgctctgctcccaatattactgcatcaacttctgcatctcctcatgaattttcacacttcgcacctgcatcattgtttactaatcccgcagaaggcagtggtggatggctagataaatag

SEQ ID NO: 56132 - DNA, 657 bp, Oryza sativa
  Clone ID: PAT_MRT4530_58073C.1
atggcagaagagcatgagcaagaacttgtagaaactgcgattactatccatgataatgactgcactgatcaactaatcaacttgatgactaaactgaagataaatgagaagccggaattctattcacatgcctatcaacggggagaacgttgggaatattatatgaccgtgaagatcaatcctccacgaggtgaacgtgatatgtattacttccaaacacatcataggtgggataccatgcgagctgcactatatgatgtgtccagggaggcttttctacgtcttaatcatatctaccgagacaggttgcaacactctcgctattcttatcatcctatgcgagagccaggcgaagattattgtaccctccagaatgtggattatcatgaacaaccagtgaaagcaactatgtctatctggatggaagccgcggatgacatgtatgaagaagctttggaacatatggatgtacaacataaacgtttggaagaagctgaacgcagagaagctgttctcaaacacaaatatcgtatacttcatgaattatatgaggaaagagaaaaacaaaattctatcctcaatatttgtgttgtaggagcagccccacttgcgattgcggtccttgcggatcctcgactatggccaaccttggtttga

SEQ ID NO: 56133 - DNA, 819 bp, Oryza sativa
  Clone ID: PAT_MRT4530_58074C.1
ctccttcagatcctccgaatgagcatacctagcaccctaaattaccttgttctccttgtattctcaagttacatgtgcaccagctaccctaatctctttgctgtgactatgtataagtctgattcagtcaaggccatgtgttcaagacccctagaagattcttttgctctacccctctcggatgaggcttattcggaattcttgcaacttcagggggttctggacagtttgaatttacaatcagggatgggggatgcttggaattttatctagggctcagataagtacacagctaagaaattctataagctaaattattctgcattgcaaccccccagacccatgatttggatatggaaaacaaaatgtgtcatgaagatcaaagtctttgcctggataatgttctgtgatagacttaatacaagagatatgctggatagaagacattgtgccaaagaagatgatgatctcacgtgtgttttatgcaatgcgaactgcagagagacaaggctacacctcttctttttatgtcctttcagcatcaggtgttggcaatacctgggaattgagtggaataataatttggagtttttccaaatgatctccctagcaagaatcaaatttgctcagaagggtttcctggaaattttctttttggcagcttggcacatttggaaacaaagaaatggcttcatatttcagaacattcaacccactttccaggcatggagatctcttttcgtcaaagaagttcttctgcatatgtgcagaatgaatgatcctttaaagcaaactgtttttaattgggtacaaacctta

SEQ ID NO: 56134 - DNA, 1654 bp, Oryza sativa
  Clone ID: PAT_MRT4530_58075C.1
cccgcgcccccgccagcccatccccctgctgctgctgctgctgctctcctctccaagaccaagaaccagcacgagcccccaagccaggcgccggcctcctccttcttaagcttcccaattctttctctttccctcctcctccgcctccgcctacgccttccccgctagtcccacacatccggcgaagattccggaagtttcgtcgatcctccgatcgatcaagcggcgagcggcgggaggcatggagaggtacgagctgctcaaggacatcggcgccgggaacttcggggtggcgcggctgatgcggaacaaggagaccaaggagctggtcgccatgaagtacatccctcggggcctcaagattgacgagaatgtggcgagggagatcatcaaccaccggtcgctgcggcaccccaacatcatccgcttcaaggaggtggtggtcacgccgacgcacctggcgatcgtgatggagtacgctgccggcggcgagttgttcgaccggatctgcaacgccgggaggttcagcgaggacgaggccaggtatttcttccagcagctcatctgcggcgtgagctactgccacttcatgcaaatttgccaccgggatttgaagctggagaacacgctgctggacggcagcccggcgccccgcctcaagatctgcgacttcggttactccaagtcgtcgctgctgcactcgaagcccaagtcgacggtcgggacgccggcgtacatcgcgccggaggtgctatcccgccgggagtacgacggcaagacagccgatgtgtggtcttgtggagtgactctttatgtgatgcttgttggtgcttacccctttgaggaccctgatgaccccaagaatttcagaaagaccattgggagaataatgtcaattcagtacaaaatacccgagtacgtccatgtatcccaggactgcaggcaactcctttctagaatttttgttgcaaaccctgcaaagagaataacaataagggagatcaggaaccacccatggttcctgaagaacctgccaagagagctcacagaagctgcacaggcaatgtactacaagaaggataacagtgccccgacctactccgtccagtcggtcgaggagatcatgaagattgtcgaggaagcgcggacgccgcctcggtcctccacccccgtggccggctttggctggcaagaggaggatgagcaggaggacaacagcaagaagccagaggaagaacaggaggaagaggaagatgctgaggatgagtacgacaagcaggtgaaacaagtccatgccagtggtgagtttcagctcagctgagtatttctgtccagcagcacaggaagattgcaaactggagatattgtcataatgtggcagctgatggtcacactcccattctgtagtttgcagtcttgtttttcttttttcagtttcattttttcttttcttctctttgatgctgcaacagtgtaaattaccaaagtggttctgtcactgtctttgtaatgactgatttaagttagcatgcagaaacataatgtattgaataaaaccatctcattgagcatcttctttctcaaaaaaaaaaaaaaaaaaaaaaaaaaaggggcccggtacccaattcgccctatagtgagtcgtatacaattc

SEQ ID NO: 56135 - DNA, 237 bp, Oryza sativa
  Clone ID: PAT_MRT4530_58076C.1
atggcgcaccacgagagggagctggtcgacgagtgctgctggtgtggtgcgcggtggtgttccacccggcgcacgcgcgagcagctgtggatggtgctcggcggcctcgtcctcctcggcaccgcgctcgtcgcttggctctccctcttcacctctggcaagtgcggccgcctcggagcctctgcgccgtccagcttctcccagaatcagaaactctccaaacagttcagcttttga

SEQ ID NO: 56136 - DNA, 2008 bp, Oryza sativa
  Clone ID: PAT_MRT4530_58077C.1
cccgggctgcaggaattcggcacgaggttaggacaagccagcgtctctctctttctcgtctctccaatggcggcggcggcggcgtcgtcggagtcagcggatgccgccgccgctgggccgtcgacgctgagcatctacaaggcggcgcggcgcatcaagcggcgggagagcacgctgtacaacgcgctgcggagcgtggcggacgacgccgcgttcgtggcggagatcgcggcgctgtggccggcgctgccgctggtcgccaacctccgctgcgggctctggtacttgccgccccgcgccgtcgccgccacctgctacttcaagtccaccgatgggcacgcgggcaactgggccttctccaccgcccgcctcaacctccacctcgccctcctcgctggggagagaggagggtgcataattgttgattcaacaaggagagggaaacgtttccctgacagcatgtcaaagaccatacccatttggtgctgtgtcctcaaccgagcaattgagaggtatcggctgcagactaacaacaagtcagctgctgtagccaacaaagacgctgaaaagatctctgaatcatcaaactgggataactcagtgcatcttcctgtatgggttctagagactgagaaaaatgctatagaggggcgtatcgaggaatggacaacccaatttgaatcatgtggtgcagacattcgttctcttgcgttaagtttgaagaaaccactacgtccattgtggatatcacaaaggacacggatatggttaaatgaagttccagagcttgaatcatgggatttcacccctatcatattagtttcagcatctgcatctggtgcagtagctacacaaaggatgacttcagagttcagctggcactatattcctggagctggagatgatgaagagagttgggcacgtggtctcactcctacattattctggaagcactcatatgatctgcttgatggtggaccagacctttgtaatcagttagttgcagatattgttgaaaaagatagggtctatcgtgcacagagaggcgaatattctccccaaattacagctaagcctttgaagtgttcaagccatgatggtcctttcagtaatggtgatcatacaagtattgtgcaaccaatggactcggatcctcctaccgttactgctatggacaaacaaaattccagtgatggccatatactcttctggattgggacatcaaaccttgcagtagcatcaactctccaagttggagattccttagctgaagtggattgtatactgaactgtgacagcacatcaaatttacctttgacttcatcagagaattcttaccttgaactacctatggtgggatcaaaggacgaccggttttcgttgatgaaaaaccttccaaaagcagttagctttgcaaacaggaatttgatagcagggaagaagctactaatatgctgtcaaaatggagaggatataagcatctgtgtggccttggcgataattacacgattatttgattgcgatggattctttgatcatggcaattcatttctgaaaggagacgtcacgaagttggagatgaggaagaggctggtttttgtttgcaaatatgctgttaatgcaagaccatctagaggaaacttgaagcaggtctatggtttcctttgcagcgagaaggaacagttttcttgtttgacgtagtttatttacgtctagtcttgtggatcctgatcagttgtttcctttcctatcccctgcaagatgcatctatgtgttccgatcagttagggaagctctggtttctgagtttttcatgtcaactgatgaactgctagtgtatatggggaaccaatagtcgcaaattgcccttgggatttcactgacaaacaacctggagttgatctcataccaggttaatcgacaaactggcactgcttattaacctgttaatgatacgacggtggtttctgtaaaaaaaaaaaagaaaaaaaaaaaaaaaaaagcggcc

SEQ ID NO: 56137 - DNA, 1487 bp, Oryza sativa
  Clone ID: PAT_MRT4530_58078C.1
cggacgcgtgggttcggctctttcttaatcttcgaaaagaaagaaatttcgtaatggaaaggtaggatgaaaaaaaagaaaaaatcaaaaggaagtgtggaaaaaatgacaagaagatattggaacatcaatttgaaagagatgatagaagcgggagttcattttggtcatggtattaagaaatggaatcctaaaatggccccttacatctcggcaaagcgtaaaggtactcatattataaatctcgctagaaccacccgttttttatcagaagcttgtgatttagtttttgatgcagcaagtcagggaaaaagcttcttaattgttggtaccaaaaaaagagcagcggatttagtagcatcagctgcaataagggctcgttgtcattatgttaataaaaagtggttcagtggtatgttaacgaattggtcgattactaaaactagactttctcaatttagagacttaagagcagaagaaaagatggaaaaattccaccatctcccaaaaagagatgtggcaatcttgaagagaaaattatctaccttgcaaagatatctcggcgggatcaaatatatgacgaggttgcctgacattgtgatcgtcctcgatcagcaaaaagagtatatagctcttcgggaatgtgccattttggggattcctactatttctttagccgatacaaattgtgacccagatctcgcgaatatatcgattccagccaacgatgacactatgacttcaattcgattgattcttaacaaattagtatttgcaatttgtgagggccgttctctctatataagaaatcattgattaagaagaatagttaattcttgggcaactgcgtagatttatggaatcacttactattcttttttgttttgcatagaaaaaagacggggaatattgatatatattagagggtattgatatatattatcatctgatgtgatttcttgatatcctaaatataagattaatacttcacgttgctgagttgagaaaaagatggttgaatcaaaagaattctttttttgaagttcattttttatcaggggacaatatgaatattataccgtgttccattaaaacactcaaggggttatacgatatatcgggcgtagaagtaggccaacacttctattggcaaataggaggtttccaaattcatgcccaagtacttatcacttcttgggtcgtaattactatcttgctaggttcagttatcatagctgttcgcaatccacaaaccatcccaaccgatggtcagaatttcttcgaatatgtccttgagtttattcgagacttaagcaaaactcagattggagaagaatacggtccctgggttccctttattggaactatgttcctttttatttttgtttcgaactggtcgggtgctcttttaccttggaaaattatacagttaccccatggagaattagcagcgcccacgaatgatataaatactactggtgctttag

SEQ ID NO: 56138 - DNA, 108 bp, Oryza sativa
  Clone ID: PAT_MRT4530_58079C.1
atgaccaacatgaagatgatattgctcatcagagtgaagataaaggcgcccaacaacaacgacagagcagtcggtggcgatgaaagcaagctgacaatgaagacgtag

SEQ ID NO: 56139 - DNA, 378 bp, Oryza sativa
  unsure (1)..(378): unsure at all n locations
  Clone ID: PAT_MRT4530_5807C.1
cgacccaccctcgccttcctcgacaaggccgtcaagcccgtcctcgtcgcggggcccaagctccgcgtcgccaaggccggaggggccttcgtggacctcgccgacgccagcngccacgcggntggcngcantgccgtccgccaaggggctggtgccggagacgctgccgcgcttcatcgggacctactggggcgcggtcagcacggccttctgcgcggagatcgtggagtccgcggacgcctacctgttcgcggggcccatcttcaacgactacagctccgtggggtactcgtgcctgctgaagaaggagaaggcggtggtggtgnagcncgaccgcgtgaacgtcggcaatggcccgcgttcggggtgcgtgatgat

SEQ ID NO: 56140 - DNA, 2207 bp, Oryza sativa
  unsure (1)..(2207): unsure at all n locations
  Clone ID: PAT_MRT4530_58080C.1
cctccgcgcttcgctcgccgtcgagatctcaggcgctcggcctccccctccccttcggcctcctccacgcgtccgccgcagccatggctccagcaccagcaaccacgagctccagcaagcgctcgaagaagcggaagcagcccgtcgctcccccgccggagtcggattccgagtcggaggagttgtcctacgacaccgccgcggctgacgaggaggagggggaagaggaggcgccgaaccagatggaggagctggaagaggagcaggaggaagagaaaaaggagaagaagcagaagaaggagatgagcaaggagaagaagaggaagaaggagaaggggaatgaggggggatcggggattctgaccaacatgctcttctccgagctcggcgtctccgagcctactgccagagccatcagggagatgaactacacctacctcacccagattcaagctaggtccataccacacctgttgaatggaaaggatgtgatgggcgcggccaagactggttcagggaagactcttgccttcctcataccagcaatcgagatgctccaccacgcacatttcatgccgaggaatgggactggagttgttgtggtttgcccaacaagagagcttgccatccagacacacaatgttgccaaggaattgatgaagtatcactcacaaactcttggatatattattggcggtaatggccggagaggtgaagcagatcagcttgcaaagggagtcaatttattagttgctacaccaggcaggcttttggaccatctgcagaataccaagggattcatatatagacggctaaagtgccttataatcgatgaagctgatcgtctattggagcagaactttgaagaagatatgaaacagatatttaaacgccttcctctgaatagacagacagttcttttttctgctacacagacagagcaggttaaagaatttgccaagttgtcatttgagaaaaacgaagaaagtacctcaaaacctgtttatgttggtgttgatgatgctgaaactaatgctactgttgagggcttacagcagggatattgtgtcattgatagcgcaagaaggtttttggttctttatgctttcctaaaaaagaaacagaataaaaaggtcatggtgttcttctcatcatgtaattcagtcaagttccatgcagaacttctgaattttctccagatagaatgttctgatatccatggaaaacaaaagcagcagaagcgtaccacaacattctttaacttctgcaaagcagaaaagggtatcttactatgcactaatgtggcagcacgtggacttgatattcctgatgtggatttcattgtgcaatatgatcctccagatgaaccaaaggattatattcacagagttggacgtactgcacgtggtgaaaaaggcaaaggagaagcactgttgtttttactgccacaagaactgaagtttcttatctacctgaaggctgctaagatttcgctgacagaattagtgttcaatgaaaacaaagtgccaaatttgcaatcgcaccttgagaatatcgttggcgagaattatttcctgaatcagtcagctaaagaggcatacagatcctacatcttggcatacgactcacactccatgaaagacatttttgatgttcataatctcaatctgaaggatgtggcagcgtctttctgttttaagaacccaccaaaggtaaacatcgatttggagagctctgcatccaaacatcggaggaagatgaggaaagtggacggtggaaggaggcatggcatcagcgctgcaaatccctacggaagaaaaggcggtgatgacaaaaggcagtttgcaagattctagagatgttcaatacatggagtctcaaaagacccttggccctatgaaattttgatagataacttatattatcgcatcatgctataacacaattattctgtccaatgtatccacttagtctagcactcgagattgttgagaaatgagaatgaaatcgtgtgccaaattcattgctggtaaacctgaaaaaatgataaattgcaatttgacagccgtttctacaaaaatgttataaagtacgggttgggccttatttatgttcagaactacccactccatttgtcttcatacttggtcgtttcagcctgccatccctttcttggccctttggcctncatggcaacgcgtttcacc

SEQ ID NO: 56141 - DNA, 245 bp, Oryza sativa
  Clone ID: PAT_MRT4530_58081C.1
atgcgctttagcaacaaagcgctcatcccttcttctttcgcttggaatcccctcgcttcttctttcgcttctacgctcgtgctttcagcaagttcgtaccagtcgtcaggagctccaacctccgcgcctagccgcaaggaacctaaatgctggttctatcccggccaagcaagcaaggtgaaccccggtgggaaagaaagaccagggggaagaagctgtcaacacttctacaatccagtctctta

SEQ ID NO: 56142 - DNA, 485 bp, Oryza sativa
  unsure (1)..(485): unsure at all n locations
  Clone ID: PAT_MRT4530_58082C.1
cggcacgaggcacaatgctccagttgagtcaactactgttgttgtttgggtgctgatctgcggtgcgagnaagcatgtcgtattggaagaccaattgcatggcatttcttggggacatttgggagaatgagacctacaaggcaacgggtttgcccaaccaggtcccaatccttgcaggcatacaccccagcaaccctgatttggtttacttcttgctggagcatcacctgtttggcgtcaatctgtacaagaagatggttattcactttgtcgatgaacattaccagcttttgcagccaattgttcgctcccgctcgctgcagccactctcttggcgccaagtacagctttggaagctacctccgtcacttcacgcaggttcaatagaactgtcagcacagcacgctagtgacttaggtaacctccgcctgaaggctgctcagctacggcgtcaagaacatgctttaaagagacgtgaaaagatg

SEQ ID NO: 56143 - DNA, 225 bp, Oryza sativa
  Clone ID: PAT_MRT4530_58083C.1
atgcagcaggttgcaagcacagccatgagcctccgaacagtgatgagcactgacatcaaccttctcccagtcaaaaggcaagcttttgacgtaggaatagatgatgtaggactagagctgaaaaacggctacaggcaacagcagctaaaaacggccatagccgcatcactgcagcagctagcgttcccgatccgcccctgtttcttttgggtgaggaaggactaa

SEQ ID NO: 56144 - DNA, 423 bp, Oryza sativa
  Clone ID: PAT_MRT4530_58084C.1
attgaaaggcgtcttcgtactcgcctctctacgggcccttctccgacgacgatcggcgccgttcgtctccgacgccaccgccggcgtcatgagggagtgcatctcgatccacattgggcaggccggtatccaggtcgggaacgcgtgctgggagctctattgcctcgagcatgggatgcagcctgatggacagatgcccggtgacaagaccgtcgggggaggtgatgatgcttttaacaccttattgagcgagactggtgctgtgaagcatgtccgcggcgctgtttataccgatcttgaacctagcgtgattgatgaagtgaggactggtgactaccgtcaggtctttcaccctgagcaggtcatcaatgggcaaggaggatgcaaccaacaaactttgcccgggtcactacaccattggca

SEQ ID NO: 56145 - DNA, 828 bp, Oryza sativa
  Clone ID: PAT_MRT4530_58085C.1
atggaacgggcggcgcggcgcggtagcagcggcggcacggggctcgggggagcggcgcggcacggggcgcgaggtgacgacggcgacggctcggcagtggcgacgggacggtgcgcggtgcgatgggacggcgcgacaggatggcggcgagcgacgcgcggcggcacggcggtagcggcggtgcgcggcgcaaggcgatggacggcggcgcggagacgcgacggaaacgacggcgacggcggcgcggggttaggggcggccaggtgcggtgatggcgacggcgtcggcagaggggaggcggagcggcgcgcggggcgcgagggcaacgcggcaaaggaggggctaggactaggagacctcgtcgaacacttcaggccggctcgatgcggcgcacacgtcaacaccgattgtagcaaggggactagatgcagcacaagcagccaggcggcgcacactgggaggagacccgggttgtggctcgatagtcaatcatggggcgaggagatggcgatcaacgtcggtggggaagtagagaccattggcccgtcagcaaacgactcgggcttcctcctctgcaacttcgtcggccgctgcacgttctcttctggctctccaacacggccgtaccgccccgcaggcctcgcccacctccacgcgctccacgccgcgcttgccaacctgctcctcctcccgaagaagcgtgtcgcccaaaccactagctcatctaccgcctcctcccttctcgacggcttcttcgtcttcgccgacatgtatggcaccttccaggaggccatcctcaacctcaggaagcacgcccccaacgtctag

SEQ ID NO: 56146 - DNA, 143 bp, Oryza sativa
  Clone ID: PAT_MRT4530_58086C.1
tttttgtggtgttggtcataaacaggacggggaacaccttgagtaatattacagtacctattgtggttttttccacttagatcttttattttgtttagttttagactggtaaacaaattcactattcacaataatcaaagctc

SEQ ID NO: 56147 - DNA, 301 bp, Oryza sativa
  Clone ID: PAT_MRT4530_58087C.1
ccaacccctccgccgtatgacatcttgactaccgggcccgcagctcgtgaagccttcatttgcactggagaatgtccatcgacccccgacttcatccatctccaatctgtgtacttttgtttatgactagactgagccccaaattaagctttacccattagacatgtggaagtacggtagtgctttgcacaaaaggcccaagctttagtccttatagtggccggggtgctatttcccacaactggcatgcacccaaaccccaccgaaaacaggttttaggggttttgaaaaagaaaaagag

SEQ ID NO: 56148 - DNA, 304 bp, Oryza sativa
  Clone ID: PAT_MRT4530_58088C.1
gggatcctgaatcctgatgtttgcaagtgacatctttctacaaaatgtataaagacgggtgggctatttatgtcagactaccactccattgtcttcatcttgtcgttcaagctgcatccttcttggccttggcctcctgcaacgcgttcaccagcctcgcgaggcaggcgccggcgtcgtcccgggggttcttggccgtgaggtgctcgccgacgtcggccggcaccaggtccacctccggcagcagccttttgacagcggcaaacatttcgtggtcgtctacctccaggtggatcttggccat

SEQ ID NO: 56149 - DNA, 632 bp, Oryza sativa
  unsure (1)..(632): unsure at all n locations
  Clone ID: PAT_MRT4530_58089C.1
gatctgattcctgtgcgcaatcggcagcgcgcggattccagtggtgctcctccacgcctcgccgctgcatctccacccatggcgaccgccgccgccgccgacgacctggacctcctcctctcccttgacgcggacggcggcgaggccgtcctcgagacccctccctcctccccgcgccgcgacgccgccaccgccgcggccttcacccctcccagggcggtgcgccccggcggcaccgacatgtccgtgttccgtgacgccgtcaaggactacctcgacgccacccccgccgccgtcgcaacctctctccccaaggggaagaggccccccaagtccaccgagaccatcgtcgacgcccactccggcctccgcatcaggagcctgacggcgtcgccgctcgagatcaccaaccgcttcgccgacattcggttcgtccgcatctccgccatcaggaacctcgccgggggcgacagcttctccggctgctgggcgacggcgggggtggtgctcgacaagggcgcgccgcgggtgagcgcgcaggggaaggagtacagcatctggaagatgggcgcgctcgacgacgccgacgtgntcggtgttcctcttcggggacgcccacgcgcaccactccg

SEQ ID NO: 56150 - DNA, 435 bp, Oryza sativa
  Clone ID: PAT_MRT4530_5808C.1
atggcgcactccaagaacaccacgcgcgcgagaacggccgttacggcatcacgtcggactcgggattggctgctacggccggccgaggtaggtctccacgttgctggtggcgggggatggaggggaatggcatcgggatggagtttaatggcgtcgataggatatgataggatagggagaggattaagaaggcccctgcgtctcccgtctgctcccgctcgcgcgtgcgcgattgagcagagatggcggccaccgcgcatcacgcggaagctggctggaagggacacggcaaatgcaggaagaggcaggcaagcagccaaccatgtcgccgtcgccaaacacaatcgacgcgttacggatcggatgcaggcagaggaaatcgagtgctgccagagggtgggcgcgcggaagaatgactacaaagggtgtgtctag

SEQ ID NO: 56151 - DNA, 473 bp, Oryza sativa
  Clone ID: PAT_MRT4530_58090C.1
gcacgagggaaacaatgccaaagagattgatcgagcccctgactcctccttcctccgcatcagtggccgacgaccggatctatgggctgccgccgtcttgccaccaagagcaacatggcacctacatccaccatgtcgatggttggatctgcaggccgcagccgccgccgtccccaaagtcctcatcgacgacgactgctacctcggcatgccatctctcatctgctcggctacgtcgtcggccatggaatctccacggcctctacgttgacttggaccagaatcctccgcgtcgcaccctccgttggcaccaccgcctgccgtccgctgaggcgctgacccgacgcccccttgaggccttaccggcgtagcctccccttccgttcatcctgtctgtctctccctccctatatgaggaacggatatactcctactcctatatgattattgactgggtagataagaacgatgca

SEQ ID NO: 56152 - DNA, 423 bp, Oryza sativa
  Clone ID: PAT_MRT4530_58091C.1
acaaaacggtctcatccggggacaaaattcaaaagcccttgggtaaccggttacctccccaatttttatttaaaggggaaaggggggtattggtttttttggtacaaccaaatttttggggggggggattcccggccagggggccttgggctcaggggtctttggtctaggtggccttggaaccaaagacttttttcgcaaaagacgggaaacaaaatgatgctggggggatcccggaattggaaaacttaagggggcctttcgattttggggggaaccccttatcctcaagggtaaaaaaggggggggggaaataaaccgggggccccccggggggggaaaggctaaaacccataaccccccttggggttggtggcccctggtgtccaagactatatttactgggcccttaaaaaccggggg

SEQ ID NO: 56153 - DNA, 2104 bp, Oryza sativa
  Clone ID: PAT_MRT4530_58092C.1
aacatcgagaacgagttgccgtcagagcagctagctaccaacaggcccttcgccgataccatgagaagcgcatccgagcacgcacgctttcgatcggcaactacgtcctccgacgggttcaaagccaagcagcgcaaaacaagctctcacccaaatgggaaggaccgtacacgatcacgcaagtcctgcgaccaggcgcattcaagatttcagacggcgatggtcgcgagttggcaaattcttggaacattgatcaaccacgatacagaaactaccagcaagtccaacgccaatccatcgactgaaagattttctccgcaagcggtgccattgacttcgccaggtggtctatctctgcgggagtccaacgagaacgtgcaaacccttcgtggaggaactcgaggtgcagctgcggacgattatctcgtatacaggccaacacgtgccctccggcatatcggctcgatcgacggcactcctgcttcaaggcctcgtcgatacgcttgccgatgccttcaagttgggcacaggccccattcagccacgagatatacccggccaccgactcctcgggatccccgcgagatacttggagttcccggcagactccggccatggctgtgcaacaactcctgaggtacgagttgaaccacacctcacgacctcggagtgcttccacggcctggtcctttttcacttccaacatagtcctctcaagttctgccacctcaaacttcgtcctgtcgtcctgcaacacatacgactcgaaggcaagtgccggaacgatcactggcaactcaggctgcccgcactgctggacatcctcgacatcgatatctgcacgcgaggacgtggcacgccccgatgtagatcccgttggacatatcctctctgatccttgccgcatgcttggaggggatcgcctccattgccgtcgcagttctgtaatcgaagtcgtcagcgagaactcatcgggattcgccgggatcgtggtcgtgacaccacactccccggcgaactggtgcaggccagtgtaggtaagccgcagcaagccacggaactctgacaggttgttctcgagctccgacatgcggtgctcgagcccctgctgttgccgctcgttgccggccaccagctccctcatcttctggaggtcctcgcgaacctccgccaggtaacgcgctagcttgtcgacgcgttcgttcgctgacgccgccgctgccgccctcgcctccgcaatctcgcggcctatgccgcgagcgctggcttggaggatgcgccttatctcgatttggagctccgatggggtgggcgtcttccgacgatttccgagcacggaggagaacttcctcccccttttcggaacattgccgccactcatcgtggcagcagcggcagcaacatcggacgcctccttggcgacgtccaccttcagcgaagccgccgcctggtggtccacgagcggtccgatgatatcagtaagagggagagcattgatcgcggcttcgcgttcagctggctccttctcgcaaagagggacggggacgttgctcgccgttgtaggaccgctgatcatcacttgaccgacacggtgctccacggtttcgcccgacaatccttgtactcggaggtcatcgatgatatcgatgaaggactgaagggaaggggttaaggcgggtttggcggtgcaagaagaaatcttgtctggttgctcctcagggacaacgaagactggatccgaattttctatcctgttggatttcatccaacgcaactcgtagtagaaacgaaagaggtcgagaaatggctctactccaatataggcctcacaaagatgcgaaaagatactaaggaaggcgatggaattggggttcaaatggagcaaagaaagaccgtagaaattcaagaccaaaagcagaaattcggaaggaggaggaagaaaaccacagagaatgtagtcctcaactgcaaccatgcggcccaggactggctcagggtcagtacctcctggttctctctccatggccccgcaaccggggagagcgccgtcctcctgtaacttcttcagcgacgcgccggtggaagtggatttgtcgagatccat

SEQ ID NO: 56154 - DNA, 372 bp, Oryza sativa
  Clone ID: PAT_MRT4530_58093C.1
gggggaacccgaacaaaaaaattaaaggtccagcattgttcagggttgggcaatttaagtttcagttcctggggtctagaaaaagcccccattctccctatattaattctgcagccagaaataaaaagggtaccccggttacccatgaagtataagtttccccaagaagtttaagaaaaaaaaactggggttacaaatcttacacaaaatacataagttcaatgaagcattttccattggagctccccaactttcctttggtatctataactcaccttttttcaatggcatcaatcaaattttactttttaaggttgcctaaatcaaagcccttttacaaccaggagttgaattaaaattagcgtgacaatt

SEQ ID NO: 56155 - DNA, 204 bp, Oryza sativa
  Clone ID: PAT_MRT4530_58094C.1
atggtgtacaacgtggtcgccatcccggtcgccgccggcgcgctgttccccttcacgaggctgcagatgccgccgtggctcgccggcgcctgcatggcgttctcctccgtcggcgtggccgaaaaccggagcgaacatagccgtctcgggtttggtcgaaccctcacggaggccgttggcccaggcccaagttcagttcggtag

SEQ ID NO: 56156 - DNA, 542 bp, Oryza sativa
  Clone ID: PAT_MRT4530_58095C.1
caacgaatttgtccgacgtcgtcctcgccgtctcatccgcctttaatggcggcttttatcccccccccccccccccccccgcgagaccgcgaccgccgcgccacacgacggacgacgacgcggccgtgttcgcgccagccaagcgtacccctacctgcgaatggttgggtagcgacgagccagccagccagccagccgtttttttttttttcgacgccccaattcaattcgcgcgaggcgaccgcggcggggcggcttgcgcccacacgtttctcccctcttgctcactttttattccgcgggaagagagggatagattcagctgggctggtggtgattgggacggcgctggtgtgtgtgtgtgagaaaggagtggggctgagctctccgaccccgctcttggctgtggagcgagctgctgctgctgctgctggtgctgggcgggcgctgcggacttgcccttttttattggggctttctctgctctggaccaggaggaggtagcggggagagaaaggccttgcttggttggttttttgctg

SEQ ID NO: 56157 - DNA, 147 bp, Oryza sativa
  Clone ID: PAT_MRT4530_58096C.1
atggcctctgagccgtacatgaggaagaagggtgtcttcttgttggacgttgtcggtgtgtactatgccatttgccctctcgacctgtccattgctctgaggtcgcttgactccaagtgcggctgctgctcttatcccagcgagtag

SEQ ID NO: 56158 - DNA, 211 bp, Oryza sativa
  Clone ID: PAT_MRT4530_58097C.1
agaaaaaggaaaaacgaacaatatgacttattgcacggaagaactcaaaagagatcaagaaacacatcttatatttacacatggaagatgtttacacacaaagactctttattggtttgccactagcattaaatagggaacattaggctagcttacacgtaccgatttcttgctgtactaacagagacagcaagcttatttggaatgagtc

SEQ ID NO: 56159 - DNA, 519 bp, Oryza sativa
  Clone ID: PAT_MRT4530_58098C.1
atggccggaggagacggcgccacctacaagggcggcatcaaggcctactggaagcgccggggctacggccggctcgatcccgcctcctccgcgcaccgccgcccgcgcctccccaccgcggagctcggcgacggccgcggcgcggcaggaggagcggggcggtggcggcgagggtggcgagtacgccgccgcgggctcgggcggcggatcctgcgggcgctctcgccgcggcggctgctggcgcgcctccgcgacgcgtacgtgcggggcatgctccgcctcgcgtcctccgccgccgtcgccggcggcggctccgctctgtacggcggccccgccggcggcgccgaccccttcgggcggccgcggccgctcagggagtacgacgagaaggcgctggtggagatctaccggtccatcctcgcgcgcggtggcggcggcggcggcggggtcgtccccgtcgccggcgacgccgccgcggtggtcgccgtggcgcggctgcccacggtggcgggagcgtga

SEQ ID NO: 56160 - DNA, 214 bp, Oryza sativa
  Clone ID: PAT_MRT4530_58099C.1
ctgttcttgaagcagcagagcgaggtagacatggcgggcggcaccatggacatctcgtgcccggcgctggccggcaaggccaccgcgaaggtgttcggcgaggggcgcattaccatacgcaagtggaccgcgaaacccaatcccgtctaatcccggagcctgggccggactccgaaacccacgccgctcttccacagggagggttacagggagg

SEQ ID NO: 56161 - DNA, 954 bp, Oryza sativa
  Clone ID: PAT_MRT4530_5809C.1
ccggccggggtcgcctcttcctccgacgagcgacagcgagagccttccactctcctctcctctcctctccacgccattccagaaccaaccctcgccgccgcgtcgctcctctccccgccgacgaatccaggcccccggattcccccgcgctatggccttcgccagctcgctcctcccggcgccgccggccagcgtcgccccggagctcgcctccttcctcccgccccaggccaagaggggcgccgtctccctcgccgccacgcggcgccggggagcccggattggagttagagccgaagtgaatgaatctggaagtgctttggctgctgacgccttcgcccaagtcaagcatgttctacttcctgtcaccgaccgcaacccttacctctcagagggcactagacaggctgcagcaacatccgcttctctagcaaagaagtatggagcaaacataactgtagttgtgattgatgataagcccaaggaagagttcccagagcatgatactcagatgtcaagcattagatggcatctctcagaaggtggatttacggagtttgggttgatggagcgcccttggggaagggaagaaaccgacggctatcattggagaagtcgcggatgagttggagttagacctggttgtcctaagcatggaagcaatacattccaagcacgttgatgggaatttgctggctgaattcatcccgtgccccgttttactgctcccgctctgaaatgaccttagagcttttctttcacctgtcatgacttgaatggaaggcaaataatctgtttcacctctttccagatgtaatttctacagatgtcttctgggtcattttatggatgtaccttctgaatgattttctgttggattccataattttgattatgtgaatatcaataaaaacatgtttcaggtttttaaaaaaaaaaaaaaaaaaaaaaaaa

SEQ ID NO: 56162 - DNA, 391 bp, Oryza sativa
  Clone ID: PAT_MRT4530_580C.1
gcgttggggaaattatgaaactgcacattggttaaaagggaaccggccgggccccaaggattcaggttagaacccccaccttttaaagaagttcaaattttccccaggccctggtttccaacccttaccccaccaccggatgggacctttcaaaatggaccacttccccaccaaagggggctgccccctcaaaaaaaaaaaaccaagtcaacggcctattgaaatggcccacacaaggggcctgttggcttgaaggttaatgccttcggtgtaaacgtggttaacttcaatcctccctaggccgggaacctgcccggaaaatttgaagccttaacccggtttcggggcttctggtttgagggccttaatctcttccaggccttgtaacggg

SEQ ID NO: 56163 - DNA, 475 bp, Oryza sativa
  Clone ID: PAT_MRT4530_58100C.1
ctgaggaagacaaaggtcttattattattgtccatacaatgatggctgggaatacaaggtactacatattaccgactgacacggaaacacatgcttatttactattcatcttgactaaagtttatggtaaatcatgaagtttcaccacagaaacacagatgaaaactctactaagacatgtgcgatggattaaccaggatgcatccttcttcaggtcggtgtttattttgaattcctagaatcgtcatgaaattcatattatgagttgtagatcactcaggaagatctttgtcaggaaaaagtaagtgcttatccttatgcttgatgtttagcaaagactcattcagtggaatgttatgaccaacaatagcatattgtgaaataaagtttttttgcttctgaagtagctggggtatattggcctcatcaagagatccaaaactattaccatgtccaggaggaatgggaataacat

SEQ ID NO: 56164 - DNA, 1010 bp, Oryza sativa
  Clone ID: PAT_MRT4530_58101C.1
tttttttttttttttttttttttttttttttgggtgtcaggtatattcacttcactatcaagcatttcaagccaactgacattgtccaagtgcaggaaaaggcagtaagcccccatcttactcaagacattcaatagattatccttacatcgtcccaagactgctcatgataataacaatggtgcgcacaaacgacaaagcaaacatctcaacacatgtaaaccccccatctagatgaggtagaatggaaacggaatcaaatgatcgaacgcgaatctcgctaagttgtgagttccatgatggctgtgacgatgtcgccattggcagccttgagtgccttcaccgccttggacctcgacacggtggcctgggtcatcaccagctcgatgtccttcggctcgacaccagtctcgtcgacggcctcatcatcttcctgggctgctgtcgacgcctccggcttcgagagcatgctgctcagatccggcgccttgaactgctctgcagcctgggtctgcagctgcgagctcaggtcctcgatcttggcctcgccaaaaatgacataggtgtcggatgtagggctcttgaagacatccggtttggagatgacaaaaaggatattcttgctcttcttgacagtaacacggctcacaccagtgatagacttcatgccaagcttcaccatggccttcctgctttttttctcactacgactctgcttagatcttccacttgcatcacctccctccgcatcatcgtcatctttgtcatcctcgtcgtcatcatcttcatcgtcatcgtcatcttcaacaacgactggctcatctccctcgttgagcttctgctcctcgatctgggcgcggagctcctcctcctgcttcccgatctcggccgccgtcatggttgggaggggaagagaaggtggaggaggtggcggcgcagacgagcaagggaaaaaccctagagcagcgaatgcgggggggcctcgagggtcccaatcgcccataggagtg

SEQ ID NO: 56165 - DNA, 567 bp, Oryza sativa
  Clone ID: PAT_MRT4530_58102C.1
atggagagatcacctgaagtggtgcaacacaaggcagcaaaccgagctgccgaggatgatcacaccacctcgattccatggctaaagctgggtgtcgtcgatgcactgacagcagaagcaggtaagcttcccgagtcgaatccgaagccggccgtggcggcgccgcatagaaccttctcctgcaactactgcatgaggaagttcttcagctcgcaggcgctgggtgggcaccagaacgcccacaagagggagaggtgcgcgccgaggaagtcgcacggcttccagcagcagcatctcatggttgggctctccccgactgcaccgtcgtcgtttcttcaccacatgagggttaaccctcacgccacgatcctgaaggtgaaccgtggctattcttctgctgatggtgttgtcgtggcgaaattccatggaggccagatgagtagcagctgggtgccttttgcggttgaacatggtagagggtcagtctggcctgggagcttcaaagcaagctctcaggagcagaagaagcgcacggaggaagatcttgacttgagcctgcggttataa

SEQ ID NO: 56166 - DNA, 2438 bp, Oryza sativa
  Clone ID: PAT_MRT4530_58103C.1
atggccagctacggcgtcgacacgcggccggcggccgcggcggcgggaggcgggggagcgggagcgggagcggcgggggagggggcgctgtcgttcctgtcgcgcggcctccgggaggacctgcggctgatccgcgcgcgggcgggggagctggagacgttcctgaccgcgccggtgccggagccggagctgctcgcgcggctccggcgcgcgtactcgtcgtcggcggggaccacgcggctggacctgtcggccatcgggaaggcgttcgggacgggggtggtggggagggggagcaggggggcgaggtgggggtgggaggaggtccaggaggccgaggagtgggagcccatacggatggtcaaggcgcgcctcagggagatggagcggaggcggcagtggcaggccaccgacatgctccacaaggtcaagctcagcttgaaatcaatgagctttgtacctgaagcatctgaggaagttccaccgctagatttaggtgaactcctggcatatttcctaaagcaatctgggccattgtttgaccaacttggtataaaaagagacgtgtgcgataagctggtggaatctctgtgcagcaaacgcaaggaccaccttgcatataattcatttccagcaagtgaaccatccgcattcagcaatgacaatgctggtgatgaacttgacctaagaatagctagtgtcgtgcaaagtacaggacacaattatgaaggtggattttggaatgatgggcataaatatgaaacagctgacaagaggcatgttgcgatagtcaccactgccagtcttccctggatgactggaacagctgtaaatcctttatttcgagctgcttacttggctaagtcttccaagcaagatgtaaccttggtggtgccttggctttgcaagtctgatcaagaacttgtgtatcccaatagcatgacatttagttctccacaagaacaagaagcttatatgaggagttggctggaagaaagggttggtttcaagacagacttcaaaatatcattctatcctggaaagtttcaaaaagaacggagaagcataattcctgcgggggacacttcacaatttataccatcaaaggaagctgacattgctattttggaagagcctgagcacctgaactggtaccatcatgggaaacgttggactgataaatttaatcatgttgttggtgttgtgcatacaaattatttggagtacattaaaagggagaagaatggtgttattcaagccttttttgtgaagcacatcaacaatttggttgccagagcatattgccataaggttttgcgactgtcaggagctacacaagatctccccaagtccatgatctgcaatgtacatggtgtcaatcccaagtttcttgaggttggagagagaattgcagcagagagggaatctggccagcattctttctccaaaggagcttattttctagggaagatggtctgggccaaaggttacagagaattgatagatttgtatgccaaacacaagagtgatttggaaggcatcaagttggacatctatggaaatggtgaagattcacatgaggtgcaatcagcggctatgaagttgaacctaaaccttaactttcataaaggccgggatcatgcggatgattctcttcatgggtacaaggtttttataaatccaagcattagtgatgtcctttgcactgcgaccgctgaggcattagcaatgggtaagtttgttgtctgcgcagaccacccatcgaatgattttttcaggtcattcccgaactgtttgacatataaaacatcggaggactttgtcgcgaaagtgaaggaagcaatggcacgcgatccacaacccctcacacctgagcagagatacaacttatcctgggaggccgcaacacagagattcatggagcactccgagctggacaaggtcttgagcagcagcaacagggactgcaccaccagcaccagtggatgtggtaaaagtggagacaataagatggaaaaatcagcctcgttgccgaacatgtcagacatggtagatggtgggctggccttcgcccactactgcttcactggcaatgagctcctcagactgtcaaccggagcaatacccggcaccctcaattacaacaagcaacatagcttggacctccacctcttgccgcctcaggtacagaacccagtatacggctggtaagatactccatatatacaattagtagtagtatttctctcagcacatagatagctctgtaatttgtttgtaacactagttttcgtttttctttttgtctaccatatgccgaaggcaatcttgttcattattattgcaaactactactacagtactactacaaactacatgtgttagatagaagtgccattttcactggccttcatattcatattaaagcagagttgttc

SEQ ID NO: 56167 - DNA, 2534 bp, Oryza sativa
  Clone ID: PAT_MRT4530_58104C.1
cgccggccgggaaaagcgaagcagtccccaccccgaccgcgtccacctcctctcttctcccacgcgcgcctcgcctcgtctcctctcgagatctcgccatggacgccatcgactccgtggtggatcccctccgcgagttcgccaaggacagcgtccgcctcgtcaagcgctgccacaagcccgaccgcaaggagttctccaaggtggcgttgcggacggcgatcgggttcgtcgtcatgggattcgtcggcttcttcgtcaagctaatcttcatccccatcaacaacatcatcgtcgggtccggctaggttggatgctaaagaaagactagcatggggatatagtggagtactcatcaaggagaaaacagaagattattgaggatagtgctgtgttctaaagtaggcgtccaaagttcattgacccgtttcaagaaactgttgctaaaagatggtttatattctgtgccctttttggggagaaatcatcgtactgaattagactttggcagtctcgtctggagaagtggactagtggagtgtcgtgagttcttcgcttttgcttggctaaaatcgccgttagaaacttgtggaatcgagcagctcgccgcgcagccatgggtacgcgacgcgtagggctcctcctcctcctcctcctcgccgccgtactgctccagcccctcctcgcggcggcggcggcggagggcgtggtccgcatcgcgctgaagaagcggcaggtcgacgagaccggccgcgtcgggggccacctcgccggggaggatgcccagcggctcctcgcgcggcgccacggcttcctcaccaacgacgccgccagggccgcctcgaggaaggcgagggctgaggccgagggcgacatcgtggcgctgaagaactacctcaacgcgcagtactacggcgagatcgccatcggcacgccgccgcagatgttcaccgtcatcttcgacaccgggagctccaacctctgggtgccttcctccaagtgccacctctcgattgcttgctacttccactcgaggtacaaggctggtcagtcgagcacgtataagaagaatggaaaacctgcttcaattcattatggaacgggtgcaatttctggctattttagtcaggacagtgtgaaagttggtgatgtagctgtgaaaaatcaggattttattgaagctacgcgggagccaagtattacattcatggttgcaaagttcgatggcattcttgggcttggatttaaggaaatctcggtaggaaatgcagtgcctatctgcagatttcctgtcactgacattgcaaagcaaactcataggtacaacatggtgagacaaggtcttgttgttgatcctgttttctcattctggttcaaccggcatgctgatgaagggcagggaggcgaaattgtgtttggagggattgatcctaatcactacaagggaaatcatacatatgtccctgtcactaggaagggatactggcaggttgatctcattttgaagttggttgggattctgtgcagctgggtgtgcagcaatagcagattctggaacttcactgcttactggtcccacggtatggccataattactcagataaatgaaaagattggtgctactggggtagtcagtcaagagtgcaaggcagttgtttctcaatatggtcaacagatcctagatcagctgcgagcagagacaaaaccagcgaaagtatgctcttcggtcggtttatgtacttttgatggtactcatggtgttagtgctggtattcggagtgtggtggatgatgaagttggaaaatcaagtggtccctttagcagtgcgatgtgcaatgcttgtgagacagctgttgtatggatgcatacccaacttgcacaaaatcaaactcaggatctcgtattgcagtacattgatcagctatgtgaccgtcttcctagtcctatgggagaatcatctgttgactgcagcagccttgcatccatgcctgacattgccttcacaatcggtggcaacaagtttgttctcaaaccagaacaatacatcctgaaggttggtgagggaactgctacccagtgcatcagtggattcacagctatggacattcctcctcctcgtggtcctctctggatcttgggagatgtctttatgggagcctaccataccgtgttgtgaactatggcaacctgacaaggttgtcttcgggcagaggcggcataataggccccccagtagggtgaatggtagtgaatcgctgatccctgaagaattttcaacatcattgaggaggtttacctctccgcatagaggtgtaggttctatattttattgcatgctcaattaataaagctactggctatctcaaaacctttcttttttaatttgtttaagcgtagaaatcattctaagtaaacaaaattcagacgacagcatagcaaagaaatgatcatgtttttgccgtaaaaaaaaaaaaaaaagaacaataacaatgttaatgttgccggaaaaaggattacaaatgtgggcgggccct

SEQ ID NO: 56168 - DNA, 623 bp, Oryza sativa
  Clone ID: PAT_MRT4530_58105C.1
gacgtgtgtaccttaatatgattaaaggccgcgggttttttttttttttttttgcggcaaaaacatgaacatttcattgcatgctaattgcaaagtctaattcagtacgatgatttctccacaaaaagggaacagaatataaaccatcttttagcaacagtttcttgaaacgggtcaatgaactttggacgcctactttagaacacagcactatcctcaataatcttctgttttctccttgatgagtactccactatatccccatgctagtctttctttagcatccaacctagccggacccgacgatgatgttgttgatggggatgaagattagcttgacgaagaagccgacgaatcccatgacgacgaacccgatcgccgtccgcaacgccaccttggagaactccttgcggtcgggcttgtggcagcgcttgacgaggcggacgctgtccttggcgaactcgcggaggggatccaccacggagtcgatggcgtccatggcgagatctcgagaggagacgaggcgaggcgcgcgtgggagaagagaggaggtggacgcggtcggggtggggactgcttcgctttttcccggccggcctcgagggacccaatcccctatagga

SEQ ID NO: 56169 - DNA, 597 bp, Oryza sativa
  Clone ID: PAT_MRT4530_58106C.1
cgaggcttgctgtctctccctatagcttcttcttgttgttgttgttgttctctctcgcttcgagctcgtatggagtttgggatggtggaggacgcggcggcggcggcgggggaggaagggctgacgctgagcctgtcgctgcagccgtcgccgccgaggttccaggcgctcttctcctgctgctactgcccgaggaagttccggagctcgcaggcgctcggcggccaccagaacgcgcacaagctgcagcgcaacctcgccaggcggggccgcgaggccgccgcctctctcgccgccgccgccgccgcggcggccgcggcggccgcttcctcgggggatcagcagcagcaaggcaggacgacggcggcggcggcggcggtgcttgccggcggcgagagcgcgccgcctgctgctgctcgcgccgccgcggatctcgacggcgccggcgtgtggggaggagctgggatgaggggccggccggcgcaccaccaccgcctgatgcagggtggttactcttccggcggctcgtcggccgccggtggcaggggcaacggggagctcgccgacgagatgattgacctgtccctgaagctatga

SEQ ID NO: 56170 - DNA, 1229 bp, Oryza sativa
  Clone ID: PAT_MRT4530_58107C.1
cagcacacatctcgtccagtccatccatggcgagcctgagcgtgccgccggtgccgacggacccgcggcgcgacgcgatcgacctccacagggcgttcaaggggttcggctgcgacgccacggcggtgaccgccatcctcgcccaccgcgacgcctcccagcgcgccctaatccggcgccactacgcggcggtctaccaccaggacctcctccaccgcctcgccgccgagctctcgggccaccacaagcgcgccgtcctgctctgggtgctcgacccggcgtcccgcgacgccgccgtcctccaccaggcgctcaacggcgacgtcaccgacatgagggcggccaccgaggtggtgtgctccaggacgccgtcgcagctgctcgtggtgaggcaggcctacctcgccaggttcggcggcggcggcggcggcggcctcgagcacgacgtcgccgtcagggcgtccggcgaccaccagaggctgcttctggcgtacctgcgctcgccgcggtacgaggggcccgaggtggtcgacatggcggcggcggcgcgcgacgccagggagctgtacagggccggcgagaggcggctcggcaccgacgagaggacgttcatccgcgtcttctccgagcgcagcgccgcccacatggcggccgtcgccgccgcgtaccaccacatgtacgaccgctccctcgagaaggtgatctaccgatcatgcacagcagcatatgctttggctttggttttctctctctctgaatttaatggaggacgcgctgtgaagagtgaaacttcagggaactttgggtttggcctgctgacaatcctcaggtgcgccgagagcccggccaagtacttcgccaaggtgctccacgaggcgatgaaggggctgggcaccaacgacacgacgctgatcagggtggtgacgacgagggcggaggtggacatgcagtacatcaaggcggagtaccaccggagctacaagcgctcgctcgccgacgccgtccactccgagacctccggcaactaccgcaccttcctcctctccctcatcggccgcgaccgctaacgtcgattggtttcggtctctttgagcgtgtgttaagggacgcatttgttccatagcgcacaaacatggcaattatttatgtgcgtgtgtagtggtgtgttcgaacgttcgtttttcgtgtaataaaaaaaattgagtttgctgtctaaaaaaaaaaaaaaa

SEQ ID NO: 56171 - DNA, 955 bp, Oryza sativa
  Clone ID: PAT_MRT4530_58108C.1
tagcatttcttgtagtgatatcgacagtacacaatcaagtgacagaagcacatcagggggcgctcctagcactgacagcaagcttaacgatatcagaagcatccaagatgcagaccgagctgattcagacgaaaaatgtgtaacaccagaagatcttagaggcaacaagaacatttctggtgctgaactgaaaagacaagattcctcaaaaagtgtacatcagcatcacaggggtgagagtaagcagccaaaaataattgagaagataatgacaactcttagagaggagagtaggcttagagaaaacaattctcctgtaagttctagtggtgtaaagttgacttctgcagttagcaataagaatcaagcagagcaatcatcagagagctcaaggcctcacagtggtgtttcatacagttcaaagtttggtgacatttcatctaatggatggaccaatacaagcgatgaatgtgtagatccagtccaggcgccattgcaattgaaacaactgtcaccaactgttgagcattgtccaaagttaaaaaattctgggtcctcgactccagaacctgccaaacagattgcagaaaatggttcctcagcttcaggaatgagtaaaaccaaatcgtcacctagttctagtagacggcctagtcctcagagacaaacaggagcaggaattccaatcgtgccattcactgtgtcaaaacgagctcatatcaaggcagagagtgagaaaacaccaccgcgacctgcccatagcccaaataattctctacataatctccctcctttgataccgatatctacaaatctgtcagaagagaacatcaagctgggtaattctcaggcaatgccagctcctctggaattcgtgactgcagcatccaaggaggacatcagcttttactcaaattctgtagttgattgtgttgaaaaggccgagccatctgaa

SEQ ID NO: 56172 - DNA, 553 bp, Oryza sativa
  Clone ID: PAT_MRT4530_58109C.1
gagggatataacatgaccagtatcttgtttctccgttgatggatgaaataatcagattgactaaaggcatccaacaaatgagacttacaagttacaagtgtttgaaatgcatattgtagcacagagaattaaacagacgatactttaccatgattaaggcatgcataacactggtactacaagaaaatataggatatatcaacaaagaaagaaaagattacgagtacagtaatacagttaacaactgaacatgcataaagtgccaactataaaatatgtacaatatgttatatgtagccggacgcgtgggttttcagatgaaatattcttaacatactagcaaaacccacgaaatgacttaaccaagaaagttgcgatggtgtccaccaaaactgcagctgggtgagatgttcctgcgctgatttccaaagctgcgcccaaggagattgggatgcccgataaacgggagcatgtctgaatccccaccaatcaccggaaagccatgtggactataaggattaccccagccataggtaaaaaaaaggactggggc

SEQ ID NO: 56173 - DNA, 2886 bp, Oryza sativa
  Clone ID: PAT_MRT4530_5810C.1
atgagagttttcttcttgtttctcatgtttgactggtgcctgatacccacggccacagtgcacagactcctcctgctctgctttgcttcccttccctgtgcgccccgcccccacgaaaatccacttcttttcctcaccttgccactgtcggttcttgcctctttctttgaggactcgcccgcccaacagaaggaggcaaaggatgatccagtcttgaatgaccagttccggaggatctgcgcaagaaagattgctgcgcctagcatctgctcaagaaacaccatttccatggaagctcctaagcttcgcttcgtcagatgcccaggatgcctccagcttcttgtggagtatccaaccattgctgtctaccaatgtggtggctgtggtactattcttagagccaaaaatcaagttgcgccagcagtgaatgctaatgcagaatctggtgaacacaatgaattttcaaataattcaactgggggttctcaaaacaacaaattgatctgtacagatgggcagaaaattccaccatcctccgatgcacaacctggtgtgctgcaggagaagattacctttgctagcgaggaaaaaactatgtcttctagcaatagcatcgactccagtgagcatgttaacatcgagtgttccttacttgatggggatgccagcaatcatgatgtgaggactgaaggcataaatgatgaagataaagtgactgtgtctaattcaagtcttgattcagtgaggaaagtagagaatgttgaaaccgatggaaatgaaaaaggttcctttacggatgatgggagcatcagcaatgaagttgctaccacccaaagcatggtccacatggatggagctggttctgataataattttacagaagtacagagtgcagctgaggggaagtgtgcacttagcgatgctaatctggactcacaagagatagttgcgatttgccaacctgataacatttctgttggcacaaaagaaagggttcagccatatgaaggttttaatgttgaatcacatgaagatctgattgaagaattggtgaggtctctttcactcagtgatgacgaagaagagtttgtcgatatagcagaaaacagtgaacttaatgatgctttatgttctcaaatgggcagctgcagattttcattggggagcaaaatgaatgaaggccctcgaactgatcctcatggccggttgattgaagaattagagatgtctttcagtgatgctgaagaaccactagaccaaaatattatggtctccctcaatgacatagaaaagcctactttggatgaggtcagtaaagaaaatcacattttggaggaggatggtaaagaaagtcacattttggacgtggatggtaaagaaagtcacattttggacgtggatggtaaacaaaaccacattttggacgagcatggtaaagaaaaccacattttgaatgaggatgataaggaaaacctcattttggataagggtggtgaggacactttggatgcaggtggtgctaattcatatgaagaaagagtattgccatcggatgacgggcttctcaaatctggacaaagtttccaacaatgtgagctggttgctgttaacatggcagaaaaggatgaggggcatctagaagaaaccaacatggctaaccatgctgaagcaaacagtggaattgctgctgttctttcaaatttgtcaaacgataaattttgtgccatattaccacctagctgtgatgggagaaaagaagaaaaatctaacatacatagaggtagagaactctgtcaaggattgtcacttgattctgtagacttccgatcaatccaaaattttatcgagtctcaaatggatgggacctcaagttctctttcaagtggctctccaagtcatggtgacctggaacataatagatcaaacagattcaagaaaattgatcgacttgagcgcctgaggaagatggatgatctaagagatcagttaaataggctttctagccagaaaggtttggaaaataggtacaagaacaaaggccctggagtccttcaggaacagattagctacagacaccttgaacaacatccttgtggttttgatggtgattctatcctggattctgatattatcgattcctattatgatcaaggaaatccaccaaggtacccaccaccagatccgttctccccaactcattcgcactatcattgtggacatgggcaaccccatatcccatataactgcagtgcatgggagtttaattcatattatcagtcctcatatgcgggaagtacggttcttgaacacgtatcacttcgctcaagctacaaggagcagaaacgtgcagtgaagaaaagcattctgcggtctctgtctggtgcttccccatttaccatctgcaatggctgtttcaatttggttcaagtgccatcagacatctatgtatcgaaaaagaagatcgctaagttccagtgcggtcggtgctccaaggcccttatgttatcatttcctgctacaaatagtgatgatgcaaagctcagtaataaggaagtaaatcgaaaaccaaacaagcctgtccacaatagtgttgttggtatggagggtggctattctttttctgctgaatgctcacgaggggatcctgtgagcataagtgaagaatgtggagcttcaatctcaagaagcttctctggtagaactagagcagctgttgctgcatcaggaagtggaaaaaaggtgtcagactcggcacttcatcggctcatggggtatgattcagcaagccagttgttacggcgcagcagagcgtttgaggatggatatgacagttttgaatccatggtgccagtatcaaacagagtatccagaagaaagaatttgtaa

SEQ ID NO: 56174 - DNA, 1111 bp, Oryza sativa
  Clone ID: PAT_MRT4530_58110C.1
ctccttaatgaagaatttggactgaattcgaaataatttccacatgagcatgacgtagactacataaattttaaaggcctcctacaagaacgtcgcagaaatcaaccaacgcattatgcttctgtttggtggtaaagttctttcaaaagtaggatctgtttttttgacattaatctgaactgaactagacgtcaaaatcatgtggcatcggcggcgcgctcttctccatctggactgcggcggcggcgtctttcttctcgctcgttgctcgggcgtcgacgttcttgtcgccggatctatggtgcttgtcgccggcacgagccttcttcttcctgttcaggaagacatctgtcaacacggtcttggactgcaacgatgccttcagaatctccaaaccctcttggtagccgatcttgaccgtcttttcctcgagcgcggagaggtcctcgacgccgagcttgctgagcagcgcgatgctggagatgctcgacatgggcatgaaggtgaggtcgtccatgacggtgtacgtcaccacgtcccgcacgaaccctttgccagtctgggcggcggcgaggcaggtcgaacagcggcagcccgtgtccgacgacatccccgcgccgaagggcgggaacgccgccttcagagacggcagagacggggtcgtcggccggatggtcgaacactggtaggccgggtggcccggcggcggcggcggaggaggaggaggagcaacgtacggcgcctggacgcgcgggggctggacgagggacgggaagccaccggcggtggcggcgaggcaggggtgcgccggcgccgggttcagcagcgcgtcgcgcgcctccgcgctctgcatgtacgcggcgtccatcctcctcacgctggcgtacacgttcgcgacgccgccgagcgcgttctcgcccgcgagcagcttcaccacggcgccgaccggcatggcgaggagcccgacgaggaagtcgacgacgtccttgccggcctcggcgaagagcacgacctgggcctccttggcgatgagcagcttgatggtcggcgtcgtcgacggcgccgcgtccgccgaagcgcacgacgacggcacggcggcggcgttgcccat

SEQ ID NO: 56175 - DNA, 471 bp, Oryza sativa
  Clone ID: PAT_MRT4530_58111C.1
atgagaagcgggctcactctcccactctgcgtgggacccaccactccgcacgtctcctcacgcctgcgcacgttgtggataccagctgcaaaccccaatccctgcaatcccgagtcggatgcccgacgcgtggatggagtcgggatccggttcaggccgctcggctccaggcgcattgtgagaaggctcaaatcacctctcctccacgccgtcggctcgctcacctacaattgccctacctcaggtctcatcaacttatgcgccgctgtcgccgtccccctccgcctaactcctggccacgtgcgccagctgatggcggcggctgggtcagcgagggcaagcatcaggcagcggaagaaggtagacccacctcctaatcaaatggtaaagctgcgctccttccacccatggaaatcattcgccaatgctgaaactgtcgccatgaaagagcaggcgaatgatcgcatttaa

SEQ ID NO: 56176 - DNA, 485 bp, Oryza sativa
  Clone ID: PAT_MRT4530_58112C.1
atgcggcgccttgattgggatggtgttccgcggtcgtgcgtaggggccaggctcggcaggacgcggcggccagagcaggaggggaagtggccggtgcggtgcctcggctggggcagcgctgcgcggtcgtgcgcaggggctaggccagcacggctcggtaggcagagcaggaggggaggtggtgccgacacagttaggcggcgttaccgcgcaggcaagggcggccggcctcggaggatgacgagcacggagaagttctcggcgggggaggtggtggcggcgcaacggacagtggagagggagatggaggcggcagcgagggcgataccgatcgttgtcgtggctggggttgtggcggctgtgccggagccggcaacaacgagacttgcggcgaagttgttgctggtcgtgctgctggtgggagggaacagggaggccctgtgccgcccgctgtcgtgcttgccctcgccgctctgccgccccat

SEQ ID NO: 56177 - DNA, 227 bp, Oryza sativa
  unsure (1)..(227): unsure at all n locations
  Clone ID: PAT_MRT4530_58113C.1
ggttttcacacacttgtcggagctataagattcagagtccaccacccctatttttagtgttcttctaccacatataggaaaagcttcacacctgtgaccaccataatataaggagttcccaagcctttatnctctaactgatctgatctctccccctcatataccctttcacaactttattttgaaacatgtaaacgtataaaccgcaaaaaaaaaaaaaaaaaaaa

SEQ ID NO: 56178 - DNA, 688 bp, Oryza sativa
  Clone ID: PAT_MRT4530_58114C.1
cgggctgcaggcaatgtcagcccagtttgatgtcattccctaagatggcaggcattttcaaccggaacatgtacaaatctaggaagaaaggaaccccgctgtatattagtggaaaaagaatgttcacagcacgtgaaataaaagtaataacaaataacaattcaacaattattggtagaggtgcatttggtaatgtctacctaggaattcttgagaatgatagaaaggtggcagtgaagagatacataaaaggaactgaacatgaagaggatcgatgtggtaaagagctgaaccttcccgaactgatccataagaacattatccaactgttgggtttctgttgtaagctggatgctgtaatattggtttatgaatttgctaacaaaaggctctgcgacatactccatggtactagcaattttcctttcccactagatttacgtctagatattgctgttgggtcggcagaaggactggcatatatgcacagtagatccaaacccatactacatggagatgtcaaaacaacccatatacttcttgatgacaacattgtgcctaaaatctcaggttttggatcatcacagataggagaagatagcacatgggttgtggcagctgacatcaattacatagaccgaatgtacattcaaaccggacttttcacacggaagagtgatgtctatag

SEQ ID NO: 56179 - DNA, 499 bp, Oryza sativa
  Clone ID: PAT_MRT4530_58115C.1
cccacgcgtccgaaatgaggaaaacggctgattctcagtagccaatagactacccttactctttttggtggagtgtgcacgtcttgattttatactatatttctggattgatttaaatgattgacatttcagttgttagttgtttgaaaaatttaatcgacatgtatcataagtagtggcatccatacttattcaggtactattagaggtgatctacaatagagcttgagcttttcaggatttcgatacatggccaatatatgtgtccgttttgatcaaaggaagactcatgcttgctgattcttttcttagtctctcataaattgggcattgtcaagtagcttaactgaccatctaggaattgtgctaataaatttggtgtcaggtagtgttaccacgttagccctgtgagcactactcacaagtccctaaacatgtctgattttgtgagaatatcagggccaatacatgggccatgttatctgcgagagcagttgag

SEQ ID NO: 56180 - DNA, 152 bp, Oryza sativa
  Clone ID: PAT_MRT4530_58116C.1
tctgatccgaattccacctatccgtctgattcggcggcgccgagccagaaatgctggcctactactacttcaggggtgggggggagctcgagcgtcagctagctagctaggtgcgacgcgacgacgtgacggctggtattgctaaggtgagg

SEQ ID NO: 56181 - DNA, 572 bp, Oryza sativa
  Clone ID: PAT_MRT4530_58117C.1
ccggagtggctggcgccgtcgtccaacgggaggcgccgtcaccctgccaccgtggcacacgcgaaccgatgtggctggaggagggcacctgccatgttggcgtcgccccccctacccacccctcgtctccattcctgtttctggactcggaatcaagcaaataatatatccatgaatatctacagaaaaagttacatccgaattccgtttgcaagattgtgttttcgaggagagaagtttttcggtagagctttggaaaattccacaggccacatatttcgtccgtttgagtttatttttttatggttggttcttttgagttcctcagcatcgccccgccacgtcggcgtggggacggcgccagccactctggcgcccaaaaaaggaccatttctgggataagtttttctaaggtctatttgcgaaataagtttttcaaaaaggactaaaatgtgaaaaatccaggtggttagcgaggctagatctaggctaatgaaagagtagggatgggagtggaatccgttggaagtctccagataaacttttgtggtgcctttttgtcttttcatgtt

SEQ ID NO: 56182 - DNA, 499 bp, Oryza sativa
  Clone ID: PAT_MRT4530_58118C.1
aataaatgcccagggtcttttttcttgctctattaatataatagggcacgatccggatccttcattctaagaccacaccgtacatgcagatgcggcagattcccaggacaccgccataacattcatatgctaatacttaggggggagaggagctcctaacatagcactgacatacacctcagcatgcagcaacatcatgtctcaaacaactctcttcctggtacacctacagcccgatagcgcattgggatggattgcatgctaccaagcgcactcacggggattggaggaagggcgtcagccacagataggaatataggcggcgctccttccttgcagcaataggacacatctcgcgcgggatatgcgacggggatgtccatcgtctgtgatatgattaaaactctcagggctcggaggcgtaaactcgttgttccataaaggcctgggcatgagcaggaggtcaaggcctggttgagatgctctgtatccttgcccc

SEQ ID NO: 56183 - DNA, 735 bp, Oryza sativa
  Clone ID: PAT_MRT4530_58119C.1
cggaattcccgggtcgaacccacgcgtccgaaatatttataaaataaagatgtttttgtcgggcagtacgtcgccttgtcatcgagtcggactcgtgcaatcatgcgagcagcaagcggacggtgacgtgcatacgaatatacaatcggactcgtgcatctgcctccttgttcttccctggccacctgggctttctgtccatcgttcccatcagatggtcctgctgcgccaacccccaagcaaggcagctcttcaacacacgcaaacgtgacactaccgacagttctaaattctaatcggaatagtatcttaaggtatgaaatgttgtccccttcatttcagaactggattttctttgtgattcttcagctatgtatatattttcttctactttcaaacaaaacagttcaaaaattattggtgatcaaaatttctaaagtttaatcaaatcatattgtaaatgttaaatatttatgaacaaaatgagtgaatttgtccagttcttttgacgttgtcttcgcccgttacaacgcacgggcacttttactaatataataacttcagtttacccaaatctttgcgttgtatcagcaagtggtgaaaatatagtaagattgccagccacaaagggtacggcacaacagaaaagattcaacatacagcagaatccaattgaaccaaactaaagaaccgggactatagttcgatagaagtgaagtgggaataaaatagggg

SEQ ID NO: 56184 - DNA, 749 bp, Oryza sativa
  Clone ID: PAT_MRT4530_5811C.1
ccggccgggacatttactctagcaaggattggctttctgctgaatcaagttttcttgcttaaaaaaaaaaaaaaaaaaaaaaaaaaaaaaaaaaaaaaaaaaaaaaagaatcggaggaagaagggggcaagctaggatgctgcggaagggagaggcgccggggcaccaaaccccaccccacctgcacaaggacgacggcgacgacgacgacgacgcaccgtccggcttcgtcaagctcatcagcgccgagggcttcgagttcgtcgtcgacaagaaggccgccatggtctccaacacgctccgcaacatgctcacctcccccggcggcttctccgagacgcgcgagggcgaggttaggttccccgagatcagcacccccatcctcgagaagatctgccagtacttctactggtcgctccactactccagtgggaaggagacatctgagtttcaaattgaaccggagataactctggagctgatgatggctgcaaactatctggacacctgatgagatgaggtggaagtgttttagcaggttttttttgttgttgataaggaagcaatcccttggtgtgcatccccatttgagtgatgtaaacattagaggattgtaactgttgtgttgtgttgtaatatgattatgtgggtgcttatggaggtatccctgagactttggatggcaaaggccttttgtgtgcacaaacgggtttgttacattacaggaatggacataaaagataggggcc

SEQ ID NO: 56185 - DNA, 874 bp, Oryza sativa
  Clone ID: PAT_MRT4530_58120C.1
tcctctgatatagacaaagaaaacatcgatgatgatgatgatgacgacgacgtcgtcaatgtcgttgttggtgtactccgccacgatgcgtcgtcgtggtgatggcggcggtggttggcgtcgacgtggtggaggcggcggtggtggttggcgttggtgtggtggaggcggcggcggtggcatcgccaaggtgcaacccaacgctgctgacaccctgcgcgggggcggcactgttcggggtgccggtaccgctggcatgttgcgcgtagctgagggcgtaggcggcgtgcctccacgggtcagaacattgatagataaggaaaaccttgggcctgtttaggggagcgtcggctgcgccaccaacgccggtctgcgacgcgcccgctccgcgacgacctcgacgccttcctcgtcgcacggcgcgcccaaccatcagctgcgccgtgaacgcctgtccgccacgccgccggtatcccccatctcggatcctcactgtgaacgcatgtcctctccggccgtcgtcaactacttctagcatccgccgcaccgggctgagcccccgttcgccactgctcgatttctctcctctcccgcgcggcccctccatcgtcgtcgcatcgatccggcggtggcgtaggtggagcggcggctcagggagcggtcgcgcgcggagatgtgctgctcgatcccgtcgatccggcggcggcgcaggaagcggtcggcggagggagcgatgtcttgccaatatctcaggtgccatctgactaccctcaagtgccgccgccaccacgccacgggtggacaggtacttctccgcctcgccggcgccaccgtctacccacgcctctgctgttcgtcgcatcggcaggcacat

SEQ ID NO: 56186 - DNA, 316 bp, Oryza sativa
  Clone ID: PAT_MRT4530_58121C.1
ggacgcgaaatcactgagtgtatttagttaaaaaaatggggggcaaaaacgaatgaccccattgtcacaaggccagttagatgggagagcaaactccattttagtgctggagtggttatgctacacaagcctagcttaaaaatttatcgattatttggtttaaaaaaaatatttttggatatataagggcatgcatgcagagcatgcagcaacacagatgtaggatataatatatatgtgtattaatatatattgacttatgaatccaggcagtgtacttatttcacattttggagctttgcacgcacgaagaatt

SEQ ID NO: 56187 - DNA, 251 bp, Oryza sativa
  unsure (1)..(251): unsure at all n locations
  Clone ID: PAT_MRT4530_58122C.1
ttcacctgcttgaagaaatcagggcntggaaggagggcaccaggccttcgcgccgaagagcagggtaagtattggagcccgtagaaactgcgtgtgaagaatacaagcngtttggggtccctaggaaccctaagcttaagccacaaggttgacgaggatggtggaaaagacccngagtaaacccagcggggaagcccccgcgtagatagnagccccagtttgccccgcgaagagggatacgggaaagaagc

SEQ ID NO: 56188 - DNA, 738 bp, Oryza sativa
  Clone ID: PAT_MRT4530_58123C.1
cggacgcgtgggttgctcacaagtgggctggttgaactccatatgaatgtgcataaactcaagtgaaatttggggccactttaaagaagaggggcgaagaagatctgtaagttagaaggtgagcaacatggatggtgatggtgttctgacgtccaaatatgaaaccagccaaccagcttggcagcctgaagatcttttggaccaaaagggcaggcctctttcccaaggtgaagcacttcgtagctacaatatgcgagtgctcagcctatacaccatatccttatatgagtatgctgagagttttattctccattgaggtgaagtatgctcaaaagtttcgttaaaatatattcagtttagtgattttgttcatgaactaactcacttcactaccatgaactcatttctccaaaattttggatcttttattagcaaatctatggactgaagtggggttttggccagagctccaatcccctgcaaatcccaaatgcagtacgagtaatattttgcaaaattatgtactccagttctattggaattgatgtaaaaccaacagattcttagttttgtcagttattaaaacgcatagatgcatattgtgtatgacattatatcaaacgtgcgttgcacgtacatgattactagtaactacaaaaagaacgtgcctcttggaacgcttgctaattgagcctgtaatattttatttagatattatttggaatatgacattctttt

SEQ ID NO: 56189 - DNA, 127 bp, Oryza sativa
  Clone ID: PAT_MRT4530_58124C.1
gttgggcatggggcctgggtgcagagggggagaagaccagctctgggacgtcgtcggttgggatcaagcacgcaggaggaggctggcacgaaagaggcctacgtgtcccaaacgagcccattatgcg

SEQ ID NO: 56190 - DNA, 2667 bp, Oryza sativa
  Clone ID: PAT_MRT4530_58125C.1
atggatcaatcaacaattgatcgaagttggatgtatgccaaaaatttgaaacgttattctacggagtaccgaaagggcgtaataaattttatgaacgccgcggaggaggatcggataagaagaagcagtgattacatgtgttgtccatgtgcagattgcaagaacgagaatatgtttgatagcggagaggacgtacacggtcatctgatacaacgaggattcatggagggctatacatgttgggtgaagcatggagagcaagaatcagaaagtggagcagcagcaaacagaagtggtgcgcataatcaggaagatgaaaatgagcatgacatgtttataccttctccattgggcggtgaaatggttgatgtggatcacgatctactgcaagacatgttacgtgacattgaggacccagcccagaatgagagagatggaatgaaattcagcaggttggtaagtgattccgagacgcctttgtacgctggatgcaaagcaaaacacactaagttgtcagttaccttggacctaatgaagctgaaggcaagtagtggatggacagacaagagtttcatagatcttttaggaattttgaaggctatgcttcctgttgagaacacattacccgagacgacatatgaagcaaagcaggttctgtgtccactagggttagaggtccgtagaattcacgcttgtcccaacgactgcatattgtaccataagcaatatgcggacttggatacttgtcctgtctgcaaggcttctcgatacaagcgaaagaaaagtgctgacgaaggaaataagtcaaagaggggtggtccggcaaaggttgtgtggtatctacatatcattgatcatttcaagagaatctttgccaacccgaacgaagcgaagttagagaacttcaagctaagagttctattgttctgcaccattaatgactaccctgcactcggtaatctttctggacaaactataaaacgaaagaaggcatgctccgattgcaaggaacatacacgaagcctgtggctgaagaaatcacgaaagatggtatacatggtcaccggaggtggctcccgctacgtcacacatttagaagaaagaagaaaatttttaatgaaaagaatgtgtgagagtttggttggcctgatgttgaatattcccgggaagacaaaggacgggttgaacgcgcgccttgatctacaggacatgaatattcgcagcgaactccagcccatacgagatgcagagacaggtaaagtgtacctccctccagcctgccacacactgtcgaaggatgagaagatcacaatgttatcatgcttgaaggatattaaagttccatcgggctattcagcgaggataagtaagtatgttaaattggacgatctaaaacttgttggaatgaagtctcgcgattgccacgtgctaatcacacaaatcttgccagttgctatcagaggcattctaccaccgaaagtgcgtcacacgatccaacgtctgtgcgccttcttcaatgcaattggacataaggttatagatccagaagatctagatgggctgcagaccgatattgtgaataccctctgtcacctggagatgtttttcccactgtctttctttgatataatggttcatctccctgttcatctggtgaagcaaacaaaactatgtggcccagcttttctaagggaaatgtggccgtttgaaaggtacatgggagttctgaagtcgtacgttcgtaacagagctaaacccgaggggagcatcattgaaggttacacgaccgaggaggctattgagttctgtgtcaattacatgtccgatgccgatcctatcggagttccagcgtctcgtcacgagggaaggttgtcaggtgttggcacaatcggaaggaaaagaattaggcccgatcaagcgtcgtacgcgcaggctcattacgctgtgctccaacatatggcagaagttggcccatactttgaggagcacttagcgaaaatccgagatgagaacttggggcgatctgatgcatggattaacagagaacataattctcggttcaacgaatggttcaagaatcgtgtgacaatgtccacggatgtcccaaatgagacagtacagttgttgaggatgggaccgtcttggaccatagacacatggcaaggatacgatataaatggatacacattttacaccgtcaaacaagatgacaaaagcacagtgcaaaacagcggcgtccgtatagatgcatttcaggatcaagttgggtcaaacacatactacggccgcattgaggagatctgggagctaaactacgtcaagtccaaggttcctttgttccgctgctgttgggtgaatctacgcactggtgtcaaagccgacaaggaaggtttcactttagtagatctatctaaggtgggatacgccgatgaaccatttgtacttgcgaaacaggtcgagcagatattctacataaaagacccttcaaacaagaagatgcacatcatgagggatggaaagcgccgaattgtaggagttgacaacgtcgtcgatgaagaagaatacaaccataatcttcatgtaagacctcacattgaccttgacgatgatccccaagagcctgtggcatatgctcgttcagatcataccaaaggcataaccttgtga

SEQ ID NO: 56191 - DNA, 131 bp, Oryza sativa
  Clone ID: PAT_MRT4530_58126C.1
gcctcgccgaagtctccgaggtataagcccgttcgatctctccctctccctctcatccttgtttcgatctgatccgtggaatcgcttcgctggatcgccggtagagcttcccgtgcttagtaagtccgggg

SEQ ID NO: 56192 - DNA, 4203 bp, Oryza sativa
  Clone ID: PAT_MRT4530_58127C.1
atggtatacatgggtcaccggaggtggctcccgctacgtcacgcatttagaagaaagaagaaaatttttaacggtaagagagaacttcagcctgctcccaaagatttgtccggagatgaggtgcacaatatggtaaaggacataagtaatgagtttgggaagaaaagaaaatgtagaaagacaaaggagaaggcctaccacacactgtcgaaggatgagaagatcgcaatgttatcatgcttgaaggatattaaagatccattgggctattcagcgaggataattgctatcagaggcattctaccaccgaaattgcgtcacacgatccaacgtctgtgcgccttcttcaatgcaattggacagaaggttatagatccagaagatctagatgggctgcagaccgatattgtgaataccctctatcacctggagatgtttttcccactgtctttctttgatataatggttcatctccctgttcatctgatgaagcaaacaaaactatgtggcccggcttttctaagggaaatgtggctgtttgaaaggtacatgggagttctgaagtcgtacgttcgtaacagagctaaacccgaggggagcatcattgaaggttacacgaccgaggaggctattgagttctgtgtcaattacatgtccgatgccgatcctatcggagttcccgcgtctcgtcacgagggaaggttgtcaggtgttggcacaatcggaaggaaaagaattaggcccgatcaagcgtcgtacgcgcaggctcattacgctgtgctccaacatatggcagaagttggcccatactttgaggagcacttagcgaaaatccgagatgagaacttggggcgatctgatgcatggattaacatagaacataattctcggttcaacaaatggttcaagaatcgtgtgacaatgtcctcggatgtcccaaatgagacagtacagttgttggggatgggaccgtcttggaccgtagacacatggcaaggatacgatataaatggatacacattttacaccgtcaaacaagatgacaaaagcacagtgcgaaacagcggcgtccgtatagatgcattccaggatcaagttgggtcaaacacatactacggccgcattgaggagatatgggagctaaactacgtcaagttcaaggttcctttgttccgctgccgttgggtgaatctacgcactggtgtcaaagccaacaaggaaggtttcactttagtagatctatctaaggtcgagcagatattctacataaaagacccttcaaacaagaagatgcacatcgtgagggatggaaagcgccgaattgtaggagttgacaacgtcgtcgatgaagaagaatacaaccataatcttcatacgatgtctcagcaaggcgaaccaatgtcgacgacaactagtgggtccttaagggcatgtactcctaggacagggaacaaaatccctaaggaacggttccgcataacagcggtggatgccgtagggttgccgacatctccaaggaaaatattgagccgatttagatctatctgtggggtcatagggaggcagaaattcagtattctgcaagatgacatcaagctcgtgccggccgcagagaaggacattgcttggctaacgttcaaggagagcttcgattatcctgcggagcatgaggaccatctcaggcgggctgctttcaaggttatgggcaatgcttggaagaacttcaagactaagctagtcggcgagttcgtctacaacccggcgaatccagatccaagaaagaaatttccttggatcacggaacaggtctgggaggaattccatgcgaagaagtcgacccccgagtccagagctagaagcgaggcatatcgcttgctccagaccaggaaccagcatccgcaccggcttggcaccgccggatatgccagtaaggaagaggaatggcagcgtgaggatgaagaagcggaggaatcgaacacgccgctcgtgtttagcgatatcccacaccctcgggctaggaactgggctagggccaggtaccagaagaatgatgatggcacaatcttcatgccaaatgcagaagatcaacgagtatatgaagctatagagttggttgccgagcaacaagcctcgcaagaggcctgctctcaaagatgcgaggacgacctcctcacgaaatcgttgggcaacaaggaacaccgtggacagacacggggcgttgggtcttctattccctggaagtatggatttccaaactacgcgtggcagtacaagaagcggacttccaacaaggcggagaaagatgcacgccttgaagcgaagatccgggcgtctataagagctgagctaacatctgaattcaacgaaaagctcaagtcgatgagggccaagattaggcaagagatccgagaagagcaacagaacccccagctcgccgctgctgctgcgcacgaagagttaggaagtcccacccaaaaacgcagcagttgcgcatcaactgagttggcaaaaaatccaacatcggctgacagcgccgtcgaccacataacgccgagggacttgcgtacaagagtgcatggagtgcaactcaggggcgactatacaaaagttcaagtcgactcggtgaagcccgaatacgagctattcccactgaagtatccaccgaacgacgaggtcctctcactaggaaatgcccgtggtaccttcatccaatggcccaaggacctcattgagatcagggttacagcgaggccaaccactgcaccaggcggtcgtccaccgaagagacccgcctctgctccttcagcccctcctgctcaagatcgtcatgcacaatcttacgatgtgcagttgcagtacgacacggattttggggaggaccgaactgaggccgacagcaaggcgattcatgaacccccactgatgaagaagagcaggaaggcacactcttcccctcagagaattactctcgataaacccgaagcaaaggggagaggaaggggaggagaggtgcaggcctcgcttctagctccaaggaagctagatctgggcaagggccaggaagagactaagggcaaagaggtcaagaagaaatatgtcgctccacaggagttccaactaggcatgccattggttggagatgacgtgcttgccgcaatgggcaccgcttgcaaggaccttcacttatactacatggagaaatctaacgccaggaagccgaataaagctaccgatatccttggagagcacgatggaaagccatttcttggtccaacaaattatatcgtggtcgacttcaaggatcttttcgacctctacaggctccgagcggtggacacaagcctccttaagtgctactccttgttaagttgtcaatggtgtcagaagaatgcaccggaagttgccttccttgatccacaagtggtcactgtcacaaatctccagaatgtccgtcaaggaatggtcaactacatctacgacaccttgtggtcccgccgagacaaggagtacattatgtgcgcctataatcaatatgcccattggatccttctggtcataacacctaagtggagtacatgtcactacctgaactccagaattgataagaacgcatatgattggaccccaattcaactagcgatagatgaagcttgggcccaatacgtgcaaagaggaggcctcaggaagacaggacatgacaccctcatccacaaaaaagacttcccggtgaagcaacaaataggtgaccagtgcggattccatgtgtgccacaacatgcgccttctgtacagagaaaaggtgaagactttggctgagtttgagatgtgccatacctattctagtagtagtattgttcaagtcaccgggaggatccagatcttctcagttaatattacagaccttggaagtgcaatgaggaatagtggcggatccactgctttgccgttgtcaccgccgctacacgaaacccgccactgccaccgcatgaagcctgaggccactactctcaccatcaatgacctccctggctacagatccaccgctcccatgcatgcaggcggtgtattcacccaatcggaggccactacactcaaacccacgccgctacccatgagaggcgaggattctggtagagagtgggagagagaggagagggaaagtgggactaggggagaggagtgggaaagaggaaataaatggtag

SEQ ID NO: 56193 - DNA, 760 bp, Oryza sativa
  Clone ID: PAT_MRT4530_58128C.1
agaaagcattataaccattagagggaagagatggtagcatcatcatgattcatgagctcacttcatccagtacaaatgattgcgaaaatgccatcgaaattatatgtacaagctcgtgttgtttcagtaaaaccgtatacacatgtaacgcatcgtcctatctaattctaccacggctcggagttcttcgtccagtaactcgtggcaggtgatctgcggctgctccagccatcctctgctaaaatcaagcttacccgcgctctcagggtgttcaccgcttcgtcctccatgatctccagcggattgttccaatgctgcccagccactgcggtttggtatgatgccaagtattgcaggcagtcttcatagtacccacagtggtagagaagggcggcataatccctcagttcacggggatcgtggttcagtaggataagtcgttcacatgctgctaaagcacgccgcatatcaccaaaccggacattagtccatactccacgcatcaacctatgttgagcagcttttgcagcagccatctctatggtacttatattgccatgtggcgttgtttgattatcacctacattaccagggccatgttggtttgcagaaacagcatttaaaaataagctaccagactggttggactggaaaggccaaaatgtattcttcagagttttcaaaatctcaaccaaaagtgactttgatgtcataatatgcggtcggacgcgtgggcggacgcgtggacggacgcgtgggt

SEQ ID NO: 56194 - DNA, 431 bp, Oryza sativa
  Clone ID: PAT_MRT4530_58129C.1
cccagtgtttgctgttagcatgcaccaagaccttactgggggtcatcgttgccaaggcgagggcaagctgctccactggcttgcaagactatgcgtgtgcttgatctgctaggggcgtcagcaccatcataccctgtgtaactaccacaggcatcatcttcccttactccaatgctacatattatgaggttatttttacctggaactatttttatacaaggttcaagccaggggctatgcactctgtctgtgataaggtctgcacaaatgcacgctctacatacagaggtgctgggatatatggtctggtctctgtcatcagctgcagatataggtttgtgttttgaaatacctcgactgattgctgagcacgacaccctaatgtagcagactcttacacaggaggaggtgttatgtgaactctacatgac

SEQ ID NO: 56195 - DNA, 568 bp, Oryza sativa
  unsure (1)..(568): unsure at all n locations
  Clone ID: PAT_MRT4530_5812C.1
ttttttttttttttttttttttatagaatgctagaaatgaattgcattataagcccttattatacattagctacaaaattaatcaaagacttaagattaacgatgcagtagtaataattttaaaccaaggtgatattacagtaggtacgtacaagtagtcgtattaatgtacgtacactacgcgtatactagtataataccgtcgtatttttttccgctgactcgatcgttgactagttactactactactagtagtagttctggttggtgcatctgcaagtcttcctgatctcgaagtgggtgccctcggcggggagcttgctgagcttggccatggcggcggcgaagtccacgtcccacttggtggcgttgtccctgtactcggcgaggtcggcggcggcgtcgccgtcggtgcgcagcacccagtccgacttgaacagcacccggttctgcaggttgttgtggtagtagctgttgtccagcgcccccaccgcccgtcgtgtccacgccngcggcgttggtacccggcggcgctctggaacgccgngcccatgtcgcggatgtttg

SEQ ID NO: 56196 - DNA, 223 bp, Oryza sativa
  Clone ID: PAT_MRT4530_58130C.1
gaatattagtgggtccggtgttccacgtctgtcgtagaagtaggtgttttacgcgttctagttgggaggtatccgctaccggtacggtgtttggaggtagcgacgaaccgcgtggttgtgagtcggttgtttgggtcatgttgtgtgttacgtctgttgtccccactatacgtacgccgggtcttctttgcggaatgcacacagagtggagaaataatggatg

SEQ ID NO: 56197 - DNA, 1121 bp, Oryza sativa
  Clone ID: PAT_MRT4530_58131C.1
tgtcccgcctcctttgaaccctagccccacccccaactcaactttccccgcccccgccaccgagaccgtcacccgcagccaccgagccctccacggcctccaccgagcccgtcgcctccaccgaccggcgacgccctccaccgaacctggcgccaccgccaccgagcccgccaccaccgccctcgccaagcctgccgccgtcgccaccgacgctgagcccgcggctgccgccaccgagcctccttggcccttcattcggaccaccgccacctcctcactgacgacccccaccgagcccgcgccgccgccaccgagcctctacaccgactggacagggaacaaaatccctaaggaacggttccgcataacagtggtggacgccgtagggttgccgacatctccaaggaaaatattgagccgatttaggtctatctgtggggtcatagggaggcagaaattcagtattctgcaagatgacatcaagctcatgccggccgcagagaaggacattgcttggctaatgttcaaggagagctttgattatcctgtggagcatgaggaccgtctcaggcgggctgctttcaaggttatgggcaatgcttggaagaacttcaagactaagctagtcggcgagttcgtctacaacccggcgaatctagatccaagagagaaatttccttggatcacggaacaggtctgggaggaattacatgcgaagaagtcgacccccgagtccagagctagaagcgaggcatatctcttgctccagaccaggaaccagcatccgcaccggctgggcaccgccggatatgccagtaaggaagaggaatggcaacgtgaggatgaagaagcggaggaatcatgcacaccgctcgtgtttggcgatatcccacaccctcgggctaggaactgggccagggccaggtaccagaagaatgatgatggcacaatcttcatgccaaatgcagaagatcaacgagtgtacgaagctataatggagttggttgccgagcaacaagcctcgcaagaggcctgctctcaaagacgtgaggacgacctcctcacgaaagcgttgggcaacaaggaaccacggggacggacaccgggcggttgggcttctg

SEQ ID NO: 56198 - DNA, 1429 bp, Oryza sativa
  Clone ID: PAT_MRT4530_58132C.1
agagggaagagatggtagcatcatcatgattcatgagctcacttcatccagtacaaatgattgcgaaaatgccatcgaaattatatgtacaagctcgtgttgtttcagtaaaaccgtatacacatgtaacgcatcgtcctatctaattctaccacggctcggagttcttcgtccagtaactcgtggcaggtcatagttggtactccagtttgattattaccaccttccgcgctctcagggtgttcaccgcttcgtcctccatgatctccagcggattgttccaatgctgcccagccactgcggtttggtatgatgccaagtattgcaggcagtcttcatagtacccacagtggtagagaagggcggcataatccctcagttcacggggatcgtggttcagtaggataagtcgttcacatgctgccatgaagatgaaaggtacgaatctctggttaggaactgctgctaaagcacgccgcatatcaccaaaccggacattagtccatactccacgcatcaacctatgttgagcagcttttgcagcagccatctctatggtacttatattgccatgtggcgttgtttgattatcacctacattaccagggccatgttggtttgcagaaacagcatttaaaaataagctaccagactggttggactggaaaggccaaaatgtattcttcagagttttcaaaatctcaaccaaaagtgactttgatgtcataatatgcggttcatcgcccaacttgcttttgtgtttgtcataacccctaggcagactgttgagatcatgtggaaagaaaatctccacattgaattccagtaagccatacaatcgtagcatcttcagtatctcggagtatatcaacgagagcattagagctgatcccaaccggcacgtcagaaccttgtggacgtagaggtagcggtcgaggtggtcgaggaagacctggggcggcgcgccggcgggcgggaggtagccgtcggcgaggaagccggtggagaggtcgtcgaggcgggagacgaaggcctcgacggggagcggcacggaggagtgggagacgagcgagtcgtcctcggcggcgacgcagagcgcggcgcgggcgaggtccgcgccgcggctgatggcgatgctggtctcggcgtccagccgcgtcagcctcccgacctgcttcgcgaacccctccctcgccgccctcgcgtgctcggtcgacacccccgccccctcgagcgagtcgtgcagcaccatccgcgccggccgccctccgccgccgccgtcgccggacgcgtccccgcccgcgcaggcccggaaggcggaggacgacgaggaggaggcgctcccccgccgccatcgcccccgccggtgccgcggcggcacgggggagggcgagcagggggaagggacccagaccgccgcgcagctcat

SEQ ID NO: 56199 - DNA, 3237 bp, Oryza sativa
  Clone ID: PAT_MRT4530_58133C.1
ttttattttgtaacaattgatcgaagttggatgtatgcgaaaaatttgaaacgtcattctacggagtacagaaagggcgtaataaattttatgaacgccgcggaggaggatcggaaaagaagaaacagtgattatatgtgttgtccatgtgcagattgcaagaatgagaataagtttgatagcggagaggacgtacacggtcatctgatacaacgaggattcatgaagggctatacatgttgggggaagcatggagagtaagaatcaggaaatagagcagcagcagacagaagtggtgcgcataatcaagaagatgaagatgagcatgacatgtttaaaccttctccattgggcggtgaaatggttgatgtggatcacgatctactgcaagacatgttacgtgacgttgaggacctagcccagaatgagagagatggaatgaagttcagcaggttggtcagtgattccgagacgcctctgtacgctggatgcaaagcaaaacacactaagttgtcagttaccttggacctaatgaagctgaaggcaagtagtggatggacagacaagaatttcacagatcttttaggaattttgaagtctatgcttcctgttgagaacacattgcccgagacgacatacgaagcaaagcaggttctgtgtccactagggttagaggtccgtagaattcacgcttgtccaaacgactgcatattgtaccataagcaatatgcggacttggatgcttgtcctgtctgcaaggcttctcgatacaagcgaaagaaaagtgctgacgaaggaaataagtcaaagaggggtggttcggcaaaggttgtgtggtatctacctatcattgattgtttcaagagaatctttgccaacccgaacgaagcgaagttagtacgttggcacgccacggagagaaggaatgacggtctgaggcaacccggcaatgatatcgatgtattcctggagcctgttatcgacgatctggagattctttggaaagaaggtgtggaaacttgggatgcatatggtcaggagaacttcatgctaagagttctattgttctgcaccattaatgactatcctgcactcgaaaagaatgtgtgtgagagtttggttggcctgatgttgaatattcccaagaagacaaaggacgggttgaacacgcgtcttgatctacaggacatgaatattcgcagtgaactccagcccatacgagatgcaaagacagtcgagacatcaaacatcgacagagtgtacctccctctagcctgccacacattgtcgaaggatgagaagattgcaatgttatcatgcttgaaggatattaaagttccattgggctattcagcgaggataagtaagtatgttaaattggacgatctaaaacttgttggaatgaagtctcacgattgccacgtgctaatcacacaaatcttgccagttgctatcagaggcattctaccatcgaaagtgcgtcacacgatccaacgtctatgcgccttcttcaatgcaattggacagaaggttatagatccagaagatctagatgggttgcagaccgatattgtgaataccctttgtcacctggagatgtttttcccactgtctttcttcgatataatggttcatctccctgttcatctggtgaagcaaacaaaactatgtggcccgacttttctaagggaaatgtggccgtttgaaaggtacatgggagttctgaagtcgtacgttcgtaacagagctaaacccgaggggagcatcattgaaggttacacgaccgaggaggctattgagttctgtgtcaattacatgtccgatgccgatcctatcggagttcctgcgtctcgtcacgagggaaggttgtcaggtgttggcacaatcggaaggaaaagaattaggcccgatcaagcgtcgtacgcgcaggctcattacgctgtgctccaacatatggcagaagttggcccatactttaaggagcacttagcgaaaatccgagatgagaacttggggcgatctgatgcatggattaacagagaatataattcttggttcaacgaatggttcaagaatcttgtgacaatgtccacggatgtcccaaatgagacagatcaagttgggtcaaacacatactacggtcgcattgaagagatctgggagctaaactacgccaagttcaaggttcctttgttccactgccgttgggtgaatctacgcactggtgtcaaagccgacaaggaaggtttcactttagtagatctatcaatggtgggatacgccgatgaaccatttgtacttgcgaaacagatgcacatcgtgagggatggaaagcgccgaattgtaggagttgacaacgtcgtcgatgaagaagaatacaaccataatcttcattttatttatatgcttcgtttatttataagtgacattcaattcattgtaatagattgtagcactgaattgtgtattttcgttattttgaaaaaaagaagacgatgtctcagcaaggcctgctctcaaagacgtgaggacgacctcctcacgaaagtgttgggcaacaaggaacaccgtggacggacacggggcgttgggtcttctgttccctggaagtatggatttccagactacgcgtggcagtacaagaagcagacttccaacaaggcggagaaagatgcacgccttgaagccaagatccgggcgtcgataagagctgagctgacatctgaattcaatgaaaagctcgagtcgatgagggccaagattaggcaagagatccgagaagagcaacagaacccccaggccgccgctgctgctgcgcacgaagagttaggaagtcccaccaaaaaacgcagcagttgcgcatcaactgaggtggcggaaaatccaacatcggtcgacagcgccgtcgaccacatagcggaaccaacgagctgcaccctcacaattaggttgatgccgaccttcacggttccagcagccgagggacttgcgtacaagccgaccccagagacaagagtgcatggagcgcaactcaagggcggccgtgcaaaagttcaagtcgactcggtgaagtcggaatacaagctattcccactaaagtatccaccgaacgacgaggtcctctcactaggaaatgcccgtggtaccttcatccaatggcccaaggacctcattgagatcagggttacagcgaggctgtcacgcccagaaattcacgaaccagaatttctaagctga

SEQ ID NO: 56200 - DNA, 3402 bp, Oryza sativa
  Clone ID: PAT_MRT4530_58134C.1
atgtcgacaacaactagtgggtcctcaagggcacgtactcctaggacagggaataaaattcctaaggaacggttccgcataacagtggtggacgccgtagggttgccgacatctccaaggaaaatattgagccgatttaggtctatctgcgaggtcatagggaggcagaaattcagtattctgcaagacgacttcaagctcgtgtcggccgcagagaaggacattgcttggctaacgttcaaggagagctttgattatcctgcggagcatgaggaccgtatcaggcgggctgctttcaaggttatgggcactgctcggaagaacttcaagactaagctagtcggcgagttcgtttacaacccggcaaatccagatccaagagagaaatttccttggatcacggaacaggtatgggaggaattctatgcgaagaagtcgacccccgagtccagagctagaagcgaggcatatcgcttgctccagaccaggaaccagcatccgcaccggcttagtaccgtcggatatgccggtaaggaagaggaatggcagcgtgaggatgaagaagcggaggaatcgtgcacaccgctcgtgtttggcgatatcccacaccctcgggctaggaactgggccaaggctaggtaccagaaacatgatgatggcacaatcttcatgcaaaatgcagaagatcaacgagtatatgaagctataaaggagttggttgccgagcaacaagcctcgcaagaggcctgctctcaaagacgcgaggacgacctcctcacgaaagcgttgggcaacaaggaacaccgtggacggacacggggcgttgggtcttctgttccctggaagtatggatttccagactacgcgtggcagtacaagaagcggacttccaacaaggcggagaaagatgcacgccttgaagccaagatccgggagtcgatacgagctgagctgacatctgaattcgacgaaaagctcgagtcgatgagggccaagattaggcaagagatccgagaagagcaacagatcccccaggccgccgctgctgctgcgcacaaagagttaggaagtcccaccgaaaaatgcagcagttgcgcatcaactgagttggcggaaaatccaacatcgatcgacagcgccgtcgaccacataacggaaccaacgagctgcaccctcacagttagggtgatgccgaccttcactgttctagcagccgagggacttgcgtacaagccgaccccagagacaacagtgcatggagcgcaactcagggccgactgtgcaaaagttcaagttgactcggtgaagcccgaatacgagctgttccctctgaagtatccaccgaacgacgaggtcctctcactaggaaatgctcgtggtaccttcatccaatggcccaaggacctcattgagatcagggttacagcgaggccaaccactgcaccaggcggtcgtccaccaaagagacccgcctctgctccttcagcccctcctgctcaagatcgtcatgcacaatcttacgatgtgcagttgcagtacgacgcggattttggggaggaccgaatggaggccgacagcaaggcgattcataaacccccaccgatgaagaagagcaggaaggcacactcttcccctcagagaattactctcgataaacccgaagcaaaggggagaggaaggggaggaaaggtgcaggcctcgcttctagctccaagaaagctagatctgggcaagggccaggaagagactaagggcaaagaggtcaagaagaaatacgtcgctccacaggagttccaactaggcatgccattggttggagatgacgtgcttgctgcaatgggcaccacttgtaaggaccttcacttatactacatggagaaatctaacgccaggaagccaagtaaagctaccgatattcttggacagcacgatggaaagtcattccttggtccaacaaattatatcgtggtcgacttcaaggatcttttcgacctctacaggctccgagcggtggacacaagcctccttaagtgttactccttgaagacaggacatgacaccctcatccacaaaaaagacttcccggtgaagcaacaaataggtgaccagtgcggattccatggcacaataaccaagtctctgactaccagctttgaggaggcaatgatgaacacttattatgcaactgtggtgattgtcaccttcctcgacgcgatgtggctcatcgccccacccgtcgagcgggtcttcttctaccgcctcggcgacggcggaggcggtgccacatgtgacgtcgacgttgcgctgtccaggttggtcgactccctagcccgcgcgctccacgtcttctacccgctcaccgtccgcctccgccgcacgcccggcaaggccaaccggtacgagctcttctaccagccaggcgacgccatcgccttcaccgtcgccgagcacacggcgtcggtgtcgatgagctggccacggatgacccgagggaggttgccaggattgagccgctcgtgccggagctcccggatggcggcgcggtgctggccgtgcaggccaccgtgctgttgcggccggcggcgccgcgcggcctcgccctcggcgtcaccgtgcaccacgccgcctgcgacggctcgagctccacgaacttcctccacacctgggccgccatctgctcaggcgccgccgccgcccgtcatcgaccgcacgtccatccctgaacgtgaagatatccaccatgtaaagacgaggacgaccaactcgcccgaccccgacgtcgtcgacagcaagctcctcaccacattcacgctgtcaagggaaaacctgcagagcatcagggacagggtcagcgccgcggcgtgctgcctccgcggcgcgggcggcgacgtcgaagcagagcctcggaaccatggccgccgtgcccacctcgtcttcgccaccgatctccggtcacggatggaaccccacatcccggacaagtacctcgggaactgcatcggcacgtgcttcgcgtcggcgcccagaatggacatcgccgcaaccggcgcggatggcctattcgcggcctgcgctgcgatcgccgccgccgtcgacgaaggaatgcgatatgatcaaggctactgggacaggtgcagggagcacagggcagaggtgacgacctggccgttgtcggtggccgggtcaccgaggttccgcgtgtacgacgtcgactttgggttcgggagtccggcgaaggtggagatcgtgtccgtggcgaagaccggcgcgatgtcggtggcggagggccgtggcggctgctccggcggcattgagattgaggtaggcatcgctttgtcgccggagcggatggagaggttccggaggtgcttccgcgatgaagtcgcgtggctgtcgtcgtga

SEQ ID NO: 56201 - DNA, 645 bp, Oryza sativa
  Clone ID: PAT_MRT4530_58135C.1
atgggcgacggcggtgtgcggaaggagcagggtccacggcggtgcgtggcgggcacagtgcgcaaagctcctctccagggaggctgccgccggcggcagatgggggcgaggcgagcctggccgagctctgccgccgccgccgcactgacgcacacgtgctcgtccgctgtcgcttcctctgcccccttcgcccccgctcccgacggcgaagaggtcccctgccccctgaaccacgcgctgcagaagacggacacgacgagaaagctgtgcgcgagtgcgacgcggagcttgcggccgtcgacgggatcctccggggcggcgggcagcgaagggcggatggggcaggagtgggcgcaggtggaggaaccgaacggcctcggggtcgggaagaggacggcggaggtggtgaggcgcgggagcttcgcgtcggcttcaacttccacaagtcctcgtcgtctctcgccgccctcctcgccggcggaagctcgccaaccacgcgctcgtcctcagtgccaccttcctctcaagcttcaccgccgtgatgaggtgctcctccgctccgacgacaacggggagctcgcccacgccatgggcgtcgagctcaacgtttgctcccgccgctgccgccgcctcgtcgccgactga

SEQ ID NO: 56202 - DNA, 5076 bp, Oryza sativa
  Clone ID: PAT_MRT4530_58136C.1
atggatcaatcaacaattgatcgaagttggatgtatgcgaaaaatttgaaacgttattctacggagtacagaaaggattgcaagaatgagaatatgtttgatagcggagaggacgtacacggtcatctgatacaacgaggattcatggagggctatacatgttgggtgaagcatggagagcaagaatcaggaagtggagcagcagcagacagaagtggtgcacataatcaggaagatgaagatgagcatgacatgcttataccttctccattgggtggtgaaatgctgaaggcaagtagtggatggacagacaagagtttcacagatcttttaggaattttgaaggctatgcttcctgttgagaacacattgcccaagacgacatacgaagcaaagcaggttctgtgtccactggggttagaggtccgtagaattcacgcttgtcccaacgactgcatattgtaccacaagcaatatgcggacttggatgcttgtcctgtctgcaaggcttctcgatacaagcgaaagaaaagtgctgacgaaggaaataagtcaaagacgggtggtccggcaaaggttgtgtggtatctacctatcattgatcgtttcaagagaatctttgccaacccgaacgaagcgaagttagtacgttggcacgccacggagagaaggaatgacggtccaaggcaacccggcaatgatatcgatatattcctggagcctgttatcgacgatctggagattctttggaaaggtgtggaaacttgggatgcatatggtcaggagaacttcaagctaagagttctattgttctgtaccattaatgactaccctgcactcggtaatctttccggacaaactataaaaggaaagaaggcatgctccgattgcaaggaacatacacgaagccggtggttgaagaaatcacgaaagatggtatacatgggttaccggaggtggctcccgctacgtcacgcatttagaagaaagaagaaaatttttaatggtaagagagaacttcagcctgctcccaaagatttgtccggagatgaggtccacaatatggtcaaggacataagtaatgagtttgggaagaaaagaaaacgtagcaagacaaaggagaagggtatgtggaagaaaaaatccatattttggcggctaccttactggaaagatcttgatgtccgtcattgcattgatctcatgcatgtagaaaagaatgtgtgtgagagtttggttggcctgatgttgaatattcccgggaagacaaaggacgggttgaacgcgcgccttgatctacaggacatgaatattcgcagtgaactccagcccatacgagatgcagagacaggtaaagtgtacctccctccagcctgccacacattgtcgaaggatgagaagatcgcaatgttatcatgcttgaaggatattaaatttccatcgggctattcagcgaggataagtaagtatgttaaattggacgatctaaaaattgttggaatgaagtctcacgattgccacgtgctaatcacacaaatcttgccagttgctatcagaggcattctaccaccgaaagtgcgtcacacgatccaacgtctctgcgccttctttaatgcaattggacagaaggttatagatccagaagatctagatgggctgcagactgatattgtgtataccctctgtcacctggagatgtttttcccactgtctttctttgatataatggttcatctccctgttcatctggtgaagcaaacaaaactatgtggcccggcttttctaagggaaatgtggccatttgaaaggtacatgggagttctgaagtcgtacgttcgtaacagagctaaactcgaggggagcatcattaaaggttacacgaccgaggaggctattgagttctgtgtcaattacatgtccgatgccgatcctatcggagttccagcgtctcgtcacgagggaaggttgtcagaagttggcccatactttgaggagcacttagcgaaaatccgagatgagaacttggggcgatctgatgcatggattaacagagaacataattctcggttcaacgaatggttcaagaatcgtgtgacaatgtccacggatgtcctaaatgggacagtacagttgttggggatgggaccgtcttggaccgtagacacatggcaaggatatgatataaatggatacacattttacaccgtcaaacaagatgacaaaagcacagtgcaaaacagcggcgtccgtatagatgcattccaggatcaagttgggtcaaacacatactacggccgcattgaggagatctgggagttaaattacgtcaagttcaaggttcctttgttctgctgccgttgggtgaatctacgcactggtgtcaaagccgagaaggaaggtttcactttagttgatctatctaaggtgggatacgccgatgaaccatttgtacttgtgaaacagcgtctcgtcacgagggaaggttatcaggtgttggcacaatcggaaggaaaagaattaggcccgatcaagcgtcgtacgcgcaggctcatgtcgacgacaactagtgggtcctcaagggcacgtactcctaggacagggaacaaaatccctaaggaacggttccacataacagcggtggacgccgtagggttgccgacatctccaaggaaaatattgagccgatttagatctatctgcggggtcatagggaggcagaaattcagtattctgcaagatgacattaagctcatgccggccgcagagaaggacattgcttggctaacgttcaaggagagctttgattatcctgtggagcatgaggaccgtctcaggcgggctgctttcaaggttatgggcaatgcttggaagaacttcaagactaagctagtcggcgagttcgtgtacaacccggcaaatccagatccaagtgagaaatttccttggatcacagaacaggtctgggaggaattccatgcgaagaagtcgacccccaagtccagagctagaagcgaggcatatcgcttgctccagaccaggaaccagcatccgcaccggcttggcaccgccggatatgccagtaaggaagaggaatggcagcgtgaggatgaaggagcggaggaatcgtgcacacagctcgtgtttggcgatatcccacaaactcgggctagaaactgggccagggccaggtaccagaagaatgatgatggcacaatcttcatgccaaatgcagaagatcaacgagtatacgaagctataaaggagttggttgccgagcaacaagcctcgcaagaggcctgctctcaaagacgcgaggacgacctcctcacgaaagcgttgggcaacaaggaacaccgtggacggacacgaggcgttgggtcttctgttccctggaaatatggatttccaaactacgcgtggcagtacaagaagcggacttccaacaaggcggagaaagatgcacgccttgaagccaagatccgggcgtcgataagagctgagctgacatctgaattcgacgaaaagctcgagtcgatgagggccaagattaggcaagagatccgagaagagcaacagaacccccaggccgccgctactgctgcgcacgaagagttaggaagtcccacccaaaaacgcagcagttgcgcatcaactgagttggcgaaaaatccaacatcggtcgacagcgccgtcgaccacataatggaaccaacgagctgcaccctcatagttagggtgatgccgaccttcacggttccagcagccgagggacttgcgtacaagccgaccccagagacaagagtgcatggagcgcaactcagggccgactgtgcgaaagttcaagtcgactcggtgaagcccgaatacgagctgttccctctaaagtatccaccgaacgacgaggtcctctcactaggaaatgcccgtggtaccttcatccaatggcccaaggacctcattgagatcagggttatagcgaggccaaccactgcaccaggcggtcgtccatcaaagagacccgcctctgctccttcagcccctcctgctcaagatcgtcatgcacaatcttacgatttgcagttgcagtacgacacggattttggggaggaccgaacggaggccgacagcaaggcgattcatgaacccccaccgatgaagaagagcaggaaggcacactcttcccctcagagaattactctcgataaacccgaagcaaaggggagaggaaggggaggaaaggtgcagtcctcgcttctagctccaaggaagctagatctgggcaagggccaggaagagactaagggcaaagaggtcaagaagaaatacgtcgctccacaggacttccaactaggcatgccattggttggagatgatgtgcttgccgcaatgggcaccgcttgcaaggaccttcacgcatactacatggagaaatctaacgctaggaagccgaataaagctaccgatatccttggagagcacgatggaaagccattccttggtccaacaaattatatcgtcgtcgacttcaaggatctatttgacctctgcaggctccgagcgaagaatgcaccggaagttgccttccttgatccacaagtggtcactgtcacaaatctccagaatgaccgtcaaggaatggtcaactacatctacgacaccttgtggtcccgccaagacaaggagtacattatgtacgcctataatcaatatgcccattggatccttctggtcataacacctaagtggacgatagatgaagcgtgggcccaatacgtgcaaagaggaggcctcaggaagacaggacatgacaccctcatccacaaaaaggatttcccggtgaagcaacaaataggtgaccagtgcggattccatgtgtgccacaacatgcgccttctgtacagagaaaaggtgaagactttggctaagtttgagggcacaataaccaagtctctacctaccagctttgaggaggttcgtgagaagatagccagcttcatcctccgcgaaataattaaccccaaaggaatgtcgaagaataaaggaagtaacaacaagatcgacaagctccagaactag

SEQ ID NO: 56203 - DNA, 352 bp, Oryza sativa
  Clone ID: PAT_MRT4530_58137C.1
gggcaaacaaacatactgaaaaggttttggcaaacaggggtaatttaacagctttttaacagggcaaaattggggggtttttcctgggggtgggattggggaacaagaaaacccggttccccccattattttttaacgggacaaaaggggggcccaaaacttcttagggaatttaagaacattattgtttccttcgggagggggccaccacagttcgggtcctaaaagattgtttctgaaagccgaaaacaaaaaaggccatggccccaaaaacaacagagggggcatcaaacgggcccccgaattcattttaatgaaccccaggtttttttggggctgggggttccttggt

SEQ ID NO: 56204 - DNA, 2793 bp, Oryza sativa
  Clone ID: PAT_MRT4530_58138C.1
atgagacgggatgacgcaagcactcgtggcgacgcggcctttgtgcgggatttcggcggcttggtcgggcggtgggcccacgcgggcgtggcgtggcacacagcgcgcgcacggtgcaaggtgaccggaagggcgcaccggtcatgcgcgacacggtcgcagctcggagcaattgatcgaagttggatgtatgcgaaaaatttgaaacgtcattctacggagtacagaaagggtgtaataaattttatgaacaccacggaggaggatcggaaaagaagaaatagtgattacatgtgttgtccatgtgcagattgcaagaatgagaatatgtttgatagcggagaggacgtacacggtcatctgatacaacgaggattcatggagggctatatatgttgggtgaagcatggagagcaagaatcaggaagaggagcagcagcagacagaagtggtgcgcataatcaggaagatgaagatgagcacgacatgtttataccttctccattgggcggtgaaatggttgatgtggatcacgatctgctgcaagacatgttacgtgacgttgaggacccagcccagaatgagagagatggaatgaagttcagcaggttggttagtgattccgagacgccactgtacgctggatgcaaagcaaaacacactaagttatcagttaccttggacctaatgaagctgaaggcaagtagtggatggacagacaagagtttcgcagatcttttaggaatttcgaaggctatgcttcctgttgagaacacattgcccgagatgacatatgaagcaaagcaggttctgtgtccactggggttagaggtccgtagaattcacgcttgtccaaatgactgcatattgtaccacaagcaatatgcggacttggatgcttgtcatgtctgcaaggcttctcgatacaatcaaaagaaaagtgctgacgaaggaaagaagtcaaagaggggtggtccggcaaaggttgtgtggtatctacctatcattgatcgtttcaagagaatctttgccaaccccaacgaagcgaagttagtacgttggcacgccacggagagaaggaatgacggtccgaggcaacccgtcaatgatatcgatgtattcctggagcctgttatcgacaatctggagattctttggaaagaaggtgtggaaacttgggatgcatatggtcaggagaacttcaagctaagagttctattgttctgcaccattaatgactaccctgcactcggtaatctttccggacaaactataaaaggaaagaaggcatgctccgattgcaaggaacatacacgaagccggtggctgaagaaatcacgaaagatggtatacatgggtcaccggaggtggctcccgctacgtcacgcatttagaagaaagaagaaaatttttaacggtaagagagaacttcagcctgctcccaaagatttgtccggtgatgaggtccacaatatggtcaaggacaaaagcaatgagtttgggaagaaaagaaaacgtagcaagacaaaggagaatggtatgtggaagaaaaaatccatattttggcggctaccttactggaaagatcttgatgtccgtcattgcattgatctcatgcatttagaaaagaatgtgtgtgagagtttggacatgaatattcgcagtgaactccagcccatacgagatgcagagacaggtaaagtgtacctccctccagcctgccacacactgtggaaggatgagaagatcgcaatgttatcatgcttgaaggatattaaagttccattgggctattcagcgaggataacttttctaagggaaatgtggctgtttgaaaggtacatgggagttctgaagtcatacgttcgtaacagagctaaacccgaggagagcatcattgaaggttacacgaccgaggaggctattgagttctgtgtcaattacatgtccgatgccgatcctatcggagttcctgtgtttcgtcacgagggaaggttgtcaggtgttggcacaatcggaaggaaaagaattaggcccgatgaagcgtcgtacgcgcaggttcattacgctgtgctccaacatatggcagaagttggcccatactttgaggagcacttagcgaaaatccgagatgagaacttggggcgatctgatgcatggattaacaaagaacataattctcggttcaacgaatggttcatgaatcgtgtgacaatgtccacggatgtcccaaatgagacattacagttgttgggaatgggaccgtcttggaccgtagacacatggcaaggatacgatataaatggatacacattttacaccgtcaaacaagatgacaaaagcacagtgcaaaacagcggcatccgtataaatgcattccaggatcaagttgggtcaaacacatactacggccgcattgaggagatctgggagctaaactacgtcaagttcaaggttcctttgttccgctgccgttgggtgaatctacgcactggtgtcaaagccgacaaggaaggtttcactttagtagatctatctaaggtgggatacgccgatgaaccgtttgtacttgcgaaacaggtcgagcagatattctacataaaagacccttcaaacaagaagatgcacatcgtgagggatggaaagcgccgaattgtaggagttgacaacgtcgtcgatgaagaagaatacaaccataatcttcatgtaagacctcacattgaccttgacgatgatccccaagagcctgtggcatatgctcgttcacatcatacggaaggcataaccttgtga

SEQ ID NO: 56205 - DNA, 3471 bp, Oryza sativa
  Clone ID: PAT_MRT4530_58139C.1
tctaggtgtacaccatttcttcattccatattccttgtcgagatccagcaaccgttctcgagcgatcgagaaggcgtagagtatggtattttgtctctacaggatctgacaaggccttatcggctctgggcgtccccagccgaatatcccttaggttcctcggaggccttatcaagacggcgtaaagggacagtaggataggtttcaacgctaggtgtcgtcgtggtaagtgatctctgggtaaaacacttggagatattgtgtacctgttatcaactttgctgaaatagatgtagtaggagagtcgctacaccgctggtgggagaaacgctacatcgctggtcgaggatcaggcagtagtcgtaactcgaccacttaaagttgaagtagtgggagagacgctacatcgctggtcgaggaccaggcagtagtcgtaactcgaccacttaaagtggaactagtgggaaaaacgctacatcgctggttaaggaccaggcagtagtcgtaactcgaccacttaaagttgaagtagtgggagagacgctacatcgctggtcgaggaccaggcagtagtcgtaactcgaccactttgtagatatatgccggatatatcataatcacaccagtacaatatgtgggcagcatatctaactgttgtccacatgttgatctgaaggtctgactcgtagtcgacaacagggtagtcttccttctcgaatccgtgcccggcgagatcagagatagcgctttcgtatctcctgacggtatccggagacaccgtaggggaatagccatgcctatccctgaagtcgatatccggcggtgtgtcttggcgtatgtaggcttgtatgttgtggcttctggtgggcgtgtgttgattgtcatgggtgtcttccgtggtggatccgacaaggccttatcggctctgggcgtcactagccgaagttcctcgaaggccttgtcaagacggcgtaaagggacagtaggataggtttcaacgctaggtgtcgtcgtggtaagggatctctgggtaaaacacttggcgatattgtgtacctgatatcaactttgttgaggtagaggtagtgggagaatcgtccggtcgggttggatctccccacagcgaagttgtcgagtagcttgttgtcgaagaatctatctcttgaacccatcttgtcaaaatctgttgttgacatgacggtctgaaggtccgactcgtagtcgacaacagggtagtcttcctcctcgaatccgtgtccggcgagatcagagacagcgctagatcccaacggccggcggtaccagatagggtcgatccaggcatatctctcgccccgtcccgtcaggatgagagtctctaggcactcgtccctagccggagccagcgtgctagctcctggagatggcacgttggtcctggtcagatatatgccaggctttatcccaaccattataagcaagacgttgtatgaagaagggcgaacatgcagattgctaaactgacacgtggtggacaaaggtgaccggtctgtgactggtctgacactggttatgtcgccggaagacaaccgtgttcccacgttgcacctgcttccggcggagtggaggtaggtatgggccgtcccatcagaagggtcactcgggcagcagccgttgcaaatctccgcccatttatgaagagatgacagggtgatccccgaggtcagacgaacgaggacgcgtggccacagcttctcagcggcccgaacccagggcccccggccgaaccggcaaaggggggcctgcgcggtctcccggtgacgagccccacgctccgtcaaggtcgaatagatccttgaagtcgacgacgatataatttgttggaccaaggaatggctttccatcgtgctctccaaggatatcggtagctttattcggcttcctggcgttagatttctccatgtagtatgcgtgaaggtccttgcaagcggtgcccattgcggcaagcacgtcatctccaaccaatggcatgcctagttggaactccaatggagcgacgtatttcttcttgatctctttgtccttagtctcttcctggcccttgcccaaatctagcttccttggagctagaagcgaggactgcacctttcctccccttcctctcccctttgctttgggtttatcgagagtaattctctgaggggaagagtgtgccttcctgctcttcttcatcggtgggggttcatgaatcgccttgctgtcggcctccgttcggtcctccccaaaatccgtgtcgtactgcaactgcacatcgtaaaattgtgcatgacgatcttgagcaggaggggctgaaggagcagaggcgtgtctctttggtggacgaccgcctggtgcagtggttgacctcgctataaccctgatctcaataaggtccttgggccattggatgaaggtaccatgggcatttcctagtgagaggacctcgtcgttcagtggatactttagtgggaatagctcgttttccggcttcaccgagtcgacttgaacttttgcacaatcgcccctgagttgcgctccatgcactcttgtctctggggtcggcttgtacgcaagtccctcggctgctggaaccgtgaaggtcggcattaccctaactgtgagggtgcagctcgttggttccgttatgtggtcgacggcgctgtcgaccgatgttggattttccgccacctcagttgatgcgcaactgctgcgtttttgggtgggacttcctaactcttcgtgcgcagcagcagcggcggcctgggggttctgttgctcttctcggatctcttgcctaatcttggccctcatcgactcgagtatagcttcgtacactcgttgatcttctggatttggcatgaagattgtgccatcatccttcttttggtacctggccctggcccagttcttagcccgagggtgtgggatatcgccaaacacgagcggcgttttcgattcctccgcttcttcatcctcacgctgccattcctcttccttaccggcatatcctgcggtgccaagccgatgcggatgttggttcttggtctgtttcgtgatccaaggaaatttctctcttggatctagattcgccgggttgtagacgaactcgccgactagcttagtcttgaagttcttccaagcattgcccataaccttgaaagcagcccgcctgagacggtcctcatgctccgcaggataatcgaagctctccttgaacgttagccaagcaatgtccttctctacggccggcacaagcttgatgtcatcttgcagaatactgaatttctgcctccctatgaccccgcagatagacctaaatcggctcaatattttctttagagatgtcggcaaccctacagcgtccaccgctgttatgcggaaccgttccttagggattttgttccctgtcctaggagtacgtgcccttgaggacccactagttgtcgtcgacat

SEQ ID NO: 56206 - DNA, 303 bp, Oryza sativa
  Clone ID: PAT_MRT4530_5813C.1
atgaagtttttgattccgccgccgctggttcggccgcctcctcctgacctctcctacatcaaccgatcgtaccgatctgtccgtcgacgagaagatcgagatgataatctaagtggggattttcttcttgctgttcttcagaaacatagtggtgcacctataccattcgaggagtcgcaaatccttgaatattacaagaaatttttggcccagtactctgactacgaggatgaggattcagaggaggattcagatgaggaggattcagaggagggggagaaaggcaagaagaatgtatgttaa

SEQ ID NO: 56207 - DNA, 190 bp, Oryza sativa
  Clone ID: PAT_MRT4530_58140C.1
gttgttatatattttttttttttttttataaggtaaaagggacgccaggttagcctagagctgccagccgggaatatgtgcactgccggggatgaagtccggtacttaaaagaaaaagcgccgtggactgcctcccctggacagccacagaaagtcagggccggatgctggaggtgcccgacgttccaaa

SEQ ID NO: 56208 - DNA, 953 bp, Oryza sativa
  Clone ID: PAT_MRT4530_58141C.1
atgggcaccgcttggaaggaccttcacttatactacatggagaaatctaacgccaggaagccgagtaaagctaccgatatcttggagagcacgatggaaagccattccttggtccaacaaattatgtcgtggtcgacttcaaggatcttttcgacctctacaggctccgaacggttaagttggcaatggtgtcagaagcatgcaccggaagttgccttccttgatccacaagtggtcactgtcacaaatctccagaatgaccgtcaaggaatggtcaactacatctacgacaccttgtggtcctgccgagacaaggagtacattatgtgcgcctataatcaatatgcccattggatccttctggtcataacacctaagtggagtacatgtcactacctgaactccagaattgataagaacgcatataattggaccccaattcaactagcaatagatgaagcgtgggcccaatatgtgcaaagaggagacctcaggaagacaggacatgacaccctcatccacaaaaaagacttcccggtgaagcaacaaataggtgaccagtgcagattccatgtgtgccacaacatgcgccttctgtatagagaaaaggtgaagactttggctgagtttgagcgggaacaccactccacaagtatcctcgacggcacggacgaagcctactcctcggagaagccaccatctgacgcatactcaaactctggggtttggggaaaatatagcaagactgagtactacccactgtactcagcaagtcataccggaataggggtatgatgcagggaattaacaagggatagctatagaggttcgtttgcatagagcgagcatttataaatagtagttgaaagcagtaaaacagttgtaataattaatcaatattaaccacccactgtccaacgctaccccacgttgcaacaggcccaaccatccac

SEQ ID NO: 56209 - DNA, 430 bp, Oryza sativa
  unsure (1)..(430): unsure at all n locations
  Clone ID: PAT_MRT4530_58142C.1
gattagaggctgccgtcggcgcagtcaacgacacgagacagcgacagcggcgagcggttacgccggcaggagaggcatggccactcgcgtgtggacgccgtgaaggtgagcacgtgtgctactcgagcaccttacccacaatctgctttggacactgacaggtgggaccaattgcatggcgagtgcgcttacagatgacatgtgggaccactagctcatagagaaagcgtgaagtgcaacaagagcttcgagctgatgcaacactccaccatatcaaatttcagatttgattcaatcaatggctaccatgatagatgcatggctggtcgaanaagcatatctaatcgagctctacattcatacatgtcaacagttggatcattcgtatcaccagcagttcttagtagcagagcatttaaactgtgtactc

SEQ ID NO: 56210 - DNA, 384 bp, Oryza sativa
  Clone ID: PAT_MRT4530_58143C.1
atgagaggtgtgtacaggggccgtggggatagatggcccattatccatacccttgcaagcctcgagagcaaccgccggtctcttggcggcggagtgggaatcggctggcctttggggagcaacgcaagcaaccttcgggatttgctcagccgccgcttcgccgccgccccggggcgaggggtcggcttcgagatcagctccggcggctggtcatgtcagccgtcaggtcaggtcagggccacaccaactcggcaactcggcggagttgtggcgatgaccaccgacctggtcgatcgcgacgagacgacgacatctcctcggtcggggaatcgggatgcgctcgagaaggcggctcggctcagctgcgtgcacgtcgccagctga

SEQ ID NO: 56211 - DNA, 2778 bp, Oryza sativa
  Clone ID: PAT_MRT4530_58144C.1
cccgcctggctccgacctacccgaccggcatctccaccgaccggcgccgccctccaccgagcccggcgccgccgccgcaaactcctcctttgccgagcctgccgccgccgccaccgagaccgctgcctccaccgagcccaacaccacctccaccaaccggcgacgccctccaccgagcccggggctgccgccactgagccccaccgaccgtcctcagacgatgtctcagcaaggcgaaccaatgtcgacgacaactagtgggtcctcaagggcacgtactcctaggacagggaacaaaatctctaaggaacggttccgcataacagcggtggacgccgtagagttgccgacatctccaaggaaaatattgagccgatttaggtctatctgcggggccatagggaggcaaaaattcagtattctgcaagatgacattaagctcgtgccggccgcagagaaggacattgcttggctaatgttcaaggggagctttgattatcctgcggatcatgaggaccgtctcaggcgggctgctttcaaggttataggcaatgcttggaagaacttcaagactaagctagtcggtgagttcgtctacaacccgccgaatccagatccaagagagaaatttccttggatcacggaacaggtctgggaggaattccatgcgaagaagtcgacccccgagtccagagctagaagcgaggcatatcgcttgctccagaccaggaaccagcatccgcactggcttggcactgccggatatgccagtaaggaagaggaatggcagcgtgaggatgaagaagcggaggaatcgtgcacaccgctcgtgtttggcgatatcccacaccctcgggctaggaactgggccagggccaggtaccagaagaatgatgatggcacaatcttcatgccaaatgcagaagatcaacgagtatacgaagctatagagttggttgccgagcaacaagcctcgcaagaggcctgctctcaaagacgcgaggacgacctcctcacgaaagcgttgggcaacaaggaacaccgtggacggacacggggcgttgggtcttctgttccctggaagtatggatttccagactacgcgtggcagtacaagaaccggacttccaacaaggcggagaaagatgcacgccttgaagccaagatctgggcgtcgataagagctgagctgacatctaaattcgacgaaaagctcgagtcgatgagggccaagattaggcaagagatccgagaagagcaatagaacccccaggccgccgctgctgctgcgcacgaagagttaggaagtcccacccaaaaacgcagcagttgcgcatcaactgagttagcggaaaatccaacatcggtcgacagcgccgtcgaccacataacggaaccaacgagctgcaccctcacagttagggtgatgccgaccttcacgagacaagagtgcatggagcgcaacttagggccgactgtgcaaaagttcaagtcgattcggtgaagcccgaatacgagctgttccctctgaagtatccaccgaacaacgaggtcctctcactaggaaatgcccgtggtaccttcatccaatggcccaaggacctcattgagatcagggttacagcgaggccaaccactgcaccaggcggtcgtccactaaagagacccgcctctgctccttcagcccctcctgctcaagatcgtcatgcacaatcttacgatgtgcagttgcagtacgacacggattttggggaggaccgaacggaggccgacaacaaggcgattcatgaacccccaccgatgaagaagagcaggaaggcacactcttcccctcagagaattactctcgataaacccgaagcaaaggggagaggaaggggaggaaaggtgcaggcctcgcttctagctccaaggaagctagatctgggcaagggccaggaagagactaagggcaaagaggtcaagaagaaatacgtcgctccacaggagttccaactaggcatgccattggttggagatgacgtgtttgccgcaatgggcaccgcttgcaaggaccttcacttatactacatggagaaatctaacgccaggaagccaagtaaagctaccgatatccttagagagcacgatggaaagccattccttggtccaacaaattatatcgtggtcgacttcaaggatcttttcgacctctataggctccgagcggtggacacaagcctccttaagtgctactccttgttaagttggcaatggtgtcagaagcatgcaccggaagttgccttccttgatccacaagtggtcactgtcacaaatctccaaaatgaccgtcaaggaatggtcaactacatctacgacaccttgtggtcccgccgagacaaggagtacattatgtgcgcctataatcaatatgcccattggatccttctggtcataacacctaagtggagtgcatgtcactacctgaactccagaattgataagaacgcatatgattggaccccaattcaactagcgatagatgaagcgcgggcccaatacgtgcaaagaggaggcctcaggaagacaggacatgacaccctcatccacaaaaaagacttcccggtgaagcaacaaataggtgaccagtgcggattccatgtataccacaacatgcgccttctgtatagagaaaaggtgaagactttggctgagtttgagggcacaataaccaagtctctgcctaccagctttgaggaggaaatgatgaacacttattatgcaactgtgatgatgtaa

SEQ ID NO: 56212 - DNA, 540 bp, Oryza sativa
  Clone ID: PAT_MRT4530_58145C.1
atgctgaatcaatccaaggccagctctgtctgttcatacacatcgcccccaaagccatccgtcccagacaagggtcgatcagatgaagacgatcgacaacggctaaacaaggagcagagtgggcaggtgagcaggagtcggcacaagagcacccaaccaacgacgacacgcagccgcatgggatgtagctgcggaggttgccacaggagcactccgtatgcacaccacctcactaccaagacacaggagaacgttgccagcctccacactatggccgttgcaagcagcagccggtggagaaagctggaaaccagtagaagagggagggttatagaagctccagatctaacaaatcagagaaccaacaccagccaagttgaacaccaccgagtggattcgcttcagggtcaccgaggcattaggacaccgccaccatccaaaaccgccgcctgcaactccaccactcaccaccatgggagaagctcacattccggcaagaactgggaaaacgggataaacctacacaacaggaggacctga

SEQ ID NO: 56213 - DNA, 434 bp, Oryza sativa
  Clone ID: PAT_MRT4530_58146C.1
caactctgaagaagaagaggttttctctgtctaggagggagagattgtgcagcgaggtttctttctctcactaggaggtttgaggttgctgggagtggttacgaagctaattaggagctttgccgctttggttgagtttcttggtgagaggtgaggagagcgtgagcgagctcgctctcagtctcacgccttttgtgttgtgttgtggaggaggagaaaggaggcggttttttgttgtttctgtcagcgttttctcgtcaggtacagcctactatacttctttcgagttcatataccgtgctgctctcgaattcggaagccctttttttttctgctatcttgcgaagctcctgtgtgcaaagtcgaaaaagtttgccgaagatgaagtcttgctgaagctgccctgctttgcagctgcagtttcttgtcagttt

SEQ ID NO: 56214 - DNA, 718 bp, Oryza sativa
  unsure (1)..(718): unsure at all n locations
  Clone ID: PAT_MRT4530_58147C.1
gtggtcaatggggcacgaggcttggtaggtgcaagctcccctggtactctcattgaaaggagcgctctgctactgatattggcattccgccttttcgcgatacgttccgcaccgtgcttttactgtgttcgattttggtgatccccatgattctcaaatgcgggaggtcggcatttagacggtgccagaggcctcgatcttgacagccttgatgggcgcatcgccgtggcgagtagggttgccttcgatggcattgaggacgtcctggccctcaataagttcgccgaagacgacgtgcttgccgtcgaggtggggggtggcaccgaaggtgatgaagaactgggagccgttggtattggggccggcgttagccatgngagagctggccacgcttggtgtgcttgtggctgaagttctcgtcggcaaacttctcgccgtaaatggagcgaccaccggtgccgttgtggcgggtgaagtcaccaccctgggccatgaagccgcggataacacggtggaatccggagccggcataggcgaggctggagtccttgccttcgcagagggtcctgaagttttcggcagtcttgggaacttcggtatcaaagagcttgaagaccatacggccggcagggttgccgccgatggagatatccatgaagacgttggcgggagcagacattttgatagatagttacgggacggtgcctcgtgccgaatt

SEQ ID NO: 56215 - DNA, 1023 bp, Oryza sativa
  Clone ID: PAT_MRT4530_58148C.1
atggcgcaagcggtacatcatcctccctgggcaacaagcggcgtctcgtgcaccatctcctccggctccgccgtctcctcctgcaccatctcctccggctcctctgccacctcctcctgcaccatctcctccggctcctctaccacctcctcctgcaccatctcctccggctcctccgcctcctccgcctccacctccaccgtgtccgcctgcacctcccaagacaaggaaagcctattacaagaagtccaatccagttcctcgcttggaaaacaaccacaccaagtggtcgagccgttggtgaccggcgaagactttggcataacggatttcatttcggacaccggtctaactgtggctctgttggttggaggcgcaccaatcccgaaggcggaagtggcatacaagtttgaactcggtaaaccgcttgtcaggcctgagcggctgcagtccctaccgacacaaatgtataaattccatgaacggtacatggaaatgagcgccaatggtagagagatgttcggagcgaggattagaaaccccgacttcttgcaaggagaagatgttctatggatccatttcaaggatgtcttcgatctgtaccatcgggacgccctcgacgtctctcttctgagcgcatggattttaatggagattcaaagggcccgacggcggggggtttacgatactgggttcatcgaccctcggaaaatcaacaccgaaatgctcgacaagtacgagaaagacacagaggacaatctcgtccatctcctaacgcagcagcatttcaagacgttcatactattgtcgtacaacacagaattccactgggtcctgttctttttcgacttggacgcatgcagagtcactgtgtacgaggagaaggtttttgacaaaggtcttccaactgatagacagggcttgggatcggttccgtcaattggtccgcgggacttggaaagaaaaacttggatcgaggtttcattttccagtgagtacatgcatgatccaaaattatattga

SEQ ID NO: 56216 - DNA, 401 bp, Oryza sativa
  Clone ID: PAT_MRT4530_58149C.1
tgaagttcccataggcagcaacgcccatcctaagaaggagcaaagcaaatgttacaagttcccttttttgtggcttgagaaacagcaggccagcagcaacattttggtgattttcaccgcagattagtagcaatcataggctcaagtaagatttttggtgacctttactgctgattagcaccattcatagactcaagtaagttcttttttggtggtttacttgagcatcggtatttttgagaagcagcaacaataggcatagatcagatcactatcatgtgtagttctgagattgtcactccaactttcttgtcggctctatcatgagccatgaagtattttcttcctaacaaatatgttctctaaatacaagtattccacttagttctatttaactcttg

SEQ ID NO: 56217 - DNA, 1383 bp, Oryza sativa
  Clone ID: PAT_MRT4530_5814C.1
cctagagatgtccatcgagccccgacttcgtccatctctatccgtgtacttttgcccatgaccagactgagccacaaactacgccttacccactagacatgtggaagtacggtagtgctttgcaacagaggcccgagcttaatccttatattggtcggggtgctacttcccacaactggcatgcaccaaaaccccaccgaaaaacaggttttaggggttttgaaagaggaagagatagagaacaaccttctgtaccttcggcgacgaccacgaaccacgcttcgggaacctctggaacgacaaaagctaccgaagcacacaagcaaagctacaagcctaaaaaagaagcaataacaatacataaaaagaaaaccgggtacacagagacggtccacgggtcgacggaagcgggccccgtgtgtcaacagaggcgagtggccgacaaacagactccactagacaccacgcgggccgcacacgtggaaaccacgtggctaccgagcgggcacacaaacacggtcaccacacgcacacacgaacgactaccgacaccggtacacaggcgagacgaggctggcacaaggcttgacgacgcggagccgaggatgaagacgacgacggggctgcggcatacttgacgaaacgcgggcgacgaacggacgcggcttgacgaagggagggccgacgacgagcgcaaccaggaacgaggaggaggcgacaatggcagccagcagcagctgcacagagacgagaacggtgtggaacacgccactacgatgccgatgatagtggcggcgcagcgagacgatgggccggcgaggatggacggccgactggagaagtcgtcgatgaggacgaacgatgccgaaggtcgtggtggtgtggtgcggccgatagtcgcacgggcgaggaggaagggacggtcgaagggacaccggcaaggatggcgtggaggcgacgtgcggtggcttcccgaccaaggagaggcttggccaagggagaggacgacgctgcgacgccgaaggaggagacggcgatgtcggtcggtctcgcgcccctctctcccggaggctgacaggtggggcccacctgtcagggccgtcttcaacctccggacggccgccgccgagccgaaccctagccgtcgtttcccgctccaaatccggccacgccgccgcgacgcgtcgcacgtccgccgccgccgctggccatcttcggcatcgccgccgtgccgtctccgccgtcgcctttggtcgccgccaccgccgttaggtgcgccgtgaggagaggaagctcgtccgcccctccgtttgcgtcgccgatcatcggagctccctcgacgccgtcgacccgagccgccgcgccgcctcttctcgtcgccgg

SEQ ID NO: 56218 - DNA, 438 bp, Oryza sativa
  Clone ID: PAT_MRT4530_58150C.1
atggcggcggcgctcaggaccaccggcggccggcggctggcggaggtgctcgtcatgatgatgttcgtcttggcggcagcgctgctggaggcgccggcgatggcctccgccgcgaggggactgcagctggtcaggcctgacaagcggtttaccgagttcaaacttgtatgccacttccgccttcgggattggtgcgcctccaaccaactgagccatgggactccgaggcttgagttgcctcttcacttctcctgccacataagcgtcaagctccacttgactgcaaccgaggtggagcttggcgagaccttgtcttgggaggtgcaggcggacacggtggaggaggaggcggaggagccagaggagatggtgccggaggagacggcggagccggaggagatgctgcacgagacgccgcttgtcgccccgggaggatga

SEQ ID NO: 56219 - DNA, 4017 bp, Oryza sativa
  Clone ID: PAT_MRT4530_58151C.1
atgggctcaccggattgcgacggagtcgaggacttatctcgccggcgccggagatggcgcctccgttcccggcgaatccgaggcggggtacctcggttcttccgcgaaacgagacaagggcgagagggagagaaagttggtcggccggtcgggttaagtatggtcgccggcggagatggacaggaggagctcgccctctcccgtgctcgacgcgtgctcacacgcgtggcatgcgagttcaggcagtgggcccgtgtggagaggaatgtgaggctgacaatggggtcccgccatgcagccctggcccacatggcagcgactagtgtatatggaaagtcgaaagatacactggaagcacgtaatgatctgaagcatatggaacaatgcggcgaccttcacccggaaccaaaggagaaaggaagccattacttccagccagctacactcttagcaaggcagagaaggaaactgctaccagttataataaggggtatcctcccagacaatgtctgggcaacaataagaaagctatatgctttcatgaacgcaatttcgcagaaggtcatcaatccggatagattagaagcccttcagaatgatgtgaggcaagcatcgccaaggggtggaacagaggaggtcattgaattttgcatagaatttatcgaagaccttcgcccaatcggggtacttgaatcacaccatgaagggagattacggcgaaaggggactctcggaaggaaagcaataatgacggtagacaacaatttattccgtaaagcccatttcacggttctgcaacaatcttcattggtggctccctacatcgaggagcacttggctctaattcgcgccagaaacatcggtaagtccgatgcatggattacacggcatcacattgatactttctccgagtggctgcgacaacatctcatgggtaacgagacgattaaccaacaactggccttcctggtgaggggaccatctggctcgatcgcgacattccagggatatgaaatcaatgggtacacattcttcacgagagcccaagacatgaagagcacgaaccagaacattgttattcgtatcgatgccatgggacacgatggtacaactagcacgtattacggtgccatcgaggacatatgggaacttgactatgaacctctcaaggtccctctgttccggtgccaatgggttaggttgactggtggaggtgtaacgatcgatgacagtgggatgacaacggttgaccttaacaaggacatgtctagcaaaggaaaaaagggcaaagggcctgatgagccgaagcgccacgtggttttcccaggaaaaagaaaaatcgtcaaagtagaggacaagactgacgaggattacgatcagtttgatgggaaaccccctttcacggtgacgattgaccctagcaccctcctatcaaatgaagacactccttactcacgtagcgatcacaagaaaggaacaatagtgaggagaaatttactacagatggctgatcgcaatgaggaacagatactgtacgatacaatcgcagaaggaagcagccagtactggaacgaagaagaggggaacgaggatccaaaccagcacttgaacgaggaggggaacgtggagagggatgcggaggggaacgaggaggaggaggctagtggaagtcatccctccgctggacagaagagggcacgcggacaacgaggtgccgcgaagaagatagagaatcggcacatcataactgaggtggacgaagacggccgacctagtgccccggcagaagcagccaagaattttatacgccacagcggttgggttgtgagggacaacgtccctgtcaacatgagaaagagatcatgtggtctgtggaccacaatgctcgagacgttcacgctacccgtgggtacggagaacatagtgaaacagtggactctgaagaaaatggcaaaacagttccagagcttcaagggagatctcaacaacaaatacatcctgaagggactaacaccgaacttcgacgtattcccaaagctaagggatcattgggacgagttcgttgcttacaagacagggcaacaaggacaagcgatgatggcccgaaacaaagaaaatgccgccaacaagaagtaccatcaccacttggggtcaggcggatatagcgtcgcaatgccgaagtgggaggagatggaggcaagattgattgagaggggtatcgaaccggccaccgctaaatggctggatcgatcgaagttctggagtcggatgaggagcaagagagatactgaggcgaagattgtagatcttgagtatagggtatcgagctacgagctcagcatgcaagaggaggtggcaaggaaggtggatgaacgtatggccacacatcggtcccaggatccccagccgtacattcctcctgcaatggtcagcccatcaggcaatcgtagcagctgcgcctcaacagggcaggtaggatcacagagcatggacgccatgcaaacccaggacaaaaccacctgccccgttgatgagatcacgcagcggacaccatgtgagctgcatattcccttcaagaacttatcaatcaaggtggcgtcgggaatggccatcccaacggacccttccgggacttaccactgcaggccgattccagcaggatactcgagggtcgaagttgaactggtggaagccgcgtacgaggacctcgagttggactacccaggaggagacagtgagacgcatctacgagacacaagccatgccattatactatcgcgacaagcggtacatcatcctgcctgggcgacaagcggcgtctcgtgcaccatctcctccggctccgccatctcctcctgcaccatctcctccggttcctccgccacgtcctcctgcaccatctgctccggctcctccgccacctcctcctgcaccatctcctccggctcctccgccttcctgcctacttcgccttctccacctccaccgtgtccgcctgcacctcccaagacaaggtctcgccaagctccaccgcctgcccgcacaagggcaacgaagaaagcgaaagttgacgccaccaataacaaggagccgcagtacgattgcagtcaagaggagcttgatgcttatgtggcaggagaagtgaagaggcaactcaagcctcggagtcctgaaaagaagatacctattgacccgagcatgaagaacttctttaagggaatgtccacaacaaacaaggaggcctcacagatatcggactatgaccgaacacttcagaaagcctatcacaagaagtccaaaccaatccctcagcttggagaacaaccaaaccaagaggttgagccgttagtgaccagcaaagattttggcataacggaattcatttcaaacaccggtctaactgtggatcagctaattcgaggcgcaccaatcccgaaggcggaagtggcatacaagtttgaactcggtaaaccgcttgtcacgcctgagcagctgcagtccctaccaacgcagatgtacaaattccatgaagggtacatggaaatgagcgccaagggtagagagatgttcggagcgaggatcagaaaccccgacttcttgcaaggagaagatgttctctggatccatttcaaggatctctttgatctgtaccatctagacgccctcgacgtctctcttctgagcgcatgtattttagtcactgtgtatgactcaatgaataaagaggagaagatttttgacaaggtcttccaactgatagacagggcttgggatcggttccgtcaattggtccacgggacttgggaagaaaaacctggacggaggtttcattttccacgtattcacatgagggataatctcccacacaaggattttatcacggctgttcaagaacaactgatgggattcatcaacaaagaagtccttaatcccaatggtgaattctattacgacggatcgacaattcataacgtcggtccttcctcttctgacataacgccggcgtcgaagtcgtag

SEQ ID NO: 56220 - DNA, 468 bp, Oryza sativa
  Clone ID: PAT_MRT4530_58152C.1
atgggcgcgcagtcaggcgcctttgtttacagcaccacgtcgatcctgctaagccacaggtcgttaggagtcaaggcggactctgaccgtggaccaggaaattcgacggagaagcggcagcagccagcagccagcagccgagctcggtccaccacgtctgctgccgctgttggccgccgctgcttcccggctccttccttgcaaggcgtctacgacctcgagagatccgtcgccttgtctctgcacggtccgatgagaagacgaccctgggtcttcggctatttcaacgtgacgaaggcttcttctgcaccgtttctagaagcaggcctggagtccgagatggctccgtgcggcaacggcaaagagaaagggcgccacaagccaatggaaaaggcttctgatgaattttccatggtcagacaagctagtgagcaatctgatgccgacggcgagcagctggtgcactga

SEQ ID NO: 56221 - DNA, 3899 bp, Oryza sativa
  Clone ID: PAT_MRT4530_58153C.1
tcaatccacatttggttcagcatccatgcaaacatgaatcaatttctgctggtaatttcgaaagacctcactgaccgcgatcagggttttgtcgtgcacattcttgggagggaaccggcgattggggctctgttcagatgtcggcgaaacagacaataaaaaatgtacagatatatatattcttacagaaaagtattgccagtgccaagcgtcctcacctactagtacaatacaacaccgcaatgcctatccctttcaagtagtattatcaggttctccgtacagatgccacatcagcaatgctaatcatcggcgtcttttgtaggatacggcgcaacgcggctctgtccagcatcaagatttgcaggcgacatacatcccgtagaaaaagattacacaccagacaaaaatgcaggcagcatacatcctgtagaaagaaaaaaaaaaagcttcacaccagacaaaaatggagaagcaaaagctagacgttgacatctacaaagagtagtagagaccagtgggggcactcggtctctttcagcttcggatattgtccatccaggagagggcctccctcccacatggcaattggcaaatggcatggcatggcgccaaaagggctcaatccacatttggttcagcatccatgcaaacatgaatcaatttctgctggtaatgcccgaagacctcgctgaccgcgatccaaggtattctttcatttgcattgaaccataaccgctcttgcctaaatgccattgaacttagttgtccacaattctcagcaactttcgccatattttcaggtgcagatctctccgttgaagatgatgccctgttcaatgtggaggcttgctcagaatgataatgcacacttgattctgagcccttctcgcttgatctacttgtcgatttatccaggtaatgatgaagagcttgaggtagctgcagccagaaaagtgcttcttggatatcaccaaaaattgcagcagcaaatgcaaaccttgcacatgttcccttattcacaatagctgaatacaatttagctctcccatcatcaagaatgaacccgtcctttctgtatggttccaacacttttagcagcaattctgccactacagaatcaccaatgggaggcagggttgtctcaatcatgtaactacgaagatctccaatgtaaagatcgtgataccgcagatgacaatacaactactcttaatgcatttgggtaaaaatttgagccttcaggaggtgttgacagtaacaaggacaccgcagtttccaagtttccaagagagacaagaacatggacacgcttttgcaaagcctcttcaccatccaagcttctcatgccaaggtattctgttcatttgcattgaaccatcagttgctcttgcctaaatgccattgaacttagttgtccacaattctcagcaactttcgccatattttcaggtgcagatctctccgttgaagatgatgacctgttcaatgtggaggtcttgctcagaatgataatgcacacattgattctgagcccttctcgcttgatctactctctcgatttatccaggtaatgatgaagagcttgaggtagctgcagccagaaaagtgcttcttggatatcaccaaaaattgcagcagcaaatgcaaaccttgcacatgttcccttattcacaatagctgaatacaatttagctctcccatcatcaagaatgaacccgtcctttctgtatggttccaacacttttagcagcaattctgccactacagaatcaccaatgggaggcagggttgtctcaatcctctaactacgaagatctccaaaagttgctggtgcttccctaaagctgctactagctaatttatcgccgctattgcattcaaaccaggatggcttcacaccaagttgcaggatcatccgcaaagccaaagcatgtgctgttggaaatagtattggcagacacaatggcattggcctaaacctctctcttgtagttactggcctcaaagtagaactggccctaggatcgatgttaacctcaatcagccggaaactactatcagctccagcgatgcataacacaagcggttcatccttctttgttcgggttgacaacccatcaagctccaagacaagcataccaggtgattgcggttgtagacgagcaattgccaacggatctgcactcattggcctgactatatgagaatgaaacaagccgtgaatttccaagccatcttaatcctctgacagtgctgctatggacagcaaagctaacagatattgcattagctaaaacatcaacaatttcaatagtcccattctgagttcctacagcaacaagtggtactgctggagcaggattgtttccaccacgggctactgtggcaagtaaagaaggggatggcacagctagcgtagtcacagtggaggacaaaagatgaagctggcccatcaaattaatctggtcccactggttcgcacctagtttatcttttctagcacatgcagacttgtcaaaacttaaatgccatgaccagatcttgccatcttcagagatcgaggttagatatgtcatggtcccttgatacatattttggtttgtatttgtatcagagatgacagaatgtgtagattgtatttgtcccaagtcccgtgattgcttctctatgttacggaaaacagcctctgactgccagattgtagtagcaagaacagctggaggtggaacaattgtaccaattgaaggcatgagatcttccaccgcacacaacaaatgcacatgttcaccctccttgcgcttccagatactcagcttgccatcaatgtgcgtgcagtagagcaggtcgaaatcaggatcagacatgacatcagagaatttgccaaatcccctgggcaatggagtgacagagagcgcagtactgtaattgaggtcaaagacaatgagctcccgcgggaacgtgacatataggatgttcctccacagcggggagaagcatagcttcggcgtgaatgctggaaacgcggcgagggccggggagggcgggggcgccgctatctccttctccagcctctgcagctctgtaatgtcactggcgccgcaggtcacccggtgctcctggagcgagatatcagagtccggccgcgggatggcggagaggaggaagccccggaggccgatcgcgcagagatgcctagcgtcgaaggggtcacggcggaggcaggagaggtactcgggcgaggcgtcgaacatccagaggacactagggttgttggaggtctcccagatgcagagcagcgagggcccatggatggaggcgaggagccaaccggaggcatggtggatccagcagaggtcctggacgccgccgccggatcccggcgcgacaccgcgggtctcgtcgaggttaagccagtgaaggacgaggcgcgcgcgcgcgtcccagacggcgatgcggccgtggcggtcgccggcggcgaggcggagcgggcggcgttcgtcgtcgtcgtcgtcgatccccgcggcgtggaagcgcgagacgctcagaggagagaaggacggagcgggggagattctgcgggtgtgtcgtcttagaatcgccggcggcgggataagcgggagctgggtggccccccagcgcgccggcggtgaacgaggaggcgaagggaggaggatggcaggggaggcacgcagaggagctgcatggtgcgcggtcgggagattgacgacgctgctccccgcgccatgcgcgaggagccccgcggggctgaggtcgatgcacccgccgttgccgcggccggggggccccgggagcatcatcgcggtggcgctgccgccggcgccgccgccggccgcattgccgtgcaaccgcgacgacggtgaggcgcatgacgccat

SEQ ID NO: 56222 - DNA, 1482 bp, Oryza sativa
  Clone ID: PAT_MRT4530_58154C.1
atggctgatcgcgatgaggaacaaatactgtacgatacaatcgcagagggaagcaaccagtactggaacgaagaagaggtgaacgaggatccaaaccagtacttgaacgaggaggggaacgtggagagggatgcggaggggaacgaggagagggatgcggaggggaacgaggaggggaacgggcagacactgaactttaacacattcccgaagctaagggatcactgggacgagttcgttgcttacaagatagggcaacaagggcaggcgatgatggacagaaacaaagaaaatgccgccaagaagaagtaccatcaccacttggggtcaggcggctatagcctcgcgatgctgaagtgggaggagatggaggcaagcttgattgagaggggtatcgaaccagccaccgctaaatggccgaatcgatcgaagttctggtactatactcatggtggaacgcttaacccagttgatggctccctggtcttcagcgatcagatacgcgaggctgccagtcgactaacggacgcagtggaagcctcttctcagggcacgagtcggatgaggagaaagagagataccgaggcgaagattgccgatcttgagtacagggtatctagctacaagctcagcatgcaagacgaggtggcaaggagggtggatgaacgcatggccgcacatcggtcccatgatccccagccgtacattcctcctgcaatggtcagcccatcaggcaatcgtagcagctgcgtctcaacggggcaggacgaaaccacctgccccgttgatgagatcactcagcggacaccatgtgagctgcatattcccttcaagaacttatcaatcaaggtggcgtcgggaatggccatcccaacggacccttcagggacttaccactgcaggccgattccagtaggatactcgaggatcgaagttgagctagtggaagccgcgtacgaggacctcgagttggactaccctggaggagacgcaccttccatgtcaaggtctcatcaagatccaccgcctacccgcacaagggcaacaaagaaagcgaaagttgacgccgctgaaaacaaggagccgccatacaattgcacgcaagaggagcttgacgcttatgtggtagcagaagtgaagagaatggagattcaaagggcccgacggcggggggttttcgatactggattcatcgaccctcagaaatgcacaaagcaagaccagggaactaacttgtgcggctactacgtatgcgagtattgccactgccttacaacccaaatcatcaccacaagagagctcgatgttattcgcatgagggataacctcagacacaaggaatttatcgcggcggttcaagaacaacttatgggattcatcaacgaacaagtccttgatcccgagggtgaattctactacaacggaaatacaattcataagtcgttagcttctgagataacgactactacgtcgaagttgtag

SEQ ID NO: 56223 - DNA, 5732 bp, Oryza sativa
  Clone ID: PAT_MRT4530_58155C.1
atggatcggcaatggatgtacgctgaccagcggtccaaagagtttattgacggcgtgcattattttttgagagtggccgaagctaacaagcagaagggttttatttgttgtccaacaaataagtgtaagaatcagaaggagtattctgcatccaggactattcatttccacttgtttgagtcggggttcatgccgagctataattgttggacatcccacggagagcaaggggttgaaatggaagaagatgaagtggaagacaacaatattccagactttgctcagtacgttggatttgatggaaatcaaacgggcgaggaggacatagatgctgattataacgacgttgcgaatgatcttggtcaaatgttgcaggatgccaaggaggactgcgaaagtgaaaagggggcccataaattggacaagatgttagaggaccacagaacgtcgttgtacccaggttgcgagaaggggcacaaaaagttggataccactctggagttcttgcaatggaaggcaaaaaatggtgttagtgataaggcatttggcgatttattgaaactcgtcaagaacattcttccggagggaaacaaattgcccgagacaatgtacgaggctaagaagatagtctgccctctaggactggaagttcagaagattcacgcatgtccgaatgattgtatcctatatcgcggtgaggagtacgagaacctagaagcatgccctgtttgtaaagcactacgatacaagattagacgagatgatctaggtgaggttgacgggcagctaacgaagaagagaattcctgctaaggtgatgtggtatttccctataataccatggctaaggcgtttgttcaggaacaaggtgaatgatagaatgatgcgttggcacgctgaagaacgtcaacaggacgggatgctgagacaccccgcagatggttcgcagtggcaaaacatcgacagaaaatttaaagactttggaaaggacgcacgaaacaaacggtttggtttaagtacggatggcatgaatcgttttggagagatgagcagcggccatagcacttggctcgttacgatgtgtatctacaacctcccccctaggctatgtatgaagaggaagtacataatgatgccgattattattcaaggccccaagcaacctggtaacgacatcgatgtgttcctaagaccactggtcgaagatcttaaactgttgtggaagaaggaaggtgtcctcatgtgggacgaggacaaacaggaggagtttaacctacgagcgctgctgttcgtaaccatcaacgattggcctgcacttagcatcttatccgggcagtcaaacaaggggtacaaggcttgcactcactgtatggatgaaacagaaagtacgtatcttaagcactgtaggaaggttatgtacatgggttatcgtcgatttcttgctgcaaaccacccagtatggaagaaaggcaagcactttgaacataagacggaccaccgtacgaagcctaaacatcacagcgggaaaacagtgtttgctatggtgaaagatcttaaagtagtgtttggaaaggggcctggcagccagcctatagagtgcgaagatggtcatgcggcgatgtggaaaaaaaactccatattttgggagttaccctattgggaattcttggacgtccgccacgcaatcgacgtgatgcacctcactaagaacctttgcgtaaaccttcttggcttcctagacaatgtccgggcaacaataacaaagctatgttctttcatgaacgcaatttcgcagaaggtcatcgatccggataggttagaagcccttcagaatgatgtgttgcaatgtcttgtcaggtttgagttgatatttccaccttcatttttcaatataatgacacattttcattggtagctccttacatcgaggagcacttggctctagttcgtgccagaaacattggtaagtccgatgcatggattacacggcatcacattgatactttccccgcatggctgcgacaacatctcatgggtaacgagacgattaaccagcaactggccttcctggcgaggggtccatctggctcgatcgcgacattctagggatatgagatcaatgggtgcacattctacacaagagcccaagacatgaaaagcacgaaccagaacagtgatgttcgtatcgatgccatgggacacgatggtacaactagcacgtattacggtgccatcgaggagatatgggaacttgactatggacctctcaaggtccctctgtttcggtggcaatgggttaggttgactggtgtaggcgtaacgattgatgacagtgggatcacaacggttgaccttaacaaggttggatactcggacgaaccttttgtccttgccaatgatgtaacgcaagttttttacgtgaaggacatgtctagcaaaggaaagaagggcaaagggcctgacgagccgaagcgccacgtggttctcccagtgcaccctcgtcttctccaccaacacttagacgtttttccatcgagatcgagcatcggcttctccttcgccgccactgcctagggcaaccccgcaccgacgccgccatcgtctctcaccatcgcctggcggtcctcgccgcctccaccgcagacgccgccaccacgtctcttggcaaatatttcttctatgaacagatggctgatcgcgatgaggaacagatactgtacgatacaatcgcatcgggaagtagccagtactggaacgaagaagaggggaacgaggatccaaaccagtacttgaacgaggaggggaacgcggagagggatgcagaggggaacgaggaggggaacgtggagagggatgcggaggggaacgaggaggaggctagtggaagtcatccctacgctggacagaagagggcacgcggacaacgaggtgctgcgaagaagatagagggtcggcacatcataactgaggtggatgcagacggccgacctagtgccccggcacaagtagccaagaattttgtacgccacagcggttgggttgtgagggataacgtgcctgttagcaaggtgtactggcgcagaacaagggcacgcggggatgatgacagctttgtcccggaatcagagaaagagatgctgtggaccacaatgctcgagacgttcacgctccctgcgggtacagagaacatagtgaaacagtggactcttaagaaaatggcagaacagttctagaccttcaagggagatttgtaccggaaatacatcttgaagggggcagacaccgaacttcgatgtattcccgaagctaagggatcactgggacgagttcgttgcttacaagacaggtcaacaagggcaggcgatgatggaaagaaacaaagaaaatgccgctaagaagaagtaccatcaccacttggggtcaggcggctatagcgtcgcgatgccgaagtgggaggagatggaggcaagcttgcttgagaggggtatcgaaccgtccaccgctaaatggcctgatcgatcgaagttctggtactattctcatggtggaacgctcaacccagttaatggctccttggtcttcagcgatcagatacgcgaggctacgaatcgactaacggacgcagtggaagcctcttctcagggcacgttccgacccgacagagagaaggacgagctgtcactcgccctacagactctcgagcatctaggacgaacacgagggaaaggcgtgattccctagaagatgggaatcaaggaggacatccacacgtacaggagtcggatgaggagcaagagagatactgaggcgaagattgcagatcttgagtacagggtatcgagctacgaactcagcatgcaagaggaggtggcccggaaagtggatgaacgcatggcagcacatcggtcacacgatccccagccgtacatacctcctccaatggtcagcccatcaggcaatcgtagtagctgcgcctcaacggggcaggtagtatcacatagcatggacgccatgcaaacccatgacgacaccacctgccccgttgatgagatcacgcaacggacaccatgtgagctgcatattcccttcaagaacttatcaatcaaggtggcgtcgggaatggccatcccaacagacatttcagggacttaccactgcaggccgattccagcaggatactcgagggtcgaagttgagctggtggaagccgtgtacgaggacctcgagttggactacccaggaggagacggtgagacgcatctacgagacacaagccacgccattatactatggcgcaaacggtacatcatcctccctgggcgacaagcggcgtctcgtgcaccatctcctccggctccaccgtctcctcctgcaccatctcctccagctcctccgccaccacctcctgcaccatctcctccggctcctccgcctcctccgcctcctcatgcaccatctcctccggctcctccgcctcctccacctccacctccaccgtgtccgcctgcacctcccaagacaaggtctcgccaagctccacctcctgccagcacaagggcaacgaagaaggacaaagttgacaccaccaaaaacaaggagccgccgtacgattgcagttaagaggagcttgacgcttatgtggcaggagaagtgaagaggcaactcaagcctcggagtcctgaaaagaagatacctattgacccgagcgtgaagaatttcttcaagggaatgtccaccacaaacaaggaggccttaaagctatcggactatgaccgaacacttaggaaagcctattacaagaagtccaaagcagttcctcagcttggagaacaaccaaaccaagtggtcgagccgttggtgaccggcgaagactttggcataacggatttcatttcggacactggtctaaccatggctcagttggttggaggcgcaccaatcccgaaggcggaagtggcatactagtttgaactcggtaaaccgcttgtcaggcctgagcagctgcagtccctaccgacacaaatgtacaaattccatgaacggtacatggaaatgagcgccaatggtagagagatgttcggagcgaggatcagaaaccccgacttcttgcaaggagaagatgttctatggatccatttcaaggatgtcttcgatctgtaccatcgggacgccctcgacgtctctcttctgagcgcatggattttaatggagattgaaagggcccgacggggtttacgatactgggttcatcgaccctcggaaaatcaacaccgaaatgctcgacaagtacgagaaagacacagaggacaatctcgtccatctcctaacgcagcagcatttcaagacgttcatactattgacgtacaacacagaattccactgggtcctgttctttttcgacttggacgcatgcagagtcactgtgtacgactcaatgaataaagaggagaaggtttttgacaagctcttccaactgatagatatggcttgggatcggttccgtcaattggtccgcgggacttggaaagaaaaacttggacggaggtttcattttccacgtattcacatgagggaaaaactcccacacaaggattttatcacggctgttcaagaacaactgatggggttcattaacgaagaagtccttaatcacgatgatgaattctactacgatggatcgacaattcataacgtcggtccttcctcttctgatgtaacgcaggcgtcgaagtc

SEQ ID NO: 56224 - DNA, 2130 bp, Oryza sativa
  Clone ID: PAT_MRT4530_58156C.1
atggaagaagatgaagtgaaagacgacaatattttggattttgctcagtacgctggatttgaaggaaatcaaacggatgaggaggaaagggatgctgatggtaacgacgttgcagatgatcttggtcagatgttgcaggacgccaaggaggactgtgaaagtgaaaagggggcccataaattggacaagatgttagaggaccacagaacgtcgttgtacccaggttgcgagcaggggcacaaaaaattggataccactctggagttcttgcaatggaagacaaaaaatggtgttagtgacaaggcatttggcgatttattgaaactcgtcaagaacattcttccggagggaaacaaattgcccgagacaacgtatgaggctaagaagatagtctgccctctaggactggaagttcagaagattcacgcatgtccgaatgattgtatcctatatcgcgaaagtacgtatcttaagcactgtaggaaggttgtgtacatgcgtcatcatcgattccttgctgcaaaccacctggtacggaagaaaggcaagcactttgaacataaggcggaccaccgtacgaagcctaaacatcgcagcgggaaaacagtgtttgctatggtgaaagatcttaaagtagtgtttggaaaggggcctggaagccagcctatagagagcgaagatggtcacgcagcgatgtggaaaaagaactctatattttggaacttaccctattgggaattcttggacgtcagccatgccatcgacatgatgcaccttactaagaacctttgcgtaaaccttcttggcttcctaggtgtatatggaaagtcgaaagatacactggaagcacgtaatgatctgaagcatatggaacaacgcggcgaccttcacccggaaccaaaggagaaaggaagccattacttgagtccagccagctacactcttagcaaggcagagaaggaaaagatcggtattctcagccctgtgtacctacacaacatgtttcctttcgagaggtacatgggtgttctgaagaaatatgttcataaccgtgctcgtccagaggcaagcatcgccaagggtaccatcgaggacatatgggaacttgactatggacctctcaaggtccctctgttccggtgccaatgggttaggttgcctggtggaggcgtaacgattgatgacagtgggatgacaacggttgaccttaacaaggttggatactcggacgaaccttttgtccttgccaatgatgtaacgcaagttttttacgtcaaggacatgtctagcaaaggaaaaaggggcaaagggcctgacgagccgaagcaccacatggttctcccaagaaaaagaaaaatcgtcggagtagaggacaagactgacgaggattacgatcagtttgatgggcaaccccctttcacggtgacgattgaccctagcatcctcctatcaaatgacgacattccttactcacgtagcgatcacaagaaagaaacaataatggctgatcgcgatgaggaacatatactgtacgatacaatcgcagagggaagcagccagtattggaacgaagaagaggggaacgaggatccaaaccagtacttgaacgaggagaggaacatggagagggatgcggaggggaacgaggaggggaacgaggaggaggaggctagtggaagtcatccctccgctggacagaagagggcacgcggacaacgaggtgccatgaagaagatagagggtcggcacatcataactgaggtggacgaagacggccgaccaagtgccccggcagaagcagccaagaattttgtatgccacagcggttgggttgtgagggataacgtgcctgtcagcatggtgtactggcgcagaacaagggcacgagggggtaatgacagctttgtctcggaatcagagaaagagatgctgtggaccacaatgctcgagacgttcacgctccctgcgggtacggagaacatagtgaaacagtggactcttaagaaaatggctaaacagttccagagcttcaagggagatctctacaagaaatacatcctgaagggactaataccgaacttcgacgtattcccaaagctaagagattattgggacgagtttgttgcttag

SEQ ID NO: 56225 - DNA, 4245 bp, Oryza sativa
  Clone ID: PAT_MRT4530_58157C.1
atgagcagcggctatagcacttggcccgttacgatgtgtatctacaacctccccccttggctatgcatgaagaggaagtacataatgatgccgattattattcaaggccccaagcaacctggtaacgacatcgatgtgttcctaagaccactggtcaaagatcttaaactgttgtggaaaaaggaaggtgtatatggaaagtcgaaagatacactggaagcacgtaatgatctgaggcatatggaacaacgcggcgaccttcacccggaaccaaaggagaaaggcaaccattacttgagtccagccagctacactcttagcaaggcagagaaggaaagtatgtttgaatgcttggagagcatcaaggtaccgtctggatactccacgaatataaagcgaataataagcacgaaggagaagaagttcacaaacctaaagtctcatgactgtcacgtgttgatgacacaactgctaccagttataataaggggtatcctcccagacaatgtccgggcaacaataacaaagctatgttctttcatgaacgcaattccgcagaaggtcatcgatccggatagattagaagcccttcagaatgatgtggtgcaatgtcttgtcagctttgagttgatatttccaccttcatttttcaatataatgacgaatctgctttgtcaccttgtcaaagagatcggtattctcgggcctgtgtacctacacaacatgtttcctttcgagaggtacatgggcgttctgaagaagtatgtttgtaaccgtgctcgtccagaggcaagcatcgccaaggggtatggaacagaggaggtcattgaattctacatagaatttattgaagaccttcgcccaatcggtgtacctgaatcacgccatgaagggagactacggggaaagactacggggaaaggggactctcggaaggaaagcaataatgacggtggacaacaatttattcctaaagcccatttcacggttctgcaacaatcttcattggtggcttcttacatcgaggagcacttggctctagtccgcgccacaaacatcgataagtccgatgcatggattacatggcatcacattgatacttttcccgcgtggctgcgacaacatctcatgggtaacgaggcgattaaccagcaactggccttcctggcgaggggtccatctggcttgattgtgacattccagggatatgagatcaatgggtacacattctacacgagagcccaagacatgaagagcacgaaccagaacagtgttatttgtatcgatgccatgggacacgatggtacaactggcacgtattacggtgccatcgaggagatatgggaacttgactatggacctctcaaggtccctctattccggtgccaatgggttaggttgactggtagaggcgtaacgattgatgacagtgggatgacaacggttgaccttaacaaggttggatactcggacgaatcttttatccttgccaatgatgtaacgcaagttttttacgtgaaggacatgtctagcaaaggaaagaagggcaaagggcctaacgagccgaagcgccacgtggttctcccaggcaaaagaaaaatcgtcggagtagaggacaagactgacgaggattacgatcagtttgatgggcaacccactttcacggtgacgattgaccctagcatcctcctatcaaatgaagacaccccttactcacgtagcgatcacaaggaaggaacagtagtgaggagaaagtacgtgcggacaaccgtcaccgccgatgtattgccctgcccccgcctcaagctcgccatgccgccgccgcgccgccacgccgcgcacgccaccggactgcgccacgccgccgcgacaccccgccgccgccgcgacacgctgcagccacgccgccgcgctgccacgccgccggaccgcgcgcgccacgccaccacgatgccccgccgccgccgccgcgacacgctgccgccacgccgccgctccgctgccgccacggccgccccgtcattgccgaacatggctgatcgcgatgaggaacagatattgtacgatacaatcgcagagggaagcagccagtactggaacgaagaagaggggaacgaggatccaaaccaatacttgaacgaggaggggaacgtggagagggatgcggaggggaacgaggaggggaacgtggagaggcatgtggaggggaatgaggaggaggctagtggaagtcatccctccgctggacagaagagggcacgcggacaacgaggtgtcgcgaagaagatagagggtcggcacatcattactgaggtggacgaagacggccgacctagtgccccggcggaagcagccaagaattatgtacgccacagcggttgggttgtaagggataacgtgcctgtcagcaaggtgtactggcgcagaacaagggcacgcggggataatgacagctttgtcccggaatcagagaaagagatgctgtggaccacaatgctcgagaagttcacgctccctgcgggtacggagaacatagtgaaacagtggactctaaagaaaatggcagaacagttccagagcttcaagggagatctctacaagaaatacatcctgaagggactaacaccgaacttcaacgtattcccaaagctaagggatcattgggacgagttcgttgcttacaaggcaggccaacaagggcaagcgatgatggtcaaaaacaaggaaaacgccgccaagaagaagtaccatcaccacttggggtcaggcggctatagcgtcgcaatgctgaagtgggaggagatggaggcaagattgattgagaggggtatcgaaccggccaccgctaaatggccggatcgatcgaagttctggtactatgctcacggtggaacgcttaacccagttgatggctcccttgtcttcagcaatcagatacgcgaggctgccagtcgactaacggatgcagtggaagcctcttctcagggcacgttccgacccgacagagagaaggacgagctgtcacttgccctacagactcccgagcatccaggacgaacacgagggaaaggcgtgattccctggaagattggattcaaggaggacatccacacgtacaggagtcggatgaggagcaagagagataccgaggcgaagattgcagatcttgagtacagggtatcgagctacgagctcaacatgcaagaggaggtggcaaggaaggtaggatcacagagcatggacgccatgcaaacccaggacgaaaccacctgccccgttgatgggatcacgcagcggacaccatgtgagctgcatattcccttcaagaacttattaatcaagggacttaccactgcaggccgattccagcaggatactcgagggtcgaagttgagctggtggaagccgcatacgaggaccctgagttggactacccaggaggagacggtgagacgtatctacgagacacaagccacgccattatactatggcgcaagcggtacatcatcctccctgggcgacaagcggcgtctcgtgcaccatctcctcggctccaccgtctcctcctgcaccatctcctccggttcctccgccatgtcctcctacaccatctcctccggctcctccgactcctccgcctcctccacctccacctccaccgttcaagaggagcttgatgcttatgtggcaggagaagtgaagaggcaactcaagccttggagtcctaaaaagaagatacctattgacccgagcgtgaagaagttcttcaagggaatgtccaccacaaacaaggaggtcttaaagctatcggactatgaccgaacacttaggaaagcctattacaagaagtccaaaccagttcctcagcttggagaacagccaaaccaagaggtcgagccgttggtgactggcgaagactttggcataacggatttcatttcggacaccagtctaactgtggatcagttggttggaagcgcaccaatcccgaaggcggaagtggcatataagtttgaactcggtaaaccgcttgtcaggcctgagcagctgcagtccccactgacacaaatgtacaaattccatgaacggtacatggaaatgagcgccaagggtagagagatgttcggagcgaggattagaaaccccgactttctgcaaggagaagatgttctatggatccatttcaaggatgtcttcgatctgtaccatctggacgccctcgacgtctctcttctgagcgcatag

SEQ ID NO: 56226 - DNA, 264 bp, Oryza sativa
  Clone ID: PAT_MRT4530_58158C.1
atgtcgagccggaggtcgtcgcgctcctccgtgtcggaggaggagatcaacgagctcatctccaagctccagtccctcctccccagctcccgccgccgcggcgccaaccaggcgtcgacgacgaagctgctgaaggagacgtgcagctacatcaagagcctgcaccgggaggtggacgacctcagcgacaggctctccgacctcatggccggcatggatcacaacagcccaggcgccgagatcatccgcagcctcctccgctag

SEQ ID NO: 56227 - DNA, 1246 bp, Oryza sativa
  Clone ID: PAT_MRT4530_58159C.1
actcaagcttgcatgcctgcaggtcgactctagaggatcccccaccatctcctccggctccgccatctcctccgctacctcctcctgcaccatctcctctggctcctccgtcacctcctcctgtaccatctcctccggctcctccggctcctccgcctcctccacctccaccatgtccgcctgcacctcccaagacaaggtctcgtcaagctccaccgcctgcccgcacaagggcaacgaagaaggcaaaacaaaagtgaagaggcaattcaagcctcggagtcttgaaaagaagatacctattgacccgagcgtgaagaacttcttcaagaaaatgtccacaacaaacaaggaggccttaaagctatcggactatgaccgaacacttaagaaagcctattacaagaagtccaaaccagttcctcagcttggagaacaacctaaccaagagttgattagaggcgcaccaatcccgaagacggaagtggcatacaagtttgaactcggtaaaccgcttgtcacgcctgagcagctgcagtccctaccgacacagatgtacaaattccatgaatggtacatggaaatgaacgccaagggtagagagatgttcggagcgaggataagaaactccgacttcttgcaaggagaaaatgttctctggatccatttcaaggatgtcttcgaactataccatctgaacgccctgaacgtctctcttctgagcgcatggattttaatgaagattcaaaagacccgacggcggggggtttgcgatactgggttcatcgaccctcagaaaatcaacgtcgaaatgatcgacaagtacgagaaagacacagaggacaatctcgtccatctcctgacgcagcagcatttcaagacgttcatagtactgccgtacaacacagaattccactgggtcctgttacttttcgacttggatgcatgcagagtcaatgtgtatgactcaatgaataaagagaagacttttgacaagtgtgcaaagcgggaccagggaactaacttgtgcggctactacgtatacgagtatgcccactgcctatcaacccaaatctacaccacacgagagctcgatcgtattcacatgagggacaatctctcacacaaggattttatcacggctgttcaagtccttaatcccaagggtgaattctactacgacggatcgacaattcataacgtcggtccttcttcttttgacataacgcccgcgtcgaagtcgtag

SEQ ID NO: 56228 - DNA, 1011 bp, Oryza sativa
  Clone ID: PAT_MRT4530_5815C.1
atggtctgctgcctcaacaagtccttgtatggtctgaatcaagcaccccgcgcatggtacagtcggtttgccaacttcctgctcaccctaggattcaccgaggcttgctttgacacatcattgttcatatacactcgtggctctgatgtggtctatattttgttgtatgttgatgatattgtgctcaccgcctcttctgacagtctccttcgatggactatcgctgctcttcaagccgaattctccatgaaggatcttgggactctggatcactttctggggatcagtgtttgccgcacttctgctagtatgtatctcagtcagcgtcagtacattctggatattctcgatcgtgctggtatgtcagattgcaagccatgctccacgccggtagacaccaatgccaagctttctgctgttgacggtgattcagttgctgacccaacggactttcggagccttgctggtgctttgcagtatctcacattcactgacctgacatctcatatgctgtccagcaggtctgtctccacatgcatgacccacgggagccgcaccttgccgctctcaagcgcattcttcgttgatttggttgcctactctgacgccgattgggcgggttgtcctaacatgaggaggtccacctcaggctatgtcgtatttcttggggataatcttgtgtcttggtcttccaagcatcagaataccttatcccgctccagcgctaaggcaaagtacagagccgtggctgaaacctgttggctccgccaactcctgaatgagttacattcacctccctccaaagctacagtggtctattgtgacaatgtcaacgcagtttatctcttcaccaatccagaacaacaccaacggactaagcatgttgaaatcgacctacactttgttcgtgaccgtgttgatgctggagttgttcgtgtgcttcatgtgcctaccacttcacagtacgccgacatcttcaccaaggggctacctagttctgttttttcctag

SEQ ID NO: 56229 - DNA, 193 bp, Oryza sativa
  Clone ID: PAT_MRT4530_58160C.1
cccacgcgtgcgctttaatccatatgacacaaacggcactatagactagcagtatctcgtaatcgcgtagatatgcacaacgcagttcgagaacaagtaatcatgcacgtatggatgctacgacagggagaaaatatcttttcaggattatttaattccgccgatgtggatgatccatcgcagagagcatatg

SEQ ID NO: 56230 - DNA, 2538 bp, Oryza sativa
  Clone ID: PAT_MRT4530_58161C.1
atggctgatcgcgatgaggaacagatactgtacgatataatcgcatcgggaagcagccagtactggaacgaggaagaggggaacgaagatccaaaccagtacttgaacgaggaggggaacgcagagagggatgcagaggggaacgaggaggggaacgtggagagggatgcggaggggaacgaggaggaggctagtggaagtcatccctccgctggacagaagagggcacgcggacaacgaggtgccgcgaagaaaatagagggtcggcacatcataactgaggtggacgcagacggccgacctagtgccccggcacaagcagccaagaattttgtacgccacagcggttgggttgtgagggataacgtgcctgtcagcaaggtgtactggcgcagaacaagggcacgcgggggtgatgacagcttcatcccggaatcagagaaagagatgctgtggaccacaatgctcgagacgttcacgctccctgcgggtacagagaacatagtgaaacagtggactcttaagaaaatggcagaacagttccagaccttcaagggagatctgtaccggaaatacatcctgaaggagcagacaccgaacttcgacgtattcccgaagctaagggatcactgggacgagttcgttgcttacaagacagagaaggacgagctgtcactcgccctacagactcccgagcatccaggacgaacacgagggaaaggcgtgattccctggaagatgggattcaaggaggacatccacacgtataggagtcggatgaggagcaagagagatactgaggcgaagattgcagatcttgagtacagggtatcgagctatgagctcagcaagcaagaggaggtggcccggaaggtggatgaacgcatggcagcacatcggtcacacgatccccagccgtacatacctcctccaatggtcagcccatcaggcaatcatagcagctgcgcctcaacggggcaggtagtatcacatagcatggacgccatgcaaacccaggatgaaaccacctgccccgttgatgagatcacgcatcggacaccatgtgagctgcatattcccttcaagaacttatcaatcaaggtggcgtcgggaatggccatcccaacggacatttcagggacttaccactgcagaccgattccagcaggatactcgagggtcgaagttgagctggtggaagccgtgtacgaggacctcgagttggactacccaggaggagatgccagcacaagggcaatgaagaaagccaaagttgacaccaccaaaaacaaggagccaccgtacggttgcagtcaagaggagcttgacgcttatgtggcaggagaagtgaagaggcaactcaagcctcagagtcctgaaaagaagatacctattgacccgagcgtgaagaatttcttgaagggaatgtccaccgcaaacaaggaggccttaaagctctcggactatgaccgaacacttaggaaagcctattacaagaagtccaaaccagttcctcaacttggagaacaaccacaccaagtggtcgagccgttggtgaccggcgaagactttggcataacggatttcatttcggacaccggtctaaccatggctcagttggatggaggcgcaccaatcccgaaagcggaagtggcatacaagtttgagctcggtaaaccgcttgtcaggcctgagcagctacagtccctaccgacacaaatgtataaattccatgaacggtacatggaaatgagcgccaattgtagagagatgttcgaagcgaggatcagaaaccccgacttcttgcaaggagaagatgttctatggatccatttcaaggatgtcttcgatctgtaccatcgggatgccctcgacgtctctcttctgagcgcatggattttaatggagattcaaagggcccgatggcggagggtttacgatactgggttcatcgaccctcgaaaaatcaacaccgaaatgctcgacaagtacgaaaaagacacagaggacaatctcgtccatctcctaacgcagcagcattacaagacgttcatactattgccgtacaacacagaattccactgggtcctgttctttttcgacttggacgcacgcagagtcactgtatatgactcaatgaataaagaggagaaggtttttgacaaggtcttccaactgatagacagggcttgggatcggttccgtcaattggtccgcgggacttggaaagaaaaacttggatggaggtttcattttccatgtgcaaagcaggacaagggaactaacttatgtggctactacgtatgcgagtttgcccactgcctatcaaaccaaatatacaccacacgagagctcgatcgtattcacatgagggaaaaactcccacacaaggattttatcacggctgttcaagaacaactgatggggttcatcaacgaagaagtccttaatcctgatggtgaattctactacgacggatcgacaattcgtaacgtcggtccttcctcttctgacgtaacgcaggcgttgaagtcgtag

SEQ ID NO: 56231 - DNA, 462 bp, Oryza sativa
  Clone ID: PAT_MRT4530_58162C.1
aaaaaaaaaaaaaaaaaaaaagaaaaaaagatgaaaactaagaaacaagaagatagaaaaaaaaaagagttttttctttcatttttaaaaaaaaaaaaaaaaaaagggaaaaaaaaaagaatgaaaaaaaaaaaaaaaaaaagggggggccgttttaaaggacccaagttaacgaccgcgggctggcaaggaaaaagtttttttatggggcccccaaaataaaatccacgggccgcggtttaaaaacgtcggaacgggaaaaacccgggcgtaacccaactaaatggcttggaagaaaatccccttttcgcaagtgggggaaatagcaaaaaggcccgaacaaatcgcctttccaaacagttgccaacccaaaagggcaatgggaacgccccttgaaccggccaataaaccccggtgggggggggggttacgccaagggtaacggtaaaattggcaagggcc

SEQ ID NO: 56232 - DNA, 457 bp, Oryza sativa
  Clone ID: PAT_MRT4530_58163C.1
tccgtgggcgtcctccgccacacgccgcgcggtctacttgttgtctggttttaatgtgaccatctttgttctttatgatatgtttagtttttatgttaacagttttcctgttggtgtacagtcagtatgtctttatgtaataagtttggatttgtaacctatataaaaaaaaaaaaaaaaaaaaaaaaaaaaaaaaaaaaaaaaaaaaaaaaaaaaaaaaaaaaaaaaaaaaaaaaaaaaaaaaaaaaaaaaaataggataaaaacaaaaatcggtcataatgcacataacaataaaaacacaaaaagcgaaaactaaaaaaaaatgggcgggcccttttagggaccccgtgtttcctccgtgtccctctgggtttttcctttttttttgggggcccgtatttcttctgccgggggcgtctttttcctcggggggggggggaaaacctggtgttccc

SEQ ID NO: 56233 - DNA, 581 bp, Oryza sativa
  Clone ID: PAT_MRT4530_58164C.1
cgggctgcaggaatcggcacgggaataccactattactacatggacacatgagtacagtacacacatctgtatggtttgatccaaatttttcttgacatatttttttgtcatataaaaccattttgcgaacatggctaacacgtatgaagtcttggctgtgagagtctagtgattctgtgtatatttgcttacctgtttaaggaattgactggtacaagaagtactgaatggaagctctgaatttagttgactgacatactataagttaggataccttttaggctgatattcaataggatgtctcagactaccgcaggtaatgataattttgtcgtccgtagtactgtgtattgtgctctgttttgcagactaatgatgtatactagaaaaactagacattgttcattcatatggagctaagaattcaacttattagtattagaacttctctttgctgtcctattgtatcagacctattggcaaagttctagatctactgcaagccaacagcatggctgttctgtgatgagaggtcaatgtttcccatggcatgtgctagcatagtttcatggggcttaac

SEQ ID NO: 56234 - DNA, 1792 bp, Oryza sativa
  Clone ID: PAT_MRT4530_58165C.1
ctaatgagagtgggaagccatggttgtggtgggactatgtgcagccttgaatacacaaatttgatgtagattttgaaccacaacaaatttgtgtattcaaggctgctaatgagagtgggaagccatggttgtggtgggactatgtgcatgacttctcaattaggtgccctatgaaggagaagaaatacacacctgaatacccagttcactcctcattatattacatggtattgccctgaagcttttgttgtgagcaagcagtgcaaatcacagtgtatcaatcatgggaggtattgtgcaccagacccagagcaggatttcagccagggatatgatggaaaagatgttgtggttcaaaatctacatcaaatttgtgtattcaaggctgctaatgagagtgggaagccatggttgtggtgggactatgtgcatgacttctcaattaggtgccctatgaaggagaagaaatacacacctgaatgtgctgttcatgttattaagtcactcgggttggatgttgagaagataaagaagtgtgttggagatcctgaagctgatgaggaaaaccctgttctgaaggcagaacaagatgcccaaattggtcatgataaacgaggagatgtcacaatactgccaacccttgtcatcaacaacaggcaatatcgaggtaagttggacaaatctgccgtgctcaaagcagtctgcgcaggatttgaggagacaactgagcctgctatttgtttgagcgaggatgttcaaacaaatgagtgtttggaaaataacggaggttgctggcaagatagggataataatgttactgcatgcaaggataccttccgtgggcgtgtttgtgaatgtcccgttgtgaaaggtgtaaagtttgttggtgatgggtacaccaattgtgaagcttctggcattggtaggtgcgaaattaaaaatggaggatgctggaaagaaactagaaatggcaagacaatatctgcctgctcaaatgaagtatctgaaggctgcaaatgtccaccaggtttcaagggtgatggaataaaaagttgtgaagatattgatgaatgcaaggaaaaactttactgtcaatgcaagggctgcagctgtgagaatacatggggtagctatgagtgcagttgtggcggtaacaacatgttatacatgagagagcatgacacttgtctcagcaaggaggctacgtcagctgttggctggagttttctgtgggttattttctttggacttgttcttgctggggtcggagcatatgcggtgtataaatacaggctacggagctacatggattcggagattcgcgcgatcatggcccagtacatgcctttggataaccaagaagcagctaaccaacatcatgtcgcgcatgctggtgatgatatttgaaacggcactcctttcccgggtgcgcgaacatttcatatgtgtactgatgcaccggtggccatcgactttacaggggtcaactgggcgcaaaagatagtgtgtgtgcgcgagaaagattagccgtatacatgtatgattgtaagagagacatcgtttgagatcatctttctgtaaaacccaaagaacagcataggcaaatattgtgacagttttagcccttcctcagactcagctgctcctgctgcatacatgagtactgaatacatgatacattcaaatgtcgtgtaaatacctgtctgttcttcagactagagaattcctcctcgcctcaacttaataaaagctcgagtcttgaaggggtctaaaaaaaaaaaaaaaaaaaaaa

SEQ ID NO: 56235 - DNA, 3059 bp, Oryza sativa
  Clone ID: PAT_MRT4530_58166C.1
tccaccaatgtcggccaccaccaccgcgccgtccccgaccccgatccccatcaccaccatcgccgagctgaggcagcaccactcccagctcgtccgcctcggcctcgcctcccacccgccccacgcgcgccgcctcctcgccttcctcgcccgcgaccccgcccacctcccctacgccgcgcgcctcctcgcccaccacccggacccccgccccgccctcctcaacccgctcttcgcctccctcccgccgcgcgccgccgcgtcgctcctcgccctcatgctctccctcccgctcctccccgaccacttcaccttcccccgcctcctccccgccgcgccgctcccgctcgccgcccagctccacgcgctcctcctcaagctcaacctccactcccacgcccactcgctcaacgcgctcctcgccgcctacctcgccgccgcgcgccccgacctcgcccgcgtgctcttccgcaccagcggcggcggcgcgctcgacgtcgtgtcgtggacgacaatggtgggcgggctgtgcaggctcggcctcgtggacgatgcgcgggaggtgttcgatgcgatgcccgcgaggaacctggtctcctggaactccatgatctcgggctacgtcaaggccgaccggttcttggatgcgttggaggtgttcgacgaaatgcgggcgctgggagtggaggggaacgggtttgtggcgacgagcgcgctggtggcttgcacgggcgcgggcgcgctgggtcgcggtagggagatatacaggtgggtggagcagagcgggatcgaggtggacgccaagctggcgacggcggtggtcgacatgtactgcaagtgcgggtgcgtcgacgaggcatggggcgtgttcgactcgctgccggcgagggggctcacgacgtggaactgcatgatcggcgggttcgcggtgcacgggaggtgcgacgacgcgctcgagctattccaccaaatggaggccgcaggcgtggcgcccgacgacgtcacgctgctgaacgtgctcacggcgtgcgcgcacgccggcgaggtcagcgaaggccgccgctacctcaaccacatcgtgtctcgccacggcatcgagcccaagggagagcactacggctgcatggtcgacctgttcgggagagcaggccagctagacgaagccaagaaggtgatcgacgaaatgccaatggatcccgacctcgccgtcctcggcgcgctcctcggcgcatgcaagatccacggcgacgtcgacctcggcgaggcgatcgggtggcgcgtcatagacctcgacccggacaacagcggccgctacgtgctcctcgcaaacctgctcgccggcgccggccggtgggacgaggtgggcaaggtccggcggctgatggacgagcggaacgtgagcaaggaggccgggcggtcggtgatcgaggtcgacggcgaggcctgcgagttccggtgcgggaacctgcgccacccacaggctcgggagatctacgccatggccgtggacatggtgagcaggatccgggccgaggggtacgtgccggacaccggcgaggcgctgcacgacgtcgccgaggaagacaaggaggcggcgctgctgtgccacagcgagaagctcgcgatcgccttcgggctgctgcgcgcgaggccgcgcgagacgctgcgaatcaccaagaacttgagagtttgtagggattgccacgaggcgaccaagtacgtgtctcgcgtgtttgggcgtgagatcgtggttagggacaggagccggttccatcatttcaaggatggcatgtgttccgccgccgcgcgtctccagcatctccgggagctcctgctctcctgcgtcgccacgttccgcggcagaatgggctacgcccgcaaggtgttcgacggaatcccccgcccggacctcttcatgcacaacgccatggtgcgcgggtacgcgcacgccggcgcgcccggagatgcgttcgcggtgtaccggcggatgacggaggcttcccgcctgcggcccgacgcgttcaccttctgctacctgctgcgggcgtgcgccggcctgccgggttctcgcgccgggcgccaggtccatggcgcggtcgtgaagctgggattcttgaaggacgcctacgtgaggaatgcgctcatcaacatgtttgccaagtgcggggatctgaggaatgcgagggagctgttcgaccgtgcgcctgaaaaggatgtggtttcgtggaacaccataatcactgggtacgccgcgcaagggatgctgaaacatgcgttggaggtgttcgatgagatgagggcagcagggtggacacctgatgaagcgactattgttagcttgttgtcatgctgcgcgaacacggggttgctcgacgcagggaggatgatacatcatcagttgcacttggaacggcggccatggataagcattgttgttggaaatgcattggtatcaatgtatgcaaagtgtggcgatttacatactgcagtcgaaggctttaacacgatgaaggatacggatgtttggacatggaactcagtcataggaggactggccttccatggacaagcagaacaatctgtccgattcttcaagaaaatgctcgagaagagaatacacccaaatgagatttctttcctatgtgtacttggtgcatgcagccatgctggattagttgaagatggtcagaaatttttctatctgatgaaagacaggtatggaattgagcccaatgcgaggcattacagttgcatagtagacatgcttgggcgtgcaggcttactagatgaagcatatgcgattgtgagcaacatgaggtgtgaaccaagtgcggtcgtatggaggacattgcttggggcctgcagaacccatggcaatatgaccctaggcaagcttgtgagggagaagcttctaaacatgaatgaagatgcaagtgctgactatgttctgctctcgggaatttatgcctcatctggtgaatggttgggggtggagacagagcggaggtcaatggatagaagagggataagaaaagctgctggttatgctcaaattgacc

SEQ ID NO: 56236 - DNA, 3128 bp, Oryza sativa
  Clone ID: PAT_MRT4530_58167C.1
atggatcaatcaacaattgatctaagttggatgtatgcgaaaaatttgaaacgtcattctacggagtacagaaagggcataataaattttatgaacgccgcggaggaggatcggataagaagaaacagtgattacatgtgttgtccttgtgcagattgcaagaatgagaatatgtttgatagcggagaatacgtacacggtcatctgatacaacgaggattcatggagggctatacatgttgggtgaagcatggagagcaagaatcaggaagtggagcagcagtagacagaagtggtgcgcataatcaggaaaatgaagatgagcatgacatgtttataccttctccattgggcggtgaaatggttgatgtggatcacgatctgctgcaagacatgttacgtgacgttgaggacctagcccaaaatgagagagatggaatgaagttcagcaggttggtaagtgattccgagacgcctctatacgctggatgcaaagcaaaacacactaagttgtcagttaccttggacctaatgaagctgaaggcaagtagtggatggacagacaagagtttcacagatcttttaggaattttgaaggctatgcttcctgttgagaacacattgcccgagacgacatacgaagcaaagcaggttctgtgtccactggggttagaggtccgtagaattcacgcttgtcccaacgactgcatattgtaccacaagcaatatgcggacttggatgcttgtcctgtctgcaaggcttctcgatacaagcgaaagaaaagtgctgacgaaggaaataagtcaaagaggggtggtccggcaaaggttgtgtggtatctacctatcattgatcgtttcaagagaatctttgccaaccccaatgaagcgaagttagtacgttggcacgccacggagagaacgaatgacggtatgcttagacacccagcggattcgattgaatggaggaataccgatcgaaaacacaaagactttgctgtcgaccctagaaacatgaggatatgtctttgtacggatggcatgaatcctttcaatgacatgagtagtactcacagcacttggccagttcttattgcgaactataacctcccacgatggttatgctttaaacggaaatatattatgttgtgcttgttaatccaaggtccaaggcaacccggcaatgatatcgatgtattcctggagcctgttatcgacgatctggagattctttggaaagaaggtgtggaaacttgggatgcatatggtcaggagaacttcaagctaagagttctattgttctgcaccattaatgactaccctgcactcggtaatctttccggacaaactataaaaggaaagaaggcatgctccgattgcaaggaacatacatgaagccggtggctgaagaaatcacgaaagatggtatacatgggtcatcggaggtggctcccgctacgtcacgcatttagaagaaagaagaaaatttttaacggtaagagagaacttcagcctgctcccaaagatttgtccggagatgaggtccacaatatggtcaaggacataagcaatgagtttgggaagaaaagaaaacgtagcaagacaaaggagaaggaaaagaatgtgtgtgagagtttggttggcctgatgttgaatattcccaggaagacaaaggacgggttgaacgcgcgccttgatctacaggacatgaatattcgcagtgaactccaacccatacgagatgcagagacaggtagagtgtacctccctccagcctgccacacattgtcgaatgatgagaagatcgcagtgttatcatgcttgaaggatattaaagtttcatcgggctattcagcgaggataagtatgttaaattggacgatctaaaacttgttggaatgaagtctcacgattgccacgtgctaatcacacaaatcttgccagttgctatcagaggcattctaccaccgaaagtgcgtcacacgatccaacgtctgtgctccttcttcaatgcaattggacagaaggttatagatccagaagatctagatgggttgcagaccgatattgtgaataccctctgtcacctggagatgtttttcccactgtctttctttgatataatggttcatctccttgttcatctagtgaagcaaacaaaactatgtggcccaacttttctaagggaaatgtggccgtttgaaagatacatgggagttctgaagtcatacgttcgtactagagctaaacctgaggggagcatcattgaaggttacacgactgaggaggctattgagttctgtgtcaattacatgtccgatgccgatcctatcggagttcctgcgtctcatcacgggggaaggttgtcaggtgttggcacaatcggaaggaaaagaattaggccagatcaagtgtcgtatgcgcaggctcattacgctgtgctccagcatatggcagaagttggcccatactttgaggagcacttagcgaaaatccgagatgagaacttggggcaaaatgatgcatggattaacagagaacataattctcggttcaacgaatggttcaagaatcatgtgacaatgtccacggatgtcccaaatgagacaaccgtagacacatggcaaggatacgatataaatggatacacattttacaccgtcaaacaagatgacaaaagcacagtgcaaaacagcggcgtccgtatagatgcgttccaggattaagttgggtcaaacacatactacggccgcattgaggagatctgggagctaaactacgtcaagttcaaggttccattgttccgctgccgttgggtgaatctacgcactggtgtcaaagccgacaaggaaggtttcactttagtagatctatcaaaggtgggatacgccgatgaaccatttgtacttgcgaaacaggtcgagcagatattctacataaaagacccttcaaacaagaggatgcacatcatgagggatggaaagcgccgaattgtaggagttgacaacgtcgtcgatgaagaagaatacaaccataatcttcatgtaagacctcacattgaccttgacgatgatccccaagagcctgtggcatatactcgttcagatcatacggaaggcataaccttg

SEQ ID NO: 56237 - DNA, 3020 bp, Oryza sativa
  Clone ID: PAT_MRT4530_58168C.1
atggatcaatcaacaattgatcgaagttggatgtatgccaaaaatttgaaacgtcattctacggagtaccgaaagggcgtaataaattttatgaacgccgcggaggaggatcggataagaagaaacagtgattacatgtgttgtccatgtgcagattgcaagaacgagaatatgtttgatagcggagaggacgtacacggtcatctgatacaacgaggattcatggagggctatacatgttgggtgaagcatggagagcaagaatcaggaagtggagcagcagcaaacagaagtggtgcgcataatcaggaagatgaaaatgagcatgacatgtttataccttctccattgggcggtgaaatggttgatgtggatcacgatctgctgcaagacatgttacgtgacgttgaggacccagcccagaatgagagagatggaatgaaattcagcaggttggtaagtgattccgagacgcctttgtacgctggatgcaaagcaaaacacactaagttgtcagttaccttggacctaatgaagcttaaggcaagtagtggatggacagacaagagtttcacagatcttttaggaattttgaaggctatgcttcctgttgagaacacattgcccgagatgacatacggagcaaagcaggttctgtgtccactggggttagaggtccgtagaattcacgcttgtcccaacgactgcatattgtaccacaagcaatatgcggacttggatgcttgtcctgtttgcaaggcttctcgatacaagcgaaagaaaagtgctgacgaaggaaataagtcaaagaggggtggtccagcaaaggttgtgtggtatctacctatcattgatcgtttcaagagaatctttgccaacccgaacaaagcgaagttagtacgttggcacgccatggaaagaaggaatgatggtctaaggcaacccggcaatgatatcgatgtattcctggagcctgttatcgacgatctggagattctttggaaagaaggtgtggaaacttgggatgcatatggtcaggagaacttcaagctaagagttctattgttctgcaccattaatgactaccctgcactcggtaatctttccggacaaactataaaaggaaagaaggcatgctccgattgcaaggaacatacacgaagccggtggctgaagaaatcacgaaagatggtatacatgggtcaccggaggtggctcccgctacgttacacatttagaagaaagaagaaaatttttaatggtaagagagaacttcagcctgctcccaaagatttgtccggagatgaggtccacaatatggtaaaggacataagcaatgagtttgggaagaaaagaaaacgtagcaagacaaaggagaagggtatgtggaagaaaaaatccatattttggcggctaccttactggaaagatcttgatgttcgtcattgcattgatctcatgcatgtagaaaagaatgtgtgtgagagtttggttggcctgatgttgaatattcccgggaagacaaaggacgggttgaacgcgcgccttgatctacaggacatgaatattcgcagcgaactccagcccatacgagatgcagagacaggtaaagtgtacctccctccagcctgccacacactgtcgaaggataagaagatcgcaatgttatcatgcttgaaggatattaaagttccatcgggctattcagcgaggataagtaagtatgttaaattggacgatctaaaacttgttggaatgaagtctcacgattgccacgtgctaatcacacaaatcttgccagttgctatcagaggcattctaccaccgaaagtgcatcacacgatccaacgtctgtgcgccttcttcaatgcaattggacagaaggttatagatccagaagatctagatgggctgcagactgatattgtgaataccctctgtcaccttgagatgtttttcccactgtctttctttaatataatggttcatctccctgttcatctggtgaagcaaacaaaactatgtggcccggcttttctaagggaaatgtggccgtttgaaaggtacatgggagttctgaagtcgtacgttcgtaacagagctcaacccgaggggagcatcattgaaggttacacgaccgaggaggctattgagttccgtgttaattacatgtctgatgccgatcatatcggagttccagcgtctcgtcacgagggaaggttgtcgggtgttggcacaatcggaaggaaaagaattaggcccgatcaagcatcgtacgcgcaggctcattacgctatgctccaacatatggcagaagttggcccatactttgaggagcacctagcgaaaatccgagatgagaacttggggcgatctgatgcatggattaacagagaacataattctcggttcaacgaatggttcaagaatcgtgtgacaatgtccacggatgtcccaaatgagacagtacagttgttggggatgggaccgtcttggaccgtgtagacacatggcaaggatacgatataaatagatacacattttacaccgtcaaacaagatgacaaaagcacagtgcaaaacagcggcgtccgtatagatgtattccaggatcaagttgggtcaaacaaatactacagccgcattgaggagatctgggagctaaactacgtcaagtttaaggttcctttgttccgctgccgttgggtgaatctacgcactggtgtcaaagccgacaaggaaggtttcactttagtagatctatctaaggtcggatacgccgatgaaccatttgtacttgcgaaacaggtcgagcagatattctacataaaagacccttcaaacaagaagatgcacatcgtgagggatggaaagtgccgaattgtaggagttgacaacgtcgtcgatgaagaagaatacaaccataatcttcatgtaagacctcacattgaccttgacgatgatccccaagagcctgtggcatgtgctcgttcagatcataccgaaggcacaaccttgtga

SEQ ID NO: 56238 - DNA, 2819 bp, Oryza sativa
  Clone ID: PAT_MRT4530_58169C.1
tgttcatgtgcagattgcaagaatgagaatatgtttgatagcggagaggatgtacacggtcatctgatacaacgtggattcatgaagggctatacatgttgggttaaggatggagagcaagaatcaggaagtggagcagcagcagacagaagtggtgcgcataatcaagaagatgaagatgagcatgacatgtttataccttgtccattgggcggtgaaatggttgatgtggatcacgatctgctgcaagacatgttacgtgacgttgaggacctagcccagaatgagagagattccatgaagttcagcacattggttagtgattccgagacgcctctgtacactggatgcaaagcaaaacacactaagttgtcagttacgttggacctaatgaagctgaaggcaagtagtggatggacagacaagagtttcactgatcttttaggaattttgaaggctatgcttcctgctgagaacacattgcccgagacgacatacgaagcaaagcaggttctgtgtccactgggcttagaggtccgtagaattcacgcttgtccaaacgactgcatattgtaccacaagcaatatgcggacttggatgcttgtcctgtctgcaaggcttctcgatacaagcgaaagaaaagtgctgacgaaggaaagaagtcaaagaggggtggtccggcaaaggttgtgtggtatctacctatcattgatcgtttcaagagaactttgccaacttgaacgaagcgaacttagtacgttggcacgccacggagagaaggaatgacggtatgcttagacacccagctgattcgattgaatggaggaatatcgatcgaaaacacaaagactttgctgccgaccctagaaacatgaggatatgtctgtgtacggatggcatgaatccttttggtgacatgagtagtactcacagcacttggctagttcttattgcgaactataacctcccgccatggttatgctttaaacggaaatatattatgttgtgcttattaatccaaggtccgaggcaactcgacaatgatatcgatgtattcctggagcctgttatcgacgatcttgagattctttggaaagaaagtatggaaacttgggatgcatattgttcaagctaagagttctattgttctgcaccattaatgactaccctgcactcggtgatctttccagacaaactataaaaggaaagaaggcatgctccgattgcaagtaacatacacaaagccagtggctgaagaaatcacgaaagatggtatacatgggtcatcggaggtgggtcccgccacgtcacgcatttagaagaaagaagaaatattttaacggtaagagagaacttcagcctactcccaaagatttgttcggagatgaggtccacaatatggtcaaggacataagcaatgagtgtgggaagaaaagaaaacgtaacaacacaaaggagaaggaaaagaatgtgtgtgagagtttggttggcctgatgttgaatattctcgggaagacaaaggatgggttgaacacgcgccttgatctacaggacatgaatattcgcagtgaactccagcccatatgagatgcaaagacaggtagagtgtacctccctccagcctgccacacattgtcgaaagatgagaaaatcgcaatgttatcatgcttgaaggatattaaagttccatcgggctattaagcgaggataagtaagtatgttaaattggacgatctaaaacttgttggaatgaagtctcacgattgccacgtgctaatcacacaaatcttgccagttcctatcagaggcattctaccaccgaaagtgcgtcacacgatccaatgtctgtgcgccttcttcaatgcaattggacagaaggttatagatccaaaaaatctagatgggttgcagaccgatattgtgaataccctctgtcacctggagatgtttttaccactgtctttctttgatatataatggttcatctccctgttcatctggtgaagcaaacaaaactatgtggcccggcttttctaagggaaatgtggccgcttggaaggtacatgggagttctgaagtcgtacgttcgtaacagagctaaacgcaaggggagcatcattgaaggttacacgaccgaggaggctattgagttctgcgtcaattacctgtccgatgccgatcctatcggagttcctgcgtctcatcacgagggaaggttgtcaggtgttggcacaatcggaaggaaaagaattaggcctgatcaagtgtcctatgcgtaggctcattacgctgtgctccaacatatggcggaagtaggcccatactttgaggagcacttagcgaaaatccgagatgagaacttggggcaatctgatgaatggattaactgataacataattctcggttcaacgaatggttgaagaatcgtgtgacaatgtccatggatgtcccaaatgagacagtacagttgttggggatgggaccgtcttggaccgtagacacatggcaaggatatgatataaatggatacacattttacaccgtcaaacaagatgacaaaaacacagtgcaaaacagcggcgtccgtatagatgcattccaggatcaagttgggtcaaacacatactacggccgcattgaggagatctaggagctaaacttcgtcaagttcaaggttcctttgttccgttgctattgggtgaatctacacgctggtgtcaaagccgacaaggaaggtttcactttagttgatctatcaaaggtgggatactgtgacgggccctacggcaatgcccgattgagatgacttatcactct

SEQ ID NO: 56239 - DNA, 2448 bp, Oryza sativa
  Clone ID: PAT_MRT4530_5816C.1
atggccgagcaaggaaaagcgcacgacctctctccgagtgtgagcggcgacgacggggagccgaatccacgccgtcgagctcgtactcccccacctcctccgcaccaaagccctaagcagggggaggcgcttgagagggtcgacaaatccgtagcatcaccagtcgcaggtgatgcaggagaacggcgagatggggagcgtcgcctcctcgtctacggcgacggcagcacgcctcagggcgcgcttcaggctgctggcgcgctcctacgacacccgcccgtcgtccatgacccggagtctccagcccaacgatggctggacgacgtggccaacttggtcatgacggcacagcagcgcctgggtgctggtggacggtccgccaccaccaagacctccggcgccgctaccaccggctccgtgtcatcaaggcggagggcgcggcgagcggcggctgttgcacgccattcggctgccactccctcgtcggcaccttcgactcgggaggatcagcatggagagccggatgcccgcctcgacatcgagcgccggcgtaatagccggcgtactccccgcgcaacggagggcgcttcctcgtccagagtgtcacctcgacacggacgtgaggaccagccctccgtgcccccggcgggtggtgtcggctgtagagcctttgtggcgagtcttcggaatgtccgttggcccccaaggttccggcccaccatcaccgagaagtacgatgggagcgtcaaccccactgagtttctccaggtctatacgaccgggatcgaggccgctgggggtgacgacagggtcatggcgaacttctttcccatggccctaaaaggacaggcgcggggttggctaatgaacctgccacccgcgtcggtccactcctgggaagatttgtgccaacagttcaccatgaacttccaaggcacatatccgcgcccaggcgaagaagcggacttgcatgcggtacagcgaggcgatgatgagtcgcttcgctcgtatattcagcggttctgtcaagtccgcaacaccataccatgcatccctgcacacgcggtgatctacgcgttcagggggggtgtgcggcacaaccgcatgctcgaaaagattgcctccaaagagccccagactaccgcggagctttttcagcttgcggaccgagtggctcgaaaggaggaggcatggacctggaacccctccggtcccggagtggcagcttcggccgcccccggatccgctgctcagacagggcggcgggacaggaggaggaagaagagtctatacaagaagggggcccgaaggcctcggaagaagaaagaaaaagctattcaagattggcgggggcctgggggctcactccgacgcgcccgggtcaccagccttgtcgtcgctgtcgtccgcaccaccgtcgccgccctcctcgtcggagtcgagggcgaacgcgagccgaggggccataccctcgaagctgtggacgatgtggtcggcggcgtcccggacctgcgcgcgtgcgccgtcctcggttccggaagggaactcttccagcgctacccacggggagaagtcagggtccgagaggcccccaagccgaacggcggcccaaggcccccgacggccggagttggccctccgcctgcttgtccgacggtgtcaggcgcccccgaccctcaggatagcctcggggccactgcgggaaggccgcgcctgtcgccctcttaccccgaggatatcggcgcagaagccgagggcgccccgcgctgcctctcggatgaagagcgccctggagatacggcccctagcgaagaggatcggccccgccgaaaggtgcagcggccggtctactttgttagtgaggccctccgggacgccaaaacccgataccctcgggcccagaagatgctatacgctattctgatggctccgagaaaagcgccattaccgtatctccaggcgaggcaaatcggctcgcccagattcgtgcgccgctcaggtgatgtggcagtcttgaagagaccgcccattattgacagacaaattaccattaccggtgtgcatggtttgagaccgttgggtttttgcccaactatggagaccggtcccacctgtcaccaggctttaggagtggcgtcacgcccggccgcttcccataagaagggcgatcgccctggcataacgccgggggctactgtcggtgatatgggaccgggagtatcatgaccagaggcttgaggcagacacaatcgcccacgtggcctggcaccttcggggacgtcgggcccgagggtgaggtgtccgccctcctcctgatttcccccgatgggggggggtcgggttgcgtttgccccggccccgagggtcgaggcaccccgaccccttaaggaagtcggtcagatcaacagttaggtggcgactggcggtctgacgcacgccacgccccat

SEQ ID NO: 56240 - DNA, 4089 bp, Oryza sativa
  Clone ID: PAT_MRT4530_58170C.1
atggatcaatcaacaattgatcgaagttggatgtatgcgaaaaatttgaaacgtcattctacggagtacagaaagggcgtaataaattttatgaacgccgcggaggaggatcggataagaagaaacaatgattacatgtgttgtccacgtgcagattgcaagaatgagaatatgtttgatagcagagaggacgtatacggtcatctgatacaacgaggattcatggagggctatacatgttgggtgaagcatggagagcaagaatcaagaagtggagcagcagcagacagaagtggtgcgcataatcaggaagatgaagatgagcatgacatgtttataccttctccattgggcggtgaaatggttgatgtggatcacgatctgctgcaacacatgttacgagatattgaggacccagcccagaatgagagagatggaatgaagtttagcaggttggtaagtgattccgagacgcctctgtacgctggatgcaaagcaaaacacactaagttgtcagttaccttggacctaatgaagctgaaggcaagtagtggatggacaaacaagagtttcacagatcttttaggaattttgaaggctatgcttcctgttgagaacacattgcccgagacgacatacgaagcaaagcaggttctgtgtccactggggttagaggtccgtagaattcacgcttgtcccaacgactgtatattgtaccacaagcaatatgcggatttggatgcttgtcctgtctgcaaggcttctcgatacaagcgaaagaaaagtgctgacgaaggaaataagtcaaagaggggtggtccagcaaaggttgtgtggtatctacctatcattgatcgtttcaagagaatctttgccaacccaaacgaagcgaagttagagaacttcaagctacgagttctattgttctgcaccattaatgactaccctgcactcggtaatctttccggacaaactataaaaggaaagaaggcatgctccgattgcaaggaacatacacgaagccggtggctgaagaaatcacgaaagatggtatacatgggtcaccggaggtggctcccgctacgtcacgcatttagaagaaagaagaaaatttttaacggtaagagagaacttcagcctgctcccaaagatttgtccggagatgaggtccacaatatggtcaaggacataagcaatgagtttgggaagaaaagaaaacgtagcaagacaaaggagaagagtatgtggaagaaaaaatccatattttggcggctaccttactggaaagatcttgataaaagaatgtgtgagagtttggttggcctgatgctgaatattcccgggaagacaaaggacgggttgaacgcgcgccttgatctacaggacatgaatattcgcagtgaactccagcccatacgagatgcagagacaggtaaagtgtacctccctccagcctgccacatactgtcgaaggatgagaagatcgcaatgttatcatgcttgaaggatattaaaattccatcgggctattcagcgaggataagtaagtatgttaaattggacgatctaaaacttgttggaatgaagtctcacgattgccacgtgataatcacacaaatcttgctagttgctatcagagacattctaccaccgaaagtgcgtcacacgatccaacgtctgtgcgccttcttcaatgcaattggacagaaggttatagatccagaagatctagatgggctgcagaccaatattgtgaataccctctgtcacctagagatgtttttcccactgtttttctttgatataatggttcatctccctgttcatctggtgaagcaaacaaaactatgtggcccggcttttctaagggaaatgtggccgtttgaaaggtacatgggagttctgaagtcgtacgttcgtaacagagctaaacccgaggggagcatcattgaaggttacatgaccgaggaggctattgagttctgtgtcaattacatgtccgatgccgatcctatcggagttcctgcgtctcgttacgagggaaggttgtcaggtgttggcacaatcagaaggaaaagaattaggcctgatcaagcgtcagaacataattctcggttcaacgaatggttcaagaatcgtgtgacaatgtcctcggatgtcccaaatgagacagatcaagttgggtcaaacacatactacggccgcattgaggagatatgggagctaaactacgtcaagttcaaggttcctttgttccgctgccgttgggtgaatctacgcactggtgtcaaagccgacaaggaaggtttcactttagtagatctatctaaggtcgagcagatattcaacatagaagacccttcaaacaagaagatgcacatcgtgagggatggaaagcgccgaattgtaagagttgacaacgtcgtcgatgaagaagaatacaaccataatcttcatcttgaaatttattttgacaatatgacaaatctaaacagcatttgtgaatactacatcatttcaaatggaaatatgctcgagtcgatgagggccaagattaggcaagagatccgagaagagcaacagaacccccaggccgccgctgctgctgcgcacgaagagttaggaagtcccacccaaaaacgcagcagttgcgcatcaactgagttggcggaaaatccaacatcggtcgacagcgccgtcgaccacataacggaaccaacgagctgcaccctcacagttagggtgatgccgaccttcatggttccagcagccgagggacttgcgtacaagccgaccctagagacaagaatgcatggagcgcaactcagggccgactgtgcaaaagttcaagtcgattcggtgaagcccgaatacgagctgttccctctgaagtatccaccgaacgacgaggtcctctcactaggaaatgcccgtggtaccttcatccaatggcccaaggacctcattgagatcagggttacagcgaggccaaccactgcaccaggcggtcgtccaccaaagagacccgcctctgctccttcagcccctcctgctcaagatcgtcatgcacaatcttacgatgtgcagttgcagtacgacacggattttggggaggaccgaacggaggccgacggcaaggtgattcatgaacccccaccgatgaagaagagcaggaaggcacactcttcccctcagagaattactctcgataaacccgaagcaaaggggagaggaaggggaggaaaggtgcaggcctcgtttctagctccaaggaagctagatctaggcaagggccaggaagagactaagggcaaagaggtcaagaagaaatacatcgctccacaggagttccaactaggcatgccattggttggagatgacgtgcttgccgcaatgggcaccgcttgcaaggaccttcacttatactacatggagaaatctaacgtcaggaagccaagtaaagctaccgatatccttggagagcacaatggaaagccattccttggtccaacaaattatatcgtggtcgacttcaaggatcttttcgacctctacaggctccgagcggtggacacaagcctccttaagtgctactctttgttaagttggcaatggtgtcagaagcatgcaccggaagttgtcttccttgatccacaggtggtcactgtcacaaatctccagaatgaccgtcaaggaatggtcaactacatctacgacacctttgcccattggatccttctggtcataacacctaagtggagtacatgtcactacctgaactccagaattgataagaacgcatatgattggaccccaattcaactagctatagatgaagcgtgggcccaatacgtgcaaagaggaggcctcaggaagacaggacatgacactctcatccacaaaaaagacttcccgatgaagcaacaaataggtgaccagtgcggattccatgtgtgccacaacatgtgccttctgtatagagaaaaggtgaagactttggctgagtttgagggcacaataaccaagtctctgcctaccagctttgaggaggcaatgatgaaaacttattatgcaactgtgatgatgtaa

SEQ ID NO: 56241 - DNA, 2043 bp, Oryza sativa
  Clone ID: PAT_MRT4530_58171C.1
ctactctaaaaatgtaattctcatttttggaccacgataggaggagggatgagcgactctgggggcaactctgagggcgactttgggggcgactccgccgctggcgcgagagcccctccaactctcgagcgtcgtcttgtagctgtcgacaacaggactgagcaccgcacttaccgcgacgcgttactcgccccacctactagcccttcgtccacctccaaccttgcgccgcggaaagcccccctctccatgttccatcgctgtttccgctgtttgagccatgaccacacagttgagtactgccgagaccccgttgtctgtgcagcttgccgtggcatggggcaccgccagtccgattgccatgcctcactctcgccggggcaaatcccccgagttcccgtaccacccatcctttttaaccaacaacttgcccatcctttttccaaagccgctggatcaaaaaatcctgcgccaccaccgctccgcctgcaacaccacttccaaaaaaaaccctatcctaactcgcttcactcagtcaagatggagagtgcgactgctcaagtgctcagtggagaagatgctgttctggctgcaacttttgctgctgacatgctggctggggaccagactgctgctagcgaggggcaagatggaggtctgaactactgggataatgaggtatcttttgatctggaacaactgtttgcctctgctcctttgccccacccatgtctggctattctggcggctcaccgcaccgcggttgctggtccgtctagaccgaaggggaaatcccccctgtcgattgttggtgctgctctgccagtcattagtgaaccagatgaggtgaaggacatctttatgtgtgagtcgggtactgcaagccgacctgctcgtgtccctgttgtctctttcaacagtaggtcccctcctccacctgcatcgaggagggctcgcttacctcacctggggtcgggtgggtctcgtccaactgggacaccgagcagctcttcctcaatagaggttgagtcagatgatatttcctcagccgacagcccgcagacaggccagctcaaccagtttcttgctcagctcaatccagcttttgcagaactgcttcgcatgtaccctctccactatgacatgtttgctccctatgctgacatgcggattactgctcactatgcatctgcgttcctgtaccctgcggcttcagaaccgtcgcgtgtgatctgggaagcaatgagagagtacctccctcacattcacttctccttgaaccctgctaggaggggagctatgtttgtcagatttagtactcctgaggatcgggatgctgcggtggatttccctgggaccatgatggcagaagggcacatccttgtcctggagaagcctgaggacaatgaaacctgctttcaccaaccgcttgacaagttaactgagttggaagttctggattggccccctgaacaccgcattccaggccgtatcagaaacctgttcattggggttgcttttgtgattgaaatcgatgatgaatgtgtatatggggacgacatgtcgttcctctgtctggttgtccaacaatacccgggccagccggtccttccagctatgtttgtgtggcttcgaaatggtgatattgctgtggcaaaaatcaagatcatcaggacatgggacgcgagtcagaacttcgatgacaatggcacatacacacaccacttcccagtccttgttgtccctaacccaggacgccatttctctcaagccccactaccgccgcctccaatcaatcctgctcctcctcctcagtttgaagataacctgcatgtttggagttcagttcatatcacagagttggtggatgatccagtgatcgggcacttgaaagacttatcactgccgactctgactgaacatctccctcatgaagacactgaaccagatcagacctactcagtcaggaaaaccaaaggcgacaagaagcgagccaatgaggagattgtcaagcgcaggcaaagcagtcgcctggcagcttag

SEQ ID NO: 56242 - DNA, 114 bp, Oryza sativa
  Clone ID: PAT_MRT4530_58172C.1
gatctgctataaaagagtatccatcatacagagggagaaccatcaaaaaggggcacttatgcaatgaaaagggtctcatgctctaccatacagagtgacagcgaggtacatata

SEQ ID NO: 56243 - DNA, 5589 bp, Oryza sativa
  Clone ID: PAT_MRT4530_58173C.1
atggagcaatcaacaattgatcgaagttggatgtatgcgaaaaaattgaaacgtcattctacggagtacagaaagggcgtaataaattttatgaacgccgcggaggaggataggaaaagaagaaacagtgattacatgtgttgtccatgtgcagattgcaagaatgagaagatgtttgatagcggagaggatgtacacggcggtgaaatggtttatgtggatcacgatctgctgcaagacatgttacgtgacgttgaggacccagcccagaatgagagagattccatgaagttcagcaggttggtcagtgattccgagatgcctctgtacgctggatgcaaagcaaaacacactaagttgtcagttaccttggacctaatgaagttgaaggcaagtagtggatggacagacaagagtttcacaaatcttttaggaattttgaaagctatgcttcctgctgagaacacattgcctgagacgacatacgaagcaaagcaggttctgtgtccactggggttagaggcttctcgatacaagcgaaagaaaagtgctgacgaaggaaataagtcaaagaggggtggtccggcaaaggttgtgtggtatctacctatcattgatcgtttcaagagaatctttgccaacccgaacgaagcgaagttagtacgttggcatgccacggagagaaggaatgacggtccaaggcaacctggcaatgatatcaatgtattcctggagcctgttatcgacgatctggagattctttggaaagaaggaaagaaggcatgctccgattgcaaggaacatacacgaaaccggtggctgaagaaatcacgaaagatggtatacatgggacaccggaggtggctcccgctacgtcacgcatttagaagaaagaagaaaatttttaatggtaagagagaacttcagcctgctcccaaagatttgtccggagatgaggttcacaatatggtcaaggacataagcaatgagtttgggaagaaaaaaaaacgtagcaagacaaaggagaaggaaaagaatgcgtgtgagagtttggttggcctgatgatgaatattcccgggaagacaaaggacgggttgaacacgcgccttgatctacaggacatgaatattcgcagtgaactccagcccatacgagatgcagagacaggtaaagtgtacctccctctagcctgccacacactgtcgaaggatgagaagatcgcaatgttatcatgcttgaaggatattaaagttccattgggctattcagcgaggataagtaagtatgttaaattggacgatctaaaacttgttggaatgaagtctcacgattgccacgtgctaatcacacaaatcttgccagttgctatcagaggcattctaccaccgaaagtgcgtcacacgatccaacgtctgtgcgccttcttcaatgcaattggacagaaggttatagatccagaagatctagatggactgcagaccgatattgtgaataccctctgtcacctagagatgtttttcccactgtctttctttgatataatggttcatctccctattcatctggtgaagcaaacaaaactatgtggcccggcttttctaagggaaatgtggctatttgaaaggtacatgggatttctgaagtcgtacgttcgtaacagagctaaacccgaggggagcatcattgaaggttacacgaccgaggaggctattgagttctgtgtcaattacatgtccgatgccgatcctatcggagttccagcgtctcgtcacgagggaaggttgttagaagttggcccatactttgaggagcacttagcgaaaatccgagatgagaagttggggcgatctgatgtatggattaacagagaacataattctcggttcaacgaatggttcaagaatcgtgtgacaatgtccacggatgtcccaaatgagacagtacagttgttggggatgggaccgtcttggaccgtagatacatggcaaggatacgatataaatagatacacattttacaccgtcaaacaagatgacaaaagcatagtgcaaaacagcggcgtccgtatagatgcattccaggatcaagttgggtcaaacacatactacgaccgcattgaggagatttgggagctaaactacgtcaagttcaaggttactttgttccgctgccgttgggtgaatctacgcactggtgtgaaagccgacaaggaaggtttcactttagtagatctatctaaggtgggatacgccgatgaaccatttgtacttgcgaaacaggtcgagcagatattctacataaaagacccttcaaacaagaagatgcacatcatgagggatggaaagcgccgaattgtaggagttgacaacatcgtcgatgaagaaaaatacaaccataatcttcatgtaagacctcacattgaccttgacgatgatccccaagagcctgtggcatatgcttgttcagaccatacggaagtttcccgcctccttagaaccctagcgccgccgccaactcctacttcgccgctgtcgtcctccctcgccgccaccgccaccgagaccgccaccgccgccaccgagcccgccgccgccgccaccgagcccgccgcctccaccgactggcgacgccctccaccgagcccggcgccgccgccaccgccgttgtcctccctcgccaagcctgctgctgtcgccaccgacgctgagcccgcggccgccgccaccgagcctcctcggccctccattcggaccaccgccgccacctcaccgacgacccccaccgagcctgccgccgccgccaccaccgagcctctacaccaaccggaccggtgtcggccttcctcgtcgtcgccgcccgcgtcctcatctacgcacgtcgccgatccccacctagcccgacgccgcccgcccggcgccgacctacccgaccggcatctccaccgaccggcgccgccctccaccgagcccgacgccgacccccagatgatgtctcagcacggcgaaccaatgtcgacgacaactagtgggtcctcaagggcacgtactcctaggacagggaacaaaattcctaaggaacggttccgcataacagcggtggacgccgtagggttgccgacatctccaaggaaaatattgagccgatttaggtctatctgcggggtcatagggaggcagaaattcagtattctgcaagacgacttcaagctcgtgccggccgcagagaaggacattgcttggctaacgttcaaggagagctttgattatcctgcggagcatgaggaccgtctcaggcgggctgctttcaaggttatgggcactgcttggaagaacttcaagactaagctagtcggcgagttcgtctacaacccggcaaatccagatccaagagagaaatttccttggatcacggaacaggtctgggaggaattccatgcgaagaagtcgacccccgagtccagagctagaagcgaggcatatcgcttgctccagaccaggaaccagcatctgcaccggcttggtaccgccggatatgccggtaaggaagaggaatggcagcgtgaggatgaagaagcagaggaatcgtgcacaccgctcgtgtttggcgatatcccacaccctcgggctaggaactgggccagggctaggtaccagaaacatgatgatggcacaatcttcatgccaaatgcagaagatcaacgagtatacgaagctataaaggagttggttgccgagcaacaagcctcgcaagaggcctgctctcaaagacgcgaggacgacctcctcacgaaagcgttgggcaacaaggaacaccgtggacggacacggggcgttgggtcttctgttccctggaagtatggatttccagactacgcgtggcagtacaagaagcggacttccaacaaggcggagaaagatgcacgccttgaagccaagatccgggagtcgatacgagctgagctgacatctgaattcgacgaaaagctcgagtcgatgagggccaagattaggcaagagatccgagaagagcaacagatcccccaggccgccgctgctgctgtgcacaaagagttaggaagtcccaccgaaaaacgcagcagttgcgcatcaactgagttggcagaaaatccaacatcggtcgacagcgccgtcgaccacataacggaaccaacgagctgcaccctcacagttagggtgatgccgaccttcactgttctagcagccgagggacttgcgtacaagccgaccccagagacaagagtgcatggagcgcaactcagggccgactgtgcaaaagttcaagtcgactcggtgaagcccgaatacgagctgttccctctgaagtatccaccgaacgacgaggtcctctcactaggaaatgcccgtggtaccttcatccaatggcccaaggacctcattgagatcagggttacagcgaggccaaccactgcaccaggcggtcgtccaccaaagagacccgcctctgctccttcagcccctcctgctcaagatcgtcatgcacaatcttacgatgtgcagttgcagtacgacacggattttggggaggaccgaacggaggccgacagcaaggcgattcatgaacccccaccgatgaagaagagcaggaaggcacactcttcccctcagagaattactctcgataaacccgaagcaaaggggagaggaaggggaggaaaggtgcatgcctcgcttctagctccaagaaagctagatctgggcaagggccaggaagagactaagggcaaagaggtcaagaagaaatacgtcgctccacaggagttccaactaggcatgccattggttggagatgacgtgcttgccgcaatgggcaccgcttgcaaggaccttcacttatactacatggagaaatctaacgccaggaagccaagtaaagctaccgatatccttggacagcacgatggaaagccattccttggtccaacaaattatatcgtggtcgacttcaaggatcttttcgacctctacaggctccgagcggtggacacaagcctccttaagtgctactccttgttaagttggcaatggtgtaagaagcatgcaccggaagttgccttccttgatctacaagtggtcactgtcacaaatctccagaatgaccgtcaaggaatggtcaactacatctacgacaccttgtggtcccgccgagacaaggagtacattatgtgtgcctataatcaatatgcccattggatccttctggtcataacacctaaatggagtacatgtcattacctgaactccagaattgataagaacgcatatgattggacctcaattcaactagcgatagatgaagcgtgggcccaatacgtgcaaagaggaggcctcaggaagacaggacatgacaccctcatccacaaaaaagacttcccggtgaagcaacaaataggtgaccagtgcggattccatgtgtgccacaacatacgacttctgtatagagaaaaggtgaagactttggctgagtttgagggcacaataaccaagtctctgactaccagctttgaggaggcaatgatgaacacttattatgcaactgtgatgatgtaa

SEQ ID NO: 56244 - DNA, 246 bp, Oryza sativa
  Clone ID: PAT_MRT4530_58174C.1
cccacgcgttcgacgaattccattggtcgcgattcctctgccctcgcctactggtgctccccgtcctaggggatcgccggagaggaatcgcgcggaggaaaaaaaaagaaaagggcttactcaccgcctaagctcaaaggaagccatggagcacagggagagcggatgccatcagccatagagcccgatcctttgcgtcaataactgcggattctttggcagtgccgctaccatgaacatgggctc

SEQ ID NO: 56245 - DNA, 257 bp, Oryza sativa
  Clone ID: PAT_MRT4530_58175C.1
atcattcaaaaaatttccattcacattcatggagtcaatcataattagacaaccttcacctttcccatcacccccatgaactatccgaagacaccaccattccaccaaactcccctatgacttttacgacaaatcatcttttcaacccactcactaataattaatcacagagagattagcaaacatctaatcctaacaatcagtcgtcctagctgccccactcgtccgtctacttattagccttgcaatacacctcc

SEQ ID NO: 56246 - DNA, 389 bp, Oryza sativa
  unsure (1)..(389): unsure at all n locations
  Clone ID: PAT_MRT4530_58176C.1
gtcaactttgtatcctgttaaggtggttgtcgctgacaggggggactattttaanattcaaatctggcaaaaatgcccatattgaaaaactatgccccctggtgcggacactgcaagaagctggcgcccatcctggacgaggcagccaccactctccagagcgacgaggaagtcgtgattgccaagatggacgcgactgccaatgacgttcccagtgagtttgacgtccaaggctacccgaccttgtacttcgtgaccccgagcgggaaggtgacatcctacgacagcggcaggacggcggacgacattcgcgacttcataaagaagagcaaggggaccgtcgtcttcgtcgcaccaccacccaggtgccaccggcattcgagaaggca

SEQ ID NO: 56247 - DNA, 315 bp, Oryza sativa
  Clone ID: PAT_MRT4530_58177C.1
cccacgcatctgtgcacgcatgcgcccgaatccaacactaaccctaaatctgagcgttgggcggcgtgagcttcggcctgatggacgacgccgccgaggtgatggaccggctcatcatggcacggccgactacctatgggggtctgtctggccaggacggtgagccttactacgagcgtcttctacagggcgctgcagagactcgcgaccatctgctgtacggggttttccccggggtcgaatacgggtacgactccgaccactggcggcggcgcaaacgtcgtaagccccggatacaccaagggcgaccggctc

SEQ ID NO: 56248 - DNA, 282 bp, Oryza sativa
  Clone ID: PAT_MRT4530_58178C.1
atggatgggcagcagctacgtagctcggaatctccggcgagcggcggcggcggagtcaccggcggcggcgcgccacatctgttccacgcgctcgggccggcgctgctgatctcgattgggtacattgacctcgggaaatgggtggccgcggtggaggcagggtcacggttcggccttgacctcgtgctgctggccctcctcttcaacttcatggccatcctgtgccagtatctcgcggcttgcattggcacggtcaccgggaggagcctcgccgagtggtga

SEQ ID NO: 56249 - DNA, 231 bp, Oryza sativa
  Clone ID: PAT_MRT4530_58179C.1
gataagctgtcaaacatgagaattggtcgacggcccgggcggccgcaaggggttcgcgttggccgattcattaatgcagctggcacgacaggtttcccgactggaaagcgggcagtacccaagcacaagacgaagacagagctactcaccacgtttcaggaggtggccatcgtcgatgaggtcaccatcatcgaggacaaggcctcttgtggtgcggatccatatatttag

SEQ ID NO: 56250 - DNA, 606 bp, Oryza sativa
  Clone ID: PAT_MRT4530_5817C.1
acgtcttgttgtttacgcgggcaagtaattctaattcaataaaaactgcgcgcgcgaatatttactctttcctgtcttatttggtaatccataaccttatcaaataagacaatttttttggatgggtggggcctcccacccaacgaagtattgctattcttttcaagataaccctatccagacataggttctggccactcccactgactcctcctttactgggtaggattgaatcttcaaaagtagcttccaaaaaatttctttccgactcacttcctgagttctattaactcgacacgctctttgatattccttgaaaactagatttccttgcccaatcaaactacgattgcgaattctctggttttttaattatatggctgctgtatcacattgctttatatgacctacttcatagaccatacatattggaatcctatatccttcttataactctttcttctttctatcaaccttgcttatatactacattctctttagctgtgcttcacaacttaaaatcctacatttttctaaagaagaaattgaacttgctacacctctatgatacattcactcatttatcatacatgtctttattcatat

SEQ ID NO: 56251 - DNA, 466 bp, Oryza sativa
  unsure (1)..(466): unsure at all n locations
  Clone ID: PAT_MRT4530_58180C.1
gagctttgcagtcatcttgcatgctctgatatacgctagtctttctccaaagcaaaactctgcccgaaatttcggtgcaaaacctcgtttttcagggtgaaactccgcccaaatttccggtggcaaaatcctgctgttcagggcgacactctgctgaaattttcggccggtgaacagcgctttttcagggcgacgccctgctgaaattttcaccaaggattgtcgtcttggtgaacagaaactctgcccgatattcgattggatttccttggtttttctgggggagattctgccgaaattttctgcacgtacgtgtacgtgtatgctcgtgctgttccaaccttggtgtttatgataacatccactgttcttgttcagtccttctccgtcgtcttcctctactggttctacgtcttctcataatcaacccaaatcactctacangaatntccaactggttaattac

SEQ ID NO: 56252 - DNA, 505 bp, Oryza sativa
  Clone ID: PAT_MRT4530_58181C.1
aaacccaaatatttcttgggtggatatacctggaactataccttggtttacggggcacgggtggccgctcacacacatacatattgggggggcggagcatattattaggacataccggttatgaaaatatagctagcccctttataataactaaaaatttttcagcaaatttcactcacatcggtcccccaagaagccaaagggaatgcaaaagccctggtgcatatgcctaaaaagggggttttgtttattaacccaccaccctttgttattacactcgcgcattggggcctgcctggttgtttctttgtttggttggatgtctggttgggtgtctcagcccttccagagggtcgcgtccatgttgcatgccccccccgagatgtcggcggggttgttctgggcggtaacatcctgggggggcccccccagggacgacggtttgtttaccaagaagcctccgggggccctgtccattttctgctgttgttggtgttgttgcttg

SEQ ID NO: 56253 - DNA, 750 bp, Oryza sativa
  Clone ID: PAT_MRT4530_58182C.1
actcctaagggcgattgggtttcctcaagccggccgggattccacctcctctccacgcgcgctgctgctcctgctcccctgcacgcacgctcgccgccgccggcgccatggccgccttcaccaccaccgccgccggatccgccgtcgccttcgcgcggccagccaaggcaatcaatgtcagttcagtctctttcgctggtttaaggaagaacaatgtggctttcactctgcagccagtgacacaaagatttgcagttctccgtgctgccaaaaaggaaacagtggagaaggtttgtgatattgtaaagaagcagcttgtacttcctgaaggcactgacgttactggtgcctctaagttcaccgatcttggtgctgattccctggatacggttgagattgttatgggtcttgaagaggctttcaagatcagtgtcgatgaatcaagcgcgcagtcaattgcgacagtggaggatgctgctgagctcatcgacaagattgtttctaatgcaaagtaaactcaatttcgttggaataatgtgtcaactgtcaaagagattaaactgctgttgttgttcgatgtccatttttctgtgctagattttactgtggagaggtgccttaatagcacatgattatcattggctgttttgcgatgctatgacattttaagctattgaagttgttgaaaaagaaatttcattgccgaggaaaaaaaaaaaaaaaaaaaaaaaaaaaaaaaaagcggtcgcc

SEQ ID NO: 56254 - DNA, 237 bp, Oryza sativa
  Clone ID: PAT_MRT4530_58183C.1
atggcggaaacaaacggtgatgcggctgcggcggcgtggatcggggctggagtggcggcgtggagcggcgacgttggagtccgggggcttggtggaagggcgagacggtgcggcgcggcacggtgcgacggtcgacgggggctagcggtggcagtgacggcggttagggttgggaatcgcgggggtgaggaaggtctcggcagcgaccaggcgaggaaggcgtcggcggcgacgtga

SEQ ID NO: 56255 - DNA, 390 bp, Oryza sativa
  Clone ID: PAT_MRT4530_58184C.1
atgggcaagatgccacagggcggcctcttgcgccatggctgtgacaacctcaggccaggaccgggaacggtgccgaaacgagatcctgcccgagaagaggtcaaggattgcctggactcccaaggagccatggagatcgcggattcaatggttgttggccaacgcatcagcgaccatagagctcggcggcgcgcgggctggtcggcggcgcgcgggctggcggcggagcgtgggctggcggcggcgcacggggtcggcagtggcgcgcgggctggtcggcgacgcacgttctcagcggcggagcgggggctggcggcggcatctggagctaaaaatttgccaaacacttttgatgggtctgcaactccaataggagctagctccaactag

SEQ ID NO: 56256 - DNA, 580 bp, Oryza sativa
  Clone ID: PAT_MRT4530_58185C.1
gaaatctaaaccttccatcaattccccttccgctgctcgcgccaccaacacactgtgctaagaacagtggacacaatgttggccacagcagatgcaattgacaaggctgttgtgcaatctcctcctggtgttcagatatcagtggaacccactgttctaaaattcagcacaaggcaagaacacgcagagcttcaagatcacattcaccatgacccacaagcttcaggggggctacctgtttgggagcctagcatggtatgatggtggtgctcactatgtcaagattcccattgcggttcgaccacgtggtatctgataattatgcagatctctgatgaagaatacaactacaggatgtttatactttggaaggttctatggagcaggcctcatcctattttagtccctccaagttgagtttgtcagccttccccaaactgttgtaccgttttatatgttttctgctttattgtttgtaatttgtgattccactacactatgtgatacctcctatcgtatggacattggtgtaaaataataatggaataaatgagggcacccaaaaaaaaaaaaaaaaaaa

SEQ ID NO: 56257 - DNA, 320 bp, Oryza sativa
  unsure (1)..(320): unsure at all n locations
  Clone ID: PAT_MRT4530_58186C.1
aantaatttggggttttagggagaatcccgggcttcccaacccaaaaaaaactttttttttttaaataggaacaaaaaggccataggctgaaggctaaaaaccacccattaaataacggggaaagacaattctgggttggggggttttaaaaggggccttaagtgggggaaaaacgacagtttacagctgggcgcaaacatgagttcgcgaattggtcacctaacccccggcaaaaaagctcaaaaaagggttggctggggcaaaaaaatttaaatcccgggaaaaaaggccggtaacggaaaaattcgggccaaccccc

SEQ ID NO: 56258 - DNA, 545 bp, Oryza sativa
  Clone ID: PAT_MRT4530_58187C.1
cagcgaacaataggatgacataggttcagttcgttggtaagcccctcgcgccagatattgaggatgacccaagcatattgattagctacacgcctccaccactcaaccctttacccccaagatctacacatgattatattcctcccccccccccccacccctctcccccccctcccccacccccccccccccctctcctcccccccccccccctacccctccccccccccccccccctccccccccccccccccccccctccccccccctcccacccgcccctcctgcctccccccccgcccgcgccccgccccccccccacccccccccccccctccccccctcccccccccccccccccccccctcccccccccccccccctcccccccctcccccccccccccctccccccccccccccctcccccccccccccccccccctcccccccccccccccgcccccccccccccccccccccccccccccccgcccccccccccccccccccacccccccccccccccccccccccccccccccc

SEQ ID NO: 56259 - DNA, 502 bp, Oryza sativa
  Clone ID: PAT_MRT4530_58188C.1
cccacgcgtccgctctgctgctgcgtctgcatgcgcgatgccaggcgatgcgtgtgaggtgagaccgtgagagagaaaagaaacagcgagagagagatgaagccgtgattaaaagaagagaggagaggagaggagaggaggagaggaccagttcgctcgcgctgcccgcaactctctcctaccaccaccgcccccggggtgcctcctcacacacttggcgcgcgcctcgattcattcctcctcttccttccccccttctttttcttcccccaccttgcttgcaattgccgcggaccaatggcagttcaggcgcattaccaccaccaccatcaccaccagcagcagcatcagcctcctcctctcttcctcgccagaggcgtcgtcgtctcgccggagaccaccaggccggcgggcatggagtatcactaccagcagcatcagcagcctcccctcttcttggacttctcgcatggagatggagatgggggcaactcgaggaagc

SEQ ID NO: 56260 - DNA, 420 bp, Oryza sativa
  Clone ID: PAT_MRT4530_58189C.1
cgatcgagaatacatggagtctgccgtggcgagcgcattgctgaagagcgtcatggggaggctcttcacggtgctagagaaggagtacagcaagcacagggagctggctcaagaaaccaactccctccagcaggacctccgcatcgttgcggcggccatggacgaccagctcctttccatcaggaggagcgacgcccgcacggccgtcgcgcggctgcacagcaaggagatgctcgatcttgcgcatgacatcgaggactacgtcgaccgcttcatccaccatctcacttgcaggcagcagtgtgctagtgccggccggaactcccttctggaccgggtcgcccacgagctcaagagggttcagagccgctcgagcttctccttttagatccaaaagctcaagaggcccttcaggcaagt

SEQ ID NO: 56261 - DNA, 582 bp, Oryza sativa
  Clone ID: PAT_MRT4530_5818C.1
atggagccgagatccccgcggccgattccttcctctccggccgttctctctctctcccggcgctatataatcgctcctcgtgcttcgctcctccgtttccgtcgctcgccgctcactctccccgtcggaattgtgcccgcaccgtcgcaccttctctccgccgtcgccgccgagctccggttcgccgccgtcgtcgctccggacctcctcccgactcggcgtcacctccatcggcttcgccgcgtccccgtcgacctcgtccgcgcctccgtttcgcccgtcgaccgccggagcaccgtcgtcctcgcagtcccgagccgcgccgccgtcttcctccgctccggtcgtcacttccgccgccctcgtcgacccggggtgagccgtggaccgctccgttcgcttcccccttccctcctctctctcgggtgccgctccgccgcgccgttggtcgccggcggcgaccatcggggcgcgagtgcgccgcctcccgtcggccgtgccggcgaggccaccttcgggcgcgccccgcggctgccaggtggggcccggccgtcagccgcccgcgcccgcgggtgcggctga

SEQ ID NO: 56262 - DNA, 712 bp, Oryza sativa
  Clone ID: PAT_MRT4530_58190C.1
gcacgagcttgagggcctgcaggtttgtttggagaagacatgtctgtcactctgtcagtgaggcctcaacctgatgatgcatcgtgattaacggttctccgcgcctggcagacagcacgatacagctgctgcttctgcttgggatccttcggggagctgttgtcatgtggagtgaatctcgtctctccatttattgtcacacttcttctcctcttttctctcttcttcttttttccgtccatcatgataatcatctgaacagtccttaatttttgtgatcatctcgtcgtttatactggtggtctcactggatctctcttgtctagtagcatgagtatgacgtgatgagtggtggcccagtcacttgcagccagtgatccccctgctaattatacatggattgtggatggtgctgctgctactgtcgagtgtcccactactgcttcactcatcatccacttgagccaggcaggcagattccttaattcaccccaactcagtctcattggtgtgtgcccgaatcactgctggtacagatccctatatagtgacttgaaatatgctactaagcactttggccagggcaaaagcacacaaggcaatgacatcagctctcagcacatttgagctgctctcagaagtttttgtttttttttaagagaaggataggtggcttgccgtgtgtatacaaagatttgttaatcttttggat

SEQ ID NO: 56263 - DNA, 266 bp, Oryza sativa
  Clone ID: PAT_MRT4530_58191C.1
aattcccgaggaaagcaacagggggtttaaacaccttacccaaagggaatttaatttttggtaacatcccgggcgaagaacccttaacattggatggatggatagggggttttttgatttgggggggccattggacacaaaaacgatttgattgggggaaaaaaagatttttgacccggatgggtaaggataactggccacgaggggccccacaaataagtttctccagttcccgccggagttcccccctgaagccccccccacgg

SEQ ID NO: 56264 - DNA, 3296 bp, Oryza sativa
  Clone ID: PAT_MRT4530_58192C.1
atggttgatgggccaagcccacgaacagggggaagaggtgaggtggctgtgcggctgaggtggcgtccacgtgtatgccaagctggcgtggacgggagaaagggagagagggagctcgcccgagatcggacggctcacggcggccgagaggcgccagcgaacggcggcgagccggagagggtggctagcaccgaagggaagaggaggggacagggaacccattccgcggctcggatcggagggggagggtgcgacggcggccggcggcggcggcgaagctcgctggatgtccgatgcggtcgagcgcgaggagggaggagggagcgccggatggggcttagccaaaccgcggagaagaggcggtttgggagggggaaccgacatagagcggtcaaggagcgggagatggcggtcgcgctagctcggctggcggtcacgggcgacgcaagaacggcggacgacgaggatgcaaggagcggcgaagacggtggatcgggtggccgaaatcgaaccgcgggagcgggaggagcagcgcggggcgagctggcgctcagtcaaggtggtggcaggcgccgccgacaggtgggacccacctgtcgggtgcgcgtgagggagaactacctcggccgcccgtccttcttcgccgccgatcaccggagctcgccgccgacgtccaacccgagccgccgcctttgccctctcgtcgccggtcgtcgtcgttcatcggtagatgttgtgtctttttcttcgttttgcgtgttagcttgtcgtttccgtcgttgcgaagtgtgccagactgtgaagtggcgagaagtccatgggggtcgctggggagtccatgcctctggttgtagagggggtgattatgatccaggaatggtgcactgtgttttcttcttggtgaggactaagtgcctcttaatcatcacagtcacaaacgtcatgcgcggatcgggcagtgagcgatgggagcccacgagcgaccgtaaaattagccatccgcaaccgcaagagataatgagatgtgttgatgatcaggtgaggatgcggcaagttcagagaagtaaaaacaagcaaataaacatgagtgaactggttaactccatgacgcaagaacttgattattattggtcactgggcactgatattgatcgtggaacagaatcatgcttaatttacaaggttcagcaacatattcgtgacattgacagattttcatacgagccctgtattgtatcagttggtccataccatcatggatctgcagatctgcaaagtatggagaaagtaaaatggggctatgtggatgtaatcgttaaactgaactacatttggtttagcaatggttccatggacattccgtgtattgttgttgatgagtacacagggagtcttttcaggaaccttattgcgtttgaacaaacctgccctcaatttggagatgacttcactgcttatattgttttcttgtctcaacttataagcatgccagaggacgttacgctgcttattcagagaaaaatcattgtgcaccagcttgatagcgatgaaagggtgtctgatctcttcaccacgctcagcaaagacgtggtttttgatttcaatgctgcgagtgcgactgtcattgtcctcatctgcacaattgtgcaaaccgtttttggcatactggcttatgttaatccgccgaagtaccaaatcatggtcgttggatcgagccagatccaacgactaacagagttagcgccgctttgccgccgccgcagctgtcgcctccttcaccggcgacgcctactccgccgtcgccacctcctcctcctccttcgttgcggcgttgcctccaccatccccgacggctcctcctatgcgccacctactctgttatttttcctcccgattgtacccctccggaattgtactgttcgatttgttttggtacctacaggtaccagtaccaggaggagtagtactctctctgtccaaaaaacgacttcatttttccttatcacatttatcttacattctctgtatttttccttcaagaaacgcaatactcatgcaggcgttcacaacgcaagctcacttacacctataaatacacacgcacaccttcaaaagagtcttttttaccttacatatgccactgttggcaaaaatgccaacatacagcatgggtatgatcatgcattcatgcgctttaaagttcaagtcttcaagaagcctctacgcatgagagaatatcagacgaagaacttgctgatcgccgtgcacgcctctgctcagcgcgacccacgagtccacgagaagatatacgatccaccaccaccatcccgaccgtcacctccacctcacccccgcgccatcaccagcagccgccgccactccacccccccatccccgcaccgctcgcactcccactcccgcgcccgccgcctcatcccccacattccccgccccgatgaccaccccgtccgcgccgccgccgtgcccgcacctcgccgcgtaccgccacaccacgcgctccactccgcttcactccagccagctgcactccgcgtcacagcccgctcggcacgccccgagatccgccgcgagcactcgcgagctcccccgctgctccccctgctcctcccccacctcctcctcgtcccgcactctacgcctgcctctcctgcgccgccgtcttctgccccacccacgccgcctcccacgcctccgcctccacatccggcggccaccagatcgccgtcgacgtcgaccgcgccgagctcttctgcggggcgtgcggggatcaggtctacgatccggacttcgaccacgccgtcgtcctcgcccagtcctcctccctccctcccccatcggcatccccctccccctccccttcccccgccgcgccccgcaagcgccgccgcgtcgagtaccgcgcctgggcaccagatccggccgaattcgcgctcatcagctccgccgatcccaccacctccgcatccgccgccgcgcccgcggggctccgcgggctcaacaacctaggcaacacgtgcttcatgaactccgtgctccaggctctgctacacgcgccgccgctccggaactacttcctcggcgatcggcacaaccgctacctctgcccgcgccagacgcccatgaggcgccgttccgccgaggcaaacgacaaggcggcgtgcctggcgtgcgatctcgacgagatctactccgccgccttctccggggagcgcacgccctacagccccgccaaattcctctataggtctggatctagcgctctgtttgcattgggt

SEQ ID NO: 56265 - DNA, 810 bp, Oryza sativa
  Clone ID: PAT_MRT4530_58193C.1
atggctactgcagtgagtccgcgagagtttccatctactgcatgcaaggctgttccagctgttgctggctttgatttgaatgtccgcctagaagaagatgaggacggcaatgttcccttccatctcaacgagccaatattggaggatcacaacgttaatggatttgatttgaacatgccactagatgaatttggtgtagttgatttagatttttttacaaaaccacgctgtcacaagaagggtagatctggtcgtaaggcaatccctcttgatttggaacaattgcgcaacattcctctcaagcaaagaatgaccatagaagatgtgtctagtaaactaggtatttccaaatctaggatacaaaggtatttgaaaaaaggtttgcttagacggcactctagtagcatcaaaccatacctcacagatgctaacaagaagactaggttgaagtggtgtgttgacatgattgatcaaagtttggttggtgatccaagatttaaggatttttttgactatgtgttcattgatgaaaaatggttctacctctctcaaaaatctgagaagtattacttgctacccgaggaagatgaaccacatcgcgcttccaaatggccaagagaagatgtgaacaaaccaatttttatacaacaagataatgcaccttcccatttgatattggatgatcctgttttttgtgaggctgctagggaagaagggtttgacattcgcctagtttgtcaaccacccaattctccagattttaacattctagacttggggttttttcgagctattcaagcaattcaataa

SEQ ID NO: 56266 - DNA, 198 bp, Oryza sativa
  Clone ID: PAT_MRT4530_58194C.1
atggtggtactccacctcgcgggcggcggcggcggccggcgaaagggcgagcagcagcggcaggaggacagaggtggagcaaatccaacaaattctgaagctttgtggtactacctcaaagttgagcagaaccagtttgttgtctgcaacagtgaagctatcgatattgggttccagggaaagatgccatccaattga

SEQ ID NO: 56267 - DNA, 1011 bp, Oryza sativa
  Clone ID: PAT_MRT4530_58195C.1
atggctgttccagctgttgctggctttgatttgaatgtccgcctagaagaagatgaggacggcaatgttcccttccatctcaacgagccaatattggaggatcacaacgttaatggatttgatttgaacatgccactagatgaatttggtgtagttgatttagattttttacaaaaccacgctgaacatgctgtacagaaccaagctcctgttgaaggacagcatcgaaggaaggacatgacagaagaagtcacaaaacaagtgtaccaagcattgttgaatgacaacaagaatgggaaactaggcaagaaagatacaagaagggttgctgatcaatttggagtgcgcattcgatcagttcagcgcttatggaagcgaggtaaaatccaacttactcataacattccggttgtggttgctagtcacaagaagggtagatctggtcataaggcaatccctcttgatttggaacaattgcgcaacattcctctcaagcaaagaatgaccatagaagatgtgtctagtaaacttggtatttccaaatctagagtacaaaggtatttgaaaaaaggtttgcttagacggcactctagtagcatcaaaccatacctcacagatgctaacaagaagactaggttgaagtggtgtgttgacatgattgatcgaagtttggttggtgatccaagatttaaggatttttttgactatgtgttcattgatgaaaaatggttctacctctctcaaaaatctgagaagtattacttgctacccgaggaagatgaaccacatcgcacttgtaagaacaagaattacatccctaggttcatgttcttgtgtgtttgtgctcggccaaggtttaggaatggagaatgtgtttttgatggtaaaattggttgttttccacttgtcacttatgaacatgctgtgagaagtagtcagaatcgtcttcgtggagaactagtaatcaagccaataacttcaataacaagagatgtgattagagatttcatg

SEQ ID NO: 56268 - DNA, 901 bp, Oryza sativa
  Clone ID: PAT_MRT4530_58196C.1
ttgatcggcggggaagcgggtgaaggcccagatctgggaacggaggaggaggattatgtgttcaaggtggtggtgatcggggactcggcggtggggaagacgcagctgctggggcggttcacaaaggacgagttcttcatcgactccaagtcgaccatcggcatcgagttccagacgcggacggtggagatcggcgggaagcgggtgaaggcccagatctgggacaccgcggggcaggagaggtaccgcgccgtcaccagcgcctactaccgcggcgccctcggcgccatgctcgtctacgacgtcaccagccgccggagcttccaccacgccgcccgctggctccacgacctccgcgcccacgccgacaactccatcgtcgtcatgctcatcggcaacaaggccgacctctcccacgcccgcgccgtcgccgccgacgaggccgccgccttcgccgaggaccagggcctcttcttctccgaggcgtcggcgctcagcggggacaacgtcgaggaggccttcctcggcctcctccgggagatccatgccatcgtctcgcggaggtcgctgctggagatggacggcatcaacggcgacgccgccgccaacgccaacgccgcgctcatgctcaggggcaccaagctctcgctctccgacgagctctccatcatggagaccagcgccatcaagagagtgagcaggtgctcatgctcttaattacttactttagacgtcatcggctcatcgccatcgagagagtactcatgctcttgacatcatcatcatcatcgcaagttcataatatacatggatgacagatcttactgcagaagctgagacatcttggtttccaagacacataattgaagggaacagtatatattaattcagctcttgggtg

SEQ ID NO: 56269 - DNA, 408 bp, Oryza sativa
  Clone ID: PAT_MRT4530_58197C.1
gtaaatgctttttagtgggtaccaactaggaagatagtagggatgaaaacagagcggatagtttccatccgctccggacaaaaacggatacggatacctttcggatcggaaatttctcggatagttcggatacggatacgaatacggatattttctcccgggtatggtatcggggtttccgtcggatatagataataattcggatattcggaaaaaatatttccatattcgtgtccgatcatattcgattcttattcctattcgattttcagtattcgttttcgtatccggtaaaaaaatataaaaacaaatatggtatgagcactatccatccttatccgctcctcatttagtaacttgctactattattagagatactgttgccatattctaccacgatcaagcct

SEQ ID NO: 56270 - DNA, 444 bp, Oryza sativa
  unsure (1)..(444): unsure at all n locations
  Clone ID: PAT_MRT4530_58198C.1
tttatacagtggtgttcttctttttatgtagttcaaaccgtaaaagataatcaggctattttttaacagtagcttgtagacatacccagcagactccacgaattttggctaaattttttgagtctttgcatcatggtctaaaaattcataaaacactgcatagtcccaacctaaaaacagtaggtaacctggttgtcgaatttgtgtagcccaatctagatggataaaatcttagttcctttagggtagctcaaaaggttacccatcaatctctctgattttctttttaaaaatttaacttttcgtgagctgcacattttgttgcttcattttccatcctttcatttaaaccatatgctnttcgttggatttctttatttttgaaagttttatttgactaatgcttttgacatgctattttggactttaatcaattattttgaa

SEQ ID NO: 56271 - DNA, 3093 bp, Oryza sativa
  Clone ID: PAT_MRT4530_58199C.1
atgacaagtgctagacacttgttcttcaccttgtccttctccttcttggcgctcttgagctgcattgccgtgtgcaatgccggtgacgaggccgccgcgttgctggccatcaaggcgtctctcgtcgatccattgggggagctgaaaggatggagctctgcgccacattgcacatggaagggcgtgcgctgcgacgcccggggcgcggtcaccggcctcaacctcgccgccatgaacctgagcggcgccatcccggacgacatcctcggcctcgccgggctcacctcgatcgtcctgcagagcaacgcgttcgacggcgagctgccgccggtgctcgtgtccatcccgacgctccgcgagctcgacgtcagcgacaacaacttcaagggcaggttcccggccggcctcggggcgtgcgcctcgctgacgcacctcaacgcgtccgggaacaacttcgccggcccgctcccggccgacatcggcaacgccaccgcgctcgagacgctcgacttcaggggtggcttcttctccggcggcatcccgaagacgtatggcaagctccagaagctcaagttcttgggcctctcgggcaacaacctcaatggcgctctcccggctgagctgttcgagctctcgtcattggagcagctcatcatcgggtacaacgagttcagcggcgcgatcccggccgccattggcaatctcgccaagctccagtacctcgacatggcgatcggcagcttagagggccccattccgccggagctcggccggctgccgtacctcaacaccgtttacctctacaagaacaacattggcggccagataccgaaggagctcggcaacctctcctccctcatcatgctcgacctctccgacaacgcgatcaccggcacgatcccgccggagttggcgcagctcactaacctgcagctgcttaacctgatgtgcaacaagatcaagggcggcatcccggccggcattggcgagctccccaagctcgaggtgcttgagctgtggaacaactcactcaccggcccgttgccgccgtcgctcggcaaagcgcagccgctgcagtggctggacgtgtcgacgaacgccttgtccgggccggtgcccgccgggctctgcgacagcggcaacctgacgaagctgatactgttcaacaatgtcttcacgggcgcgatccccgcggggctcacgacgtgttcgacgcttgtccgcgtcagggcgcacaacaaccggctcaacggcactgtgccgttggggctcgggcggctgccgcggctgcagcgcctggagctcgccggcaatgagctgtccggcgagatccccgacgacctggcgctctcgacgtcgctctccttcatcgacctctcgcacaaccagctgcggtcggcgctgccgtcgaacatcctgtccatccctgcgctgcagacgttcgcggcggcggacaacgagctgaccggtggcgtgccggacgagcttgccgattgcccgtcgttgtcggccctcgacctgtcgaacaaccggctatccggcgcgatcccggccagcctcgcgtcgtgccagaggctcgtttcgctgagcctccggaacaaccggttcacagggcagatccctgctgctgtcgccatgatgccgacattgtccgtcctcgatctctccaacaacttcttctccggcgagatcccgagcaacttcggcagctcgccggcgctcgagatgctgaacctggcgtacaacaacctcaccggccccgtgccggcgacggggctcctgaggacgatcaaccccgacgaccttgccgggaacccgggactctgtggcggcgtcctgcctccgtgcggggcaagctctctccggtcatcgtcgtcggaatcgtatgaccttcgccgctcacacatgaagcacattgccgctggctgggccatcggcatctccgccgtgattgcggcatgcggagccatgtttcttggcaagcagctgtaccaccggtggtacgtccatggcggatgctgcgacgatgccgccgtggaggaagaagggagcggctcgtggccatggcgcctcacggcgttccagcggttgagtttcaccagcgccgaggtgctcgcgtgcatcaaggaggctaacattgtcggcatgggcggcacgggggtggtgtaccgcgccgacatgccacgccaccacgccgtggtcgccgtcaagaagctgtggcgcgccgccgggtgccccgaggaggccaccacggtggacgggcggacggacgtcgaggcgggaggcgagttcgcggccgaggtgaagctcctcgggcggctccggcaccggaacgtcgtgcgcatgctgggctacgtgagcaacaacctggacacgatggtgatctacgagtacatggtcaatggcagcctgtgggatgcgctgcacggccagcggaagggcaagatgctgatggactgggtgtcgcggtacaacgtggcggcgggcgtcgccgccgggctcgcctacctgcaccacgactgccggccgccggtcatccaccgcgacgtcaagtcgagcaacgtcctcctcgacgacaacatggacgccaagatcgccgacttcggcctcgcccgcgtcatggcgcgcgcccacgagaccgtctccgtcgtcgccggctcgtacggctacatcgcgccggagtacgggtacacgctgaaggtggatcagaagagtgacatctacagcttcggtgtcgtcctcatggagctcctcaccggacggcggccgatcgagccggagtacggcgagagccaggacatcgtcgggtggatcagggagcggctgcgcagcaacaccggggtggaggagcttctcgacgccagcgtcggcggccgcgtcgaccacgtacgggaggagatgctgctggtgctgcgggtggcggtgctgtgcacggccaagtcacccaaggaccggcccaccatgcgcgacgtggtgaccatgctcggggaggcgaagccccggcggaagagcagcagcgccacggtggccgccaccgtcgtggacaaggacaagccggtgttcacgacgtcgcccgactccggttacctatag

SEQ ID NO: 56272 - DNA, 240 bp, Oryza sativa
  Clone ID: PAT_MRT4530_5819C.1
ttttgttttttattttttttcagtttttttttttttttttttagaaataacagttttgttggttttaaaacatctgtgtcaatatgcccccggggcaaaagaccaaaccttgcaacagaaagccaagcccagggcccgttttttttctcacccacgggaccattaacagaagggcgggctgtgttggttggccaattgtacatggactaagcaagcacaacaactaacaatttctgtagg

SEQ ID NO: 56273 - DNA, 748 bp, Oryza sativa
  unsure (1)..(748): unsure at all n locations
  Clone ID: PAT_MRT4530_581C.1
ctcctattgccctaaacccgtctctctcctcctctcacctagcgccgccgccgccgccgccgcgaacgcgaacgcgatggccgcagccgcagtgctccggagccatggcgcccgccgcatcctctcctacccccagcagccaccgcctctggctggaaccctgtgggcgaggtccatggccaccttcacccgcacgaagcctcatgtgaatgttggcaccattgggcacgtcgatcatggcaaaaccacactcactgctgcgattaccaaggtgttagctgaggcagggaaggctaaagctgttgcttttgacgagatcgacaaggccccggaggagaaagcaagaggaatcaccattgcaacggctcatgtggagtacgagactgctaaaaggcattatgctcatgtggactgcccagggcatgctgattatgtcaagaatatgatcactggagctgctcaaatggatggtggtattcttgtcgtatcagctcctgatggccccatgccacaaacgaaagagcatattcttctgngcccgacaggttggtgtgccatcacttgtatgtttcttaaacaaagttgatgctgttgatgaccccgagctactagagcttgtagagatggagcttcgtgagctcctcagtttctacaagttccctggtgatgagattccatcatcccggggtccgccttgtcagccttacaggggctaatgatgagattggaagaatgccattttgaacta

SEQ ID NO: 56274 - DNA, 961 bp, Oryza sativa
  Clone ID: PAT_MRT4530_58200C.1
tttggtcgcaatagttctgctaatcacagcgaatttgctaatggcattgatatgcaaggtcgtctgaacctggaaaataggattatagattctgacgagagagcggtgtaccaggaagcactacagaatattatccaggataaaagggaagatgatctgcctgagggtgttctgtcagtacctctgcttaggcaccagaaaatggcattggcttggatggtttcgaaggagaatagctctcattgtgcaggtggaattcttgcagatgatcagggtcttggcaaaacagtgtctacaattgcccttatacagaaacagaggatccagcagtctaagtttatgtctgttgattcagatcgtttaaaagctgaagcgctaaaccttgatgatgacgatgaggcagcgcctgttgcggataataagggggagcagactaagaatgatgaacccaggaaggatctaggagctggttcgtcatcaacagcagctggtactggtgacgttgaaacatgtgctagcctaatgaatactgctccagataagacggttgaaagaaatgttgaacgtaagaagaagagtaaggcaagcacatcatctactatgcaatccatgacaaggcctgctgcaggtactctagtggtgtgcccagctagtgttcttaagcaatgggcgaacgaattgactgacaaggttggtgaaagtgctaaattgtctgttttggtctatcatggtggctcaaggaccaaagatccaaatgagttggcaaaatatgatgttgttatcactacatacacaattgtggccaatgaagtgcctaaacagaatgccgatgatgacactgatcagaagaatggtgaagaatcttctgctggtaataagagaaaacaaccacccaaagcacagagcaagtcgaagaaaaaaaaaaaaaaactcgagactagttctctccctcgtgccgatt

SEQ ID NO: 56275 - DNA, 2091 bp, Oryza sativa
  Clone ID: PAT_MRT4530_58201C.1
atggccgaagggctgcagcgaccggagatttgcgcgaggagcgagagaccggaggaagaagaggagggggcgtccgacccggcctccctcccggcgctccacgccgtcgccgtaaccaccggcctccacggcttcgccgccgtgaccaactccctcgccgcccgctacgccaagaccgggtcgttcccttccgccgtcggggtgttcgccgcggcgcgggcgagggatgtcagctcctacaacaccatcctctccgcgttccctgacccggccgaggcgctcgacttcgcgtcgtggatgctccgctccggcgccgtgcggcccgacgccgtcacgtgcaccgtcgcgctctcgctggccgccggccggggggagggcttcctcgtgcggcagctgcacgcgctggcttggcggtccgggctcgcggctgatgtgttcgtcggcaacgcgctcgtcactgcgtactcacgtggagggtctctcggggaggccaggagtgtgttcgacgatatgccggcgagggacctcgtctcatggaacgcgttgatctgcgggctcgcgcaagacggcgactgcccggccgaggtgattggcgtgttcctccggatgctcagggacggcgacgtccagcctgaccggatatcggtctgcagcgtgatcccggcatgtggcggcgaggggaagctcgagctcggccggcaagtccatggctttgcggtgaagctgggcgtcgagggatacgtctccatcggcaacgtgctcgtcgcgatgtactacaagtgcggcgctcccggcagcgcccggaggctgttcgacgccatgagcgagcgcgacgtcgtgtcatggaccacggccatctccatggacggcgaggacgccctcacgctgttcaatggcatgcggcgagacggcgtgccgccgaacgaggtcaccttcgtggcgctgatgtcggcgctgccagcggactgtccggcgaggggagcgcagatggtccacgcggcgtgcctcaaggccgccgtgtccggcgaagcggcggcgtcgaacagcctcatcaccatgtatgccaaggcgcgtcgcatggacgacgcgaggatggtgttcgacctcatgcctcgccgggagatcatcgcgtggaacgctgtgatctcgggctacgcgcagaacggccggtgcaacgacgccctcgagctcttctcgtccatggccaggtgcctgacacccaacgagaccacgttcgcgagcgtcctcagcgcggtgaccgcggtggagacggtgtccatggcgtacggccagatgtaccactccagggctctcagcatgggcttcggcgacagcgagtacgtcgccggcgccctcatcgacatgtacgcgaagcgtggcaacttggaagagtcccggaaggcgttccacgagacggagcagcggagcctcatcgcctggacggcgatcatctcggcgaacgccaggcacgggagctacggcgccgtcatgagcctcttcggcgacatggcgcgctccggcgtcgcaccggacggcgtcgtgctcctcgccgtcctcacggcctgccggtacggcgggatggtcgacgccggcagggacatcttcgactcgatggctgccgatcgcggcgtcgagctgtggccggagcactactcctgcgtcgtcgacatgttaggccgggcagggaggctggcggaggctgaggagctcatgatgcggatgccggcggggccgagcgtgtcggcgctgcagagcttgctcggagcctgcagaatccatggcgacgcggagatcggcgagaggatcgccagaattttgacggagaaggagccgacggagtccggcgcgtacgtcctcctgtcgaacatctacgccgacgtgggcgactgggacggcgtcgccaaggtgaggaggaagatgagggacagaggcgtcaagaaggagatcgggttcagctgggtggacgccggcgctggcgaggcactgcatttgcacaagttttcgtcggacgacacgacgcatccgcccgaagcaattgccatctgtgatttccgagttgcatcgaaggcacagttgacatcatttgtctaa

SEQ ID NO: 56276 - DNA, 524 bp, Oryza sativa
  Clone ID: PAT_MRT4530_58202C.1
caagctccatccctcgcaacacgcaccccgcgggtcagagccatctgccaatcaatgttcacttgtgaattgtgagctgacctggttgagaagctaagcaaaggccgtgtggcgccatggcacagcagcatccgtgcgcgcaccgggacccgggcggcgtggagatgggcgtcccggccgtgtacccgccgctgccgaacccgaacgggcaggccatggaccaggagcggctcggcgggggaggccccaaccactgggtgggcaacgacgccaacacgctgctggttgtggccacgctgatcaccacgctcacgtaccagctcggcaccaacatccccggcggctactggcaggacaccaagggacgaccaccgcgcccgcgcccccgccatgcgcgccccgccccccccccgggccccggggttcccggggccgcgcggggtggggtgcgcccgctcgtgggtcccgccgctgcccctgccggtgcgggtgcccgtggactcgcgcaacgtccggtggtcgtt

SEQ ID NO: 56277 - DNA, 426 bp, Oryza sativa
  Clone ID: PAT_MRT4530_58203C.1
tgttttctccgccaccgagcgcatctcggcgtcggcggcttggggggagagtcagagatgcatctgagcgagaacgaggggatcgagggcgtgcggttcgcggtgacgggcggccagggcttcgtcggctccgcactgtgcctcgagctgctccgccgcggcgcccgggaggtccggtccctcgacctccgggccttcttcccctggtccgaccagctgctcggcgccggcgtccgcttcttccaaggggatgttagaaagaaggaagatgtggggaaggctttgcgcggtgtggactgtgttttccatctcgctttgtatggcatgtcagggaaggaaatggtacaggctgggcgagccgacccaggtcaatataaatggtacatgcaatgtgctggacgcttgccaccagcattgcgttagaag

SEQ ID NO: 56278 - DNA, 246 bp, Oryza sativa
  Clone ID: PAT_MRT4530_58204C.1
attattgattttttttttatttttgggaaaaatgaagggcggtaggacatttgtccgtgttaattcagggaaacacgaaaaaatttttttttaatacgcccataatgctgaggatcacaatttttttcagcccgaaagggagggggaccggtatagaatacacatgctggtggttattgcagggtccgttacatgattttttttaggctggggcgtgctttttgtgttaaaaagcttgctcatgat

SEQ ID NO: 56279 - DNA, 1521 bp, Oryza sativa
  Clone ID: PAT_MRT4530_58205C.1
atgcatctgagcgagaacgaggggatcgagggcgtgcggttcgcggtgacgggcggccagggcttcgtcggctccgcactgtgcctcgagctgctccgccgcggcgcccgggaggtccgctccctcgacctccgcgcctcctccccctggtccgaccagctgctcggcgccggcgtccgcttcttccaaggtccgccatctcgagttcatcctcactacagtggttttggcttttccttcactgtaactgacgcggtcactgagttttttcttagaagggatgttagaaagaaggaagatgtggggaaggctttgcgcggtgtggactgtgttttccatctcgcttcgtatggcatgtcagggaaggaaatggtacaggctgggcgagccgacgaggtcaatataaatggtacatgcaatgtgctggacgcttgccacgagcatggtgttagaaggctcgtgtatgtaagcacgtataatgtggtttttggaggagagccgattgtcaatgggaacgaggcgctgccttatttccctgttgaagaccatgttgatgcctatgcgcgtagcaaatcaattgctgaacagttggtgctgaagagtaatggccggcaaactaagagtgataaaagcagtcgtctttatacatgctcaatacgtcccgccgctatctatggtccaggtgaagagcggcatcttccaaggatactatcccttgcgaagttgggattagcattcttcaagattggggatccaaatgtgaagtcagattgggtctatgtggataatcttgttcttgcactgatattggcaagcatgggacttttagatgatattcctgacaggaagggaattcctgtagctgctggtcaagcatatttcatatgtgatggatcgcctgtcaatacttttgaatttctcagtcctctatttcaaagtttggattacacagttccacgagttagaatggatacctcagttgctcttgccatctcaagattttttgtgttcatgtatacactactctatccatggttggatagtaaatggattcctcagcctcttctccttcctgctgaagtatacaaggtgggtgttacacactacttttcatatttgaaagctagagaggaaatcggctatgtacctatggtgagcccgcgagaaggattggctgcaactatttcctactggcaggagaggaagagaaaagaactagatggcccaaccatatttccttggctgtttgtaacaattggcatgctggcattgttttctgctgcttaccttccacccgtcggtccattgaaatgggtgcttgacctccatttatttgttttccgatcaaagttggtgattcggttagtctttgtgatagcaactgcattgcacgttggtgaagctgtttatgcttggttcttggcaaagaagtatgacccgaggaatgctacagctatctacctacctctgaactggaagtcccaagaactacaagcatattacagcctgatggcagagtga

SEQ ID NO: 56280 - DNA, 429 bp, Oryza sativa
  Clone ID: PAT_MRT4530_58206C.1
aaaggaagcattaatagggtttattaaatctgagatggcaatatgatgtgaatgaaacaatttttctacaatctcttaaatgctcttcctactgcgcgagcagctcttctgatccaagaacgtctcttgcggagtcttctgatgtcaccagcaacatggcgagcagcaccagccaaacgacgaccaccaattctgaagtctctcatgcattctctcttgaaacctccacggaacttgcgacagaatctaccagcacggacgcgcaatctacgggtccattttctggccttaccagctggcttcttgtggaatttcttgacaaagagagatctcttaaccttggtaacaaccttggaggtacagaaacccttcaatttggattgccaatcagcagtggcataggtataaatattggcatagtaggagagt

SEQ ID NO: 56281 - DNA, 381 bp, Oryza sativa
  Clone ID: PAT_MRT4530_58207C.1
atggcccacatatcagatattaaactgataagaacagatactacacttgatcttagccaaaaggccgagaaagctaggtctgcaacggcccagtatgctaaatttctcgtggtcatgggccttgacatcctgcccccgcacgatgctgtagcctttgtgcgcttccgccggcgccttggtgtactgctcctggccaccggcgggagcgaggagtgcgtcgccggtgacgagaagaacggcggcgagagcgacgaggagagcccttccggtggtgctcatgttgtcgttcgtcagcttggtgtgcctgcagtagctagcgtgcgtttgagcttccgatcgatctgcaaccccccgggtcgacggggcgtgctgtatttctag

SEQ ID NO: 56282 - DNA, 510 bp, Oryza sativa
  Clone ID: PAT_MRT4530_58208C.1
atggcaaacgccacgcagcacatcatcggcgccgtcgcagggggacaccgccgcggccgtctccgcgagggaacgccacatccgagcccacctgcacacggtcacagcagcagacgagagtgtgagagagaccgaaacccagagcacacgcagagcagagaccaaactgcgcgggagcgggggggggggacctcgtgggcggagaccgcggcggcggacgcggcgagggagtgcggcggggcggcggcggcggcggagaggaggaggacgcggcggaggagcgcgaggagcgccggtggggagggcgagaccaccgactcgtcgcggagggtgaggagcgccgtgcgccactcccgcgcgccgccgcggggatggggcggcggatgtggcggcggaggtggaggccatcgccggcgaccaccgtggcgggcggttgctggtgaaactccttcgccgatctactccagtgaagagaagagaaaaatccttcagacccaaaggagggactaa

SEQ ID NO: 56283 - DNA, 1692 bp, Oryza sativa
  Clone ID: PAT_MRT4530_58209C.1
atggagatcagcacagtgctgggcgcaatattggcagagtacgcggtcaccttggtggccatggctgtgggtttcctggtggtaggctacttgtacgagccatactggaaagtgcggcacgtgccaggtcccgtgcccctgccgctcatcggccacctccacctgctcgccatgcacgggccggacgtgttctcagtgctcacgaggaagtacggccccatcttcaggtttcacatgggaaggcaaccgttggtcatggtggcggatgctgagttgtgcaaggaagtgggcgtgaagaaattcaagaacttccctaaccgaagtatgccctcacccattaccaattctcctgttcatcagaagggcctattcttcacaagtggttcgaggtggacgactatgcgaaacatgatcctctccatctaccagccgtcgcacctggccaccctgatccccagcatggagtcgtgtattgaacgcgcggccgagaatctcgagggccaagaggagatcaacttctccaagctctctctcagcttcaccactgacgtcctcgggcaggcagcgttcggaacggactttggcctgtcgaaaaagttggcctcgtcggacgacgacgaggacacccgcaagatcgcggccgatacctgcgcggaggccaaggcatcatcggagttcatcaagatgcacgtgcacgcgaccacgtctctaaaaatggacatgtccggctcgctctccatcatcgtcggccagctcctgccgttcctccatgaaccgttccggcaggttctcaagaggcttcgctggacggcggaccacgagatcgaccgcgtgaacctcacgctcgggagacagcttgacaggatcgtcgccgagcggacggctgcaatgaagcgagacccggcggcgctgcagcagcgcaaggacttcctgtccgtcatgctcacggcgagagagtcgaacaaatcctcgagggagctgctcacgccggactacatcagcgcgctcacttacgagcacctcctcgccgggtcggccacgacggcgttcactctcaccacggcgctctacctcgtcgccaagcacccggaggtggaggagaagctgctcagagagatcgacgggttcggaccccgcgaccgcgtgccgacggccgaggatctgcagaccaaattcccctaccttgatcaggcacgccaaacccttcctcgacgtgtttatatcgtcagacatgaatttctgaccgcgcatcgtgcacgcatgcaggtcctgaaggaagcgatgagatattacccctcatcgccattgatagcaagggaactaaaccaacagctcgaaattggaggatatccccttccaaagggaacatgggtgtggatggcacctggtgtcctaggaaaggatcccaaaaatttcccagagccagaggtgttccggccggagcgcttcgacccaaacggcgaggaagagaagaggaggcacccgtacgcgctcttcccgttcgggatagggccgagggcgtgcatcggccagaagttcgccatacaggagatgaaattgtcagcgatccacttctaccgtcattacgtatttcggccctcgcccagcatggagtctcctcctgagtttgtgtactcgatcgtctccaatttcaagaacggcgccaagcttcaggtcatcaagaggcatata

SEQ ID NO: 56284 - DNA, 3099 bp, Oryza sativa
  Clone ID: PAT_MRT4530_5820C.1
ctaggaatttgccaactcgcgaccatcgtcgtctgcaattttgaatgcgtctggccgcaagacttgtgtgatcttgtacggtccttcccatttgggtgagagcttgttttgccctgcttggctttgaacccgtcggaggacatagtcaccgatcgaaagcgtgcgtgctcggatgcgcttctcgtggtatcggcgaagggcctgttggtagctggctgctcgaacgacaactcgttcgcgatgttcctcgagtagattcacatcgtcgtttcgctgctcctcctgatcctcatcggaatacttctgtacttgtgtactttgatgtcgtagctcggtggggagcatggcctctgagccatacacgaggaagaagggtgtctccttgttagacgttgtcggtgtggtacgcacggtccatagtactgacgggagttcttcgacccacttcttgtcatgtgacatgagcagtactatgccgtttgccctctcgacttgtccattgctctgagggtgagaaaccgaggcgaagcagatcttgactcccagccgctgaaccatgtcgcaagcgtctttgagggcggttggccagaaaaatccttgtcgaaaagcttttacgactaatgtccgaccagcggcgtgtgacccacagatcccttcatgtatgtcgaggaggagatgtctgccgtcgtcggacgagacacattttaggagtaccccgtttggcgtcctcttgtatatatcgttgccgatcatacagtagacttttgctttacgggatattttctcagcttctgcgtcgtcctcgggcaactcttcgctacctatgaatttgatgagtggggtgcgccagtcgtctgtggtcttgatatcggcaacggcgcgctctgcctctgtagcccccgagctgttgttgagggtaaccgggctatctttgccgcttgcatctttcactgatggtcttttttccagcttcctgacttctgcgagatacttagataactcggggctagagcacttgtaatctttatgcacctggttcgcgactagttcggaatctcctttcacgatcagtcgcctaactccgagtgtagctgcagctcttatcccggcgagtagtccttcgtactcggctgtgttattggttgccctaaagttgaggtgaattgcatgcttgaattgatctcccgaaggtgatgtcaagatgaatcctgcccctgctccttggctgttgagtgcgccgtcgaacgccattgtccatgtttcgttgtcgatttggttgtctgacttgatggctgttcgtggcacgaagtggacatcaaattggcttagctcgattacccatttcgcaatgcggccgacaacgtctttgtttctcacgacttcaccgagagggaaggaggatacaactgtgaccctgtgggcttggaagtagtggcatagctttcttgatgtcatgattaccgcgtagagcagtttttggatatgtggatatcttgtctttgcatcgtggagagcttcgctgacgtagtaaaccggtcgttgcaccttctctctctcgacaacaatgacagtgctaacggaatatggcgtggcggcaatatagaggaataattcttcattaggttggggggcaacaagtataggggaatttgataggtagcgcttgagtgcaatgaatgcctcttcggcttcctgtgtccatacaaatttgtcttgcttcttcagcagagtgaagaaatgttgtcctcgttctcccatcctagcgacgaacctgcttagtgccgccatgtatccggttagcttctgtacttccttgagtcttataggcgacttcatgttctcgattgccttgatcttctcgggatttgcttctattcctctaccagagacgaggaaaccgagcagcttgcccgatggtactccgaacgtgcacttctctggattgagcataaggcgatatcgtcggaggttgtcgaacgtttcccgcagatcatcaatcaatgagtcgcttgtcttggtcttgacaacaatgtcatcgacgtaggcctcgacattgtttccgagttggttgctaagtgcgccctggaccgtgcgctggaaagtgtttcctgcggttattagtccgaacggcatcttaacatagcagaataccttgaacgacgtgatgaatgatgtcttctcctcgttctctttcgccatactgatttggtggtagccggagtaagcgtcgagaaagctcaacaactcacaaccggctgttgagtccaccagttggtctattcgagggagagagaagtgatccttgggacacgccttgttgaggtcggtgaaattgacacacattctccatttcccgttggccttccgcaccatgactgggttggctagccactctagatggagtacctctctgatgaaaccagctttgagaaacttgttgagctcttctcgtatggcttgttttcggtctagtgcaaatctccgcagtttttgctttactggcttggcatcgggtcgtaccatgagtttgtgctcaatcacctccctaggtactcctggcatgtcggacggtttcttgggtggctcagttgtggcataagggctaggcgtgtgctcaaccatgtcgaggctccgcttgtcgcattgcactgccagcttagcattcccttgaatagtgattgttcctttcggtcccggcatcttgagcacttgatacgcgtagtgagatgcggccataaacttcgtgagtgcagttctcccaatgatggcattgtatgttgtatcgaattcagcgacatcaaaggtgatctgctccgttcggaagttatttgctttgccgaaagtcacaggcaacgtaattttgcccaatggtttggacgatgactgaggagtgattccatggaagggttgatcggtgggagtcaactcgcttcgtggaatccctatcgcgtccaaggtgctggcgaagagaaggttgattgagctgccgccgtcgatcagaactcgcgcaaccttgatattctgaatagtgggttcgaccacgatcggatatcgccctgggatgacagcagtgttgtcacaccggtccttaactgccat

SEQ ID NO: 56285 - DNA, 162 bp, Oryza sativa
  Clone ID: PAT_MRT4530_58210C.1
atgggatatttgtttcgttataaatccattgaagttcatattttggcaattaaccatattttgactaaacagacaattgacaagaagatcggtgagttttctaactgccatattgtttattctggaatcgatttccagaagagacaaattaaggtgctataa

SEQ ID NO: 56286 - DNA, 1137 bp, Oryza sativa
  Clone ID: PAT_MRT4530_58211C.1
atggtttctttgttactgcagtggaaacccgcacttcttagcgattatgacagcagcaagagtagcccactgcattttgcttcatctgacggggattgctccatcatccaagaaatgttaactcatgcgccacctagcactgccttcatgctggacaatgaaggcctttcacctttgcatgttgcagcattgatgggccatgcagctatagtccatttattgctacagttttgtccttcttcggcagacattcgcgacaactatggccgaacctttctgcatgcagcagctatgaaaggccattcttccatcatctcatatgctataaagaagaagattcttgagcatcttttgaatgcgcaagacaaggaggggaacacaacacttcatttagctgttattgcaggggaatgcaaggttgtttctaaactattatcaagtggaaagatgcaagccaacatcatgaacaatgttggccacgcaccaactgaccttatcaaaaattgtaaaggtttctactcaatggacatcatgaaatggagagagactacatcaaaaaatctggctgttgtttcaacacttgtggcaacaattgccttctctgctgcattcaacattcctggatcatatggaaatgatgggagagcgaatctagcagggaatagcttgtatagtgctttccttattctggacaccttctctgtggtcacttcagtcatggcaacaatactactagtctatgggagagcttcaaggtctcaacgctcgtggctaggcttcatggtcacaatgcactttctttggttgtcactaaacagcatggtgttaggcttctttgcagctctagcggcggtgatgagtaaggagaagggcataaagattgcaatgtcccaggtgatctactatgggatgtacatcctgacgacgctgctttcaatcttagcaatgccaggatcatttacaagcattgtgaagttcctcatcagtgctcccaaggagcgacaacgacacactaagagacagattagccggcagtatccctttgccatcttttacattgtcaacgctgttttgttcgttatcataaatagtctagcaatggcatcattcgaagtggctagaaatcttagttactga

SEQ ID NO: 56287 - DNA, 1308 bp, Oryza sativa
  Clone ID: PAT_MRT4530_58212C.1
gagagagacgaccgatcgatcgatcagctagctgcagcttccagaaagagtagttagctcgatcgatcgatccgggaaggatcagagttaattagtgagtgaggaattgtagccatgggccggccgccgtgctgcgacaaggaggggatcaagaaggggccatggacgcccgaggaggacatcatcctcgtctcctacatccaagaacacggccccggcaactggagatcggttcccatcaacacagggctgatgaggtgcagcaagagctgcaggctgcggtggacgaactacctgcggccggggataaagcgcggcaacttcacggcgcacgaggaggggatcatcgtccacctccagtcgcttctcggcaaccgctgggccgccatcgcctcctacctcccccagcgcaccgacaacgacatcaagaactactggaacacccacctcaagaagaagctcgccgccgccgccaactccacttcatcctccaaccgccaccccatcttcgccgacgccaccttcccctccgccgccggcggtagctacacggtgagcagcaactccgatgtcacccagatggcagccattgctaggcgctcccccttcgccgactgcccatcctcctcatacgcctccagcatggacaacatctccaagctgctcgacggcttcatgaagaccaactccccgtcgccgccgccgccgccgctgcagcactatgacggcggctattacgacgacgtcaagcccgccgtcgatgtcggcggcaaccccttgctgtcgtccttcgactgcatgtccggcgccgacctggactgctgcttcgacgttcatcagcagcaccagcagcagccgccggcgtcgttcatggagtacggcggctatggcggcggctacggcgacgagagcaagcagcagctgatgaaccaggcggcgccgccgctgtcttcgatcgagaagtggctgttcgacgaggcggcggcggagcaggtcgccgacctcatggacctctccgacggttgctgctccgtcccaatgatgttttaattagctcaagtaatgaaagaaaacactgtcacattcgatacgtatactgtgcacatcaataattaattttacattaattagctagatgcatgtttaggttaaactattgttgttactatacttgaagctagaagatttgttttatttgtagttttggatgtgtgaccggttgtacgtgtgtcactggcatcaaacgtcagcacaagaataagagatatcaacaggaattaaaaaaaaaaaaaaaaaaaaaaaaaaaaa

SEQ ID NO: 56288 - DNA, 1644 bp, Oryza sativa
  Clone ID: PAT_MRT4530_58213C.1
atgtccatccacctccgcgcccacgccttcgcggcgagccctctgcgcggcctctccgcctccaccgccgccgtctccccgtcggccgcggccgacgccctccgctccctcctcgacgcgggggccggggcagccgacgccgcgcacccgcacccgcacccgcacctctccaagatcctccccttccgccgcggccgccccctcgcgcgctcctacgactctcctcctccccccgctgccgcggccgcggcgccgccgcctcctcccgcctggcgcctcgcgtggctcccgcccgcgcgcgtccccgacgtgccctcggacgccttcgtgttcctgggcgcgcacggcgaggaggaggggaaggaggccgcggcgtactgggccgtcgatgtgagcgagcgcgacggggagggcgccggggatgggtcggcgtttgtggatttgaggacgctcatggtggccacggactggagggacaaggacgccatgggagacctcgccatcgcgggccacgctcgggcgctgctagaatggcatagcacagcaaaattctgcggagcttgtggatcaagggctgttcctgctgaagccggaagacggaagcagtgcagcaatgaatcctgcaagaagaggatataccctcgagttgatcccgttgtgattatgttggtcatagataaggaaaacgatcgtgcgctcttaagccgccagtcgagatttgtgcctcgaatgtggagctgtcttgctggttttatagagccaggagaaagcttggaagaggcagtgagaagggaaacgtgggaagagactggtattcaagttggggaagtcatttatcacagttctcaaccgtggcctgttgggccgagtactatgccatgccaactgatggtgggattctttgcttacgctaaatcattggagatacatgttgacaagaaagagcttgaagatgcccaatggcacagccgtgaggatgtcaagaaagcactaacatttgcagaatacgagaaagctcagagaacaaatgcgctcaaggtcaatcaaatatgcaagggtgttgagaaaaggcagagcatctctgctgacctcaaaatcgaaagtgaggagcctgctccaatgttcgttcctgggccctatgcgattgctcaccacctcatatcatcatggtcttttgaaggagcaccaaaggcacctagctccttctccaacctatgagccttgatcctgttattcattttcactaaacaacacaacaacaggagatagggaataaaaaattttagtcccatgtatcatgtatgccttagtttcttgttagtgtagatgtgaaatgtgtccattgccggttgtaataaaaggttaagaaaagtacatcacgttcactggaggatttggggggagtacagattacagagcaagtgtaatattttagcatacaatttgtaacagtgtatagatgcagcacagatgtgctgatgtttgtatcttccatattcaaagagctggcatcaagtgtgaaattttgccaggtttgttacaagttgaggacatctgttacatgttgactggtataggtctgcttggagaaaactggaatattcaagttaattttccaaaaaaaaaaaacctgcagcccgggga

SEQ ID NO: 56289 - DNA, 428 bp, Oryza sativa
  Clone ID: PAT_MRT4530_58214C.1
cccccccaaaaggtttggcctaataattaaaaaattattttggttttccccggcactttattacaagaaatttttttattcctacaaaatttgggatgtggtttttacaaaaaaaagggtaataaaaaggggttttttttatgggcaggcccatatgggttttttttaaaaaaaaaacaaattatttaaaattttaagataagttggaaacctaaaatttttccaaggtttccctcggctaaaaattttatatggtttaggttttttggggggaaaactgggccttaatcttggccacccccttgtcgtaaatctggaaggccttgggaaggacggctttagccaccgtcggaaagggggaaaaaagggtgggggaaatggactgttggccgggaagcttctttttgaagggggaaaccacggggggg

SEQ ID NO: 56290 - DNA, 567 bp, Oryza sativa
  Clone ID: PAT_MRT4530_58215C.1
atgagacaaaattgcccttcatgtcctccgtcgccgctgttgaggaagaggagctcgtcctcgctggccaatctccatgtccaccacaagcagctcaccgtcttcctcccagacggcgaggtggccggcgagtcttccgacatcttcctctccctcgacctcgccacctccgccgactacctcgccgcggtcgacgacgaggcggagggggacgcggtggaaaggcagcagcagttgctggcgagcctcgccggcgatggaggcggagggggacgcggtggagaggcagcagcagttgctggtgagatggagcgcaagcctccgccgccgcgaggcctccttgacgacctcgcctccgcctccgcctccgccttgttggtgctgtccggcggcggcggccaggggcagccgccggtggttccatcactccgcgcacccgcacacccaaatgccctcgtcggcagtggcggtgggctcatccagcggcgttgccggccatcccgccctcgtcgacggcggctacggaaggggaaggatgcgaaacacgttttcaagattgcattctag

SEQ ID NO: 56291 - DNA, 335 bp, Oryza sativa
  Clone ID: PAT_MRT4530_58216C.1
tatggaacttagcgcactccaccagcccctgccggccgatcgtgcactggacatatgaatggggaccgacgaatgggcagaaccaattcatcagcaagcacctactatgggccgataacgagagatggatgcaggacgcattcaacagcagcggctagattctcgagtgaatcatcacaagactttgatacgtgtgatggctcctaacatcggaactacaataccgtcgcaagcaccaagattgacagataccccttcaggcagcgatcactgggagaccctacatggtcaacttagatcgaattgaagaatgcaattaactacaacaggaagaa

SEQ ID NO: 56292 - DNA, 202 bp, Oryza sativa
  Clone ID: PAT_MRT4530_58217C.1
atttacaagcttgccagcttcataatattataacacatggctttttttggccacctattttttccgaatagccagatccgaatttccacaaactatagggcttcctcaggaattttaaaaaaagaactcgcaatctattccccatgaaatccttggacaccctggccctcccgacgatgaccaccacttacgcgaataccta

SEQ ID NO: 56293 - DNA, 1230 bp, Oryza sativa
  Clone ID: PAT_MRT4530_58218C.1
gccttccttttttttttttttctgaaaaaagtctagtgccgaatatggcaccattgtacatggaactttagctgttccatctcttcccttatgtttataatatttggctagacaaatcatgtacaagcttcagcacaattaagataagctagatacaaattatacgcgttgacaatatgaggggcttacagcataaaaatgatcctgtctgtataagttcaacaccagtcttgcctggcgaaaaaaatggaagttcttgctccacacttccacaataaatggcgaacattaccacatcaattataggctactccttcttggttttgctttcatctgcttcttcctctatcttcttgggtttagttaataaggtcacgacccatactcctagcaaggttgcttggaggggtgcaagccaatatacaagtaggtggtcgaatgttgtgtgatcccctcgagcataggcccaagcaaaagcagatgcagggttcatgactcctccagttatatctgagctaaggagatgaaatgtcattttccaaatgctcgagatccatgtcttcataaagaaccctttcatctccttcttcttaagagtcaccgacactataacaaccatgaaagttgccaacccttcagctaacgctccatggtgaactccaacgcttaacggagctcctttgcctactttagggagagctgctcggatgagcttcactccaagaatcgacccaaacacctgcgcaggcatccgtacgaaggcggcgaacaggtagagagaggggccggcgcgggatgcgagggcaccggcgaggacggtgagcgggttgtaggaggcaccgccggtgaagccctcgagccaggcgaagaagaacatgtagacgagggagagcgccaccttgacggcgtcggcctcggggcggccaccgaggccgagcaccccgtacacggcgagcttcaccagcgcgcccgcgcacacccacatcgccgccaccaccaggtcgcccaccaccagccacggccggatgcggccgcgcgacggcggcggagcgggcgacatggcctgaccggtgggggggaggggaggtagggccggagccggagccggagaggagctcgctctcgccggtggtcgctgccggtggaggagcgatggatggatggatggattcctctgccgggattaaggaggagggcgagcgagaatttagagggttgccaccctcgtgc

SEQ ID NO: 56294 - DNA, 1918 bp, Oryza sativa
  Clone ID: PAT_MRT4530_58219C.1
tcaggtccttggtgatgacgggttcgacagttcaggcggtgccgggaagctaaaatcaagttcaggcagctcgggcatcgtgaacttcttcgggcccaggccgcgtctgccgtcgaagaggaacgccgccgtgaccggcgactccgtgtcgacgttgctgctcctgagcagctccagcggcaggtcaaagtacgcggacggctcctgctcctgctcctgctcctcctcttcgccgccggcgcgctcgaacacgatgctggacgacgacgacgagctgtacttgaacctctccatggatgcccccttggacgccacgctggcccgcgtctcggccgtgctcgcccgggcgcccggctcgctcaggctcatggattgctgctgctgcatcggccgcctcctcgacagccccggcaggggaaggcagagagcgccgcaccagaagccgtcgccggcgaacctatcctgcctcgccctccggtagttgatcgacgagttgctcgagatgtcggtgaccgacgaggcgacgcgggatcgccggccggtggcggcgcctctggctgcatttgatccgtccgcagaggcatgggacctccggtcctggtcctcctcatcatcgatacctgcagctccagcttctttcttgaaggacgcatgcttctctcgaaatgaatcgtcttcttgagaaaaactcatggcatcaccgtaccagaagtgaactgcatgcacgagatgttccgactgcttctgtagagaattgtagaaaagaatcaacacgactgatattccaataatgacaggaaaggcagttaacagatatagagcagaatatcccactgcggagggcacttcagtttcatcatcttcctcctcttcatcatccaaatcagcagcagaatcccaatcaatgttaagtcttttagcagctgtctcaggatcaatgcctgtatctgtagcctttgcatagacagatttcccaggtttactcttcttttttggagcttccatctcaagatctggccattcagtcatctccttcgcaagcaactgaagggcaacacggttttctggaatccggccttcattaacctcaaccaaagcatcagccaaatcatccctggtgatttcatcaggatcctctatgccgagtaatctcttcctttctatatctctaggatcctcaatcatgatagttagcttaacctcgccaaaggtcatatccctgttcttctgaagaagctcaagcacccttttgacctggcggatatcctccaagtcctcggggctcgcctccggctgctcggcggaagacgcgatgtcgcctgcggctccatcggaggaagccggcggttcggaatccccttctccctcaggagcgacagctgtgtctgacactccaggttcgtcctggccgagcgaggcagctacgcggcggcggcggcggctgctacgggaatacgcccgtgcgttggctgtagaagggagggggaggccgcagtggcagtggggcagggagaggagagagctaggtctcgtcgcgacggcgaggagtgtgggagaggcggggcggcggcgaagtggcgggagcggaggaggcggggagggtggtgagagcagcgccattttggctcccccctatcttgttgggtccggggcatctccgctcgcccgcggccgcacggtttgcgaggatgacgacggtgcggcacctctcggctccccttgcgggccccaggcggcagtgagcgcgccgttgcagctgtgtaaacagtcgtgcagtacacaaagcccttgtctctttggtacttcgagatatattcgcatgggcttggccctttttgttcatgacagcccgttctcagcaaacaggccggactatgctgtttttgcccaactcggccgaccgatcacagcctactag

SEQ ID NO: 56295 - DNA, 169 bp, Oryza sativa
  Clone ID: PAT_MRT4530_5821C.1
gctccagcgaacgcgacatctatatgtggggattgttgtagaaatatttggggggctcagcgacaacggggcgtgtggagaacactaactatccgcatacgattcctggagatggtactagggcccagtctagggacaagctacaggggggccttatgcgcatgccaaa

SEQ ID NO: 56296 - DNA, 1029 bp, Oryza sativa
  Clone ID: PAT_MRT4530_58220C.1
atggagatcctcgtcgaggagagcaacgtccagcgcgtcgacgcccccgtcacggtgaccgccccccttcccccacccttccccttccatctcagtttcgttcgattcgcttctgacgatttttgggcgattacgatgagctttgctgatgaggattccagggctttggtgaaaattgctggtattatatgtggagatattcatggacaattctatgacatgaaagaactattcaaagttgggggtgactgcccaaagacaaactacttgttccttggggattttgttgatcgaggattttattctgttgaaacatttttgcttctgttggccttaaaggttagatacccagatcgtataactttaatacgaggaaaccatgagagcagacagattacacaaataagagtaatagatcgcaagcaagaagtacctcatgatggggccatgtgtgaccttctttggtctgatccagaggatgctgtagatggttggggattaagtccacgaggtgcaggattcctatttggtggaaatgttgtttcttcttttaaccacacaaacaacatagactatatttgccgtgctcatcaactagtcatggaagggtttaagtggatgttcaataacaagattgtcactgtatggtctgctcctaactactgctacaggtgtggcaatgttgctgcaatcctagagcttgatgagaatttgaataagcagttccgtgtatttgaagctgccccacatgaatcaagaggtgttcctgcaaagaggccagcgccagattactttctgaagttttgtagttggcatttgtacaaactgtccgaagaatgcatatccattcctgctaggaaatgccaggcaccgccggaagaggacaaagttcttaaggaaaggctaaaattgaacagatcttcaaacggctcctccatgaaggttaagacgtcgagaacgctgctgtcacccatcctcaggggcatacctattaaggccaacaagggtccttggacaccggatttataa

SEQ ID NO: 56297 - DNA, 312 bp, Oryza sativa
  Clone ID: PAT_MRT4530_58221C.1
gaggcagcagagcaccttcgacaccgtcttcgaccgaccgatcgaccgaatccacgaacggaacaccgaaatcgggagggatccggatgctgcgaagcggctcgcccgtggagctaggacggcgagcactaacctgctgcgaggagtcgtctgcggtgcgggggcggacgtgtactacgaggtggggagggaagcctctcaccacgcggcaatcgtttgcgttcaccgacgccaccggcttcacctcttgacgaatctccttctcagtcttccgcgccgcgtcattgcctttcgtgaagatttttcttttta

SEQ ID NO: 56298 - DNA, 121 bp, Oryza sativa
  Clone ID: PAT_MRT4530_58222C.1
gtggtccctctggtcgatggtggcgacggtcgggtccagcaacgttgaggacccatgcagaatgcggaggtacggcaaaggggacgaggctagtggctcggtgggcgacgaggcgaggtag

SEQ ID NO: 56299 - DNA, 322 bp, Oryza sativa
  unsure (1)..(322): unsure at all n locations
  Clone ID: PAT_MRT4530_58223C.1
gattatcgtggcggcacccgtgcggagctcgttcgagaagaccggcctcccggagcaggggatcgtctaggacgacgccttcctggcggagcatcggcccgagcgagcggcgccgccttggccgggggggtcctccagagcgccctggacgccgtgcgcgtcgagaggccgtacacggtgcagcacgtggtgcggncctttcggtgcagttactgctccacgcgttgccggggcgcgccggggcggagttgcaccgcgccgtgcccgcgcgcgccgacgcggagttcgactacgccgggggcgccgccccgtgcgagcaacg

SEQ ID NO: 56300 - DNA, 439 bp, Oryza sativa
  Clone ID: PAT_MRT4530_58224C.1
cgttcacactccctattctcaatcaccattcacataaaagaggctactcctgaaggagaagaattgataaaatgtgggaagcttaatttggttgacctggctggatcagagaatatctcccgttctggagctagggagggacgagctagagaggctggtgaaataaacaaaagcttgcttactttaggtcgcgttattacagccttggtcgagcaccttggacatgttccttacagggacagtaagcttacaaggttgctccgtgattcactaggagggaggaccaaaacttgcattattgctactgtttcacccttcgtgcattgtctagaggaaacattgagcactttagattatgctcaccgagcaaagagcatcaaatacaggcctcgggtaaaccagaaaatgatgaaatcaacattaatcaaagaactttatg

SEQ ID NO: 56301 - DNA, 452 bp, Oryza sativa
  unsure (1)..(452): unsure at all n locations
  Clone ID: PAT_MRT4530_58225C.1
ccacgcgtccggtggtcgtcctttcgccgtgttcggttgttgcaggagcggatttgattggaagttcccaagtcgaggtctcaaggaagaggtcagtttcccgtctacagtccggtcgtttgatttagtcacttgggtcggtgattgatttcagatttgagtggttgattacaaccttcaatcgatggatggatgatcatcggtttctatcagtccttacacgaggtgattcgataccctgggttgattgttatttgtaaccgctgatctggcttgtggtatgtgtttgtgctcctctagatgatgcaggaaggagagtgcctgttgagatgaaccgaattggtggaggtttgattattatggtccaggttcatggttgctttgattattagttagattcatgatgaataggggtggngggaggtttgcttgttatggttcatggntttttt

SEQ ID NO: 56302 - DNA, 828 bp, Oryza sativa
  Clone ID: PAT_MRT4530_58226C.1
gacatatagtgatcaatcatgcatcttctggttgttggaagctagcaaaactgaaggttcttgttgctgttgctgttcatcattatcatagccaataagaaagcaagaatccaagaggagacaggatcggaggaggaggaagaaagcgagaaaccaatcgatcgatcgatcatgctgatcttggaggtgggcatctggttgctgccgttcacgctgctggtggcgccggtgaggaggatggtgaggctggtgcaggagctgcagcggatcatgctcgtcgtcgcctgcgaccggagccgccgcggcggccggccgccgacgttcggcgaggtcttgagccgcctcgaccgcctcgactccgccaccgtcatcgtctgaacgatgatcgattgatcagcatcctgtaagctgtaattaagttgcttcaattcctctgccatcttcttcttcagttcttcttgatgtaaatttctgaatccgaattaagtgcgttttagttcttcaagaaaggatgctctcttctgaatcttttgctctgtgatcttcagtttttggtacatgcaagcacttgcatgtatctgtaattatgtatgtacggtttttgtatatatggggctgaaattaagttttatccagctccctgcataagattattgatgaacaccagtctaaaaaaaagagtattgatgaacaagtattcataggatgaatgaagaagtgttctctgttgtatagagagaaaaggttcctttgttcttcagtttatgctgatgattcataattaatttggagctcatttctttctctgaaaaaaaaaaaaaaaaaaaa

SEQ ID NO: 56303 - DNA, 1382 bp, Oryza sativa
  Clone ID: PAT_MRT4530_58227C.1
gtggatccccgggctgcaggaatcggcacgagggccaagaacgccaaaaaccctcgctttgctgctgctcctcccccttctccttcggctgctgatcggattcgcggcgtcccaggctagggatccgggcggtggcggcgatgggcggcggcggcggcgcggaggaggagctgacggcgcaggagacggcgctctacgaccgccagatccgcgtctggggcgttgacgcccagaagaggctaagtaaagctcatgtgctcgtgtgcggcatgaatggtactactactgagttctgcaagaatattgttctagcaggagttggcagtttatccttgatggatgatcatttagtcacagaggatgatctcaatgcaaatttcttaattcctcatgatgagagcatatatggtggtagatcacgagctgaggtttgctgtgagtccctgaaagatttcaatccaatggtccgagttgcagtcgaaaagggtgatccatcattaattgatggagaattccttgacaagtttgacataattgtagttagctgtgcgcctattaaaacaaagttgttaattaacgacaactgccggaagagaagcaagcatattgcattctacgccattgagtgcaaggattcctgtggtgaaatatttgttgatttgcagaaccatagcaatgttcagaaggttggaggtgaacccaaaccaaaggagttggcatatccaagtctccaggaagctatctccgtaccctggaagaatttaccaagaaaaacaactaaactgtactttgccatgagagtactggagaattatgagtcatctgaaggccgcaatgcttgtgaggcatcactttctgatcgacctgcagttttggctctgaggaaggacatgtgtgataaaatgtctttaagtgagtctcaaattcctactgctctcctggaacggcttttagcagctggaaagaagcaacatcctcctgtatgtgcaatccttggcggcattcttggtcaggaggtgattaagtcaatatctggtaagggtgatccgatcaagaatttcttctattacgacgccgctgatggtaaagggatcgctgaagacattcctcccctttcttcagactgaaccagttaactgctcgactcccattcagcctggcttcactaatccctgtacccattaattagcttcaaattagattagcagtcaatttaagtctgagagatacttagaactctactatttgttatttaagttgtgccagcttagaaatggtatcagatagaaattttacattttgtgccaacaatttcaaagctgaaaccaggaaaggttttgtgctgattgaaagattaaatgtgttgctctgtattctcttcc

SEQ ID NO: 56304 - DNA, 195 bp, Oryza sativa
  Clone ID: PAT_MRT4530_58228C.1
atggccatctgtgttggatcttttggagcaacagtatgtctatttactggattgaatgctcttaatatgatggttttgatatatcaaatgtttatgcagataattttatgcacaaagaagcttactggtttggtttggacaagtcatgttcaccttcagtctgtaaccatgcataagcttatccgggaattttga

SEQ ID NO: 56305 - DNA, 521 bp, Oryza sativa
  Clone ID: PAT_MRT4530_58229C.1
cagtggtacacctctggccagagtaaaactattcgaatagccgtgcccgcagttatggctcctggtttagaatggtatattcctggtttggaggtagaactgtgcagccgggtttggttgttcagaatggttgggcctatgcaacggatgccgcgcttcaagcctgagtacttgttcggtactgagggatttgtccaggaattgcgtacgatgtccttcgccataggatttgggactgcccctttgatgcccagattcctcacgatcgtgatgaagagaagtgccgtgtcatggtcaccttgaacagagatggcaaggatcgctacagtgatcagttggccgacactgagtatcgctaccatcctcgccaaccccaaggaagtgaccgtggcagctatcttgaacctgcatggattgacaatgatgctaccacatggcatttggatgagatgctgtgcgccatggatgagtcccgcgctgaggtcgtattacctgctcaagatcgtgaagactggaatcgt

SEQ ID NO: 56306 - DNA, 1406 bp, Oryza sativa
  Clone ID: PAT_MRT4530_5822C.1
atggccaaagccgtcgccctactccttgcagccatcgcggcatcggccgtgttagtgcaagtggaatgcgacgcccccgtcgagaagagcttcaacaaggccctcctcgcccctgtcgataagcgcttggatgaggcagctcaggccatcaacgaggccgccgactccgttgtggctgctgccccaccagcgaaaaaggatgaagttgaagctgccacgtggaagcggagaatcttcgccataactgctctcgggatggcccaaggagatgagaagaaagttgctgcaacttcacttgcctacaagaaagcagctaaagctgtcctcgatgccgccccagctgacaagtttaagttgatggatgaatccttcaaagtggctgttatgcaggcgggcccgcccgccactctcgctgacgggtgggacccacctgtcatcgccttcctcccgccgcgcccgccgccgcgcccgtgccctagcgccgccgccgccgcggattccgccgcatcccgccttccccgcgcgccttaatgaggggggaattactccccacgtttccctctcccgattccccctcttttccctctctctctccctcggattcgtccggattcatcccgcgaagttcgccggcgtcttcaatggcgcccgagatctccgcgcgcggtttcctctctccccggccgcgctctccccctctcggcgctatatatttgctccccgtgcctccctcctccatttccgccgttcgccgcttgctctcgccgtcggattcgtgctcgcgccgtgctcctctctctccgccgtgccgccgaactccgttccgccgggcgcaccgctccggacctcctcccgactcggcgccacctccatcggcttcgccgagtggttgccgaccccgtccgccgctccgcttcgcccgccgaccgtcggagcgccgtcgccatcgtcatcccgagccgcgccgccgtcttcctccgctccgaccgccgttctcgtcgtcgtcgttgtcccggggtgagccgaggaccgccgttcgccttcccccttccctcctctctctcgggcgccgctccgccgcgccggtggtcgccggcggtgaccatcggggcgcgggcgcgccgctcccgtcggccgcgccggcgaggccgccctcgggcgtgccctcgcggctgccaagtgggcccggccgtcagccgcccgcgcccgcgggtgcggctaacgcgcgggacccacggcgccgaccgccgccagccgcgtgcgcccggtccaccgtggaccgagcggctgacgcgtgggccccacttcccgtggacccgggcaaatgaaggctacacgagctgcggcccgatggctgacaataagaaaggcaataaggtcataagtcaggacattgatgcctcaag

SEQ ID NO: 56307 - DNA, 384 bp, Oryza sativa
  Clone ID: PAT_MRT4530_58230C.1
atgtccttcctcataggatttgagactgcccctttgtatgcccagattcctcatgatcgtgatgaagagaagtgtcgtgtcaaagtcaccttgaacagtaatcgtgaagatatcccatcggaggtggcaaggatcgccataggagagctccgcgaaagctacaatgatcggttggccgacaccgagtaccgctaccatcctcgtcaaccccagggaagtgaccgtggcagttaccttgaacctgcagggattgagaatgatgctaccacaaggcatttggttgagatgctgtgggccatggatgagacccgcgctaaaattgtgatagcagctcaagatcgtgaagaccggaatcgcggaaagatttgcaagctggaggacaag

SEQ ID NO: 56308 - DNA, 514 bp, Oryza sativa
  Clone ID: PAT_MRT4530_58231C.1
aacaccacacctcaggtttcacccctactttccacgggcagcgggcaattccctctcgtgcctaggtgaatctaaaagccgcataggccgtcgtagggcctatccgaactccatcacgctcacccttgcctggatgcgtcaaccagaggaaagctatacttcaagttaggcagttacccattcccgcttgtggcaagcgctgtatgtcttccagtgtatcccacgaaccggaccttaattgccatgggtgcgaccagcaaaaccatgcacccacagcccaccattcagtcgcattttaattggataattatgaccaaagaaacatggtcggatgtcccaagcacgcagctcgtcatgatattaaaaggtctaatactacaattatcccatcaactgtgctagtgcccgcatgcgctgccgctccccgcgtcgtcgtcggccgaggaggagttgacaggtggagtcgctgagccctcctgttggcgagggagggacaaaggaggtcgggagagag

SEQ ID NO: 56309 - DNA, 1217 bp, Oryza sativa
  Clone ID: PAT_MRT4530_58232C.1
atggcaaccacggcggcggcgtcgccgccggcgatcgcgaccgcgctctccgccctgctgcggcgacagaggaggagaagcagccgttgcgtgggggcatcgcacgccagatgcctcgccgccgacgcgaatgctgaggcggtggcgccgagccggaggggaggccacggtgggacgcgccttgaggaggccgtgccggccggcgaggggcgctcgaggatcgacgcgtggatctccgcgaggctcgggggcggaggcgtcagccgcgcgcgtatccaggcgagcatccgcgccggcctcgtcgtcgtcaatggccgtcccgtctccaaggtttcacatatggtaaaaggtggagacattgtcagctgcacggtgttggagctgcagccactgagagcagagccagaggacatcccactggacattgtttatgaggatgaccatcttctcgttgtgaacaaaccggctcatatggttgttcacccagcaccaggaaatgcaaatggcaccttagtcaatgctatacttcaccactgcaagatttcaacatttacctgtttagcacgtaattcaattgatgatgaatgccctgattcttcagatgatgatattgatgtgtttgacatcgatcaatttactactggcgaagtaagttcagaagtccgtgaagctcttgtgcgtcctggtatcgtgcataggcttgataagggtacaagtggactacttgttgtagccaaggatgagcattctcatgcacaattagcagaacaattcaagctgcatacaatacgcagagtgtacatcagtcttacttgtggtgcaccgaatccgaattctggcaggattgaagttcctatagctcgtgatcctaacaaccggatccgtatgattgccactcctggatcaggccatagatatgcacgacatgccgctagtaggtgataagagaggtctttgctggtggtggatcagcactagtagagtggagattggagacaggacgaactcaccagattcgagcacatgcaaagtacctagggattccccttcttggggatgaaacatacggaggtaccaaaagcatggcattgtcacttttgagacccagaactccttcaagatatcattgtgatctttcaaatatgatatcaaagatagacaggccatgtctccatgccgcgttgcttggatttaagcatcctcactcaggaaagatc

SEQ ID NO: 56310 - DNA, 1551 bp, Oryza sativa
  Clone ID: PAT_MRT4530_58233C.1
atggcccaattacgagcaaagatgccacgcttcaagcctgagtacttgttcggtactgagggatttgtcctggagttgcgtacgatgtctttcctcataggattcgggactgcccctttgtatgcccagattcctcatgatcgtgatgaagagaagtgtcgggtcaaggtcaccttgaacagtaatcctgaagatatcccatcagtgatgttcgaggctggagggggaaactgtattcatgcttgtcaggaggtggcaaggattaccataggagagctccgcgaacgctacaatgatcagttggccgacaccgagtatcgctaccatcctcgtcaaccccagggaagtggtcgtggcagctaccttgaacttgcaggaattgagaatgatgctaccacaaggcatttggttgagatgctgtgggccatggatgagacccgcgctgagattgtgttagcagcccaagatcgcgaagaccggaatcgtggtaagatttgcaagctggaggacaaggtggatcgtttggagaaggaattagccgcattgaagggagaagcaccaccgcagaaggccagggttcgtcttaccgcaaggaagagagctctttttgtccctcgctaccagttggcatctaagtggtacacctctggccagagtaaaactattcgaatagccgtgcccgcggttatggctcctggtttggaatggtatattcctggtttggagatagaactttacagccgagattggttgttcagaatgatgccacgcttcaagcctgagtacttgttcggtactgagggatttgtcctggagttgcgtacgatgtctttcctcataggattcgggactgcccctttgtatgcccagattcctcatgatcgtgatgaagagaagtgtcgggtcaaggtcaccttgaacagtaatcgtgaagatatcccatcagtgatgttcgaggctggagggggaaactgtattcatgcttgtcaggaggtggcaaggattaccataggagagctccgcgaacgctacaatgatcagttggccgacaccgagtatcgctaccatcctcgtcaaccccagggaagtggtcgtggcagctaccttgaacttgcaggaattgagaatgatgctaccacaaggcatttggttgagatgctgtgggccatggatgagacccgcgctgagattgtgttagcagcccaagatcgcgaagaccggaatcgtggtaagatttgcaagctggaggacaaggtggatcgtttggagaaggaattagccgcattgaagggagaagcaccaccgcagaaggccagggttcgtcttaccgcaaggaagagagctctttttgtccctcgctaccagttggcatctaaggttcgtgtggtggaagaagaagaagctgccccagccccagtgaatcttcccgtcattaatgtaagtgatgatgaaggagaagagtcaaagcgcacccattcgaaggttgagtggggagctacccaagatgatgagatcgagccttcaatcaactccgatgcccggaagacctag

SEQ ID NO: 56311 - DNA, 451 bp, Oryza sativa
  Clone ID: PAT_MRT4530_58234C.1
tttcattcatgtccgaaaaccacttccgacatccggtcaaacatccgatgtgacacccgaaaattttcttttcgtgaactaaacaggaccgattgttaacagtgaaatttgcctgctatttgactgccaataagggtttcatcggggtttcagccgatgaggtatctggacattccatcggcttacaaggattacatccgaatggtttctactggattatattgttgttttcttgcattatcatcagccgattgcgtttatattgttatttacaccaagcgtcagaatctacgttagaattagagccgatagctcaaaaccctatcgctatcggttgggtcaaattgactagcacacccgcatctcattaacctttggaccttcactggagctaagcagatctctcagatcagtgtgtgtttttttcatcaacacctatgtagctgaaaaa

SEQ ID NO: 56312 - DNA, 330 bp, Oryza sativa
  Clone ID: PAT_MRT4530_58235C.1
gttcaagatagctgccacggtcacttccttggggttggcgaggatggtagcgatactcagtgtcggccaactgatcactgtagcgatccttgccatctcctgacaagcatgaggatagtttccctctccagcctcgaacatcaccgatgggatgtcttcacgattactgttcaaggtgaccatgacacggcacttctcttcatcacgatcgtgaggaatctgggcatcaaaggggcagtcccaaatcctatggcgaaggacatcgtacgcaattcctggacaaatccctcagtaccgaacaagtactcaggcttgaagcgcggcatctaa

SEQ ID NO: 56313 - DNA, 1026 bp, Oryza sativa
  unsure (1)..(1026): unsure at all n locations
  Clone ID: PAT_MRT4530_58236C.1
atggtattgttcatggcttggtttatgtggctgttttgggggattttggctcttttctggcttaggattccggacgttcccgggggaggtccgattttgcaaggagaagactttggaaggagttataagcggctagcaaggncaagctcctggtttggaatggtatattcctggtttggagatagaactttacagccgagattggttgttcagaatggttgggcctatgcaacacggatgccacgcttcaagcctgagtacttgttcggtactgagggatttgtcctggagttgcgtacgatgtctttcctcataggattcgggactgcccctttgtatgcccagattcctcatgatcgtgatgaagagaagtgtcgggtcaaggtcaccttgaacagtaatcgtgaagatatcccatcagtgatgttcgaggctggagggggaaactgtattcatgcttgtcaggaggtggcaaggattaccataggagagctccgcgaacgctacaatgatcagttggccgacaccgagtatcgctaccatcctcgtcaaccccagggaagtggtcgtggcagctaccttgaacttgcaggaattgagaatgatgctaccacaaggcatttggttgagatgctgtgggccatggatgagacccgcgctgagattgtgttagcagcccaagatcgcgaagaccggaatcgtggtaagatttgcaagctggaggacaaggtggatcgtttggagaaggaattagccgcattgaagggagaagcaccaccgcagaaggccagggttcgtcttaccgcaaggaagagagctctttttgtccctcgctaccagttggcatctaaggttcgtgtggtggaagaagaagaagctgccccagccccagtgaatcttcccgtcattaatgtaagtgatgatgaaggagaagagtcaaagcgcacccattcgaaggttgagtggggagctacccaagatgatgagatcgagccttcaatcaactccgatgcccggaagacctag

SEQ ID NO: 56314 - DNA, 2549 bp, Oryza sativa
  Clone ID: PAT_MRT4530_58237C.1
ggacttttttttttgtttgtaagagggaatcggttcgtgtgcttttcgttgggtcggaacatgtcggccccttggcgaacagcgagagaaggtggttcggcaacctgagattgtgcttgggcttgggcggcggcgacggaagccttatcgtactcagcttgtattgcttggcgccgcttggaatcgtcttcgccccttgcaaacccgtcaatgatgcgaagtaaatgctcaagcgtctgtgtctccttgttggcgatttttcttgtgagttcgcccttaagtagcccggccgaagcgacgtttatgacagacgcctcggttatgtcttgcacttggcaccgagcttgcgagaagcgaagcatgtactctcttatcgactcccccggcctctggtgaatgccgagtagatattgctgcgtctttggctcctcataggtgcctcgaaagttaagaacaaagacgtcgcgcaattgctcccatgagtaaatgcaattggctggcaaattgaaataccaagaacgggcgatgccgtctagagcgagatgtattatctttgtcttggtattttcgtcgccgtgagccgcttcgatcgcggactcataaatggagaggaattcctttgggttagtttcgcttgagtagcatgggatgggcgggaacttgaactggggcgggattggatgggtcttgattcccacactcaggggtagccccttttcaccccctgccctgttcacggcaccttgctgtgggtacggcgtggcgaagggcgaaatcacggcttgcgcgtgaggttgggccatggcattcggctgcccggctccgattggtgatgctagctgagctgccatggctgggtcgaacgttggttgtgaccatgtcatggcgacctagtttggtgcttggtttaatccgaagcctggcgttggtgcttgcggccgaacggctggtgcttgagctgcattgatgaagtcgaactgcggtccttgactccacggtgaagcccccagacctggctgattcgacggcaaccaactaggcgcaccttgacttgtattcccctccgggtgggccgaaggggctgtacctgaaatgctgtggggttggctgggttgctgaaggaaagcttggagctgcgcctgcagagccgaagccccttctgccattgtttgtggcacttggccaggcggttgaggatgtacttgggtagcgaccggttgagcttgcagttgcacgtgaggggccggatgcactgctgcggtcgaaggctgtccggcgaagtacattggcgcttgtgcaacttggaccgccttgccgccttgtatgcttgctgctgttcttgcatttggcgaagcatgtcttggagtcgtgtcatgttatgtcgcatggcttccatgtcggctttggtttgtgtctgggggtcagagttgacttgggcttgcacagcggcgagcgcagttggggccgctgccagctgtgacggagcggcttggggcaccagcagttggcttgtcggaaggatctccgccctggtctggagtgccctcgccgccgcagccgccttcgccatgtcaaccgtgttcggcacctgcacagaggtagcaggggccgaaggcggtagtgatggcgcagctcctggtttggaatggtatattcctagtttggagatagaactgtgcagccgggattggttgttcagaatggttgggcctatgcaatggtatttattaaatgccatttatgcaaatgagactatattatgccatcctttgttatcccttgcatttgcatatttgctgcgtggcttgttgagtatgtcatatactcaccttgcaatcattcatcagaggaggagttctacagtcatgccgaagatgccgtgcttcaagcctgagtacttgttcggttctgagggatttgtccaggagttgtgtacgatgtccttcgccataggattcgggactgcccctttgtatgcccagattcctcatgatcgtgatgaagagaagtgccgtgtcaagatcaccttgaacagtaatcgtgaagatatcccatcggtgatgttcgaggctggagggggaaactatcttcatgcctgtcaggaggtggcaaggatcaccataggagagctctgcgaccgctacagtgatcagttggccgacactgagtatcgctaccatcctctccaaccccagggaagtgactgtggcagctatcttgaacctgcagggattgagaatgatgctaccacaaggcatttggttgagatgctgtgggccatggatgagtcccacgctgaagtcgtgatagctgctcaagatcgcgaagatcggaatcgtggtaagaactgcaagctggaggacaaggttgatcggttggagaaggaattagccgcattgaagggagaagcaccaccacaaaaggccagggttcgtcttaccgcaaggaagagagctctatttgtccctcgctaccagttggcgcctaaggttcgtgtggtggaagaaaaaaaagctgccccagtttcagcggatcctcctgtcgttaac

SEQ ID NO: 56315 - DNA, 779 bp, Oryza sativa
  Clone ID: PAT_MRT4530_58238C.1
actgagagatactatatgcttgctatgattgggttctaaatgttcctcttaacacacattacagaacaatgctggaaatttttttttttttttttttttttttttttttttttttttttttttttttttgggaaatatacataggatttggaaaatctattgcaacactggggacagacatacatgtcctttatccattgggggtttcttaattattatttttaacgggtctcggcttaattacctccctgttggcatggagttgattgacaattcggcattggccccaccttggctaacggcactggtactgtaccttaaacgggctttttccaatgctagggcatcctttagctgggctaccaccatactcatcggtggcctttcactaaatgccttttttgggcccaacagcgctttgtccacaaccttccaaattgggctgatttcaaactcaccatgaagtcgcggatcaaaaattgccccaatatttcccatattaacctttttttttatgccctgcacaatatgcccatttgggggtatgaagggaggctcccctgttacaatttttagcaaaacttctccaaagctgaagacatcactgcttaaagtaaggctgcccctaaaacagcactctgggtcaatggtacctaaggggcccaccacaagggggctgtaatgggaactctgggccacacttttaaaatataacttttgacaaatcccaaaaaatctgggatttttttttgcgacggttgggggcccccccccccttt

SEQ ID NO: 56316 - DNA, 2556 bp, Oryza sativa
  Clone ID: PAT_MRT4530_58239C.1
atgagggagcagtttgggcttaaaccaaaggacactggaaacttgtatcggcatccttaccctgagtggttcaaaagggtccaattgcctaaccggtacaaggtaccagatttctcaaaattctcagggcaagacaatgtttcaacttatgaacatgtcagccaattcttggttcagtgtggtgaggcatcggctgttgacgccctgagggattttgagagtttatcacatcttgtacagaaggtgacgttgcacgagcaaaggtttgctgaggccaagaagaacttcaaaaatatcaaccatgtgtatccatatatgtatggttctgatgatgaagatgatgattccgaagtaacagcagtcgaatgggttagaagcaaaaaagtcataccatgccaatgggtgaggagttctggaaaggaagaaagatttgactttgacatcaccaaggctgataagatttttgatttgttgcttcgggagaaacagattcaacttcctgctggtcatgtggctatagaaggggcaaagatcaaatttgatgattcgaagaagccgatgaaggttgatgataatcctttccctgttaacatggaaaaatatcatgaagaaaatgatggtggttttgatcctcattgggaccgcgagtttttcagattttgctggaatgagggtatgaggctgccatcgattgaggattgccctggatgcagtgaagataaagattgccctagtcaacgggccgatgttgcttcagaagatggctacatcaccacctccgatgtggaagaggaagaggaggaagaagaagttgaggatgaggatggcgaagtctttggtcgtgatgacacaacgaactacagaaccatcattgtgcagcgggtgctcagcatctgcaacaacttgattctgttgattgcgatgtggttcctatgcaagcttgttcacttttgctggggcgtccttgggaacatgacaatgatgctacacaccatggagcatcattgccaaaccgtgctgcttatcgaaccaacccagatgagaccaaggaaattcaacggcaagttcaagaccttttggaccgcggcaagtctttggatgaacacatggatcatttacgtgctgtttttaatgttctacgcgatgcacggaattgaggtggatgagtcgaaaattgaagccataaggagttggccggttccccaaaccatcacacaggtgaggagctttcttggtcttgcaggattctaccaccgtttcgtcaaagattttagtacttttgttgcaccattgaacgagttgacgaagaaaggggtggtcttccattggggaaagacacaggagaagtcctttgacacttcgaaggacaagcttacgcatgcacctttgctacaacttccaaactttggtaagacttttgagttagaatgtgatgctagtggagttggcattggaggtgtcttgatgcaagatggtaagcctgttgcatattttagcgagaagttgcatggtcctgttttgaattattccacgtatgataaggaattgtatgctcttccgtgcgccgccgacgctccggtcgtcgtcactgctcggggaggtcaccgtcgtggtcgccaagccgccgccgtcctcgtccgccccttcgtcatcgccgttgaccgccggaacaccgtcgccgtcgtcgacccgatcgtctccgccgctttgacctcgtcgccggcgtcgtctgttgcttctccgccgttactttggtcaccgatgccgcgctataagcctgagtacttgtttggtaccgaaggatttgtccaagagttccgtacgatgtccttcctcataggatttgggattgcccctttgtatgcccagattcctcatgatcgtgatgaagagaagtgccgtgtcaaagtcaccttaaacagcaatcgtgaagatattccatcagtgatgttcgaggctggagggggaagctacattcatgcttgtcaggaggtggcaaggattgccataggagaactccgagaaaactacaatgatcggttggccgacaccgagtatcgctaccatcctcgtcaaccccagggaagtgaccgtggcagctaccttgaaccggcagggatcgagaatgatgctaccacaaggcatttggttgagatgctgtgggctatggatgaaacccgcgctgagactgtgatagccgctcacgatagtgaagaccggaatcgcggcaagatttgccagctagaagacaaggtggattgtctggagaaggaactagctgcattgaagggggaagcaccaccgcagaaggccagggttcatcttaccgcaaggaagagagctctattcgtccctcgctaccagttggcgccaaaggttcgtgtggtggaaaacgaagctaccccagccccagcggttcctccggtcgtcaatataagtgatgatgatgaagaggaatccaagcgcacccattccaagatcgagtggggaccaactcaagatgatggggacatgccgaacgagccttcaatcaactccgatgcccggaagacctag

SEQ ID NO: 56317 - DNA, 1235 bp, Oryza sativa
  Clone ID: PAT_MRT4530_5823C.1
taaaaagaaaaaccctaaaagtcccccttccctcccttgggccggcccggcccatctctccttccccctctctctctcttctctccccgcggcccactcggcctctccccacgcgcgcgccgctgacgggcgagcctgcccgccaccctcgctgacgggtggggcccacccgtcatccctgacctcccgccgctcccgccgtttccgccgcttcgcccgcgccctagcgccgccgccgccgcgaatccaccgcatcccgccgtccccgcgtgcaataaagtggggggaaatactccccgtgattccctcttcctttccccccatttttccctctctctctcggtttcaaacggacggatttgcccccgcaaatctcgccggcgccattgatggcggccggacctcccgcgccggttttctacctccccggccactctcttccccttgcaaccctatttaaacccttcccgcaccttcttcgtccgtttacacctctcggcgcccttcctcctcgccggattcgagctcgcgacgtcgctttctctctccgccgtcgccgccgagctcttgtacgccgccatcgtcgccccggaccgcctcccacctcggcgccgcctcctttggcttcgccgcatcctcgccgacctcgtccacctctccgtttcggtcgccgaccgccggagcgccgccgaccccatcaacccgagccgcgccaccgcctccctccgctccggccgcctccctcatcgccgccgtcgccccggggtgagccgtggaccgtcgcctcctttcccccttccctcccctctctcggccgccgctccgccgcgctggtggtcgccggcggcgaccaacggggcacgggggcgccgccttccgccgaccgcgccggtttagccgcactcgggcgcgccgagtgggccaccgtggaccgtggaccgtctcggccatataaggaccggtcttcgggcctctgttgcaaagcactaccgtacttccacatgtctagtgggtaaggcttagtttgtggctcagtaaggaataatgcacgcacgtcaggaacgcctgttgggtgatttccggtcttctccagctccaacaaccccgtggatgctttggattggttgcatgccgtggggaagaagctagacacggtgcagtgcagtgatgaggagaaagtcgtcttcgccgcccatcagctgcagggacccgcatctctctggtgggaccacttc

SEQ ID NO: 56318 - DNA, 1884 bp, Oryza sativa
  Clone ID: PAT_MRT4530_58240C.1
atggcaacaagcattgctaacaggtgtggatctgacactcatgtcgttaaagactgccgcatcctgaaacatcttgttctcttgtaccaaaaatccctcaaggacaaaaaatcttctgagaacccaaaatttgaagcccacttcaatcttacacatgaagagcgactgaggttgcaattttgcatgctgctgaccttgtccaactacgaccaactgcatatcatgaaacttccccaatgcagtgatctatttactgcctggttcgctgactctatctttgatgaggaacatttcccggcattagggggagacttcaagtaccagaaagaatgccagaaaattgattgggatgcccaagatcgtgatagtctgcaacctagctcggtggtgcacaatgctgagactagaaattcggaagaccatagacacattgtttcgggagatcacgatgagtctataagggttgatgaaattgtcatcaactactttgaaactagtgaatcttttgatagaagagcttcaattgtcgacattaatttttctgaacaaattgctgattacctccaagttgatccagaacctagagatgtattctcggctgtaatgcctactcctcgtggtatctttcctgtgggatacaaatgggttttcgtccggaaacggaatgaaaacaacgaggtgttgatggacgtagtgacagcatatctttatgggtcacttgattctgatatttacatgaaggttcctgatggaatcgacatcccgactcagaagatcaagaacttctctgaagacaagacaagtgacatagaaattcttgatctgctaggcatgatcgccgcctccgagagaacccgtgcgccaccgtcgccgccgcttgtccagccgtgcgccgccgtcgctccggtcgtcgccgtcgctcgggaaggccgctgttgggatcgccaagtcatcgccgtcctcgtcccgccctccgtttccgccgaggatcaccggagcaccgccgtcgtcgtcgacccgatcgtcgccgccgcttcatcctcatcgccgtcgccgtccggttgccgtccgccgtcgtttgggtcaccgatgccgcgctacaagcctgagtacttgtttggtactgagggatttgtccaggagttgcgtacgatgtccttcgccataggatttgggactgctcctttgtatgcccagattcctcatgatcgtgatgaagagaagtgctgtatcaaagtcaccttgaacagtaatcgtgaagatatcccatcggtgatgttcgaggctggagggggaagctacattcatgcttgtcaggaggtggcaaggatcaccataggagagctccgagaaagctacaatgatcagttggccgacactgagtatcgctaccatcctcgtcaaccccagggaaacgaccgtggtagctatcttgaacctgcagggattgagaatgatgctaccaccagacatttggttgagatgctgtgggccatggatgagacccgcgttgagattgtgttagcagctcaagatcgcgaagaccggaatcgtggtaagatttgcaagctggaggacaaggtggatcgtttggagaaggaactagccgcgttgaagggagaagcaccaccacaaaaggccagggttcgtcttaccgcaaggaagggagctctttttgtccctcgctaccagttggcgcctaaggttcgtgtggtggaaaaagaagctgccccagccccagcggatcctccggttgtcaacgtaagtgatgatgatggagaagagtcgaagcgcacccattccaaggtcgagtggggagctactaaggatgatggggacgagccgaacgagccttcaatcaactccgatgcccggaagacctaa

SEQ ID NO: 56319 - DNA, 657 bp, Oryza sativa
  Clone ID: PAT_MRT4530_58241C.1
tcactccactgagagaaccatgtccttcgacgtgaagcttttgtcatttcgacaacagctggcgccggccatagggaacccagggcgaagccactgatgccaccgaagaaaacaattaaagagagagttgtgcctaagaggaaagaaggcgaaggcgaagcggatatggcaggcgaagagcccgcacgagccgaagcaggagcggagctccatgaaggcacaggcggtagagagcaagcagcagcttcgaccatccaagtccgaaccacccaagcttcgactcaggcgacggcctccatcgtccctagcatagctcaggcgacgacctccatcgtccccggcacggctcaagcgattgccgaggctgaagcaacggcaacgcaaggggccgagatggaagccatgcatcagaacatgatacggctacaggacacacttagtcagatgcaagagcaacatcaagtctatgaggcagccctgcaagccaagacaaccctttcgacttcggcgagtcccaatccatcttcaacacccgcaacggcggcacaagcgattcaagcttcgaccgcgatagcccaagccaatcaggcttcgactcctctgctgctcctcttctgtaaattctacttcttcgtaaataaacctatattattataa

SEQ ID NO: 56320 - DNA, 1719 bp, Oryza sativa
  Clone ID: PAT_MRT4530_58242C.1
atgtctttcgtgattagtctcacacttctcaccctattaaatgatgatgttaataacttgtttagctcctggtttggagatagaactgtgcagccgggattggttgttcagaatggttgggcccatgcaacaggggtttacacacatatgctgtgctacaagcttgagtacttgtttggtactgaaggatttgtccaggagttgcgtacgatgtctttcctcataggatttgggattgcccctttgtatgcccagatccctcatgatcgtgatgaagagaagtgctgggtcaaagtcaccttgaacagtaatcgtgaagatatcccatcggtgatgttcgaggctggagggggaagctacattcatgcttgtcaggaggtggcaaggatcgccataggagagctccgcgaaagttacaatgatcggttggccgacaccgagtaccgttaccatcctcgtcaaccccagggaagtgaccgtggcagctacctagaaccggcagggattgagaatgatgctaccacaaggcatttggttgagatgctatgggctatggatgaaacccgcattgagattgtgatagccgctcaagatcgtgaagaccggaaccggggaaagatttgcaagctagatgacaaggtggatcatttggagaaggagctagcagcattgaagggagaagcaccaccgcagaaggccaaggttcgtcttaccgcaaggaagagagctctattcgtccctcgctaccagttggcgccaaaggttcgtgtagtggaaaaagaagctaccccagccccagcggatcctccggtcgtcaatatggtgcttactcgcagcaacgggaatggccccaaccccaacaacaacaacaacaacaatgcagagaatcccacgcttgctcaagtcctggctcaacaggcacagcttatgaatatgatgatgcagcaactccagaaccagcagaaccagggaaacaaccatgcgcctccccagaataagctggtagactttcttcgtgtgaggccgcctactttctctagcaccaccaatcctgttgaagctgatgattggctgcacaccatagagaagaagttggacctgcttcagtgcacagatcaggagaaagtctcttttgcttcacaccagctgcatggccctgcctctgagtggtgggatcacttccgccttaacaggactactgctgaacctatctcttggcttgagttcaccgctgctttttggaagacgcacataccatcgggagtggtgtccctcaagaagaaggagttcaggtcgctcactcagggttctcgcacggtcactgagtatcttcacgagttcaatcgtctggctcattatgctccggaagatgtgcgcactgatgaagagcgccaagagaagttcttggaaggactaaatgatgagctttcttacccactcatgactggggattatcatgatttccagaagttagtggataaggctattcgccaggaggacaagtacaatcgcatggagcagaagaaacgccggattgctcacttcaaggcacagcagggaaatagtcagaggccgcgtcttgctttgggaccccaatctatgccacagggaggttcttcgtttgttgttcatccgcagcgccagttcttcaacaacagcgcgggcaacaacatccgcaatcaagctccacgctctattgcagctccgtcacagcaatag

SEQ ID NO: 56321 - DNA, 1208 bp, Oryza sativa
  Clone ID: PAT_MRT4530_58243C.1
tgtttaagatgcactaatgcattattactcatatgatttgtgttaaatttaatcattatattagagagcagctcaaagctcaattgctcaaaaggagaggaggaaagatatcagaaaagctactataccatatcaacaagaaaagctggaaatcaaagtaggcacaagatggagacatatatgattgtgttgatgtgaatctacagacaacatttaaacatccggtgttcaaagaccataaaattcagatggaaccaagctcttttccagtagggttggatattaaatcgccattagaaggtgcagtcttgcaagcacatctgtctaccttcgactgtcctataggaacaattccgatactgcacaacaacaacatggacaacacaattctacaacgaattggcgagttggctagcaatgagtcacgaatgctggtaagtttttttagttaaatgcttgaactatatggggccggaattgaatactgggatgaggtatacggaatacggggatcaatatatgtctacgacccaaaggtgaagaaagatagtcaggaccttactgcatcatggatacaaattagtaacttgccaaaagctgcggttggagttgggataggtgttgggtcttgtgtgtctccaagccttagtggtgataactttgctaggttccatatattctgggataatgaagaactgaaaaaaggctgcgttgatcacaattgtcctggtttcgtgtaagttagtcgcaatgttggtcttggaggaagaatccatcccatctctatctataatggaccacaatatgtaataaatgttcttatttttaaggatccaaagactgaaaactggtggttggcatatggttcaaacaatacaccaatcggatactggccaagttcacaattctcttacctcaaagccaaaggtgattatgcattttggggtggatatgttcaaggtccgatagctgcttcagaccctccacaaatgggaagtggccatttcgcttctgaaggatttggcaaaacaacttttattaggaatattcaagttattgaagacaagaataacaagctggttactccaaacattcgtgattctgatcctttttctagtgatccaaaattatacagctatgatggttatggacttaatgataatggtatgcatgtatactatggtggcccaggcaagtatagctaaatg

SEQ ID NO: 56322 - DNA, 557 bp, Oryza sativa
  Clone ID: PAT_MRT4530_58244C.1
gaaaccaaaacccacccaccctcgcggtcgccggcgctcgaatggcccccaacgccgccgtcctggtgcggccccacatcgccggcgtccaccatctgcccaccggccggcgactgccccgtctggctcctccccaggcggtctcgccgccgttttcacggcagaagggatctgtagtggctgcgagtggacgtgtctgggcgagtgcgagtggttcgtttgagaaagatcgcattggagatgacgatgtgttagcttcgccgcagatagtggaggagagcaaagtcgatttgctgaagattctgaagagtgccaacaccattattccccacgtagtgctggggagcacaattcttgctctggtgtacccaccttcttttacatggttcacaactagatattatgcaccagcattgggattcttgatgtttgcagtgggtgtaaactcaagtgttaaggatttcattgaggctatacaaagaccagatgctatagctgctggctatgttggacaatttattatcaagcctttcttaggattcctttttggcactctt

SEQ ID NO: 56323 - DNA, 174 bp, Oryza sativa
  Clone ID: PAT_MRT4530_58245C.1
atgggccgtgggcgtgcacgaaaccggggaggacggtggtcgattggcgcggtagtgcaggctgcaggcttgcagcgcagcagcagtacgccgcgcgcccgcgccgctgtgcgtgcacggcgtcggtatgtacgcgtgcgttggctgatgcaagctcgtcgtaggcacgtaacg

SEQ ID NO: 56324 - DNA, 993 bp, Oryza sativa
  Clone ID: PAT_MRT4530_58246C.1
ctagacggcggccacggcaacgtggccgcacgggatagacgatgccgtggcgtacaggctcgccgccatgccgtcgcgctggacgcagaagctgccgtcgtcgagcatcatgatctcccgtaggccgtcccagatctcctggtccttcgccgccgccgccgtcctcgcgtgctctggcgcgtgcaccggcgacgacgcgttcgagccgcagttctcacggaggttgtgatggaggagtggacgtggctgctgcgcggccgtggacgccgggaagttgagcttggcgcgctggccgcggaactcgagcgcggcgacgtcgtaggcgcgcgcggcgtcctcggcggtgtcgaacgtgccgagccacttgcagacggcgcggcgcgggtcgcggatctccgccgcccacttcccccacggccgacgccgcacgcccctgtacctgctcccctcgccgccgctccgcctccgcggcctcctcttgcccacgccgcccgtcacgccgccgctggccaccgcgcccgtggtgcactccccctcatcctcctcgtcggtagccgcaccggcaaccacggtcgccatcgtcggctccggcagcagcgtcggcaccgtggtgtcaccggacacgacggagatgagcgcgcggatgaacagcgagtcctcccgctcgctgttggggagatggaacccgccgccgccgcgctccaccctcggcaccatggtggtgcgaaacggtgcatctccagcgagacgcacacggagacgacggctgctgggctcgcggggcacgttctcatcgtggggtgggaactggtgcggcacaagggagagacgggctaggacggcgctgtcgccgtcgccatcgacgtcccgccgccgcgcgcgtcccatcgccgctgccgcgccgcgcgccgtctcgtcgcctcgcgccgcgagcccgcgccttgcgccccgcgctgcgccgctgccgcctgctgtgccgcgcgccgtcgccat

SEQ ID NO: 56325 - DNA, 330 bp, Oryza sativa
  Clone ID: PAT_MRT4530_58247C.1
gcccagttactcctactcgcctcgacgccgcctgctcgcttcggcgcggcggcgccccacctcccctcctccgacacgacggcgcggcgcccttctgcggtcgacgcctccgtcctccaccctccctctcctccatcttcccgccatcctcaactacaagacgacactgcggtggcgatcgcatcgatccctctacctcatcacgacccggcgggggcgaccgagcggcggcggcggcagcggcgacggcggccggatcatgggactaggaagggaggtgtggggggtggttccgccccggcgaccgaggtcgaagcggcgctgttctga

SEQ ID NO: 56326 - DNA, 915 bp, Oryza sativa
  Clone ID: PAT_MRT4530_58248C.1
gcggagaacagtagtaaaggtttaagaatcctattaagaatggaacaagaaatgaagcaacgatcgagcaatgaaatgggtgacagatcatcgatcatggcatggaccagaagctgccgtcgtcgagcatcatgatctcccgtagagccgtcccagatctcctggtccttcgccgccgccgccgtcctcgcgtgctctggcgcgtgcaccggcgacgacgcgttcgagccgcagttctcacagaagttgtgatggaagagtggacgtggctgctgcgcggccgtggacgccgggaagttgagcttggcgcgctggccgcggaactcgagcgcggcgacgtcgtaagcgcgcgcggcgtcctcggcggtgtcgaacgtgccgagccacttgcagacagcgcggcgcgggtcgaggatctccgccgcccacttcccccacggcagacgccgcacgcccctgtacctgctcccctcgccgccgctccgcctccgcggcatcatcttgcccacgccgcccgtcacgccgccgatggccaccgcgcccgtggtgcactccccctcatcctcctcgtcgctgcagctcgagccagctgccgccgccaacaccaccacctcgcagtccacgccgatgcacccgtccaccccgcacctggcgcacgtagccgcaccggcaaccacggtcgccatcgtcggctccggcagcagcgtcggcaccgtggtgtcaccggacacgacggagatgagcgcgcgcatgaacagcgagtcctcccgctcgctgttggggagatggaacccgccgccgccgcgctccaccctaggcaccatggctgaaccaaacaaacctcggcgagttcggtcggtgtcacgcaaaagttggcgcgctatcgtgatccgggcgctgctgcggacgcgtggg

SEQ ID NO: 56327 - DNA, 846 bp, Oryza sativa
  Clone ID: PAT_MRT4530_58249C.1
atgcagcagcagcataaaggaaagagaagctatcgtgctggggccggggtgcgagtggaagataagggtcatcagctacaagctgatgagagctgtggctgggagtccgggccaatgaaacaaagctggggactactgggtgaggggtgggagaacccatataattcctgccggtttcgggcagggaggagaggacccaccaaactatgcgagaggccgatcgatatcgagtcggccggcgagaagctgaggacgacgtcccactccgtccgatctccgattgatccccctcaaaccggttcagctctccccgttgcgtcgctttcagccgcacgccgtgcctctcagcccatgtgccgaccgaccatcgacgtgctagcctcctccctcccacgggcgaactgcatgcgtgatccgtacatgcatatgcgcgcgtgggcgtgggcgtgggcgtgggcgtggcagatcgggcgggcgccgggggcgggagctaaagtggcggctgggagggcagcaggacgggagttggagcagcgacaatcaggagggtgggagctggagttgcggtggcggtcgacatccaagtcactccaaaccccacacacgcgattcgtcgtcaaggctaagctcagtcacacagtgttcgcgatgatcctggtggccgtagtggcggagctgctcgaggagtacacggtgctggtggcccgggtgctggagcagctgttcaacgacgcgcccttccctcgccggatgcggttcctcatgctgcggagcctccccttcgtgccgccgccgctgccccctccgccgccgtcgcacgccctccgcgtcaccacccgcggctga

SEQ ID NO: 56328 - DNA, 2745 bp, Oryza sativa
  Clone ID: PAT_MRT4530_5824C.1
aaatgattttaggctgggctcggggtgcatggttttgctagtagcacctcggccacataaggaccggtcttcgggcctctgttgaaaagcactaccgtacttccacatgtctagtgggtaaggcttagtttgtggctcagtctggttataaacaaaagtacacggatggagatggacgaagtcgggggtcgatggacatctgtcccggaggttccggccgtaggtggggttgggtcggtactcttgtctatggctaggatgggttggaaactatgtcatgtcttccgtccatatgccgtggtgaataagcctaacatacatcataacagcaaaagacttagatctgttaaggtcctatccttagtttctaatctgtctctcccctttgttttccctctctccctctccaaacctttgcaacagatggctgacaatgagaaaggcaataaggtcagaagtcaggacattggtacctcaagctcccgagtgaatgaagcaccagacaccagttgtgtgacactggtccaacacctgattaaccagaaccgattgcttatagagatactacagcagcatcagacgccaattctgaacctgagtcaaatacaacctcaagtgcagttggaggcagtccaagcactcacaccacaagtcagcatgccgccagcatcccgaaggacccatggtgacgtgccacatgttgactcaaaagaagcaagtatcatttgttttatgtgtgatgagcaagggcactatgcaagggagtgtcctcagcagaaaagaaaaacaccaatgcgaaccgaagatgaagtccgtaagatgatcattaccagcatagaatggcctccaccaggaatgacaaaacgtcagagaagaaataccttccgaggtgcaccacagttgacagagcatcttttagctaatggaggtagggtgtctgatagtgaagattcagatcaagtctcctcagatgatgaagatgagaagtctccccaaggtttcaaccagaataaaatggaacgaaaggcatgctctcgttgtggagaaatcggtcatgttgccagctcgtgtgccactacatgcgttcattgtgaggaagaccatccacccgacaggtgcccaacgagcaggatcacttgtttcttttgtgaaggaactgatcatgtaccaaaagattgtcaattcagttttctgctgacgaagaagatggccaaccaacccgccagttccaacggagagaagcatcaaggcaacacaaatcctcgtcaagattacagttttagcctaactccagtgccaggacagaggaatcaaaatgagaaaagaaaatgccgagtccggaaagatatttgttgcttcaattgtcaaggaatgggtcatttcgccgacaagtgcccaaaaccgagaaacatagctgccagcacctcagtccacgcaactccctgcaatcagaagcttgctcctcagcgaattgtcatccatgcatcccgaagcagtcctatagcccccgttgcaacagctccaactccagcgagtgcattaccacaaggtgtcaatgctcaacttcagccccagccaccagttgacaacacagaggccagtatcggcattgtacctttggatgttccagcacagcagccaagaaatcaaaattggaacaacccagcaggggcaaccaacgttcaagtacctacagtccagcaacagtgcaagttatcagaatttctaaaaactgagactccaacctttgccattgccgtcgatcctatggaagccagtgattggttgcgcacagtcgagaagaagctggggttggttcagtgcacagaccaggagcgggttgtcttcgcaactcatcagttgatatcacatgttcccgcaggaatgatcacactgagaaaacgagagttccgctacctgaatcaagaagatttgaccgtcacagagtacctgcacgagttccatcgtttggctcactatgcaccggaagatgtggaaaatgatgaagacaaacaagagaagtttctccaggcgttaaaagatgagatcgcagtgcaactactcctagaggaatatgaagattttgagaaacttgtggacaaagccatacaactcgaaagtgagcataatcggatgaagaactgtaagaggaggattgtcagcatcccagtatcttcatgtggtaaccaaagacagcgcactgagccacttcagatcatcggatcttctgttgcacatcaagagtttccgccccaagaagatggacacaatgcagacaacaacattagcaatactaatgatgatgataccaccaacaaccatgctccatgccccattagtgaccactcaaaccaagcgtgcaatgtcaacatcattcaccaaggtgtcgacgatagtatcgatgatggcacccaaaatgacaaccctagcaattgtgactctgagaaagactccaatggtgatagcaactatggtaccactgatgccaatgttagcaaggatttccaaccaccaattccaactccaagtcagaatgatcgtccccagacggatagctcagcaaagaagacgttgatttgctacaattgcaaagaaccaaggcattactcgagggactgcctgcaaccaaggcaaagtcgacctccacattaccgccaagttacacaaagcagacatcccaatcgtattgtggtcactggagcaaacaccgtacccgtgaggcctcgtgttaatcagaacccatag

SEQ ID NO: 56329 - DNA, 118 bp, Oryza sativa
  Clone ID: PAT_MRT4530_58250C.1
gggacccgtggttttaggctctagacggctatcatgcactgaatatggctgctgatggggcccgtctgctgcgaaagatacaccgagagatcttaatctatgctaccacaaaaaccca

SEQ ID NO: 56330 - DNA, 3163 bp, Oryza sativa
  unsure (1)..(3163): unsure at all n locations
  Clone ID: PAT_MRT4530_58251C.1
ctatacacatgaaccagaaccaaaattggaactagccatgaaagctccttaaagctccttcagttggagagcttctcttggtgttcatagcctgctcttgctgtgcacatgtcgtctgcagctcgttgcctggaaatgagacagacagactgtcactgcttgagttcaagaaggcgatcagtggtgatccacagcaatccctgaatttcttggaatgaaagcacccacttctgcagttgagaggacgtcttgtgcagggcgaaggctccactccgtgtcacttctctgaacctgacagattgtggtttagcaggcaatatctctccatcaattgccaacctgacattcctaaagtctctttctctgggtaaaaattcattctttggagaaatccctgcatcacttggccacctgcatcgcctacaaatattgagtatttccaacaacaatattcaaggtagggtacccaaggagatcttcaaccttccaacaataacggaaattgatttatcgttcaacaagctatttgggcaacttcctactgaaataggcaatgccaaacaacttgcatctttagagctttcctccaataagttattttggtgatataccaaatactttgagcaattgtgaaagtctagaagacatcaggttggatagaaatgcttttactggaatcatccctacttcattaggcaacataagaagcttaaaagttctcaacttgtctcacaataaattaactggatcaataccagtatcgcttggcaacctacagcttcttgagcaacttgatttgtcattcaaccatcttaagggcaaggtcccgaaggcgatcctgaacatgtcggtgctggttgcgcttagcctcagcacgaacagcttcagtggtgagctgccatcgggcatcggtagcttgctgcccaatcttaggcagattgccattggcatcaacttctttcatggagacatcccttcttcgttggcgaatgcttccaatctggtcaagattgatatatctgaaaataactttactggggttgtacctgcctccattggcaagcttgccaatcttacaaggttaaatcttgagatgaaccagctccatgctcgtagcaagcaagactgggagttcatggatagcgtagccaattgtactcagctacaaggaatctctatagcgaggaatcaaatggaaggagaggtaccaggttcattaggcaatttttcagttcagctacagtatcttttcttgggacagaatcaattgtcagggagttttccttcaggcattgcaaatcttcccaacctgataattcttggactagattacaaccgattttcaggttctgtaccacaatggctaggaggtctgaagacattgcagaaactaagcttgtctaccaacagttttacagggtatcttccctcctccctttccaatctgtcacacttgacagagattcttctagacacaaatcagttcattggaaacataccttaagctttggaaaccttcagttcctaacaacaatcaccattactgataacaatcttcatggtggtgtgccaaaggagatcttcaggattccaacaatagcggaagttgggtttgcattaaacaatctcagtggagaacttcctacagaaatagggaatgccaagcagctcatatatttgcagctttcatccaataatctgtcaggagatatacctaatactttgagtaactgtgaaaatttgcaacatgttgagcttgaccaaaataattttagtggaggtattcccacctcgttcggcaaattaattagcctaaaatttctcaacctgtcacacaataagttaagtggatcaataccagtgtcacttggtgaccttcaactccttgaacagatagatttgtcattcaaccatcttacaggtcaggtcccaactaaaggaatcttcaagaattcaacttccatgcaaattgatggaaatttggctctttgtggaggtgcactggagttacacttacctgaatgtcctatcacaccttcaaatacaactaaaggcaagctaccagtactactgaaagtagtgatcccattagctagcatggtgacacttgccgtagtgatattggtcctgtatttgatttggaagggaaaacaaaggacaaactcgatatctttgccctcatttggtagagaatttcccaaagtttcttataaagatcttgccagagcaactaatgggttctcaacatccaatttgattggcgaaggaagatatggttctgtataccaaggacagttatttcaagacataaatgtagttgctatcaaagtcttcagtctagagacaaagggagcacaaaagagcttcattgcagagtgtaatgctttgagaaatgtgcggcatcgcaatctggttcctgtcttgacggcgtgctcaagcattgattcaagtggaaatgacttcaaagcactggtatatgaattcatgccacgaggagacttgcataaattgttgtactcaactccacacgacgaaacatcttcagatctgtgctatatttcactagctcaaaggttaagcattgtggtcaatgtttctgatgcattggcttacctacaccacanccatcaagggacaattatccattgtgatatcaagcccaccaatattcttttggatgataatatgacagctcatgtcggagactttgggcttgcaaggttcaaaaatgattccagacaatcgtttggtaactcacatttgacctcttcatttgcgataaatggaaccgtaggatatgttgctccagaatgtgccggaggtggacaaatttcaactgctgcagatgtatacagcttcggagttgttctcctcgagatattcataaggaggaggcccacagacgacatgttcaaggatggattgagcattgcaaagttcacagagatgaacatccctgataagatgctgcagattgttgatcctcagctagtacaagtcattaacgatgaaaatggagcacaatgtgttctttctgtgttgaacattggactctgctgcaccgattcagccccaagcaagcgcatcagcatgcaggaggcggccgacaagctacacacaatcagggattcatatctcagaggatactgaagcagtcagtttc

SEQ ID NO: 56331 - DNA, 501 bp, Oryza sativa
  unsure (1)..(501): unsure at all n locations
  Clone ID: PAT_MRT4530_58252C.1
gcggtttcaccaggatgaaactctntccttctctctcatccccatttcatgcaaataatcattttttattcagtcttacccctattaaatgtgcatgacacaccagtgaaacccccattgtgactggccttattgagcagtttcgggagaatcgacaactggtaaactgattattttttttactagaaaaggatgcaccataagcatatctctaatgacttctgtacaaactcaactacgtaatataaacttttgctaatatgcgccctttctactgtcattttttttggaagtttaaggatattttattaatttcagcatctttgctatttattttctgtaacaatcatgatttttttaagaaactttaagaataattctaaccaaacctgtactggtagatatggctggggaataaaaagctgacaagaaatccaaccaccataattaaaatgctatttgtatgaattgtaaattatccatggcaagcactgactcatg

SEQ ID NO: 56332 - DNA, 702 bp, Oryza sativa
  Clone ID: PAT_MRT4530_58253C.1
atgcggcccttctcgaggcacgccggcttcttcgcgtcacttaagcaggtggaagaccggctggcggcggagcaacagccgccgccgccgccgccgccgccgccgagacagcctgagacgctgccgttctcggacaccatgaccgcgtcgcccctcttcctcggcccggcgacggacacggcggcggccgaccgccccggcggcgagagcagcggccccgcggtggacttcctcacgctctccaaagacgaggagcggttgcaggaagaaccccgaggcgccgccggcgaggacgacgacgaggacaacgacgagatcggggaggacatcgcgcggctcatggcgctgctcggcttgtcgccgccacggcgcggcctcgagggcggcggcggcgacgacgacagcggcgggtgcgattgcagcggcggcgaggggttcttggccaaggtcgtcggcgtggtcgggcccaagtgcgacaaggagaagaggagggtggacggctgggtagagcattacttcagcggcggcgagtgcagggagccggcgaggctggcgcacctgctgctcgccaaggcggcggcgtcgtcgtcgtcgtcgtcctgggagggagaagggcaccggggtgcttcaccttttgccttcccggccaccgtgaaggagttcttggatcgtgacgccccaccgcgctgcacggaggagtag

SEQ ID NO: 56333 - DNA, 188 bp, Oryza sativa
  Clone ID: PAT_MRT4530_58254C.1
gaaataaactttgcttgaactccatactgggggaagcattaaaacccccttacaaaatatctttaattgaaatttctccaattttcttccctatgaatgagggactggcttgctgtaacccattttcctccaaagttggcatcacagcaatgcattttatttcggcagcttttgcagccctcgtgcca

SEQ ID NO: 56334 - DNA, 465 bp, Oryza sativa
  Clone ID: PAT_MRT4530_58255C.1
acaaacaacaagttttttttttttggggtggtttttaataattgttcttttttttttttagggaagagttggtaaataaaatttactgtcaaattatggtgaggaatttttgttgatatccaaaaacaataggtcaaaaatttggggtgggaaaaaaaagctgattgggtggcaatccggagagctgaactccaaaaattccagtttcatatgctattggattgatataataaacctgttaaaccttttttagaagtatggttgtaaggggaaagttgttttccttggagcaaggtcattattgtctcaccccataatttaaagttcatgatggtcacgctggatcgaaaatgccttgagcttttgttacaattgcttcaggtttagtttattgcaaagcgctggaagtcgtaatacagtcacatactcgcatttactaggctcatggacaccatttagtttatt

SEQ ID NO: 56335 - DNA, 658 bp, Oryza sativa
  Clone ID: PAT_MRT4530_58256C.1
cccacgcgtccggcgggagctgccggggagcttccagagcgcgacgagcagcttcccgtcggggaaggcgctcatgtacttcggactcttcctcgccaccggcatcttcttcgtcttcatcgcgttcgcgctcttcctccccgtcatggtgatcatgccgcagaagttcgccatctgcttcacgctcggctgcgggctcatcatcgcatccatcttcgcgctcaaaggacccgccagccagttcgcccacatgacctccatggaggtacagctgctattattattattcttctcgctgtaaattgttttggtgattgttaaattgttctgtagtgctatatctcaattttgggagtagagacaatccaacacccaatttgacaccgcaaatttggtcgaattggcttagggcctctttgtttaggcttaggcttttaactcagctttttaacttatatgatttataagccaatggatagaaagtcgtaagtttaatgttggagtcatacctctacctcacaaaagccaaaaaaagcttctcaactcaacttttggcttaatagtgtagagtggcttatggttttcaaaaagccaaatgaaaaactggctatttggttatgcttagacttttttggctcataagctggcttataagcct

SEQ ID NO: 56336 - DNA, 2424 bp, Oryza sativa
  Clone ID: PAT_MRT4530_58257C.1
atgctcccctccggcctcgcagtcgctccgcctcccataagcctccacgccgccgcctcccgcacgggccgacagcggtgcctcattgtacttgataatgtgtggactgtatcaacatggaatgttgttagacatgctttacaagaggattgctgtagtagaatagtagtaacaacagaaattaacgatgtggctcaggcatggagtttttacaagtctcaacataatgcatctcacgtgatcaagaagcatattttgaagatggaaccgcttaatgacgatttctcaagagatttacttgttagtagagtttttggtgataaagacaaatgtcctgaagaactcaatgaagtttcatatgagatagcacgaaaatgtggcggtttgccactagcaactatcgctgcagccagtcttttattgagtcggccagacaaaccagatgaatggatctatgtacagaagtcgttgattccagatttgaggatacaacctacttccgaaggaatggcacaactactgaacaatagcttcaacaatcttcctcatcatttgaaagcatgcatgctgtatctgagtatatataaagaggatcacataatcaatccggacgatctggttaagcaatgggtagctgaagattttattgaaggtaatgtttgcatagacttaccatcagagctccaaggactgaagtatctcaggactctgcatattggtgcaatggtgacctttttgagatcagaagttgttcatcttccgccgttgctgcacttcagacttccacccaatctagggtactttgttgacgcagggagtgtacagagtattgaagaactgaccaatttgcaggatcttcaactcgcatgtcctcagatagccacttctgaccatattaagcacaacatgaaactgttgggttcaattattgggatacttaagagcctcaaatctctaacagttgttcctgtctgcttctctgaagattctaatgataacgaaaattcaagcattgccattttcttggatttcttagataaagttccccccccttgtagccttctgcagaggcttgagttgtttccacgtgtttgcgtcttccatagacttcccagttggatcataactattgagaaactctgtattttgaaagtagcagtcatggaactcctgaggaaagacattgagactctctcaatgctgaatgccctcactgttttctcactgtatgtccggacaacccctgcagaacctatcatatttgacaagtcaggattccatgttttgaagtacttcaaattcaagtgtagtactgtatcaagtctgagatttgatgaaggagctatgcccaacctccaaaggttaaagatggaattcaatggtagcacagtggagcaatacaaccttgaaaatgtgggcttcaagcacttgtcaggtgtcaaggtcagcgcaaaaatttgcattgccggtactagtgaagctaacagaatggctatagcctctgtactgaacaatgccatcaggcaaaatacaagaatatcaagtgtaatcatacggttcatcaacagggttataaaagatcttccgattgtccccacccctcacacggatcatatgcatgaaaatctgaggctggataagagtgtcaggtcctggcctacccagtgcgatggctgcaaggagcttggtgccggccacaggttcaagtgcgagcaatgcaactccaaggtgtactatgatatgtgctgcgcaacagcgcctcacaccctgaaacaccctctgttcccaggctccgtttttcggttcctccgaaagcctctggcctctgaatgcggtagggcctgtgatgcatgtggtgacctcatgcacggcttcgtctaccactgctttgagcgtggcctcgacctccacccacgctgtgcgaggctgcctgttcgcactgcaaacgtaaagggctatgtcatggagcttcgcagggtgtcggcttgcagcagatgttgcatttgcatgtgtggcaaggagggttatcgcaacaagttttggtcctaccgctccagtcaggaaggccaggacattaacgtgcatatggcgtgtttaaaagacttggcatcaaaatcacatgaaaccctaactaaactgtatgagatcctaatgggtgaatcacagtggacgccaacagaggttttaggcgaagatacatccgaccaattagttgtcagcagtgcggaggatggtgatcgtacgccactgagacaagatgaaattacagaggagtttcagcacaaggatgaagtatgtaatgttctagagcatggacgggaggaactccggaagaaagaaaccgataccagagtaaagatcgccaagacaaactcaatgtggttctcttatcatacagttgacaatttgacatgtgcattttga

SEQ ID NO: 56337 - DNA, 2871 bp, Oryza sativa
  Clone ID: PAT_MRT4530_58258C.1
atgctcccctccggcctcgcagtcgctccgcctcccataagcctccacgccgccgcctcccgcacgggccgacagcggtgcctcattgtacttgataatgtgtggactgtatcaacatggaatgttgttagacatgctttacaagaggattgctgtagtagaatagtagtaacaacagaaattaacgatgtggctcaggcatggagtttttacaagtctcaacataatgcatctcacgtgatcaagaagcatattttgaagatggaaccgcttaatgacgatttctcaagagatttacttgttagtagagtttttggtgataaagacaaatgtcctgaagaactcaatgaagtttcatatgagatagcacgaaaatgtggcggtttgccactagcaactatcgctgcagccagtcttttattgagtcggccagacaaaccagatgaatggatctatgtacagaagtcgttgattccagatttgaggatacaacctacttccgaaggaatggcacaactactgaacaatagcttcaacaatcttcctcatcatttgaaagcatgcatgctgtatctgagtatatataaagaggatcacataatcaatccggacgatctggttaagcaatgggtagctgaagattttgtaagtgcgacggaagggaaaagtttggatgaagctgcaaggaatcatttttatgagcttgtccataggggaatacttgaaactgaacatatcagctgtagtgatgaggttgtatcttgcacagtgcatgacatggttcttaactttatcaaacgcaaggcaatggaagagaattttgtcactgcaattgatcattctcagtctggtataagactagcagacaaagttcgacgactctctctccatttcggatattcaaaagatgcaaaggcaccagcatgtattagattgtcacaactacgatcacttgtgttttctggattttggaagtgcgggccttccatttcggagtttcatcttcttcgagttctattccttcatggtaaacatggcgaatttcttgacctcactagaattcgtgaactgtttctactgacttatttgcagattgaaggtaatgtttgcatagacttaccatcagagctccaaggactgaagtatctcaggactctgcatattggtgcaatggtgacctttttgagatcagaagttgttcatcttccgccgttgctgcacttcagacttccacccaatctagggtactttgttgacgcagggagtgtacagagtattgaagaactgaccaatttgcaggatcttcaactcgcatgtcctcagatagccacttctgaccatattaagcacaacatgaaactgttgggttcaattattgggatacttaagagcctcaaatctctaacagttgttcctgtctgcttctctgaagattctaatgataacgaaaattcaagcattgccattttcttggatttcttagataaagttccccccccttgtagccttctgcagaggcttgagttgtttccacgtgtttgcgtcttccatagacttcccagttggatcataactattgagaaactctgtattttgaaagtagcagtcatggaactcctgaggaaagacattgagactctctcaatgctgaatgccctcactgttttctcactgtatgtccggacaacccctgcagaacctatcatatttgacaagtcaggattccatgttttgaagtacttcaaattcaagtgtagtactgtatcaagtctgagatttgatgaaggagctatgcccaacctccaaaggttaaagatggaattcaatggtagcacagtggagcaatacaaccttgaaaatgtgggcttcaagcacttgtcaggtgtcaaggtcagcgcaaaaatttgcattgccggtactagtgaagctaacagaatggctatagcctctgtactgaacaatgccatcaggcaaaatacaagaatatcaagtgtaatcatacggttcatcaacagggttataaaagatcttccgattgtccccacccctcacacggatcatatgcatgaaaatctgaggctggataagagtgtcaggtcctggcctacccagtgcgatggctgcaaggagcttggtgccggccacaggttcaagtgcgagcaatgcaactccaaggtgtactatgatatgtgctgcgcaacagcgcctcacaccctgaaacaccctctgttcccaggctccgtttttcggttcctccgaaagcctctggcctctgaatgcggtagggcctgtgatgcatgtggtgacctcatgcacggcttcgtctaccactgctttgagcgtggcctcgacctccacccacgctgtgcgaggctgcctgttcgcactgcaaacgtaaagggctatgtcatggagcttcgcagggtgtcggcttgcagcagatgttgcatttgcatgtgtggcaaggagggttatcgcaacaagttttggtcctaccgctccagtcaggaaggccaggacattaacgtgcatatggcgtgtttaaaagacttggcatcaaaatcacatgaaaccctaactaaactgtatgagatcctaatgggtgaatcacagtggacgccaacagaggttttaggcgaagatacatccgaccaattagttgtcagcagtgcggaggatggtgatcgtacgccactgagacaagatgaaattacagaggagtttcagcacaaggatgaagtatgtaatgttctagagcatggacgggaggaactccggaagaaagaaaccgataccagagtaaagatcgccaagacaaactcaatgtggttctcttatcatacagttgacaatttgacatgtgcattttga

SEQ ID NO: 56338 - DNA, 171 bp, Oryza sativa
  Clone ID: PAT_MRT4530_58259C.1
atgcttcggccaatcgaccaattgactgatcaccaacaacgaatcacccataatttcaatagcatcggcttcaacttctttgagcaattgcaaccccttgagaactgcatcatattcagcctaattgttggttgcataagtccaaggtacaacttgaaccgagccgactga

SEQ ID NO: 56339 - DNA, 546 bp, Oryza sativa
  Clone ID: PAT_MRT4530_5825C.1
atggcggggaaaggtaggaagggcacggcggcgctgcttcgattgaaggtggtggaggcggcagcggggatggaaggaagctggcggtgccggctgggagcagaaggcgtcctttccccattccctgcatacctggaagctggcgcggtcaatggcgacatgaccatgggaggccggtgcggcgagcgggtggttgcacgagaggtcggtgcaggcaacggcaaagaggctggcccggccgacatgtatgaattgacaaggggcagggttgcttctgtttctcaccgggcagcgttgctgctgctgctcgtgttgttgctgtgtttgacgtcgtcgtctttagctgagagtgaaggaagaaggtggcagccgcggcggctgctggtgtcgccggcggcgacgtcgagccagcatagggccggtcagcagcagcagcaaatgagagttgatggtgcgaataagcccttcaagcagcctgcgacggcggcgagcttcggccgtcgacgtgttcccagatccggctggaatcccatccagaacagatga

SEQ ID NO: 56340 - DNA, 1059 bp, Oryza sativa
  Clone ID: PAT_MRT4530_58260C.1
atggagtccatggatcatggcggcggcggtgctggcctgctcgcggtggctgcggcgccggcgccggcggcggtgctgacgacgatgcatgggcgcgagctgtcgcactcctcctgctccttctcgtcggcggccgcgtcgctgtcgtcgccgtcgtcgtcgacgtcgtcgaggagctaccacgctgcgatgtccggcaagtcgctgtcgtgcgagagcatcccggagatcatggacaagcagtcgtccttctcctcctcggcgtcgtcctacgagagcttcatccagctcgaggcggccgacctcgaccgcatcaccgcggcggcggcggcgacgcgggcaccggccgtgcagacgatgatggcgtcgcacgagcagcagcagctcgccgtcgccggcggcagcggagggtatgatccgaagaggctcccgtcgtcgattttccggacggggtcgacgagctccggcggcggcggcggcggcggcgactggagcgtcgcctccaacgactcgctgttcagcatcaacctccgccactccggcgacctcagcgcgcgctacaacagcagcaaccacagcagcagcggcgacctcttctacgacgcctccggtggagggttccaccgcatcccctcctctacctcggccgccgccgccgccgccgccgccggcggcggcggcgggggcgggggcctttgcgtgagcggctcctgcgccaggtgcaccaccatcgccgccggcaagaacaggaagtccgtccggttcgcccccgacgccgagatcgtctccggcgagatcaccaacccctccgccgtcttccccacggaggcggcggcgccggcgacggaagggaaggaggcggcgaagagcccggacgcggcggcgcagggagggtggtgcctgttccgatgctgctggccgtcgccgccgtcggtgtggtggcctcgatgcgggtgcggcggcggctgcggcgtgttctgctgcggcggcgagaattgccggcgctatagtggtagtagcctctaccgctacctctatgatgtagcagactggaaatag

SEQ ID NO: 56341 - DNA, 2050 bp, Oryza sativa
  Clone ID: PAT_MRT4530_58261C.1
cccacgcgtccgctattctccaagaaaccaaaaaccacacataaaatataagtgacaattgttacttaatcccctctagcctccaaccctttagaacctacacatattagcccagtaatccctacaccctataaaaggagataggttataccctaaaccctagcccttttagttgtttatcgttttcttgctattttatggattttattgaaattggctctccctcttctctagtagagtctattgtattttagaggcaacctgtggtatttcaaggatcggataatcaggttgcctatctcggatttatttgcgttggagcaaggcaagttattattcctccccttgaacataattaccctatattctatatctctattctatgcattagtcattcatgattttgaatgcataacctgaacatatagcaaaccagatatatgctagatttgcttagcactgcctagttagtctgcataaaaatataatgaacttagattgggacagtacgtaggaattggttgatttccgggtggctagtactgtctcagtcgatatagttattaccaagtacttatgtcaaacgaacgagtacgaccgcaattctagaatggggacagaccttgcaaatggttctattgtaagtcctcgcgcaggaggcaattatatgccgcgaagggcaaatgtgacgtttaccgaggcgcaggttaagcttaatgggccagaccacacttgtttttcagttaataagtgtggtgatacaatggcttctaagggatggatagctgatagggtggtggactggttaaaggagaaacccacattgggaccaaaggagttgcaagagaaggtcaataagaagtataagatggatgtcccaaatttcagggtttttagggccaaggagaaggctatggacatgatatatgggaagtgggatgagagctatgatctattgccgacttacaaagaggcacttctgaaggcaatccctggtagtgttgttgagttggacactgaagagcataatggggatgtttgtttcaagagattctttgtagctcttaaaccatgcattgatggtttcctgcaaggatgtcgtccttacattgcaatggattcaactcacttgacaggaaggtcaagaggtcagttggcagctgctgttgcagtcgatggccacgattggctatttctagtggcctatggggtgattgaaatcgagtataaggagagttggacatggtttattcagaacttgaagcaagccataggtactcctacaggattggtcatcaacaccgatgcaggcaaagggatagagggagctgtagatgatgtctatccaggagtggaacaccgagagtgcatgagacacttgtggaagaacatgaagaagaattgggtgtcaaaaactaaggacttgcatattgtggatatgcatgagaaaataagacatatgattgttgcaaagtttgacttgagagccaatattgctagaaatatggagggcaagataatcccagccattaccaaagatcttaatgctcagagcaaggctatcaaggaccatgaagttcttagatgtggagatggcaccgccgaggtaactgtatccaccattacacatgcagtaaacttgaatgagagaacttgtagttgtagggcttggcaaataagtggaaagccatgtagccatgctttagctttcattgcaaagcttagcagacaagtacatatgggtgattttgtggatgaatgcttctccgttgagaggttcaggaaagcatatgcagggttattcaaccctatgacatccaagcatctgtggccattggttgatgtaggctacaaaatcaagaagcccaaattgaggagaaaaccagggagaccaagggtctctaagatgaaggcttctgatgagctaagtattgccaaggaggccttacagctagtcaaaagaggaaaaaaggcactcaagagagtagcagtgatgcacatgcatctaatgcaagcgcaggtggatgtgaaggggaaggggatggggaag

SEQ ID NO: 56342 - DNA, 477 bp, Oryza sativa
  Clone ID: PAT_MRT4530_58262C.1
atggcgatcagcctcgtgtcgcagccgcggcgcagcatccagatgtactgggcgcggaggaactacaggcgcctcggctcgccgccgtcgcggcacctccgcgtggcgcgcctcggcggcggcgctggcggcgcgcggagcacgaaggacgcccccgtccggcgcgggcgcctgtcgtcctggaacgcccgggcggcggcgcgcgcggtgctactgtcgccgctgcggctgatggcgaggatccgggacgcgtacgtcgacgcgatgctggcgctggccgccggaggcggcgccgcgctgtccaggtcgcggtcgcggagctgcgcggcgacggaggcggcggccgggctgctggacaggcgggtgccgcgggcgcgcctgcaggggagcggcggcgacttcgagcggcggatgatggagcacatctacaacatgatcgtcacgccggagcttcccggcgccgccgccagggcataa

SEQ ID NO: 56343 - DNA, 252 bp, Oryza sativa
  unsure (1)..(252): unsure at all n locations
  Clone ID: PAT_MRT4530_58263C.1
tggtggttagtaagatataggttntttgttgtcgtntccttgcntgaagaagcccgtgtccntggtagaganagtcangtgggtaagtacccgtccgtccccgtgtcgtccgtcgtcgtgtggctggagtggaattgtgtgtcaggtgtcacccgtgccgtgtgtgtgtcgtantgccgtggaacacacagaactccattctatagtgtagttagctcatgaattttcagccaaaaaaaaaaaaaaaaaaaa

SEQ ID NO: 56344 - DNA, 190 bp, Oryza sativa
  Clone ID: PAT_MRT4530_58264C.1
ccggccgggcacatcaaccagattaagttgccattagcgagcgctaatagctatggcagctaccattttgtgtcgattttgtatatacttgcgcgctatgctattatgcgagggagctatggcccaactattgaatcaatagcaaaccgcatgccatattctctcgcgacggaagattcagggattgtat

SEQ ID NO: 56345 - DNA, 687 bp, Oryza sativa
  unsure (1)..(687): unsure at all n locations
  Clone ID: PAT_MRT4530_58265C.1
atattatctgcaacaaaaatatggcttccaacaaggtagtgttctcagtgttgcttctcgccgtcgtctccgtgctcgcggcgacggcgaccatggcggagtaccaccaccaagaccaggtggtctacaccccgggcccgctctgtcagccagagaatgggctacccgatgtacccgctcccgcgtntagccgaggcgtaggtagaaacagccagatagcgtcaggccagtgggcaccggcccgccagccagccagacgcaaggtaccaggcagacgacctgctagcccggcaagctcgcccgccgtcagacgacaagctaggtgcaagagtgcngacggcgactcaagccacaatgctaggagacggcaatcatacaagaggacgcaacagagcagcccaccagactagatcagaggcacccccccaatagtccccgacgagtggtatccagccgagcatagcccggacgacgagggaccaagagacgcagcagcggcaagcgacgccatcccgagcagtacatgcaacgatggacaatccccaacaagcaggacggtggtgtctgctacatggcatggcgacgactctaggctactaaacnaaagccacatgtanaccacgctagtgcattgtaatgttggtgtgggttactaaaactacatacgtgtattcccctttggtttga

SEQ ID NO: 56346 - DNA, 150 bp, Oryza sativa
  Clone ID: PAT_MRT4530_58266C.1
cggcaagtacctgacaggaatgggaaaacaccatatccttacaaaatgcgtattcctaggaagtgtactgcaaaatgctatgagaaccgagtattacctgcccttctgaaaaaacatgttgtccagcttaccaaatttgactaccgggtt

SEQ ID NO: 56347 - DNA, 361 bp, Oryza sativa
  Clone ID: PAT_MRT4530_58267C.1
gggccccccctgaaaacatttttccccccccaaaagccccttttaaccctttttaaaaccccattttttcctaaaacccgggaggtcatcccaaatttcatccccaaaaaaacccggggggccccggaaaaagtatcttttccccaacccggatagccccaaaattcatcgggtgggcccttggccaaaaggttcccggttcatttgaacccccccaacaaaaacccccctaaaaggttgttgggcaaagggaaaaacctcccccaaccgggacccctcccttgcaaatttaagggccccacggggaaaccccctttccccgaagaatttttccaacacaaaacccttttttggttttttt

SEQ ID NO: 56348 - DNA, 449 bp, Oryza sativa
  Clone ID: PAT_MRT4530_58268C.1
gtgtaaaataaatttttttttcttttatttttttttaacatttaatttttgtgaccatacttgttttggggcggacaaggaaataagacgagagcctccctgaacctggcggaaaaaacgtgggcgcggaccttggtgacacagctggccagaaaccgcgagccggcgagcggagccggcgcccgcatgacgaacaccgacaagatgaggtcggagctcaccagcggaccacgcgacaacggcgcgccgcacccgaagtcgacgaagatgaacccgacctggctccagggcgacacgtccacggactcgaagtgaaacctaatctggaacgggtcggcgccgccggtgcgcccctccgcccagttaaagcactcgccggccatccgccggtttgcctcccggaccacgccgacgagcttgatcaccgacgacgccgccacctaccccgc

SEQ ID NO: 56349 - DNA, 662 bp, Oryza sativa
  unsure (1)..(662): unsure at all n locations
  Clone ID: PAT_MRT4530_58269C.1
gtttgggccccgggaaaaatttttcccgggggccacccgnaaaggggggggaaagnaaangggttgggggcctcccaannaaagaaaaccgggggcccgggcttttcccatttgggggggccggaaaaatcccggggccctttaaccaaaaagttttccaccccgccccttttcccaaaccgggggcgggggncccctcccgttccttggttgccctccggggccaaagggggactttccncccttaacttacccaanaaattgaaaaattttgcccgcggggnctccatcctcccgcccgttaccacntccgccgttcctcccaaaggcaaccnatnggccccnaaantggcnccccccnatttcattaaacctngggnccangntaaacntaaccanaaggaacaaaaccancntttaaaccaattntttaannacnttnggcannaaggncctngnttngggaaaaaaaaattttgaagaacttantgaaaccatngnngnntcccaaatttgtncggtaaacnaaataatccttttccccnttccaaaccttcctccgcctttgtttcctccntttaaatttgncgttttnttccaatatattganatcgttcccnttgntcccaatacacaatatttgtttcccaatttttggtncc

SEQ ID NO: 56350 - DNA, 1581 bp, Oryza sativa
  Clone ID: PAT_MRT4530_5826C.1
atggctgacaatgagaaaggcaataaggtcagaagtcaggacattggtacctcaagctcccgaatgaatgaagcaccagacaccagttgtgtgacactggtccaacacctgattaaccagaaccgattgcttatagagatactagagcagcatcagacgccaattctgaacctgagtcaaatacaacctcaagtgcagttggaggcagtccaagcactcacaccacaagtcagcatgccgccagcatcccgaaggacccatggtgatgtgccacatgttggctcaaaagaagcaagtatcatttgttttatgtgtgatgagcaagggcactatgcaagggagtgtcctcagcagaaaagaaaaacaccaatgcgaaccgaagatgaagtccgtaagatgatcattaccagcacagaatggcctccaccaggaatgacaaaacgtcagagaagaaataccttccgaggtgtatcacagttgacagagcatcttttagctaatggaggtagagtgtctgatagtgaagattcagatcaagtctcctcagatgatgaagacgaaatggaacgtaaggcatgctctcgttgtggagaaatcggtcatgttgccagctcgtgtgccactacatgcgttcattgtgaggaagaccatccacccgacaggtgtccaacgagcaggatcacttgtttcttttgtgaaggaactgatcatataccaaaagattgtcaattcaattttctgctgacgaagaagatggccaaccaacccgccagttccaacggagagaagcatcaaggcaacacaaatcctcgccaagattacagtttcagcctaactccagtgccaggacagaggaatcaaaatgagaaaagaaaatgccgagtccgggaagatatctgttgcttcaattgtcaaggaatgggtcatttcgccgacaagtgcccaaaaccgagaaacatagctgccggcacgtcagtccacgcaactccctgcaatcagaagcttgcttctcagcgaattgtcatccatgcatcccgaagcagtcctatatcccgcgttgcaacagctccaactccagcgagtgcattaccacaaggtgtcaatgctcaatttcagccccagccatcagttgataagacagaggccagtatcggcattgtacctttggatgttccagcacagcagccaagaaatcaagtacaagatgaagaacccgagccaataatacctttagcaccaaccattctctgcaccgacagcctcagcaaagaattgtcgtcgatggaagaagttgtgtctctccccgacctactccaggccgagccaagggcaatcaacctctggagggcgataccaagcagaagaccgtcatccgcttcaaacagcactcagaaggaagcttctcctgtgaatgatggcaatatgcagtcctatcacatcatcacagaaccaatcaaggatgatgcagtcactagaacaacgccagctatatctctccagaatcaaaatgagcagccacgcttgtggttttcagttcgctacttatcattgtgtaatcgaaagtttgcagcaatcatgtaa

SEQ ID NO: 56351 - DNA, 130 bp, Oryza sativa
  Clone ID: PAT_MRT4530_58270C.1
tttttcctgtccttcggcggcttcttttagagggatactctcgagagctctctgctttggatcagctagcatcctttcttattgtaggaccgactactaatgatgctagagcctgccatcctgatcctgt

SEQ ID NO: 56352 - DNA, 2253 bp, Oryza sativa
  Clone ID: PAT_MRT4530_58271C.1
atgtcctacacaaactgtttgaggagatatccagttagagccatctttccatacactaatgccatcctccgagcttctttggagaaaggatctccggaaaagtcactgacagattacaacagtatgcttcgtttcactgctttctgccctgattacagaacatatgtgctccttctcaaggcttgtgcaaaatgttcaaatatctatgctatcatggaaatccattcccatctcgttaaacttggcctgctatctaatcaacgtatagtaactcatctcttcaaattatacattgatcatggtcgcgtgatggaagcttgcaaactattttggctaatgctggagtggagtgccgaacccttttatggaaatttgatgctcatgggattcttgaagtgtggacagatagacaaggcatatcagattttcaagaggatgcctgtcaaggatttggtctcatggaattcaatgattgcaggtacagcaaggaactcgtgcctgaaagatgcaatgaatattttcagcaagttggtcaattcaggtctagtgcctgatggcttctcattctcctcagtcctatcagcttgtgctcaagctggtgcccgttgttatggtatgtgggttcatcaactaatggctgaactgggattggaaatgaaccatattttaagttcatcacttgttgatatgtatgcaaaatgtggaagaattgacgtggcaattgggatattcatgacaattaagagaaaccatgtctctgtatggaacacaatgattggtggcctggcagcacatggtcttggatctgatgcggtgatgttcttccgtgagatggaaagtgaaggtcttgttcctgatggggttacatttgttgcactcttgacagcatgcagccattccggcatggttgaagaggctcgtcaatactttgaagcaatgactacaaagtattctatcactccgaggattgaacattatggtgcaatggtggatactttgtcacgagctgggctactggatgaagcatatgacttggtaaagacaatgaatgtgaaacctgatgctgtgatatggagggcattactcagtgcttgttgcaggtaccggcaaactaaactaggtgagatcaccgtcaaggagatagcgttccagggcagtggtgactatacccttctttcaaacatctactcatctgcgaatagatgggaagattcagaggaagtatggaaagagaggaagaaaaagggaattaggaagagcaagggcttgagttgggttgagttagggaggagcacccatgaatttaaagctggtgaccgatctcatcctgacactgatggcatttataaagtgttgcatcggttatcaaacaaggccaagagtgaaggatatattccattgactgaactagtgtccaaagatgtctctgaggaggaaagagaagaaaaccttaccgtccacagtgagaagctagcggtggcatatagtatccttaagacaatgccaaggacagagataatggtgtcaaagaatctgcagacttgcagtgattgtcatgaatggatgaagatagtctcgaagacagatgctgctcctgtaaagactgttggtcagtactgtttggagaactacagaattgatttgtttagcatcatatcaacagttctgacaggaggcttctcacgccgctatgaaagaatcattgagtttgctgttcgggatcttatgggaggaaagaatagcactatccagacactcataaatcctgagagagagataaaaaatgcatatgttcatggtattagcagcagcatggtctgcaaacctgatataccaagatttcgggagtttatccctcttctattacagtatgttttgagtcgtcaaatggctgataaaccagttctgtgggtcgctcataatggacgtagctttgatgtaccatttctcatgtatgaattccaacggagtaaaatagagatgcctggtgactggctatttgtagatacacttccaattgcaaggcaattgattggttctgatggggaaaaactgaaatctgtatctttagacaatctgagggagcactacaagatcccattggcagggagcgctcatcgagcaatgcaggatgtgatcaccctctgctatgttctccagaagttgaccttcgagctgaaactaactgttcctcagctccttgagaggtcattccgggtttccgatctttcaatccctcgccctggaaaatga

SEQ ID NO: 56353 - DNA, 2064 bp, Oryza sativa
  Clone ID: PAT_MRT4530_58272C.1
atggaggccggcgcgtcgctgccgctccccgactccgcttcctctccccatctcctcttccaacgccagcggcggcggcggcggcggcgtgctgctcccgacggaacatctcctgcgcccgcgccgacccccgttagctggaagccccgcaggcctcgaggccgccaccgcggccgtctcctcggggcagcgccgtcgcggaggttcgaggatgtgctgcagacacaggactgcaacatactcctgcgccactagagtgaaaccaggcgctgggatgagctatctaaggtcttcgggtggatgcagaagcacgacatgctcaacattgcgtcatacagcagttacttcaagtacattgggttgagcggctaccctgcccgagcgctgcgagtgtacggtgatatcctagaaaacccgatagagatccatgtctcagtttataacccggtcctcgggtgcttggtaaagaacgggaggttcgatagcagcttcaagctttatgatgagatgatacgagaaggtctatcacccgatctgttcacctacagtacccttctgtcagggtgcatgaagttgaagcagggttacactaaggccatggaattagttaatgagctgaattcccgtggttttcagatggatagtgtaatatatggcactctcctggctatatgcgcgtcacataactgctgcgagaaggctgaggaatattttcagaaaatgaaggacgaaggacacaagcctaatctattccattatagctctctgttgaatgcatattcagaaaatgctaattatgaaaaggctgatctgttgatgaaagatttgaggtcctcagggttaacaccgaacaaggttatactcaccactttgttaaaggtgtattctaaaggtggtctctttgagaaggcaagggaactgctaactgaactggaagcttcaggcttcgcacaggatgagatgccttactgcatattgattgatggccttgtcaaagaacggaagatatgggaagccatgattctatttaatgatatgaaagaaaaaggtgtcaaatctggtaagaaatgtgttttgtcgatggaaaatcatggaattggcttcctattgatggcatataatgatgttcaatatctggttcctaacaacacattatctgtttactatggctatgcattcagtatcatgatatcagcattacatcgaggtggctatcgtgaagagtcaaaacaacttgcaaaagaatttgaggccaagaatgcaacatatgatctggttatgcttaatacatcacttcgtgcttactgcagcaccaatgatatggaaagtgtaatgatcatgcttaggaaaatggatgaatcgaacatatcgcctgatgctatcacatttaataccttaataaggtacttctgcatggcaaaggtctatcacctagcatacaagacaattcaagatatgcatacaaagggccatcaattgaatgaggagctttgttctgagataatgatgcagctaggagaagcgggttttccttctgaagcattttctgtgtataatatgttgagatatggaaagagaacagtgtgtaaatctcttcatgagaaggttttatgtatcttagttccagctggacttctcaaggatgcatacgtagttgttaaggacaattccgagttcatatctcgacgctcgctggggaattttgctagatctttcatggcatcaggcaacataaatttgattaacgatgttatgaaagcagtacaccgttcaggatggcgtattagccagtttggagttgaagttgaaaccccagatttctggatgttcaaactggatatctttgggaaagcaattcagcgatacattcagaaacctgataagaagcagctactgctttgcctcttggactggatgactggtcaaggctattctgtggactcatcatcaaggaacttgcttttgagaaatgcccaactctttggccaaaagcaacttatagctgaaatcctttccaagcagcagggagcatcaaggatcacaagtcaaaggcaccaaaaatag

SEQ ID NO: 56354 - DNA, 506 bp, Oryza sativa
  Clone ID: PAT_MRT4530_58273C.1
cgcgccgccccccgggcgctggaagccccgcaggcctcgaggccgccaccgcggccgtcgcctcggcgcagcgccgtcgcggaggtcaaggccgtccccgaccccgtcgccgcactcaccaggttcgaggatgtgctgcagacacaggactgcaacataatcctgcgccactacggtgaaaccaggcgctgggatgagctatctaaggtcttcgggtggatgcaggagcacgacatgctcaacattgcgtcttacagcagttacttcaagtaccttgggttgagccgcaaccctgcccgagcgctgcaagtgtacggtgctatccgagaaaacccgacaaggatccatgtctccgtttgtaactcggtcctcgggtgcttggtgaagaacgggaggttcgatagcagcttcaagctttatgatgagatgatacgagaaggtctatcacccgatctgttcacctacagtacccttcttgtagggtgcatgaagttgaagcagggtta

SEQ ID NO: 56355 - DNA, 2814 bp, Oryza sativa
  Clone ID: PAT_MRT4530_58274C.1
cacgattgtctccccactcccaatccaatcgccgcggcggaggcggcgggcgcgcgtgcacaccaggtgttcgacggaaggcctcgccgggtggggggcgaagatgtacgtggtgaagcgggacgggcggcaggagacggtgcacttcgacaagatcacggcgcggctgaagaagctcagctacggcctcagccaggagcactgcgacccggtgctcgtcgcgcagaaggtatgcgcgggtgtgtacaagggcgtcaccaccagccagctcgacgagctcgctgccgagactgccgccgccatgaccgcgtcccaccccgactacgcctcgctcgcggcgaggattgcggtttccaacctgcacaagaacaccaagaagtccttctcggagacgattaaggacatgtatggacatttcaacgagagatctgggctgaatgctcctttggttgcccacgatgtatatgaagtcatcatgaagaatgcttctcgcttggacagcgagataatttatgatagggacttcgattatgattattttggtttcaagactctggagaggtcttacctgctgaaacttgttgggaaggttgtggaaagaccacagcatatgctaatgagagtttctattgggatacacaaggatgatattgaatctgctatcaaaacgtaccacatgatgtctcagcgctggtttactcatgcttcgccaacccttttcaatgctggcactccaaggcctcaattaagtagctgcttcctcatctgcatgaacgatgatagcattgagggaatttatgatactctctcagaatgtgctaccataagcaaatgtgctggtggaattggtctctcaattcacaatattagagctactgggagttacattcgaggaacaaatggaacatctaatgggattgttcccatgctgcgtgttttcaatgatactgcacgttatgttgatcaaggcggaggcaagagaaaaggtgcatttgctatatacttggagccttggcatgctgatatttttgagttccttgatttaagaaagaaccatggaaaggaggagaatcgtgcaagagatcttttctatgcgctctggattccagatctgttcatggaaagggtgcaaaataatgaaaactggtcattgttttgtcccaatgaagctccaggtttggctgactgttggggagatgagtttcagaatctgtacaagaaatatgaaagagagggcaaggcaaagaaagttgtttcagcacaggcgctctggtttgacattttgaaggcacagatagaaactggaacaccatatatgctttataaggattcttgtaatagaaaaagtaaccaacaaaacctggggacaattaagtcttcaaacttgtgcacggagattattgagttcacaagtcccactgaaactgctgtgtgcaatctagcatcgattggtttaccgcgttttgtaagggaaaagggtgttcctatggagtctcatccggctaagcttgttggtagtaatggatccaaaaaccgatattttgactttgataaattagctgagattacttcaattgtcacaaggaatctcaataaaataattgatactaattattaccctgttgagactgcaaagagatcaaatatgaggcacaggccaatcggaatcggtgttcagggcttggcagacaccttcattttacttggcatgccatttgattcaacagaggctcagcaattgaacaaggatatttttgagactatttattatcatgccttgaaagcttctgctgaaattgctgcaaaagaaggtccttatgaaacttatagcgggagccctgtcagcaagggcattcttcaacctgatatgtggaatgtagttccatctgatagatggaattggtcagatttaagggagatgatttccaaagttggagttaggaactctcttcttattgctccaatgcctaccgcttctactagtcaaattcttggcaacaacgaatgctttgaaccatacacctcaaacatatacagtcggagagttttaagtggcgagtttgttgtagtaaacaagcatcttctccatgatttgactgagatgggtatttggtcccctgttctgaaaaacaagattgtctatgaagatggttctgttcaaaagatctctgagatcccagatgatctgaaagcaatttacagaaccgtgtgggaaatcaagcagaaaactattgttgacatggccatcgatcgtggttgttatatcgatcagagccaaagtcttaatatccacatggaccaaccgaactttgggaagctaacttccctgcacttccacgcttggtccaagggcctgaaaactggaatgtattatctaagaacacgcgctgctgccgatgcaatcaaattcacagtggacactactctcctcaaggataagcagcataatgcagaggaagaggatgtccagtctaaaatggcagaggtggtgtgttccttgaacaaccgggacgaatgcttggcatgtggtagttaggttcgtccaaatcacatctaccttatcctgacctatatatatgaccttatactgcccctaggctaaaccggcttatctttcgatctcaatagtggtaacccgtgtttggtgcactctgaaattctggattgaggctatcagacaagacttatttttagaacttcaccgttggcttgtatatttatgcttaggctactgtgactgtatctatctaaatctaaacacctagtgctttcattctattacctctgtactaaaatatgagaaattttagccat

SEQ ID NO: 56356 - DNA, 240 bp, Oryza sativa
  Clone ID: PAT_MRT4530_58275C.1
atgtgcccggcggtgacgggggcgacgctgttcgcggtgggggtgatgctgtgcccgttcccggcgctggtgccgtcgtgccggaacctcaccgccgtgctgccggagctatgggacctcctcgccgccgtctacttccacatccgcgacgagctccaccagctgctcgcccgccggccgccgccgcgccacggcggggcggcctggatccgcacccctgtggccgcggcggcggcatag

SEQ ID NO: 56357 - DNA, 609 bp, Oryza sativa
  Clone ID: PAT_MRT4530_58276C.1
atggaaaaccctaatgggtatgcccaacagttgaagtacctactccagcaagtagggtacttccaggagccggtctattgttttgagcggatcacccaaggatccttggagatctggaaggtgaaaatcttcctccgctaccagggagatggagaagaagtgctcactttccagattcgccatccccggatcacccttgcagctgctattcgggatgtgttccgtgaagccctcctacggctttgcgggataagcattcccttggatgtagccaacagctttggcatgcacccgtaccacgaagaagatgacagccggtgccgcctccgcctgactggagagcctgaagggagcagatgcacccttctctccgagctagcccacaccaccgagaatgcctacgagcaagctcttgaagaacttgacgaacttcgggatcgatatgccaatctggaatcccgctatcggcgcctagctcaagagcacacaaccttacttctctgccaggtgttcacgatagcccgctacatcgagagcgggaggatgggcaggatccgtcggaagcgtccgttggaagttgatcccctctcgcccccaccatctccatga

SEQ ID NO: 56358 - DNA, 219 bp, Oryza sativa
  Clone ID: PAT_MRT4530_58277C.1
atggcgttctataagtgcgaggtatatttgggaacagagatagattcaagattgattcaagttggtgtcccaactgataaattggtgaacaagtctcaggctctcagctggttgaagcagaacaacccagtaaaagttcagtttgacatatacacagcaggctaccagttttgtccagttcatcatgacaaatctgagaacatcactccatcaatatag

SEQ ID NO: 56359 - DNA, 445 bp, Oryza sativa
  Clone ID: PAT_MRT4530_58278C.1
tttttgagtgggctgccgcagggatgctgcatcggagtgaaggggctgtacaacgccggctgcaccaccggcgaccgccaggcaggactgccgctgcctcaagagcctgggcggcagcattaagtggctgaagctcgggaccgtcggcggcgtccccggaaagtgcagcatcatcgttggctttctcattagactctcgaccgactgcaacaaggtgaggtaaatcaatcctgcttggatcgatcgatcgagcttaacatgctagctcaataggagatgatcagctagtaaataagcacgtgcttgctacagcatatatgaacaaagtaattaaaatgacggggtgggcagacatgcaatgctgcaggtcttctgtgtatcagctgtatactgtatgttgcacgctgcctgtgtgcatgatctatcgtaattttcgtcagcatgt

SEQ ID NO: 56360 - DNA, 213 bp, Oryza sativa
  Clone ID: PAT_MRT4530_58279C.1
atggagaggatccaaaagggagaggatttccacgggttggattcggaccggtggacagcaccaacttctaatggtcgccacaacttcatgcgaactccgatttaggcatgcaagacgagtgccctcgtggccgggttgacgcgcaccacaagttcacggtgaccattggagacggtgtatcggttgctaaggcgcggtgtctttggacggttg

SEQ ID NO: 56361 - DNA, 410 bp, Oryza sativa
  Clone ID: PAT_MRT4530_5827C.1
atggcacagaccgagctcgtgctcctctttgtccacggccgcgacatcgacggtgtggcccaagggctcatgctccacaaggacaccggcatcgtcatcctctcaccggccaccgccgatgctaccaccaacaagaagaggaaccacgaggtagcatcatcgttgtatcttcatgggcaggggacttggcagttgatctgctcctggtggccctcagcgatggcaaccccgacggccctcaatggcgacaaccacaatgcatagcgcagccgcttccccttctcccttgtacaactccgtcgcttctcctctcttcctcgtctactcactgagtgggccctgcgcctgacgctttgcaggacaaggctctcgtagctcaaacaagacacaaagaaccaaactagagccat

SEQ ID NO: 56362 - DNA, 1390 bp, Oryza sativa
  Clone ID: PAT_MRT4530_58280C.1
aatgaaatcattttgttttgttattttgcaatcacaataaatcagaaatgttgtgtgacaaatacaaatatgtaggtgaggaaattatcactgttgaaagatcaacttggaaccgaagaccactttcaataaccgtagttacaagggaatcaataccagctaagacttcaagctgcattgttctgtagtcattttgaatagcatcaatcttattgacaacagtttggatctttggcttgtttttgtccagtaccacctgagcaataagcttcttgtaaggtaaatggtcatccctcaagttcaagtgtgcaatatgccctactgtctcaaaccctgtaggaacgattattccttctgggagtatttcctctaaaatctgtacagactgaacttttggtctgtatccggtatttgcaaaggcagtgttacctggacagtacagaagcatcagatactcattcattggccagtaattgtagaacaaggtcaattggcattgcacaagctcgtaggatgaagatccatccttgttagtttcatggtccaacacaacctgaaaagttggcttaactaaaactagtaaacagattccactgaaagagaaaatcttgacagcctccgggaggtcatcaaccctcttgttggcatagttctcgtccaggagcagcaaccgggtgggacctcctctccacgtgatcctcccgaacccctcctccccgaccaaccccatccactcgtcgccgtgctcctcttttctctctccgatcacctccaccacatatactttgtctttagtatcccttgccgtagccgcagcctcgccgcctccttcatccttcttccccttccgtttcctcgcggggggccgcgacatcttggcaaggttggggaattgcacgaagcctcgggcgttgaactcgcgggccagcttctctcggcgagccaccgcagttggcagggaggagggagtggcgaggcttggatggggaacggggaagaggaggccgccgtcgtcgccgggttggcggacgacgttgcgcacgcgaggccagttgaggaggtggccacggaggcgacgctcgaggggcgcacaggcggcggccgggacgcggagggcggcgagatcgaagatgcgggcgaaggagagcaggccgtcagtttcgccgggcaggcggcggccgcggcggagcgaggggccatggagactaggtggaacttgaggcgctcgcgaggaggaggtggagctactggtggtggtggtggtggtggtggtgtaggaggaggaggagagaggtttgaggcggaggtgaaggaggagacggccggaggtggggcggcgaaggcgagggaggaggcagtgcgaggggagatcgaggagcggcggcgccat

SEQ ID NO: 56363 - DNA, 1688 bp, Oryza sativa
  Clone ID: PAT_MRT4530_58281C.1
ttttttttttttttttttttttttttttttttttttttttttttgggtcaccaagtgaacttattccttgttaacaaatccgtgtagtactaccttacaattaacgattaatccatgatgcgtggaccatcttattacaactgggcctccaccaaatcccttttgaccaatcgtgtcggcccacacacacaaaacaaaagcaaaaaaaagcccattgagcaacgagcccatagaagtagtaacaataacaaagttcacatttcacaagcattttacttgtcgaaggccttgatctcctccttgaacgccggcaggtggtcgtcctcgacgcactgcgtcatgatccgggcgccggtcttgggcaccggcggcgcgccgatgatggcgacggccatgaacgggtagtacgcgaagggtatgacgtgcgacggcggcccccacccgtagtccgcctccaggaaccccagccgcgtccagtcggagacgaacagggaatcgtacgtgaagctcagctcgtacggatcctccctgaagtcggccaccgcccaccgcgcgaagtccgccggcagcctcgccttcgcctcccgtatcatccccaccaccccggccacgtccgccgcctccaccgccccgctctccgccaccaccgacaccgggtagaagcagttgccgtagaacccattgccgccattgccgccggcggcgggtgcgggccaggcggcggcgccggccatgaggtggcgggtgttggcgaagaagcagaggttgacgcgggaggtgggttccgggaggcggagcgcgcgggtgcgcgcctgccacgtcttggcgatggcgacgtcgaaggtggagcagcggtggccggtggcggcgaagtaggcggacttggccttgttgatgctgtccaggctcaggtcggcggtgacgtggcggagctggaacatcttcagctccggcggcgggcccgggggcagcttcggcgggctcgggatggcctcgcgggcccagaccgggctcaccctcggcctgtccagcccgcgggcgtagtcgcccaccgcgttgatgaactgcccggcccctagcccgtccgccatcgtgtgcaccgagatcaggcccaccacgaaccctccgcaactgaactccgtcacctgcatcatgagggggaggtcgagggggtggacaccgggggcggcgtcggggaggaggtcgtcctcggggatcatgagcgggtggtcgaggccgttcacgtcgtcgaggctgcagccggcggcggcctccacgaaccaggcgccctcgccggtgcactccacgcgggcgctccccggcccgccgccgccgtccacgaacctccccgcgaacgggtagtagtccaccagcgccttccccagcgcctccttgatcacccgcgccggcgacggcttggcgtcgccgccgctcggggcggcggcggagaagatgtgcagcgaccgcaccaggtggcggagccccaccacgcggtcgatgatggacagctccagcagctcgccggacgacggcggcgtcgccgcgctcggccgcacgaactcccggttcgtcctcaccaccgcgaaccccatgctgtctggctcagctagctactagctcctcctcgccgtcgtcgtcgtcgtcgccgccgtcgccggagatggagctcaagaccttcgaggtggtgg

SEQ ID NO: 56364 - DNA, 571 bp, Oryza sativa
  unsure (1)..(571): unsure at all n locations
  Clone ID: PAT_MRT4530_58282C.1
ttcccctccccttcctcctcccctcacctggagatagatcttacacagatcctcccattcctccttccttcccctccccttcctcttccctcacctggagatggagaaggccgcgccgcgcggacgcggtagtacggacgcgctgtgtgcggcgcagacgtgntngttgcaggggaagcacatgcgcgcagtagtaatggtagcggtagccggcagtagtgggattgatatttcgtgattgatttcttgagtagtagcagtagtagcggttgtgggattgttgcaagggaagcacatgcgcgcagtagtaacggtagcagcagccagcagtagttgggattgatattttgtgattgatttcttgagaagtagcagtagtagcggttgtgggattgatttcttgaagtagtaggattgatttcttgagtggttgtgggattgatttcttgagtagtagcactagtagcggcatccggcagcttgttttctctctctttatatttttttgatattttgtgattcactaagatgtataattttgtgaatcacaaaatatcaaaaaaaaaaaaaa

SEQ ID NO: 56365 - DNA, 946 bp, Oryza sativa
  Clone ID: PAT_MRT4530_58283C.1
atggcgtgccggcgccctgcgtggcactgcagcgccgcccgagccgctgtggcgctgccgccgccgcaccggcacgccagagtactggaggtagttgtgaggtgggtggcggagggaggccggcgcgaagaaggggggagagtcggcgaccacgggatggaggtggttgtgagagatggcaacggagaattcaccgtctggggttacatccgcgtcaccgttcccatggacacgcgggtcaccgcgggggacgaggacggggagtggagcactgtccccgcccccgcccctgccatccccgatggcggcggtgacggaggcagccctgcgccggcggcggagctccacatccttcgatctgaggtggggaggagcggcgaacttgcagtcggatccagtgtcgccgccaagctccccgctatggtcgccgcccttgagttccgcgagctcctccacactgacgacctcctgctccccggctccccatcgcctgcccctgctcgcccgccgcgacctcttgcttcatgccactggctcgacaacacttgcaagctccaccaccatgaccttcgccatcgctgtcgagcgacacgaggtccttcgaacctcctcgctaaggtccaagtcctccgatttgcccgcgatgcagaaatgacaccagtcgacgtcgcttgctgctccccgcgctagcgaaccccgcagcgtggccgtcaccgttgagggccattagctccatcgcgccgaaaccacactgttgtcgtcgtctccatgcgacgtggggcaaaggtcgatgcggcgccggtgcccatgcgaccggagggacgactggcgctcgcagccaagtccgtcgccgccgccgtaggtcccattgccggcgtgcggagggggagagggaggacaagggggagagagggctggcgccggctctgacgcacacatcgcccat

SEQ ID NO: 56366 - DNA, 600 bp, Oryza sativa
  Clone ID: PAT_MRT4530_58284C.1
atgtcgttttgcaatgatcacaagacacaccaccaaaggaattggatgtatcgcaactctgcgtacaatctagagaagcctaagccgaagcctaaggcaaagaaaaagaaaagaaatgtggagaagacggtggaggaagaggaacagctcaatcatcgtctcagacttgcggctatagagaacactaagaggaagaggaatgaggagagggagcttaggaagatggcaagggagtttgcggagaagaacgagcgtgcaaaggaacgggcgggaaaggtggatagggcacaacatgccaaggaggctgatgttgtaactgcctatctctatgggaacttggacatgaacatttgcatgaagagatcccatgatggattttacataatatatgtatatgtcgatgatctaaacatcatcgggacagtcaaggatattgaagaagcaaactcatatttgcaatctgagtttgaaatgaaagtcttagggtatagcacagagcctactaagagacattgtaaaggcatcaaggacattcttcgttatcttaaaggaagcaaggacatgggactgttctacagaaagaaccaagacctcacctaa

SEQ ID NO: 56367 - DNA, 513 bp, Oryza sativa
  unsure (1)..(513): unsure at all n locations
  Clone ID: PAT_MRT4530_58285C.1
cccttggtgcnggattcngccgagtttatttaaatacttaatataatagatctttgatggagtnttaccacatgcagcagtggcattaatacccnntncattaattaagttacacntatgncngnnccnntttgggnttcttttaatngnncntattnccgaatttctgtnccctgcngatgatccttgganatcatgttctnctnattnaccataggatgcntnccaaanatgggcccacnacacaaaaaatgcgtncctctgacattgtctgggccnatttggttggnggttctcccnttaattaaccanaaatganncattcttgtgccntantttcttcccntgcctggcttcnccttnanccattccccatcttccnccccccacnantcnncacactggggagaagtnttganccccatngcgccganctcncgggganaacctngggtggggcanctcccccgcgaaaccggnggatgaaactctcctgtttntcccgggcccccc

SEQ ID NO: 56368 - DNA, 2329 bp, Oryza sativa
  unsure (1)..(2329): unsure at all n locations
  Clone ID: PAT_MRT4530_58286C.1
cacatcttttttttttttttttttttttttttttttacggggaacatatcatataaatttttttcccaacatgaaattttaaaagttattaaagacaatggaattgcaccgtagcgtttagcacgggcatattactagtatacatagtgctaaaacgtataacaggcaagcaccaggtatttgacaaagaacatggcatatgcaggaaagtgtagttactttatacctggtatgaaattgtaataatatgctaatcaaatacgttggcacgccatgttctttgtcaactgaaattgtaatcatgagtgccctttgggtgctaaagatcatgagaagcagatgggtaactagctaataaaaatcttgctcagaaaaagatatgcaatactacttccttgtcaaatgccatcaccactagcacgttctgttcaatcctgtcaattcagccgttccatggattcatgaactctgatagtagggaaaaagggcaattcgactgattacgttggaagatgaacagaaccgctcatgtcgtcaccgagagttcacatggcaaggcagtgggaaaatgtagtacccaagaaagggcccaaatcaatttataccagagttgccaatcaagttgtgatagcgccactggaggtatcgtcaggtttgcccatgcactcagcacttgtcgacgccattgtgcaaagggctcttctgccccataagtttccaaatgccagcattgccgcccggccggcctcgagggatccaatcgccagaacgggtgtgcttgccgccttgctggagaactgagggattgtttgtctgatcctggttaccttcgcaacccttgttatggaggaattgttaccgtggtcggcaaaggcttgttcgctgcaatttgttgatgccaaagagagcttcagttcttgcaattttccgcaggtcgcacccttacaaaggtagtcacggaaatttgtcaatacacgcttctcttgctctttgaaaatgtctaccagattctcttctgtggttgagggggttgcatctggagcttttgaatcctggaaaactgcatcttgctcatcacacatcagtgcctcgggttccaggagacagaggcctcttgttacccttctgtatatcaaaagggtcggccctcggccattccagcctaccttcagcaataagaacttcgtttgagctcttctccagtgaacacatttgtttagctggttctttctgaattgcttctctatcatggtttgtggaagaaaggcaactatctactcgatttaacttttttctcttggtgttttccttcattcctgactctaaaagtgttgcgccagcttgtcttgacactagaattaaaagattacagagctcatttacatcttctatctggatgatgtctgctaaacttggcctgtaagtaactttatgtggtacatattttacgagacttttagcatcttctctagtaacagaagaagtgagtgaacacgaaagagcatgtgaagtgttgttgttaatggaatgatcgctcacagatgcagccaatgaaagactggagtcattttctgctgcatggaaaattatcacagattgtccaaccatcccacttgaagcaggattctgcacatgatgcgcatgaacagtgttcttctgggaaattctatctgcattactcttgtaattcttgcaacccgtacatctgcagttctctgaacagaaaacactagctttgaagcattcacagtatttcttcagacactctgttctcttgcatttacacccctttgtatgtttacccacaatatcaccctctgatacatcatgccctacctcacagttgtgggctgtgctattcgaaacttttggcataaaagctgcaggattccgttccaatgcaacattgatagcatcctgtcttgcattctcatgattaacattgttgcaacagtttgtgcaattgcaaccaatgcagtatctgcctttttcaaagcactcacaatacagcttcaggcatttcgaatacttgcagctgcagtttgttttccttgtcagtgtcacatcttttgtttcagaccacatttcgctagatggcttttgagaactcagcatccatgtgaaacatattcattatctgttctcctaattttctcaattaatccaagaaactcatatatgcattagtgcaaacaatggcaaacagtgaattataaaactttaaaggtatgcatcatactatcacaaatatgaagttatcaatttcaatttcttcaacaaagcattccccggtacgtcgtgggtgcgnagccgggaatttccgggaccg

SEQ ID NO: 56369 - DNA, 426 bp, Oryza sativa
  Clone ID: PAT_MRT4530_58287C.1
atggctggtgctgctgctcgtcgccgtctccttcgtcgacaacttaccgaagcacccgggttcgacgggatcgtcgccgtcttcctcggcggccccaacgaccgggagtcggtggcattcgcgtgctgcctcgccaagaacgacgacgccatcaggctgaccgtcacgcacgacggcatcgccaacgctgcatgcccaggacctaaagtcgtgactccgattgggcctgtggtggagcaggcccaatgtgacctgggtggcccacggttgataggccgggctgcgcactctaacaagtggtatcagagcccaagtggatcgagtgaagccccggaccggctactggcagtgggagaacccccaccgcccgccggagctgctggtggccgcctcgccatctccatcagcggctacggcgacagctag

SEQ ID NO: 56370 - DNA, 250 bp, Oryza sativa
  Clone ID: PAT_MRT4530_58288C.1
atgagagaagtcatgaacgacaacatgaattcatttgagttgaagtcgggggctactgtcagggttatagataagatgatccacggtataaaacggaccccttgggaggggttcgagacatccaattcaatcgccaacacacccaccaaaatttacgaagccagagtacgtggagtcaactcgccgggagatctcgtcgaatccctcgactatgatctcgtcggcaccatctgtttcgactactctcttt

SEQ ID NO: 56371 - DNA, 810 bp, Oryza sativa
  Clone ID: PAT_MRT4530_58289C.1
atggcaggaggtgacaacaactcccagaccaccaatggcggctcaggtcacgagcagagagccatggaggaaggcaggaagcaggaggagttcgccgccgacggccagggctgcggcctcgccttctccgtccctttcatccagaagatcatcgcggagatctttgggacatacttcttgatcttcgcggggtgcggggcggtgacgatcaaccagagcaagaacgggcagatcacgttcccgggggtggcgatcgtgtgggggctggcggtgatggtgatggtgtacgccgtggggcacatctccggcgcgcacttcaaccccgcggtgccggcgtacgcggcggcgcagatgctgggcgccaccctcgccgccggcacgctccggctcatgttcggcggccgccacgagcacttccccggcacgctccccgccggctccgacgtgcagtcgctcgtcctcgagttcatcatcaccttctacctcatgttcgtcatctccggcgtcgccaccgacaaccgagccatcggggagctggcagggctggccgttggtgcaaccatcctgcttaacgtgctgattgctgggccgatctcgggagcatcgatgaacccggctcggagcctggggccggcgatgatcggcggcgagtacaggtcgatctgggtgtacatcgtcgggccggtcgccggcgcggtggccggagcttgggcctacaacatcatccgcttcaccaacaagcccctccgggagatcaccaagagcggctccttcctcaagagcatgaaccggatgaactcctccacctaa

SEQ ID NO: 56372 - DNA, 183 bp, Oryza sativa
  Clone ID: PAT_MRT4530_5828C.1
aagtgttgcagcactgatcctcaaagggggatgcgacagtgcctgtaactgaattgatgatccgatagcacattagcttgtttagaagaatcaggtgctccatgtaatcacatgtaaactagtcatttcaatccaatgcattattcaaccatgtttattactactaaaaaaaaaaaaaaaaaa

SEQ ID NO: 56373 - DNA, 1380 bp, Oryza sativa
  Clone ID: PAT_MRT4530_58290C.1
ccgcccggcggggccattgcagttgtatccttcttcttcttcttctttctctactcacctgcatctgtagagagagagagagagagagagagagagatggcaggaggtgacaacaactcccagaccaccaatggcggctcaggtcacgagcagagagccatggaggaaggcaggaagcaggaggagttcgccgccgacggccagggctgcggcctcgccttctccgtccccttcatccagaagatcatcgcggagatctttgggacatacttcttgatcttcgcggggtgcggggcggtgacgatcaaccagagcaagaacgggcagatcacgttcccgggggtggcgatcgtgtgggggctggcggtgatggtgatggtgtacgccgtggggcacatctccggcgcgcacttcaaccccgcggtgacgctggcgttcgcgacgtgccggaggttcccttggcggcaggtgccggcgtacgcggcggcgcagatgctgggcgccaccctcgccgccggcacgctccggctcatgttcggcggccgccacgagcacttccccggcacgctccccgccggctccgacgtgcagtcgctcgtcctcgagttcatcatcaccttctacctcatgttcgtcatctccggcgtcgccaccgacaaccgagccatcggggagctggcagggctggccgttggtgcaaccatcctgcttaacgtgctgattgctgggccgatctcgggagcatcgatgaacccggctcggagcctggggccggcgatgatcggcggcgagtacaggtcgatctgggtgtacatcgtcgggccggtcgccggcgcggtggccggagcttgggcctacaacatcatccgcttcaccaacaagcccctccgggagatcaccaagagcggctccttcctcaagagcatgaaccggatgaactcctccacctaacctctatctagctaaccaccaagaaccctaattaattactactgccagtactactactgctactttctgttcgagatcgatatcgagatgcttgatcgatgcaccgcatcgcatttaaaagggaagagatggatgaactactatttgtgacgtacacatatatagtagtaatttaattagcgttagttcgttgtcgtctcggctacgtgccacaaggcctcctttgtaacgcaggaattttataggaattctgtgatgtgtgtttttagatgtggggattcctataaaattcgtgtggaacttctctgcctcctatatatgtagaacttaaaaaatctatgtatatgtgtgtgtggaatagtatgttttggaccacgtgataaaaaagcagagtgtttacttgcaaattatggttttcttttaaaaaaa

SEQ ID NO: 56374 - DNA, 2779 bp, Oryza sativa
  Clone ID: PAT_MRT4530_58291C.1
tccagctgaaaactaccttttattcatcatcttaaacacacgcgcagcgtagcgcgctgttattgctagtatttataaaacaacaacctattgaagtattgataggatcgtgtaacaattaccaatactcatctataaaacaagaaaaatactactacagaacgggacaggatgatgcctccgaggtgatatcttgcatcagccgattactactactatttgactattgtgtactcaactactgtactactactgttgagctggtccctgcagctgagtggttctggttcggtggttccccaaccaactgatgcggctcgcttattctctcctccgcgccgccaccagccatcgccaccggcgctccacctccacgccggccggatacaccgaaagcgacgacgacggcgaagcgccgccgcagctccgtcggcagcgacgagacggcgacgaggtgggccaggagcgcggcggaggacacggcggcgttgatgaggaacagcccgccgaagctcctcggcttcagccggagcttgtcgtcgccggtgctgttgctctttctcgcgcaggagccgggctcgccgaaccacttgttctcgatcctcgcgagcctgttttcctcggccagctgcacgatcgcgcgcgacacgtccggcaccagcggagaccccaccgggaaaacgttaaaaaaggcacaacagtattcctcggttatcgttggaccaactatggcgtagccttggcagtactgagacacaaagagcttcaagtagggcacttcgtcaataattgccgagacaccgccgttatctgaccccatgtttagggcttcggcatactggtcaattgtggcatatgcccttagtctgtcctcattgaatcccatgtcttttaggatgttttggacgaatgatccctgctgataacccacatagtcgcccttctttaattcgtttatcgtcggctgcagctgtcccactgtcaacatcgatgttaggtttgccgtgtagcttgtcgtgatgataagaacagtaaacacccatacgatgaccacgagcttcgacaggttgctctccaacttctccttttcatgcaccaggttcaccattttgtcataagataacatgttgtcagtgactggcacatactgatatgcgactggatacgccagcttcgccatgaccgcttggaacacgtctatgcagaagcctgtgatcattgccccgccggcgctcgtctggttttgttgccttcggatcgccacgaattggttgaatccgaccttcaccgggacggcgacgcggagcggccgcccgttcgccgactcgctccacccgatcgggacggccgccgtctcgcccggccataggatttgcttcagctcctcattgctgccactcttggggcggcgccgcgccatgtcctgggagaccccaagctccggcgtccagaaacccaccgtcctcgcgccgctgccgatgatgttgacaacctcgtacgccgacacctgccgctcgccgtcgaccagcctgaaccttccggccaggccttgaaacgtggtcgcgagcagagcatcgagaaacgtcgtcgtgttgtgttcttccctcgcgttgctgctctggtggagacatcgatcggctgcggcggcggctgcccatgccgtgtcgtacagccagagcagcgacgccgacgtgtgcgcgacgtcgtcgtcgtcgtcttcgtcgtcgatgcccgggttatcacggcgaaaccttgccttgagccgcctcgtgaaactcctgacttggcccgtcggctgcacgtacgggcgtaggctgacgacaccctgcatgtgctcgatgtcgtcagggctaaggccgtccgccgcggcgccgacgccggcggtggcgatccacgcgtagccctccgacatcatgccggcgacgctggcccggcggaagaggcgcgcgaccagggcggggagcatgtgcacgacgtagacccgccacggcatgatcttgacggcacggagcgccgcgtcgaggcggccatccgtcgcgtcggccggcacggacacgctgtccaccacgccacgcgcaccgtacgaccctgccagcagctgcccttgcacctggaacgcgtgaaccagcgccgggaggatgccgatgccgtagagcgagtcctcgtgaaggagcacggccgcgcgccacgagaacacatcgaggattgcggcgatgggcgcggcctgggaggcgatgctggcagcggtgcgcacgaagaagcgtgtcggcggtgagctcaacgccggtgaggtagtaggggagaaggagaggatcgggatgtggttgcggatcgcgatgccagcgaagagctcgacttcggctgaggtttgaggcccgatgatggcttcgacctgggcgttcttgttcatcaactcctcaagatacacaggcatgcgcaccggttcatcttttcccctaaatttggggtccatcatggacactccggcgtgcgctgccgcaaggacgtccccgcgcgagtccctgacgcgcagctccaccctcgcgcgcgcggccgcggcggtagaataatcgttggcgccgtagtagtcgtccaacgccattgaaatgcaggcgaggctcctccttccctcgccgccgctcgccaggtccagcacaactccgaccctcaccggcgccgccgccgccgccctactgatggcaccgcaaagcacgaccagaagagaaaggcgagctactgcagctgccgaagcagcaacgggaagcggccacctctccat

SEQ ID NO: 56375 - DNA, 167 bp, Oryza sativa
  Clone ID: PAT_MRT4530_58292C.1
atacatcctccccaaccactgcatccgggtcggcgaccttctcctcctcctcctccaagcagaaagcaataggcaaaaacaagcctataggctcacaaggaacttccctaaagccagctgatctagcgacacataagttaaccataactatatattttactcttacc

SEQ ID NO: 56376 - DNA, 685 bp, Oryza sativa
  unsure (1)..(685): unsure at all n locations
  Clone ID: PAT_MRT4530_58293C.1
cttgaacgcaaagctctttcaaaanccngtccctgacatttgtcaatccatccccacgcgtccggagaaaggcagctctcttttttcagatatagcgcgggaagttatcagaaagaaaggtaaaagaactgaggcaattgtagaagttagcatggcaaacacaactaacatgaaattgcaatacttggatgatcttatcatggaactggatggagatattgagagcctgaacatctccaagaaatctcaacatctgggtgaagattgcacagctgaaaatttgcgaatgatacttcacagggacatgcaaaacaatcatccggatgctaactcgatgtgggatttcggttggaaccgcatttctgaccttccgattgagagaaatgaagtcgtcagggatttggagaagaacatattgggtggcatgatcacagatgtagcaagggagctaattgaattatcagtacgccatgggtgctgtgcctgtgaggcctgagtgagtgtcagactgactttgaaacgtgatacaagagttgatttctgaaagtgattgatcttaggttagatttgtatatttaccaaggttttccagtaaatatatacatatatttttgcaagatttctgtacatagaggaatttgtacgtgcgttgaccagcagcattctctgcctgtcttgactacta

SEQ ID NO: 56377 - DNA, 302 bp, Oryza sativa
  unsure (1)..(302): unsure at all n locations
  Clone ID: PAT_MRT4530_58294C.1
cacgcgtccgcccacgcgtccgcctacggcgagagcctgcnagtccaagatcatcaacgacagggagacggggaggtcacgtgggtttggcttcgtcaccttctcctccgagcagtcgatgcgcgacgccatcgagggcatgaacggcaaggagctcgacggccgcaacaccaccgccgtggcgactggggggggcccgcctaagcccactggcggcgctcccgagagtggaggcgggcggatccgcntgctnccngcgctcccgttcctgccaggcccntcccaaggaccaacggccgtgg

SEQ ID NO: 56378 - DNA, 318 bp, Oryza sativa
  Clone ID: PAT_MRT4530_58295C.1
ctagagcgagtaggcagagcaacgcgcccgcgtggagcggagcaggggcgccagcggcagagaagagagcgactgcgggcgagcgcggcagcgggcggcggcgagcggcttgctccgctcaccgctccgccagctggcttcgccgcctccgatctggtggccgcttccgtcatctcctcccacctctccgttgtgggggatggcgccgacctctccaaggtcgggatcttcctcaactccacggcgcggcaccgctctgtaaatggcatatgggctctcgttcgagccctggtatataaatacacccggcgacgccat

SEQ ID NO: 56379 - DNA, 663 bp, Oryza sativa
  Clone ID: PAT_MRT4530_58296C.1
atggcaccggtgaaggtgtttggtccggccatgtcgacgaacgtggcgcgggtgctggtgtgcctggaggaggtcggtgtcgagtacgagctcgtcaacatcgacttcaaggccatggagcataagagccccgaacacctcaagcgcaacccgtttggtcaaatgccagctttccaggacggggatctgcttctcttcgagtcccgcgcggtaggaaggtacatccttcgcaagtacaagaccagcgaggccaacctactgcgggaaggcaacctgactgaggcggccatggtggacatcgggatcgaggtggagatacaccagtactatccggtgatctcgtcgatcgtgtatgaatgcctcttcaacccggccatgtacggtgtcccgaccaaccaaaaggtggtcgataatagcctggagaagctgaagaaagtgctggaggtgtatgaggcccgtctatcgcagaatacgtatttggctggcaatttcctcagctttgtggacctcagccacttccccttcaccttctacttcatggcgacgccatacgcttcactactcgacaagtaccctcatgtgaaggcatggtgggatgggctcgcggcgaggccctccataaagaaggtcaccgctgccatggttcttcccctgaaggcataa

SEQ ID NO: 56380 - DNA, 638 bp, Oryza sativa
  Clone ID: PAT_MRT4530_58297C.1
ccaatggaggagaggcgcgcggcggcgttagcggttgcgacaaccgctattctacaccaatcgcctccatccccaccacccccaatcacaccacgctggcgcggcgccggctgctggctgctggctgccgtctgacaagtagggattgccgccgccgacggaagggggggggggggggggttcagagctcccgtcttccagcacgcgtgcgcgcatgcagggcggctccgccgtaccaagcctcgcagtcgcagggccatggccccatccgtccaacttggaggagaaaccaagagaactaatgctggggtgaggagagacctaggagcactacctagaggatatgggaaggaactcaagattgcagtgccatggaaaccaggttttaaagcttttctgaatgtaactgacagaagtgtcggtggctattgcattgatgtatttgaggctgccgtgaagaagttaccacaccatctgagttataagtttgttgtcttcaacggttcttatgacgagctagtacagcgtgtgtcttcagggaactatgatgcagcagtgggggatgtaacaataactgccgagcgaaccatccatgcagacttcacgatgccatacacagagtctggtgtgtcaatgct

SEQ ID NO: 56381 - DNA, 441 bp, Oryza sativa
  Clone ID: PAT_MRT4530_58298C.1
aaaaaaacacacctctggggggggggccctagccttcaaaaccggttttaaaaaaaacttttacaggacaaaacaacaacccaattgcttgcaaattatttatttatttatttaggtattctttaaccccattgccaacttaaaagggttcccccccattaaaaaccccttgggagcccttggtttgggggggggggaaagcccccaacccatctcccttggtatgccggagcccctgagcccctttttttgagaagcgaaatgcctttgccaaaacaacaatggggaaagccccgaaaaaggaaccctttcccgcaagggggcttaccaaaaaagaaggggttgtcttaaaagcaaagaaaacacaaccttttttttgggccctttttacaaccacaaaagggggggggacaaaaaggaagtggccacaacaaaactttc

SEQ ID NO: 56382 - DNA, 457 bp, Oryza sativa
  Clone ID: PAT_MRT4530_58299C.1
gtgacggaatttttagaagtttgaagggaacaacatttaatgcgacggaatttttagaagtttgaagggaacttaaaaactgcctaaatcaataagaacaatggtgttacaataaaaaataataggtatacagtgactagactagagggcaattgggatttgggattgcttcatttatgatgtatccaaggccaactatgttgaacgaccccatgaatgagtaaaaccccacagctcaacattcttcagttcaaaatctggactatgagccaagcatgagttcccaaatgtctgacatgatccactggttccatgtaacaaatctttatcgaggcacaacgcgaaactcccaccttctccaaatgccaaagcatcattcaagcataagtagtagtacctgttggcaccggttggtctgaaaagcctaggttcaccataaatcgttgtgaatacaaat

SEQ ID NO: 56383 - DNA, 6049 bp, Oryza sativa
  Clone ID: PAT_MRT4530_5829C.1
atgccgcatggaggagtggataggtctctctctcctttgtttctcgggttcgtcccgtgccgggagcaatcgagctcgcgccgtcgtcctctctctcctctgtcgccgacgacctccggccggccctctccgctcgccgggaccgtctcccgcctcggcgtcgccttctccggcttcgtcgcatcgccgctgaccccgtccaccacctcgccgagctcgccgaccgccggagcgccatcgtcccagtccacccgagccgcgccgccgccttcctccgctccggccgcctcctttgtcgtcgccgtcgacccggggggcgcgggcgccgcctcccgccggctgcaccgtcgtggccgcctccgggcgcactgtgtggccgccgcgtggggcctagccgtcagccgcccgcgccctcgggtacggctgacgcgtggggcccacggcgccggctggtgtgagcccgggtgcgcccggtccaccgtggaccatgaggctgccgcgtgggccccactcccgtggacccggacaaatgaaggctacacgagctgcggcccggtagtcgagatgtcatggcacagggctggtgtcctgctgctaggggctcagtcctgcctacctgtcccggaggttccggccgtaggtagggttgggtcggtactcttgtctatggctaggatgggttggaaactatgtcatgtcttccgttcgtatgccgtggtgatggccgacaccctcaaccgtcgtggtctggacttgactggctttgttttagagctgcggggcttgtgcgttgtcctggggtatccgcatggagtggactaccagtgcaagaagcttccggagcaggatggtgacgatgcagagccccgcgccgcttgggaggtcaccgcggtgatcctcaccggctctcccgagaggacttctttggcaatcaccacggatggagattctttccccgccgcttgccagaacgccgcgctcctcgccatcggcactcttcaccagcgctatccggacgagctgtagcactcgccctaccgctaccaccctcgtcgaggaggagcccgcgattacgccaccttcagggatgctagctcggaggatgacgctaccatcatgtacctggcgcgcatggtggaggagtacgacgcggcccgtatcgacttccatcatatggtgcgccgcgggttggtcgagaacaacatgaagatcctggagctgcgtcaggagaatttgcagctgaagaaggacttggacgcggtggaggcacagttgtgtcagctcaagatcgcccagggagaggtctgtcgccccaagcgtcgccgcgtctgccgcagcctgaagatcactgcccacaagagtacctccaggcctgagctggttcgtcagtccttggcatggacttgcttcgtggagacccctcgcgcggagcccgcgcccttggttcctcaggaggaggaagcctctggcgttggtagcacggaggatctctctctgtttgctagttctgtgtgggattttcagatggtgacaaccaggagaagcgctgctactggtgactggtgagggcagtcatcctgaaggcagcaaccacaacaaccatggcagcccacctccacctcctccccagccaccaccaccgccacaagacaccaaccccatcctcacccaaatcctcgcccagcaagccaacatgatggttgctttcctccaccacatccagaatccgccgcaacacaatgctccacccccaccaccacccccgcagcattctaagcttgccgagttcctccgcatccgcccgcctaccttctctagctcccataaccctgttgatgctttggattggttgcatgccgtagggaaaaacttagacaccgtacagtgcaatgatgaggagaaagtcatcttcgccgctcaccaactgcaggggcccgcatctctatggtgggaccacttccaggctacgcagccagagggacagcctatcatttgggcccgtttcgccgccgccttccggaggacccatgtgcccgccggagtcatggcccttaagaagagggaatttcgggagttgaaacaaggcaactgctccgtgatggagtatttgcacgagttcaataatttggcccggtacgccccagaggatgttcgtgaagatgaggagaagcaggagaaatccctagcagggatggaccctgagctgtctatgcgtctggtctccggggactatcctgatttccagcgcctagtagacaagagcattcgcctggaagccaagcacaaggaattggagtcgcacaagcgtcgcttggcgaatttccgcaaccaacagggggctaaccaaaggatccgctacaccaatccctatccagggggatcctcctcgcagcagcagtagcaacaacctcgctccgcgccccgacctcaattcgtggtgcgcgtcctacagccacagcagcaacagaatcagcaagggacccgtgcaccccaccctcctgcaccagccgtgcagcctggacaaggccgcagggatgctcaaggtcaacagcgtctgtgcttcaactgcttcgagcacgggcactttgcggataaatgcccaaagccgaggcgccaacaaggtcaagcgcctccccgccccaacaacggtggtaaggatgtcactcggggccgtgtgaaccacgtgactgccgaggatatgctgacaactccagacgtcatcgttggtacgttcctcattcattccatccctgctaccattttgttcgactctggagcttcccactcatttatatctgtgccattcgtggggagaaatcagctgggggtagaaaggcttaggaaccctctgctcatcaccacccctggaggggttatgacagcaaagtattatagccctgccgttcctatagaaatccagggaattcctttcccctcggatttgattcttctagacaccaagaacttggatgtgatcctcgggatgaattggttggctcaattccaaggagtagtggattgcgcaaggcgcactgtcactctgtatcggggccctgatcaaccggttgttttctttgcacccccaacttccgccggcagttcagtacttcatcagctaggattgccagaaatacccatcgtcagtgagttcggagatgtgtttccggaagaactacccggtatgccgcccaagcgagagattgagttccggatagatcttgctccaggaaccactcctctgtacaagcgaccctaccatatggcagcaaatgaactggccgaagttaagagacagttggaagagttgaaagaaaaggggtatatacggccgagcacttccccctggggtgctcccgtgatttttgtggagaagaaagacaagacaaagagaatgtgtgttgactacagagctctcaatgaagttactatcaaaaacaagtaccctcttccccggatcgatgatctgttcgatcagcttaaaggtgccactgtattctccaagattgatcttcgttccggatatcaccagttgcgcatccgtgaagaagatatcccgaagaccgcattcaccacgcgatacggactgtatgaattcatggtaatgtcattcggtctaaccaatgctcctgccttcttcatgaacttaatgaacaaagtgttcatggaatacctggataagtttgttgtggtctttattgacgacatactggtgtactcacaatcagaggcagaccatcagcagcatctccgtttagtgttgggaaagctccgggagcaccaattgtatgccaagctcagcaagtgtgagttctgattgtccgaagtcaagttcttagggcacgtgatatctgctaaaggagttgctgtggatcccgaaacggtgaccgccgtcactgattggaagcaacccaagacagtcactcaggttcgcagctttttgggtttggcaggatactaccaaagattcatcgagaatttctccaaaattgccagacccatgacgcagttgctgaagaaggaagaaaaatttgtgtggagccctcaatgcgagaaagcattccaaactctcaaagaaaagctggtttcctcgccagtgttaatcttaccggatactcgcaaggaattcctggtgtactgtgacgcttcacgccaaggattggggtgcgtgttaatgcaggaaggtcatgtggtagcctatgcctcacgccagctacggccccatgaaggcaactaccctacccatgatttggagttggccgctgtggttcatgctctaaaaatctggcggcattatctcattggaaatcgctgcgaaatatataccgatcataagagtttgaaatacatcttcactcagtcggatctgaatcttcggcagagaagatggttagagctcatcaaggattatgatgtgggaatccactatcacccttgtaaggccaacgtggtcgcagacgcgctgagtcgaaaaagccgttgcaacactcttggcgtccgtggcattccacctgagcttaatcaatagttggaagccctgaacctaagcatcgttagccatggattcttggctacactggaagccaagcctaccttgctcgatcaaatccgcgaggctcagaagaatgatccagatatgcatgggatcctcaagaatatgaaacagggtaaagccgttggtttcatagaagatgaacacggaaccctatggaacggaaatcgtgtatgcgttccaaacgacaaggaacttaaacagttgatacttcaggaagctcacgaaagtccttattccatccaccctggcagcacgaagatgtacttagacttgaaagagaaatactggtgggttagtatgaagcgggaaattgcagagttcgtggccctttgtgatgtgtgccagcgtgtcaaagcaaagcaccaacgaccggccggacttctccaacctctccaagtaccagaatggaaatgggatgaaattgggatggatttcatcaccggagttccaaaaagccaagatggatatgattctatatgggtagtcgtggatcgactaaccaaggtggctcggtttattcctgtgaagaccacctatggagggaacaaattaactgaagtctacttcgctaggatcgtgagtctccatggcgtccctaagaaaattgtatctgataggggaagtcaattcacctctcacttctggaagaagctccaagaagagttgggtacccgattaaatttcagcaccgcgtatcacccgcaaaccgatggacagaccgagcgtctaaatcagatcctagaagatatgctccgtgcctgtgttctagattttgggaagacctgggataagagtctcccctatgccgagttctcctacaataacagctaccaatccagcatacaaatggcaccttatgaagcgttgtatggccgcaaatgccggacaccactattgtgggaccaagttggggaaagccaagtgttcgggacggatatcctgagagaagttgaagctaaagtcagaaccattcgggataatctaaaggtggcacagtcccggcagaagagttatgcagataaccgacgccgtaacctggaattcgcagtggatgattttgtgtaccttcgggtcacgccattgcggggtgtacacaggttccagacgaaagggaacctcgcacctaggtttgtgggtcctttccgcatcattgctcgacgcggagaagtcgcttaccagttggagctgcccgcatccttgggcaatgtgcatgatgtgttccatgtgtcgcaactcaagaaatgtcttcgagtgccgtccgagcaggccgattcagagcaaattgaagttcgcgaagacttgacctatgtagagaagccggtgaaggttctggacaccatggagcgcaggactaggaaccgggtaatccgtttttgcaaggtccaatggagcaaccacgccgaggaagaagctacctgggaacgtgaagacaagctgaaggcagcctatcccgatctcttcgccagttcttccgaatctcagggtcgagattccgtt

SEQ ID NO: 56384 - DNA, 567 bp, Oryza sativa
  unsure (1)..(567): unsure at all n locations
  Clone ID: PAT_MRT4530_582C.1
ccttggctgcaggattcgncctagctcntgccgaattcggnangaccacatcactcanncagctnnttnaatctccgaccatntcggataaatgcggcnactgcgaccgtgntgacaananccagtgcgtgaagaaaggtaccaactatggggtcgtcntagttgaaccgaaaaaaccacntcnaggangtcgccgccggnganganaacggngggtgcaagtgcgggnaccanctgctcctgcaccgactgcnagtgcggcaagtgaantcnccaancaaccgaacactccccgccggggagtcacctaccttaattangtccacnataaaaaccacccnnatnaatgtggtttgtgtnttttgctgatnaangcngaattaaacccgcgtgttatcnattaattaancnctggtcgcntccgngantatgcgtgtttcaacgtatgaatntgtgtgangtgacgtacccgcgcnattctccgtgaaattaacnancntgtnttcntgtggtgtgcctantaaaaggtcnntcatactccatcnaacttcnacaatttcttggtct

SEQ ID NO: 56385 - DNA, 771 bp, Oryza sativa
  Clone ID: PAT_MRT4530_58300C.1
atgctcgcttggaaggagaaggtggcggacaggctcgcccgcctcctcgccgactcccccgcctccccctcctccgccgccgccgccgccgctgccgttgagccgcagttgagagttgacgctttagccaggagagactattcttcggttttcaggataaaaaggttgtgttttggcaacaaacctgagtgccgcacttggaagcatggaacatcgctaagaacacttttccgtaggagtgaaaatctccagggtccatgcctattgattgtcggagacatgcggggggctgtgtttggtggcttgttaaatggtcctctcaggcctacagagaaaagaaaataccagggaactaatcagacatttgtattcacaacgatttatggtgaacctaggcttttcagaccaaccggtgccaacaggtactactacttatgcttgaatgatgctttggcatttggaggaggtgggagtttcgcgttgtgcctcgatgaagatttgttacatggaaccagtggatcatgtcagacatttgggaactcatgcttggctcatagtccagattttgaactgaagaatgttgagtttagaagtttgaaaagcgtgccgcgagtatccaaaattcaatccaacttttgttggagaaaagaacagggtcaggtggttggtggttctgtggggttttactcattcatggggtcgttcaacatagttggccttggatacatcataaatgaagcaatcccaaatcccaattgccctctagtctag

SEQ ID NO: 56386 - DNA, 1254 bp, Oryza sativa
  Clone ID: PAT_MRT4530_58301C.1
caacgaaaattgctaggaaaggattttcatttcctctcactgtttgaaaccccacacctcagcagaagcatatgttttacgtgggtggcactgagtatatggcctcattgtttggcttttttattttatttttttcatctagtttatattacatcatttgcttttgagtcattgaggacatgtatacaaaatgtttactcacaaatgatctttttttgagattgaaaagaaactaagtagttggaaaggtaaatatatgccagttggggggagactaatgttgattaattatatgtttatgatttctttttttaagatttcaaaatgagttcttcaaaaaaaatgattattatagatcatgcttctttttggcaaggagatgagcacaagaagaagtataggcttactagatgggaaattatttgtcaacccaaacatcaaggtggtcttggagttcataatcttgaaattcaaaatcaatgtcttttgagcaagtggttgtttaggctcataaatgagtagggcatgtggcaggtctattgaaaaggaaatatctttataatcgatccttaagtcatgttgagaagaaacaaggggatttccatttttggtctggtcttatgaaagttaagagcaagtttctaaatatggggtcctgaattgtgaataatggtgtaaaagtgagattttgggaagataaatgggtagtgaattattcttttaaagataggtatccatcgttatatgctatagttcgtaggaggaatgcttcaattgcaaatgttatgtcttctgtcccactgaatgtttcttttaggagaactttagtaggaccgaatttaaacaattggcataatttatgtgtgcttcaattgttcatattcatttttcagaggagaattatatttttagatggaatttccatcaaaatggtgtattctcggttcggtctatgtacttagctttaattaataatggcaacattgagagaaataagattatatggagacttaagatgcctctcaaaattaagatttttatgtggtacctacttgaaagggttgctctaacaaaggacaacttagttaggagaaattggcatggcagtttgaaatgttgtttttgcatgagaaataagactattcagcatttgtttgtggagtgtcactatctccacatatcattagccaactctttcttcctcatctctctccttctctttgccatcctcaccaggtcaggagtcaggctgcg

SEQ ID NO: 56387 - DNA, 475 bp, Oryza sativa
  Clone ID: PAT_MRT4530_58302C.1
cggacgcgtgggtccgtctccgccgtcatcggcgccatcgcctccatctcccggcgcgacgtcttctccaagctcgtcctcctctccgcctcgcctcggtactattctattctactactgcgtcttcaccaagcagcatacgagtatctcatactactctttattactctcccttatatggattggggaataaataggagtattggactttaatttaattttggtggtgatgaattcggctaaaaacagctccccgaatgggtactagtaccgaggtacgtcacgaggaaattttttgtcgattttgggggcagatggcggcttttgtcttcatagaggaatcagctgtcgatttgcggggcttgtcgtcatgggggaaattggagactcgcagggggaatcggttggacgcttggactaggattccttatgtagatgcctctccatcagcatggggcttatggctcgtttaatt

SEQ ID NO: 56388 - DNA, 407 bp, Oryza sativa
  Clone ID: PAT_MRT4530_58303C.1
gaaaacacaacatagtgaatggtgactgcatgggttatattatcaaagaggcgaaaattagaacatcgtttgtttattaagctgcataatctttatatataccaaaagttgttattaccggcacaacatacactcacatatagacatagttaagcgtgatccgtaacaacatatgatccataaacactcgaacggagccctgcatgcttacaaagacatgcaggcactccacttatggtacaaccgttgacactgtgacactgcaagtcctaaatcaaacatgacaacagacgcatgcatctagcatatcatatgcatgagggtgcatacatagacatagaggattgatcaacataatcgagaacattggatcaagcatctgagcgagctatgccattaaaagaaca

SEQ ID NO: 56389 - DNA, 769 bp, Oryza sativa
  Clone ID: PAT_MRT4530_58304C.1
gattctccagactctgtggtttggcctcatgaaaaaaacaaaacgttttctgctaagtctatgtatagattgatgaaatttgggggtgttgtagacagggatatgaaggagatttggggttgcaaagttcctttgaaagttaaacatttcctttttttggctgggagggatagaattccttgtgctgatcttcttgtcaaaaggaattggaaaggggcaatgttcaggatcatttcgctgatgcagagatggatgttgctgttaaaagaaaaagatcgaaaggctctgtcttccttgcttgacaagatgaagcgcaaattggaggatctgcgacctaaggatgtgttgcctcagatcattaattttctattgctaattggattgatttctaattacaaattaattaatgcttttttggctattttgttggcatgtattcatgtactccgtatcaaacaaggaccatcgtgggcagcttgttcgacttcatgacgtcatctcccgagcagatcagatcaatccacccgcctgatgcgccccacggcagcctccacgctgcaactggtgctgctgccaaggcgtcctccctgcgattttccttcgctttcaccgtcgaccgccttcgttgccgccgactggtgtcttcattgtttttgatggatgactttgttcccacattggccacctcggccgccttgtctgacgccgactggtttatttggctccacggctgtgcgtcttcatcatcattgactggcgccatcgtcat

SEQ ID NO: 56390 - DNA, 416 bp, Oryza sativa
  Clone ID: PAT_MRT4530_58305C.1
agatctatcggctcatcgagtattagattatcatatataatctcgtgctgcatcggttaggttcgacctactagattgttgttaatgatataagtcttgttagccgataggttcatgctaatgttttatcggggtactagccgataagttatctggacgttgcatcggcttgtaaggattgcatccgattggtttctattggattatattgctatattatattatcatcagccgattgccttcatatcattatatatattggacatatagccgatagctcaaaaccctatcactatttgcaggatcaaactgactggcacgcccgcatctcaataacctttggacctgcactggagctaagcagatctcctaggccagtgtgtgttctttgcatcaacacctccccgtgcggctta

SEQ ID NO: 56391 - DNA, 1385 bp, Oryza sativa
  Clone ID: PAT_MRT4530_58306C.1
ttttttttttttatccgtccggaggagagagaggcggcggaagaggaagaggaggagggggagagcatggcggcgcctctcttcacaatctcggggcttcgcgaggcggcgatgctgtacgccagccgcgacgaccccatcaaggtcatcgtcacggacgtagagctccgccaggcgcccgccttgctggagttgctgtagaaggccagtcggctcccgcgcgggtggtatctggaccgtgaccctaatcttctaccgtgggcccggctgcagaactccagaatagtcaaattaaccgttcttgtacctttatcctcaatgtacgttctgaaacccgccgccccccttggagcccttctgtgaagaccatcactcccccacatcgctcgccatgtcgatgggccggaggggccgttccacgcggtcgcggtcacggcaggcaatttcctccgccaccacgtcgaccacatgatcaatggtacgcgcgatcgggactagcttgtcgcgaatgtcgagagagttcgcgacaaggtcgccgacctcaacaccatggtggtcttcatccccgagctcggcctcgacgatggaccggacggcggcgaggacgacccggagttcggtggcgatgatggatccgacgacggcgaggacggcccggagttcggcagcccgcaaggtgacaacgaggaagctaggaccataaatggtatccaatgtaagacactcaagtgacaccgcattattgaggatataacatgtcagttccaccaagctcttcgcagagctgaaaccagtgatcttcacactcttgaggtggccatggcggtgtccagggatgtgtctcagttgtgaatccgtgaaaatcgattcatgcaccatacgtacctgagtcacctcatgccccgattcaatgacaagagtttcaagatttggcataatggatggcagcttggcccgagcatcacagattgcatgtcccatgtctagtttcttcatttgcagcgtttccacaacggagaagtttaccctggatcctctatcgaaaagactagagagatttggagctttgctctctatcactttcaagcctgagcattcaccaacactaagtctgctgagctgctgtagggcgaaaggtatcttcaggcaagttatcttcgtgcattgagcgagctctaaatgccccaaagcaagagagttggaaagaaggcactctaactcagcccatgtaatgctcactaaccacagagaaagacttgttaggcttctcaaggggccaagttcaggtgtgggatggagggcacaaaatcgaagtttacaccgcaccgaagtgagtctcgaaccccatcagacaaaagtgagcatgggaagttgtatcctcgtgc

SEQ ID NO: 56392 - DNA, 404 bp, Oryza sativa
  Clone ID: PAT_MRT4530_58307C.1
atgacgcgagctcaaacgactgaacagacacagtgtcacggctcatggtactgaaaataacgacttaatggaagcaggtgatgacaccacctccaccatcaactggggagagtttattgatggaacacagtcttttaataaaatagaacgagagaaacactttatggtagcctttacatactttaacaaagagggaagtggttttatcacagttgacaggcaaaacaaggcttgcatggaacttaacatggaagatactcatcttgattagatgagtttggatgataatcaaaagactgatggtgaaagcgattatgatcaatttgtcacactgattgaaaaaagcaactctccacttggcgggcaaataatcgaaagcagtgtgaatgtaaccctcagggaga

SEQ ID NO: 56393 - DNA, 1512 bp, Oryza sativa
  Clone ID: PAT_MRT4530_58308C.1
atgagcaaagaagcgttcacactctggctgttcttcctgttgcttgtacatggcgccttcgctgatcaggctgctcgagtcctggagttctccaggtccagaatggagatgcgggacgaccaatatacgacggagcacacgagtcaacgtgccaatcatcagctgtacatgagctctcaagatggactcaaggaggcagacaaggtcagtgagctccctgggcagccaggcagagctggctttgatcagtatgcaggatatgtcacggttaatgccacatccgggaaggccctcttttactactttgcagaggctactgacgatccttccactaagcctttggtcttgtggctgaatggaggattaacatgtgaattctatcgtatgacaaagttgtaccttgagatttcagggcctggatgttcttctctgggagatggagctatgcttgaaattggaccattcttagtcaatggcgataacaggacactgtccataaacagatatgcatggaacaatgtggcaaacatgctcttccttgagagcccagctggtgttggcttctcatactccaacacaacatcagactacgacaacactggtgacacgagcacggcagcagatgcatacactttcctcaccaactggctcgagaggttcccagagtacaagggccgcgacttcttcataacaggtgaaagttacggcggccactacataccacagcttgcgaatgctatattgtcgaacaacaatatcacaaatgtcaccatcatcaatttgaaaggagttgcaattgggaatgcatacttggatgatagcacaaacacaagagcaacaattgattactactggacacatgctttgatctccaaagaaactcaccttgcagttcagcgaaattgcagcttcaatggaacatacatggcacaatgccgaaatgctttagcagaagctgatactgaaaagggagtcattgatccatacaacatctatgcacccttatgctggaacgcttccaatccccgacagctgcacggctcggcaatcaatgttgacccctgtagcagatactacgtcgaatcatatctgaatcgccccgaggttcagagaacacttcatgctaacaccacaggattaaaacagccatggtcaggttgcagtaatatcatcactcctgaaaattggaaagatgcacctgtgtctatgttaccatctatccaaggattgatttcaagtggagtaagtacatggctgtacagtggtgatatcgatgcggtgtgcccagtaacttcaacattgtactcattagacattctagaactaccaataaactcatcttggcgaccatggtactccgatgacaatgaggttgctggctatgttgttggatacaaaggtctggtattcgcaacagtcagagaatctggacatatggttcctacctaccaacctcaaagagcactcaccttgttctcctcgttcctgcaagggatattaccccctgaatga

SEQ ID NO: 56394 - DNA, 396 bp, Oryza sativa
  Clone ID: PAT_MRT4530_58309C.1
ggggaaaagcctccccgggggggcttattaggggattcgaaaacacccctttttttgaatccccagggccaaaactggtcccaaaagcaaggcccccgagtttattacaagggaacttccagggtgggcttagccagcaaacattactggttgaatcctcaaaacactggtgggggtgggtttaaaaagttattcttggggggggggggtatgctaccctcattcactttagttttgggactgcggcatggattgcatctgcaagaagcggaatgggccttccgtttaaaccagccatactggacctcccataaaaaggcatataaaggggggattcctgcctcaagaaagccacttgatccctggtgagcccagggaaagggaacattccgatct

SEQ ID NO: 56395 - DNA, 963 bp, Oryza sativa
  Clone ID: PAT_MRT4530_5830C.1
gggcgcacggcggcggttcacgcgaacggacggccgagatcgacttgatccaaaacggacggccgagatcgatcggtccacgaccggctcatggaagagggcgacgatgacgtcggcgatgacgtcaccaccggcggcggcggctcggcggctcggacggctcggacggcgcacgcttgccagcgaacggcggcacttcggcaagaacggaggacaccaacgggtagcggacggcacggcgaactcaccggcgacccaagcgacggcggaagaccaacggacggcgacggcgacgaggaagaagcgacggcggagatcgggtcgacaacggcgacgatgctccggcggtctccgacggtggcgaaggggcggacgaggacggcgacgacttggcgatcccgacggtggccttcctgagcgatgacgatgaccggaacggcggcggcgcagggctggagcgacggcggcgatggcggctcgaggtctcacgacgctagggcgctaccggtgacgagaggcgaaggcgagggtggcggcgggtagagaagagctcgggggtccttttaaaggggctcggaggcagcggcgaaggcccacgacggccggcgacgagaaggaaagttcgggaaaatcgaatccgaaacaaactcgaatccacgaatttccaaacgattttagccggtgtttccaaaggagaaaaggtagaggaaatcccgaagatcatttcccctcttttgattcggccggagaaggaaaggatcggccgatttggaaagcggcggcggcggcgcggcgctaaggtttcggccggaggaagacgacgactccgacaggcgggccccacctgtcagcgagcgaggacgcgcgcgcgggcggctgcggctgcggactgggccgacttgggccgaggagagagagaagggttttgggccgactttcggcccaaagccaaaagaagacttt

SEQ ID NO: 56396 - DNA, 177 bp, Oryza sativa
  Clone ID: PAT_MRT4530_58310C.1
atgacacgtagtgcgtcggaatctgatctctgtaccctctcttctctactgtacgcatcgcatgtgcgcatgcgcacgtggtgcgtgtacggtctggtcgacgagcacaagtggatgcccaacacaagcacgtgcacgcgcgcagcagcgcgcaagacgcacgcacgcgccgcatgc

SEQ ID NO: 56397 - DNA, 2706 bp, Oryza sativa
  Clone ID: PAT_MRT4530_58311C.1
cgcaggaaggagaagtcctcgtgattcgtcctctctccctcctcgatcctaccccttgccggcgtcttgcttctcctcctcccacttgagcggcagccgtcgccgtgatgtagcaggcagtcccgccgaatcgatcccgcggtagctagctagctgcaggctgcagcagctaagtccaacaattttaggggggaagaacccaatcttgtgaacgaaagaactagtctgggtcagccaagaatccagccaagattatttctatctgtcccgcgggggcagtttaaggtttcttcatctgctccagaaactcaggacagaagcagtttactgattataatcacttttgctctctgggacaagaaaggaagaggggcaaatccaaaagagtttgatacttttatcacggattactgttagtcgatggagaataataatgatggagtgattggaatatcctggcgtaattctaatccaaaggttcacagctcaatgtgcagtgaattgacaatgatgttagataaagtctcttctattcttccctcaatcgaaactgctcaaccaggatgtaaagcgggtatagaggaactatgcaacctgtacaacatagttgacaaaggaaaactcataatccagaactgcattgagtgcagtagtctttacttggctattacaggggaggcaactgcaatgcggtgcgaaaggataagagatgcgctgaggcgaagcttgttcctggttcagaatatggtcccgtcatcattagctaatcaggtggctgatgttcatgatgatcttggggatgtgaaattcattgttgacccagaagaagatgaggctggcaaagccattttggagatgcttcggcagtctgatgcaacccaagaacatgaactccagactttcttgtttgcagcgtcaaagttaaatttgacgtcaccaaaggctatcttaattgaaagacgagcaatcaagaaactactggacaagatcaatggtaatgatcccaaaaaggaaggaatactcaaattttttcaatatctagttaggaaatatggaaagactatgaagcctgagggtagtgcaaagaatgaaggtgtggatgttgcaaacgttacttcgagtacaaacctaattgctagtggtaccgatgctccacagaaatgcttttcacctacaaactcttggactggaagatgtgaagagcagaataatttgtcacgattttctactcctccagagttctgctgcccactatctatgaagctgatgtacgatcctgtgataatagcatctggacaaacctatgagagagagaacattgagaaatggttcagtgagggatatgatatttgtcctaggacacagttaaagttagaaaatttcacgattactccaaatacttgtatgaaggctgtgatctgcaactggtgcaaagataatgagcttgaattcacttctttacctgaacaatttcatagttactctgtttcaagtctacacaatatctcagcacctctagttgctggaacaaagagagattacatgtctgatcatagcagttcatctgttgcattatctggttctagttatgtatcatctccaatgcgggaaacagaagagtcaaggactaattctactcagtttttttcaaacgcttattaccagttgtatttgtccttcagcagcttcaacaaggagatgtttctgaatttcttttacgagctgtccgagcttccaatggaacttcaagtgaaggctgtcagagatttcaaaagtgttctgaatcgtgaatatcaaatttggcgttctatgatttccaatggttttttagaagcatttcttgagtttcttaagaacgataatggaaaatgcacaatggaagctcaaagaactggcattcagttttttcttgcttttctacgtaatagcaggacccgaattccatccattagtgaagatgcagtgcgtctcgttgcttcatttcttgattcagagttaaaaactgaagcattggagatactccatgaactgctgcagcaaccaagttgtcggaaatctcgtctcatggcatctgttgttgctccatctgtgtttctagcttgggatagtgcagactccctgtgcctagaactagttttgaagatcatctgcgagctttcattcaaaaatgatgtacaatctttcctaatttcttctggaataatctcaaagctatctccaattctcagtcaagggaaatcgcctgagtgttgcctaaagattctactaaatttaagtgaagggaaacaagctgcggatctcattatcagaactgatcaatgcctcagttctatttcagattatctggacacaggaagctccgtggaacgcgagcatgcgtcaggtatccttcttgccttatgctctcgcagcatcgacgattgtgttcttgtcatgaaggaaggtgtcatccctgcgctggtcgatttgtcggtcaatggaactgaggttgcaaaggcttcttcaatcaagttgcttcaacttctcagggactctagacaaagcgaccagtttggcaattcatgttcaagtgaggtggctgtcaatggtgcagcagagaattcgcccattggcacgatctgcaaacaaccaatatcaaaatcagctcggtatatctcaagaaagctcagcattttctcgaaacctcgatcgctgaccctcgtctga

SEQ ID NO: 56398 - DNA, 108 bp, Oryza sativa
  Clone ID: PAT_MRT4530_58312C.1
atggaacacatcatgcacgttgcccaaggaggcgggcagctccaactggggcgtgacccgaagatacacaaagtcatccactgcgaattccaggtcacggcgtcggtt

SEQ ID NO: 56399 - DNA, 457 bp, Oryza sativa
  Clone ID: PAT_MRT4530_58313C.1
ctccgcactgcctgcgccggccggtgatctgatcgatatcggcagtcagccatacatcgatcgagcggcaaagcgcctatagctgctgcaagacatgtcggacggcacggccaactgcatcgacatcctcatcgccatcatcctccctcctctcggcgtcttcctcaagttcggatgcaaggtggagttctggctctgtcttctgctcaccttcttcggctatctcccgggaatcatctacgcggtctatgctatcaccaagtagtagttacatctcatctttactatacatctaaggtgattgaagctagctagtagtactagtgaaacctgtcttgcgtctatgtatcgattcatgtggtctacgtacgtactggatctcaactacttgatctgtatcggttcatgatcaggcctctgggctacttcacgtcataagggagaagaattcttgtgc

SEQ ID NO: 56400 - DNA, 522 bp, Oryza sativa
  Clone ID: PAT_MRT4530_58314C.1
atggcgacggagacccaggagcggcactggagcggtgacggaggcgtgcgggtgagggccggagcggcggcggcggcggcggagatcgagaccgccgtggaaggttggccgtcggaaggaagaaaacgagccacgagaacggccgtgtcctcgccatcctcggccccgccaccgcactatccatcgctgcgctccacgccctctctgccggccacgacgcaccggcctccgccgttctcccgccgcgcccacgaacgcgtaagggtcgcctgcgtctcgccaccgcgactcgcgtcggcatcccctcgaagatggcggcatccggcggtggcttcttctgcacctgcggcggcaaccactactacaaaaatcgtttttctgtacgagggggtcggtaggttctatgcgggccgcttgtggcggcgcctgcaaaaaccgccccccgggggcgggttgattagccgcatgcgaacatgcggccgtcttaagtggccgcatatattagggcatgcggctccttaa

SEQ ID NO: 56401 - DNA, 1104 bp, Oryza sativa
  Clone ID: PAT_MRT4530_58315C.1
atggagaacaaccgaagctgcaggaaaacacaaaagaaagatagagccaacttctttatgaaaacaacggttatcaacgatgccgctactcgtaggagatcaataaagaaaaataaattcttcgtgggaacaaaaatattgaccttttgccgccgtgatgagtatggtattaccgacatgactaggcaagttatgatcaaacaaacatatttgttccgtgaactgaagctacgctttgctggaagaagaattgataatgagatgaaaatcttacatgaacaagggatgtacgattgggaagaatataatgaacataaaacaaatatcgaagtgtcgattgctgctattcgaaatgctttgaagaagtatcgggaacggcggattaaagccagggttttttatctagttccccaccttactgaaatttcatactttgtgcgtagccatttgaaaactatgccacgagaagaagccctaaagaagatcatgcttgatcgtcataggagtgaagcttgtgagcgtgcaaagatggaaagtatttcttcatccaagaagaaaaaagacgaagaaaataatgcagaatcgtttcgtttggaggaggggcgcgtcatgcatacgttgtgtgtgccgcacgtcgatctcgtggaagtagaagcggaggcttttgccgggagccggagcaggaagggaaacaagcagagaatgagtacagctttggattgtgatcggacggacgccagacgcagcaagacaaggggccgaaatgaccgttggatgacgatccgagggccaccgagacgagcaaccagaaggcagaaaaaccagctgcttaattccccccgcgtgccgctgatgggtcggcacaccgcaatggccgcaacagcgaaaattaacgcaatgaagaaggggatttccaacaggtttgaagatttaagattgaccccccggaattgcaaggtacagcagtaccatagagtggaatttgatcgtcttcctatttgttctcaagctcttcttaaggttgtcattgtgggtgcactactggaattgatcaaagggactggtttggaccaaataccagtcctccaagcaggccttaaataa

SEQ ID NO: 56402 - DNA, 1416 bp, Oryza sativa
  Clone ID: PAT_MRT4530_58316C.1
atgcggtttttggttctttggtgttcgcgtctctgttcttggttggttggtttggtgctgttcgtggctaatttctcggtgttgcttccggtttcggttgagttttgcttcctctcgagtgaggatttgagtgttttgcaagctgaagaaacaatagccgagttcatgtttgctttatcttacaatgttcatagaatatccagtttggccactgtagaaacgattgagtcgtcatctttccctgagcaacccggagtgccccacctattctgcttcctcttctccacacggatcgtcgagacaagaagcaagaagcatccagatatggcaccaagaggaaagccttggaagcattgttgcaacaagtgcgacaagagcttccgttcagggaatgctcttggaggccacatgtcctgccacaggagtgttggtaatcagccaaagagcacgtcaagcccacccactgttgttgatctgcacatgccactgctgagttcctgtgatgataatcttttgcttttgcccccagaaacacaatgccagatgtgctcaaaggtgttctccacctccggatcgctgagggagcacatgatgatgcacggtggggagaaggtggtggtcaaggctgaggaagaagctgccgggctgattgaagcactgggcattgctgatagcatgcaagatgtaatggtgttttcttcagtgaagcgtaagcgatcattccgatcaaagaggcagacaccagcactcagtttggaggagatagaggctgcagatgctctcctactgctttcagggtgctttgacaagacttcagcttatgaggattgctatctgggagatatagaagacagtagcttgagatccattgtgctgacagaggttaacatgaatgccgtggatcgttgttcggttcgatctgttggctccaaggagccaataaatgataataactcaggttacaaggattgctatggacaaagtgacaaggaaaactgtttgatcgttcccaaggaggagatggatccaaatgattttgatcatgagctggttagagatgctgctctcaggaaaccaagaaccgacaattcagatgaggagatgaagtttggtgatcttccagctgctgctatgaaggacaacagccaccgttgcaatacctgcggaaagtcatttggatcagggcaggcactgggaggccacatgcgacgtcattatgttcggaagtgcaatcgtcaacggggggttgctgaccacgctggttctgttcttatgaaagtgcaaaagctgaagcttagattggaccccatcttgtttgatgtcacacttccagctctcactgatggagactgctgcatttctgtgggtgtgaagcctgaacctcagctgtggtgtgtcacgagcaatcttcagtga

SEQ ID NO: 56403 - DNA, 586 bp, Oryza sativa
  Clone ID: PAT_MRT4530_58317C.1
cgggctgcaggaattcggcacgaggccaaattgcaattcatcaaccaatgtccaatgatcccgttccagtctcctcctctctccgtgcgttgaacaaattgccaattggatctcgccttccgagcggttgaggacaagccatcgtggaggcaagtgcgccttgggcgatctgcagcctgagcctgcaggttggacttccacggctagctccgatggaagctttctcaaataggcaagcgttccgaacctatctacaacgcagcctaaacaaggccaaatgctccgctgccctatcattttcgctgggactagcaaggaaagctattgttttcccaagttagatatcaatgttcatcgcaagaaggcttcgtgtgattggctccgctcgcattgagacgattcctcgccaagcagccaagcacaaataagctggagtaaaagcaccaataggcagcagaatatcgatacgtggctaccatccaaagtaaggtgacgtcgtcgtctaccatgctttgacatttcgacaattattgaaccatggaatctgatgcaatgtcgacatgcaatgcacgaacgatatcctcct

SEQ ID NO: 56404 - DNA, 441 bp, Oryza sativa
  unsure (1)..(441): unsure at all n locations
  Clone ID: PAT_MRT4530_58318C.1
ttttnttttttttttttttttttttttttttttttttgggggtttttttttttttttttttgtttttttttttttttttttttttttttggggaaaaaaaaggaaaggggggcccttaaaaaggaaacagtggttccaattaacaaattattttgggggaatcgccccccgaaaaatttggaaggggaaataagaaaaaacggttaaaaaggggggggggaaaaattttagggaaagaaaaaaaaaaggctggggggggggaaaaaaaaaagggccggggggggcaaaataggaaacaaaaactgcccgggaacgggggtttcccgggttggaaactaaaagaattttaagttggaatggggaaacaaaactggggtaggaaaaaatcctcccaaaccggaaaaagggggggggcttttggaaaaaaagccccctttgggg

SEQ ID NO: 56405 - DNA, 3168 bp, Oryza sativa
  Clone ID: PAT_MRT4530_58319C.1
tttttttttttttttttttttttttactcacgaatacctctttgtattaagacagaaggtgtttgagtacatttcaagctaaccaaattattacaaataaaagggaagagagacaacacagaaactgaaagagaaacatgttactcatattataagaacaaatcatatctgcaattttttcaatttcggtactaaatagtttgcacggttaacacctttatttaccggcaacagccctcctccctaagatcctaactgcactctaatttacaggataaagaactcaaagaacaaaaaagttaaatcatatcgaaacaaactccggataaagaactcaaagaacaaaaaagttaaatcatatcgaaacaaactccacgcccattttatgactttgcatgagcagattgtgacttccactgctgtatcgcagctcgcaacgaatggtttgggattacggacaaatttggtagaattcgccgtgtgaccggggatactttgtgtttcttgagccaagctttgattgcttgttgctcatacgtgtgcccatcagcagcaacataaggatcattcattacctcctgcattatagggcagatgaagtggcttggcacatttaactttggacttcttaagttaacagtggaagtaatcctatgcagaatttcctggagcttggggagaacctctgactcaaggccaggtctctctctgcattttagggcagtgcatctcaagccaagctttgccaacatttctgcctcaacaagtggccaatcagtctgagacttgtcaaggatatcagcaagcatcccgtttctgatggcgttttctacgctgacaatgagcccattggggcgtttgccggttagcatctgaagaatgataactcccaggccgaaaaggtccgatttcggacgaaccgtcccggtttgctggtactcaggatccatatagtacagcgtgccggcgatgatggtctctttgtactccgtttgccagtcaggcacaagatccgatatgagcttcgcgaaaccggcatcgccaattttacccacataattcttgttcagtaagatgtttgcgggtttgaggtcacggtggactataggttccggtttccttccatgcaagaatgcaagcccgcatgacacatcaaagatgatttggaaccttaggaaccaatgcagcggctggcgccctttgttgttaagaagttgatcttctagacttccattctgcaagtattcgtatacaagacagccaatttcagggcagaagccaagcaacaaaaccaggttgggatgctgaagctggctgagaatgtcaacctccctcaggaactcatcggtcttgtcgatggaatcttgctgaatgaccttgacagcaacttcagtatgatcaagggtgcacctatacacattcccataacctccctcaccaatcttccttgcttcagagaaattatcagtggcgagctcgatctcatgttttttgtatcgcctgcaatttttgcttgttgacaagatagcatcaacaacttttgccttatcgagggagatcatgctcgctaccatttctgccttgttcctagagtaggcctcccgggtgaatgatttctttgcttgctcaacttcttcaatggcctctaaatgttttgccttctcgtctgctaccacctgctttagagcttcctcctcctgtagagcatgctccaccttccttgcctcttcagaacactcactggaaagtacctgaatctttgggggggagggtggggttgtcgcatggcggcatgggaggtgccaggccctccctggcccccacgatggcttcgccactggagatacgtcgcaggccccaccaactacggctgccattactggaggaagatcgaagcagtgcatcttgtctgatacagcgacagcgatcttgcggggattctcaagccctgtttggttcacacccgcactaacaaaggaacctatggcgtcttcttcttccttggcaacatgactgacatgattcatcacctttttcttagcatggacaagatcttcacaggctttgtcatacatcactaaggtatcctgcaattccttcctcagttttgctacttcatctatggattgacactcttcacttgagttagagtcagcataatgtgcttccttgaaggggcttcgaagaccatggtttttatatccttctattcctgttgtctttgcacctaaactgttaaagaggatttgcccatgactttctgaactttgacgtgcattagtaggaccacaatgagaaacacgggactgacagcatgaatctgggtgtatcccattctcagggaagttgtcgaacaacaaacttctgtacgattgtgcaaatgctttctgactaactgactgaattctcaagccagtaccagacctgctcatttgaggatgcctcgtcactttcagtgtcagtcttcgtttggacacgacaaatacattgcatgaaatttccgttgtttttaggaccgcagtggcaacatctgggacactcattgcccttctgaaccaccctaaggaggcggagccgatcaccaggctccgtacgccggaatccgccgcgtaccggaccagcgcctccgccacgccgtcgccctccagcaccaccgtctccaccgtcgcattggcggcggcggcgaaaatgcggcggaaggggcggagcgcctcctgcgcgcgggcgtggcggtcccgggcgtacgcctccgccgcctcccgcgccacccgcgccgccggcacctgctccccgcatggggaggggacgaaccggagcggggggatgacgtggacgacggaaatggcggcggcggaggcgcggccgtctccgtctccagcggggacgaggttggcggcggcccaccgcgcggcgcggcggctcgcgctgccaccggggcggacggcgacggcgacggcggcgggtgacggcgggcgaggctcgccggaggccatgggtatcgaggcggaggcggaggcggcgatcgcgaggtggttcaaggcgacgcgggaaattcgttggttgcgcgcgggcgtctcgggagtcggggaggagctcgctcagctcactaggtggaaggggaagagggggaaagttgggcttaagagtgatgatcatgagagacggtag

SEQ ID NO: 56406 - DNA, 660 bp, Oryza sativa
  Clone ID: PAT_MRT4530_5831C.1
atggggctgtacgacacgctcaagaggaggtgggagcgtgacgacggcggcggcggcggcccgctgccgctgcaccggaaggtcgcggcggggctcttctccggcggcgtcggcgcggccgtggggaacccggccgacgtggccatggtgcggatgcaggcggacgggcggctccccgcggcgcagcggcggaactaccggagcgtcgcggacgccatcgtccggatggcccgggacgagggcgtgtgcagcctgtggcgcgggtcgccgctcaccgtgaagcgcgccatgatcgtggcggcgtcgcagctggccacgtacgaccaggccaaggaggccatcctggcgcgccgcggccagggcgccgacgggctcgccacgcacgtcgcggccggcctcgccgccggcctcgtggccgcgtcggcgtccacccccgtcgacgtcgtcaagaccagggtcatgaacatgaaggtggtggccggcgcgccgccgccctactccggtgcgctcgactgcctgatcaagaccgtgcgttcggagggggcgatggcgctgtacaaggggttcgtcccgacggtgacgaggcaggggcccttcaccatcgtcctcttcgtgaccctcgagcaggttcggaagctgttgaagggcgtcgacttctga

SEQ ID NO: 56407 - DNA, 701 bp, Oryza sativa
  Clone ID: PAT_MRT4530_58320C.1
ctacgcgtagaggacgacgaggcgaacccaacggtactcaccaaaacgacaaacgacgcacgacgacggccggcgacgaagaggacggcggcggcggctcggcttgacggcgacggcggagctccggtggccggcggcgaaggggaaggtgcggccgaggttctcctcaccacggcgcacgggcccgtgaatgaaaaatgggccgtggacggggcacggttggcccaggaaccgaaatggcgcggagggatgcgatgcggacttgcggaggtggctggcgggctgggccatcagctaggagggcgaagctccgcgtcgacttcctcggatttgacggctcagcaggacagcaccatctcacggtagccctaatcgcactctaccgatcctcccaagccccgtccgtcgccgtcgctcctagcgccgccgccactgcaaaccctagcgccgccgtcaccgcgccgccgcctccgcttcccgttgccttctttgggattgcaaggaggagacgcaccccatacaccggcccgacgccattgactaccgctggaacgccgccgccaccgatgatccgagccaagccgtcgctccaaccttgtcgccgtcgctgtctgtcgccatttgccgtcgcgccgcacaccggtgggttccccgtcacgcttgtcatgtcggcgccttccgttttcaacgccgtgccctag

SEQ ID NO: 56408 - DNA, 450 bp, Oryza sativa
  Clone ID: PAT_MRT4530_58321C.1
atgcctgcaaacttgaccgctactcgaaagagaaggttgcaatgtctttgtgctcaaaagttgaaagagaagaaagccgaagaattgagagatagaaggttcaacgagttgcggccgccgccaagacaagagtggaggcctaaaccaattgaagttgagaagccggtgattactcaagatgaagatgaggacaacttggatacaagtgattcaccggttattacgacgtcgggttctcctctcgccgcgcttctcctccgccgcagcttgtggaacagccacgagctcggcaatggcatcgtagctgctgctgctgcagtgaggcagtgtggtcgtggactgtggggggagagcatggatatcaacatagtgtttgcattgcctatagaatttcgtgccatggatgaggtcggaattgcacaactttcaattggtccaaaagatgcttga

SEQ ID NO: 56409 - DNA, 573 bp, Oryza sativa
  Clone ID: PAT_MRT4530_58322C.1
atgaagagggtgagagaaaagaatggataccctatcccccacactagcccgccccaacaagggcatcttgtgccgtcaccacaagaggactgtcagctagatcggagctcgtcgggggcctgcaacgctcaccttaaagcaccactgtcgtcgctgcctcggctgactgcctatatcaccgccaccttggtcggattgcccgtatcaccgctacctcagaccgccagcccacatcgtcgtcacctcgccccgctgtcccctgtcgcctttggtcttgccatagcaccgtccagcctcgcacccgtgtcgtggcagctctgtctaccatcggcgccatgcagttcccctgttgtgccaccggtcacgcgaaccaccgcactggttcccgtgggtggtcgcgcatggcttgctcccgctgcaacctccatgctacatcggcctctcgcctttgccgactgcgcactacaccacgtcggcctcccaccaccgccagccatgtcgccctttcaccccaccgccccgctcgcccagatccatcccaaggtgtctggatcccgccacggggaggtctga

SEQ ID NO: 56410 - DNA, 2876 bp, Oryza sativa
  Clone ID: PAT_MRT4530_58323C.1
atgggattaagcgattatgatctaatgggggtggcggtaccagggacgggtgttggtggaccccatcctgaagcccttaaagaaaggatgctttgtaacctctgggaggtgtatactttagctcagagaaatcgaaaatttaatgaacttctgaatgatgaagcgataatgatgaagccttcaaaagaatcgaagaaaagaggtgcaggaaagaaacaagaggaagaagagaataataccatatccattgaggatgaaatgtgtgatgcgaacaataagaaggggaagaagatgctcactggggaaaatgctttgatgtgccaccagtgtcaaagaaatgacaaagggagggtgatttggtgtaaatcatgcaacaataagcgcttctgtgagccatgcatgaaacgatggtacccaggtttgtcagaagttgattttgctgcaaaatgcccatattgtagaaagaactgtaattgcaaggcatgcctaagaatgataggagttgaaaagccccctgaaaagaagatttctgaggaaaatcaacgacgttatgcttttcgtattgtagacttgttgcttccttggttgaaagaacttcaacaggagcagatgaaggagaaggaattagagggtagattacaaggtattggaggattttctaactgcctatttacatttttatttgcaggtgtttctatggatgaagtaaagttggaacaagctgattgtgatatggatgagcgtgtttattgtgataggtgcaaaacttcgatagttgattttcatagaagctgcaaggcttgttcgtatgacttgtgccttgcatgctgctgggagcttcgcaaaggtgagattccaggaggagaagaggcaaagagtgtgcagtgggaagagagaggtcagaagtatgatacactgcaatccagtgaaaaatgtttctcacccaattcatgaccagactttctattgacccccagtactgaaacttgcaatgacatggctgttgctggggacccaaataaccctttgttactgtggaagggtaacagtgatggtactagctggatgtccacaccaagtgagaaatttaaagtcttgcatcaaggttgctctagactctgtttcccctgaaaatgttggtgagtgtgttaagctgaccggagagtagttattaagagagaagcatttgataaagcaataaacgaaacaagtgatcagtgcccttgcttttatcacacaagcaagataagaacaaatgctactcgagaggcagcaaacagaaagggctcaagtgataactacttgtactgtccagatgccaataatatccaggaggatgacctgtcgcctgaagagtggggaagaccaacccattgatgaatccatagaagaaaggaagcctgaatagcgagggagatctaaacggtgatctgaagattgaagagggcattgcgagagaagaaaaccaatggtgatgttgaagatgagcactttgctgttaaggcagtggattgccttgattggaatgaggtggaaattatatcgctctgggatagaattaaggtttcgacagttcaagaatcacctcagacatcatcatggtgtcgattttgttcatatgtggggtgattgtccttcactaaaatgatgtgattgtttgttgctgatagtggcaattgacttggattgccatttcccgagtatactgatccacgatatggcccgctaaatcttgctgtcaggcttcctgctggtgtactgaagcctgatcttgggccaaaaacttatattgcttatggatgttatgaagagttaggcaggggtgactctgtgaccaagcttcattgcgacatgtctgatgcggtaaatatcttgatgcacacagctgaagtgtcctatgacactgaacagcttgacaagatagcaaaaattaaaatgaaaatgagagaacaagatcttcatgaactgtttggggtttcagaatcaggcgccaagggtaaagctgatgatgaagcatcgaaaatctcatgtaacatggaaaacaaacacacctctaaccaaagtactaagggtttggacattaatgctttaccacctgatgattctggaagtgatattggggataaaccatcattttgtcaatctgaggtttctcacccaattcatgaccagactttctatttaactgtggagcataagagaaagctcaaggaagaacacggtgttgaaccatggacattcgagcagaagctaggcgatgcagttttcattcctgctggatgtccacaccaatcttgcatcaaggttgctctagactttgtttcccctgaaaatgttggtgagtgtgttaagctgaccggagagtttagacgtcttccatctgatcacagggctaaagaagataaactagagattaagaagattgctctcaatgctcttaaagaagtcgtaaatttcttagatcctttaccaaaagggtcaaagaacagggatgaagtggtagaagtgaccaaaccaaaaaggaaatacggtaaccgaagaggtgacctgaagagtggggaagaccaacccattgatgaatccatagaagaaaggaagcctaaaaagcgagggagatctaaacggtgatctgaagattgaagatcctgtccaacaatgaaccagtagatgactagatgagaagcctaaaaaaccattaatgctcttttgattattcagaggcccaaatgattgggctgatatcgctctgggatagacttaagtttcgacagttcaagaatcacctcagacatcaccatggtgtcgattttgttcatatgtggggtgattgccttcactaaaatgatgtgactgtttgttgctgatagtggccattg

SEQ ID NO: 56411 - DNA, 537 bp, Oryza sativa
  Clone ID: PAT_MRT4530_58324C.1
atggtgcccttgattgcaacgagcatgactgaagagcaggaaacagaagaggaagaagaggggcaaggagcttgtggcatatgcatatccctgtgccataccatgcagacagtgttgtatagcgagaaggggagcagtggggactgcggagaccaccagatggctcatctccctgttccgaagcagtcaccactaggagatgctggtgatggtcaccgagtcacgagacagcaactggatctaaacttggtcaaactaacaacaatattgttttttcaagcggactgcaagcttctgattttccaggtcagggcatgtttgcacgcaatgaagcattcgtttttccctgagctgattcacggttgctgggatgagtcagagatgattggctgtggttcccccaactggggttcttcacggccctgcagcttaggtctcctccgccccacccgctgtctactagccaccttgccagatctagccaaggagagtctagaattaggcgatatcgtcttggtagcccgagcctttcgctat

SEQ ID NO: 56412 - DNA, 273 bp, Oryza sativa
  Clone ID: PAT_MRT4530_58325C.1
atgaggattgtggacctggggaaaagatggtggaaggggaagatggatgcccaggattcaggtgttggggaaaaggaggaggaggacagcgatgcgctgctccgacaatttcgtgccaagctcgacaccatcggcgtcccctaccagtggcccgtcgcgcggaccggcggcgtcggcggcgatggccccatcatcgcgctccgggaggacatggacgcactcctggtgcagagttcctctacctcccatgttgtgccgactaccgaggagtag

SEQ ID NO: 56413 - DNA, 508 bp, Oryza sativa
  Clone ID: PAT_MRT4530_58326C.1
tggcgaagcggagggcgtgggcggcgtggacgcggcgcacaccgaatgtgtggaatcacgactacaggaggtggagggcaggaatgcgaggttttgcgctgggtgtagcggtgttggcgaggcggatgtcgacatcggcacaggacggcgacagtggcggcgcggcggcgtgaacgcggctcacgcgggcggcatggactcgcggcagctgggctcgagcgcgaggaggcgatataatggacggggagcagcggcgttgaagacggcgtcgacgtggggccgggtgtcgacatcgtcggctactgtggaggggcttctcgggcaaggaagggagctcatccaagcctcgttgcggcgcggcgcagcacaacatgatgcggcactgtgtggcatgactcaggcggtgcacggccctgtgcggagggtgcgaggcggctcgacgcgtcgctcatccggcccggcatttcgtcgagcacgtggcgtgtgcgtgaggatggctgctgggtag

SEQ ID NO: 56414 - DNA, 297 bp, Oryza sativa
  Clone ID: PAT_MRT4530_58327C.1
atgcccatcgacgcgcggccaggcgccaggctcgccatcgacgtgtggccgggcgtcgggctccccatcgacgcgggtgggcgtgggcggcggcggatgaagatgatgggtggtggtggagcgccaccgccgctgacgaccgcggcgagctcctcctcgtcctgctacttctgctttgctgctgctgctggtggtggtggcggcggtggcagaggcgcagctgtttgctgcgtcgacgaccacgggatcgagctgtggatcgatttgggctttggaggcagcgcgcggagacgatga

SEQ ID NO: 56415 - DNA, 648 bp, Oryza sativa
  Clone ID: PAT_MRT4530_58328C.1
atggaggacacggaaatactttcgatcaacttcacatcttcttcaattcatgacaaatcagtcaggagagtccgaatccgcggggctggccgtggtggtggtgtggtgtgcgtgcgctggtgcctggtggctgccttcctgcccatgtgccatgcaaagcatgtgcctcacacggccacaaccccccgctcacccgctgtacgcgccgcttcatcaggcagccccgcgcgcgagccccccacccacgtacaacgtcgctgttgcctccgcacgcagccgatcgaggcgttgccgtgcccgactgctgctgctgctgccgcgcccgcgcggctcgcctcgccgctgtcgctgtgcgtcgcggccgtccgtcccatgcacgtccgtagcggtagcggcgacgcgcgaacgtacggggccactcgacgtctcgacccggtctacctcgcgcgcgcggcggggggttggctaccgtggcccggcctgcattgccgctggtctgaacaaatggtggggggctctcgccgacacgaaacgatctctgcattgccggccggcatttgccgccggtctgaacaacggtgggccaccgaggcagcaacgacacgcggcagattcggaaccaataagggcacccataatggttattca

SEQ ID NO: 56416 - DNA, 216 bp, Oryza sativa
  Clone ID: PAT_MRT4530_58329C.1
tcgtttacacagatgcgtaggcgcgccgggggaggttttgagacaccaccggtcgcctggtcctgctgatattgggctgcatccattgcatagcacgacggctggggtgatcacggaaagaaaatcgtcaggattagtgcgtcgagccaacagcatgttcggttagggcaataactccctggccacgttactgggaggaccatctgctattgattc

SEQ ID NO: 56417 - DNA, 831 bp, Oryza sativa
  Clone ID: PAT_MRT4530_5832C.1
gattcctttccctcagcccaggtacccccgggcccatatcactgacagtggcaatcaataaattcacaaaatggatcgaagcgcagcccacacaagaaattaaatccgacaacaccatcaagtttatcaaagggatcttctacagatatggattgcctcaccgcatcccaacacacaacggctcccagttcacaagtgatgacttccaggattactgcatcgagcttggagtcaagatctacttcacttcagtttcccatcctcaaagtaacggacaagtcgagtgagctaatggtaatcgtgctccaagggatcaaaactcacatctatgacaggctcatggcctacgatatgcgttgggtcgaagaactaccatatgtcttgtgggtcgtacgcactacaacaacttcgtcaaacaaagaaacacagtttttcctcgtatacggatttgaggccatgctcccgtcggagctgcggcaccaaagtacacgagttaaaaaatactctgatgagaaacaagaggaaaggcaaagcgacgatgtaaacttactcttagaacatcgtgaacgagttgcagtccgagcaaccgcatatcagtagtccctatgccaatatcacgaaaaatgtatacaagcccacacacttgccatcggtgattacgtcctccgaagggttcaaaatcaagcaagacgtaacaagctctcaccaaaatgagaaggaccgaacacggtggttcaagttactcggctaggttcgttcaagattgcagattgtgaaggctgtgcgttgtcaaactcatggaacatagaccaactacgttaattttatgta

SEQ ID NO: 56418 - DNA, 373 bp, Oryza sativa
  Clone ID: PAT_MRT4530_58330C.1
atggcaaatctgtcgaacttgtcttcaatgtgaaatatatgtaaaatttattacaaatatgtcaaaatatttgaatatatacatgatatgaaataatagtgtcaaacaaacaagatataaaagggtcaaataagcaagggcataaagagaactatttagcccctaaccttaacacccgtttaatttcacccacggatgtttcgtttttttgtaaaagggagggatcacaatacagcaaccttacataaaaggtatgggtcaaatttggttagtttagactttcaaaaaacagggttcaaaataagtcaaattgccccctttttgtagggcataaaaagcatttagatggcaattgaaaaatttctaaatagta

SEQ ID NO: 56419 - DNA, 414 bp, Oryza sativa
  Clone ID: PAT_MRT4530_58331C.1
atggttgatctgtcaggcctcgagatattcctcgccgtcgtcgcgctcatcgccgcgatctgtgccatctcctggaccgtgcgatgcttaatcggccggcggttcgaggtcgccaccggcgatcccaacggggagcgccaagggttgctgaacaaggaggaggtcgtcatcatcgacgtcgccgccgccacggaggcgaggggcgacgacgtggcgctctgcgcgatctgcaaggggaggctcgcggtcgcggtcgcggacggcgggggacagccgtgccggcggctgcggccgtgtgggcacgtctaccacgcggagtgcatcggcctgtggctgcagagggggacgacgtgcccggtgtgccgcgccgacgtcgttgcctcgcggaacgaaatcgtcggcgcgatggcgtga

SEQ ID NO: 56420 - DNA, 443 bp, Oryza sativa
  Clone ID: PAT_MRT4530_58332C.1
atctgagcgccggcgggctccatcgcaggggggattcttgccaaagtccacacggtttcccctgctgtggaacgccataaaccacacagagggggagaagaagtggaagcgggagaccaacggaccgcacgcgatgcaccagcagtgcgatgccgatgcccgcgcaggcgccgtctactgccggaattaccacccagcagatgcaaaagtatctggatgaaaacaagcacctcactttggctatctcggaaaataagaatctgggaaagccggcagaatgtgctcaccgctaagcgcagctacagaagaaacggttgaactaggctgtgatagctgatactaaaccgactaccactatatgtcgaacgcagatggggccgcatggggcatcgccggcgtcaggggggaaaagcatgcctgcgaggccaatgttcccccccagg

SEQ ID NO: 56421 - DNA, 115 bp, Oryza sativa
  Clone ID: PAT_MRT4530_58333C.1
agtactgatagaccaacagaatctctactaagtgtcatacttgtggtagttaatattactctacgccgatactagtcctcagttacattactcttaggtctcgctcttggactca

SEQ ID NO: 56422 - DNA, 1224 bp, Oryza sativa
  Clone ID: PAT_MRT4530_58334C.1
atgccgctcgccgccgccgtcgccgcctcggcggtcgtgccgccgcggccgcctcctccgccgccgcggagagcgcggcccttgcgctcctttactggactaatactaacgagggacctagcagccctaacggtggcccgctgcgctccctcccctcctgcccccgcggcggaggcggaggcggaggcggtggcggtggatgaggcgccgccagcgaagccgcggccgcggcggtacccgaggcagtaccccggcgaggcggtgggcgtcgccgaggagatgcggttcgtcgccatgcgcctccggaaccccaagcggaccaccctcaagatggacgatacgggggccgaggaggaggtgggcgatggcgtcagtgaggatgcgtcggcgtcagaggaggaggaggaggaggaggacgacgacgacgtggttgaggaggaggaggagggagcggggttggagggggagtggatgccgagcatggaggggttcgtcaagtacctggtggacagcaagctcgtcttcgacaccgtcgagcggatcgtagccgagtccaccgacgtcgcctatgtttacttcaggaaaagtggtctggaacgctcagctagaattacaaaagatttggagtggtttggagggcaaggaattgcagtaccagagccaagtactgctggatcaacatatgcaacttatctgactgaacttgctgagagcaatgccccagccttcctttcccactattacaatatttattttgcacatacaactggaggggtggctataggtaacaagatatccaagaaaattttggaaggaagggagctagagttttacaaatgggattctgatgtagaacttttgctaaaagataccagggagaagcttaacgaacttagcaagcttgtttctccagagctgcagctgagcatttgtcgcaggaggctcccacacaagagaggagatgagatggtctctcgcttgatgattggtccccgccatgtgggattggctctgctcccaatagcaatggcaatggcagcagaggcctgggggctggggccatagtaaacttgaggcttagtgcagtcatttttgtcgaagactacacgtcttaactatgttgaagtctggtacagaaggatcttctggtgtgagactgaagctgatcagcgagcactatcctggagattgaaaacaccaggccacaacaatagcctcttttct

SEQ ID NO: 56423 - DNA, 340 bp, Oryza sativa
  Clone ID: PAT_MRT4530_58335C.1
gggcccccttaaaacccggtttttccccaaaaaaatggggcatactcgtttaaatttggggggagggaccacaggcctagaatttattatttcggggggccgggggaaaaacaaaacttatgtttatgggggggaaccctttatttccccggcctgggggtttttttaatttaaccgaccccccttaaaaaagttttaaacccacaagggggtttttaaacactgccaacgtttctgtttccccaccaatttttttaaagaaaccataaggggggttttggccggatccggtagccccccccttggttgggaattttttgaaaagcccccaaaaggcccc

SEQ ID NO: 56424 - DNA, 1827 bp, Oryza sativa
  Clone ID: PAT_MRT4530_58336C.1
cggaatgcccgggtcgacccacgcgtccggtttcgtcctcctcgcgagcgatccccacctcgccgcagttcgccgacttttcgccgccgcgtcgcgctcccccgaggtccactcctctcctgccggagaagcgggcctaggcgaagagcagcgccatggcgaccgcttcggtgtcgtttaagtctagagaggatcaccggaagcagctcgagctcgaggaggcgaggaaggctgggctcgcgcccgccgaggtcgacgaggatggaaaggagatcaatccccatatcccccagtacatgtcctcagccccatggtatcttaacgctgataagccgagtttgaagcatcaacggaattggaaatcggacccgaactacaccaagtcatggtacgataggggtgctaagctttttcaggctaacaagtacaggaaaggagcttgtgagaactgtggagccatgactcatgacaagaagtcatgcatggaacgacctcgcagtgtgggagctaaatggactaacatcaatatagcaccagatgagaaagtggagtcatttgaactggattatgatggaaagcgtgatcgctggaacggttacgacccatcgacgtacacccgtgttattgcagattatgaagctagagaagaggctaggaaaaagtatctgaaagagcaacagctcaagaaacttgaggagaaggatggtgaggagggtgacgagaacgtggctagtgaggaggaggatgaagaagatggtttgaagatagatgaggctaaagttgatgagagtgctcaaatggattttgctaaggtaccgaagcgcgaatatgaagaggatgttggcattaatggccatgcgaccgtatggggctcatggtggaaagatcatcagtgggtctacaaatgctgcaagcagactatccgaaatagctactgcactggcttagctggaattgaggctgctgaagcatcggctgatttgatgaaggcaaatatggcccgcaaggaagctgcagaagatgagcctgtacgacatgaagaaaagcgactggccacctggggaactgatgtgcctaatgatattgttcttgacaagaagctgcttgatgaagccctaaagaaggagggtgcgaggaggaaagaggagatggatgaaaggaagaggaagtacaatgtgaaatggaatgatgaggtcaccgcggaagacatggaggcttaccgcatgaagagaattcaccatgatgatcctatgagggatttcctccattaggccttgtatgctccatagttgctcatatatgagcacaacactctgccttgcagtgtcacttgtgtaatgtattagctgtggctatgtcttcctctaactggagtgataatttagagctaagagctctctacttctcttccagatgttaccatcctcttgtccggatggttgtgtttgtattgctgatctttctataaatgatatggaaaaaaggagttgcatacttgcataagcttaaatgaaaaaaaaaaaaaaatagtccgaattgatcaaggcaaatatggcccgcaaggaagctgcagtagatgagcctgtacgacatgaagcaaagcgactggccacctggggaactgatgtgcctaatgatattgttcttgacaagaagctgcttgatgaagccctaaagaaggagggtgcgaggaggaaagaggagatggatgaaaggaagaggaagtacaatgtgaaatggaatgatgaggtcaccgcggaagacatggaggcttaccgcatgaagagaattcaccatgatgatcctatgagggatttcctccattag

SEQ ID NO: 56425 - DNA, 398 bp, Oryza sativa
  Clone ID: PAT_MRT4530_58337C.1
tttggtttttttttttttttttgtttttttttttttttttttttttttttttgggggggggcaaaatagacttattgcaaggacgagcacgttaaactggttgggccttaaaaccagcatggcacagcctgggtcatattgggtcgtaggggcaaccagggaggcgagcccggcctgactgactgatctcaaaccatgctttggttgggctaggccaggccgtgtctagcgactcatttggccatctatagggaaaacaagaaaacccttcatgctttatttttgggaccaaagcaagagcccctttagcaattaagttgacgatgattactccctgggggtcacttgcatcgggaggccttcttccttttccagagtttaccaaaacacaaaccctg

SEQ ID NO: 56426 - DNA, 685 bp, Oryza sativa
  Clone ID: PAT_MRT4530_58338C.1
ctttgtttttagattgctaagaacacatatataaaaattttattcataaattatttttcgtttacaaatatatcgtttggcttattccacgaataagctaacgatgggaccgtactaggggtgaaaacagtacggaatttttccggattccggtcatgttttcggaaacggaatcggccggtcggaattttttcggaatttctcggaatcggaatcgaaaacggaaatattttctcggaaacggaatcgaatatgataaaagcagtttccgtcggaacccggaaacgactggcccccgcagtcctcgcccccaccatctagcgccgcccttgctcttcgtcgtttcgccgccggccaccgccaccatctcgcacctccgccggcctgctcggtccccgccatctcaaggcgccgtcccaccgcgtctcgccgtttcaccgtcgccaccaccgccgccgccgacggaacaaccaccacaccgacgaggcgacgacgacaccaccactgcagtctcttcctcactgccaccaacgccgacggctcctcgcctcgcagcagccagcagcccagcggcagcatctgagaaattcagtagctccaaaagcattcgcaccatgtctctcttcacactaataccaaaacatttggtaagatctattctaacacaaaaccaaatgtaccctaa

SEQ ID NO: 56427 - DNA, 203 bp, Oryza sativa
  Clone ID: PAT_MRT4530_58339C.1
agtactaacaaacacagctcttaacacttacttttagatagcacatcttatttcttctttttatataaccactggctagcacatggctgacgaagatcgaccatcctccatcatgggattattcattagcgatgctgctcctggctcgtcgttacagccatgtagacggtgggggagtccccttcggcggtcaagaggttgcc

SEQ ID NO: 56428 - DNA, 271 bp, Oryza sativa
  Clone ID: PAT_MRT4530_5833C.1
aacaactacctgatcgaatgttgtgttactgttttggatttttgtagcactagaagtgtccttcactggacacgagttatattcatggaagggataaagaatttgattcagagaaatttttgtaggcatctagtgtgcaatagacacttcttatctttcttttacctttgtcaaaatatgactgcatcctgattcctgatatcatagagcaggcaatgaatcaatcattattcaatctatgacctctatatctttcaaaaaaaaaaaaaaa

SEQ ID NO: 56429 - DNA, 186 bp, Oryza sativa
  Clone ID: PAT_MRT4530_58340C.1
gtccgcgctatctatccatctatctatagctttggtctcccgcgaattcaccgagcaatggcgtcctcgtcgcgccagctgcgcgtgaaggctcgcggcagtcattcggaggaagtgcgtaggcgggcgaaggttttagtacagagggggtagacttgacagcaacgtattgaaggcgtatgatgg

SEQ ID NO: 56430 - DNA, 834 bp, Oryza sativa
  Clone ID: PAT_MRT4530_58341C.1
atgaccgtcaacagtgacggcgaatgctgcggtagcacagacgtcgccggaggggcagcgtcgcgttgcgcgtcggcgtccgtctgcaacagcacggtggtagcggcgtcgacggatggctgcggctgcgcggacgtgtcgccagcttgcgctgccctggctgggcagctggtcggcgaggcggctctcgggcgggctccggtgagcacggcggggttgctcgctagcagcgagcctcctgctcggcaaggggcttcttctgccagtggcgggtctcgtggctcatgtgcggcgatgtgcggatatggagttggtgggacgacggcttgtgctggtgtgatgcaggaatggggcttgacgttcgcgatggtgacttcttcattgtcggccgagtgttctcgctcctttcggtttcccccccttctttggtcggaccttgttcttgtcgtggggaacactaaggggagggcggaggttctggcttgccgtaggagttattggcggattaatggcatttcaagttcaacgatgatggtgcgcgtgggcgccgtttcccttcttggaggcgttgtcatggcgttctttggtatccctcacaaatctccatgtgaaaaccttgttccaactttcggacgagcaacggcggcgttacgagttgtgtcctccttgggggcgtcgcttcggagaagtgccaacacatcgatgactgttgatgtctcttccaaggagttctggtgctggtcgtgtgaaggaagtggctcctcggtggcttggctgatacccattgttggatgttggagttgcttttcgatttggcgactttcgtggctttag

SEQ ID NO: 56431 - DNA, 643 bp, Oryza sativa
  Clone ID: PAT_MRT4530_58342C.1
tgacgaccgaaagtactttacctgggaacctcactcgttccctgaccctattgacatgggtgagcatttggatgcccacggccgacagcttgttgtccttcttgacccccatatcaagaataccgacaactacgtcgcctctgaataaatgcttgcccaggaccttgccgtacataacaaggaggaaaagccatatgaaggatggtgctggcctggagcttccaactggattgattgcgttcaaccccaaggcaattgagtggtggaagactatgctcaagttcgacaagttcaagggcacaatgagtaacacctgcatgtggaacgatatgagcgaaccttcgttgtgaacagacctgatgtgaccatgctctaagacaacattcaccatggaggatgggaacaccgtgatgtccacaacctgaaacgtctgaccttccaaaatggtacttttcaagctgctcttcaccgggaaaagggagaacttccacgaactttcatcctggcacgagccttttacgctggatcacaaaagcttggcgctatttggaccggagaccaccacgctgactggggacatttggcggtttctattcccatgactctgaaccaaggaatcttgtggttcccctttgctggggct

SEQ ID NO: 56432 - DNA, 251 bp, Oryza sativa
  Clone ID: PAT_MRT4530_58343C.1
ggcacgaggttttagctctctgctctttggctattgtgggaattgctgcagcatcctctgcggaaaattactggctatctgtttggccaaacactcctctgcccaaggctttctcagatttgctcctaccttatggtagaaccaataatttgcccatcagagctgatgaactaaaccagtactcaacactatttttcgagcatgacctctacccaggaaagaaaactacactaggtcatcctctaagaatg

SEQ ID NO: 56433 - DNA, 2224 bp, Oryza sativa
  Clone ID: PAT_MRT4530_58344C.1
ggctgcaggtattttttttttttttttttttttttttttaaaattcttaaccattcacattcacattcaccggttcaattgatgcttaccacaactttgcctagagttcccgtcatcgcctctgcgataataccaacaaaatttgatacaaatcgtgacgaaagtttttttttttgcaataaacataattcacctcggcaatctattgattcttaaataaatagtctttaacaacaaattctagaatttaaaagttctgcttgagttcatcgaaccaccaaaacaagtagaactggtcaactaacaaacggtcagggatgtaaatgaactagggcgtacatacactccacattcttgaacctccacgactagggtctaaaaaatcatcgatatactcaagcatccatcatatgagctttctgtatgcattcagcaattgagcatgccttcacgggctatcaccaatcccattttgctgcatacagaaaagcttatctcctgagaagtacctcaaatcaaagcagaaagctgatctattctcccatcagattgcagggatttccaactattctcagcggtagccccatcctcttccccggcctcccctgccccggcctcttccactccctctaccaccacgggataacccttcaaaagctctgttcacaagttgattccgggctgctccctctccccgccccttcttgctcgcaggggtgttcccatttgtagcaggctgggacctcttccctcctgttgttgtaggtgctggtttctttggctgctccatccatgagagagtgattttcttgtcaccaataaataaaggggatttcgcacgcaacggctgcgccattgctagtatgttgttgtaggccctcattgtcattgttgatttctgctgatcagatttaattttagttttctcttcttcagtctttgctgaagatattgccttgttaaaatctgccatcccctgagttagtctctttgagactgctcgaactgtctcttctgttccagttaacctctccgtaaagtctttgtaatgttctgagaaatcctctccaagtctatccgatggttgtccagtaacaatcttgtaaccacataggctgtttgtggtgtttggtgtcttatgggctaaatggtgaaaaatgtacatcaggcactcaacataattatggttgatatcttccaccttcttcccaggcatatatttcttgagcaattgaacaacagggggaagcagctgccgtgcatcttgtgctgtagcatatggtgagcttgcagcaactgttttgagcaaatccagtttcttctcttcaggcaaaagataagcacagttacgcagcgagagcgagagaggagtggagagccatggcttccatcgtggcatcgaagaggatcccactgttccgcctcgtggagcagctcctcgccgcgtcgccggcccaaggcgccgcctccgctctcaggccggtggccgtcgccggcgggtcccgtgcatacaacaccggcgcgcagctccgccggcacgagagggacgagtcggacgacgacagcggccgtgggtacgacaccaggcgccccacacgcgacgccaccatgcccgccttcttctcagatgtgttccgtgatccgttcagcgcgccgcagagcctcgggcggctgctgagcctcatggacgacctggcgacgccggccgggcgcgccggcgccgcgacgctgcggcgcgggtggaacgcgaaggagagcgaggaggcgctgcacctgagggtggacatgccgggcctggggaaggagcacgtgaaggtgtgggcggagcagaacagcctcgtgatcaagggcgagggggagaaggaggccggcgaggacgagggcgccgccccggcgaggtacagacgaggtcgcacatggcctccatggcgctcggggcgagtgccgggaagctccggaagaagcgggggatgagctgcggctcgagctgcttcgccttcacgctctgccccttcacggccgatatgatcgcctcgtagtccgccgcgtgctgggacttgtccttggcggaggagaggcgctcgccgagctcgtagagccgctcgacctccgcggcgtcggcgtcggaggcggccattttgtcgggggttcggagttatagatttgggaggtttagtttatggaaaggaaaaaaaaaaaaaaaaaaaaaaaaaagacgggcggc

SEQ ID NO: 56434 - DNA, 412 bp, Oryza sativa
  Clone ID: PAT_MRT4530_58345C.1
ttgatggtcgttagcaatcagtttcgaacgtcaatatttactaaatagaggagaactagttatgcttgcaatgcatattcatgttagaataataatattccactagtatttggttcactaaacttttgcagagaataatcataaagtggaggagaatcgacatcaaatcaaacgataaatcaatcggacgatgtcgagaatcagacttatgcatgaatgggccaagaactcggaaatgacacgacgaatggggccaaaattcacaagtctacggagaagagcacgagaggatgccaccagccgtaatctgggctggttgggccggccccaggttcagccgaaccctcctcagcaccgtttgatccaggtcttttctagatggtgtagatcagcccccaatggcggttggagg

SEQ ID NO: 56435 - DNA, 1472 bp, Oryza sativa
  Clone ID: PAT_MRT4530_58346C.1
cgtcggcggattccatcggggagcgcctcgagttctccgccatcttcgttaggccacttgccgcaaaggagttgcaagtctacatgagcaatatggcagcttggtcacattaaggagaaattatttagtatggggaccatatcatccacatggtatttccagtgtccgtataggttgattgggaataagaggcgattcagtccatgttggtttgataaatatgctaattggctacagtatagcgaaaaggatgacaaagcctactgtttatgctgctatttgtttagggacataaaaggtaatcaccatgggcatgatgtatttgtcatataagacttcaactcttggaacaagacagagatattagtgactcattttggtgactgtaatagttttcacataaaggcactcaagaattgtgagcatctattgaaacaagaccagtcaattcctgtggcctttcacagacaaacccaaacggaaaaaaatgagcatcttatccggttaaatgcatcaattgatatatgtcgatacttgttgcatcagagacaacctttccgtgggcataatgaatcaaaacagtccaaaaataaaggaaattatttgtagttgttggagtatactattaagcaaaacgatgttgttgccaaggcattaaaaaatgcctcacttaataatcacatgctatctccaacaattcacaaagaaatcactaagtgctttgcaaaagaattattgggaagtattatggaagaatttggcaatgatgtgttcagcttattggttgatgagtgtcttagatgtttccaacaaagaacaaatggtggtggttcttcggtatgttaataaatgtgaggtgttaaaagaaaatttgttggtattgttcatgtggaggacatgacggcttcttatctcttacttgcagatcttggtctaagtctaaaagaaattagaggctaaggttatgatggagcaagtaatatgttaggtgaatttaatggttggcaagctaaaattatgagaataattcagcatattatattcattgttttggtcataaacttaacttggtggttgtgagatatccgatgttggtgatttttttatatgatatcagttttgttgaatgtgttggtagttcctacaagagaaaagaaaaacttcgagagcatcattaaaaagaagtgaggaaaacaattggaagggaagaagttgttacaggaaggtgactatcaagaaatatctcttcagaggctaggtgacacttgttggagctctcgttatgaaacattgatgggcttgtctaaaatgttcccttcagttgtcagagttctagaatatgttgaaaaagatggctccaatgcctacaagaggcgtcaagataacgatcttctaaaatattttcagtcttttgattttgtatcctttttacgtatgatgacgttggttttagctttaacaaatgaccccag

SEQ ID NO: 56436 - DNA, 441 bp, Oryza sativa
  Clone ID: PAT_MRT4530_58347C.1
atggctccgactgccgccgccgctccctttcccaactccggctactaccgccgctgcccctcccgtagctccggccgcagccgcccctcccgtagctccggccgcagccgccctccctctcttcgtcgatgtctcccctgccactggctcggccgcgacgcgccattgcctcgacgcgacccagacaaggtcctcgagctcactgcgcagggctcgtcgctggcggccgcgtcctcctctcgtcgagcgggtcctcttccccggccctcgccggaggtcctcgcgggcagccacctcctcctcatggctcaggcgtgcgctcagctctcactcctctttggattaggcaaggggacgaagggatcccatcccgacgggatcccgggcgtcaacttggagctggagcctggaggtgttctcggcttgggcggggacgcctag

SEQ ID NO: 56437 - DNA, 431 bp, Oryza sativa
  Clone ID: PAT_MRT4530_58348C.1
agtacgcggcccggaatcttgggctcgacccacgcgtgcgtcatacagtcgatatggaaccaccgtgaaccgtgttggccacaagtgccagcatctccatcccgaaggctctccacctgctcctctgtaatagactacaaagaagattgagcaaacatatcatgctaggagtttcaagcagaaccacctacagagaccatggccatagtgggtgcactagggctatcaatcatgcgccgagtctggtgatcaatctttgtggactggagctagctgaagatttcatacactgtgagagtctattgcttggactactcctttatcgtcgagaccttcacctcccaaactatcctatctagagcatgtggcaataccagcactctctcatgatcactatggggtagatgcgccttgagggcacgcatcttgtt

SEQ ID NO: 56438 - DNA, 3001 bp, Oryza sativa
  Clone ID: PAT_MRT4530_58349C.1
attgggtccagaaaggtaacagaaacacttctttctttcaaaaagcaacccagaagagaaggagagagaacagaatctctagtgttatccataataattcaataattaatgatcctgaggagatagcaactgtcttcacttcttactttgaaaatctctttcaaagctccaatacagatgatgccactccttctatgctcggcctcatcaccggcggtgcagtggcggaatgcccggacaccaagtgcggcagcgtggacatcccttacccattcagcatcggcccaggccgctgcgccatgcctggatttgagctagcctgcaagaactccaggccgttcctcggagatttcgaggtcgtcaacatctcccttcagctcagtcagctccgggtgctgaataagatatcttctttctgctacaatcctgcatctaagttgatggaaccaaatacatttcagagtgacttggacactccgttcatgttgtccgacaccggcaacaagttcaccgtcatcgggtgccgaacactggcatatattgccgataaggacaacgtgggcaagctcatgagcgggtgcgtgtccgcctgccggcgaggtgacgtgacgagcgccaccaacggtacctgctctggggtaggctgctgccagacaacctctacaacgccaccctatgcagttacgctgtgctcatggattcgtccgacttcaagttctcaacaagctacttgacttcgccggagtttaacacctcctacggcggccgggcgccaatgctactggattgggctatccgaactgtgaacaactgtgacgaagcacaaaaaaatctcacgttatacgcgtgtaaaagtgacaagagcgagtgcttcaattcctccaatggaccaggctatatatgcaattgcacaaacgggtaccaaggaaatccttatcgacaggatggttgccaaggtaaaattccttctaatctcatcatagctagaattttaaaattacgattaccctaagtctttcttgaaatacacaaaaattcattcatttgttgtgctggttttccttttctttttccatgcatgtggacaggcggcgccacaacattttttcgactcaccatctgactttgatgatgattccggcatattgctcggccgcctctgcagccacctgcgtgagaagctgcggcggggtagagatcccttacccgttcggcctggatcctgcctgcgccctgcccggcttcaacctcacctgcaacatcaaaggagatggcaagccgtattacaaagacgtggagctgcttaacatctcgctgacagaaggtcaggtacgaatgagctatgcggcactcatggaggcatccagcttcaacttctctaagaactaccctacttcttcatcgttcaatgatcattaccgtgggcgagcgccgctgcttgtggattgggccatcggaaatgagacctgtgatgtagcacgtgtattacacgtgcatcagcaaaaatagtgggtgtgtggactcgctcaatggaccaggctatagatgcaactgctcccaaggatttcatggaaatccttacctgaaaccagaagatcccgacagctgccaagatattgatgagtgcaaggaaccatataagtacccctgccatggaaaatgcagaaataaagttggaggttatgattgtacttgtccgtttggtacacgaggcaatgcctacaatggaccatgcgacaaagggcggcttaagcatttttaccttctcctcgctaggaatttgtgcctctcttgtggttgctctaacgactttacttgggatagaatggatcaagtacaaacaacgaatcaaaaggcaagacatcatgaggaagaggggcgagtattttcatctacacggaggccaattgttaacagatatgatgaacatagagaacaacatttcatttaagctgtatgaccgagatgacattgagttggccaccaaaggctttgacaagacatcaatcattggtgaaggaggtcagggtactgtttttaaagggtataatcttgatcaagtgaacaaccctgttgcgatcaaaaagtgcaagggatttgatgagaatagtaggacagaatttacacaggagctgctcatactttctcgagtcaaccatgaaaacatcgtcaagcttcttggttgttgtctgcaatttgaagttccagttcttgtgtacgaatttgtccccaataagactttgcactatctaatccacagccaaaatgatccatccatcagaacactggagatccgcctaaaagttgctgccgaatctgctgaagcattttcatatctacactcactggaccaccctatcttacatggggatgtcaagtcgatgaacatactgcttagtaacaattttattgcaaagatttctgattttgggtgctccaaaattagggcagctgatggacacgatgacgtggtgaaaggtacgattggctatctagatccagagtacctgctgaagttcgagctcactgacaagagtgacgtgtacagctttggtgtcgttcttcttgagcttttaacacgccgtacaccattatctaagcagaaggtcagcctcgcatcagtatttcaagaggccatgaaggaaggcctgtttcttgagctcatagacacagaaatattacatgaggataacatgggattgattggtgatctagcaaggctggcatgccagtgtttagcaatgactagtgagagcagaccaacaatgtgcaggattgcagaggaattgcgacgaatagaaaaacgagtacgacaacaccgtggggtacttacaactattagttcaatgtcattgttagcaagttcatctgcagacacatcattgcagtgattggagagctctatgcatctcgaaccgagccaatgcatcgagccagtttttttttattcttaggacctcaaatgtgcctttgatttctctcatcagtgccgtcttctagg

SEQ ID NO: 56439 - DNA, 468 bp, Oryza sativa
  Clone ID: PAT_MRT4530_5834C.1
atgcagacgtccccgaagctccccgaccccatttttcgcatagaccagcaaagggcgtacaagcctgcggccgggtccccgccccccgttagccccccatatcgtgcgggattccagctgcccccgcaggccaggccaagagccatcctggcgccgcccgggccagggcgccgacgggcttgccacgcacgtcgcggccgggccttgcccgccggcctcgtggccgcgtcggcgtccacccccgtcgacgtcgtcaagaccagggtcatgaacatgaaggtggtggccggcgcgccgccgccctactccggtgcgctcgactgcctgatcaagaccgtgcgttcggagggggcgatggcgctgtacaaggggttcgtcccgacggtgacgaggcaggggcccttcaccatcgtcctcttcgtgaccctcgagcaggttcggaagctgttgaagggcgtcgacttctga

SEQ ID NO: 56440 - DNA, 459 bp, Oryza sativa
  Clone ID: PAT_MRT4530_58350C.1
atggaggtgataagagagaaggtgtcttgtgtgctaccactctgtcatgccatcttgccgagggacccatcgagctttgtcctcactgttaagcatggatcagatgcatggttcatgcccggttttatggattcaagtttgaagaacacaaacaatatgcagggaatttttctttacttcagattatttcatatgaattcagttgtcaaaaaattccatgttaattattggttctactgttcaacgaagaaggttgataaggtcatggaggaaatgaagcctataattattttatcattgcttggtggtgtttcagatgactctgctgcctcatattcgacaaattggacattgaagcaggtgacaggagaaactcatacaagagtgataccacctcagttactgccaaaagatcagaaaatcatctttcagaagccgagccaacattgctactcttga

SEQ ID NO: 56441 - DNA, 1798 bp, Oryza sativa
  Clone ID: PAT_MRT4530_58351C.1
agcccagccccgcctcgcgctcctcgcctttctttcgcgagagtcagagacggcggcggaagcgtcgacgcctcggttgcccaccagcgttgcggcgtcgccccctccttcttccatccttttccctcccctccccttccctccctctagctatgtgatttcaccggtcctcccctgcgcgaccaaccggagcccttcgggcttctcgggtatttttgatccgacgcctcgccggtgagggggatacagctccttgccggtggcgccggtgagggggtagatgtgctcatccagcgaatcaagcttatggtggatcactgttcaatgggacaagctggcggtgggagtcgatatggtgaagcagcagcaagcgagcaactgaatccgcagcgccgctcgcgtggtctctgtccacaggcgtttcgagttcctggttgtgcgtcccccatccatcccgggttcccgactcctgcagtcgccaaagattgacgccatcaaccgtccccatcacgtcatgatcctccgcttcccgttatgcttcgtgctgctgcacacaaaaaacaacagtgttccatcgaatgactgatggattagggtgaggtgttgttcacagataagagagaaggtgtcttgtgtgctaccactctgtcatgccatcttgccgagggacccatcgagctttgtcctcactgttaagcatggatcagatgcatggttcatgcccggttttatggattcaagtttgaagaacacaaacaatatgcaggtgcatcatttcttatttatttccatatttttcgtgtacatcattgtttaattttaggaaacactttaactgcttcatgttgttactacctctattctgaaagagaggtacttacagtttcagcggggagattcatcttgcaggacaccattcatcttctttaccatggttcggttaacaaaagcttaattatattctaatgatcatatgtaattatgcctcacttctattaagggaatttttctttacttcagattatttcatatgaattcagttgtcaaaaaattccatgttaattattggttctactggtacattatatattgtacaatatagtgatgccactttacctagcttgatagaatgacatagatggccaaaaaaaaaatcatgctagggatcactacaaggctatgaatagaaagcttatatgaaaacattctgccaacaggatatccattggaatgatatactttttatcaagattgcaaatgttttctaccaggaatgacatgatgcagatatatagatgatgtacatgctaataattgatgagtggttagattaattcatgggatttgttgtgttggtccagttcaacgaagaaggttgataaggtcatggaggaaatgaagcctataattattttatcattgcttggtggtgtttcagatgactctgctgcctcatattcgacaaattggacattgaagcaggtgacaggagaaactcatacaagagtgataccacctcagttactgccaaaagatcagaaaatcatctttcagaagccgagccaacattgctactcttgaaaaacacatctatttctactttttttttgtgatatttgtatcccaaaacctatatttagactatatcatggtgtgtattttgtgccgttttggtgatttgcgacatttttttttctctatcggtcatgatttatgttacatagaagagactgtacatgcgagacctctctatatacgatattacttatcttattttgtcattaaaaaaaaaaaaaaa

SEQ ID NO: 56442 - DNA, 649 bp, Oryza sativa
  Clone ID: PAT_MRT4530_58352C.1
cacacccctcggacatacagcaatcatggaacacatccgctctttcctcctagcagcactggcagtcgtggtggccgcggccacggcggcggcggcggggctaccgccgctgccatccacaatgccggcggacgtgccgcagccggagatcccgccgtgcctgaacgacctgatgccatgcgcgtccgtgtacgacgacagctccatgctggggccgtgctgcgacgcgctggggaaggtgttcaagagcgatcgggcgtgcctctgccagatctgggagatggccagaaacgacaccaggcaggtcgggagcaacgccctcgacggcgatcagcaaatgttcgcccggtgcaagatccctggcgcttcctccaccatctgcgacaacgggcaagcaggtcatggaacatcggcaggctactcctcgacaggctcccaagcaagaaatgcctcacctcactcgaggttgaccgaggcattccggatctttcttctccttcaaatactgttcattttgggagtgtgaagcacactttggaagacatcattttccatattcatctcccagttcagtgcatgtaaccacatatgcatgttagttgtttgaccgaggtgaatgattcgaagacaatggtcgctgtctagtttt

SEQ ID NO: 56443 - DNA, 2534 bp, Oryza sativa
  Clone ID: PAT_MRT4530_58353C.1
gagaacgcggcccgcctttttttttttttttttttttttttttaataacaagttaaatttgccattttgataaaccaatacgattaaatgtggcccgtacagaagcgtatcggtatttggtaacatcaatcaaccttttttgctttcacgtttcgacatgatataaaacttctgtaaggagcgaaattgttacaaagaagcatcaataggaaaaaaaaaagaacagatggaaactaggtatccaaaagttagaccagcttcattgaagctatctgggtagcaacctccatagcttcctttagttgagaggcctcagttccctggccctgggcaattccattcttgccaccacctccctttcctttgaggggcgcaatcgatggtgtcaaccaatccaacaccttcaagctgttagcagcgctgggaggcacaccagcataaatgactgccttattcgtggcttcatccgtgctgaatagcatgattggcaaatccttctggtccttgactttgataactgcttcccgaatagcacttgtgtcaagacccacatctacatgagcaacacagaagcgctttccttcagaaagagcagtttgggcggcatctattgcaaacttcacggccttctggatgttctcctcgcccattttcttcttggccttcctaagttcatcctccaacttcgacacccggcctttaagatcagcttttcttgcagctggaattaaagctgtatcaagcttgctcttgatggaagcaatcgtcttttccaatatagctccctccaattttgatgcttcattgatttcagaatcaatagatgatgcatcctttatagcatcagaggcatgtttagcagtaacagctgtgatcctcctaacacctttagcaataccctcctcggacaacagggcaaatgcttctgcctcgctagtgtttttaatgtgtgtaccgccacacagctctgttgaaatggatagccattctttgctttcaggattggcaagtagatcttccactttgcgaccaactgatacaactcttaccggatcaggatagatttcaccaaacacagctcgtagaccatttatgcgcttcgcatctgctaattttatttcacgtgcaaatacttccagtttgtcttttatctgttgattcactatagactcaattttccgcaaatcttctggctgaacaggtttcccatgggagaaatcaaaccgtagcttctctgggagaacaattgaacctttctggtcaacatgatcaccaagtatttcccgtagagcaaagttcagcatatgggtacatgtatggtttggagcaatgagagcacggcgagcataatcaaccttgcatgccactttatcaccaacagacaatgccttggaaccttttgtaaatgagcccatatgcagcacatacccagcaaatacttgaacattagttacattgaaagatccgaaagacccttcaattttcccagtgtcatatatctgaccaccctgttcagcgtagaagcttgtactttccaggacaaggccaaagtcctcatcgccagatgcggcacttacatattctgaaccagtgtagatagccttcaccacactgtcattgtccttataaccatacttcgggctatcatctgtactagcaagcccttggttgcgcagctgtgctgtagcattggcatccaagacaatggaattttccccagccttgaagcgtgcattcctagccttctgcctcgcttcttccattgcagcatcaaaaccctcccgatccacactcaagccatagtcaactcccatgacctcagtcaggtcaactggatagccataggtgtcccacaggacaaatgcatcctgtccactaagtactgttcctccactctctttaacagcatctgccgctttcttaaatttttcaaaaccctttgctagagtgttctcaaagctttcctcttcatctttaattatatctttgatcttcttttcattgtccttcagctcagggaatacatctcccatcagttggacaaatacatgtacaagagagctaaaaaatccttgctttgctttcaacttttgatgaccaaagtgaacagcgcgcctaagaatacgcctcagaacatattctctgccctcatttccaggttgagaaccatcagcaatagcaaacgaaagggttcttatgtgatctgcaactactctgtaagccatatcaactttgtcaacatcttcaggacctactttacccgagtatgattgaattccattgccagccaattggtggatggcatcaaatattggcatgaatacatctgtgtcataattgctcattttattctgaaggatagaagttaagcgttcaaatcccattcctgtgtcaacatgttttgctggtaaaggtctcagagtacaatctgcttccctattgaactgaatgaacacaagattccatatctcaatacaagtggggtcatcattgttcactagggaagcagcatcacggttgcccggacgcgtggg

SEQ ID NO: 56444 - DNA, 543 bp, Oryza sativa
  unsure (1)..(543): unsure at all n locations
  Clone ID: PAT_MRT4530_58354C.1
ctccgctccctcgtcccctcccagagggatgcggtgctcgatgcgngaanaaaagggctgcacccggaagatctacnaagacnccaaagtgtnctgcaacggggaactggtgctggtgaccggggggaaacaaacccgaagtacaccgtggacattgtggtccggggaaancaccctactacgtcngcgacacntcggcnatagtcctccntggacagcccnattcaaaaanttccncaagaaattggggccncattcaaggaattnctggccccaagaaccattggaaggganaattcncccccacggnaaccggaatttccacccggaagnaagaaaggaatcccccggngccacctnaacccccgtttcncctctcncctccgccgccgggntcnccggngcggtttccncttggttnattttggggaatttcctttaaatggattaacncccccttggcttgcnccccccctttacnctttcnttncccctttgcncncctaggtttttcaatcngggtttccccnttggaaacctttt

SEQ ID NO: 56445 - DNA, 261 bp, Oryza sativa
  Clone ID: PAT_MRT4530_58355C.1
ggacatcttgtttttaaaaaaacgtataggataacacgtagtacacacagatggggaccctactgaagaaaattaagaaaaaacaagcacacggggagcggcccacaaggagcgtacagctgatacaaaaagagaatggcccgctggatgggggccgcagggggtataataactacgttgataaaaaatgctggaaaaaatacgtgcttaaatacaagctgaacaactccggtcgaaccaccgtgaaaagcccaatcgatc

SEQ ID NO: 56446 - DNA, 161 bp, Oryza sativa
  Clone ID: PAT_MRT4530_58356C.1
atattaaattttttttttttttttttttgaaaaaccattatcccaaaaagctttttaaaggaagaacagttccccgaggataagaagaaaccatgaccaaataaagggagaccagatattctccaaggcttcgggcggcctgcaaaattgaacaagagggg

SEQ ID NO: 56447 - DNA, 383 bp, Oryza sativa
  Clone ID: PAT_MRT4530_58357C.1
cacaaatcagctacagaagacctcgtcttcaccatctggctggatccttgcacagagactagccatatccttgacgtgaacagcctgcgcaaccttacaggctacatgcacgattgtcaaaaggttggcctagagccatcaccttggcagctccttctgttcttcgaagacgcttcctcagttacgataccgccggcgcttagttggatgccaaactggctgctcacgtgggtccaccacggacttgcgtggtacgcagagagtgtgttagggtacaagaggtcgtattccgaatatgccaaagagtcttaatgccctcactcaggtcttgcaaatatccctttggtaaattacatatcgaaatgaagcgtattgcattgagt

SEQ ID NO: 56448 - DNA, 1679 bp, Oryza sativa
  Clone ID: PAT_MRT4530_58358C.1
atggagcaagcggcggcggaggcggaggcggagaggatgaggagggagaagaaggacggggtggtgaaggaggtgatacggctggagagggagtccgtcatccccatcctcaagcctaagctcatcatgaagctcgcctacctcgtcgagcaagataaggatcgtggcgagttcttgaagctatgtaggagggtggagtacactatccgtgcttggtatcttctgcaatttgaggacctaatgcaattatatgccctatttgatcctgttaatggcgtgaagagtttggagcagcaaagcctgacaccagatgagattgaaacgcttgaactcaatttcttaacttatatgtttcagataatggaaaagagcaacttcaagttgttatctgatgaagaatatgatgtagcccagtctggtcagtatcttctgaacctaccaatcaaagttgatgaatccaaggtagacaagaagttgttgacaaggtacttcaaagcacatccacatgataatctaccagcatccgttgataagtacattatatttcggcggggcattggaatcgaccggacaactgattacttcttcatggagaaagtggatgtaataatatcacgggtgtggagatcattgctaagagttacaaagattgacagactcttctctaagaaaaagcaattgagggccaaaaaggacccaaagaagactgatgaagttaatgaagaagtagaagaacaagaattttctgttgagcgcattcgcctagaaaagatggagctgaggaaatcaagcacagaagccaagccggatcgaggaatatttgtaaagcatttcaagaacattccaatggctgatatggaattagttctgccagagaagaagaaccctagtttgactccaatggattgggtgaaatttcttatttctgctgtgttaggtttggttactctaataggttctcttgagatgccaaaggctgatatatgggttgtcatagcaatcttgtctggtttaattggatactgtgctaagatctactttacatttcaggccaatatggtgtcttaccagaatttgattacaaaatcgatgtatgataaacagcttgacagtgggaaaggaacacttctgcatttgtgtgatgatgtgatccagcaagaagttaaagaggtcattgtttcttactatattttgatggagcaaggaaaggcaactgtacaagatctcgatttacgctgcgaacagctcatcaaggaagaatttggtgtggagtgcaattttgacgttgttgatgctgtgaagaagctagaaaagcttggaattgtatctcgggattcaatcgggagaattgtatgtgttccattgaagcgtgcaaatgacattatagggcaaactactgaagaaatggtgatgcgagctcaacaagcttcaaccggttcatagattctgcatactgttgaagtgatcttcgtttctttatatgaagatgaaattaattgtgatattctcaaacgatagtttttttttctctgtgcagttctgtgatgtacgataatgtcaaaaataattccatcttattatttcgttctttcatttattctgtaaataagagcgatatatttcatttttcagtgtggcaaaaatggtgtatcccccacaaaatgaaccttgcaatttcc

SEQ ID NO: 56449 - DNA, 643 bp, Oryza sativa
  unsure (1)..(643): unsure at all n locations
  Clone ID: PAT_MRT4530_58359C.1
ccggccggaagaaattaacttagcaaaaatcaacgctcacatattcatggcatcagcttcagacaagctcgtcctctcggccatcgtgctcgccgtcctcgccgccgtggtggcagcggcgtcgggctacggcgacgtcggcgagtactgccgcgtggggaaggcggtgtcccggaacccggtcccgtcgtgccggaactacatcgcgcggtggtgcgccgccgccgggggccgcatggactcccgcaagcagccgccgcgggagttcctggagccgtgctgccgggagctcgccgccgtgccgatgcagtgccggtgcgacgcgctgagcgtgctggtgcgcggcgtggtcacggaggagggcgaccgcgtctccggggatgatctcccagcacgcggcaccggggtgcgacgccgcgacgatcgccgggatggcgagcgcgctgacggactacggccggtgcaacctgcagcacactgggtttctttggctgcccatgggttgggaagtggcatgcattaacttccttagtaattaattaattaggcctttgcttagttaattatttaattagntatccggcttactggataattaagtatcgatatttgctagtagcatctatcatggtttggatgctgc

SEQ ID NO: 56450 - DNA, 860 bp, Oryza sativa
  Clone ID: PAT_MRT4530_5835C.1
atgtggccgggtggttggcgactctactatcaccgcaaagctttaggtgctgcgatcgtgcttgtcaacttgtcacaaaaagttgccaacacgatttttggaggcggtccgctggggaagtctgttcaacgacatctcaacttcgacgccaccatgtcgaagcaacgcaagcaagaggtggatccatccaatatcgttccaatctcattggacgatcttgaggaagaggcacgcaagatcgtggaggagcgacttaaggagattactcaggaggtgttgatgaaatcatgcaccaagacctgtcaaggtgtggttctccagcccggaccgtcgcccaaagtcatctttggtgagtgtcttccggctaggctgatccaccgcctatgtacatgggagtggtggatccgctaccgggaaggtcagggacggctagaccgcagcgataggaacagtggtctcaggctaggcggatctgccacttgcacccacgagagcagtggatccatcgccgaggaggttggtggaagcgtgagtgcgatggatctaccttgtcgatacgagcgatagcctcggactagggcctcgcagatccggtagtgcaattcttctctctcacctttccccctcccttgttgatccggcgcaatggccttgggaggggcggatccacctctggcaaggttggggatagtgttgacggttgttaagtactgatttcgaccatcaatgctatactcaagagaagatgttggctgtggtgtgcttgtatgttcaaggtgggctccaactccggcgtcgacagtgatcagggggcggatggccatgatgttggccttgagtgcgtcccccacgatggccat

SEQ ID NO: 56451 - DNA, 625 bp, Oryza sativa
  Clone ID: PAT_MRT4530_58360C.1
aaatgtgctaaatgacaagcaaatgcaaagctgcatgcgaagtatgagctatgggcatgtggcatgcagacaacttgcgtgcctgctccgccatgcgtgctcgccgtcctcaccgtcgcggcagcggcggcgggctacggcggctacggcgacgtcggcgagtactgccgcgtggggaaggcggtgtcccggaacccggtcccgtcgtgccggaactacatcgcgcggtggtgcgccgtcgccgggggccgcctggactccggcaagcagccgccgcggcagcgcctgtagccgtgctgccgggagctcgccgccgtgccgatgcagtgccgtgcgacgcgctgagcgtgctggtgcgtggcgtggtcacggaggagggcgacccgcgtcccccgggatgatctcgcagccacgcgggccccggggtgcaacccccccaaccatcgcccgggatgggcaaacgccctgaacggactacgggccggtgccaaccggcaaccacactggggtttcttggggctggccccattgttgggggggttggcattggactcaacctttcgttaattaattaaaataaattaagggcccgttggcctaaattaaattaatttaaattaaggta

SEQ ID NO: 56452 - DNA, 198 bp, Oryza sativa
  Clone ID: PAT_MRT4530_58361C.1
atggcgcagccgccggaacctgctggagtgcgctccgtcgcgctcgctactagtggaggtggattggcgactggcgagggccacgcgcccacgtgtgatggtggcggtggagtggaggtggattggcaactggcgagggccgtgcgcccgtgcgcgatggtggccgtggggcggctgcagctaggtttattggtttag

SEQ ID NO: 56453 - DNA, 663 bp, Oryza sativa
  Clone ID: PAT_MRT4530_58362C.1
cccgtctcggccaccgccgccgggttccgcggtcttcgccagacttcggcgagtactccgcgtgggggaagcccggtgtccccggaacccggtcccatcgtgccggaactacatcgcgcggtggtgccgccgtcgccgggggccgcctggactccggcaagcagccgccgcggcagctcctggagccgtgctgcccgggagctcgccgcagtgccgatgcagtgccggtgcgacgcgttgagcgtgctggtgcgtggcgtggtcacggaggacgggcgaccgcgtcgcccgggatgatctcgccagcacgcggcagcccagggtgcagacagccgcgacgatcgcccgggatggcgagcgcgcctgaccggactaccggcccggtgccaaccctgccagcacactggctttctttggctgccccatgtttgggggtggcactggattaacttccttagtaacttaattaattagcgcctttgcttaattaattatttaattagttatccgggttactggataattaattatcgatatttgcctagtagcatctatcatgtttggatgctgctttctccgtgaatgtgatgataataataatcagaagaaataaataagaagagttggattcatcagctttccagtatcaaaaaaaaaaaaaaa

SEQ ID NO: 56454 - DNA, 393 bp, Oryza sativa
  Clone ID: PAT_MRT4530_58363C.1
atggcaagtgggttgtggtttctggggatatcacttgctgtcctactactctgttacgtgggaacaaacagaaggggtgatgggcagcggccgcctggccccaggacgctgcccatagtcggtaacctactcgacctgcgcggcggcaacctccaccacaaactcgcaagcctggctcacgcccatggccccgtgatgacgctcaagcttggcctcgtcaccaccgtgttcatctcctcgcgcgacgctgcgtgggaagcattcgccaagcacgatcggcgccttgcggcgcgcacggtcccggacacgagacgtgcgctcgcgcacgcggaacgatcaatggtttggctgccgagctacgatcctctatggaagaccctgcgcaggatctcg

SEQ ID NO: 56455 - DNA, 1178 bp, Oryza sativa
  Clone ID: PAT_MRT4530_58364C.1
ttcaaatacgttgcactcccaatcccaagtgatcaagaacaaaattaaattttctaaattacaagcaaatcaaagctcatcgaagtatagctatggcattggcatcagacaagttcgtcctctccgccatcgtgctcgccgtcctcaccgtcgcggcagcggcggcgggctacggcggctacggcgacgtcggcgagtactgccgcgtggggaaggcggtgtcccggaacccggtcccatcgtgccggaactacatcgcgcggtggtgcgccgtcgccgggggccgcctggactccggtaagcagccgccgcggcagctcctggagccgtgctgccgggagctcgccgcagtgccgatgcagtgccggtgcgacgcgttgagcgtgctggtgcgtggcgtggtcacggaggagggcgaccgcgtcgccgggatgatctcgcagcacgcggcgcccgggtgcgacgccgcgacgatcgccgggatggcgagcgcgctgacggactacggccggtgcaacctgcagcacactggtttctttggctgccccatgtttgggggtggcatggattaacttccttagtaattaattaattaggcctttgcttaattaattatttaattagttaaacgggcccatgcgatcactaattatggatatttgctagtagcatcaatcatgtttggatgctgctttctcccgtgaatgtgatgataataataatcagaagaaataaataagaaaaaaaaaaaaaaaaaataaaaaataaaaaaaaaaaaaaaaaaaaaaaaaaaaaaaaaaaaaaaaaaaaaaaaaaaaaaaaaaaaaaaaaaaaaaaaaaaaaaaaaaaaaaaaaaaaaaaaaaaaaaaaaaaaaaaaaaaaaaaagggggggccctttttaaagaaccaaatttaacttcccggggtttgcaaagtaaaaatttttttttagggcccccaaaataaaataaccgggccggggtttaaaaacggggggacgggaaaaaccttggggttccccaactaaaacccctggaaaaaaatccccctttccccaggggggctaaaaccaaaaaggccccccccgatcccccttccaaaaagtgccccaccctaaatggcaaatgggcccccccctttaccggcccttaaagcccgggggggtggggggttcccc

SEQ ID NO: 56456 - DNA, 643 bp, Oryza sativa
  Clone ID: PAT_MRT4530_58365C.1
ctcaggcggggcggcggcagcggcctcctccggcgagggtaaattcccggctccaacgtttgaccccgcatctgccgatcagcgcaccaccaagctctcctcccccttcaccgaaatccgcagccacctcaagcccacctcttccgcaacccccagccctcatccggcgggacctccgccgccgcctcctcgaaccccagcccttccttcgtcgacatcttccacgccaggccggacctgcagcacagagtatgccggttttgatggcctttggctgattggctctcaggccacaatggcgtacttgctggggaaaccgcaacatgagttggtggagaggcagcagattggttggctcgcgggccccttcgccgtcatcgtcgacctcctcgcgccgctctttgccgacctcctgcggcgcagacctgccgacgcagtggtgttcgacggcgtcctcccgtgggctgccaccgcggcggccaggctccgcatcccgcggtacgcgttcacggggacggggtgcttcgcgctcccggtgcagcgagcactgctgctccacgccccgcaggaccgcgtcgcgtcggacgacgagccgttcctcgtgcctggacgccccgacgcggtgcggctcttccgcccatag

SEQ ID NO: 56457 - DNA, 2752 bp, Oryza sativa
  Clone ID: PAT_MRT4530_58366C.1
cctggtccgtccccgctctctccactccgccgccgccaccgctggtcgtcgcctccccccccaaatcaaaaatcaaaatcaaaacccccccatctcttcttctagtttcttctagaagccgggacgaacaccgcgtcgtcttcgccttcgccttcgtcgtctcccgctcgcttcctccctcctgggttaggctgtgcactgaagtactgaacgttcttttgtagactgttaagcttatcctgcatcatggagaatggagacaaggatgagaaaaatgttgctgtcacggaaggatctaccaattctgaagaaaaggatcaagatgaggatttgttgaggagaacagaaatgctgaatgcaaaagaagcaataaattcttcaaatgagaattcaggcaatgattcagaagcacagatccatgtgagagatgattcacaaaaagaattcaatgagaagatgaataaagaaggaagctcagatccaatggaacctacagattcaagccagacagaggaagatatccttgctgaagacaaatctgaagaacctgtttttgatggaactgaggttgctgaaatggaagatttgaggcgttcgtccaatcaatctgtggaacttgattcagatgcccatgggtctgtactcaatgaaagagctactgcaatcaagaattttgttaaggaaaagggtgccattgcagtttcaacatttataaggcgcctttctggcaaaaaggacgaaaatgaattttctgttgaagatgaaaagaatgaaggatcagaaagcatcagtagtggcaatattggctcagatgctgaacctaaatcaaaagaggtgcagcccaaatctgaggagagaactacatggaatccactcaacttgattaaaatcggacgagattttgataccttcatgactggggaagctgggcatgaaaatgtgccagatttgatagagcaaccaacagggaagggaagaattattatatacacaaaactgggttgtgaagattgcaaaatggttcgctcattcatgcgtcagaaaatgctcaagtatgttgagatcaacatcgacatattccccagtagaaagatggaactagaaaataatactgggtcatccacagtaccaaaagtgtatttcaatgacttgctgattggagggttaactgaattgaagaaaatggaggagtctggcattcttgatgacagaactgatgctcttttcaaagatgaaccctcatctgctgctccgttgcctcccttacctggagaagatgatgaatctggtagtgggaagatagatgagttggcaaccattgtcagaaaaatgagagagtcaatcactctgaaggatagattttacaaaatgagaagatttagcagctgctttcttggtagtgaagctgtagatttcttatcagaagatcaatatttagagagagatgaggcggtggaatttggaagaaagcttgcaagcaaatatttctatcgccatgttttagacgaagatgtatttgaagatggaaatcacttgtatcgcttcctggataatgatcccataattatgagccagtgctacaacatccctaagggtatcattgatgttgaaccgaaaccaattgttgaagtggcatcaaggttaagaaagttgtctgaaaccatgtttgaagcttatgtatctgaagatggtaaacatgttgactacagaagcatccagggttgtgaagaatttaaaagttgttgcggttatcctattgtgatggttgacgggtatgctgtactaacatatttcttgcataggtatgttagaacaactgaggagctccagagggtggaaacccatgagttatcacgggaagaaaagctcgctttcttcataaatctctacaatatgatggctatccatgcattagtgacatgtggtcatcctgctggaccattggacaggagaaagttctttggagattttaagtatgtcattggtggatgtgcttattcaatgtcagctattcaaaatggcatactgcgtggtaaccaaaggccaccatacaaccttgccaagccttttggacagaaagaccaaagatccaaggtggcccttccatatgctgaacctcttgttcactttgctttggtatgtgggaccaaatctggacctgcacttaggtgttactcgccaggaaacatcgataaagaactggtggaagctgcacgtgatttcctaagaaatgtaggaattgttgttgatcctgaagccaaggttgcatctgtaagcaagattttgcgatggtatagcacagactttggtaagaacgagacggaagtgctgaagcatgcggcaaattatctggaaccagcagagtcggagcaattcttggaactacttgcgaacactcaactgaaagtcttgtatcaaccctatgactggagcttaaacatttagctgcagccatggtattcacatagatgtctagttatacttgaatacctgtcacagatactcgtggaagatcacgacttcttttacaccagaattttcccaagagttggtcacagctctggatgctgttttgttgtggcacaaagaaatgagtaccaatccaactctgttcgattcactggacaaaatgtgtaccttccttgtttcttttggacgttctctgttgcggccattcgtttttttggcggtgaatagctgaatgatttgtgatagcctttcaaggaaaaaaaaaaaaaaaaaaaaaaaaaaa

SEQ ID NO: 56458 - DNA, 897 bp, Oryza sativa
  Clone ID: PAT_MRT4530_58367C.1
atgggtggacccacgtgggccccatatgtcattctcagcccccttcttcctcctctctctctccccatctccctcacttcaactctctctcccctctcctctttcacgacggagagacagcggcacgcggcggcggaggcacagctccggcagctatgggcagaagagccgcaccgcgtcggggcgtccaggcacgaggaacggctcgtcgtccgacgcgacgccgtcctgcggggcgtggagcagcagtgctcgctgcaccgggagcgcgaagcaccccgtccccgtgaacgcgtaccgcgggatgcggagcctggccgccgcagtggcagcccacgggaggacgccgtcgaacaccactgcgtcggcaggtctgcgctgcaggaggtcggcaaagagcggcgcgaggaggtcgacgatgacggcgaaggggcccgcgagccaaccaatctgctgctgactacgatttcatctaaacaacaatgcatcaaatgtacaacactcccagctcaccctctccaccaactcatgttgcggtttccccagcaagtacgccattgtggcctgagagccaatcagccaaaggccatcaaaaccggcatactctgtgctgcagccagtagcaaaccaaatacaaccacaacatcatcagtaaccaaaggttatccatcagtttcatcaggcattcaccaatgtcgactaaacgagaaacaagaaaaccaaaatcacgatgtatcattacagttgttcgtcttcagatctttggtcggcagcgcgtccgatcagacgtccggcctggcgtggaagatgtcgacgaaggaagggctggggttcgaggaggcggcggcggaggtcccgccggatgagggctgggggttgcggaagaggtgggcttga

SEQ ID NO: 56459 - DNA, 441 bp, Oryza sativa
  unsure (1)..(441): unsure at all n locations
  Clone ID: PAT_MRT4530_58368C.1
gcatatatttctagaggtttgtccaacatatctaaaattctagtatgggtgccgtgttgttcaagagttgggttcttttctgccttagtaccaacagagttccgctttatggttcacttcacaaaattttctccgcatgttgtttatttatcttaaacgagcaggatggaatgcttcataggctgcttcaaggaatgggagataggcangtcctctattttccagataatacnggggagacatcgaaaagatatgcacctcttncttctttgtacagctgaaagtatgccttatgatagcacaccaaccacatgcaatttcttctaatgaacacancattgtttatactttgctacatacagnggacagttacacctcaaatccctnctagaataaatcgaatgaaacagttacataccagtctgtactatgacatcagta

SEQ ID NO: 56460 - DNA, 2088 bp, Oryza sativa
  Clone ID: PAT_MRT4530_58369C.1
atggggcaggctttgggcggggcgctgcgccgcctcgggcgccgccggggcggcgatcccgccgccgcgctgctccgttgcggggtcgtcccctcgtcgtcatcatattctgctccggggacgctgctcccgctgaaacaaccggtgggggattgcgggggctgccgccggagcttcagctcgtccgcttgggtgggttcccgcctgtggcgcagtctgcatcggcgtcagagcgcgggggccgcggccacggccacggcttgggaggcgcaccactcgacgaggaagagctccatggcaacagtatcaagtgagcctgacacatctgcttcacagtctgaaatcctacatttcatcaaatccacctttgggacacttgaagggcaaaaccattgttggttgaactgcatgaatgacacctggaagaccctcaatcaaggagtataccttatccttttatatgaatcttgtggaacatcagacagccatggaaaactttcatctgcttttcaaagattgaagtatcttcaacagaggtatttatgttctaaggatcatgccctcttctcaaatttggatgaagagcttgaggttttgatcaaggcctgcaaatctttattgaaagcaggcatggacaatgctgtcttgaaagctgaaccttctgacactgctttagaatcaagagtttcttggcaaaaagaagaggttcctaaagaaccgtatgttggttctattggatgctcccctggctttgaggatggtgaatttgaatctgccaagttcttgcgccctgctgcatcattttataatactgctgaagattgtctgtatattgtagattcagagaaccacgcagttagaaaagcagatttgggaaggaggatgttagagaccgtttatccagtctccagtaaaagtagcagtggcatctggagttggattgttgataagctaggcttgagacgggaagatgctccaagtgaaaatttcattgcagattcaatagcatttccatggcatttgctaaatattacagaagatgacttcttagtagcagaccgcaactttgaagcatcatggatcttgagtgtatcaactggtcaaaaacaggaaattggaagaggtatagctgaagaaatggagtcatatcagcaaataatacatgaaagatgtgctctcctgaaggatatgaacatgaattggtcgtcaagtgctaaagagcattctgatctgttggggaagatcccgttcaaggaacttgtctcgtctgttgcaagatttcagaagtacattatcttctgtgatgcagatggtcaaagggttttgaagcatgacttggataccaatggcacctcaaatattcaattttcgaattttggggtccttgggttgccgtattggtttgtttgccatctcgagagagtatcaaccaggggacattcaattggaaaatttcaagagcatacccgtaaagtaaatgtgctcccaggaagatgcaatataaaggtttctgtagatataccagctgatactcaacttgccgcgcctttggtcgagagttgtatttggcgccaagtaaggggatctggtgctgaggtatctggttttgatgaaccatccacaagcacagaaaaggttggtatagcacagcaatggtatgatgagatagacaacctagctttttctgaagttcctgaggaacctacagtgcatgaaggtgatgagaacctttcagatggaagttatcaagaacagagaagagcgcatttcaactgtgttgttaatgtcagtcctgggacatgcgagctggtggcctctgctgcgttgtacctgaagatcgatagcgcgaaagatgaccacggagaacagaaatcactggtgaagaggatcatccagtgccagcgtcgcgaggatcacgcaggcgttgagctactgatggagagctgcaaggattcgagggacctgacaatcatgaagccggtgcacctgaggctgatgctggagtgtgccgatcatcctgctgggaccaccaacaaggagaccatcagctcagagtccagctttgagataaacatctctttagattag

SEQ ID NO: 56461 - DNA, 261 bp, Oryza sativa
  Clone ID: PAT_MRT4530_5836C.1
atggccaaccctaactggagcagcatggcagcagcgtgcaagctgactagtggtcggcctcgcctgggcgacggagaggcgagcaaaacacagcgcaaggggaaccaggtggcccagggcaacgagcaaaaggaggcatgggccagcaaaaggtggcatggcaggctaggtgaagctgggcggtgcagcattaatgtcctcttccacaaggagtccagactacggctggcatcgatattttcgattttcttttctcgctga

SEQ ID NO: 56462 - DNA, 224 bp, Oryza sativa
  Clone ID: PAT_MRT4530_58370C.1
ctctttttctaacccgcctccaccacccacatcgtgggcttctttacaccacctgtggggcttccaaaatatcccttccccttccatcccctttgcccaaaagctactctatcctattctcctccaccatcccattctgaccccaactagttacctctaccttcaatacatccaaatcaccattccacagaactatgacaagatacctccatactaccttcacc

SEQ ID NO: 56463 - DNA, 312 bp, Oryza sativa
  Clone ID: PAT_MRT4530_58371C.1
atggggcatgggacgccatccgctctgcctgccgccatgctcgtccgctcgcctgcaggccgcgctcgcctgccgctactcggctgccgcacggacctgtcgtcgccgctccgcccgcccatcgccgctccacccgtcgcccaccagcctcacttactgaagaagaagaagaagaagaagaagaagaagaagaagaagaagaagaagaagaagaagaagagaaagagaagggagaaaagagaagaggaggagaagaaaagaaaagaaaagaaaatatgtgtaactgacatgtgggcccacatacttttttaa

SEQ ID NO: 56464 - DNA, 388 bp, Oryza sativa
  Clone ID: PAT_MRT4530_58372C.1
ttcattccctagctagctagctagctaagctagcacgcacccatggagcagccttccacctcaagctcgctcgccgtggcagagatggtggccgacgtgctcctccttctgggtgccaccggcacgtccacccaggcagggcgcctcctcgacgaagaactccccaccgacgtcatcccagggatccccggcgtacccggagtgccggtagtcgggcccggtatcccggtgatccccgatgtgcccggagtgcaagtacatggacccgggatcccgttcgtgccggtgatccccagcgtgcacgcagaacgagccgatcatccccggtgtgccgatgatcgccggcgtgacaaccctgacagtgccgacaattgagccgtcgattgat

SEQ ID NO: 56465 - DNA, 416 bp, Oryza sativa
  Clone ID: PAT_MRT4530_58373C.1
acaccgccagatatcaacatcagagattagcctagacaaacccaatccggtgcctatggtagccggtaagagggatctagcgctatctctgatctcgacgggttcatattcaaggaggaaaactaccccgtcatcgactacgagctgataaataaagagaaacaccggtttaggccaacaagatgtagggttattatctgtcagataagaggcccgaacctgcataaaaatccttgtctccatctcttttacctcaatctcgcatataccctggtaccaatgatccccataccatccaaataccgtagtcgcgatctcaaacgtcgacagcagctgcacaaggtggatgggtcggtggcggcgcgggcggagggcgtcggccgtcggccgcgacgacgaagactaccgcaggacga

SEQ ID NO: 56466 - DNA, 644 bp, Oryza sativa
  unsure (1)..(644): unsure at all n locations
  Clone ID: PAT_MRT4530_58374C.1
cccttccaaacggaaaatncggcgtcgaatcgtccttgcgctaattggcggttttaagacgcaatggaattgtccacgccaccatagagccgccattgtgtatgctgtgtagagcgcatgttcttcattgacgatagccactacctcattgggtacctctatgtgccgatgcgttgaacagtgagacaaatcggtgagacttcttggcgtcatacaagcagcgttgagagaatgaaggaccaacagatgtccaaaggtggactcaagtggctagccgcccaaacgtaatgataatgcagacattcnttgaagtagagttggntatgatctggnctgcattttgatgatatacctatcagcgtgtangatgtaaaagttgtatatcgccgcgcaacgggcccagtggcgcaacctccgtattgacgaatggcgatccccgttttaatgattctnnactctgcaatgtgcacgtacattagtgcagtctattcaactcngtatactttttactcgagtctagaaacttggatgatctnngtcgtncagnttgcccttcggcttntgtggatacacgagtaactancagcacgtcaatccatatgctcttgtaggtnccgattgtgntccaaaaaaaaaaaaaaaaa

SEQ ID NO: 56467 - DNA, 290 bp, Oryza sativa
  unsure (1)..(290): unsure at all n locations
  Clone ID: PAT_MRT4530_58375C.1
ggggcttcgancgggcgggcgggccgccgggccttcgttgtcgtaacgaactttccccgggcgnagctttcttggggccgggggcgncggtcgtgggccgncgcaaccggggttggcgggcgggcaggcgggcgggaattggntgncgggtgncnaagaaccggggaaacgcgnccgcccggncgaacgggtggntggcaaccttggttgggtggcaacttcgnccggaaggggggcaacaaagaaccctgggccgcgttacaagcggtgaagctttggttgggaatggg

SEQ ID NO: 56468 - DNA, 1221 bp, Oryza sativa
  Clone ID: PAT_MRT4530_58376C.1
atggatgtgaagctcctgctgctgctgctgctgtccgtcctcctcctgtctgctgcctccatggccaaggacgacgatgagcagcagcagaaggtgcaatgccatgaggacgacgaggcggcgcttctggccatcgacgacgccctcgggaacccctacaatttggcgtcgtggacgcgcaacacctcctgctgcgactggtacgacgtggactgcgaccaggactctggccgcgtcgtctccctctccgtcttccaggacaccaacctcaccggcgccatccccgacgccatcgccaacctcacccacctccgcaccctcctcctccaccacctccccagcctctccggccccatccccgactccctcgccgccctcaccgacctcacccacctcaccatctcctggaccgccgtctccggccccgtcccctccttcctcgccaacctcacctccctcaccatgctcgatctctccttcaactccctcaccggcctcatcccgccctccctcgccgccctcaccaatctctccgccatcaacctcagccgcaaccgcctctccggccccatcccgccgggcctcttctccaacctgcagctgcaggacgacgacgacgaggtgtacctccggctgtcgcacaacaacctgtccgggagcgtcccggcggacctgctggcggcggcgaacctggcgctggtggacctgtcgcggaacgcgctgaccggcgacgcgtcggcggtgttccggcgggcaagggcgttcgaggtgatggacctgtcgcgcaacgcgctgagcttcgacatgaccgggctgcggctgcaggaaggggtgagctcgctggacctcagccacaacatgctgtacggcggcgtgccggcgcaggtggccgggctgagcagcctgcaggacttcaacgtcagctacaaccgcctctgcggcgagctgcccgccggcgccgcgaggttcgatcagtactccttcttccacaacaagtgcctctgcggaccgccgctccctactccctgcaattaagctcccattacttaattactagctatgtggtgaaattatacatcagcaatgcaagcaaaataaataaatatatatatatatatatatatttgtataatgattttaataagtcaaaaacagattgatgcatttggaaggaatgattaataaagctgtgttcaattgtttctgggacaaaaaaaaaaa

SEQ ID NO: 56469 - DNA, 327 bp, Oryza sativa
  Clone ID: PAT_MRT4530_58377C.1
atgggcccattctaccttgaccagaccgtggtctatgccttcgcccggaagctacgccgcgattggcccttcaatgggacccagcgccgcacctcatctgacacgggggacaactatgcgacgtgggggcgtgaccgcgcgtcaaccggacatgaccgacgacaggccggtcacacccgatttgacacgggccagtggcgcgctggggagggccttgggtcgtggcaactcgagggcccgaggggcctgacatggcaccccgaggggcatgacgtggcaccccgaggccccctagccgtggccgcgactcacgaggtgcgggggtag

SEQ ID NO: 56470 - DNA, 510 bp, Oryza sativa
  Clone ID: PAT_MRT4530_58378C.1
cctggtcctacccccgcacctcgtgagtcgcggccacggctagggggcctcggggtgccacgtcatgcccctcggggtgccatgtcaggcccctcgggccctcgagttgccacgacccaaggccctccccagctgccacgtggcgggcagagcgtgagggagggggggaaccctaggctgagcagccatcaatgcgcggtgccccaaccgtccctcaccgcgtttaatgcagtaagggcggacgtgcggtaccgcgccactggcccgtgtcaaatcgggtgtgaccggcctgtcgtcggtcatgtccggttgacgcgcggtcacgcccccacgtcgcctgtctccggtggagtgaagggtgttatgctcgccaccggcaagaacttgtataaccccggtgcccgagagtgctttagcaggattcagggcggctacacaatctctccaagcgagcctcttcccccggccgaactcacaaaaagggggtctcacgatctcccgctaaagagg

SEQ ID NO: 56471 - DNA, 489 bp, Oryza sativa
  Clone ID: PAT_MRT4530_58379C.1
caaaatatggcttccaacaaggtcatgttctcagaattgctcctcgtctgtctctccgggctcggggcggcgatggcgaccatggcggaccaccaccaagtctacaacccctgtgagcaatgtccgccaggaataagctatactacatactcactccctcaatgtataacattggtgaggcgccaatgcgtttgccgtggtgcggacagcgccgtggacaagcaagtctggcaagactgctgacggcagctcgacgccgtcgacgacgggtggagcacgtgcggtgcgctcgatcacatgctgctaagcatctacagggagctcggagccaccgaggccggacaccccatggccgaagtgttccccggctgcctgagagggggactaggagcgcgcggaagcgagccttccggtgttcttgaacgtggacattcgcaatggacctggaggcgactgctactggcttgggtatgctaggagcccaagaac

SEQ ID NO: 56472 - DNA, 159 bp, Oryza sativa
  Clone ID: PAT_MRT4530_5837C.1
atggcggggaagaagtttgaaagaacatatgggtccgacgtggaggcccacgtgagccacaataggagggcaggaggacttttggtggctccagacacggacaggcaggcactggcaagcggaggaagggaggccggaggtcgtgaacaaaacggttga

SEQ ID NO: 56473 - DNA, 1100 bp, Oryza sativa
  Clone ID: PAT_MRT4530_58380C.1
tttattttattgttgtgcattacaaaaagtacacaaaaattgtttgttcaatacagtttagtagtcaactctatggataatttacaaactctgctttgttcaattagtacaccagagccaatagaaaatagaaaaagaaaaggagaaaaaaaaaactctagttaatctgccttctttgtttcaagctattccaacggctgggatctaatcacaacgttcaaaaactagacgctgcaccggaaaatggcgggaaccaggtgtccgcttcatccagcttcatcaggtcctgcaagccatcccagagctggttgctgccggcttcgtccgcgcccatctgccaatccaccggcgtcgtcgtctcctcggcatccgcgctgcacggcgacagagtcggagtcatctgctctgccgttgtcgtcgccgccgtgacagcatcgccgccattgccgtttctttggctgggcatgggcaaaggctcggagcacgggaagttgagcttcgcgcgcgcgccgcggaactcgagggcggcgcggtcgtacgccctggcggcctcctcggcggtgtcgaacgtcccgagccacttgcgcaccgcgcggcgcgggtcgcgtatctccgctgcccacttcccccacggccgatgccgcacgccgcggtacacgttcttcttcctcctccgcctaaccctcttcccgcctgatcctcctgccaccgcggccgcagcagcagcagcagcataatccgtcgccattaccgcctcctcgttccccgccgcctcggccccaaagaagtcgcacccgagacagccgtcgatgccgcacagagcacacgcctccccgcacgccaccgtgacgatctccggcggcggcgtggtgcacccggacaccacgtaccgcagagccgcgacgatgatgctgtgctcctgctcggacgagatccaccgcgcggagctcggagcctgatgactacccccacgctcatcaagcttggtcttgcaagaatcctgcctcgccgccgccatggccggtatcaccttctccgtcatgagtgttccagtgatcagtagggagctaagtgagccggagctagtagtgtgcctcgtg

SEQ ID NO: 56474 - DNA, 120 bp, Oryza sativa
  Clone ID: PAT_MRT4530_58381C.1
atggacgacggcaatgccacggacgttcagatcggagcggctacagcggtcagaccggatgcatctgtgcggtcagaccagcgcctcaactccggaaagataaacttggtagctttctaa

SEQ ID NO: 56475 - DNA, 462 bp, Oryza sativa
  Clone ID: PAT_MRT4530_58382C.1
tcccgaatcgaaaccccaccatccgccgccgccgccgtcgccgccgcgacacctgacgccatggaccccggcggcctgcgcccagcgccccagtcggccgccgccgccgccgccgccgcggctgcgggggcgggggcgggggcgtccgcggcggacgagccccgcgacgcgcgcgtggtgcgggagctcctgcgctccatggggctgagcgagggggagtacgagccgtggttggtgcaccagttcctcgacctggcctaccgctacgtcggcgacgtgctcggggacgcccaggtctacgccgaccacgcggggaagccccagcttgacgccgacgacgtccgcctcgccatccagtccaaggtcaacttctccttctcccagccgccgccccgcgaggttctgcttgaggtggcgcgggaccgggacaaaatgccgctgcccaaggcggtggctgcacct

SEQ ID NO: 56476 - DNA, 369 bp, Oryza sativa
  Clone ID: PAT_MRT4530_58383C.1
atgaagaagttcgccgacgtgcggcggtgtaacagcgtggagcccaaagtggagcacacttttcctcccccaggctgcaacctgggcttgggccagaaaagtggcctcactctcgatccctcttgggccgatttcggctcggacgacaccggctgtccgatctctagggttttgatcggacggccgagcgtcgatagtggggaaacaaaaccccctccctctcagccgccgatccctagcccatttccctccctcccatctcacttcaccgccgacccctcccccaccaccgacggcggcggcggcggcgcccccaccacccacggcggcgtcggcggcatcctcccccaccaccggcggcggatctag

SEQ ID NO: 56477 - DNA, 233 bp, Oryza sativa
  unsure (1)..(233): unsure at all n locations
  Clone ID: PAT_MRT4530_58384C.1
agttcaacaattgatggnccaaaagaatacaggggcatctnttggnaatctacataagnttcccaaaggnccccataaaggccttaatatcnnnggaaaaanccnattttcnagggcatattgtacaagagccaaacggctgttctaatcctntnatcaggggcagcagcattagaattcncactcnaaattttctanctngatntngaatttcctntttnaactncgnaaaa

SEQ ID NO: 56478 - DNA, 627 bp, Oryza sativa
  Clone ID: PAT_MRT4530_58385C.1
atggcgattgcgagggtgagggcgacggtcgcgggggacgcatggagggcggcggcagccgcgacggataaagggggagagggtcacagccttgcggctacgggcgacgggcaagagcagtggccacacgggaagagagcgagggcgagggcggcggccgcagcggatggagggggagagggcgcgaccttacggctaccggcaacaggcaagagtggctgccacacgggacggggcgagggtgagtgcagcgacgcgaacgatggcaggagcgctagccgcggggaacacggacggtggcggtggccatggcagatgcagcggggggatgcagcccagggtggaggcctgggtggtcgaggtggcgacctggcggacgctgtcagagcctcggaggcttggatggacgagggcgtcggactgacggacgtcggggcaaatgcaggagacgttgctgaccgtggtgtaggggtgaaaacgattccgtttttgaaaatagatctggaatctggaaagtttacgtaccgttttcacccctactcatggggcttcgtctgtgatggacgtggcatcgaatatgccgttcctctgggagactcgagagtaaaattcgaccactgttgctaa

SEQ ID NO: 56479 - DNA, 1110 bp, Oryza sativa
  Clone ID: PAT_MRT4530_58386C.1
atggtgctcgagcgggaggctatttttcccgatgaggtgttagctgtgatgatggaaggcatcgaccaaccggtgatgggcggctgtcgaggagctttcgaagtcctgtggtcacattgtggtgaggcggtggagggaccaaaaacaatgcacgaccggaggacgccttcgatccgcccgtccttgcctcttgcaacaataacaaggaggaagcgagaaagagaggcaggcagctgcggcggccaccaccttgtcaagctcaagctcaagccctctatcaatgagggggagccgaggtcgaccctgccggcggggatagcacatagtaggctcccgagccgcaacctgggcttgggccggaaaagaggcctcactctcgatccctcttgggccgatttcggcccggacgacaccggccgtccgatctctagggttttgatcggacggccgagcgtcgatagtggggaaacaaaacccactccctctcagccgcggaaccctagcccatttccctccctcccatctcacttcgctgccctctcctccgcgcccccgagcggcggcggcgacgacgccgcccctcccccaccaccgatggcggcggcggcggcacccgcaccacccacggcggcgtcggcggcatcctcccccaccaccggcggcggatctagcgggaggggaggcaccccgcgagcggcggcggcagcaccctcccctaccaccggcggcggatctagcgggtggggaggcgccccgcgagcggcggcgacggcgcccctcctccccgagcggcggcggcggtggagtcctcccccaccaccgacggtggcggcggtactctcccccaccaccggagagtgccctccgccgccgctgccggcggatctatcgggaggggaggcggcggcggcggcgctctcccctccaccggatccacagcgacggcgacggcggcggttcggcaacgacggcgacggcgacggcggcggcgacggtgacggcggcggcggcggcgacggcggcggcggcggcgacggcggcggcggcggcgacccccttcgatctaattttttgtttttatttggatatatgtgtgtacatgcatcatga

SEQ ID NO: 56480 - DNA, 310 bp, Oryza sativa
  Clone ID: PAT_MRT4530_58387C.1
gggaaaaaacgcccagcttacaagggagaaacacggcacattaagcacacaggcaagcctgcatatgtatcaaaaggaacaaaacaaaacccaatactaaacaaaaataaccggctatttttaaaacaaggcaacattaaggggcaacaaaaaacaatttcaacccaaaaatccggaaacccctttttaaaaaaagcttaaagcttgggttgcagggtaaacaagcagggctttgggctccactggtctcaggagcaaaaggggcccgaacaacggttggtgaaagcccaaaaccaatcccaggggcgga

SEQ ID NO: 56481 - DNA, 2511 bp, Oryza sativa
  Clone ID: PAT_MRT4530_58388C.1
caacaaatttggggaggagaaacccttgtgctgttgtttaggggagttgggggggggggggggagaagatatttttctcgagggaccaacaatagacttatttccgacctatgccggtcggcccacggccttttgcgcatgagcgggcgcacttttcctcccccaggccgcaacctgggcttgggtcggaaaagaggcctcactctcgatccctcttgggccgatttcggcccggacgacaccggccgtccgatctctagggttttgatcggacggccgagcgtcaatagcggggaaacaaaacccactccctctcagccgcggaaccctagcccatttccctccctcccatctcacttcgccgccctctcctccgcgcccccgagcggcggcggcgacgacggcgcccctcccccaccaccgatggcggcggcggcggcacccccaccacccacggcagcgtcggcggcatcctcccccaccaccggtggcggatctagcgggaggggaggtgccccgcgagcggcggcgacggcgacggcgcccctcctcccgcgagcggcggcggcagcaccctcccccaccaccggcggcggatctagcgggtggggaggcgccccgcgagcggcggcgacggcgcccctcctccctcgagcggcggcggcggtggagtcctcccccaccaccgacggtggcggcggcgctctcccccaccaccggagagtgccctctgccgccgccgccggcggatctagcgggaggggaggcggcggcggcggccgcaacctgggcttgggtcggaaaagaggcctcactctcgatccctcttgggccgatttcggcccggacgacaccggccgtccgatctctagggttttgatcggacggccgagcgtcaatagcggggaaacaaaacccactccctctcagccgcggaaccctagcccatttccctccctcccatctcacttcgccgccctctcctccgcgcccccgagcggcgtcggcgacgacggcgcccctcccccaccaccgatggcggcggcggcggcacccccaccacccacggcggcgtcggcggcatcctcccccaccaccggcggcggatctagcgggaggggaggcgccccgcgagcggcggcgacggcgacggcgcccctcctcccgcgagcggcggcggcagcaccctcccccaccaccggcggcggatctagcgggtggggaggcgccccgcgagcggcggcgacggcgcccctcctcccgcgagcggcggcggcggtggagtcctcccccaccaccgacggtggcggcggcgctctcccccaccaccggagagtgccctctgccgccgccgccggcggatctagcgggaggggaggcggcggcggcggtgctctcccctccaccggatccacagcgacggcgacggcggcgatggtggaggagatggagtggcggatggcgccggccatgaaacccgtccccttcctcgccgacccacctcaagtaagcagcctgcagatgctgctgccgccggagtactcgcatctggctgggatcggcgagatctccagcatccacaatggcatcgtcgtcatctacgcccatcgatactacctcctctacgacgcctccaacaaccacctcaccgctatccccccactccccgattccctatgctctcccaccttccttcccctcggccgcaccgccgtcgtcgtcaccgccggcgatgatgatgatgattacatcctcgccgacattgtcacctcctccaccacagggctccccgacgcgaagctcttcgtgtgctcgtcgtcgtcggagtgggccgagacgccgccggttcgtctccctctccctccacatctctgtggcccgacctacttcttccacgtcgacacggccttctccttccaaggcagcatcttctgggttgatctcctcaagggcatcttgatttgcgaccacgtctcgtcgccggaaggccccgagctagtgttcgtcccgctgccccactgccgcgacgtccacggcaaaccccgccattgcttcagcccgaatgagcaccgttccatcggctgcgtctctggtgccatcaagttcgtcgccttgatcggctactgcgaagaagcttcttgtcccgccaacgaggtgaagctcaagacatggtcactctccccagatttcaagcactggaaggaggaaacgacattgactgtcggagacagctgggcgagcgagagcttcaacgagattgggttgccacatgttatgccgattcctattcttagcgtgaacgaagatgggatcatgtatgccgttctgaatgatatctttcaggagccaatacctgatcacaacaaggtcctgtctttcacgaagatatctcaacacggcgaattgcggtggcttacaccctatctcattgctactgacttcagctcatacctacaggaccacacgagaggagaagcaagcgccaaggatgagcagcagttggaggactga

SEQ ID NO: 56482 - DNA, 1988 bp, Oryza sativa
  Clone ID: PAT_MRT4530_58389C.1
cggcccgcgggccggttccgtccgtgcttttccatctccgagtgggtgtctgcgtctgctcgcgctcggggtcccgcacgctcgctccccggccgacgaaaacaaaccagaaaccaccacaactgaacaagaagagagtattttctcctctgttccttctcttttgcccttctggttgggaaacaagtaacgacgccggcggcggagagacgatggttcatctgccgcaccaggggaagctgcggcgggatgtcaaggaggaggcgctggacgacggcgacgcggcggcacaggcagaggcgtcgccgttccacaagaggtcccgccttgctctacagcactggagcacagacggtggtagtgtgtccaatcaacagtcatcccaacatggtttccttgatgagcctagcccattgggcttgcggctgaagaagagcccctctctggtggatttgatccaaatgaagcttgtgcaggctggtaaggccaaagatgtccagcatagtggaaccgctagtgcctcagagaaattgaaggcttccaatttccctggttctgttctaagaattggatcttgggagtgggtgtcaaggtatgaaggcgatctggttgcaaaatgctattttgctaagcataaacttgtgtgggaagtactggatggtggtctgaagagcaagattgagatacagtggtctgacatctgtgccatgaaggtggtttctccagaaaatgaacctgggatcttggagatcgcattgtcccggcagccacttttctttcgagaaactaatccacagccaaggaaacacactttatggcaggcaacatctgatttcactggtggacaagcaagcattcacaggaggcattttcttcagtgcccgccaggaatgatgaataagcatgttgagaagcttgttcattgtgacccacgtctatattcactaagccagcagaacgacatcaatttggataatccgtactttgaatcaaagtcttctatatttgaagatgcagagggcataaaaggccaagattttgagcataaagatgatggcgatcagttagctccccaaagatttacagaactgttaccgcctcattctgcatcagttagtggtactcaagtgattaaacaagatgctgcttctggtgattgtgaacggcaagaaagcatctataattggaacggtatcaaggtaccggggataaggcgctccatgtccaaaagtgagattgcaaatcacattgggaatcatatctacagacagatgtattcagggaacctacctgcagttcatcgtggggattccacgtcaagtaaagtaacattagatggaataacccgattcctcttgggcagcacccagatcatcggcgatggcgatggcgatggctcaatgggtaaactgacatttgatgagcttaccagacaactcctcaatgattcccagataaccaacgcagctgatgaaaggatgctcatgtcaagggtcaactccctctgcagcctgattcagagagattcaggttcaggccagacaaaccccagcagcagcattcatggtgacaatgagatgcaagaaaggaagccccaaccttatgcgcttccggtgtcagcagacagtggaagcaacacctcattgccgccgaggcaagaatcgtttggggatctcctgacgcacctgcctcgcatctcatcatttcctcacttcttgtgagtgatctgacggagcaactctggagttggagtgttattctattggggtacatattggcttgagaactcttgcttgtagaaatttttgccgggaaatgtcttgaccccttttcttcttacttttttttgtacataaatagataggataactgtagattgtatagtaagcttctttagttcgatagggcaaatgcatccggtacatattctcgtcgatatagtcctttctaatttatacatttcttactcttagaaaaaaaaaaaaaaa

SEQ ID NO: 56483 - DNA, 654 bp, Oryza sativa
  Clone ID: PAT_MRT4530_5838C.1
atggagcggcggcggtggccggagccaggggagggaggggcaaggcggcggcggtggctagagccaggggagattgggggcggagctgggcgtcgaggtgtcgtcgtcggcggccacgtcctccctcgtccacggtccacaccgaacccgatcctcgtcgctggcagccgcatccttccccgtccacggtccacatcggagctcgtcgctggcgaccgcatcctccgttgggagcacgtcaccggcggccgcgtccgtcgtccacgcctcaacccgcggccgcgttctccacgccggcgctgccgccatcaccacgcaggatcctctgccgtccatgccccacactggtgctcggcgccggcgccgtctctatcaccacgcaggatcctctgccgtccatgtgaccatgccccacgctggagctcgccggtggccgtgtcctccatgccggagctcgtcgccggcggccgcatcctccacgccgaagcttgtcgtcggcgccgctggagctcgttgtcggtgccgccggcgtcagctcgtctacgctcgctgctcccacagtggcccgtgctcccctgtctcagggaggtgaagagggagcgatcccgttgggacagtatcccaacgggataccggtgggataccggtatatag

SEQ ID NO: 56484 - DNA, 402 bp, Oryza sativa
  Clone ID: PAT_MRT4530_58390C.1
aacaactgcttgcaatacgtatttcgtacctttgtttgattagcagttggtttgcttatctggtgtgatggataactaggaccatgtctatgattacttaacactgttgtgtgctgataatgttgcagtgaacagtacaagtaggatcgcagatattgagtagtgtgcaagcatcagagcaggtttgtggagagagcagttatgctgagacattggatatgttcctagtatatgctgcattgggtaggtgctatgatggattggataaacctctagttaatgatgctgttatcatggaaccaccctttgacactggtgatgcttatgaagtatctttcattgaagggagaggctttacaggcctatcttgctcagactgcccatgcgtccttgcattgtcaa

SEQ ID NO: 56485 - DNA, 495 bp, Oryza sativa
  unsure (1)..(495): unsure at all n locations
  Clone ID: PAT_MRT4530_58391C.1
gggggtgagggttttatttattttatgatacaaagagatcaacttatttatgcacagaagcatttctcaaggaaaaaaaatatatgcacaaacacaaatcacaaaccacaaaccacacaagagaaacaaatggaattacttccatttttcatgggggtcttcgctgatctgtacacaattttattattgctcttatgttctcgctagcaaaatcaatgaaaccaagacgaaaaaaaggtagaaaaattatttacattacaaaagataactaaagctgaggctagaaaactaccctttgggggggtggcgggggggggggggnggggngattntactngncgggcgccgngaagcagntntnngtncgggcgggcgcgccgnctgcgccgccgncgncgncggnntcgccgggaaccctggcggtggccgnggtcggcccatcgcgcctcgggctgcttggcgtggagccaaccttcctcggnggngggagcggcg

SEQ ID NO: 56486 - DNA, 204 bp, Oryza sativa
  Clone ID: PAT_MRT4530_58392C.1
atggcggtggcggacgtggcgttcaaggcgctgacggcggggctcggggtggcgacgctctacctcgccggaaccttctccgtcaacgtctaccgcggcctctcgtggcactcggagcaatccaaatggttcataaaactattcatcggcttcaatgtggctgatgaggtactgcgtgcaaaaatgatgataacgagaagttag

SEQ ID NO: 56487 - DNA, 318 bp, Oryza sativa
  Clone ID: PAT_MRT4530_58393C.1
atgttgatgtgaccatggctactatgaatataattgttgttcatatcatggatcaataaaatgacatcatgatcaagtcctccaagtgctggaatccaattcgtccaccttctccgtttttggtccatgtgtacttgatgaaaagctctcacagtcctttttccaacgaatccagtctcatcgccaaattttatctcagtcatccacaatcacagaaacaatgtgttgcgaaacctatgatgggcctatttgcttgtaacttcatctggaaccccgacccaagtgaggcccatgtggggtgcgctccaaccaggtgga

SEQ ID NO: 56488 - DNA, 528 bp, Oryza sativa
  Clone ID: PAT_MRT4530_58394C.1
atggcggcggcggcgcgcgcgatcatatgcgagatggcgccgcagaggggggcggtggtggcgccggcggcgccggcgcagcagaaggcgacgacgagacgggacgcggcagtggtggcgcggaggcgggtggtggaggaggaggagagcggcggcggcggcgcggggtcctccccgttcttcgcgtcgctagccgactacatcgagagcacccgcaagagccaggacttcgagaccatctccggccgcctcgccatggtggcgttcgcgacggcggtggcggtggagttgacgacggggaactcgctgttcaagaagctggacatgcaggagatcgaggaggcggccggggtgtgcctcgccgtggtcgccggcgccgccgcgttcgcgtgggtgtccagcgcgcgcaccaggatcggccagatgttcacgctgggttgcagcgccttcgtcgactcgctcatcgacaacatcgtcgaggctctcttctccgagggcgagctgcaggactggtccgacgacgtatga

SEQ ID NO: 56489 - DNA, 304 bp, Oryza sativa
  unsure (1)..(304): unsure at all n locations
  Clone ID: PAT_MRT4530_58395C.1
gnnanngcagcgaggggggttccgggggctggattttttttttgtttttgcgggcaaccgcagaatcttctgccacgggacattcccggagaaagggtgagctcccacattttccccccacagaagccctgccttggggggggggggttacattccgggttttccccctgccgcggggggagaggaggttaacagggcctgggagggcacacacgggggttcccccctgagggagaacaccctctttgccggggaccgttgtaatgggccgcgacataaaaaccccctgtgggggttaccgggg

SEQ ID NO: 56490 - DNA, 1394 bp, Oryza sativa
  Clone ID: PAT_MRT4530_58396C.1
gtttcaccgggcggtgaacggccaccgtaccgcgtctcgcggtgtctccggccactcgctgtccccgccgaactttcaaaaaggaggaggaggaggagaggtggccggcttctgagaggaggagaagtcagtgattgctcgctcgtttttccaagaaaccggccggactcgagcgctcgtcaagtccgtgttccagatcgagtttgtagagccatggcggcggcggcgcgcgcgatcatatgcgagatggcgccgcagaggggggcggcggcggcgccggcggcgccggcgcagcagaaggcgacgacgagacgggacggtgggaagatcatgctccagccacgcctctgcacgctccggtcgtacggcgccggcagcggcgtggtggcgcggaggcgggtggtggaggaggaggagagcggcggcggcggcgcggggtcctccccgttcttcgcgtcgctagccgactacatcgagagcacccgcaagagccaggacttcgagaccatctccggccgcctcgccatggtggcgttcgcgacggcggtggcggtggagttgacgacggggaactcgctgttcaagaagctggacatgcaggagatcgaggaggcggccggggtgtgcctcgccgtggtcgccggcgccgccgcgttcgcgtgggtgtccagcgcgcgcaccaggatcggccagatgttcacgctgggttgcagcgccttcgtcgactcgctcatcgacaacatcgtcgaggctctcttctccgagggcgagctgcaggactggtccgacgacgtatgaatcgacgtcatcagcaattcagtatagatcgaaatgatatacatgtatagatatgcgtatagttatatagatggtatactataacagcatgattagcagaggaaagtatagatcgatatgatatgatatgatagatcagctgcatgtgtgaagcaaacttttgcaagtttcatgatttcatcatcgtcgattcacagacgcatggcgcatgcagagatatgattcagatcatcagatgggatccggcccacaggataggatgcagatctagatggttcagacttagaatcatcgtacacagatcctgtagatggttttggaagggttcggcctatcattacaacttcgcaatctgcatgggagttcattagtctgaattctgagagcagatctaaggtttgttttttggtctagcaagggagtcctgaatatggctgtgaaatgtgtatgtctctcttcagtgtatatatatactgggggttgattgatcagcccctaaagttaactgtaactagaacatgtatcttctgaggaaataataaattctagagtcttgagactacggtaaaaaaaaaaaaaaaaaaaaaaaaaaaaaa

SEQ ID NO: 56491 - DNA, 412 bp, Oryza sativa
  Clone ID: PAT_MRT4530_58397C.1
atctggcaaaaaaaagtttgatttgattcttacagtcccagtcaacatattgacaactatgttgggcagcagttttatcaggttggtccaggtaaaaaataaaaaatgggggcctgatgtccctattttacatcttcctagaaaaatcaggtaagctcaaattgcagcacaactgcatgactgcctaaaaatatgtttttttttttaaaaaaaaagaaagtttaaaggatgccaccatgtgcaactgcactttatgtttttttccaaaactggtattctggaacaactttttttcaagtttcaactggctttaaggttggaacaatccctgttttcctccatattagagcaatcattattcaaaaaccagttattaacagataatttggtaatatggatagacttttgaaaa

SEQ ID NO: 56492 - DNA, 1806 bp, Oryza sativa
  Clone ID: PAT_MRT4530_58398C.1
atggcagcggtagccgtgaagcgcaagctcattgtcgacaaatcccccacccatcgcctcctccactcacctctgtcacccatcactttggtgagaaggagaagggtaccttcagatctagaatcttctgagggttcctccacctcccttcgttctgacgctgcctacaccgccaccctcgaagaagatgttcaagctgtagcacgtgccgttatccgcatcgccttgaagtacccagaagcaatctgccagttgatggttgcggggcatacaacatggaacgaggccgagatgaaagcttttccggaggcgtgcatggaagagattgaggcacgcacaatcaccagcacctgccccaaccgtcaaggctacatcaacctggaggtgaagatgttccagaaggtgcagaaggtggtcaaccggcaccagctaaacaatttatgggatacatgtcgccgccagttccaaacttggtgctggctcgagtcaatggccactgggcttggttgctgtcccttcaccggcaatatcctagccagccctgagtggtggactcggatggatcatatgaggagaggcgcacgtgcattccggaatggtccccttctgtatattcctgagcaccatgcggttttcaggggtagggtttgtaccctgaaccgctctggagttcctgtcagaacacccatcaacgcagtgcctcagcaggccgagatcctcgacatagaggacctcaccgagcacaccctacaagaaccatctgagcagactccacggcatgggaagaggtcactgactagaggtaccacctctggcggaagctccaagaggtccaggggctcttctgctagcgatgctctcaaccgtttggcggacctcggggttcagtcaaacgatagcagaaccagaatggaagagataaagcaagcaaagagtgccaaggcctgcatggagcttctgaaggctgacggttacacctcgagggatcctatttaccacatggctctgagggtctttcgagatggcttcctcagggagtttttcttggacgactgccacactccggaggggagccccttcccccctggatttggaggttacatccagtcagctcctgccgtcagtcctttttttgtacatattactgccttctgtgttgatggattctttggtgctactggtgatgctgttcttggagctgtagctattaatgctgttggagatgatgctgctactggtgatggagaaggagatggcgttggagatgatgatgatgatgctggtgatggtgaagcatatggcgatggcgatgacgagggaggagatggtgctggtgatggccatgatgattatggtgacgatggcgatggtggtgctgcgggttacgggggaactggttatgtgggtgctctttattggggttgggacctggaagttatgatctatctggttatgcaatgttttgacctcatgccgatcggacctactgctagatcctttcgaacgatgagtgtgtctgagctagagcttttcgaacgtgttgtctgtccaaataattttgctcgacttcgtctcgagcaacgttgcataaattataggatggcttggtctgggtcaaccatgtgcaagtacttccatagagtgcttaatgcagtttatgccatggctgctgatatcaacaagcctgcaaatcctaattttcgcagagtgcataactgtgttatgcaagatgcaaatttccttccttttgccggggccgcaggtgtagttgacgggacccacatcccaattcgtgttgcagtttaa

SEQ ID NO: 56493 - DNA, 304 bp, Oryza sativa
  Clone ID: PAT_MRT4530_58399C.1
aaaaaaatcgtcctcctttccgtagctggcaacatctccgcctctcctctcgcttcccgcatcttcccacacacacacacacaaaaaaaaaaacctcacgcgcgattccaatcctccctgaatccaccgcgcctttgcctaagggtttcgattcgttcgcgtgcggctgctctccccccgatcgatcggcttctcgcctcgctctcgacgaatcgaggtcgctagctcggttcggttgtgcgttgcgttgcgttggcgtagcggcgggcggttgaccgttttcgctagggttggagctccggga

SEQ ID NO: 56494 - DNA, 536 bp, Oryza sativa
  Clone ID: PAT_MRT4530_5839C.1
cgcatattgccagagagctcactgcggatctctgagcataggcatgggcgggattgactaccggcgcgaacatatactccgccatgccgctgccgcagacctctcaggaaactcttggagaaatgctacaggactcccaacatcaacgtcaccgactattgcatccatcctgctgaacctaagcacagatatacaaagaaccttgaaggaaagcgcctcacaagaaaaccgcgttattgataagtggaagatgcctttcctcaccgatgatatgaatctataggaaactttggtcgcctgcactactaggacgctgccctaccaaggttgaagcttatgtaccagatctcatatatatatgcctcaactctgatacaccacataggcctaccttgagggccatggtgcatcacctagcactcattcatgacatagatggtacaagtctatatactcatattgaaccatctgctgccccccgataggagaggaagctgtctactggtgataatgatagaattgcatcaccgatgctg

SEQ ID NO: 56495 - DNA, 2313 bp, Oryza sativa
  Clone ID: PAT_MRT4530_583C.1
cttttgaaactaatggatgcagttgacgagtatatccctgatcctgtgaggcagcttgataattctttcttgattccgatagaagaagattagcaaatccaatggcgattgcatcgggggacggctttctcggtgaggccttcgccggcgacggcggaagcgtttgagatcccgtctttgactccagtgagtaaaatatctgatccgcgttttattacttaagtccagtggcgggggcggaagcgccggttagacgtgcgcaacgctgctggggtggtcggggcagcccgactacatcgacgcgcagccggcggcgcgggaggagtcgccgccacccatggtttcccgccaccatatgcacatttgcgccatcccaaatatatgatgggaataatgttgttgtgttgttggggtatcaataacgatttttccgccgacgccgtctatgtgaaaggaagtattagtatgaggcctcgacggcggcgtgcttgtcggattgattccatggagatgggatgatttcccccgatgatcgccatgtcactagcttaaagcattggacccgttcctttccccctcttacctagcgccgccgccgccgccgccgcgaacgcgaacgcgatggccgcagccgcagtgctccggagccatggcgcccgccgcatcctctcctaccccaccctccgcgccgccgtgatctcgggccccacggcgctaccggatgcgtcggcggctgcggcggcggcgccccagcagccaccgcctctggctggaaccctgtgggcgaggtccatggccaccttcacccgcacgaagcctcatgtgaatgttggcaccattgggcacgtcgatcatggcaaaaccacactcactgctgcgattaccaaggtgttagctgaggcagggaaggctaaagctgttgcttttgacgagatcgacaaggccccggaggagaaagcaagaggaatcaccattgcaacggctcatgtggagtacgagactgctaaaaggcattatgctcatgtggactgcccagggcatgctgattatgtcaagaatatgatcactggagctgctcaaatggatggtggtattcttgtcgtatcagctcctgatggccccatgccacaaacgaaagagcatattcttctggcccgacaggttggtgtgccatcacttgtatgtttcttaaacaaagttgatgctgttgatgaccccgagctactagagcttgtagagatggagcttcgtgagctcctcagtttctacaagttccctggtgatgagattccaatcatccgtggatccgccttgtcagccttacaggggactaatgatgagattggaaagaatgccattttgaaactaatggatgcagttgacgagtatatccctgatcctgtgaggcagcttgataagtctttcttgatgccgatagaagatgttttctctatccagggccgtggaactgttgtgacagggcgtgttgagcaggggacaatcaaaactggtgaagatgttgagatcctaggtttgactccaagtggtcccttgaagactacagttactggtgttgagatgttcaaaaagatactggatcatggagaggctggtgacaatgttggtcttcttcttcgtggtcttaagcgtggtgatgtacagcgtggccaggtggtgtgcaaacctggtaccgttaagacgtaccaaaagtttgaggcggaaatttacgtccttacaaaggatgaaggtggtcgccacacagccttcttgtcaaattacagtccacagttctactttaggactgccgatgtcactggaaaagttgtgttacctgatggcgtggaaatggttatgcctggtgataatgtaactgcaggatttgagttgatatcacctgttccccttgagccaggccagagatttgcgctgagggaaggagggaggacagttggtgccggagttgtttccaaagtttacagctgatctgtttccagttttttctgcgtagcgaatttagtaacaaatgaatgttcatagggaatcagatctatccgaccggcaatatgagagcaaaagagcgagggactcgcagagcatcttctctgaattcatgagatgcagggatcgttggctcggccaccattccgaactagttattgcttttctttttccatgtctggttgttgctgtataacaacgcgtttagtcatcttaacacgtttttttgcccatagcttggtgactaaataagaaagattcatcataagcatcttaatggttgatgtttctctcgaaaaaaaaaaaaaaaaaaaa

SEQ ID NO: 56496 - DNA, 1335 bp, Oryza sativa
  Clone ID: PAT_MRT4530_58400C.1
atggcggacgacggcggcgacggaccgccgtgcgactccgactacatcagcaacctcccggaaaacgtcctggtcaccatcctgtccctcctcaggctcgacgaagcggcgcggtccaccgtcctctccacccgctggcgccacctcttcccctacaccctcctcgacttcagggcctacgccctcggccgcgacgtcgtcgccgccgtgaacaccatcctcgccgcgcaccccgccgcgcgcgtccgctccttccgcaccggcttgctctacttcccgcccgaggacgacccctccgtcgaggcctggctccgggacctcgctggccgcggcgtcaaggagctctccctctccttccgggagaggtggcagaagatccccgcgtcgctcttcgcctgcacctccctcaagcgcctccacgcgagcagctgcaccttcccggacgccacccaggcccccgtgccgctcgccgccctcgccgagatcgatctgttcggggtcaacatatccgaggaatcgctcggcgccctgctgtcgcggtgcacggcgctggaacacctgaggatgcggagcatgggctggtgccaccgcatccacgtccggtctgagagcctcaagaccctctgcggctgcggcgacttcgatgagctcttaatcgaacacgctcctaacctcgagcaggtgtacggcaactacatgtacatgagaagcacacacctcaaggtcgcgcacgcaccgaagctggagttcttgggctacctcggcatgagcttcgacacgattgagattgggcaatccgttttcacggaagatgatttcgatataaagaccctgatgccaagcctgaagacactcgctatcgaattgagctacacgtccgaggggtacatcaattggttcatgcagctcctcaagctgttcccttgcctagaaacgctctacatcaggtcagacacttggtccaaggtccgcgccgcggcaccggggtcctgggacgtgctgagatctgtcccctgcatcgacaaccaccttgagagggtggtgtttgaggtttaccgggggcacgagtggcagagggagatggccaagtttctccacggcagggccaggttcctcaaggccatggagttccactgccagggagataaaggttgcagcgagcttttgggtgaagaatgggtcagggagcagcaggagctactgtgcctcgacagccgggcatccttggacgctcgtttcctcttcttcaagggcgctctggtgaataatcatcacgatgttagccaccatgagtggtacaagaggaagtactatcattacctgtataatgtctaa

SEQ ID NO: 56497 - DNA, 939 bp, Oryza sativa
  Clone ID: PAT_MRT4530_58401C.1
tcaacctgtggttgtcacagcggaggaggcctccgccgccgccacggaagaggaggaggacatcacggcagccggctgtgctggcgggaggagggaagaggaggccagcaagccggttgtcgccaagtcacagccgcacatggacgggagctcgatgccgccccctgccgccgccgcggaggaggaggaggaggataccacaatggccggcctcctcctctgctcctgcggcgcgggggcctcggaggacgccatggcggaggtggcggcatcgtggtcggggggaagcatgggtgcggcaactacggcggcgggagagggggaagaggaggccggcgagccagtggccgccgagttgcagtgcacgagcttaatcccaatattttcgtcggccttggcccgtcgtagtttattttcgtacacctagactaccgcatgggcctgaaacgaggaaatccctaacgatttcggaccctctcaggtttgacctctggaatgcgcgcaatgcgccaatgcccatgcttatacctgatacacgcccagcgcggctgattgcaaaattcttagccaacttgcttctcctgtcacgcgttctcggtttttctgcttccccctctgtcccccctttccccaacatgggcggcccaatccatttgccttgctttcggcgctcgctaatattaaacgtcggcgagagatattatccggcgccactagaacctccgcgacgtcgaactcttccactgtgccattgagttcttctagattggtggcggcagccacgaaggcgacttcctcctgtgcggcggccctccttactcttgctgctacacttcgcccctccctgccacagccaccatccgtcgagggaggagtgtcgccgccggatccgctgtcttgagctccggctgccgcctttgtcgctatatcgaccaacat

SEQ ID NO: 56498 - DNA, 1165 bp, Oryza sativa
  Clone ID: PAT_MRT4530_58402C.1
atcaggagacaattgattaaattaatggtaggggtaccacttttttacatgacttcactagattgctcattctttctctttatcttcctatcttcttcgttatctcttcccctctctccctcatttctctcttctccagcgagtttgtctacatgtggctggctagcggcactgctttccctccaccttgcaacctcacgcactgatcctactcggatcctctcctcctcactgatgcctctcctgtcctcgagcggttggttgatcgatcgatcagcacggttcttcgccagccatgacggcggcggcgatggcgccctcacctccgaagccggtgtccccgaggcagatcagcctgggggacctcagggcggtgtccatgctcggccgaagcgtcaagggcgtcgtattccacgttgtgcccaccatggcgggggaggtggaaggggttgtttcctcatccatggcactcaaggcgatctcgcgggagacggagcaacacaagaagatggggagcggcggcgaggacaggcaccggcggatctggttcgagtgggatgtgctcatgtcgctgagccacccgctgctcccttcactccgcggtgtcctcgccaccgatgtcgttgtcggaccaagaagatggcttcaggccaagctggtggcggctaagaaccgccacgccacaacggtggccgagataccgccgctcaagtctaccgtcgagctgacgaatgacgccatcgtcgcgaggatggaggcggggaagaagcgggcggtggtggaggtgctccaccggcgcattgaccgcgagcgtgacgacccgcggcggctgcggtcagaggtcgcactggagcagatggtgctcgtccggcaccaggccgcgcgtgctctagtcagcgacgtcgatgttgatgtcgacgcggcccaccacaatgtcgtggcggtcccaacgcggaggccggaggagttgcgcgggggcgtggagggcgaggagagaacggccgagtttcacgtcgaggagattgtggccgccataaggttggccgaggcgcacgccaggaagcaggaagctgctgagcaatggcacggccgtgaccttgaagtcgtgatgttctgcaacaaaatttgcatattaatttttgtggctaaatcctgctcaatttga

SEQ ID NO: 56499 - DNA, 366 bp, Oryza sativa
  Clone ID: PAT_MRT4530_58403C.1
gcccccatcctccgtgcggcgggggccagcgcaggtcaggggaaccacgcggagccggcgatgtcctcctcatcgtcctcccccttggcatcgccctccgcggtggcgccgtcgccgccgccaggctggtttcggcagatcgcggaacggccgcctccactctcccgccctgctgatcgaggtgccggcgaggatcagccgccgcccgacccacttcgcccctcggatccgccccgccgtcgcccgctccgactgccgctccaccctgccgtcgtccgctccggccgccgcccatgccgctccgccagtttggagagcgagagaagagggagggagaggatagagagggatagagaaatgggagga

SEQ ID NO: 56500 - DNA, 507 bp, Oryza sativa
  unsure (1)..(507): unsure at all n locations
  Clone ID: PAT_MRT4530_58404C.1
cggacgagcaccatctgctccagagcgacctctgaccgcagccgccgcgggtcgtcacgctcgcggtcaatgcgccggtggagcacctccaccaccgcccgcttcttccccgcctccatcctcgcgacgatggcgtcattcgtcagctcgacggtagacttgagcggcggtatctcggccaccgttgtggcgtggcggttcttagccgccaccagcttggcctgaagccatcttcttggtctggcggcgtcagagcgagttgaggtctcttccgccgtagcggtcgatgaccaacccgacaacgacatcggtggcgaggacaccgcggagtgaagggagcagcgggtggctcagcgacatgagcacatcccactcgaaccagatccgccggtgcctgtcctcgccgncgctccccatcttcttgtgttgctccgtctcccgcgagatcgccttgagtgccatggatgaggaaacaaccccttccacctcccccgccatggtgggcac

SEQ ID NO: 56501 - DNA, 226 bp, Oryza sativa
  unsure (1)..(226): unsure at all n locations
  Clone ID: PAT_MRT4530_58405C.1
aaaccnnnannnggaaaaaaaaaccaaccactttcataatctggggcttataatatacaataaccccaaaacgcatcataaatacattaccctctagggcccgcttgcagacacatgcgaataaactgagaaacaacggaggttaaaaacaaaaaagcaaggcggcacaacatttctccctatcaggacatggaggctcgggcaggccacacctcaaaaagtacac

SEQ ID NO: 56502 - DNA, 402 bp, Oryza sativa
  Clone ID: PAT_MRT4530_58406C.1
atggctgccgcgacgagcgtcggcgtcagcaagaggagatggaggctaacccggtggcgcggcacggggctctgtgatggcgtggaggaaggagacggcgatgtccacagcgcagcaacccgccgtgatggcctccacgacacggcggctcgcagcggccgcgccctagtcgtcgccgaacatcacgacttcaaggtcacggccgtgccattgctcagcagcttcctgcttcctggcgtgcgcctcggccaaccttatggcggccacaatctcctcgacgtgaaactcggccgttctctcctcgccctccacgcccccgcgcaactcctccggcctccgcgttgggaccgccacgacattgtggtgggccgcgtcgacatcaacatcgacgtcgctgactag

SEQ ID NO: 56503 - DNA, 143 bp, Oryza sativa
  Clone ID: PAT_MRT4530_58407C.1
ctggtggtgataaacaggaagcagtacaaggtgacggtgcatgtgttcgtggagccccacaaggtgcccaatccaactctgggaaagccgttttctcccgaggaagaggatgcacggtcggcctcgtcgtccggacaagccgg

SEQ ID NO: 56504 - DNA, 463 bp, Oryza sativa
  Clone ID: PAT_MRT4530_58408C.1
aatcccaaaatatccaaactcatgttttgtttccttccttggccgaaaccctaaaactcatcgaagccgacatgctcctgaagaactcctcatcagcgggatccacttcatcttcttcagcaacgggggggggggggggtttatttatatagagcaaggattaataacctctacagagggggtacactttacccacacgacattactcactcggatcacccagcccgtgcagaacggccacgtctggagaccttgaggctttcatgacaaggcatttcgaaagccgacacaggttcaccatatgccaacgagaggggtcccagaccaacaccaggttaggtcccagaccatactgtgccatgaaacccgggggttctcctcgacaccaccctattgaatccacatgtctcttggcatcatggttcccccgattagctaattactcagccaggggcgtcccatt

SEQ ID NO: 56505 - DNA, 363 bp, Oryza sativa
  unsure (1)..(363): unsure at all n locations
  Clone ID: PAT_MRT4530_58409C.1
ggtagcagggattcngcncgaagatnaagacggagaagacggccgtctgtgncngatgcncnncaacctncnngttgatnganaattgcccattcagtcnccccnnntctnnncnatanncnngntgnacgcggngataccccnctaaaacncangatcctatttccgggaatgcaanaaagtccaanagttcctcgcgaccnactcggggtnntgaagaagggtctnccccnacttctctgggttntaaaatacccctagcgtgccnattatcaaanctgtctggggctttgnanccncttntttcccanatgtgnnananancccnccgaggngncncatttnnttcatgggtgtcaacct

SEQ ID NO: 56506 - DNA, 589 bp, Oryza sativa
  Clone ID: PAT_MRT4530_5840C.1
cgagggagctaataattagcatagcctccttggagaatatgtctcaaaacttgaaaaagagggaaatgacttatgttaccaattgtgtcatttaagggacatcccgcgacttgcagaaaataattccagatacttagaaactctagctgaagaaaataattccagaggtctactgtctacatcattacagtaccaaccaccgtcaacttgtaaatgtacaggggaggaagacatttcaacactaagagatataaagctcggagaatctgaatcaatgcaagaaaatttattccctgggcttgaggaccaacagaacattcaaaaagagagtgaagggagagagatagtatctcaagatgggcttctcgaagagcatcaagatgttccttcaaatagattgttggaaaaacactgggacgaagagatgcaagagtcctatcctatggaaaatggaggcagagaatatcagataatagatgcattatcatttgaccaatccttatcagaggaaaagcagcatcaacaagtaatgtgtggaatggcaatccaaataagctctctgaagagatggtgcgctgtatgagagata

SEQ ID NO: 56507 - DNA, 447 bp, Oryza sativa
  Clone ID: PAT_MRT4530_58410C.1
atggaggacacgattggggcgaaccaatggccagcagaggcctcatcctcgtctctccctatcggggatttcggccccccaaaatctgcagcgtcgcgccgccatgtcacccccttgcgcccccaccccacccaaaatcccctcgtcgtcccgtcgcgcgcggccgcttcccctgcccccacaaaggttctccgcacggacggtggctggtggccgacgtttttcaccgcgccggccgccggggcccggggccaggctgagcggtcggtgaggccggaggaggacgacgaggaggagatggggctcgtgaggtcgagctcggtctccgcgacggcagtggaggaaaaagcggcggccgtgacggcgaaggcgtggtggggttggcacttcccgagcccgctcaaggcgttccggcaccggagatcatcggcgagcatgccggagtga

SEQ ID NO: 56508 - DNA, 485 bp, Oryza sativa
  unsure (1)..(485): unsure at all n locations
  Clone ID: PAT_MRT4530_58411C.1
annnccnnancnccctnggccncnncgagnaaaccgcgcaaaggccaacgggagaaacggaggacaggacgcccaggcggcngcagagggcggcggcgcgccagaagccgggccaacggacgcggacgccaggaggggggggcaagacacctttttttacaacgacggtgaccttctcctgatcgcatatgccggtgggaatgttccacccccccctgacctggtagtaggtgcatgaggtgttctggccggggctgtggcatgtgtaaaaaaacaggtccatgcaggcgcgctggtagcagcccaagcggcgccgctacgaggacttgtcagggcggtaccagttcatgatcaccttggtcaccttgaacttgtcgacggaccctcctccgcctncgacgtcgtggacttggatggacatggagacggcggcagcgggcacgtgtagccgcccagtgtgcttgcccttgcgccggcgcaagcgg

SEQ ID NO: 56509 - DNA, 401 bp, Oryza sativa
  unsure (1)..(401): unsure at all n locations
  Clone ID: PAT_MRT4530_58412C.1
gaaaaatcttcgtcctaccaaaaccggatcttgaaaagtgttcagtgcccaacacatcggtgaaacgnggagagctgaagagaagggaaaccccagaggcattgatcatttggtacagccgctaattcggcatttggtactgccaccatttctcgaaagggaaaaaacatacttaacaattcgattgggaggaccaagggatagatcgattgcaatatcagtatcatacaaatagaaatagacatgagtacatgaataaggaaacgcaaaagacacagagtaggggtagtcagaagcgtcaatgcagacgccaatgggtaatcagatccattccacttcttcagatagcagtcgatcctggatcgtcctcgcttccaaactccgtaaatgaatgaactnct

SEQ ID NO: 56510 - DNA, 481 bp, Oryza sativa
  Clone ID: PAT_MRT4530_58413C.1
gtggatccccgggctgcaggaatcggcagaggctctctgtatggtggcgaatgaggattatcgccatctgtttgtgaattgtactacgtgaacataatctggatgcttagaggatgggtgagcatctcttttcaactgcagggcgagatggacatggagataggacagtgatacctgaaagcacggttccatttccggaacagctacaggaagtcattcgacatggctgatttgaaaaggaatgtaaagagtgttcaaccagcgatcgcgcacagctggtgacattgtttcggtgaaatttccatttggaaagaggcgggagtgttcaaaccatcaaagagtaatctgccgtagtgtttccatgtttatgttgaggttgatctagttaccaacctcaccccgattttgacagctttctgttaatgtctttgtaaaatgtagtaacatttaacccctttcaatcttactaatgttattgtat

SEQ ID NO: 56511 - DNA, 1461 bp, Oryza sativa
  Clone ID: PAT_MRT4530_58414C.1
atgggactctgctcctcctccagcgcccgccgggacgccggcacacccggcggcggtaacggcgcggggaacaaggataacgcggggaggaaggggatcgtggcgtgcgggaagcggacggacttcgggtacgacaaggacttcgaggcgcggtacgcgctcgggaagctgctgggccacggccagttcggctacaccttcgccgccgtcgaccgccgctccagcgagcgcgtcgccgtcaagcgcatcgacaagaacaagatggttcttcctgttgccgttgaagacatgataattatgtgtatattgttatggagtaagtcatggaaaaactctcaaatgtttatgaaatcagtagaagtatatctaagtataaccataaaatgtctaagtgaacttttcatggccttagccaagttgaaggaaggaactgtgcaagctaatgaagatctgaccctgttacatgtatttgacagattatgtgaaggcggggagttacttgaccggatactagccaagaaagatagccgttatagcgagaaagatgctgcagtagttgtgcggcaaatgctcaaggttgctgctgagtgccatttgcatggtttggttcatcgggacatgaagcctgagaacttcctcttcaaatcaaccaaagaggactcatccctcaaggctacagattttggtctttcagattttataagaccaggtttgtgtgtgttgaaaaacaagccagattttcgtcgcaagccctggccaaatatcactccttgtgctaaagactttgtacaaaagttgcttgttaaggatccccgtgcaagattaactgctgctcaggcattatcacatgaatgggtgagagaaggaggacaggcatctgatatacctctagatatatctgtattacataatatgcgtcagtttgtaaaatacagtcggtttaagcaatttgctttacgggcgttagcttctacactaaatgcagaagagttgtctgatcttcgtgaccagttcaatgccattgatgttgacaagaatggaacaattagtctggaagaactgaagcaggctcttgcaaaggatgttccatggagattaaagggtccacgtgttttagagattgttgaggcaattgacagtaacacagatggattagttgatttcgaagagtttgttgctgcaacattacatgtgcatcagctagtggaacatgatactgagaagtggaaatcattgtctcaagctgcatttgataaatttgatgttgacggagatggctatatcacatctgatgaactgagaatgcaaacaggactgaaaggttctattgatcccctcctggaggaggctgacattgacagagatggaaaaataagcctagatgaatttcgcaggctcctgaaaactgcaagcatgagttcacgcaatgtacaaactccgaggagtgttcacagatcgtag

SEQ ID NO: 56512 - DNA, 510 bp, Oryza sativa
  Clone ID: PAT_MRT4530_58415C.1
aaatttggactggagaaagatttcatgagtctaattcttttagcaccatatatatatatatatatatatatgtatatatatatatatatgtatatatatatatatatgtatatatatatgtatatatatatatatatgtatatatatatatatatgtatatatatatatatatatatgtatatatgtatgtatgtatgtatattgtatatatgtatatgtatatatatatacatatgtatatacatatacatatgtatatgtatatacatatacatatacatatacatatatatatatatatatacatatacatatatatatatatatatatgtatgtatatgcattcctgtgtttttcctacgactcaatcaaacggtcattcctatatttttcctgtgttttacaatcctctgttttatacttgtattcttgttagaattctatgtttttcctattcctcggtttttttattcctgtgattcaaagaggccctaagactatacttcta

SEQ ID NO: 56513 - DNA, 1940 bp, Oryza sativa
  Clone ID: PAT_MRT4530_58416C.1
gctttgaccccaattcccaacacccctcccccttcgcttcgctgctcccgattccggcagcctcgcgccgccgccacattgatggtaatagttggatccgccgcctccgccgcagccgacgacgatgggactctgctcctcctccagcgcccgccgggacgccggcacacccggcggcggtaacggcgcggggaacaaggataacgcggggaggaaggggatcgtggcgtgcgggaagcggacggacttcgggtacgacaaggacttcgaggcgcggtacgcgctcgggaagctgctgggccacggccagttcggctacaccttcgccgccgtcgaccgccgctccagcgagcgcgtcgccgtcaagcgcatcgacaagaacaagatggttcttcctgttgccgttgaagacgtaaagcgagaagttaaaatactgaaggccttacaaggccatgaaaatgttgtacatttttacaatgcatttgaagatgataattatgtgtatattgttatggaattatgtgaaggcggggagttacttgaccggatactagccaagaaagatagccgttatagcgagaaagatgctgcagtagttgtgcggcaaatgctcaaggttgctgctgagtgccatttgcatggtttggttcatcgggacatgaagcctgagaacttcctcttcaaatcaaccaaagaggactcatccctcaaggctacagattttggtctttcagattttataagaccagggaaacactttcgtgacattgttggaagtgcctactatgtagcaccagaagtgcttaagcgtaagtcaggcccagaatctgacgtttggagtattggcgtaataacctatattctactgtgtggaagacgacctttctgggacaaaactgaagatggaatatttaaagaggtgttgaaaaacaagccagattttcgtcgcaagccctggccaaatatcactccttgtgctaaagactttgtacaaaagttgcttgttaaggatccccgtgcaagattaactgctgctcaggcattatcacatgaatgggtgagagaaggaggacaggcatctgatatacctctagatatatctgtattacataatatgcgtcagtttgtaaaatacagtcggtttaagcaatttgctttacgggcgttagcttctacactaaatgcagaagagttgtctgatcttcgtgaccagttcaatgccattgatgttgacaagaatggaacaattagtctggaagaactgaagcaggctcttgcaaaggatgttccatggagattaaagggtccacgtgttttagagattgttgaggcaattgacagtaacacagatggattagttgatttcgaagagtttgttgctgcaacattacatgtgcatcagctagtggaacatgatactgagaagtggaaatcattgtctcaagctgcatttgataaatttgatgttgacggagatggctatatcacatctgatgaactgagaatgcaaacaggactgaaaggttctattgatcccctcctggaggaggctgacattgacagagatggaaaaataagcctagatgaatttcgcaggctcctgaaaactgcaagcatgagttcacgcaatgtacaaactccgaggagtgttcacagatcgtagcttttcatagctgtgcacacttcacaaaagtgaacaaagggcagtcattgttgtaatatttttcatcgacacgtgtaatcaaaattgttgccagaaaagctcttgatgtaaattaatatggacatgtaggactgaagctagccagctaatctgtagatgtgcctcgagaaattaaacgttgtcttgcatacgtttgtgtgaaggatgacctattcatccctcccccctcatatttgggtagaattcagcttcaaaaaaaatattgggttaattggat

SEQ ID NO: 56514 - DNA, 462 bp, Oryza sativa
  Clone ID: PAT_MRT4530_58417C.1
gctatgacaaccctgattggatttgttgctgctcagatatgtgcaagttaaaggttgaagcttgactggagcaacgatcacataactggaaaaaagaccatgaagccgcaatatactcatcaactcatttgctttcagttcttgcagtccagtttaagcgatgcttacatggatattcgctttttttgtccagcaattggaagtactggcttgttggagttgcagatacgacattcagagttgcagtgcaaaatcaatacggatttggatgttctttgacctctctaaagccaggcttatccctcacccaccatgacataatttttctgatgtttaagcagcttccacctaaataaagattcagagaagatagtattttgctcgtttcaggtccattttcggtcattttggagggcaatccactccgattgaaattttctgaccatagcattttccctcact

SEQ ID NO: 56515 - DNA, 291 bp, Oryza sativa
  Clone ID: PAT_MRT4530_58418C.1
atgacgcctgaagaaatagcggaatacaagaagggcttgcatacgatcaagttgcttactatgaagcaacctaaaggcagtaccctctatggttattacacatgcaaatttctcagtgttaatgtgaggtacaggaccaacgcagaggatttgcctagaatcaaacatcgaacaagctttgacgataaaggcattaaaaatatgcagcaggacctctgccacttcatccattgcgagtgctgtcataaggatgtaaggatggacggttcttcaacacagaagacagcctag

SEQ ID NO: 56516 - DNA, 1596 bp, Oryza sativa
  Clone ID: PAT_MRT4530_58419C.1
atggcggacaccggcggacggccggaggtgtcgctggccacggtccggtcgccgggccacccggcagcttctacgacggcagcggcggcggcggatctcggccacgctgacaccgggcaagagaagcccaccgtcgagagcgcccaaccggcgaacggtgccgctccgatgggcgagtgcggcacggagtacaggggcctccccgacggcgacgccggcgggccaatgccgtcgtcggcacgcacggtttcgatgatcccgctcatcttcctcatcttctacgaggtgtccggcgggccgttcgggatcgaggacagcgtgggcgcggccgggccgctgctcgccatcatcggcttcttggtcctccccgtcatctggagcatcccggaggcgctgatcacggcggagctgggcgccatgttcccggagaacggcgggtacgtcgtgtgggtggcgtcggcgctcggcccgtactgggggttccagcaggggtggatgaagtggctgagcggcgtcatcgacaacgccctctaccccgtcctcttcttggactacctcaagtccggcgtcccggcgctcggcggaggcgcgccgagggcgttcgccgtcgtcggcctgacggccgtgctgacattgctgagttaccgggggctcaccgtcgtcggatgggtggcgatctgcctgggcgtcttctccctcctcccttttttcgtcatggggctcatcgcgctccccaggctccggccggcgaggtggctcgtgatcgacctccacaacgtcgattggaatctgtacctgaacaccctgttctggaacctcaactactgggattcgatcagcacgttggccggcgaggtgaagaatcccggcaagacgctgcccaaggcgctgttctacgcggtcatcttcgtggtggtcgcctacctgtaccctctcctcgccgggacgggagccgtgccgctggacagggggcagtggacagacggctacttcgcggacatcgcgaagctgctcggcggcgcgtggctgatgtggtgggtgcagtcggcggcggcgctgtcgaacatgggcatgttcgtggcggagatgagcagcgactcgtaccagctgctgggcatggcggagcggggcatgctcccgtccttcttcgcggcgcggtcgcggtacggcacgccgctggcgggcatcctcttctcggcctccggcgtgctgctgctctcgatgatgagcttccaggagatcgtggcggccgagaacttcctctactgcttcggcatgctcctcgagttcgtcgccttcatcctgcaccgggtgaggcgccccgacgcggcgcgcccatacagggtgccgctgggcacagccgggtgcgtggcgatgctggtgccgccgacggcgctgatcgccgtggtgctcgcgctgtccacgctgaaggtggcggtggtgagcctcggcgcggtggccatggggctcgtgctgcagccggcgctgaggttcgtggagaagaagcggtggctgaggttctccgttaacccggatctcccggagatcggcgtgattcgcccgcccgccgcgccggacgagccgttggttccgtag

SEQ ID NO: 56517 - DNA, 597 bp, Oryza sativa
  Clone ID: PAT_MRT4530_5841C.1
atggagtcggtcgagggcgcgggtggaggcggtggcgacgtcggcggcggggaaggagtcgggtgcgaggtgaggatggcgatgaggcatggcggcctcggacagctagccgagggcgtgggagacggctgcatctggccggcgcggcatcgtttggtggagggttcggagaacggcttggcgcagagtggcgcagccgatggcaacggaggccggctcggcgcgagaagcgcgggcgacggagaaggaggccggcttggcacgagaggcgcagccgatggagggaggctggattggcgcgagaggcgcggtcggcggtggaggaggcgacctaggtggagctgccggtgggtgtggcgcggtcttcggcgcacaaaggctggtcgacggaggacgccggtgcaggggtcccacatgtcggcagagcttgtgtggtggtggagcatctgtgcttcagccgtggattcgcaggtgtggcggtcggtcatgcttagcggcgaccggtccggtgttagccttctcctgggcttatgtgttggcgatgtcgccgccgacgaagcagaggtcacgccagatgaggacgggagctcgatctag

SEQ ID NO: 56518 - DNA, 799 bp, Oryza sativa
  Clone ID: PAT_MRT4530_58420C.1
agtacggtattacgcttctcagtggcccgaacctgtatacagtctatcgttgggaaaagatggacataaactttgttggtgcatggtgcctaatgcaatacatggatgcttagaagaccatggttcccatcggttatctagatccaacaaggatctgtcaatcccagcataccgtaacgctatcagaaaacactgaacagctcaagaacatgacgcctgaagaaatagcggaatacaagaagggcttgcatacgatcaagttgcttactatggtacaatacattagacgagctttcctgaaatttcaacggaaaagagtcctaatggccgtatacaactttaacaatcatgaaatttgtttcttgatctacccgaagtacaggactgttacagtcctggacccccttgattataatcacatgacgtatacacaattcctaataatcttacaatatgcgtacaactactacaagataaagagtggagaacaactataaataaggaagaagctactagtgcataagcaacctaaaggcagtaccctctatggttattacacatgcaaatttctcagtgttaatgtgaggtacaggaccaacgcagaggatttgcctagaatcaaacatcgaacaagctttgacgataaaggcattaaaaatatgcagcaggacctctgccacttcatccattgcgagtgctgtcataaggatgtaaggatggacggttcttcaacacagaagacagcctagcgacaagtgataaatacaagtctcttctggagtggaacaatgcaatgcca

SEQ ID NO: 56519 - DNA, 506 bp, Oryza sativa
  Clone ID: PAT_MRT4530_58421C.1
tgaaacgaagggagtatctgacttgatatgggaatgcagggcgcctctaaaggtaaagctgtttgcatggctgcttgtcaggaatagactgtccacaaaacaaaatctgctaaagaaaaaaattgttcaatcggcggcatgcatcatctgtaatcatggggctgagacggcgaatcacttgtgttttacttgcccttttgcaataagcttctggcgggcaattgcaattcatccacccattcagcaagtgcaaatgctacaccaactaaaacccgcacaatctgccggtaaaacattttcaggtcttctaactactttgtttctgggcgctttgaaatcatcgtcatgacgtagttttcaggggttgttcgccttccattgtttcctgccttcaaaggtgtgttagcgaggtggccctcagggcagaaaatctgaagattgaagatcgacatgtaatttctgtttggaaacaaatttactcttcccaccttcaaactctaaactta

SEQ ID NO: 56520 - DNA, 202 bp, Oryza sativa
  Clone ID: PAT_MRT4530_58422C.1
cgggataaactagatttatatttgatttccacgcttgttataaaagcgcagcgcacagtcatcagtttattagcacccataaactgagcgtactccatataatacggaactggttcaggtttccttccaaaggcatgcaatccacccaaacagaatgatgactttcgcatgggctagaagttaatacgggtaacttagggaa

SEQ ID NO: 56521 - DNA, 606 bp, Oryza sativa
  Clone ID: PAT_MRT4530_58423C.1
atgtgcatcatctggaacaacatgcaaaaagaaaaaaaatcaaatctagccgacgacggagcaaggtcgacggtggcggatctggcctccccgcggcacggaggcggtggatccggcctccccgcggcccagcgacagcggatctggcctccctgcgagccgccgcccgctcccgagcgccgccgcgcccgagctcgcctcccgccgccgttgcccacccgcctaccgtcgccgccgcacgcccacctcgcgtcgtcgtcgtcacgcctaaaccgtcgccgccgactgtggggtgggaggagctggttggtgaggatggatggcgccggaggcggtggagaagagagggaggagagacgcgagggagagaagggagggaggggagctggagagaggggacgggtgggtgggcagttcttgcgcggttgggccggcaaccgaccggaccaggacgcgtcaactaccgcaacggataccaacgaacctagccggcctccccccctcccccacgtcgtccgggccgtgagccgccacgtggcgctccctcgctgcctctcattgtgctctcggcgcggtggcggcggcggcggcggcctaatcgtgccg

SEQ ID NO: 56522 - DNA, 1107 bp, Oryza sativa
  Clone ID: PAT_MRT4530_58424C.1
atgccaaccgccaccggcagccgcacaccggtgcggtctgcctccgccgtcatagccggcacggagagcggccagcaccatctcaagatcgacggctactcccgcatcaaggacgagctgcccaccggcagtgacatcaagtctcgatctttccgcgccggaggccatagctggcacctgcgctactaccccaacggcttcaactcggactgcgccgagtgcatctccatcttcctccagctcgactacaatgtcatgaaaggcgtgaaagcgcagtacaagttcagcttgctcgaccgtgccaggaagccgtcgtactccaggagtagtggcaaggcggacgtcttcctcaacaccggttggggttaccggacttacatcgaaagggggcttctggaatcgtcggagtatctcagagacgactgcctcacgatcgtgtgtgacttcaccgtcttcaaggacttgcggaccgaggacatcgacgttgatgacgcgatgccaccgccgcagtcgcctcctacagtggtggtcccgccatctgacctgcaccggcacctcggaggtctcctcgccaccggagagggcgccgacgtgacgttcgaggtcgagggcaagacgttcgcggcacacaggtgggtgctcgcggcccggtctccagtgttccgtgtggcgctcttcggcgccacgaccggtggcgccgatgatgtagtgcgcgtcaatatcgatgctatgaaggtgcaggactttgaggctctgctccactacatgtacaccgactcgctgccggagatgaaaggaggagaggcggcggcgatgctcccagaccttgtcgcggcggcgaacaggtacaagatggagaggctaaggctggtgtgcgaacacaagctatgcgagtacgtgaacgggagaacggttgttgccatgcttgcatttgcgggggagcaccagtgcaatggccttaaggagaagtgcctgcgttttcttgatgacccggtgaaactgagattgattgtgcaggcagagggagtcgagaatttgagcaaaagttacccttctattttgaaagatgtaattgccaagtttgttgcaacacccgtagatagctga

SEQ ID NO: 56523 - DNA, 561 bp, Oryza sativa
  Clone ID: PAT_MRT4530_58425C.1
atggccaccttccgggaccacctcgccgtcatcgccgaggcgctctgcgcgatcgccgccgacatgaatgcggccgcccgcgccctcgacccctccaccgtcatcagcctcgcctgcgccgccttcaccgtcgccatcgtgctcgtctgctacgccgacatctgcggccgcctcgccacgctccactcgcagacgcagacgccggcgggggaggacgaggacaataatgccacgccgccggaggctcctgctgcttctttccttaaaggaccgcaagcgctccagcaatggcaccgacacctctttcttctcggagtcgtcgtcgtcgtcttcgttttcatcaaccgagttctcgttcttcgtcttcgtcttcatcatccgagtcctccttcctcgtcgtcggatgatgacctagcgcggcgacagatgcagatcgtcgggtggttctgtagcgagggaagcaccggagaaggctctgttgatgatgatgattatgatgctggtgatggtgatggtgcagcggatgcggaggcgggcatgaaggaggcagtggtggcctag

SEQ ID NO: 56524 - DNA, 339 bp, Oryza sativa
  unsure (1)..(339): unsure at all n locations
  Clone ID: PAT_MRT4530_58426C.1
agagaattttgaagacaaggtgaaagtttgaaaggggaggagcagcaatggcggacatcgcgctgctggtggtggaggagttcgagaagatgncccagaaagttnaggcagcagagnnagcagcagggccggatcagcgaggaggtgcccgccggggatgcggcggcggcttcgcgggcgggggagtggggttcttgggcgccggcggcggtgaggacgagggtggcggcntgaaggacccgccgccgccaggggctcgccgccgtcgatgnttcttctccgttnatcttctttgtttctctcctcctctttttccttttttggaagtaatttggtaag

SEQ ID NO: 56525 - DNA, 467 bp, Oryza sativa
  Clone ID: PAT_MRT4530_58427C.1
atggaggacatcacgagacaagaaaaacccaccggatccggcatccacgactcgctcagcctccccccgtcttcgaccactccctccgcctaaaggccaaagccgccccaatccgctcggcaccgaactgcactgttgtggcagctcaatccgtggatctgtcgtcggcaagctcagagaaggccgatccatcgccagcgagttcgggggagttggatccatcgccggtgggctcggtggagggacaaggagggggagcggcggagagggagtggcgccgtcggtgggtggtcgaggagggagagcagcagatgagaggagagaaaaccaagaggaaagagcagaaaaaggaagacggcggattcatcgagagcagctgagcaggaggagaaatgggaaggaaagcacgacgactcgacgtcggcggcggaccgcggcgcgtccaggatgctgtggcagggacctct

SEQ ID NO: 56526 - DNA, 545 bp, Oryza sativa
  Clone ID: PAT_MRT4530_58428C.1
tcggtttcgttcagtgttgcagaaaatttgttttcagggcttgttccatcttgtttcgagaattttacagcttcaatctttgctggcaaccgaaggctttgtggtgcaccgttgggtaactgcaggttgcgcagagtcaacgacgagactagtatcggagcagctgtcggtttcgtggttggattcgtgttggccttctacttcccgcactggttcgtcttctccacgagtctccattcctacatctttcggatttgatcttctggaacttttgtgtggcgttgtggcaaccggccgtcaacttcaggtgggcaaataaacatgtacaaaaagagcaattctacggtccttaaggatgtattatgaggtaccaaaattttagtgtaaaatttggtacctcatggtacctcatagtacctaggtatcaagaggtaccaaatttacaatagaaaaaatagtatctcatgttacctcctcaaggactataaaattgctcgtgcaaaaatacttgtatttccatgaaaaaaaaaaaaaaaaaaaaaaaa

SEQ ID NO: 56527 - DNA, 1683 bp, Oryza sativa
  Clone ID: PAT_MRT4530_58429C.1
atgggagatgaagctgcccaagctgtagaactgatggaacatatgctgaagctcaaagagcaaggtttgcaaggggagcagatcactcggcatttcatcaaaagtcggctagctccaatcaaagagagatcccgcacggcttttgaatttgatggcaaacatgatccaaatcacgaagactcagactccctggattttaagatcatgaaggagaggatgtacaaaatcttctctaacgccattgtcgtcagctatacgcatctgctgccagtcgtaccatataacgcattcaatccacctccaccgtcttgtcttcctgttgaatcaactgacagtggcgggtatcctgtccaggagtttgctttggtgaagtccgaccccccaattgctcagcgccgatctcctcgtcatcagaccgttcaggggagtgggggaccgaagattaggtccgaacctcagcctaaaacctccaatccagccgggcaatcagattcccgcaagagaaaattagtgctgagcgacgacgaaggcgacaatggcaagaaatctggagatgaagaatcacccagaaaaccgccgaagcatgctgctccaaagaagaaaacgtctagtcgccccatgccaaagattagaaaatcctccaggaaaccatccgacatagatccatctagaaaggactctaatccggctaacacggagacgagttcctccaaagaaactgggccgactgtcgaaggccatccgaggccaggccaagaaatcccggaagtcgaagctcaggctgatagctctcaagggccagacgctggtagcgacccaaggcctggatccccggctaaagcacaggaatctactcgccctcgttcgggaattatcacaggaccactggtcggcgatgaagaagaaattcctcggataagagcagctgaagactctcgccctcccatcctagtcaagtggtggaatgatgacttgcggcctgaaggcataataataaaccggcagaaagaggatgaagaggtgtgccagctgaagaaggcacttggtgaagcaactcgtattgtcaatatcattgacaaagtcatcatgcagagaatccatctcaggaatgaggcaaagaccataaccctgaaaaaattggttcctcatctagggactcttgaagctgttagagatcagctgagcgaagtcaaagagctcgccaggaagacagagcacgatctatgggatcggattgctcaacttcaagagtctaatttcgaactaagcggctcgtcaaaagtgcaagccgccaagatatcccgactggagaaacagattcaggctctggagaatgagaaagctgagctggccaaacaaagggactcgcccctgaaggacgttgaagtcttcgacaagttgagagtcgctccggacacgtacttcaagaacattaaagaagccgggagtatgggagcaagtttggcgctggcgatgaccaagtccttgtacccgaagattgacattgatgccgttgatggctttgcagacgggacgagcgaagaagctgctctcgatctcatcaacgatgcacagaaagcagccgacaaaattgcggttgatgtggtagagcggtttcaagataccgatcttcggcagattggccctggcagttctgatgatgaaaagactgacactgattga

SEQ ID NO: 56528 - DNA, 475 bp, Oryza sativa
  unsure (1)..(475): unsure at all n locations
  Clone ID: PAT_MRT4530_5842C.1
accgctccttcggccgcgcgcgcgcgtccccgtcncgcgcgtcgttcgccggcgccacctccgccacctcctcgtcccacttccgctccctctcgtggaacgtgttccccncgtngtcggcgtccngcanctgcagcgatcggggcccggctggccgcnccgcgcgcgcacnaagcgggcctcgccgcgcccgtctacnccatgggctgtgtnctccacctcntcccgttgggcgctctccccgccgtcccgtgccccgaacgctccaccgcgctccaagcgcacatctccccncngggccggcccncgcccgttccccttnggcgccnccgctcctcccctgccaaaaacccctcccccaaggaaggaaaaccccaagganaggnnccaactccttgccggctncttcnaggnaatccnttttctccaaaaattcccccccaaaactccccaacnccctncaacccggggcccn

SEQ ID NO: 56529 - DNA, 378 bp, Oryza sativa
  Clone ID: PAT_MRT4530_58430C.1
atggagaattccagcagcaaggcgcatggcttccgtattcatttgatattttccatctattggatctacaagaacccagaagcctacgggctacatgttctccaaggacacatgttccgaagcattcctgttgtgcccggcttctgctacgtgatagaactacctaatgagattctgccccctgccaccatcggcttctgctgcacgacagaactcgccgtcaacgtcccgcctcctgccactaccagcttctgctccgcgacagaactcgtcaccgttgttcggcctcctgccaccggccaccgctggcttctgctgtgcgacagaactcgacggctagtttttgccttctgccaccaccggattctgctccattag

SEQ ID NO: 56530 - DNA, 1998 bp, Oryza sativa
  Clone ID: PAT_MRT4530_58431C.1
tcagacctgaagtaagtagtaagcaccgactgggaaggcgatcccatcccgatcttggttgaactcgcctaacatgaagtagatgatatgttcctctagcgagctcaggatggggtacattggtgtcatactcatcggcaggtttgcattacaaaattcttgttgattccacaactcctttagactgatctcatattctttcacccaagtgttactcttcagcagcagcctccataatgtcacatagcgatccccgggattgatgtactcaaggaatccatcgatggagatgaatcggatggatcccccagcataacccatggtgcgataaacttctggtgctgccacctgccctgtgtaccggacatcagcttgatatcccataggaagattgatgaagctgaagtccacccgatcaaccttgtcggagagtaggtcatcacaagagcaaaacagtacgccgcacaggagatccgcccaaaaaccatgtccctcaaacgagaaagtcaggtcggctacgaacgagctctcatcgtccagccactggttgggtaggttggccgtcttggtcagctcccacggcgaagaggacgacgaaggccacaggagaaggacatcttgccagttgatgtcgttgtcgccgtcgtcttctccaccggcgaactccaccttcttggccttgcccaggaagacgtcttctccggtgagaacgtcttcctcgtctccagtgagaacgtcttcctcagcgaactccggcatcttccccttgcccttggcgtcgtccccgccggaacttggcgtcgtcctcgccggcgaacttgggcatcttggccatgagaaccagtgcgtacgactggtcattatagccggggtggcggcgcgcgatgagaagtcgtgtggtacggccaccgacggcgccactccctctccgccgctccccctccttgtccctccaccgagcccaccggcgatggatccaactcccccgaactcgctggcgatggatcggccttctctgagcttgccgacgacagatccacctcccctgagctcggtccagccgtcgtcggcgttgggtggcgaatcagtcgacgccgatagcagatcgagctccccaacggtggattgagctgccacaacggtgcagttcggtgccgagcggattggggcggctttggcctttaggcggagggagtggtcgaagacggggggaggctgagcgagtcgtggatgccggatccggtgggtttttcttgtctcgtgatgtcctccatgatcactatttggtctgattggtgtttgttttgttggatttctcaggatctggtacagtggacgaatgtctggctcgacgtcccgttggtgcttcttctggtcgtccagtcggctctcaaggcctggctgcggcccgccgagtttgagagctcgcctgccccgtgcctgccagtgactgatgtccttgattcgccgtcagttccagccactgacgcctatgctgatggactcactatggatcaccctattatgacaacagaattctggacatcacatgagtgccttcttcttccctatgagcaagcattacctgaaaacattagagtgaaactccctcacctcatacgtgctgttcatgttgctgtccagatagtaacatgggttaccgacccgatgcatggtaacacaatgaaggctccttgtggcctcaagactcgctcctttgctacttttcagtatttgcttgttcctattacttctcagtactggaaggccatattggtgtatgagaatctgtcaaatccctatggaatagcgggaactctccttcatgtccaagtctcgcagtcctatcttccgaagccgaagtttattttcaatggcggacatgaactttgggagtggagaagcatatgtggatgtggtcatatggatagtcaacctctaaatgatactactactcgtactgaagtaaaaggtgggaaggtagtgagcaggaagtag

SEQ ID NO: 56531 - DNA, 1548 bp, Oryza sativa
  Clone ID: PAT_MRT4530_58432C.1
gcacgaggctctctctctctcttctctctccagtccaatctcacccatcgccgacgacccacgcacgcagtccaccaacgcgccgccgccgccgatggggaagaaaggggataggcagcgagagctcaagatttggtttcttgcagcagcaggcagctcttgtttctccataacttctttgatgcttcaatttaatttgatacgcgaaattatatctgcagacctgcaggagggtgcgcagggtttcttcttcgacatgtcttgggctgcaatcgagaatgatcctggcatttttactgaactgttgcaacagatgcaactgaagggtcttcaagttgatgaactctattcactcgatctggatgccctcaatgatcttcagccagtttatgggctcattgtgctgtacaaatggcaacctccagaaaaagatgagcgtcctatcaaggacccaatcccaaaccttttctttgctaagcagataattaacaatgcatgtgccacccaagctatcgtttctgttctattaaactctccgggtatcacccttagtgaggagctcaaaaagctaaaggagtttgcaaaggacttgccaccagatctcaaaggattggctatagtcaattctgagagcatccgtttggccagtaattcatttgcaaggccggaagtccccgaggagcagaaatcatctgtcaaggatgatgatgtctaccatttcattagctatgttcctgtggacggtgtcctgtatgagcttgatgggctaaaggaagggccaataagcctggggaaatgcccaggtggcgttggcgacataggttggctgaggatggtgcagcctgtcattcaggaacgcatcgatcggttctctcagaatgagataaggttcagcgtcatggctatcctaaagaaccggagggagaagttcactttagaactcaaggagcttcagaggaagagggagaacctcctggcacagatgggtgatccttccgccaataggcacgcgccatctgttgagcactctcttgcggaggttgctgctcatattgaggctgtaacagagaagatcataatggaggaagagaagtggaagaagtggaagacagagaacatcaggaggaagcacaactatgtgccattcttgttcaatttcctcaagattcttgaggagaggcagcagttgaagcccctgatagagaaggcgaaacagaagtctcacagctctgctaatcctaggtgaaatcaactgttatttgtctcgattgccgtggtttttgtcaatgtagagatggctgactagccttttgttttcgcggtagtgtttgaaccatgtgatgattattatctttagttatagatattcggtcgaatttagatgaaattcaggcgaatgtcccttgaaatagactgtcttatcagactacatgtgtacactggagggtcattccctattgcatccgtgtagatcttgtccttcctttgtcacattataaataatctaattgacggcctaagcctcacatcaaaaaaaaaaaaaaaaaa

SEQ ID NO: 56532 - DNA, 399 bp, Oryza sativa
  Clone ID: PAT_MRT4530_58433C.1
atggtgatcgtgacggtgtcggtggtcttggcggcgacagccgtcggcggtgacgatgtggtgtggatgctaaaattaagtaggacattagagcttctaggacctgaagagacatcagaaactatcctggctttttccaacttcagcaaggatggttgccacaacaaggacatattctgtgtgaaagctgtttcattgcctcagtttcattttccatttattgtggtgcacatagcaaagggtcccaccctgattagcagctatcatttcatcggcctgatcatcaaatatgtggagataattctcggtgatcctggtgatggcagcaacagagacgtcagtgcagataaaacaaaaaccaatttgcatgatttggtctctactaatctgaagctgtag

SEQ ID NO: 56533 - DNA, 778 bp, Oryza sativa
  unsure (1)..(778): unsure at all n locations
  Clone ID: PAT_MRT4530_58434C.1
agcagaggtaaccaccaccagatcacggcaatggcgtctccggcgtctgatcccgccatcgcagcgccccacctagaggcggaagaacccgccgtcgtaacggtggcggcggcggcggcggaggaggctgtggtggtggcggcggatgtggagaaggagggggaaggggaagatgaggaggaggaggaggaggaaggggagtgtgggttctgcttgttcatgaagggagggggatgcaaggaggcgttcgtggcgtgggaggagtgcgtggaggcggcggggaaggaggagggctccgacatggtggagcgctgcttcgaggtcaccgccaacctcaagaggtgcatggacgcgcacgcggactactacgcccccgtgctccgcgccgagcaggccgtcaacgaccacgccgacgccgccatcgccgccgacaaggcaaaggaaggcggggagaagaagctagatgcggtggcccaggaggccgcgtccgccgccgacgagaagaaacaacaggttgaggagaagtcgtcgtcgtcttcttcctcgccgaccaccaccattgacgagagaaaggagaaagaagtggtgactgaaaaggctgattcctgagtaacttaacagtttttttcaaatttnggttaagcaattggagtttatgatcctnactggtgattgatatgaagcagagctaactatattatagatttngtcaagccaaattttttgggnacccttttgtggggggggaaanaaagccgattacgggtataaattnttg

SEQ ID NO: 56534 - DNA, 465 bp, Oryza sativa
  Clone ID: PAT_MRT4530_58435C.1
atggttaaagataagtttgcccatgggcccacttgtcaatcacacatctggctttctacgttcctcttcttgctgctgggccgactcgccgcgtggacggaggacaaagaacgacgtgcccacgaggagggtgagggcattgtctctcgcggtggcgtcgggcaaccgactgcgtcgactggccttgaaggtgagggccccccatgggccgacagtgggacggatagagatgatcgggaggctcgactggcggaagatggcagcagcggcatgcgtcgggtcccccgtgggccgacagtgggacggatagagatgatcgggaggctcgactggcgaaagatggcagcagagcggcatgcgggaggctcgactggcgaaagatggcagcagcggcatgcgtcgatggctggcatcgacggagtcagggtgtcggtggagacgaccctagggcgcgaaggacggtga

SEQ ID NO: 56535 - DNA, 513 bp, Oryza sativa
  unsure (1)..(513): unsure at all n locations
  Clone ID: PAT_MRT4530_58436C.1
aaccantggagatactttccttggtggtgaggactttgatggtgcattgcttgactacctggttagtgagtttaagaagtctgacaacattgatctgagcaaggataagttggccttgcaaaggctcagggaagctgcagagaaggccaaggtcgagcttttctcaaccatgcagactgaaatcaacctcccctttattactgctgatgccactggtgcaaaacacttcaatattaccttgaccagatcaaagttcgagtctcttgtggagtctctcattgagagaactcgcatcccctgtgtgaactgcctgaaggatgcaggcgtatctgcaaaagacattgatgagggttctactggttggtgggattgacgagggtgccaaaggttcaggatattgtttctcagatattcaacaagacaccaagcaagggtgtcaatccttgtgaggctgtttgccatggggagcttccattcaagggtgggaatctttnaaggggtgantgtaaagga

SEQ ID NO: 56536 - DNA, 1419 bp, Oryza sativa
  Clone ID: PAT_MRT4530_58437C.1
atgtcgacctccgccagcccgtctgtcgcgccatcggctgagtacgcagagcatctctccaacttggtcgcggttcccagtctgtcaaacgagcaccagtattttctcggtccgatcggcaatcctgatccccatgagtttattagtgccgagactaataggattcctttcagactagccaacccgaacataggtcattggaaaaacaccttcaaatcttggccttccattgagaaaagtgcccctgagaaaagttggcctgtatggtacaagcgggtatcggctagcaagcaggctcactgggacgaaattggaatcggccaagcacttgccctgaccatagcaaattcggctaaggacaaacccctgatggccgctgcagcctatttctggtcgaacacacttaatgctttactctttaaccaagggccaatgaccccaaccctgttagacatcacaatgatcactggcttagatgtcacctcattggctaatcccatgagcttgaacactaaaaacacttttgagttcaagaccaagagcattggaggctggtcagggtatattgcagcgtacaagggcaaagggccagtcacccctcgagagcatgtagtctttctgctgatatggcttgaaaagttcctgttctgcggatcaagttgtggtcccacaaccaactggcagtttccagctgaagccctagaaacaaagagacaattccccttaggcaaaatcctcctcggctatctgtaccaaatgttgaataatgcatcggccaagatagctgtcggctcagttgttggtgtaggtggaccatggtggttgctgcaaacttggttaaacttggtagccatgaaagttgttaatcggccaactgctcctgctatcctagtattagccgatctgttctcgtttgatatcaaagattaccttgatgaagagacagaagaagataccaccagcaaggctctagctcccttgtccgatgacatcccagatgatcttgccaatattattactccagcagtatacctcgagcagcatcaattcaagctggaaagagctaaacaaagattagctgatcggcgggagcacaaggatatcgaagctacaatccaagccaatcggcaattggtgcatgaagaaaaatccaagctcgatcagctgtctaaggttccgatcaggtccaacattgatcggctcgaagcccaaaagattgatctcttggcacaacttcaagaatgcaatgccgagctggatctggaacacaagaaactagctgatctcccaaaagctgttgaggagcagaaggctaagctgagatcggccattagaaatgtcgccgatatgactaagtccttaacagtcatccctggaaccgatgctcaagacgcccaagcgatcgaagaagtagagtaa

SEQ ID NO: 56537 - DNA, 489 bp, Oryza sativa
  Clone ID: PAT_MRT4530_58438C.1
gggggggaaaaaaaaccccccccccaaaaaaaacaaagggggcaaaccggggcaaaccccccccacaaaaatttacaggggggccccgggggcaacccacaaagaacaaaacccaggggcatttagggggggggcccaaacaaagcccaacatgggaacccaggctaccacaaaaaaagggggcccagaaaaaaaggggaaaccccgacgggcccagtttttaaaaaaaaaaaaaaggggggggggccggggcccaccccccaaccccacaaaacagggggggggaaaaacccaaagggttggcagggggggtacggggcccaaaatgcccccctcaaaaaattggcaaaggggggggggggggggggcttcacgggcgggcaggggcccaaagggggccgggggggggtctcaaaacccggggaatttactttagaaaagaaaaaaggccccccaaaaggaaggctgggaacaaaaatggcgggggaa

SEQ ID NO: 56538 - DNA, 304 bp, Oryza sativa
  Clone ID: PAT_MRT4530_58439C.1
cgtcgtcaatattttcgttttcctggatagcgcctgcaaatctgacttactgctcataatacggcctccgatgacggagttgcgaacgctctgaaactaaatcgttgtatcacacctgacctaagccagatgcaccccctgaaatgccaaatatcggcggagaatcttatgcgtggacgactacgccgactaggacgccataatgttgcactagatggtatttggcacaatattggttcaattccggttatcattccactttgggcaaaactacttttgatgtgctctattgacacaccccact

SEQ ID NO: 56539 - DNA, 453 bp, Oryza sativa
  unsure (1)..(453): unsure at all n locations
  Clone ID: PAT_MRT4530_5843C.1
gttcttcggccgccgtgggcgggggggtggcctgttctggaggccggagtcggtgttcaagaaggtgttcggcgacctgacggtgagggacgccgccaagccgctgcttgtaccctgctgcgacntggctacggcggcgcctttcctcttctttttttcttccctcncngcttttttgtggtggtgggttncccctttcctcttncccttcttnctcctcntcctcccgtnccctttctctctttttccccccctctttgtcccctctcgcttccctccctttgggatcctccgctgatctccggcgggnttgctcgtcttcggggtcctgctcctcttcgtcctccttgtcgccctccttgttcgcgggggcttcctggccctgctggtgctccgnggcttggtccttccttgttgctctcggcctcggtggtctccttctttggcctgccc

SEQ ID NO: 56540 - DNA, 1362 bp, Oryza sativa
  Clone ID: PAT_MRT4530_58440C.1
atggatatcctccggctcctcgcgccggcgccggccctccccttgatgctccacggcggcgccgccaccggcaagacgcgcgccctcctcctggcgctgcggtacctccgccccagccagcgcctcgtctacgccgcactccgttccctcccttcccctcgcgccctcttcgcttctctcctctcccagctcagcgcaacgccattctccacttcctctcgccaccgcgtccccgacaagccctccgacttcgtcgccgcactccgcgacgccctcaatggtatcgtctcccagggcgaggtcgtatacctagtgttcgacaacttggaagttgtgaggagctgggataagggtggtcagcttctccctctccttctccgcctccacgacctcctccaattaccgcaggtcgtgctcgtgtatgtgagcagtgcaacgcctgatgcgtactactccatgactggctctgttgaaccaaattatgtttactttccggattacacagtggatgaagttcgcgacattctgatgcatgaccatcccaacccaaagctctactcatccttcctgagtgtggcactgaagccattatttcgcgtaacacgaagagtggatgagctttcggcggtgctggaaccgcttttcaggaggtactgtgagccactgggtgacttgaaggcagttcctgatgaaggcatgaagaggaggttgtttgaacatgttcagtcacatcttgcagttgcgttgaatgagacattcaatgtccccatgagagcttccatggatgaaatcaaggacggtggttctgctgggaagggcagtgctaaaaggcagtttgctggtaaagatggactctccagtgaactggagttccatatgtctgtgtcagccaagtaccttctgctgtctgctttcttggcttcaaggaaccctgctactcttgatgcagctttgtttgattcaactggaggcttagataaccgcaagcgcaagagaaagagctcccaggcttcaatgcatatgaaggataccatagttgaagagatgcttatgaaagggcctggtacatttcctcttgagaggctcttggctatatttcagtgcatcacatccgtgtcagaagatatacttgatgaaattgattgccctggcaatatggcaagtgaaagtggaacaactggtttgatgtcggatgttctactacagttgtcaacattgtgcaattctaatttcctctcgaaaagccggagctgcccattagagggctcagctaggtaccgttcaaacattgatgaagatttagctctcaaggtcgccaggagtgtgaattttcccctctcaaagtatatgtacagaagatag

SEQ ID NO: 56541 - DNA, 2166 bp, Oryza sativa
  Clone ID: PAT_MRT4530_58441C.1
cactcgaacaagggaggggatcagacgatcagtagagagccgagcaacgcccacaatctcgcgaatccgcttcacccggcatggcagcggcggcgctgtacaaggacgcggcggcgccggtggaggcgcgggtgcgcgacctgctgggccgcatgacgctgcgggagaaggcggcgcagatggcccagatcgagcgcaccgtcgcgtcgccccgcgccatcgccgagctcggcgccggcagcgtcctcaacggcggcgggagcgccccgctcccccgcgcctccgccgccgactgggcccgcatggtcgacggcatgcagcgccacgccctctcctcccgcctcgccgtccccatcctctacggcaccgacgccgtccacggccacaacaacgtctacggcgccaccgtcttcccccacaacgtcggcctcggcgccaccagggacgcggagttcgcgcgtaagatcggcgaggcgacggcgctcgaggtccgagctaccggcatccactggaccttcgcgccctgcgtcgccgtttgtagggatccgaggtgggggaggtgctacgagtgctacagcgaggacacagaggtcgtgcgctcgttgaccaaccatcgtctccgctataaatgctagagatgctagtgatgacccataattcccttttgggtatgggttgaaaatgttccgaggtgattcttgcgccaagcatttcgttggggatggtggcacggacaaggggatcaatgagggaaacaccatttgctcacttgaagatttggaagggatccatatcagaccttatcctgattgtatatctcaaggggtggcaactgtcatggcgtcctacacccaatggaacggggaaccattgcacgcaagccgctatttgctgacagatgttttaaagggcaagttaggcttcaagggttttgtggtgtcagattgggagggtattgacaggctctgtgagcccagaggttctgattatcgctattgcatcgcgcagtctgttaatgcaggaatggatatgattatgatacctttcagatttgagaagtttttggaagatcttgtgttcttggtagaggcaggggagataccaatgtcacggattgatgatgctgttgagcggattctgagggttaagttcatatccggagtgttcgagcatccattttcagatccgtctctagcagatataattggttgtaaggagcatcggttgctggcacgtgaggctgttcggaagtctttagtacttctaaaaaatggcaagaatcagaaggaaccattccttccattggccaaaaatgtgaaaagaatacttgtagctggaacacattctgacaatattggatatcagtgtggtgggtggacaatagcttggaatggagacagtggaagaattactattggtacaaccatattggaagctataaaagaatccgtgggagcagaaactgaagttgtgtatgaggaatgcccaacagaagccacagttgaaactggggaattttcctatgcagttgttgtggttggtgaggttccatacgctgaatggttgggagatagaacggatcttagtattccatttaacggctccgaccttatttctcgtattgctagtaaagtccctaccctagttgtggttatatctggaagaccattggttgttgaaccccaagttctggacaaggtagatgctcttgttgctgcctggctacctggaagtgagggtatgggagttactgattgcctctttggggatcatgattttttgggtacattgcccgtgacatggtttaggtctactgatcaattgcctataaatgctagagatgctagtgatgacccattattcccttttgggtatgggttgaaaatgttccgaggcagatcaactattaacaacagaataggccaagcgatgattgggccattcgtcgtgtcactgaaatcagtatatcagaagttgaaacttcaggtcaaatcttggccacttctggcatatcattattgctgtttcatggaaaatgttatcagcaacagtgctccatggaatgatactattgctggagatcggaggcatagatcttacttggttaacatactgaagtttgactccggttcttgctgtgatattgatggcctttacctggaatga

SEQ ID NO: 56542 - DNA, 359 bp, Oryza sativa
  Clone ID: PAT_MRT4530_58442C.1
atcaatatatatgcgtggatatcgatattatatcatctatcaataaatgtcaggaagcaagattatccttgcttgccatacaaagaattcgctgcaacattttagctacagttgcttaacaatgcgaatagcagaaatgggatgctaggagtacaatcttctcaacttctcaagcttgtcaaaagaattggggctcaataatctgaacaccacatgtatccttggctctcatctgattctcatcagtttatcagctgtcaccccttcgtgacatgaaactgatccccaattcaggttcagagaggcctggtccggcgccccgaggcccgaccgcagaggagcgcgttctttgggatcgg

SEQ ID NO: 56543 - DNA, 213 bp, Oryza sativa
  Clone ID: PAT_MRT4530_58443C.1
ggatactatgacggtaggttctgtaccatgtggaaactgcccatgtttggaggcaccgaggccacctcatttctcaatgatcttcagtaagcaaaaaatgcataccctgataccttcctacgtatcattggctttgacaacgttaggcagatgcagttaattaagtttcatcgtgtataagccacctggttgcgaggagttatgcggcaatta

SEQ ID NO: 56544 - DNA, 339 bp, Oryza sativa
  Clone ID: PAT_MRT4530_58444C.1
atgcgcgttcctggcgcgcgggcgcacgaggggaagtccacctacgagtcacaaaaagaatggagggatctcacgcgcgtccacgtcgtgagtcgtgacgtgctctccttcctcgggatccccaccggcgcctcgtgcgcacgacagctggggaatagagaaactggacttggcggtggcgagtgggcgactctgcttgttgtttatgcactcggaggcagctcgattcgctcgtcccgtgctggcgaaaaggccgtggaaacaacgggtggcgacatgtcgaggctaacggtttggacccccaatgacgacatctgtcagaggaaagccgtgaggtga

SEQ ID NO: 56545 - DNA, 2277 bp, Oryza sativa
  Clone ID: PAT_MRT4530_58445C.1
atggaacagatttcacttgagcatcggtacaaggagtgcaggccacgaagaaataacagctgtccaaccaaaacacttgtcgggaaggatcagttgaaggaattggagcacaggagaccatcacctagtgtgattgcaaaactgatgggacttgatgtgttgccacctgcttatgtagcccacaatcagcaccaggaattcaaggatgtattcgaagtgtcagaggaaccacaagaggccgtcacgaaagagagatcacataatttccctaaagggttgccaagcttgaagcgaagtgcattaaagctaagaaagcttatgccatcaaagtctccctacggcgatgaaacatttgataacaatgtagtgaaccaagatggttttgatcgcttgaactcgctagagataaataatcctttgtttgagaagcacccctatgatgtgaattgttccccaaattatcgatatgagaaagatagtacttcaagtactttcaggaagtaccctgttggtttaggtaactcttcacttaaagaaattgttgttctggagctaggcttaggggaagtccaacattcaggtaatgccttttctacaccagaaccctctgatgtcaataagaatttcaggagaaagatgaagcaggctgagttttctactacgaacaggggttcgcaaaatcttttaggcactaaagatattaatgtgcctagaataaaaggagaaagacacttgactagcaatgctgtagattcactgttaaagcgacaagattcatcacttgatcaatataacacagtggatacggataacactggatcatctcagaagtgtgttagcagtgaagttaactccagaaaaagcaacaggtcatcatcaaatagctcaccctggaaaatccgccgcaagtatgaggaaggtgccattggttcaaaaactcttgcagagatgtttgctttatctgattcagagaggttgaagagggattcagactcacatgtgcagattcaagacaataaacttaaccggggcaacaacaatgacaaggaaggatgctttatagtgttgccaaagcatgcacctcgattgcctcctcacagtttgttggacaagaattcttcctgtgaaaggtcccctcacgatatttttttctcaaatacatcaattagtcacaacagtggtcagtttcacttcgattctttctgggataaaccaacacggcagcaaatttcaagtcccacccaagatgacttgaggaatgcttcttgtgcaagatatcacaccttggagcaacatagatcttctttcccttcttatgataataccagaaacaactcatggcatttaactgatgacttttcaacttttgcctgcataaatgagaaagtacttttcacaacagatgaagacttgttgagaaaacctactgaaacagtgcattcttcgtttggatcacgattatctggggaacaaaaggtttcagcatcgcctttccattgcggtgtatatgaagccataactatttctgatcatacttgtgcggcaaagtctcgtagaagcttgaaagaggttgaccgaccaagcccagtgtctattcttgagcctccaactgatgaagacagttgttgttctggatacttaaaaaatgactcgcaagtcatgcctagcatcgataaacaaatatatggctgtgagctccgatatgagcaagaagtatccttgtccagcgacaatgacaatgattcttctgaccagtctcttgaagcatttgaagttgaggaggaaaaggaattctcttatctacttgacatacttataagctccggtgtgatagtcgcggactcacagctcttgttcaagtcatggcaatcttctggttaccttgttggtcctcatgtcttcgacaagcttgaggggaagtacagcaaggttgctacatggccaagaccacaaaggaggcttctgtttgatcttgcgaattctgttctttctgagatcctcgcaccatgcatcgacacgcatccgtgggcaaagttgagtagaaattgctgccctgtttggggccctgaaggacctgttgaggttgtatggcaaacaatggtcaggcagcaggaagagcttgctgtagcacatcctgatgacaagattcttgatccagaatggctggaattcggtgagggcatcaacatggtgggatggcatatagccaggatgttacatggtgatctcttggatgatgtcatactggaattcctctcaggatttgttgcttcatga

SEQ ID NO: 56546 - DNA, 192 bp, Oryza sativa
  Clone ID: PAT_MRT4530_58446C.1
gcacgaggatgcaaaacaaccagcaccggcggccgcagcctcgcgcggcgacctgaaaacctcgcaaccgtaaaaccctagaggcggattccggcagcagatcggaggcgcggcggcggcggcggcggcggcagaggaggagtgtccgggatgcagatcttcgtgaagacgctgacggggaagaccatcact

SEQ ID NO: 56547 - DNA, 373 bp, Oryza sativa
  unsure (1)..(373): unsure at all n locations
  Clone ID: PAT_MRT4530_58447C.1
cccacgcgtccggagatatggggatatcgttactgaagaccgagtggaaccgatgtgcttgattttaaggtagagcagactcgagatttgattgctgggagaaaggtattgacaatcttaagggagatgtaaaatctttctttagaatgtatttgtgatgttgtgactggcctgtttcctcaaggaaggtgtggttcatggaacgctgtgtgctttgcttgacttgtggaagataagtgttctagtaatcatgggaatgttgcctttcccatttctaatagccaattgtatgtatcagcaagacatatggtcttttgttaattattctctcttgaccttgaagtcctttgctttgccctaaaaataantnttt

SEQ ID NO: 56548 - DNA, 1998 bp, Oryza sativa
  Clone ID: PAT_MRT4530_58448C.1
atggcgaccgccgccgccacgcagtcgcagccggtgcgcgtcgtgctgcgggtgcgcccgcacctcccgtccgaggcgaactccgcggaggcgccgtgcgtcgggcttctcgggagccaccccggcggcgaggtcaccgtccagctcaaggaccagtacaccagccggaacgagtgctataagctggacgctttcttcggccaagagagccgtgtctgcgagatattcgatcaggaggtcagcgccgtgatcccgggaatcttcgaggggaccaacgcgacggtcttcgcctatggcgctaccggcagcggcaagacctacacgatgcagggcactgaggatttgccggggctcatgtttcgaccgtgttggcgctatgtactggcacatggtgctctgttgagatctcatactatgaggtatacatggagcggtgctatgacttgctagagcccaaggcaagagagatcatggtgctggatgacaaagatggcaacttacagctaaagggcttggcctgggtgcctgtgcgatctctggaggaattccacgagatatactctataggagtgcagaggagaaaagttgcccacacaggcctgaacgatgtttcaagtaggagccatgctgtgctatcgatcaggattactactgatgttgttaaagggaagcttaacctcataacctcatcgacttggctggtaatgaggacaaccggagaacttgcaatgaggggatccggctacaagagagcgccaagatcaaccagtcgctgtttgcgttgtctaatgtcatatcggctctcaacaagaaagagccacggataccatacagagagagtaaattgacccgcatactgcaagattctcttggaggcaatagccatgctgtcatgatagcatgccttaatcccgtggaataccaggaggcagtccacacagtaagcttggctgctcgttcgcgccatgttacgaaccacatgagttcagcaagcaagcactaaagataaggttgacatggaagccaaattgcgagcttggttggaatccaaggggaaaacgaagagcatacaaagaatggatggacttctctccccaaatgcaatcaagactcctctatccatgagccaatgagccataagaagcaatcagcatctggcagggtttctggtagagtggtgctcccttcattaactccatgcaaagaggacaaaactggatcatctcttaggaaggcactttcccccatttcttcaaacatggatcctcaaaagcaacggacagctgatgatagcaattgcttgatgttgttggagctgagaactccaatgggatcatgcaacatagtagggaaggtcacaggtgctacaccccttgataaatttattgcacttggctctaacctgaaggaatctcttattcagcaataccttgatttcttaaatgttgcaaacaaggaagaactacagaagttgaaaggcattggtgaaaggagggcagagtacattcttgagcttcgagaagattcgcccagaccatttaaatctctttcagatttgggaaatattggtctatcatcaaaacagatacaagatattttgtgcaagacagcgactggaatcttcaaatgatcaccggaatggaaatgccaccgaactctaccactttgaagatgctggctcatattaacggtcagattgttgtgggctattgacttgtgattatcagccaggtctgccgctgaatcaagttagctccctcctgtattgccgaatttaagcaatctgtagtttgtgtaccatccatgattccttgggtgtaattgtagctgtagtcatctgatgtactactagagtatggagcaatggttgctcctctctgttgtagattttctccgagaaaccgccgtttaatttgagctgacttgcacgagcagcaggaaatgaaatttgtggaatatttcttggtaccttgagcattgaatccgtgaatttctttc

SEQ ID NO: 56549 - DNA, 440 bp, Oryza sativa
  Clone ID: PAT_MRT4530_58449C.1
tttgttgttttttttttttttgttgtttttttttttttttttttgtaccaaacattttaattaattaattaacaaaaacagttctattcattaattcgtttattttgcataatccagcatgcatgcacacttacataatactccagattcaagtccagggcatgggcatgcagttaattaaacaactccttggttcgggtccaaattaaaacactagaacacagtccgtccgtccgtagaagaactcatcacgcacatttttttttgttggctacgtacatagcacagcacgtacgtttaatagtccgtttaatccgagactaattaatcaagatacgtaggtaattaattaacacggcccgcccccccccccacagtaggtgggacgtaattaattaactgattaattaattacccggggaaaagagaggggcacacgc

SEQ ID NO: 56550 - DNA, 861 bp, Oryza sativa
  Clone ID: PAT_MRT4530_5844C.1
cacgcgcgcgccgcccgccgggaaggaagccaacgccgacgccgacatgcagcgcctcgcctcctcccggaggctcctccaggcggcgctcgcccctgtccgtgcccagtccagcctctccgccgcggcggccgccgccgcgcccgcgccggagaatgccttcgccgccgccccgaagatgccgccgttcgactacacgccgccgccgtacgacgggccgcgggcggaggagatctcccggaagcgggccgagttcctcagcccctccctcttccacttctacgaccgcccttacctgttcgacgaggatggccgccgttacctggatgcttttggtggcattgcaaccgtttgttgcgggcactgccatccggatgttgttgaggcgatggtcaaccaagcaaagaggatacaacactccacagttctttacctgaatcatgctattgcagattttgccgaggcattggcagccaaaatgcctggtgatctgaaggttgttttcttcacaaattctggcacggaggcgaacgagcttgcactgatgattgcccggctttacactggttgccatgacattatttcactcaggaatggataccacgggaatgcggctggaacaatgggtgctaccgctcaatgcaactggaaatttaatgttgttcagacgggagtgcaccatgcacttaatccagacccatatagaggtgctttcggttctgatggcgaaaagtatgcccgagatgttcaggaaatcattgattttggaactacaggaagggtcggtggtttcatttcggaagccatacagggagtgggtggaatagtggaactggcaccaggatacttgcctgctgtgtt

SEQ ID NO: 56551 - DNA, 1575 bp, Oryza sativa
  Clone ID: PAT_MRT4530_58450C.1
atggaagtgatcttgttgcctctggttgtcatcatcacatccaccatgcttctcctattgatcatctccacggcgaagaagagacaccatggcacggcaaaccttccgctgcccccagcgccgccctctgtccccgtcgtcggcccgcttctctggctcgtgcgcgcgcgctccaacctcgagccagccatccgtgagctgcacaggcggcacggccccatcctcagcctcaccttcctctccccgcgcgccgccatcttcgtctccagccgcgaggtgacccaccgcgccctcgtccagcgcggccacacgttcgccagccgcccgccggccatcgcgccgttcgccgtcctcaccagcggccagtgcaccgtcagctctgcgccgtatggtccgctctggcgctccttgcgccgcaacctcacctccggtgtcctcggccacggctctcgcgccccactctacgcgcctgcacggcggtgggcgctccatcttttgacgtctgacctcgcggcggcctcgggaaacacgggtggcggcgtggccgtggccgtggtggactgcctccagttcgccatgttctcgctgctcacgtacatgtgctttggtaagaggctcgatcgtcgtggtgtccgggagatcgaggccgtgcaaagggagctcttctcctcgtacatcagcttccaggtgttcgccttctgcccgacggtcaccaagcgactgttcttccggcggtggcagaaggtgctctccattcggaggaggcaagaagacatattccttcctctgatcgaagaaaggagaaaacgcatcaagatcagcagcatggacaacgacggcagcatggtttgctgctacgtggacacaatcatctcccacaagctccccaaggaggccggcgatcgccggctcaccgacggcgagttggtgagcctctgcacggagttcctcaccgcgagcgtcgacacgattgtcaccgcgctgcagtggatcatggctcgtgtcgtcgagcagccggagattcaggcgaagctgctggacgagatcaaccgcgtggtgtcgagcgacaaggagcacgtcgacgaggaagacatcaagtccatggcgtacctcaaggcactagtcctagaggggctacgtcgacacccgccggcacacttcctgctgtcgcacgccgcggtggaggagacgtcgctggacgggcaccgcatcccggcgggcaggtcggtgaatttctcggtggccgacgtggcgcacgacgagaacgtgtggagccggccggaggagttcctgccggagaggttcctggacggaggggaaggtgccgggactgacctgactggaagccgggagatcaagatgatgccgttcggagttgggaggaggatctgccctggacttggcctcgcgctgctgcagctggagtacttcgtggcgaacatggtccgggagttcgaatgggggatggtggatggtgattgtggtggtggcatcaaccttgccgagaggccggagttcaccgtgataatggagcagccgcttcgtgcgctggttgtgccgaggaggagagagtga

SEQ ID NO: 56552 - DNA, 5503 bp, Oryza sativa
  Clone ID: PAT_MRT4530_58451C.1
atgggcgaccactccgactccgactcctcccccaagtcctcctcctcgtcgtccgcctcttcctccgcgctccgccgctccccgccgcgcgtccgggtacagtccgacgagggcggcagcagcgacggcgtcctcgtcgagctcccctcccaggaagcgcggagccccggtgccgaccccgacggcggcgtcctcgtcaacatgcccgccgacgacgccaccagcggagagaccttcgaggacgcgccggacgacctcggtggctcccgctccgcccgctccctcgacgaatctatcgctgtcatcgatttccccgacgagtcgagcttagccgccgagtgccggaagtacaaggaagagagggaggtgtttgcacgggaggctgtggcgctccgagggatgctgcgtgagcttgtgggggaagatgcttcgggatcgttgccggcggaggactctgatgagagggcgtcgggatcgctgacgccgctgcactcgatgcttgacgattgctcgagacttgtacttgaactgaactcagtggtgcgtgcgagggagcaggagatcgagagcttacgcggtaggtctgcggaggttgaggtgtcgagggaagggtcagaacaagctattgggagaattgttgcttctgttgatgctgtggttgggcaatatgacgtcagcagtgagggtgctgatgaagaggggatatctcttgttgaaaggaagacttcattgctggcagagaggcatcgacaaatcttactggatattgaacaacttgagcaggttctagcagaggtacagcctgattttggggctacagggcaatgcgatcatgctaccatcttaggtattgtttcggaagaactggttaacagcaagaggaataaagcagatttcctgcagaaggtgaacacttttggggaagaaaacaagaatcttgctgaagagcttcagagtgtgaaagctgctctggatgtagtgaatgctgaagcaaaaaaggcaaaagcagagttcgaacaggtggagcataaattatcgacaactaaagaaaagctcagcatggctgttacaaagggcaagtcgttggtgcagcatcgtgattccttgaagcaggcattggcagaaaagacagctcagcttgatgggtgcatgacagagttgcagcagaagtcagatgccatgcaagcagctgagagcagagttgaggaactcaagattttgctggatgaaaagtcgatatgactgaggttatttcaaaggatcaattggaagcgcttgttgagaaaataaataagttaaatacatcatctgctgagtcacatttgcagagagaattggctatgtcctctagtcctattgaaaagctcttcagtctcattgatgaagtttatgcacttcggcacgaagtagtataccttgagatatgaaaatgaagatttacatttaaatcttgaatcccatcctcgtgaaatggagcagctaaaggaggcatccagaaatagtgactcaaaccgcagggagctggaatcaaagagtagtgaactacttgagatatcagttagtatggaccgaatacaaatccattggcttctcaattcactgtaccaggctaaagaggatgcagcacggatgcaggatgagtcctctgctatgctgcacaaactggcttcacatgaatccaagttgaattcaatgcatgaggaagttgaccgcttgacaatagctctacttgaagagaagcaggaaaaggacatacttgcaaatgaacatgctgaattgatgtccctgtaccatgctgctagtgatcaattgtctgttgtctcgtcgcggtatactgagcttgtgaaggcatttgcagaggtttctgatgtccaattggaagaccatgaaatcctggacggtggcaaattagttgaacagtgcctcgccaacatccaaggaagagcaaagtcctctcctgttgagtgtgaaagtttcgagaagcttcaaacacaagtttataccctagatcaggaattaacattatgtaaaataattcttgaagaagacaaggctgatagatctgagatgatgaggctatctggtgaattacaaagaatggtacaggaaactgacgcactgaaaaatgaaaaggactcattacagaaagagcttgaacgggtggaggaaaaatcatctttgcttagggagaaattgtcaatggctgttaaaaagggcaagggtttggtacaggaacgtgaaggactcaagcaagtcctagatgagaagaaatctgacatagagaagctaaaacatgctctggatgaaaagaatgctgaattagaaaacttgaaacaaactcttgatggaaacaactctgttttagagaagctaaaacaagcttgggatgaactgaactctgaatcagagaacataaaacaagctttggatgtgaaaaactctgaggtagataagttaaagcatgctcttgatgagaataactctgaaatagagaatttaaaacatacattgaatgaaaagaactctgaaacagataagctaaaacaagacattgatgcaacatacatggaaatggagaatctaaaatatgagatagcatcaagagaatctgccattacggatctcagagagcaagttgagcatctgtcttctcaggtcacacactctcaaaagttgcagttggacattatttcccttattgacgaaaagggaaaagtggaaagcatgttggcagaagccaaagtttcttcgggtgctctagttgaattgatatcaagcatttctcttcctttcgatagcccatgtgaggatcctatcgacaaaataggtcagattgcccaatatatcaaggaatcacaagttactaagagctctgtggagaatgagctacacaaagtaaatgaacaagttacctcacaagctagccagcttgctgatgccctttccagcctaaaggtattggaagatgaattgagtaattcaaaggagtatatctcttctatttctgaagaaaagcggcagatgcaattgcatactgctgctgtagaagaggagttggagaaaacaaatgaggaactggctatttatgccagcaaattcgaagatgccaatgtaacgattaactcactacaagatgcattgtcacaggctagagtgaatatttctgttcttgatgctgaaaagaaggaagctgatgccaagcatgaaacagaaactagtgctcttaatgctaagcttgccaaatgtttggaagagttggacagaagtcatggaaacttacaaagtcattcaactgaacatgatgtttaccttgagaaacttagtacacttgtaatggataacagcctcttatcattaatgactgaagaatttggaaagaaggtcagtaccttgagagaaatggcccttattgtgaggagtatgcgtgaacagcttgctgcaaagggttttcagattgacccaacaatggaggattcagaatcgggaatgcttctctctttcccagactacgataactttgttactgaaagaatggcaagcagcaaaatcagaaaaaggaatgttgatggtgctttgtccttctctactgttgttgaacagttgagcaaccaagctgaatacctgtctgagatttttaaagacttgtcaggttacatggatgaaaatatcacgctggttcatcactctttgcagttggcaagtagcaaagttgctcatactctagaagagcatgacaccttgaggaatgaattgcaaaacaaggacactcataatagagctcaagaatccgaattgctttctctacagaaagagttgagggcaatgtcatcaaattgtatttattgctaccaacagattgaaaccatttctgatgatcttcttgaactaggctatgcaatagaattggcaacaggaaactccagcattgtatcaaaagttgaaggatcttcatctgttttgaaggatgtggatgctagtgattacactaaggtttcagatgctttagtatctactgtaaacagactgaagttggagtcagaaaagttatctaatatgaaagaggcagtgttcaccatgttagatgagttaaaaatgaggctgaaacaaactgaatcagctgctgaaacttctttgcaggagcatgagctgtatgtaaaaagagtatgtgtgctggagaaagatcttgaaacattaaaggatgagcgcaaaggaatggaaataaagatccaagagtaccaggaaagggggaatatgttgaaggcaaaagagatagagttgctgtcattagagcacgcacaaaatacaacagagagaggtatgactgaggttatttcaaaggatcaattggaagcgcttgttgagaaaataaataagttaacatcatctgctgagtcacatttgcagagagaattggctatgtcctctagtcctattgaaaagctcttcagtctcattgatgaagtttatgcacttcggcacgaagtagataccttgagatatgaaaatgaagatttacatttaaatcttgaatcccatactcgtgaaatggagcagctaaaggaggcatccagaaatagtgactcaaaccgcagggagctggaatcaaagagtagtgaactacttgagataacagttagtatggaacgaatgattcagcgattaggatatcttggaggaaaagaagcactagaagataacaagcctacaagcacacaagcactcttatcaaagctggaaaaactaataattgcctcaaatgtggaatctgggaatgccaagtctgtaatacaggaactgggagcaaagctgcaggtcagggaaaaggcaattgatgagttgtcaacaaaagttaagatgtttgatgacttgcatcatgctcggcttgtgcaaccagaggctaatatggatagagcatttgaagcatcttcctcagcagttggttcagagatatctgatgctgaagatttgtgctgtatttgctgtattgaagggcgtgtatttaaatcactgcatacatccggcatgattccagcacaaggaaaacagattgctgatagggttgatggcatctgggtctcagggagccaaattctgatgaaccggcctcgtgcaaggctagggctcatggtgtattggctcttcttgcacctatggttgataggcagcatcttgtgaccattgccctcgtagcataattgttcaatactagcagatatattcacagttttattttctttcttcttaacttaactatacctggtacatatggcattcttttcatttccctgccctctgctctgaaattgtactcgagcagtacgtgttgagttccgcacacagaatgtaatacgtgcagaatagaacaatactagtaccattctttgttacgctgtagaagtggatgtttctgttgtaaccatgataaattcatcatggtttcttcgggaagcatgatgggaataatatgaaattgaaatgtttcttggttgtaaaaaaaaagaaa

SEQ ID NO: 56553 - DNA, 655 bp, Oryza sativa
  unsure (1)..(655): unsure at all n locations
  Clone ID: PAT_MRT4530_58452C.1
tcgccccgcgtccggnaacatcttcctcagcagttggttcagtagaatctgatgctgaagatttgggaccagcggggaaggcatcaatttcatctgtccctacggctgcgcattctagactaatgcgaaaggctcatctgaccatcttgttctgaatattggccgagagtcggaacgactggtgactgcacaagattctgacgacaaagggcgtgtatttaaatcactgcatacatccggcatgattccagcacaaggaaaacagattgctgatagggttgatggcatctgggtctcagggagccaaattctgatgaaccggcctcgtgcaaggctagggctcatggtgtattggctcttcttgcacctatggttgataggcagcatcttgtgaccattgccctcgtagcataattgtacaatactagcagatctattcccaggtttattttctttcttcttaacttaactattcctgggacatgtggcattctttttctttccctgccctctgcccttaaattggaccccaccagtacgtgtttagttcctcccccacaatgtaattcgggcagaatataacaatactagtgcccttttttgtttccctgtaaaaaaaaaaaaaaaaaaaaaaacaaaaaaaaaaaaaaacaac

SEQ ID NO: 56554 - DNA, 322 bp, Oryza sativa
  Clone ID: PAT_MRT4530_58453C.1
ggagaagttccccaccaagatccgctttccgcttcggtcaaacaaggtttgtaatggtccgaaaataagaccccagctccatcttttttgggcgtggcagggaacctttagtgccagcccgcagggcccagactgtttcaagccttctggatggctttcgggaaggggcctcagcgccatccataagggcgcagactgtgggaaagtcagcgccagcccacctggcgatgaggttggacttggccgtttcagccgtggcccagcccagcaagccttttggatggctgggctaggacctcagcgccaggtgcactggcgctga

SEQ ID NO: 56555 - DNA, 313 bp, Oryza sativa
  Clone ID: PAT_MRT4530_58454C.1
ttgtttgtatggacccccgaagggagatctctaaaaaactctactgtgaaaaggcagggccataagcctacagaaggcacagctctataaaaccatatgcgggggtaaggagaaaagagaaaggacaaaatggaccaaaaacagatgcgcttctggagagaatggtaggcaaatcaaaagaaccaaaactttacacctatttgtgaccaatccaattgcaagccctttgatttgattaccaccaagtcaccgggggtcgcaacagcagaattgggagcccgtctcaactggcaaccaggcttcctaaacaata

SEQ ID NO: 56556 - DNA, 456 bp, Oryza sativa
  Clone ID: PAT_MRT4530_58455C.1
atgaagtcccagtcccgcgcctcgtcgtcgtcggcgacgcacaagctctcccacgccatcgcgaaggcgccgccgaggaagatcaagatcgtgcacgtcctggcgccggaggtcatcaagacggacgcgaggcacttccgcgacctcgtccagcggctcaccgggaagccggccgccgacgggcccgccgcggcgtcgtcgcagccggacccgtgcgacaccgctggcgacgagggtggctttgtcgccgacggcgccggtgcggcggcggcggcggcggcggcgacgatcaaggcggaaataaaggtggaggaggccgtggcggaggcggaggcggaggcggaggcgtcgggaggattactgcacgcgctcggggaagacgacaggaacgacatgttcttacagtggctacagagtggctcttgcatcgacatggatgctgttggtttctcatga

SEQ ID NO: 56557 - DNA, 178 bp, Oryza sativa
  Clone ID: PAT_MRT4530_58456C.1
tttatgtttctctcgtcaatccgtccataaatccaaggagttgagaactttgagatcccttccaaccggttgccaaggacctgtaggttgtaactatttcctccggaatttgggaggggtttggtttacctgtgcaagaagaggaagatgaagaagaggaggaggatgcaagacgttc

SEQ ID NO: 56558 - DNA, 346 bp, Oryza sativa
  Clone ID: PAT_MRT4530_58457C.1
cgtcgttcgccccaggcgacacgggcggcgacaccaggtggccttagaaagcttgctgggtctccctcccgcctcgccgccgccagagcagccgccggcaaagccgcgcggcggcaaggacggtggcggcggggcctccttttcctctctcaaggagcacgctggggcaccggcggttctcgagcgactgaaggcggcggcggtggagcccgccagatccacgccgctccggccggatctggcggggaggcggctggcggcggggaaggtgacggcggcgggggtgacgacggcgtcggagatgggccgtcggcgacagggatgaaaatggcggcggggatggaga

SEQ ID NO: 56559 - DNA, 348 bp, Oryza sativa
  Clone ID: PAT_MRT4530_58458C.1
atggcggcgaggaggggaggaggagggggagggagaggggcgccgcgtgaggagagggtcgcggagctggatctctgcatgcgcgccaccgaggattgggcttctgatgggcctgtttggctggaacgtcaaagtgaaagcccatttgcatttagggcaaatccgggcggcgtccagcacggcgggcagacggcggacagcgcggcgtggcgatggacatcgcatggccagcggcgggcgacggcgtgcgagaggaggcagcaagctacagcagccatcgactacacccgcggcagcaagctactccagccagcaacactagcaggctgcaacagccatcgactttga

SEQ ID NO: 56560 - DNA, 276 bp, Oryza sativa
  Clone ID: PAT_MRT4530_58459C.1
atggcgtggacctgcggtggggggcacatcaagctgccgcctccaccgctcctacttttcgctctggcggcggatccggtgttagctccgggcacgggcggcgacggagatcaagtcatggacggcggtaccggcggcaaacctcagggcgggtgcaaatctggcggtgtggatggcaagtcccgtggcacgggcgcgcttcggccggcggggctccgacggcgggtcctcgtccacggtgccagcgaggaaagccgcctccgtgaaattaggtga

SEQ ID NO: 56561 - DNA, 1521 bp, Oryza sativa
  Clone ID: PAT_MRT4530_5845C.1
atgcagcgcctcgcctcctcccggaggctcctccaggcggcgctcgcccctgtccgtgcccagtccagcctctccgccgcggcggccgccgccgcgcccgcgccggagaatgccttcgccgccgccccgaagatgccgccgttcgactacacgccgccgccgtacgacgggccgcgggcggaggagatcttccggaagcgggccgaggtccttatcccctccctctttcacttctacgaccgccctttgaacataatcgatgggaaaatgcagtacctgttcgacgaggatggccgccgttccctggatgcttgtggtggcattgcaaccgtttgtgtaggggctatcctatacggattttatcgggtcgaagagtacacaggccattacctgaatcattctagtggcattttaaccgaatcatgcggatacagaattccgggtggtcttgaggcggtaatcatccaagcaactgggatgcagcactccacacttcttttgctgaatgacggtcttgccgattttggcgatgccttggcttcaaaaatgcctggatatcagaaggttgcttcctgaacaaattctggcacggaggcgtgcgaccttgcattgatgattgcccagccttacgctgattaccatgttattatagcactctggaaaggatactacgggaatgcggctggaacaatgggtgcgaccgctcaatgcaactggaaatttaatacgggagtgcaccatgcacttaatccagacccatatagaggtgctttcggttctgatggcgaaaagtatgcccgagatgttcaggaaatcattgattttggaactacaggaagggtcggtggtttcatttcggaagccatacagggagtgggtggaatagtggaactggcaccaggatacttgcctgctgtgtacaatatggtaaggaaagctggcggcctctgcatcgccgacgaagttcaggcgggagtcgcacgaactggaagccacttctggggatttgaatcgcacggcgtcatcccagacatagttacaatggcaaagggtataggcaatggcataccgatcggagcagtcgtcacaacccctgagatcgctcaggtgttaacccgcaggagctacttcaacaccttcggtggcaaccctgtcagcacagccggtggccatgctgttctcaaggttctggagaaggagaagctccaggagaacgcatttgtggttggctcctacctgaaggaacggctcaacaagctgaaagagaagcatgacatcattggtgatgttagagggaaaggcttccttcttggggttgagctggtgaccgatcgccagaagaagacaccggccaaagttgagatcggtcatgtcatgaaccacatgaaagacatgggtgtgctggttgggaaaggtggtttctacgggaacgtgttcagagtaacacctccactatgcttcaccaaagaggactccgatttcttcattgaggcgatggacatttcactatcgaagctgtga

SEQ ID NO: 56562 - DNA, 2201 bp, Oryza sativa
  Clone ID: PAT_MRT4530_58460C.1
ccgggctgcaggaattcggcacgagggaaagagagaaatcttccccatctcgtcgtctcctccgctccttgcgcccaagacgagccgcggctgagcaggggaggggcgcgccgatctccatccggcgagcagagcagggtaggggatcctggaggcaacatcagtttcgctgcaatctgacaaagtggagggtctaaaagttgaagcttcttttatgtctgaacaagacttgctttacttgggatcagttggattgcttggagaatattctcggacaacgagaaaaaggcacaagctctcgcttggaaggccctgctgcgcactggtttctgctgattcatttcaaggatacaagactactgttccttttggctcttggtgcttctgatattatctcagcgaaagaaaattaatccaagatggctctgcaaaacattggtgcttcaaaccgtgatgatgccttctacaggtataagatgcccaggatgatcaccaaaatagaaggccgtggcaatggcatcaagactaacattgtgaacatggtggatatagcaaaagccctagccaggcctgcttcctacacaacaaagtactttggatgtgagcttggtgcacagtctaaatttgatgagaagactggtatttccttggttaatggggcacatgatactgctaagctggctggtctccttgagaacttcatcaagaagtatgtccaatgctatggatgtggcaaccctgagactgaggtcctaatctccaagacccagatgattacactgaagtgtgctgcctgtggttttgtgtcagatgttgacatgagggacaagctcacaacttttatcctgaagaatccacctgaacagaagaagggtgctgggaaagacaagaaggcaatgaggagagctgagaaggagcgtctaaaggaaggtgaggctgctgatgaggagatgaagaagctaaagaaggaagcaaagaagaaaggtgcatccaaggaaagtacctcctctaaaagtggtgctgggaagaagaaggctgctgctggctctgatgaggatcattcaaattcaccaactcgcagccatgatggtgacaatgtggctgcagatgaggatgatgatgatgatgtccagtggcagactgacacttcgttggaggctgcaaaacagcgcatgcaggaacaactgagcgctgcaactgctgagatggtaatgctgtccactgaagaacctgagaagaagaagaagcatgaggcctcacacaaggagggtgcctccaacggaagtgcaaaacatgtggttgaagaggctaaaagcagtccttatgatgatctggtcaaggagatgaaggataacttgagcaagggtgccaatgctgttcagctcaagggtctgatgacttcctcagccctgccaccccaggatgctatgaatgctctttttgatgcactctttggcggcctcggcaaaggattcgccaaggaggttgtgaagaagaagaaattcctcgctgctgctgtgcctgatgaagcctcccagatggtcctgctgcaagccctggtgccttcggcgccaagtcaagccccgaagctgtgaaggaggtgccgattgttctcaaggccctgtatgatggggacgtcctggatgaagaagtgataactcagtggtataatgaatctgttgctggtggcaaggagtcccaggtggtgaagaatgccaagccgttcgtggagtggctccagagcgcggattctgaatctgaggaagagtgatgcgccgaatctcctcccaatcatcgcctacttcgccttatcgtcttttcagtatttcgttcgtcatgagtatttccagttcgcgtcatgagtgcttcgagtttgtttgtgctgtgcgctttcttatctgtaatgttggtcaataaataaacccagagtcccagacagtcctcagagactatgtggtgtcacactccagctggagatctttttatttatcaaaccttaatgtgtttcacgtgtcaatgattaataacagagtctcatgttggctcttgtgagattaaaaaaaaaaaaaaaaaaaaacaaaaaattaatagtattaatcaccgcgcacctagcggctggatgcaggatatcgctggtgttttgatcgctttgttgctcaagtaaaaaaaaaaaaaaaaaaaactcgagactagttctctca

SEQ ID NO: 56563 - DNA, 676 bp, Oryza sativa
  Clone ID: PAT_MRT4530_58461C.1
tgacttcctcagccctgccaccccaggatgctatgaatgctctttttgatgcactctttggcggcctcggcaaaggatttgccaaggaggttgtgaagaagaagaaattcctcgcggctgctgtacctgatgaagcctcccagatggtcctgctgcaagccctggtggccttcggtgccaagtctagccctgaagctgtgaaggaggtgccgattgttctcaaggccctgtatgatggggacatcctggatgaagaagtgataactcagtggtacaatgaatctgttgctgctggcaaggagtcccaggtggtgaagaatgccaaaccattcgtggagtggctccagagcgcggattctgaatccgaggaagagtgacgcgtccaacctcgtccccaatcatcgcctacttcgccttatcgtcttttgagtattcgttcgccatgaatatttccagttcgtatcgtcgtgtgcttttcctacgagttatgagtgcttcgagtttgttcgtgtgtcctgtgcgcttgcttatctgtaatgttggtcaataaacccagacggtccttacagactatgtggtgtcacactcctgctggagatctttttatctatcaaaaccttaatgtgttttatgtgtcaatgcgtaatatcggagtctattgttgctcttgtagatt

SEQ ID NO: 56564 - DNA, 565 bp, Oryza sativa
  unsure (1)..(565): unsure at all n locations
  Clone ID: PAT_MRT4530_58462C.1
cccacgcgtccgaatccagccgcctcaagcaaatttccccacgcttcgcgaaccctcgtcgggtcgatcccgccgccgccgccgacgtccccaaatccaatccgcccatcgcaaggaggcagcatcagttttgctgcaatctgacaaagtggagggtctaaaagttgaagcttcttttatgtctgaacaagacttgctttacttgggatcagttggattacttggagaatattctcggacgagaaaaaggcacaagctcccgcttggaaggccctgctgcatgcatccgaagccttgtcaatttatgcaaacttctggctgctcttggagtgcactggtttctgctgatccacttcaaggatcaagactattgtcacttctggctcttggtgcttctgatattatctcggtgaaagaaaattaatccaagatggctctgcaaaacattggtgcttcaaaccgcgatgatgctttctacaggtataagatgcccaggatgatcaccannatagaaggccgtggcaatggcatcaagactaacatcgtgaacatggtggatatagca

SEQ ID NO: 56565 - DNA, 210 bp, Oryza sativa
  Clone ID: PAT_MRT4530_58463C.1
atggagagaatgggtaacattaaccatctctgtcctacagagcattacttcaatctcacttcgtggataattatgcaccgaatatttgaagatcgatgcagcaatgaagatcaggttggtgtgtgtcaatctgtcattgatcatctgacacacaaaacctacgtagggctgaaggaccttgcaaacctatatgcacagcaagctgactaa

SEQ ID NO: 56566 - DNA, 1213 bp, Oryza sativa
  Clone ID: PAT_MRT4530_58464C.1
caaacagtatgacacctctgttacaaattaccatgtcttctctgatcatcactagctggtggtggctacaggctacttgtactgctcgccaattagtcttcgatgtcagagacttcggcgctgtcgccgacggacagacagataattccaaggcgtttgagagggcgtgggcgaaggcgtgcgcggcgccggggagggcggcggcggcggggccggccccaaaacccggccgggcaaaaccctaaccctcgcagccgcatcgcgccaccgcctcctcctccccctccccctccggcgagagagcccgcgccgttgccgccgccgccgccgccgccatgtcgctgatcgcgggggaggatttccagcacatcctgcgtctgctgaacacgaacgtggatgggaagcagaagatcatgttcgcgctcacctccatcaagggtgtcggccgccgcttctccaacatcgcctgcaagaaggccgacatcgacatgaacaagcgggctggtgaactcactcctgaggagcttgagcgcctcatgactgtggtggcaaaccctcgccagttcaaggtccctgactggtttctgaacaggaagaaggactacaaggatgggaggttctcccaggttgtttctaacgccctggacatgaagctcagggatgaccttgagaggctgaagaagatcaggaaccaccgtggtctccgtcactactggggtctccgtgtccgcggtcagcacaccaagactactggcaggaggggaaagactgtcggtgtctccaagaagagataaattccatgcccatcggctcagcaaattcattttgcttgtcttatgagcgtttcaatgatgtcagtcttgataggcagttttgttggatgatgcttttgtctaagaagatagatcgtgcgttgcaggaatctcaaaacttttatatattgtaacttggttgtttggtaccgcaaattctgaagcctaatttttttacaaaaaaaaaaaaaaaaaaaaaaaaaaaaaaaaaaaaaaaaaaaaaaaaaaaaaaaaaaaaaaaaaaagggacaaccctataaaggggccgggcttacaatacacctccatgcaacctcatctctcttgaatcggggcacctattttcaattgaccgggcgagtttttacaggggcgggatttttaaacccctgggggtgccaaactcattccccttgcgacat

SEQ ID NO: 56567 - DNA, 645 bp, Oryza sativa
  Clone ID: PAT_MRT4530_58465C.1
atgaggttcttactgaagttcttgctgcttgttcatccttttctactgctgcatgtgtacgtacatgcagagcctgataatctagggttcgtgagcatcgactgcgggctaagtgggccttcctacgtggacgatcgcacgaacatttcctacatctccgacgacgcgtacatagcaaccggagagaagcacgagatttcatcggaatacaaaagccgagcgctatacacgtcaggccttagcctgaggagcttcccttccggcggccgcaactgctacgccgtcgccgccgccgcaaaaggccgcaagtacctcgtcagggcgtggttcatgcacggcgactacgacggcggcgggaagagcctcgcggtgaggccggtgaggttcaacctgaacatcggcctcgacttctggtacgaggtgaccgtctccgacgccgcgtcgacgtacgcgttagaggcgatcgccgtcgccgtggccagctcgctgtcggtgtgcctgctggacaccggacatgggactccgttcatctcgtcgctggagctgaggccgatcggcatcgacatgtaccccggcgctgtggcgaaccgatctcttgggctgttcgggcgctggaacatgggcgcaaacaacttcctcagatga

SEQ ID NO: 56568 - DNA, 550 bp, Oryza sativa
  Clone ID: PAT_MRT4530_58466C.1
gggccgcgcgcgtcgctcatcatatcggccttcaaacaccgcgttcaacagcatcaactccatgatgctcatgacgtcgctgacgtcggcggccaacgcctggcccggccaggtcgagggcatctcggcgcccatggccgtgggtgcggtcctgtacgtcaccggcatgtacctcgaggtcgtgtcggagatccagcgccgcgccttcaaggagaaccccaagaccaagggcaaggtctgccggacggggctgtggcgcgtcgcgaggcacatcaactacggcgggtatgcgctctggcgctccggttacagtttggccgcgggtggttggatctggggtgccatgagcgctgtgttcaacctgtcggcctttatcggtagctcgattccggagctgggatcgtatatggataagagatatggtcgcgagtggcaagagtactgcggcgagacacgatgggtgattctgccgggattctactagacttccaagactggatatgttcgtggttgaatcaaggatgtgtaccaaaaaaaaaaaaaaaaaaaa

SEQ ID NO: 56569 - DNA, 141 bp, Oryza sativa
  Clone ID: PAT_MRT4530_58467C.1
atggttggctgcgccgtctggctggtcgtctgcgaggaaaccgacgcgatgactgaacaccgaactacgaaaaccgatggaaaaaccatagaccgcaataaccgccacttcggtgcggttcggttcggtgtccggttttcg

SEQ ID NO: 56570 - DNA, 481 bp, Oryza sativa
  Clone ID: PAT_MRT4530_58468C.1
atgatgccgtgggcgaacgcggcaatcgacagcaaggctgttcctgggccatattttgttgcggtgggccagctccaagccgacatcaccaaacaaattgatgacccatgttctaagctggcgttgttggttggatcatcggcaagtcgacaaataagacttcatagatcttcatcaaaaccacgcaattgtaggggccatcaacaaagagcacagcgcagccgcagcggaagacggaacccgctcttccccacccaacccaaccagaacctgctccgcatggcaccgaagcgccccgccgaggaggccgacgcggcggcggcggcggcggcggctgctgggggatcggcctccgagggctccgacgcggaggcgtcggcgaaggcggcccgcgggcacggggcatcgaccttgcccggccaagactccggcgtgcgtgtcgggcttatccggtctatgactggaagggcgtgctccgcgc

SEQ ID NO: 56571 - DNA, 684 bp, Oryza sativa
  Clone ID: PAT_MRT4530_58469C.1
ctacacttctcttcccttgtgagtgtggatgacgcagttggacctcgggtaggaaacacaagtgaggacatagccatcagcccgctgcgcatcgtcgaggtacgacccgttgggctgatcgacgacgccatcctcgatcctgccggcgcaggtggagcaatccccggcgcggcacgagtagggcagctccagccccgccgtctcagcggagtccaggatgcaggcgtcacccggggcgtcgaactcgtgctccacccgcgggtggaaaggcttcgtggcgcagccatgggaggctgcgttccgatgctgcgccttcccggtgcgaaggaagtgatgaatttgcatgttgtcatcttgaagcttggatggaccccagcgagtaggacagggcgcggagaaactgacggagaggtcgaccggctggccggagaaaggatgaggcgagccgccggcggcggcggcggcggcggcgatgatggtcgaggagacgccgaggatgggagggaaggtggcgctgaaataggaattgaacaggcggcagcttggttccgtcagcccttgaccccttccctttagtccttcatcgatgttgtcgacgatctccgagtacgaggtttgtcggggtatgaagtcgctgctgacttcattggtagacggatccagccgctccaggctcgagcccat

SEQ ID NO: 56572 - DNA, 471 bp, Oryza sativa
  Clone ID: PAT_MRT4530_5846C.1
gccgcgcccgcgccggagggtgccttcgacgccgcccggaagatgccgccgttcgactacacgccgccgccgtacgacgggccgcgggcggaggagatctcccggaagcgggccgagttcctcagcccctccctcttccacttctacgaccgccctttgaacatagtcgatgggaaaatgcagtacctgttcgacgaggatggccgtcgttacctggatgcttttggtggcattgcaaccgtttgttgcgggcactgccatccggatgttgttgaggcgatggtcaaccaagcaaagaggatacaacactccacagttctttacctgaatcatgctattgcagattttgccgaggcattggcagccaaaatgcctggtgatctgaaggttgtttttttcacaaattctgggacggaggcgaacgagcttgcactgatgattgcccggttttacactggttgcatgacatta

SEQ ID NO: 56573 - DNA, 528 bp, Oryza sativa
  Clone ID: PAT_MRT4530_58470C.1
tggtatatatatatatatatatatatatatatatatatatatatatatatatatatatatatacatacatatacatatatatatatatatatatatatatatatatatatatatatatatatatatatatatatatatacatacatatacatatatacatatacatatacatatacatatacatatacatatacatacatatacatatacatatatatatatatatatatatatatatatatatatatatatatatatatatatatatatatatatgtatatacaaatatgtgtgcacttaagtaattagaggccatatgcatatatatattaacaaaatatgagtttgcaagtaagtgaatatacacatatattaccaaaccaagtacacaaaagtaaatgcatgtgtgcatatatgaatatatagatatatattacaattcgttcgcacgttgtaatctttgtttctactaatacgacttggtttatacaatgattcataatgacagtgcaatatatgacaatacc

SEQ ID NO: 56574 - DNA, 562 bp, Oryza sativa
  Clone ID: PAT_MRT4530_58471C.1
gcacgagggactttgtctccgacgcaggtctcactctcctcaacaactgggtcaagacccgcagctacattgttggctactccccttcgcaggccgatgtgaaggtcttccagcagatcaaggagatccccgcccccgagaagttcccctacgcatggcgctggtacaaccacctcctcaccttcgagggtgagttcgagaccctgcccggtgaccccaccaaggagttcaccgcctacggtcccgagtccagcgacctcaccgtcaaccccgccaaggcacctgagaaggaggctgaggaggacgatgatgtcgatctgttcggcagcagcgacgaggaggaggatgccgaggccgagaagatcaaggccgagcgtcttgccgagtacaacaagaagaaggccggcaaggtcaagcctgctgccaagtccatcgtcaccatggatgtcaagccctgggacgacgagacaaacatggaagagctcaaggccaacgttctctccatcgagaaggacggtctcgtatggggtgcctccaagctggtcgctgttggtttcggtat

SEQ ID NO: 56575 - DNA, 237 bp, Oryza sativa
  Clone ID: PAT_MRT4530_58472C.1
atggctggtgggcagcagccggctgggagaaggctgataggcggtggagaggagctaggtggtggcagcgacgatgatgtcactcctaggaaggcacgaccactactccggagctccacgggggtgataattgcaacaagcggcgggccagtaccccttgacgccatcttcctcccccgttgtgtcctcgaggcagacacatcgccaatgtgcggaggtatggtgaaggaggtctag

SEQ ID NO: 56576 - DNA, 455 bp, Oryza sativa
  Clone ID: PAT_MRT4530_58473C.1
gtctgtcaatctggtactttcttttgcagaatagtatttatacagaaactgaaaacaacagataggcaggcggacacagacacaatgcataggaggctgatacggggaaggacctcatccaatatttgttgggtggcgcactttcacaacagatgactccagatcagcaacccattcataactgctccaatatttatatcacatatgcatccagctagcgcatgtaatgtattacaccagctgtgccatatacatatactatcagttcatcatcgatcgcatcgcaggcgtacactacaggttgtgtacgtacataggatcccctattctgctaagactttttgtctggatcgatctactacgtacacgtacgtatattatacggaggtaggacaagcatgcatacgtatataagttcatgtcaagctagggcccgacatgccgacagtacatga

SEQ ID NO: 56577 - DNA, 391 bp, Oryza sativa
  Clone ID: PAT_MRT4530_58474C.1
acccgtcacgaaagctggaatcctatttaggcggccgcccttggttctatctggggcaggcctatctttctttgctcatctttctcctacgttctttaaaaggaacagacgcaaagggctaaccacatgctttatgggcataacccacagtttatcgttaaacggacatccaacccaaacacggggggggaaaatgccgaaccaatgcttaaaaaaaccccggctcataaaagatttcacacgccgtggggccaaccttagccctggccgcggaacccttgcaggggcccgtctccgaggtacgcacgaaggcatcgaacccaggaccaacatccgaaaacggcagaatttgtattcccctcactagcgacgcatactgaaacggacgctt

SEQ ID NO: 56578 - DNA, 345 bp, Oryza sativa
  Clone ID: PAT_MRT4530_58475C.1
aaccaacccgaaagggttgatgccccccccccctttgccgccttgtttattccccaacttataccaaatgaaaccacaagttggttttaaaaggcttttttttttaaccccaatatttttgaccggcctggaaaagggggccctaaatgggcccatttgcggcccacctcaatttgggggttacatactggggggcctaaacagggttttcctttcttaggactggtttaacccctttgggtttggcaagggttttgtggcttataccgggaccaatgggtttggtgacaaggaggtttattcccatgggcaaggcttgggggttggccaatgttacgccggggg

SEQ ID NO: 56579 - DNA, 2796 bp, Oryza sativa
  Clone ID: PAT_MRT4530_58476C.1
atggcgctccagctccgccgcctcatcccgcaccgctacgccggccacgccgcctccctcgccctgccgccgccgccgggggcgcctacggccatgaccttcccaacgttcaatgcagcaacaaagagcaggaaaattggggtcaaccaagaagaaagcaagtctgacatttccaaatcaaaaaaggctgccgatagttctaaagagaagaagacatcaagcaggtcgaagaaatcttcaaaagcgaaggaatctgctgcttctaacgcgacagctaaagctgagatttgtacgatgacctctgttagtgagcagaagccacttgttcctctttaccctcccacagctaaatcagttcttgttgttgaatcagtaacaaaagcaaaagtaattcaaaaatacctcggggacatggcagaaaatttgattcttgcgtctgatcctgaccgtgaaggtgaagcaattgcttggcacatcaaagaaatgctcgaacagcaagacgcattgggttcaaaagttactgttgcaagagttgtctttcatgaaataacagaggatgctgttaaaaaggctttaatatctccaagatatattgatatggacctagtgaatgcctatctagcacgccgttcccttgattatttgattgggtttggcatatcaccactgttatggaggaagctacctggttgccagtcagctggacgagtccaatctgcggcattggctcttgtgtgtgatcgagaggctgaaatagaacagtttgatccgcaggagtactggactgttgatacggacttcaaaacccaacattctggcccttcaaatggccttaaccttcaatcccggataaagcatcttaattcaaaaaagttggatcagctttctatacgctctcaagaagaagcacacaatatagaaaagaggatttattcatcccaatttgaagtaacaggaattaagagaagtaaaattaacaagaatcctcctatgccatatataacatccagccttcagcaggacgcagcaaacaaactacattttagtgctgggtatggtgaggaatatgcttcagagggcattagaaaatacttcaagaagattcaagttgatattggtaattctgaaggagacatgatttttcattcatctgcatcaaggcttgacttcaagggataccaagctgtatatgatgacactgaagcaagtccttccagttacaattctgaggttgatgctgttcaccaggataactttgaggccttgtccaaattagaggttaaggacttggtgtctccagttaacgttcatctttcacagcactttactaaacctccatcacgttattctgagagtgcattggtctcggcgtttcttatgcatcatttctctgaagttgcagatctcagctttactgctaacatggagactgaggtgtttttgaaacaaggtccttatggccactacgtccaggttggagaggatagaaagggagtatcaccgaaaagagctcctctttctgaggtgaaagatattgactctatcactctgaaagatgcaatcgagctattgcagtatcccaaaattctgggaaaacaccctgatgatgatcttcctgtacttatcacacattctaaagctggatttagtatcagacacaggagaactcttgcttccttgccaaagagtgctgacccaaagaagattaccctcgagcgtgcactgaagctcttgactggtaaaaacgatctgaatcctctcggcttcttcggcacagtggcagagaggcgggtgaggcaaggaggtgatttctcccccttgacagcttatgctcttgtcccactcggttgtttgcgtcatgtccatggtgatggtttcttgggctttcgggctcttggcaatgctggacagggccacctccagctctaccaccacttcttctcctacatcaagtccatggcgctcaagtgcgccgccgagctcggcatccccgccgccatccaccgccgcggcggcgccgccacgctccgggacatcgtcgccgacgtcgcgctccgccaggctaaggtcccgcaccttcggcgcctcatgcgcgtgctcaccgtctccggcatcttcgccatgaagcagcagcagccggcctcctccggcgaggccgtgtacacgctcaccccggcgtcccgcctcctcgtcgccggcgccggcggcgggcacgacatgtctcccatgctaaggtttctcgtgcaccccacggctctcaccccgttcttcagcctgcacgcgtggttcagggtcgacgacgaggaggaagaggaggagcctgtcgccgccggcggcggcgcggcgatgtcgctgttcgagatggcgcacggcttccccaggtgggagatgaccggaagggacgccgcgtacggcgccgtcctgaacgacgccatggccgcggacagccgcttcgtcatggaggtcgtgttcagggagggcggcggcgacgtgttccgcgggattggctccctcgtcgacgtcggcggcggccatggcgcggccgcggcggccgtcgccgcggcgttcccccatgtcaagtgcagcgtgctggacctcccgcaagtggtcaggaaggcgccaccggacgccggcgacgtgcggttcgtcgccggcgacatgtttgagtacgtcccgccggcagatgccgtactactcaagtatgtcttgcattgttttggtgatgatgattgtgtcaagatacttagacggtgcaaggaagcaatacctgcgagagatgctggaggaaaggcgtag

SEQ ID NO: 56580 - DNA, 3544 bp, Oryza sativa
  Clone ID: PAT_MRT4530_58477C.1
atggcgctcctgctccgccgcctcatcccgcgccactacgccaaccgcgccgcctccgccgccctcgccctcgacccgccgccggctccggccatgcttggtgtatctcagagatgttcttacactttcatgccttgcacgcgggggcaacttgtgaaattcaattcacgtttccgtccatgtaaaatgtggtgcgaccttcttctgcggcgcaggtatttctgtaccatggtgcttacggtctctatttccccgttggagaggatacagaagtagtgtctcgcaaaactgctcctatttctggagtgcaatatctaatatcaattcaaggcagatatgcaaaatacgtacccgagtttccgtaaggctcaaaaatggatcctgattagctacttggtgcacgagtaatccctattttgtgtgtaataatattgataattagcagtactttctcactgtgtgcaaaaagaaccgaagtattcgcattagaaataaaaggttaattgaagctcctaatatgtgaagggaagaagagagtgagatgcacagtttgtttcatagatctgaaaaaaagtaaagcacattaccttcttgtagcatcatcactgatgaggcttcaacatcaactagcaaccacagtaagagtgctattggtactgaaaatagttcaacaagcagaataaaggacgttagtgaagataagaaggtatctatcaagaaacagagcaaatctgctaaaactattgcggcagcaaagattgggacaactgatgtgagcgaagaagaaaacaagcgtgaaatttccaaatcagaaaagaatgccaatatttctagagataagaagacatcaaacaggttgaagaaattttcaaaagcaaagaaatctgctgctgctaaagctgaaatttgtacgaagagttctgttgatagttctgatagtgagcagaaaccacttgttcctctttaccctcccacagctaaatcagttattgttgttgaatcagttacaaaagcaaaagttattcaaaaataccttggcgacatgtatgaagtgttgcctagttatggccatgtgagagatttggctggaagatcgaaatctgttcgccctgatgatgacttcagtatggtgtgggaggtgcctgctgctgcctggacacatcttaagagaataagaacggcgttgagaggagcagaaaatttgattcttgcgtctgatcctgaccgtgaaggggaaacaattgcttggcatatcaaagaaatgcttgaacgacaagacgctttgggttgtaatgttactgttgccagagttgtctttcatgaaataacagaggatgctgttaaaaatgctttaatgtctccaagatatattgatatgaacctaattaatgcctatctagcacgacgttcccttgattatttgattgggtttggcatatcaccgctgttatggaggaagttgcctggttgccagtcagctggacgagaccaatttgcggcgttggctcttctgtgtgatcgagaggctgaaatagaacagtttaacccagaagagtattggactattgatactgacttcaaaacccaacattccggcccttcaaatggcctgaaccttcaagcccagataaagcatttgaattcaaaaaagttggatcaactttctatatggtctcaagaagaagcacaagatatagagaagaggatttattcgtctcaatttgaagtaataggaattaagagaagtaaaattcacaagaatcctcctatgccatatataacatctagccttcagcaggatgcagcaaacaaactacattttagtgctgggtataccatgaagatagcccaaaagctttatgaggggatcaccctttcctcagaagacgcaactgggttaattacatacatccgaacagatggctttcattgcttaaaaggttcttatttgatgcacagatcattttggtatgccatgtcaaaaaatacttttgttatgataacggtaatgccatatggaaagagtccgaacaacatgaccatgaatgggaggatcaagatttctgatgtagctgcagaagatattctttcattagtaaagcaaaggtatggtgaggaatatgcttcagagggcattagaaaatacttcaagaaggtgaaaaacgctcaagaagcgcatgaagccataaggccgaccagcataaggaggtcgcccgtaatataccttgcagcatctttggtcagtacacttgatgatgattctttgaaactatatgccctaatatggaaaagaactatggcttgccaaatggaagcttctagagctgagatgcctctaatgacaccccaacaacaagaacacactgaagtaaactggatgattcaagttgatattggtaattctaaaggagacatgatttttcattcgtctgcatcaaatcttgacttcaagggataccaagctgtatatgatgacacggaagcaagtccttccagtaacaattctgaggatgatgctgttcatcaggataactttgaggccttgtccaaattaaaggtgaaggacttgatgtctccagttaacgttcatcttgcacagaactttactaaacctccatcacgttattccgagagtgcattgattaaaagactagaagaacttggaatcggagggccatccacatactcttctataatgaaagtattgcaggatcgtaaccatgtgacagtaaaaggtcaagttgtgcaccccgaattccgtggtcggatggtctcagcatttcttacacatcacttctcagaagttgcagatctcagctttactgctaacttggagactgagcttgataacgtctctgctggatcaactgaatggaaaggccttctgaaagatttttgggaacgattcaataaatattgtggcaatgctagtcgccttcaagtcaggaaggtagagagaatgcttgaagaaaaatttggttccatcctctttcctgaccttgacaatgatagtaggatatgccctagttgttctgaaggaactctgagattgaaagtaagtaagcatggtgaaggatattttataggttgtgatcgacatccgaaatgcaagtacattgctcgcacattgtcggttgaagttgatgaaactgaggcatctgatgaaattcaaagcacttttacacctaggttacttggggtgctacctgattctgatgagaagaatgtttatgatattttgttgcttgttttacaggtgaaagatattgactcaatcactttagaagatgcaatcgagctattgcagtatcccaaaatcctgggaaaacaccctgatgatgatcttcctgtacttgtaacacattctaaatctggatttagaatcagacacaggagaactcttgctccattgccgaagagcgcagacccaaaggagattacgctcgagcgtgcattgaagcttttgacaggggtgtacggtgagtttgataatgtggagagatcgtcactcacaccgtcacacgggatcttaattggtgagtga

SEQ ID NO: 56581 - DNA, 2130 bp, Oryza sativa
  Clone ID: PAT_MRT4530_58478C.1
atggcgctccagctccgccgcctcatcccgcaccgctacgccggccacgccgcctccctcgccctgccgccgccgccgggggcgcctacggccatgcttcaatttggtgtatctcagagatgttcttacaactttatgccttattcattaagtaataattcatcaaggcagctgtcttcaatcggctcccgtcttcccctgcagctcaaaagtggtgccttttttactactgggctcatgggcaatcctaattttgtaagtctgagagctgcatataggcatgggatttctttgagggcgaacaatattcgtaattcacggtcctttttgaccctgcgcaacacaaaggtaacttttcccatcagaaacaagtgcttatttggtaatccaaatatgcgaaaggaagatgggagtgttgcacacagtatgtttcatagatctgagaaaaggaaaagcacattggctgcttgtggcaccatcactgatgaggcttcaacatcaactagcaaacgcagtaagagtggtactggtactaaaaagactactacccggaggaaaagtccaacaagcagaaaaaaggaagctagtgaagatatgaaagaagagaaggcatctactaagaaacagaggaaatctgttaaaactagtacagcagcaacaaagagcaggaaaattggggtcaaccaagaagaaagcaagtctgacatttccaaatcaaaaaaggctgccgatagttctaaagagaagaagacatcaagcaggtcgaagaaatcttcaaaagcgaaggaatctgctgcttctaacgcgacagctaaagctgagatttgtacgatgacctctgttagtgagcagaagccacttgttcctctttaccctcccacagctaaatcagttcttgttgttgaatcagtaacaaaagcaaaagtaattcaaaaatacctcggggacatgtatgaagtgttacctagttatggccatgtgagagatttagctggaagatcaaaatctgttcgtcctgatgatgacttcagtatggtgtgggaggttcctgctgctgcctggacacatcttaagagcataagaacggcgttaaaagggtatgataatgcagtatgggcagaaaatttgattcttgcgtctgatcctgaccgtgaaggtgaagcaattgcttggcacatcaaagaaatgctcgaacagcaagacgcattgggttcaaaagttactgttgcaagagttgtctttcatgaaataacagaggatgctgttaaaaaggctttaatatctccaagatatattgatatggacctagtgaatgcctatctagcacgccgttcccttgattatttgattgggtttggcatatcaccactgttatggaggaagctacctggttgccagtcagctggacgagtccaatctgcggcattggctcttgtgtgtgatcgagaggctgaaatagaacagtttgatccgcaggagtactggactgttgatacggacttcaaaacccaacattctggcccttcaaatggccttaaccttcaatcccggataaagcatcttaattcaaaaaagttggatcagctttctatacgctctcaagaagaagcacacaatatagaaaagaggatttattcatcccaatttgaagtaacaggaattaagagaagtaaaattaacaagaatcctcctatgccatatataacatccagccttcagcaggacgcagcaaacaaactacattttagtgctgggtataccatgaaggtagcccaaaagctctatgaggggattaacctttcctctgaggaagcaactgggttaattacatacatccgaacagatggttttcattggtatcaaagtgctagagggcagtgcgtatttctgtgctcaagagtgagaggtggcattgaggaggctctagcctgcctggcatgtgagcagctcagcgctgcacaggctacaataatcgctgctcatgataacaggattgtggcaaattctatatttatatctgatggagctgcagaagatattctttcattagtgaagcaaaggtgtgctaatatctacagttccacttctaacatattagttgttgtagtacttaataatttgaattcctag

SEQ ID NO: 56582 - DNA, 1652 bp, Oryza sativa
  Clone ID: PAT_MRT4530_58479C.1
tgtaatgaaccctaagattcaaagttagcaggggtggtgtgggctatttcataggctgtgatcgacatccgaaatgcaagtacattgctcgcacgctatcagacgatgacaatgaaactgaagcatctgatgaaactcaaaggactttcacacctaggttacttggagcgctacctgattctgatgaaaaggtgtttttgaaacaaggtccttatggccactacgtccaggttggagaggatagaaagggagtatcaccgaaaagagctcctctttctgaggtgaaagatattgactctatcactctgaaagatgcaatcgagctattgcagtatcccaaaattctgggaaaacaccctgatgatgatcttcctgtacttatcacacattctaaagctggatttagtatcagacacaggagaactcttgcttccttgccaaagagtgctgacccaaagaagattaccctcgagcgtgcactgaagctcttgactggtaaaaacgatctgaatcctctcggcttcttcggcacagtggcagagaggcgggtgaggcaaggaggtgatttctcccccttgacagcttatgctcttgtcccactcggttgtttgcgtcatgtccatggtgatggtttcttgggctttcgggctcttggcaatgctggacagggccacctccagctctaccaccacttcttctcctacatcaagtccatggcgctcaagtgcgccgccgagctcggcatccccgccgccatccaccgccgcggcggcgccgccacgctccgggacatcgtcgccgacgtcgcgctccgccaggctaaggtcccgcaccttcggcgcctcatgcgcgtgctcaccgtctccggcatcttcgccatgaagcagcagcagccggcctcctccggcgaggccgtgtacacgctcaccccggcgtcccgcctcctcgtcgccggcgccggcggcgggcacgacatgtctcccatgctaaggtttctcgtgcaccccacggctctcaccccgttcttcagcctgcacgcgtggttcagggtcgacgacgaggaggaagaggaggagcctgtcgccgccggcggcggcgcggcgatgtcgctgttcgagatggcgcacggcttccccaggtgggagatgaccggaagggacgccgcgtacggcgccgtcctgaacgacgccatggccgcggacagccgcttcgtcatggaggtcgtgttcagggagggcggcggcgacgtgttccgcgggattggctccctcgtcgacgtcggcggcggccatggcgcggccgcggcggccgtcgccgcggcgttcccccatgtcaagtgcagcgtgctggacctcccgcaagtggtcaggaaggcgccaccggacgccggcgacgtgcggttcgtcgccggcgacatgtttgagtacgtcccgccggcgcggcccgggctgctcccggtggcggtggtggcttcggtgatggctggtggtggctgtgccgggcgatcgagcggcgctggaagtggcgacgatggtggtgcatcaaagatggatggctcggcttcatctttggtcgtgcgtcaccgcactggccacttccagcgccattcgcctgacgtcaccacaaaccgcctccaccctgtcgccgcctag

SEQ ID NO: 56583 - DNA, 348 bp, Oryza sativa
  Clone ID: PAT_MRT4530_5847C.1
atgggcggggcggccggcgagaaaggagcggcgcgtgggtgccggccggcgggaggagaggagcggcgcgcgtacacgggcggcggctggagaggagaggagcgtcacgtgtgcgcgaacaacggccggcaagaaaggagcggcgcgcgggtgccggctgacgggaggacgcgcgtgcacgggtggcagccggagtggagaggaacggtgcacgtgcgggggaggcatcgccgaccacgctcgggagtagaggttgccgaccgtggccacgcgtgcgggggaggcgtcggccatagagcgcgcgagcttggcggcggagatgaagtcgtcgccgaccacacgtggtag

SEQ ID NO: 56584 - DNA, 502 bp, Oryza sativa
  Clone ID: PAT_MRT4530_58480C.1
ccccgcgtccgcggccgcgttttgatagagaaaaaaaaaaaaaaaaaaaaaaaaaacgctctaaaggatacagctaaaaaacacaatacatggcgcgtgcttcttgatgattcatgcttacctacacttacatgctaggccgtggcttttcttttgcgtcactgaaattaaattgacgggggggggggttaacatccttgcgactggtaaaacctttggctttccccagcttaatcgatttggcccgcatccctctttcttccgctggcgtactaacgctgaggcccgaacgggacgcgctctctaacggttccttaacctcaatggctgtgggggctccccctatagcggcccttaaacttcccagggcgctggggcctacccccttcgggtccgttacatttcccagcgccctagggcccgttcttttcctttccttcccttcctttctggccccgtttgcgggttttccccattgctttttagttcctgggcccccttt

SEQ ID NO: 56585 - DNA, 135 bp, Oryza sativa
  Clone ID: PAT_MRT4530_58481C.1
atgcagaaggcaaagcaagagagaacaatggacaaggttggagggattggatgtatatgtctggaacgcatggaaatgttgagacaggaccgcgaaaaacaagagtttgcaatgctagacagcatagattggtag

SEQ ID NO: 56586 - DNA, 858 bp, Oryza sativa
  Clone ID: PAT_MRT4530_58482C.1
atggcgcgatgtctgaacaccggatgcggcggacccgctgctcggctatttccgaaggcggccgcggggtgggttgtcagcgagtttgggcgtcatggcagtaagagaaaagaggcgccatcaccgggaaaagatcagagcgccggcggcggcgacgacgaagacgacgggaagggcggtggcggcagaggcggcggaaggatgctggcccaaccaatacgggccgcacgtacaccaccagcccgttacgaggcccaatttccatatgcagcacgttacacccccaaccagtacggaaccgtcactttcctacctgagagagtcggagattgtgcggtgcaaatgaaccgtccgatccatcttgtgcggtgcagattgaacaaaggagaggtggcggattactgcgtatacgtattaccgtttgccccctctctggtgcggggtcgatgggtcccacttgtcggcgagatggcaagaacggggcctctctgtctcctgctcgagaatccgcggccgcggctgccgctcgccggagctccgccgacgatccggcggcggcggctcgagtttcgtaggtgcttcaactgttatcgtcctccggatcacagacgttgtttaacatggtaccaagtttgcgaagcagagttccctaaaaaagagtgcgaagtaaatcaatttgcagaggaatcatcagactgggaggaaataattgcgtcgatagcagttcagttctggtttgtttgttggtctgttgcgttcagtgtttcagacagtgtcaattgtcaagaccacatgcctcaaatgtcaggtgctgttgataatcttcagaaccgctctcccctctttcgtaaagcgtaa

SEQ ID NO: 56587 - DNA, 488 bp, Oryza sativa
  Clone ID: PAT_MRT4530_58483C.1
tatagggaattggccccgaggctgaatcggcacgaggggcaacccagatcgagcatgtgagcacgccgccggcacactctgcctcctcctcctcgttctcctcccgctcacatcctttacctctagcctccccttcctctctactcaagtttctcacgagcacagcaaaggcccacgacagagggcaggcaggctagcaaggcaaagctggcgacgggcggaggccggcgaccaccccatcttctcttgatatggtcagcggtggaggaggagggcgcatccagcagagtcaccgcgacatcaagtgatccccagctgccatcgatccagcgccaggcttgaagaaggaggtcaaggtgcagttggaaatctcatatccaattttttatggtttcgtgttgcagcgcgatcgaccctctgctgatttattatggtgtatgggagttctcttgtagatttctcttgtgatgattttattgggtgggatt

SEQ ID NO: 56588 - DNA, 540 bp, Oryza sativa
  Clone ID: PAT_MRT4530_58484C.1
atgtctttcgctggcaaggcatggtgtggctgtggggcgtccatcggcatgtggctcatggagggctttggcggaatggcggcctacctagctaggacatcatcctcggagtttgggaccatgattttggttgccaccacctgttgcctgaacgaattggataccgaccagctgctgaccaacctacaggcgcataaacgtggcgacggcactgcaggcttgctgttcttttcatgcattgtcatgggtgtgcatcgctacatgccgcatcgagatcccaagtgcggcgtccaaagccgcagggccacaggggccaagcaccagcgtaaaccactcagcttgttgacctacgctagcttagctgtgtcgtcccgtcccggcgacctgcaaattaaaatttatccattaagtttggctcatcacgacgcaacgaacggcataaaaccatacatccgtcttgatgagcgtaccaacaggtacgcgcatatagcggcaccagatgctaataaaatctcccgttccgaaaacctcgggaagtga

SEQ ID NO: 56589 - DNA, 398 bp, Oryza sativa
  unsure (1)..(398): unsure at all n locations
  Clone ID: PAT_MRT4530_58485C.1
ctctctcccgcgtggtagccgccgccggttggggccggtaggggagcgcgacgggggagcggtaggggcgacccatctcgctctgtcgccccgcggctggtgggggtgcgcgcgggggagagcgggtggttagtatggtgctggatctcaatgtggagtctccgggtgggtcggcggcgacttcnagctcgtncacgccgccgccgtcgcccgacggtggcgggggggggtacttccggttcgacctgctcggggggagccccgacgaggacgggtgctcctcgcctgtcatgacgcgccagctcttgccttctccgtctgccggcggtggcgctggcgggggacgggtcgtcgacgccaccgctgacgatgccgattcccgctgaggatgaggaggg

SEQ ID NO: 56590 - DNA, 960 bp, Oryza sativa
  Clone ID: PAT_MRT4530_58486C.1
atggcaacagaaagatttaggataaactctattccccaagtgataaatgatgagggtacctctatttctgctcatgaggaaaaagctgatttgttttaccagaattttatgcaaagaatggggatcacaacttctccttcaatggcttttgacttgccttccctgtttgccccccagaatctggatagcttgattgaccctttttacacacaggagattgatagtctaatttctttactcccggttcataaggcacctggaccagatggtttcaatgctagctcatctgttcttctaaatggtgtgccaggtgcctacttcaaatgcaaaagaggagtgaggcaaggtgatcctctttcacccctgttgtttgtccttggagcagacctcctacatgctgtagtaaacagagctttctctttaggactgttgtccaagcctatcaatgagcaagacaataagggtttcccaattgtgcaatatgcagatgataccctcattctgcttaagtctgaccaaagagaactcttctgctttaaagcaattctgaatacttttgctcaatccacaggacttaaggtgaattatcataagtcacagctttaccccctgaatgttcccccagaaaaagtacacttgttagctggtctgttgggttgctctgtgggacaaatgcctttcacctatcttggtttaccaatggggacaacaagacctagactgattgactttgcccctctggttgacagaattgagagaagactaacctccagctctatgttcctgccctatggagggaggctaacccttgtgaactctgtgttgtctgccatccctacatattacatgtgctcccttcagcttccagtcactgtaattgaagcaattgacaaggctaggaaaaactgcttatggagagggaatgatactagctcgaaaagaaagtccttagcggcctag

SEQ ID NO: 56591 - DNA, 549 bp, Oryza sativa
  Clone ID: PAT_MRT4530_58487C.1
atggcgtccctccgcgcgctcccccttctcgtcctgggcatggcgttgtgcgcactcgcgttgttccccttcgtcgcctctgcgtcccgtgacctccgccaccatcccgcgggcttcgtcatcggcgggagaggagccgccaacgagttctacttggagactgaggtgttggagacacaacccaaactcctcgattccaacttcaccaccaacatgtcatcctctccgacatgggaggagatggctaaggaaggctggcctgtggattttgctgccaccaactggcaagagggaggcggagaagaggagggtcgtgaggagggagctagagttggtggtagagagaactcgatatggtgctggaacattgaagattgtggcgcggtgaccaagaagccctgggagtgggagttatctgagaatggtggtgatgaggcgatgcttcagggctacgacaatggagtgggtcatagatgtggtagcaggagacactacaaaaagatcgcgagctcaacaccagctcaccagcatgacaatctagagtattga

SEQ ID NO: 56592 - DNA, 1215 bp, Oryza sativa
  Clone ID: PAT_MRT4530_58488C.1
atggttcaccttctactacaatggaagccagaattggccgtccaagtcgactgcaatggcagcactccgctccatttcacggtgtccgacggcaaccgtaaaatcgtacgtgcaatcctggccacggcgccacctggcacggcgtacatgaaggactcagatggcctctccgctctccacgtcgcggctcggctgggccacggcggcatcgtcgaggagctgacagggttctacccagacaccgccgagctgcgcgacggccgctgcgagaccttcctgcacgccgcggccagggagaggcgctcgtcggtggtgtccctagacatcaagaaccccataatgatgggtggcctcgtgaatgcgcaggacgccggcgggaacacgccgctccacctcgccgtggtcgccggcgcgcctgacattgtggaggccctgctccgggaggggaatgtgcaaactgatgtcttgaatgacgatggacacacgccgcttgatctcgcctcagaatcaaacagtttgttcaatatggcccagccacaaaggaacgaccatctgaagccgtcgagcggccatgacatggcgagtggtatcgagaagacatccgacagcctcgcattggtggctgttctcattgccgccgccgtcttcgccgtcgggttcaacatgcccggcgggtacggggacgacggcacggccaacctcagggacaacatctcgttcaaatacttcatggtcctcgacaccttcgccatcaccacgtcagtggtcgccgtcatcctgctcgtatacgggaagacggcggcggcggcgcacctcgccgtctcgtggaagagcttcgtggtgacgctgcagtgcatctgggtctcgctcgtcagcctgatcctggccttcttctccgccatccatgccgtcgtcatcgcaacctcgagctcgaggacggtcttgatcaccatgttcttggtcatctatgtgtgcttcaacgccttgattttgtggatcgagaagtggattgatcctgcagcgacgacgtatcgcgcggtttggaggttcgtgtggcgtggtcgccatgctcacgccatcaagaggcgatatccgttcctcggcgactccctatacagcttgcttatcttctcggttataattataaatatcacagcatttgtcgttctggttgtggtgtattatttcgatgtgagaagattgtcgaacaattga

SEQ ID NO: 56593 - DNA, 707 bp, Oryza sativa
  unsure (1)..(707): unsure at all n locations
  Clone ID: PAT_MRT4530_58489C.1
ccacgcgtccgcttgggctcttgcctccttggtggactcgccgccgactactctcggagaaggaaagagcgaagaatggccgcctcatcgtctctcagactaatcctcggctcctcgtcggcgtcgcgccgccagattctcgccgagatgggatacagcttcacgcttcttagtgcggatattgacgaaaaggagatcagaaaggagaagccggaggagcttgtggtcgcgctggctcatgcaaaagcagatgctataatggagaagctgagggataatgggatgatgaaggaaattcttgattctcaagagactacactgttgataactgcagaccaggttgtggttcatgatggagtgattagagaaaaacctagcaccccagaagaggcacgaaagttcatcaaaggatactccgaaagccatgcagcgacaattggatctgttcttgttactaatgtgaaaagtggagccagaaaggaaggatgggacaaagctgaagtttatttccataagatacccngatgaagtttgttgagagtttgattgagggagggcgatgtcttctatgnttgccggtggcctgctggtagagcacccgctgacttcacctcttgtggaagctattgttggcaccatcgacagtgtaatgggactcccgaaatccctcacggagaagctgatcaaagagtcccttgaggagccat

SEQ ID NO: 56594 - DNA, 366 bp, Oryza sativa
  Clone ID: PAT_MRT4530_5848C.1
ctcttctctctatcctctctctctccggccggttacgcaggatgggcggccggctaccgaagcagcgacgggcggagcggtcggcgagaaaggagcagtgcgtaggcaccgaccggcgggaggagaggagcggtgcgcgtgcacgggcgccggccggcgggaggagaggagcggcgcgcgtacacgggcggcggctggagaggagaggagcgtcacgtcacgtgcgggggaggcatcgccgaccacgctcgggagtagaggttgccgaccgtggccacgcgtgcgggggaggcgtcggccatagagcgcgcgagcttggcggcggagatgaagtcgtcgccgaccacacgtggtagaagtttacac

SEQ ID NO: 56595 - DNA, 1559 bp, Oryza sativa
  Clone ID: PAT_MRT4530_58490C.1
gcaaaaatatattgtaggacccactgacatgtggggcccgcgggtccccgccccgcggtggccccccgggccacagcggccgctcatcgtctctcagactaatcctcggctcctcgtcggcgtcgcgccgccagattctcgccgagatgggatacagcttcacgcttcttatggccggcaagtggcgcaaggtggtcggcggcggcaccaacggtggaggaaggcatgcaatggggcggcggagggggacgtggcgacctgtggaggttgggcacggagatccggaggtagtgcggaggctaggcaagcagacctggcgaggtggcgatggtggcaacagtggtggtgtggaggaagctcatcgcccccctctctctcctggcggccatggacggcgaggaggagcacggcgcagcatggcgctgccatctccctcgctcgtcggcctcctctttctcccagcagccatggacgatgaggaggagaacggtgcgtgcgcggcactaccgtctccctcgatgtcatctcccttgctcgccgatcccctctccctcccggtggccatgaacagcaaggaggagcacaacgcggcgtggcgctaccgtctccctcaatgctatcccccttgctcgcaggcgtgggacatcgtcaacgctaccagggatagagacggagccagaggtggggaagggcaacagaaagggcacgaaggagagagtgcggatattgacgaaaaggagatcagaaaggagaagccggaggagcttgtggtcgcgctggctcatgcaaaagcagatgctataatggagaagctgagggataatgggatgatgaaggaaattcttgattctcaagagactacactgttgataactgcagaccaggttgtggttcatgatggagtgattagagaaaaacctagcaccccagaagaggcacgaaagttcatcaaaggatactccgaaagccatgcagcgacaattggatctgttcttgttactaatgtgaaaagtggagccagaaaggaaggatgggacaaagctgaagtttatttccataagatacccgatgaagttgttgagagtttgattgaggagggcgatgtcttctatgttgccggtggcctgctggtagagcacccgctgacttcacctcttgtggaagctattgttggcaccatcgacagtgtaatgggactcccgaaatccctcacggagaagctgatcaaggagtcccttgaggagccatagctattttttttaccgggacaactgactgcccatgctgaagttcatatgctagaatttttcactcatctgctgcacaaccaactcgtcatccactctgcttggattggaggatggagatgcatcttaccgatgttgtcagcttgactatgctaagctacttgccgtgattggcattattgtagtaaaacctgagactttactatgtggattaatctgtttggattaaattttctcaattgaaaaaaaaactcgagatagttctctctctctctccctcgtgccgatcctgcagcccggggatccactagt

SEQ ID NO: 56596 - DNA, 348 bp, Oryza sativa
  Clone ID: PAT_MRT4530_58491C.1
atgtctctagaatctagatcggcggccgggctcccaccactccacactccacaggaatgctaccaccactcgtgtctgcgctttcgccacggtctccgtcgcgtgggcgcgaggaggatgcaaacggaggaggcagccggcgaggtggtgggaggcgttgtctccggcggtggcgcttggcgagtgaggctggtgcgggcgctcggtgcctcggtgctgaccgcgaagagagggggcttgcgggcaaggcatgcagctcaggtgctcgacgaaatgccgcacgaggggaaggcgctgttccagctgcggccttcggggatgagcgcgcggcagggtcaaccgccgtga

SEQ ID NO: 56597 - DNA, 918 bp, Oryza sativa
  Clone ID: PAT_MRT4530_58492C.1
atggttgtggcaccggagccggaggccatcgccgtgaggatcgacatggccatgcttcactgccccatctgctttctccccttgaagcctccaatcttccaggttccttgcttgttgctgcaatgtctgatgcttcatccatttcttgtttcatggttgcattcatatgaatcgtttctttctttgtccatcgatttatgcagtgcgatgctgggcacatggcttgcagcaactgccgcggcaaggtcgccggcggccggtgccactcgtgcgaaggcgtcggcgtcggcgtcgtctacgcccgctctcgcgccatggaggccttcgtctcgtcgaccaagatccagtgcccctaccaggcgcacggctgccggagctacgtcacctactacgccgtcgacgaccaccagcgcgcgtgcccgcacgcgccgtgctcatgcccggagcccggctgcggcttcgccggctctcctggaacacctcgccgcggcgcattcctgccacgtggacaaggtcgagtacggcaaggccctgtgtctccgcgtgccggcgtctgagcggcggcggcgcctgctcgtcggggaggaggacaagcgcgtgttcctcctcgccatggccgcggtcggcgcggccagcgcggtgacgttggtgcgcgtcgcggcgagcgcggagacggcggcgcggtacaggtgcaagatgtgggcgaacgcgccggcggcggcggcggcggcggtggcgggcgcggcgagcggcaaggcggacatggtcatggtggacatggaggtggcgagcagcggcgtggcgcccggcggcgtcgccgtggaggaggcgacgttcttggccgtgccacccaagatgctgcacggggagcacaaggagatcattcttggcatttgcattgacaagaagacctcctga

SEQ ID NO: 56598 - DNA, 213 bp, Oryza sativa
  unsure (1)..(213): unsure at all n locations
  Clone ID: PAT_MRT4530_58493C.1
catgctccggcaggacgaggggaccagcaccgcgtcgtcggggtacgagcacnccgccatcgggcgccctccggcaatctgtccgttcctcattctgccngtccgccgcgtcgggcagctgggtgaccatggagcagggcggctccggcgccgcgggctgccgncnggcgtcggcngcgtcggcngcgcacggnaacaggtggcggagttcgt

SEQ ID NO: 56599 - DNA, 169 bp, Oryza sativa
  Clone ID: PAT_MRT4530_58494C.1
atgacggagcgcggtgctcctcaccgggagaccgcacaggcccccctttgccggttcggccgggggctcagggtgagatctcaagcttccgtgtatgtgggaaagatcgcggcctctcaaaagagcatgaaccacaagcgatgtatacaggttcaggccgttgagaagc

SEQ ID NO: 56600 - DNA, 820 bp, Oryza sativa
  Clone ID: PAT_MRT4530_58495C.1
ccacgcgtccgatcgcgagcggcgccctttttttttttttttttttttttgtttttttggaattaaactcggacttggcatttattttccatatgatgatgatgaacattccacatatcacagttcgagctttacaacgaatcagcgcctgcaaactacacaggccctgcaggatcagcttctgctgaactgttcacgtactggcatgttagcaaccttcttcactagaatcttgcttgggccaaggattgggctactcactgtgttgggtcgtagtgcagccggcccaattcctaacatggcactgcctccttggcatgtcaacatgtcacccggcctgatgcatcacgcgaacgatgtcaagcgccgtcttctcgttgatgctgttgctctgctgcatctccatgtagtccctgtacctgatcccccggaactccaggccccggccgtccgccgccatctccggcagcggctcgacgacggtgtccatgcacggcccgatcaggctcacgaacgacatcctcgactgctcgccgccgaccaccgcgcggtggagcacgcccttgtaccttccgttggtcacaatctccaactgatcgccggcgatgacgaagaaggagcccgggaggggcttcgcgaggagcccttcgccatcgtgcttgacttggggccatcgacgccgttctggaagagcagggtgaggaggccatggtcggagtgagccgataatcccatcgcctgctcgtccggtctagagcacgcagggtaatggttccccaccaagatctggaagcaggactcgaggttgagcgcgtcaccc

SEQ ID NO: 56601 - DNA, 305 bp, Oryza sativa
  unsure (1)..(305): unsure at all n locations
  Clone ID: PAT_MRT4530_58496C.1
ataggttgtgttgcacgcctgtgccgcccgcggtggcacgcccgtgtccccgagtggcccacccgcggcgcgacagtgagttccacgttccacttccacctgtttacctacgttgttattattccacacaaaggaaantattccactgtattattcccactttacgttgtgttcacgtaccactccacttacccccacgtaactaattccgntgtaactaatcactgccaccgtgtgtaatcctcataaaataagtttaagcaatgaatttaacccacaatcaccaaaaaaaaaaaaaaaaaaaa

SEQ ID NO: 56602 - DNA, 315 bp, Oryza sativa
  Clone ID: PAT_MRT4530_58497C.1
atgacgtttgacattttaaaggcatttcatttccgcatagaatggatgctattaaggggcttgcgtgagctcgaggacaatgcaacagtgtgcagaaactgcgtggtggcaggggtcgattgcggactgccaccatggacgttggttgtgcgggtcgacgatgctctggcggcggagatcggcgcgggagcgatcccgtcgatcaggaggtggcgcagggagcggttgccggtgccgccgtggatgtttgttgcgcaggtcgacgacgctctggcggcggagattggcgcggcgtgcaagagggaaggggattag

SEQ ID NO: 56603 - DNA, 2884 bp, Oryza sativa
  Clone ID: PAT_MRT4530_58498C.1
agcaagaaatgcatgcacttcatttatttatcgccaaagtgtatcacatagtatacatagctccaacatggtggaggtatctctgcaaaaatgtataaagaacatgcatacatcaacaggcgaattgcctgcagacaaattattcacaggataaccggtgattctgcatgatcaaatgttcgaatttacaatgtaatttcactgcattggtgaaatcttttcggtaggacaagtggttccattgcccttgctgtccacttcttttcttggtaccatcagcaggatgccgaactctagctttgtgctattcagttttccttttgtgagctataccgaatggttgtatactgtctacaatagaagttctgcaagtaccagcgcggcaagtctacgatgacacttcccagaccttgtaatcctgtccctcggcagcaactacccagtttgtggggccgcttggctcaaaatgtcctgcgccaatcttcattgttaccctctcatcaatctctgccgcatataaatttccctctgctttcagtatcttgatcttgctacggcaatggatcttttggcgatttctaatagaaattaatttagcaatctctggctgagtagaaccagtgtcatgattttctataaatgtgacagcacgcgaaggccaccaacctaacactccagggggttttcctttttcatcagacagacgccagtactcagatctttccagtgcagagtgaagtattcctttcgtggtaacatcaaatgcaccagcagttccatttgtagcatttatccaatcaactattctctgcctgtgggcatcttgattataatccatttcaccataggtgtaactgagagaatcccagtactctcctactgcaaaatatggttcgcttgcttccaagtaatcgtggacatatccaccccaaaatccgcgaacaaaatcaagtcgccatccatcgtatccaacttcctttctcatccaacaaagccattctttaagatcactcctcacaaactcttgcgagtgatcaatgtttggggctgcatggaagttatctccactgctcttgtttcctcttccctggaaatgtggatcatctgcaacaactgctcgatcatcccagttaaggcgtccaccaaaaatattccagacgccattttggttctgaaattgagcacacctgtgattcaggacggcatcaccaagaaccttcataccggcttcatgaaaacgtttcacagcctccttcaactcttccatggtcccatatctggaatttagattatacaaatcccttggcatgtatccttcaggcgacacagaatcagtaggtggtggtgaccagacaatggtgaaacccatcgatgacaactccttggcctttgagccaagttccacataccattttcctgacttatgagattcccagttaaatccttgacacaatatttcaaatccagatccagtaccagaacaagcaggcttcacaatggatgagtcatcaatgtaaacagattcctctacagtatcaattgtggggctcctaaaaatgctataagcttctgccgctaacctctcaatttcttgtaggatatcctcttgcagaactttattcttcgctcgctgacctcttctagacgacagcccaaccaccagattccttatatcactgattaagccatcatcttgtgaagacttatcatcggctttctgtttgtcagcctcggcgtctgctcttgtaagaggaatgtagaaatcaaatccattctccacatttctcaaccaagtatactcatcaagttttaccacaaaaatcagaccagaatactctccatccagtaagaatgatagagagttgcctgttccatcagctttttgttgtagcatggtctgaagagctttctgtcggaatatcttcgttgcaggtggatgtggttctggggggatctcccatgtcatggtattgtctttgcaaactccccaatgaatgataacttctccaggaatatcagtgtcgaattccacagcatgtttagttgttccattgttttccctcacattaacagttataaaattctgaacatacaccgtttttaagattgggtattcctcatagaaacctgaaatgtgtttggttcttgaacctttatcatcgggtacagttttatgaggctcagcaataggtccctcaggtttctgtaacacgttagataggtgacctaaagcccctggcctgacatcaatatcttgttctgttcctagtagatctccaccaaaggatccacttaaaggtattctgaaatcctgacccttgtgctttagaacaaaattgatagcagcaattgatgtgcccttatcaattttgatttgcacttcatgaatcgtcttgccttctgaattgtgtggagtgtccaaagatgtttcaattgcatagtccttaataggcactgaaccgggaggtctcatgtctgaaggaggttggtcccattctcttccctgctcaccatcgtaggagacaccccaatgcagcacccacttcccctctacatcacacccgatcacaaccttgcacttgccctccccatccggctccgcatcgaccctcacccacgccttcccttccaccgttcgggatcggcgcaaggggaacttctcggagaacagcaacccggcttccccggagccggccaccggcgtctccgccgcaccggcacgggccaccacgccaccgagcctcactctcctagggagcgtggcccggcaccgccacgccacgggcggccgcgcggccgtcacgaaggcgccgccgagcagcacacccctcgctgtcggacccgcccgcgggatcgccggaatgctccagctcgccaccgccat

SEQ ID NO: 56604 - DNA, 511 bp, Oryza sativa
  unsure (1)..(511): unsure at all n locations
  Clone ID: PAT_MRT4530_58499C.1
atacaggcgtgaggttgaaggancggtcacacaacatatttaatggctttagcnctgaactacttaaccaaggccntggcnttagcnacccaattggccaaggcactcccattttcnaatgaacnaaagaagaaaaattgttcntgtccaacattggctccatttgctgcngccatatncatcnttgcangancnaggaaccaagaacaattccatcccanaaaacgttatccanaaaggacaatatccnccaaantccatattgaaanttgctgctcctaccggttggaatnaaaaccttttgccccnttnaaaggttangcaaaacatccnatnatccntaaccntgccnntaccttacaatcccanaaacngggaaagggtttcnaatctcnaccccccanaattccccccttcctaatccttgtttcnnaatnaattgccntccaaanttaatcctatncccnnaaacncctccctttnccccnttttggaacattccacccccccc

SEQ ID NO: 56605 - DNA, 667 bp, Oryza sativa
  unsure (1)..(667): unsure at all n locations
  Clone ID: PAT_MRT4530_5849C.1
aaacgaaccatggctgcaccgatgcagtctgctaacactgacaccgtgacacagaacgtgaacctagcttggattcatgtcggatcggactatcggagagacacgaggcatctcacagagagagacaccgagacaatgccacctcgccggatgctgctttgtactactcgtgattcggcttttctctgcggcatttccggggagaaaaacagagtagttgtggcgcggaacagaggaggaatgttcaggagagggggcatgtgttccggcgtccatgttgccgacacgaggtgataaagaaggcaaccgacatggggcttgtcgtgatggttataatacacaagaaggttctacttgtattagtagtgcagctttatttgtgacaaaagggatcaggagttcaggactatgattatctccattttttcccctttctgccttgttcccatagacaatcgacaaagctgcatcgagcagcgtaacaaacagactgctttgtatcaggatgtataatactcccagtaatactataagatgcagattctagaaangggttaacatgtactcctactangtcgtgctatagagcagtgaagtgtaagtttcgaattatgaatcctgaactcatcgtctcgagacgaggaaagcagattcttctaaaaaaaaa

SEQ ID NO: 56606 - DNA, 350 bp, Oryza sativa
  Clone ID: PAT_MRT4530_584C.1
ctctcttttttcgtcgtcgccgccgcagcctcctcaagctgctcccatcctctccttagagttagcttcctcctattcaccatgggaaggaaaaaacgcacatcaacattgaggacattaggcacgtcgactccggcaagtcgaccaccacgggccatctgatctacaagcttgcaggtaggggcgggcgcgcgattgagtggtttttaggaggaaagccggctgagacgaacaagaaggactacacgcacgcgcgcgcccccgcacaagctcaaggccgagcggagcagaggggccaccatcgatatcggcctgtggaagaacgagaccaccccgtacgtactggcacg

SEQ ID NO: 56607 - DNA, 519 bp, Oryza sativa
  Clone ID: PAT_MRT4530_58500C.1
atggagtcgtcggtgcggagggtgcagcagcgggtgaggaaggcgcgggaggagatggatcggtgggacgacctcaactcccgcctcctctctcagttcgcaaacgctgccgccatcgttgctcgtctcccggtgctggaagaggttaagaactatggtgtcctacgatgtgtccctaacatcagagagaatcttttgggtaagcaaatggagagtttggagatcatcttcgtctctatgagggagacagtggaggaattcaatagcattgccagatctttacataaggctttgcgggatactaatcaaatggtatgcactaaaatcatcagtcatctcttcgctgacatggacgagcagtgcaagctatttttgacattatattcgcagatgaaatctgttgatgtacttgcacgattgctattggaagcactatgccctggagtcctggacatgttgacatcattatgttttgatgtacttgcatgcccagatggccagatgaaccaaagatgctga

SEQ ID NO: 56608 - DNA, 593 bp, Oryza sativa
  Clone ID: PAT_MRT4530_58501C.1
tgggccgtacgggagggggtgggactggatggagtcgtcggtgcggagggtgcagcagcgggtgaggaaggcgcgggaggagatggatcggtgggacgacctcaactcccgcctcctctctcagttcgcaaacgctgccgccatcgttgctcgtctcccggtatgcactaaaatcatcagtcatctcttcgctgacatggacgagcagtgacattgccgcgatgcgtcaactcttagtagaccagccaaacataccaaaagatgaagtgcaagctatttttgacattatattcgcagatgaaatctgttgatgtacttgcacgattgctattggaagcactatgccctggagtcctggacatgttgacatcattatgttttgatgtacttgcatgcccagatggccagatgaaccaaagatgctgatgcactgtaacaaagctggaattgctgtgtctggctgccagcaagagagtaggatgtaggagtagctttctaacatacactaaaatatcttccctttttttatccccaaattttcctagttctatgttaacagtcatgtcctggagactaaaatttatctttgactg

SEQ ID NO: 56609 - DNA, 972 bp, Oryza sativa
  Clone ID: PAT_MRT4530_58502C.1
atgccgatatggctcatcctgctggcctccctcggcgccgtccatgtcgccgccgacgtcctccgactcgtcgccaccctcacgttcggcctgcgcgcccgtcccaggggggacctccgccgccggtacggctcgtgggccgtcgtcaccgggccgacgtcaggcatcggccgtgccatggcgctggagctcgcggggcgcggcctcaacgtcgtcctcgtcggccgtgaccccgccaagctccgcgacgtcgccggcgccatcgcccggtcccactcccaccacggcgtgcgcaccaagaccgtggtcttcgacttctccctcgtctccaccgtgcaaggtgagaaggcgatggcggcgctaagggagacggtggaggggctggacgttggggtggtggtgaacaatgccggcgtggcaaagcccggcgcgatgttcctgcatgaggtggaggtggagccattaatgaggatgatacgggtgaacatgctagccctaacgaaggtgacggcggcggtgctgccggggatggtgatgaggggcaggggtgctgtcgtcaacatcggctcggcgtcagcggaggctctcccctccttcccgctctactccgtctacgccggcaccaaagcatatgttggtgagttctcaagaggcctctccgtggagtacaagagaaagggaatcgatgtgcaatgccaggtgccatgcctggtggagacgaacatgatatcgagagccatgaaggatatctttctgtcgcagttcgtggtgaccccggaggagtacgcccgtgcggcggtgcggtcgatcggccacgggcggatgtgcgtgcccaacatggcgcaccgagtgcagctcctggggatgagatccaccccggatttcgtgttgaactggtaccgcctgcggctccacttgcagcagcgagccatctttcgaagccgcaggtgtcatcggatcgcgctcctctga

SEQ ID NO: 56610 - DNA, 244 bp, Oryza sativa
  Clone ID: PAT_MRT4530_58503C.1
accaaacatccagggtccatcctccagagcatgccgcttcccggatgctgatgaaagacaccagatcttccccagtgcttgcgccaaaccctccgcgttcaccactttctccgccaggaccttcccgatcgccttcggatcccctgatcccatacttccagactccgcctcgcagatccggatccccttcttctctgcctccgacaattgcatgcgcttcatcagtgcctgcatcgcctccatg

SEQ ID NO: 56611 - DNA, 339 bp, Oryza sativa
  Clone ID: PAT_MRT4530_58504C.1
atgccaccctcccgtcgtgcggtggggcgccgccgtcctcccgtcgcgcggtggggcgccgccggttcctgccctcccatgtgcgatgggacggcgggcgctctgccggcccccgccggccgccaccctcccgtcgcgcgcgccgctgtccgccgtcctcctgtcgcgcggtggggcgccgccggcccccgccctctcgttgcgcggtggcgcggcgccagcccccgccctcccgtcgcgcggtggcgcgccaccggcctcctgtcgcaggcaccgccggccaccgtcctcctgtcgtgcggccaaagtccgataccctctcgtcgctgcgccacctag

SEQ ID NO: 56612 - DNA, 305 bp, Oryza sativa
  Clone ID: PAT_MRT4530_58505C.1
acatgagtggtgactctatgacgcacccgaagtgttctacacaaggaagatacgattggtcgaaacgttaggtctccagtagtgccagagacaagcctccaaccgtatgagaacgattccgagaatctcgccatggtgcagaccctctaacccagcattgaacgactccagcggatgggtctagtctttgtagcacgcgagtccaacagcaatccacttaccacaatcaccatcttccacatttttatgcacaagtcacctcacagctcaccatagatgctctcgatgaaagattacctgcatct

SEQ ID NO: 56613 - DNA, 436 bp, Oryza sativa
  unsure (1)..(436): unsure at all n locations
  Clone ID: PAT_MRT4530_58506C.1
cgtcttcccagatatccagctcgatgttttccgcgagatggtaaccagcttcgactgcgagtcacgtctcgctgtcgtcgccgatgcacttgtcaaaaatcgtgtgtcttgggtgaagggccggtggaggctncccgacgaaacaaacaacacctcggccttgccagcagcagcagcagcaacgccgcagacaaatgccaaaccgttacaggcccagggtgcgtntcggaggaggcaaggtggtccagtaccgatcaaggaacaattcaggagtgccgaatacagggaagcggtcaggtcactggctctttacgagttcaagggtctttcgcggtcngccgtgactgcagtcttggctgaacncccccattcatacctagaggcgcgaaagacgctcatcgaggtgtcttccnaatcaaaaaaaaaaaaaaaaaaa

SEQ ID NO: 56614 - DNA, 1097 bp, Oryza sativa
  unsure (1)..(1097): unsure at all n locations
  Clone ID: PAT_MRT4530_58507C.1
atgcacgtcgtgatctgcccattgctcgccttcggccacctgcttccgtgcctcgacctcgcccagcgcctggcgtgtggccaccgcgtgtcgttcgtctcaacgccgcggaacatatcccgcctccctccggtgcgcccctcgctcgcgccgctcgtctccttcgtggcgttgccgctcccgcgcgtcgaggggctccccaacggcgccgagtctacccacaacgtccctcacgacaggccagacatggtcgagctccacctgagagcttttgacgggcttgccgcgcccttctcggagttcttgggcaccgcctgcgccgactgggtcatgccgacgtcgtccgcacctaggcaaacactaagaatggatcaatctggaaatctcactcgtgaagagttcctgcatgacaccgaaaggattgagttctacaagaactacctcactgaactgaagaaagccatcgacgatggtgcaaatgtggttgcgtacttcgcatggtctcttctcgataacttcgagtggctgtcaggttacacatcaaagttcggcattgtctatgttgatttcactactctcaaacggtaccccaaggactcagccaactggttcaagaacatgctgcaggcatcagggcctggctcaaaatctggttcaggcacttcagattctcaagttggttcagcaacttcagcaagccatccagttggttcagccatctcaagtagccatcggctcttgcttcccctgttggtttccttgcattttcttttcccttccttcttcatgtttttatccctgtagaagtagcaatttagcagtgattaataagtagtggatgccagcagtatgttcgctttaaaaaatgtgctgcagctaagaggagctgagagagaccaacctgaaggccatcttgtttaattttcgcgtgcttttcgccagtagtgagcactatgattcagaaccagatttgtagtacttgtggtgattacgctattgtgtgtttcagtgtttgtatttgtagtatgtattgattaaactacatcaacttttcgggttcanaaaaaaaaaaaaaaaaaaaaaaaaannnnnnnngg

SEQ ID NO: 56615 - DNA, 123 bp, Oryza sativa
  Clone ID: PAT_MRT4530_58508C.1
atgaaggacatggtgggggaaagcaaggtcccattcctcattgcaaaagcatcgatcaagtttgacgagggtggcccttcgacgctcgttgctctagatcatgttgaagtctccaaggattag

SEQ ID NO: 56616 - DNA, 465 bp, Oryza sativa
  Clone ID: PAT_MRT4530_58509C.1
ttaatctgctggccatgccacaatgcaagtgtacaccacccaattatcttcaatagttgtgccaccctccgaccacacctggaggttgttgcccttgatgtgcgcccagatgatcttgagcgcctccgtcctgggcagctcctccgcgccgccgacgaactcccgcagctcggcggagatgggcttcggcttcatgatcccgctcgccgccctcttcttcttcccggacgacttcccctccgccgccccctcctccgccgcggccaccaccctcaccctcaccctcgtcgccaaccgccccgccctcgcggtcgcggctctccccatccggaacgacatcgccgccgccacgggcgccgccgccctccgcagagccatcgggcacgcgagtagctctccggagcggatggccgccgccgtcgccgtcgccgacatcgccggagcacacgcggagaaagcagcgac

SEQ ID NO: 56617 - DNA, 2179 bp, Oryza sativa
  unsure (1)..(2179): unsure at all n locations
  Clone ID: PAT_MRT4530_5850C.1
ccccccgcccgccttccgcccgtccgctcgcgggcactctctgtgctctcaccactacaggggtgcggggttccggttgccgggatggggcttgggattaaaggtctcaccttcctgcttctccttgtcttgcttgttctgtgttccaatgtcagtttatctgacgcaagaagtggcaagcactggaggcaaaacagagcatcctccagcactctgctgcgaagaaaagggaaaggaaagaccaacaattcccacaagcaatatggcaaagggaatcaggatccataccagccaagcccgagtacaagcccgaatgtgcccgtcaacccgagcgaaagacctgtccagggcaaaggacatccggctccaacaatgccaccaccaagcagtggaagtggtcatacattgccatctccgccaccgccgctgcctccattgctgccgccaccacagccaccagcagcccaatcacagaacacagtcttcaatgtggttgattttggggcccgtggagatggagttacagatgatacgcaggcttttgaagaagcatgggcagcagcatgcaaggtggaggcatctacagttcttgtaccatctgaacttgagtttgtcgttggcccaatctcattttctgggccttactgcaaaccaaacattctgttccagctagatggaactattttagctcaaaccagtacaagagtgtggggttctggtttgcttcaatggcttgaattcacaaaacttagtggaatatcaattcaaggaagtggtgtcataaatggtagggggcaagaatggtggacctattcagatccaaatgacgacgacaatgatgatgttgatgcttacaatgtggagctggagaagatgccacagattaaacctacagcattgaggttttatggtagttccaatgtcacagtaactggtatcaccattgttaacagctcacagtgccatctcaagtttgatagctgtcaaggagtaatggttcatgacctgaccatctcatcgcctgagaacagtcccaacactgatggaatacacctgcaaaattccaaacaagtcagcattcaccactctaacctcgcttgcggtaatgctctcattaactcaatcaaagcaaaaccgacaggattcaggactaagggaaagctaaaaacactagtacaagtatctgaagtaatatttgctctctgtgatgcaggcgatgattgtgtttccatccagacaggctgcagtgacataaacatacataatgtgaactgtggaccagggcatgggatcagcattggtggtctaggaaggtacaacacaaaagcatgtgtatccaatgtcaccgtaagagatgtcaacatgttcaaaacaatgactggtgtcagaatcaaaacttggcagggaggttcagggttggttcaaggcataaggttctcaaacatacaagtgtcagaagttcaaacacctatcataatagaccaattttactgtgacagaacaacttgcagaaaccaaacatcagcagtggcggttttaggtgttcagtacgagaatatcagggggaccttcacaatcaagcctgcccattttgcatgcagtgatagctcgccttgttcagagatcactcttactggaatacagctcaaacccctgatagtgccacagtatcacctgtacaacccattctgctggcaagcctttggagagttgtccacccccaccatccctcccatatcctgcttgcagatcggcaaaccatctgggaacaacgtgatgtcagattatgatctatgttgaaactctctgaatgagtggaaatgctgtgatccaggaaatactatactcctggtcctcattggttagggtggtcgtcgtgattcttccgaccccctttctgcacaatcatcgtgtggtgtnatatatatacagtttatgcaaggatagtatatggttatcaggacatgtaccagcttccctcttgaagtgaaatgtaggaatttgataatgtaagggatagtgttcatgcattgttctagatgcatcatgcatacatacgaggtagtactagtcactctgctatcaatttcggtaatgaaatgggaccattcctctctttctcaaaaaaaaagtactattaagatggatgaaacagaaaaaaaaaaaaaaaaananaaaa

SEQ ID NO: 56618 - DNA, 2208 bp, Oryza sativa
  Clone ID: PAT_MRT4530_58510C.1
ccggccgggaccgcgccgtcgccagcagccgccgccgctgcctctcctcctcctcccctcgccgccgatccaatccggtcactttcagtcttttttcttgagggggagatggcggtttctttcaccaacgttagctcagaggcaggcctcaaaaagctcgatgagtaccttctcactcgcagctacatctctgggtaccaagcctccaacgatgacttggctgtgtactctgcattttcaactgcgccctcttcaagctataccaatgttgctaggtggtttactcacattgatgcactcctacgtctgagtggagttactgctgatggtcaaggcgtaaaggtcgagtcgacagctgttccttcagcttcaacccctgatgttgctgatgcaaaggctcctgcagctgatgatgacgatgatgacgatgttgacctttttggtgaggagactgaagaggagaagaaggcagctgaggagcgtgctgctgctgtcaaggcttctggcaagaagaaggaatctgggaagtcctcagtgttgcttgatgtcaaaccatgggacgatgagactgacatgaccaaattggaagaagctgtgaggaatgttaagatggaaggcctcctttggggcgcatccaagcttgtcccggttggttacggtatcaagaaattgcaaatcatgatgaccattgtcgatgatcttgtgtcggttgatagtctgattgaggactacttctacaccgaaccagcgaatgagtacatccagagctgcgacattgttgcgttcaacaagatctagatcttccttgagtcaggtgatggcgatcggtgcacaaagataaaaagaaaaatccggaagtttgaattaccgttgatacttcaatctagaagtttgaattaccattgatgtgtcgttcgtggtgtcaactagtacttgagcccgttttgtgttgagattgtagcactctacttctactgagatcgttttctcctcctttaatgtttaaagaccaatcaggttattattaaagtgacaaacaggatcaccctagcgatgattatggttcgagcaaggagaaaggatctgggtaattcttagtttttgtcgaagtaagaacaggtgaggctgacacgaccaaattgaaagaagctgtgaggaatgttaagatggaaggcctcctttggggcgcatccaagcttgtcccggttggttacggtatcaagaaattgcaaatcatgatgaccattgtcgatgatcttgtggcggccgccgcgccacgcacgcaccgtcaggcatcgacgacgagcgagaccccctcggcgcagaagacactcacggcgatggcggtgacgaggacggcgctgctggtggtgttggtagcgggggcgatgacgatgacgatgcgcggggcggaggcgcagcagccgagctgcgcggcgcagctcacgcagctggcgccgtgcgcgcgagtcggcgtggcgccggcgccggggcagccgctgccggcgcccccggcggagtgctgctcggcgctgggcgccgtgtcgcacgactgcgcctgcggcacgctcgacatcatcaacagcctccccgccaagtgcggcctcccgcgcgtcacctgccagtgatggagatggtgtgccaaggtaattgcgtttgctcgtgcgaggatgagaagagaagattgaataagatgtttgatggcaacaagtcatcaggcgatccgatccctgcagctatgaatgggagtatacgtagtagtggtctcgttagcatctgtgtgtcgcatatgcacgccgtgcgtgccgtgtctgtcctgcttgctctgctgatcgttcaatgaacgacaaattaatctaactctggagtgacaagtcgttcgagatcttctaactcgcagctacttctctgggaaccaagcctccaatgatgactgggctgggtactctgcattttcaactgcgccctcttaaagctataccaatgtagctaggtgggtttactcacattgatgcactcctacgtctgagtggagttactgctgatggtcaaggcgtaaaggtcgagtcgacagctgttccttcagcttcaacccctgatgttgctgatgcaaaggctcctgcagctgatgatgacgatgatgacgatgttgacctttttggtgaggagactgaagaggataacaatgcagctgaggagcgtgctgct

SEQ ID NO: 56619 - DNA, 261 bp, Oryza sativa
  Clone ID: PAT_MRT4530_58511C.1
atggtgaatagggttcaccatgcctcgctgggcatggggcctgccgaccattgcctcgcaagaggtagtcaaaggcccgacatgggtgaggtgatgagcaacggctacaacaatcgttgccctgtcttccatgccctcacctctgtggagaggccacgtgttgcccctgaattgatcattggcatgagtgatgagccagatgagcggatacatggcaacttcatggtgcacgttgtatgctttgggggtcctggctcctag

SEQ ID NO: 56620 - DNA, 651 bp, Oryza sativa
  Clone ID: PAT_MRT4530_58512C.1
atgccgggagacggcgccggcgatgttccagcaacgcatttgatgaggaaagagaggggaaagggagtaataagcatggagaatccgtttgtaccttcaatttcagaagatttgcaacttgaggaacgaaggagttacggaagcgagaagctggaggtgtcgtccgggcattcgttcgtcgttcgtcctcgtgtgcgcgcgtgcgggcgtgtggcgtgcgcgggctggcatgagctgggcgcgagcgcgcacgagcgcagcgcgggattggcgcgaggcaacacagggcggcacaggcgctggctcggcctagccgacgtctcaaagggggccggtccaccgtggaccgggaccacgcgggtggtccaccgccggtccacgggaccgacggtccagattggccccgaggccgatcggacagcgcgggcggtggctaccgggctcggctcggcttcaagccggccgttcggctatggtggtgtgacggcggcacgcggtcacgggcgacggcaaccggcggcgcgagaggctgcggcggacggtgcgaaaggtggcagcgtcagccggagacggcggcgctcacgggagagagggaaggaaggaggagaggggatcctcaccggcgagtatggcggccggagcggaggatga

SEQ ID NO: 56621 - DNA, 367 bp, Oryza sativa
  Clone ID: PAT_MRT4530_58513C.1
aaaaagtctcatattgtatcttgagaaattgaagcttggtatccttgtactcacttgtgccctcatgaattttacttagcttgttccaaatctcataagcggtcctatgattgctaactctatcaaactcttcttggctcaatgtgttgatcaagacattcatgtcttgggcattgagttggagattgcaatggtcaacatccatcaagtcattgtcggtgatagcaaagcctacatcaacgatgctccaaatgtggaagctcgtagtcttaagagtgataaaagggctcaagtatgtctctatgaaagtgttgacgaaaaatctgtgctcagccgatggtgccagatctgtgttggtgtgaactaa

SEQ ID NO: 56622 - DNA, 307 bp, Oryza sativa
  unsure (1)..(307): unsure at all n locations
  Clone ID: PAT_MRT4530_58514C.1
aacaaaatgcgccaaaaaggaaagggtttaaaaccggaaataaaagccaaaaaaggactttgggcaatggagattttggttnaaaaaaattnccctcttaatgggggggggggggaaccaacaaggcctcgccctggaaagggtccgggggggggaataaggcattgaaacgctttttggggggccctagagaagaggaaaactggggccaataaaaaaaggtccaggngaaaaacttaaccaagaaaaaagggggggggggcgaaacaagggaaaaggaaaacgctggacctgggaaggggggggg

SEQ ID NO: 56623 - DNA, 228 bp, Oryza sativa
  Clone ID: PAT_MRT4530_58515C.1
atggcattgtctgaagggacgatcggggatcgggtgatctcttttggtaacagcgaatggcaggggaaactctgggctctgggtctggccctggctaggatctcagactacgacaagttcacgaggaaaacgtacctcttagtaccagaggtattgggaggtaccatattttacactagaaaatatgacaactcatggtacctctcaaaaactataaaatcactctaa

SEQ ID NO: 56624 - DNA, 540 bp, Oryza sativa
  Clone ID: PAT_MRT4530_58516C.1
atggatggcatgcgcctgggcagcattgacccgatgacgatggaggtggcgattggggtagaggaagctacccagaagcttcctccaatcccactcagcgcccctacggcccatcctctgctggaggcccagtccgggtttgaggcccaggaggagctggcggcacaggaggagatggcggcccaagccagcaaggaggtggtgcccgacgtggtgggctacctggacgagggcgacggcctggcccacatcgcccctccaggcgcacctgcgccacctcgcctgttcgagcctctacccgagccgcttctccctcagccgccgccccccgctccagcacgccgtggccgctccaaggtgaagatggtgccctctaggcacagtgcgagacaggcagcacgccccttctcggtgcccgtctccaagcacaccgaaggccgcctcctcaaggagatggggttcattgacaaagaggaggacctcaacgacgaggcgattgcggcgttcgtcaaggctttcgacaagccactgccgccacat

SEQ ID NO: 56625 - DNA, 832 bp, Oryza sativa
  Clone ID: PAT_MRT4530_58517C.1
tggcaaattgagttgtggcaatgttaggcaacaaccaaacagaccctaagattcttaacatgggacaagcttagagagaaacgcaggtgcatgattgatctttcggtggtgttgtagcaacactcatgtcaagattgctttgttcgggggatttttttttttggtgttacccccttgataataacgccacaagtttggcattaaaggctcacctggttccatcaaatttgagtagttgggttgactggtcaatgattgtttcataaaattaataatgcacaacatgaaaggaattatatcatttttataacttgaatttgctgttacctaagaataatatggctgaggaactatgctggtttctagtgtacatagttcatattgggttaaatggccacagtgcatatacacataagcagataatgtagtcatttatagaagacaatacaagtgacacaccaatgtatatgtattttcatccacaagatcagggttgtggaacctaccagcactaacagattcggcattttaagatttgagtggtatttcctcttgtctcttccatgccctctctcctctgtcccctactcccctttgttgaactggacttgactcgtgaggatggtcatagtcaatggtaaatattggttcaataagttacacctgtgatgttacctggattttttattttgcgctggtcaattttcattctgtttaattgctttgctcatttgaagtgtaagtgtcctttctaacacagacgtgtctggtaactgataaaggttctagatgaagctgatcgaatgctggatatgggttttgaacctgaagt

SEQ ID NO: 56626 - DNA, 153 bp, Oryza sativa
  Clone ID: PAT_MRT4530_58518C.1
atggcggacaaattatctatggccattctgtacatacgtgaagagggcattagagcacggctcgtgaacaaggacatggctccatggtacaagcagcaacagcagctatttaagcagcaaaagtacgaccaccctcatttatcaagtttgtaa

SEQ ID NO: 56627 - DNA, 300 bp, Oryza sativa
  Clone ID: PAT_MRT4530_58519C.1
gcaactaatcgagaacagagtaccagcctgccctttttacttggtttacgagaagatgaaccccaagcttcacctccacgggttatgaaccatgaacagggatactaaaagagaacctttgagaaaaatgcttggacgcaccccagtaccccccttcttatttggaacacaattacttgcactcgaagatttggtcccatcggagaagcccttggggaagaacatgtcggattatgccaagggccccccggccccggggaagaaggcccacccttaaccgggggggggggccaatggccc

SEQ ID NO: 56628 - DNA, 1684 bp, Oryza sativa
  Clone ID: PAT_MRT4530_5851C.1
atggttactccatggcagggctacatccttctagcagttcaagcgtacaccacctcgctgcacccgccgccgtgcagcccggcggccacggcggcgagcgccaccaccacctgcgagccggtgcgcggcgcgaacctgagcctgctgctgctggggctgtacctgatcccgatcggcgacggcgcggcgagggcgtgcctgccggcgctgggcggggaccagttcgacctgggcgacccggacgagcagcggcaggagacgagcttctacaactggtacaccttcgccgtctccaccggcggcttcgtcggcctcgtcttcatcgtgtgggtgcagaacagcaaggggtggggcgtcggcttcgccgtctccgccgccttcgtcgcgctcggcttgctcgtctgggccgccgccttcccgctctaccggaaccagctgccgatggggagccccatcacaagagtattgcaggtttttgtagcggcattcaagaaaagaaacgtccggttgccggagaatcccagcgaattgaagcaaattaaccaagatgacgatgccaatgcccacgaagttctccccaaaacagatggatttcggtgcttggagaaagcggcagtggaaactggcaatgacgctgggccatggtctctgtgcagcgtgacccaggtggaggagaccaagatcgtgctgcgcatggcgcccatcttcgtggccgctgttctcagctacatcccggtgccgctgctcctcagcctcaccgtgcagcagggcaacaccatggacaccaggctcggcgcagtccacatctcgccggcgacgctgttcctcatcccgaccgtcttccagatggtcatcctcatcatctacgaccgcgccatcgtgccgccgctgcgcaggctcacgggctacgtcggtggagtcacccacctccagcggatcggcatcgggttcgtcgctactatcgttgccaccgcaatcgccgcggtggtggagacgaggaggaagatgaccgccgaggagagcgggctagaggacgccaccactgggatcccgctgtccgtgttctggctgacgccgcagttcttcctcattggcattgtcgacgtcacctccttcgtcgggctcctcgagttcttctgcagcgaggcgtccatggggatgaagtccatcggcagctccatcttctactgtatcctcggtgtatcagcatggctcggcagccttctcatccaggtcacgaaccgtgtcacccagcgaaccaacggcggagggtggctggatggggccaatttgaacaagggcaagctcgaccggttctatgtcgtcctctgcatcatcgaggtggtggcgctggtgatctacgtgttcttcgcgaggaggtatgtatataggaatgaccagagggttgtggcccaagagcagaggaagggtgacacggggaatggtatggctgtgatctaaacttgaaatgaaatgagtcgtgtttatatttacatggatgtaacgatatatatggtagtaatagtaaataatttggtggtacgaggagaaatggaggaacttcattgtgaaatttaataagacactatccaggagaaagaaaatcaatgtagatttccagagacggtggaaaaaaaaggaatgcagacgtgccgtgctaaagatagagcatggtgtgggtcgc

SEQ ID NO: 56629 - DNA, 1912 bp, Oryza sativa
  Clone ID: PAT_MRT4530_58520C.1
ttttttttttttttttgttaatctaacatatttcttataaaacaatatcttccacagttatatttacatgatttatctacatatgtacaatgtggacatggcgaattcgagtatatttacaaatgatgatgatctataaacaacccctacactactattccattcctgcgccactccactggtaagtcttgaacagaatgaaggccctctctgtaacttcctgaattcttgggcctcttcgtcagctaagaattttcagtgcggttttcgggatcggctcatgagatcagcgcatgaacatcccgaaactgtagagagatctcggtcgaaacaggttggcgaagaggaaccatgtgggtgactctttcttctgtggctctgatggctcaggctggcctttcacctgaatgttctggcctatggcttgcctgatggagtctattgtcttctgatcaaccgtccctcctgtggaatcgcgaacatagaatgtgttgacagccatccttcctctcgtgctcacctccgctcttgtgacagtcaggctgttctcgcggaagattcgggtgacctctgacaggaggccgaccttgtcatttgtgcagagctcaagcttcacaccctcagacaccctccgttcaatagcagcttcaaggcactggatgactcgcaacctgtcagcttcagtgtgcattggagatccatttacatgcctcacatagaattcctggtaagcttgattatccttggcatcaatatttgcatggaaaacaacataatgcaggtctgtcaaggtgcaaaccgtgtcgaagagaagcttcggccggtccttgcatcggatggtgaccaccgagtagtccttgtcattccaattgctcaccgtcacattgggcctctgggactgattcggaggatgccgatggagctgctcatggtcgccatcatccagcatcatctggtgcagcctcctctcggtgtgcgtgctgcaggtccccgtcgacaccgccatggccgcgccgcgcgagaggttgcctccccggagaaggtaggacagcctatccctgatcctctcgagcctgtcggcgtccgtgacggccgatccggtgccctcatcggtgactcgcatcacggcggcagccctggtgttatgggtccagatctcggcgctgacaacgttgcacttgaggcttgcaagaactgcactgacttcagagaggaggcctggccggtcagtccctgtcagctcaatgacattgtgatcactcgaagcagcgacatctactgatctccggcgagaaggtatgtatcttgaatctgcacccaaagacttacaaatgtagtcttcaattcgcgcaatagtagccttatctttaagcttctgcccttctttgtcagttatattaaagacatccatgacccatccaccatctgaggttatgtacgccttacttatcacaagattcagatcaatcagaacttggattacttcaaggagaatcccatactcatttgcactgtctaccctgacaatcgtggcgtcgttgcatgaatcattatcgatctcgatccttggcgggttcatcttgcgtatgaagttgtcgtactcgtcgtcgctgtcccaggtagggccatacccttcatattccaaggacatgaacaagaaagcccaacacaacagggagagagaaagcagagatggatggatacccatggacatcctctctctatctttctctctctactcttcttcttcctcctcctcctgtgctcttatgtgtgcggcagtaaaaagcgtgggatgtggtggatggcggcgatcctagagagaaggcaggagatgagagagagagagagagagagtaggtggtggagaagagaagaatggcctcttctctcctcttctctctctccttgt

SEQ ID NO: 56630 - DNA, 687 bp, Oryza sativa
  unsure (1)..(687): unsure at all n locations
  Clone ID: PAT_MRT4530_58521C.1
gtcagtccctgtcagctcaatgacattgtgatccctcganacagccgacatctaactgatctccggcgagaaggtatgtatcttgaatctgcacccaaagaaaatgtagtcttcaattcgcgcaatagtagccttatctttaagcttctgcccttctttgtcagttatattaaagacatccatgacccatccaccatctgaggttatgtacgccttacttatcacaagattcagatcaatcagaacttggattacttcaaggagaatcccatactcatttgcactgtctaccctgacaatcgtggcgtcgttgcatgaatcattatcgatctcgatccttggcgggttcatcttgcgtatgaagttgtcgtactcgtcgtcgctgtcccaggtagggccatacccttcatccatggacatggcagagcaggagaccaagaacttgaagcctctctctctcctggatgaacgaatgcttctcctgctcctctctctatctttctctctctactcttcttcttcctcctcctcctgtgctcttatgtgtgcggcagtaaaaagcgtgggatgtggtggatggcggcgatcctagagagaaggcaggagatgagagagagagagagagagagtaggtggggagaagagaagaatggcctcttctctcctcttctctctctccttgttccc

SEQ ID NO: 56631 - DNA, 429 bp, Oryza sativa
  Clone ID: PAT_MRT4530_58522C.1
atggagtattccaagggtatcaaatccaagggaacgtgtgtggctctggcaacccgttgttcccagatgtcgctctactacgtacccggacagggaggacttaattatgacggttgtgagaaggggaaatgtccgaactgctccgcaaccgtcattgggagaacatctagagcgtccacgccaaaccctaggatcaaccgcgatcaggggggttcggccgaacctaggctgggccctcctggcctggccttcgtgtcattcttggccaccgatctacgtgtggttggacaagagaagtttgtgaaggccggatcgcgcctccgcaaggaaagagatacccttagtggaaggaggagtgcatttgtccaacctcatgaggatagggttgaaaaagacccggctctttgcgagcccctcaacggagactag

SEQ ID NO: 56632 - DNA, 453 bp, Oryza sativa
  Clone ID: PAT_MRT4530_58523C.1
ctaccagttttccgcgaccaccacagtcccctgcctcttcgtcgacatcgcctccgccatcttcaacctttccgtccactgggctgctcgtcggcaacaagcacccgtcgccggcatcctctccatctgccgattggaggtcgtgtggcgccggtagtcaacgcgcacagcgacgcgcgggggcacagtcacggccgaggcggaggtggagaaggccgaggtgtagggggcagtattggcggcggtgaggctccccaccggttcgccctccccgtcacgctcgccatagctcgtcgccggccactcgctacccagctccgacctccacctccgcgtcttgcgcttccgcccacggccgtccgctgctactcgtgtatccggcttcaacgggtggcggcaggaagcccagataaacggatgactccttcgagccaccgtgcagcggccatccat

SEQ ID NO: 56633 - DNA, 309 bp, Oryza sativa
  Clone ID: PAT_MRT4530_58524C.1
atggctggcgctggttccatctattcatgggggctccgcctccgcgtccgggatcattcaacacggcgagcggccggaacagccggatcattcgacgtctccgggtggcgtttcttggcgctggggaacgcggcggtgttcgtcggcttcgattggcaccgcgtcggcatccggctaaaatgccggagttcggtggcctcaccggcttcaacttgttcgacgcagtgggcgtgcccggagcgccgccgcttcttctgtgcccgtgaccactacacgttctctgcaaatgtggacgcggcaaggccgtga

SEQ ID NO: 56634 - DNA, 201 bp, Oryza sativa
  Clone ID: PAT_MRT4530_58525C.1
atgggggttcctaggcatccgagtaagagaaaagttttagctataattaccccatctccaccatatatgcacccccctcatcccaacaatgtgtacccccaagcaaaccatcaggccgagcaaagcactgttaactacttcacggtgaaacagaatgcactcggtggccagccgcagcctattaatcgtagcagatgttga

SEQ ID NO: 56635 - DNA, 387 bp, Oryza sativa
  Clone ID: PAT_MRT4530_58526C.1
atgaagacgggtgtcgatggagcttggttggtggaagacacaccagagcatggatcggaccctggcgctgattgggccacgtggcaaaacctgaacgcaagtttgcgtatggtaaaatcacgccacgtgtccagtataccattccagtgcactgccaatctggtgcgctgttccagcgtcgcacgggcgcacggccgctgcctcccctccgcctactgccaccggccaccgctgcatccttctcctaatctcgtggtcatggttgacagcagctccaaccatgctgacaggtgcacacgtcttctagaacatctttgctcaaagccagggcgcaaggcatttctggcatctgattttctccttaaaaatttgattaaacctggttag

SEQ ID NO: 56636 - DNA, 299 bp, Oryza sativa
  Clone ID: PAT_MRT4530_58527C.1
aaggccctaggatacacatccatttggtaccctttgaataaaaatatatagccggggctcccaaatatttaattcacatatgcctaacccaacaacatatagtcttagcagatcccactcttacataaagtcagagggggatcaggtgaaacaaaaacaaaagcagagcacggccggtaaaatcaaaagacggtgaacaaactgggaacacacaaaacaaggtgggggacattatcgaattagagatggacaataaaacagggttttatattgacgattctgttaatttgccaccagac

SEQ ID NO: 56637 - DNA, 338 bp, Oryza sativa
  Clone ID: PAT_MRT4530_58528C.1
gctgggtttttctaatgcaaaaatctacaaatgtgaggggggggagatgttaaagaccaatgtgctacaaggcctacggaagcggaaaagaagatagccctctatgcgatgcgcctggatccgaaaacactagaacgaaactcccgagacatgcttcttttgatgactgcccggggcaccacattcttatggctacaacgcttaatggagctgctaacatgggcggagctcttcatttgagcgcagccaacgaaagttgtccacagacccagacatcagagcatcttgctgctgatgaaatgatgcgtcagcaacatataatcaatctgcagaacaag

SEQ ID NO: 56638 - DNA, 438 bp, Oryza sativa
  Clone ID: PAT_MRT4530_58529C.1
atggcgccaagagggcatgacatgaacttgggcactgcactgcaactactgcaagagagtactgcaagtgcaaggcagcttaagcttagctttgctttgcttgctcatggtttccagctcagcttgagagacatccgaggtaatatgtttacacaagtgtacctagtgaaatctgcactctctgcagatgcagcagaaacagcagcaagctatcgaatggccatgagaggacgaagaggtgagaaagaagcacaggtgcagctgcagcagctagcggctagcggcgccatgaatgatgagatagtggcagagtgtggcagtgcatgcaggcaggcggtgggcggcgcaggggagtcgcctggtccccggcttggtcgtgtccatgtctgcctaattaaccaccccggccggccatccacgccggataaacctcgatga

SEQ ID NO: 56639 - DNA, 6311 bp, Oryza sativa
  Clone ID: PAT_MRT4530_5852C.1
tacatagaatttacgtaattgatcaatgttccaggaatttgccaactcgcgaccatcgccgtctgcgattttgaatgcgcctggccgcagaacttgtgtgatcatgtacggtccttcctatttgggtgagagcttgttgcgccctgcttggctttgaacccgtcggaggacgtagtcgccgatcgaaagcgtgcgtgctcggatgcgcttctcgtggtaacggagaagggcttgttggtagctggctgctcgaacggcaactcgttcgcgatgtttctcgagtagattcacatcgttgtatcgctgctcctcctgatcctcatcggaatacttctgtactcgtgtacttttatgtcatagctcggtggggagcatggcctctgagccgtacacgaggaagaagggtgtctccttgttggacgttgtcggtgtggtcgcacggcccatagtagggtcttgattccttgtagtactatgccgtttgccctctcgacttgtccattgctctgagggtgagaaaccgaggcgaagcagatcttgactcccagcctgatgcagtaatcctagaaatcggcactgatgaactgggagccgttgtctgttatgatacggtggggcaattcgaatctgcagaatatccctttgataaatttgatggcgttgtcggccttactttcccccgtgggtgtcgcttcaatccacttggtgaatttgtcgatcgccacgaataggaacctgtagccgccctgtcctcgtgggaatggcccgagtatatctagcccccagcacgagaacggccaagtgagagggatagtctagagtgcttgcgctggcagctttatgtgtttacatgtcacaggcatctttgagggcggttggccagaaaaacccttgtcggaaaacttttccgactaatgtccgactggcggcatgtgacccatagatcccttcatgtatgtcgaggaggaggtgtctgccgtcgtcggatgagacgcattttaggagtaccccgtttggtgccttcttatatagatcggcttctgcgtcgtcctcgggcaactcttcgctgcctatgaatttaatgagtggggtgcgccagtcgtttgtggtctcgatatcggcaacggcgcgctctgcctctgtagcccccgagccgatgttgggggcgactgggctatcttcgccggttgcctctttcactgatggcctcgtcaggacgtccagaaaggtgccaggttcaagtggttctcgtctggatgcatgtcgtgctagatcatccgattcgatgttgtctttgcggtatacatgtcggacctcgatcccatcgaaccttttttccagcttcttgacttctgcgagatacttggataactcagggctagaggacttgtaatctttatgcacctgatttgcgactagttcggagtcccctttcacgatcagtcgcctgactccaagtgcagctgcagctcttatcccggcgagtagtccttcgtattcggttatgttattggttgccctgaagttgaggtgaattgcatgcttgaattgatctcccgaaggtgatgtcaagatgaatcctgcccctgctccctggctgttgagtgcaccgtcaaacgccattgtctgacctgttatcaggcatggtcctatcggctacgaaatcggcgagtacctgggacttgatggctgttcgtggcacgaagtggatatcaaattggcttagctcgactacccatttcgcaatgcggcctacaacgtctttgtttctcacgacttcaccgagagggaaggaggagacaactgtaaccctgtaggcttggaagtagtggcgtagatttcttgatgtcatgattaccatgtagagcagtttttggatctgtggatatcttgtttttgcatcgtggagagcttcgctgacatagtagattggtcattgcaccttctctctctcgacaacaatgacagtgctaacggaatatggcgtggcggcaatatagagaaataattcttcattaggttggggagcaacaagtagaggtggatttgataggtagcgcttgagtgcaatgaatgcctcttcggcttcctgtgtccatacaaatttgtcttgctttttcagcagagcgaagaaaggttgtcctcgctctcccatcctagcgacgaacctacttagtgccgccatgcatccggttagcttctgtacttccttgagtcttgttggcgacttcatgttctcaattgccttgatcttctcaggatttgcttctattcctctgccagagacgaggaagccgagtagcttgcccgatggtactccgaacgtgcatttctctggattgagcatgaggcgatatcgtcggaggttgtcgaacgtttcccgcagatcgtctatcaatgagtcgcttgtcttggtcttgacaacaatgtcatcgatgtaggcctcgacattgtttccgagatggtcgctaagtgcaccttggaccgtgcgctggaaagtgtttcctgcggttattagtccgaacggcatcttaatgtagcagaataccccgaacggcgtgttgaatgctgtcttctcctcgtcctctttcgccatgctgatttggtggtaaccggagtaagcgttgagaaagctcaactcgcaaccggctgttgagtccaccagttggtctatccgaggaagaggaaagtgatccttgggacacgccttgttgaggtcagtgaaatcgacacacattctccatttcctgttggccttccgcaccatgactgggttggctagccactctggatggcgtacctctctgatgaaacaggctttgagaagcttgtcgagctcttctcgtatggcttgttttcgatctggtgcaaatctccacagtttttgctttactggcttggcatcgggtcgcaccatgagtttgtgctcaatcacctccctgggtaccctcggcatgtcggacggctgccaagcgaacacgtcagcattgtcgcggaggaaggtgatgagcgcgagttcggtcttgtcggggttggcactggagagtggaacgatcttgattgcgtcgtccggcttcgacgtcttgtttgttttgctcactttcttgggtggttcagctgtggcgggtgggctgggcatatgctcgaccatgtcgaggctccgcttgtcgcattgtactgccagcttagcgttcccttgaatagtgattgttcccttcggtcctggcatcttgagcacttgatacgcgtagtgagatgcggccatgaacttcgcgagtgcagttctcccaatgatggcattgtatgctgtatagaatttagcgacatcaaaggtgatctgttccgttcggaagttgtttgcttggccgaaagtcacaggcaacgtaattttgcccaatggtttggacgatgactgaagagtgattccatggaaggattgatcagtgggtgtcaactcgcttcgtgggatccccatcgcgtccaaggcgctggcgaagagaaggttgattgagctgccgccgtcgatcaggactcgtgcgaccttgatattacgaatagtgggttcgaccacgatcgaatatcgccgccgtggaacctccgaagatgtgtgagacatggagatcggaatctgggtatgctgagtccgattctcgagtaggcgccttagcgtccttctcaaccatgcgtactcgtttgccttctttcgatgccatatgttttgcgagcgactttttgaaaatgaggcaatcttctagagaatgtatgtccgacttgtgtatagggtaccatgcttttttcgtgtcgctgccttgtgggtctgggcgcttgggagggtccgcatattctgttgcgagaacttctgattgagctttcctttttccactcttgcgatttttcttcttgcttgactcaggtgcgtccttggctggtttcttctctccttcggtcttcggtttgtcgttcttgcgtctcagtgcgtcatccgcatgagcgcatcgatcgacaatttcgaataatctccgagtagttgtgatgcgcctcgttgccaactcctgagtagtatagcgatctctgacaccggatttgaaagcgcaaattacagaagcgtcggtgatctcggggattatgtttctttactcgttaaagcgccgaacataatccctcaaggattcgcccggattctgtgtcaacgcatgtaggtcatcttcgatcgcgtggcgcttgtaagttccttggaagttggctacgaactgctgccacaagtctgcccacgaagagatcgagtaggggggaagatgcatcagccatgaacgtgcagagcctttcaatgcggtcggcaagtaattcaccaacgcgttgtcgtccgctccggcagcgtagagtactgtggagtaaacctgaaggaactcttctgggtcggtgctcccatcgtatttctctattgctccaggtcggaatctttcaggccatcggacatcccgaagtgaacgaccgaaagctctacacccagcgctgggggcggtgggttgtcggcaatcatacgtccttcgtggatgtctatctgatgatggagatgacgaggatgatgacgatgacgatgggtcgcttggttccggcaaacgattacgaggacgtcggccgggttctcgagaatcttgtcgtcgtctcccgttgttgtctcggcgccgatctccatcatcgtcgtcattatggcgacgtcctcgaccagtatcgccctgcacccgtcgttcgcgatcgtcgtgatcgtggcggttatcacggtctcggtcttcgatcatgacgccgtgaagagacatgacgccgggaatggttctcgttgtctcgtgtgcgtcgtgtgtctcggtggccattcaggtgatcgcggagatcgccggtgccgcgaggtggaggggtgactcgatgaggcgattcccgccgttcagggttttcaccattagcattgccaattggtggctattctgggtgcgctgcggcagtggcctcttcgaacgcgttgctgaggttggtcactgattctcatagtcgttctgtccaacgtgcgagatcgtcgttcagaacgggatcgtatggggtttccctcagtattgcgttgacggctctgatgagctgggccggagtagtcacttgattctccgcttccgcattggtgcgcgctgacgtgccgacatcgtcgatagccaatacctcacgcggcgtactcgttgtcgatgatccatagtctttaagcaggtgcaagactaatggttcgtggggatcgatgtcgattaccccaacaaatcgatctgaaatcggcgtcgctacttgttccttgtctttatccctgatggggatgcgtgactgctggaccttaggaggtggcatcttcatggcgctgagaaataccttgcagctcgagaggccgtgattctttgtcttgtgaataggacaatggacatcacgagttggagaggtacgctgaattccacgctctttgcaggcacgaatttcagcatgaacgttgagaaagacccagcaggcttgcagggtgtgtttcctggttttgtggataggacaccaggaccttgtcacctcggaagtaatcctcgtcggcttgtgattcatgttggaaagacaaggcttggccgcactaggatccttctcaggctcggatgttgtcgacgttccgatctccgcttcggcgggtggattcttcgacatagagtcgccccgggttgttgccactgcgttctcgtttccggccattggcggaccagctgagatcggcactgtggtgtaaaccggaaagacgatttcaccgacttgagtccacaccagtgttgttgaagtaggaactccttggttgaggttggtgttgacgctgttgtcggtgaagctggatgtcatggtagtagaaccttgagcaccaagtccccctacctggcgcgccactgtcgacgggggatacccgtagaccggatatagagggtattggggtacgctggtacgaggatcgacgagatcgtaatcaaacaggttcgattagatctcccggcgacttggctcctgtaggcttcaactccgtaggctgtggtggatgtgttggctatgagattcgatgccttaggtcctcccggggggtcccttttatatcgcaggtcaactggtctcccagtaggactcggagacatcggacccggcacgatataatgacgacccagttctgtccgagtaggactccttccatctgtgaactcgataatgaatttccttaacatatgccgaaaacgtctgtatacgcgcaagtgtaccat

SEQ ID NO: 56640 - DNA, 593 bp, Oryza sativa
  Clone ID: PAT_MRT4530_58530C.1
tggttcaccacagggccctactcagcgctcggactcacaaggtggctggaaccccagcgacgcgcaagaagctgtgcgaccacaccctgagagcgccccattcaaggtcgctcggacacgccggcgtcacgacggagatggtcagaactgcactgaaccaggacctcatcatggaacggggcctgcgaagaacctggcgagaatgtgctcacgtgggcctcgggcgtcgccggcagcgccccggcggactcgaacggcgaacgagaatcgcgcaccgactctccccacggacgtaacgctgagcgtgctaccttgaagacgccctgagatcataccatatggagtagcattaagtgtaatgataccagtatatggctgagagacgaatgaacccggtggtttagctcttgttgtagtgaatttgtagctatatcccattatatcgcgctaataagatgttcgatagttgtactcttctgggacttgctttaagtatcttatcggaccctgaactgtgtacgctgtgtggcttatttccaataatatccaataataaagggtttattatattattataaaataaaaaaaaaaaa

SEQ ID NO: 56641 - DNA, 3501 bp, Oryza sativa
  Clone ID: PAT_MRT4530_58531C.1
atggcggcgcgggcgcgggagacgctgaggaagagcgcgtcgtcgtcgtcgtcgtcgccgtacgcgcgtagcaccgacgacggccccgtcgcctccgcctcgtgcgacgcgcgcctcgagcgctgctgccgcgaggttggcgccgcggtggcggtggtggaggagccggagcgggttgtttcggggggcggggcgttgccggagtttgttggtgagggagggggcgaggggatctaccgggtgccgctgcgcaccacgctgcacccgtggctccctccgccgctcgatgagcggccccaaccaaggcgtgagacgcaggtggagtccttcctacggacgctggcctgcgagccgcgtcaagggctgctctgagctcgctcggagtacggattccgcgtgcgggggctcgacgacgtgttagacgccgccggtggcggggcgcgcctcggcgactggtagagcgcgcccctcagggagtctatgcgcgttccgcccgtgctctgcgtctaggcggaaggctcgattgcggtggtgtggacgtgctacaaggattggaggatcatgacgtgtcgaaatgacctcgccgccggcagcgaagacaatgtcgcgatggtgataagggaggccctgacgtggcaggcacacagccgcacgccagtgctctccatggtcatcacgtcttatggtgaaatatggtcaggatccgaagggggtgttataaaggcatggccctgggacgtcattgctaagtccctctcactaatgccagaagaaaaacatgtggctgctttacggattgaaaggtcatatattgaccttaggaacaatgcagcagctggcaacatatcttcgttccccgctgctgatgtgaaacacatgcttgctgaccattcccgggcaaaagtttggtgtttaactagcatggcatttgctgtttgggatgctcggaccagggaactgctaaaagtgtttggcatggacggccaaattgagtcagctcggttagaggcacctgtgatgccagagcaatttatagaggaagaaatcaaagcaaaacccgtgaagaaggataaaccacaaagctctttcaattttttccagaaatcaaggaatgccctgatgggagcagctggtgcagtacgcagagttgctacaaaagggacatttgttgaagataatcgccgaacagaagcagtggttcaggcaatgaatggaacggtttggtcaggttgcacagatggtttgatcattatgtgggatggaaatgggaaccgactgcaagaattccagcatcattgttcttctgttcagtgcatgaaggcacttggagaaagggtgtgggtgggctatgccagtggcattattcaagtcatggatgtggaaggtaaccttctggcagaatggactgggcatagctgtccggtcatacagatggcgattggtggttcttatgtctttactcttgctcatcatggtggaattagaggatggcctctagcttcccctggccctctggatgatattctgcgaactgaattgtcaaacagggagttgtcgtatagaaggctagtgaacattaaaatgcttgttgggacttggaatgttggccaggagaaagcatcttatgaatcactcatgtcatggttgggtcgtgcattttttgatgttgacttggtggtggttggtctacaagaggtcgagatgggtgctggtgttcttgccatggctgcagccaaagaaagtgtagggcttgagggtagtgccaatggtcagtggtggatagacaatattggcaggacccttgatgaggggatatccttccaccgagttggttcaaggcagctggctggattacttattgctgcatgggcaaggaaggaccttaagccacatgttggtgatgttgatgctgctgcagtaccatgtggctttgggcgtgctattggcaacaagggtggtgtagggttaagaattagagtctatgatcgcaggatatgttttgtgaacaatcattttgctgcacatctagaaaatgttagccgtcgtaatgctgattttgatcatatctatcgaacgatgacttttaacaaacctcatggatctgcagcttctgctacatctgttcaattgcataaaaccgtgaatgccaatggaaatcaggtcgatgaagatatacctgagatggcagaagctgatatggttgtctttcttggtgatttcaactaccgactttacggtatcacctatgatgaagcaagggacatggtctctcaaaggagctttgactggcttaaagaaagggatcaacttcaagcagaaatgagggcaggaaaggttttccaaggaatgcgtgaaggtttgatcagatttcctccgacttacaaattccaaagacacctaccaggtcttgcaggatatgactcgggtgagaagaagagaatacctgcttggtgcgacagaatactgtatcgagatagccgtgatgtattaacagcagagtgctcattagaatgccctgttgttgctaaaattacatcgtatgaagcttgcatgggtgtcacagatagtgatcataaaccagtgaggtgtgcatttagtgttgatattgcaagagtggatgagtttacaagaagacaggaatatggaaaaatactccaatctgacaaaagattacacagtttgcttcgagagtcccattttgttccagacactataatcagcacaaacaatataattttggaaaaccaagaacatgttgtcctccggataacaaatgattgtcaaagaaacaaggctgcttttgaaatcctgtgtgaaagccagtcaatcagcaagcaggatggaactaaatccgagtttcctccaagggcatcctttgggttgccgctttggcttgaggttgaaccatcagttggtctcattgaacctgggcaaacaatggaagttaccgtgcaccatgaagactattacacccaagaagtatttgtcaatggagtactgcagaactgttggtgcgaagtcaccagagataaggaggccgttcttttggtcaatgtaacaggtagcacctcaactgaaaccattacacacaggatcaatgtcaggcattgctgctcaacgatttctgcatccccgcccatcaatccaccgtctatcacaaccccatccgttgatgttctatcgggtgaagcatctacaagaagttcaaagaagaatccgttgaattatttgcaacgttctgactttaagccattcggcagctcagagaggacacatggtgatacaaaatattctttacaggttgaatacaaagaaagttacttcgagtcttttcctttcagaagttgttgcctaatacagctcaactctccttctgacctgcaacttgttccagagatggatgcagttctacctactcaactgaaggagaccacccaaaaagttctggttgagctaagatggaagtttgagccaagctcaagcaaaactgactttgcatga

SEQ ID NO: 56642 - DNA, 1731 bp, Oryza sativa
  Clone ID: PAT_MRT4530_58532C.1
atcaggcactttgctcacttcaactccatgataaaattcaccgtgcaccgccccggttggtaggattcaccgtggccagtgtggagagagggatcggaagagttgttcggaaaaggccggctgaaaagctggccgtgcaccggtcggacggtcacgggtcaagcatgaaaagctttgatggagacggcgccgccttcataatctagtgttgcaaaaggtagatcatgctagaagttggtactgtcatctttgccgtggtgcgtggtcttacgtcccaagaaatccctcgttctgcctcccctcctctgagaggaatcgattagtataggcatctttcctgtgcgaataaagacaaccacaccgtacgtcagagttttaatgcaaaaatgggtgaaggtcagttgggagagctgccactgttagaattgaacatcttaactttagatgtttcttgcatgctgaattcgttgacagagcggagtatattgaaactgaaactttttggatatacatcaggtacctttggtcaggtattggaatgttgggatagggaaaggaaagaaatggtggccattaagatcatcagaggcattaagaagtacagggatgctgcaatgatagaaattggcatgctcgagcagcttggtaaatatgaaaaaagtagatccaggtttcatcccgttctccaaaggaaggttcctatttcaagcagctgcccaagtccagtgctattaaggtgattgattttggcagcacaacatatgaccagcaggatcagacctatgtggtgtctactaggcattatcgagctccagaagttatcttgggtatttgtcttgcctagtgcaaagccttccctgtcagcgtgattatggtttatgtttacgattggaatggctgttctgttcaggacttggatggagttacccctgtgatatctggagtgttggttgtatactggttgagctatgcacggtatgttgttgggtgcaatatttggtttgtattctatcacaacaacagcaggatttttgagttacgaaagctaccgcagggagaagcattgtttcagacccatgaaaacttggagcatcttgctatgatggagagggtatttggtcctttgccatgtcacatgctcaaaagggcagagtatgttgctgtccttgatccgtctcattgtcagtaagcattcacagcattggggattagtaggtattgtgtgctcatttgttgcttgtatgtagccggcattccgagaaatatgtcagaaaaggccgtttaaactggcctgaaggttgtgcgtcacgggatagcatgaaagctgttatgaagctgccacgtcttcagaatctggtgatgcaaaatgtagatcattctgggggcgagttcattgaccttttgcaaggtctgttaaggtatgatccagctagccgcctaacagcacaagaggcgcttaggcatccattcttgagggagcagtccgagcgaagaagatgacgaaaatcgtatgtcgattttcatctgacacctctaacttgtattgtctgagctcgaaaagtctattcacaaatcgtgaagtttgtatttctgtttgtaacctcagcaagcatttgtatatagaagacctgtatttacaagttgatctgtatcagtctgaatcataaattaagtgttttgaagatgttttgcttggctaacagttttggccacaaaaaaaaaaaagatgcc

SEQ ID NO: 56643 - DNA, 1269 bp, Oryza sativa
  Clone ID: PAT_MRT4530_58533C.1
atggccatgggcacgcggcgagctaatgccgcggcgcgtcgtcccctagctatctcggttcttcttcccggtgcggcacaacgtactctgttccgagtaccagttcacactttgtcagagcatatcaggcctcctgggatctttagcaccgctatgtttatttacattattatctcaaaaaagatgaattcgcaatggatgtacaccgtggaccgatggtcgaaggaatttattgatagcgtgtattattttttgagtgtagccaatgcccacaagcctaagggttttatatgttatccatgcaaaaagtgcaaaaaccagaaagagtattctacatcaagaactcttcatatccacttgttgaagttgggattcatgcctagctataattgttggacctcgcacagagagttaggggttgtaatggaagaagttgatgaagaagacgacaacattccagactgtgctcaatacgatggatttgtaggcaaggtagacagagttgtcgaagaaaacgttgtagcggatgatcttggtcaaatgttgtgcgacgtaaaaatggattgcgaaaatgaaaaggagatccaaaaattggagtggatgttagcggaccacaaggcgtccttatactcaggttgtgaacaggggcacaaaaagttgagtaccacgctggaatttttgcattggaaggcaaaaaatgaagtccaggagatacacgcatgtttgaacgattgtatcctgtatcgtggtgaggagtacgagaatctagaagcatgcccggtttgtaatgcactacgatacaagattataggagatgacccaggcgatgttgacggacagcctttgaagaagaaaatttctgctaagtttgtaaccgttaatgattgttctggacttagcaacctatccgaacaatcaaacaagaggtataaggcttgcacccactttttggatgatacttacagtaagtacttgaagcattgtaggaaggttgtgtacatgagccatcgtcgatttccagttgcaagccaccctgtacgaaagaaagacaaacattttgaagagaaggtagaccaccgtacaaagcctaaatatcgtaacggaaaaaccgtgtttgttatggtgaaagatttgaaggttgtatttggaaaaggaccaggcaaccatctgatagcaagtgtttatgggaagttgaaagatacgttcaaaggacgtaatgatctcaagtatatgaaacaacacgatggccttcatccagaaccaaagtag

SEQ ID NO: 56644 - DNA, 410 bp, Oryza sativa
  Clone ID: PAT_MRT4530_58534C.1
cttctacacgttcttttttttttttctgtgcgttagctccgtcttttttccgtgggggtttcgttatttattatattttcatactccgtcatcgtcgtttgttctatacccattcattcatccacccagcgaccgaccgaccgagcagggtcgccgacgatacgaaaggctgcttcctaaccacattcatccaaccatccactcctgagcattgcgtcaaaggcattgggctatatcctatagaatatgacgatcctcggctcatatagaaggactgaagacccacatgagggaaaatgagtggtgcacccaaaacaaagcatgaggagggaagaaactccactccgacaaaacggtcgggggatgactgcacctagtactcaagcccttctgggaaaaaaaagaaaggg

SEQ ID NO: 56645 - DNA, 286 bp, Oryza sativa
  Clone ID: PAT_MRT4530_58535C.1
ttagttgaacacctggttggtgtcgccccactgcctccgccaccgcacgcgcatggccctgcctgctgccgcagccgacgctactctcgcacctcgccctgccgccgccgaccacactccaccgcccacgtgccgtctcccgccaccgttgccgctcgtggccctcgccgccactccaccaacacctgccaccaccgcctgccgctgccgacaccaacggcgccgccggtgtcaagggatgaagatggggatgagcgagaacgggagatggggtaggaaggggtag

SEQ ID NO: 56646 - DNA, 500 bp, Oryza sativa
  unsure (1)..(500): unsure at all n locations
  Clone ID: PAT_MRT4530_58536C.1
ccggcctgcctgccttctggagcattccccctttcctcactccccttccctttctgaggtgaactgtgcttgcggcgcgatcgccaaatgattatcaaattccagtccgcgcacgacacctattcgacgaatggcctccgcgggcgtggctcggacaccatgttcaagagggacgcccccagcactgacatgatcagcggcctccccgaaggagttcttcaccgcatcatgtccttcctcaccttgcgcgaggcagtgcagacgtgcgtgctctcgcggcggtggcgcaacctctggctctccatgcctctcatcaacgcggactacaagcagttcttcgagatgacggacactaaagcgggatacgacgaggcgttggcggtggcggtgccgatgttcaagagatttgtgaaccggctgctggaactccgcgaccctgttgcctctattgacaagttntggctctgggcctccatatntgatgacaacgaggatgaccc

SEQ ID NO: 56647 - DNA, 446 bp, Oryza sativa
  Clone ID: PAT_MRT4530_58537C.1
gctttcttcgcccttgtcgaccaaccctcctctggggcggttctcataacggggcggggggtacgccccctcctcctgctcctgctgctgcttctcgtgtgggggcatggccccgagcgaggcggccgcagctcatgatgctgagatagacccggacttctcgggcgggggcggtgggggccccacctttgagttcgccttcaactcagtcaacttctcccaccgggtgctcccgatcgaggtctacccgggggacgaccacgacaacgacgaccacgcgcccggattcacactggacagtggggcacactcgctatatgattgggcgcgccaccgcaagcgccgtcgggaggaagtcctcaaggagaaagagtctgaagcagttatgccagaccatataaattgcaaagtagaaccacaagaatgtgatgcatatgaagaaaatc

SEQ ID NO: 56648 - DNA, 1920 bp, Oryza sativa
  Clone ID: PAT_MRT4530_58538C.1
atggcgttcggcgtctccggccccggctccggcgatggcgtggcggcggcggcgcggttcggcgcgcacgtggtgcgggggcggtggttcatgttcttcgcgtcgatcctgatcatggcggcggcgggcggcacgtacatcttcggcatctactccaaggcgatcaagacctcgctgggctacgaccagcagacgctcaacacgctcagcttcttcaaggacgtcggcgccaacgtcggcgtcctcccgggcctcatcaacgaggtcacgccgccgtccgtcgtgctcgccgccggcgccgccatgaacctcgccggctacctcatgatctacctcgccgtgtcggggcgcacgccgcggccccccgtgtggctcatgtgcctctacatcgccgtcggcgccaactcccagtcgttcgccaacaccggcgcgctcgtcaccgccgtcaagaacttcccggaggaccgcggcgtcgtgctggggctgctcaagggcttcgtcggcctcagcggcgccatcttcacgcagctctaccgcgccatctacggcgccgacgacgacggcgcgtcgctcgtgctgctcatggcgtggctccccgccgccatctcgctgctcttcatccccaccatccgcatcatgccgcgcgacgccgccgccgcgggcgcggacgcgcggaggcggcgggagcgcaaggcgttcttctacttcctctacgcctccatcgtcctcgccgtctacctcctcgtcatgaacgtcgtcgagctcgaggtggtcggcttccccaagccggcgtactacgtcaccgccaccgtcctcctcctcctcatcttcttccccctcgtcatcgtcgtcaagcaagaactcaacacctacctccagcctccgccgccgccgacgacgacgagctccaccgtcgacgagaagaaggagcacgacggcggcggcggcgaggacgacaagccggtggcgtgcatgcaggacgtgttcaggccgccggcgaggggggaggactacacgatactgcaggcgctgttcagcgtggacatggcggtgctgttcgtggccaccatctgcggcatcggcggcacgctgacggcgatcgacaacatggggcagatcgggcagtcgctgggctacccgcagcggagcatctccaccttcgtctccctcgtcagcatctggaactacgccggccgcgtcgccgccgggttcggctcggagtacgtgctcgccgcgtacaagctgccgcggccgctggcgctcacggcggtgctcctcctcgccaccgccggccacctcctcatcgcgctcggcgtcggcaacggcctctacgcggcgtcggtgatcctcggcttctgcttcggcgcgcagtggccgctgctgttcgccatcatctccgaggtgttcggcctcaagtactactccacgctctacaacttcggcgccgtggcgagccccgtcggctcctacatcctcaacgtccgcgtcaccggccacctctacgaccgggaggcggagcgccagctggccgccgccggcggcggcgccgcggcgaggaggggaagcagggacctgacgtgcgccggggtgaggtgcttcagggtgtcgttcctcatcatcgccgccgtgacgctgctcggcgccgccgtgtcgctgctgctggcgtggcggacgaggaagttctaccgcggcgacctgtacggcaagttcagggaggtcgccatggcgggaggggaggaaggaggagcacggcaggtcaaggtcgacgacgaggccagcgggagtagcggcggcggcggcaatggcaccaccaaggccaattcaaggaggtacaaattcactttgtggatcaacatggtcaatccgacgtatgatagcggtagagtagctgaagctgaaacacaaatagaatacatgtga

SEQ ID NO: 56649 - DNA, 394 bp, Oryza sativa
  Clone ID: PAT_MRT4530_58539C.1
gttaaatattaacgatgatatataagcatatggacacttcgttttatgagatagctcagtagcatactccggtgacagcttatatagacatccagcatgcaagtgtattgagtgtacaatacatttattcggggggaacactcttaattagggccatgttattctagcttcacagcatggccagcgcctactgacgcaacaccaccatgggggcgccggcgcagaacgggtacacctgccacctgaggagggacctacgacctgtgattctggcgcgcgcgacattagccgggaacgtgtacgaccatctgtggacgatgccctaaaaggcaacgcggtacgcctccacagagaagtcgaacgcgcactgctccagcggatacagggtggggaa

SEQ ID NO: 56650 - DNA, 1825 bp, Oryza sativa
  Clone ID: PAT_MRT4530_5853C.1
atggagaggtcacggggagggaggaggaagaagaagaagattgaatgcagtggatgtaatgcactgaagaaaccagcttttgccgtagcggagcgaaggctgaagctggcccattgggctgtgcgcatggggatgcccgggggtgcgggggcggagctcccgcggagtagtaggccattcatgggccgtttgcgtgaggcccacgaacgtgaggtgtgggcccacagcccagcgagaccccgcgaagaagagctcaagggtttagtagccgcctcggcggcggcgcgcgcggggaagaaagcccagaaccctagcccctcccgccgccgacgagcagcggcgcgcgagaagaacggccggcgagatggggcgggacaaagcgcggaggctctccggcagccgccacttccggcagagggtggtgctggcgacgctgacgtcgaccgccatcaccatcgacgacatccgctccggcggcgccgcgccgggcctccgcccccacgagggacgaagctgaggtacaagccgggggtgatcgtcggcgggagggacctcgagcacgactgcggggtgcaccgggggatcggctacttccttgagccgcttatactgcttgggctcttcgccagggcgcccatctccattcggctcaaaggaattactaatgatacaaaggacccttctgtggatactttccgaatggttaccttgcatatgctcaaacaattcggtgttcctctggagggattggagttaaagattgaaagccggggagctcctcctcttggtggtggtgaagtgtttcttcgagttcccaacataaagagcacattaaaggcagctaactgggctgatgaaggtatggtcaagaggataagaggtgtatcattttcaactagagtatctccacaaattgaaaaccgcatcatttatgctgcacgtgggatcttcaatcgctttattccggatgttcatatattcactgatcatagatctggttctgctggtggcaggtcagcaggctatggcgtatctgtagttgctgagactaccacaggctgcctgctctctgcagatgctactgtaagttatcctaatgttgatgaaatgaatgaggaatctgagaatttggagctaacatctccagaggatcttggtgttcaagttgcatcgatgttgctagaagaagttgctcaagggggagttgttgactcagcacatcagggccttctgtttattctatgtgctctaagcccacctgatgtgtcaaaggttcgtgttggtcagttgacaccatacgctatcgaaacacttcgcaacatacgggatttccttgatgtcaagttcattatcaagcctgatccaaattcaaatactgttacattgaaatgtgttggtgctggagtgaagaatcttgctcggaagacttcgtgaacaacaggatgatgaatcccatcaaaggatggatgagtgcagcaagaacactgggtctcctgtaagctctgtttgtaactgcaaagcaacaagttgagaggtttcatttgctgcctgggctaaaattttgtcgaagtgcgtggtatatgtcataggtagatttgacccaagcattttatacctgctgggatttgtctgatcataccatcatgtcttgtcacacttttgtatctcctttatctaatacggcgatgccattgagattgggctttaagttaattgaaatactagtataatggagaaatattgctgtttagccacaaaaaaaaaaaaaaaaaaacctcgtgcaaaaaaaaaaaaaaaaaaaaaaaaaaaaaaaaccccgaggggg

SEQ ID NO: 56651 - DNA, 1142 bp, Oryza sativa
  Clone ID: PAT_MRT4530_58540C.1
ctgcctcatcttccgtcgacaagcctcttcgccttcacggctggcatattgcgccgctgctgatggacatcatcgtcttcactgaccggccgcctcgtccactgtcaactagtgtcctcgcctacacggttggttggtcacaccaccgttgttgggcatctacaccttcatcgctggccgccgtcatcactgccgaccggtttcttcgcctccacggttggtgtaatccgctgccgttgttgatggcgaccatgtcttcacttccggcggctgccatcgccgccgactggtgtttttattgggattgatggacgactttctccacacatcggctacatctgctattaccgggggaacactaaaaagctaagatctagatatacatatgcataatagggattcatggctttagcattatcccttacgctttaggaatggatcagtcataacataaccgcgggttggcctcggtcgccgcggattagtgttttggcctagacggtggaatggtcacaccaccgttgtgggcgaatacatctttaccgaccagctgcatttggtaccaccgaatggtgtttccgcctatacggttggatggtcacaccaccgttgttgggcgtctacatcttcaccgaccggctgccttcgccgccgccgaccggtgtttccgcctaaacaattagatggccacaccaccgttgatgggcatcttcatcatcaccgccggcttgcctccgtcgccgccgactggtgttttcgcctatatggttggatggtcacaccaccgttgttgggcatctacatcttcaccgaccggctgccttcgccgccgccgactggtgtttccgcctatacggttggttgtcacaccaccgttgttgggcgtctacatcttcaccgatcggctgccttcgccgccgccgacgtgtgtttcttcctatatggttggttggtcatactaccgttgatggccatcttcatcatcactgccggcttgcctccgtcgccgccgactggtgtttccacctatacggttggttcgtcacaccaccattgatgggcatcttcaacatcactatcggcttgcctccgtcgctgcaaactggtgtctttgcctacatggttggttggtcataccacca

SEQ ID NO: 56652 - DNA, 1353 bp, Oryza sativa
  Clone ID: PAT_MRT4530_58541C.1
atggcgaattacttccccatggctcttaagggtcaggcgcgcggctggctgatgactcagccccccgactccatccactcctgggaagacctgtgccagcagttcatcacgaacttccagggcacatatccccgcccaggagaggaggcggacctgcatgctgtgcagcggaaggacgacgagtccctccgctcgtacatacagtgcttctgccaggtccgcaatactattctgtgcatttcggcccacgaggtcgtttatgcgttttggaacggcgtgcggcacaaccgcatgctagagaagattgcctccaagaagctcaagaccaccgccgagctcttcgagctggcggacaaggtggcttggaaggaggaggcgtgggcctggaactcccccggcaccggcgcggtggctacggctgcccctgagtccattccccgctctaagcggcgagagaggaggggggaaagaaagccggcccgctccgacgacgtgggccacatccgtgcggccgaagggccctcatgggccacgcgcaaggagaaagccgccgacaacaagccatgctccaccaccccctccggcgagggtcggtcggcggataagtggtgctcggtgcacaacacctatcggcacagcctcgccgactgccgctcggttaagaacttggccgagcggttccggaaggccgatgagaagaagcggcagagtcgatgggagggcaaagcccccgcgacccctgctaatgactggcgtgagcttctggccaccgtcccaactcacgagccggcacggaaggcgcactggtcggaggtgaaactcaccttcgaccagagcgaccatccgacggtgctcgctcggggaggaaagttggccctcgtggtctccccgaccatccacaacgtcaagatgaagcgtgtcttggtcgacgggggggccagcctcagcatcatctccccggctgcctttgacgcgcttaaagccccgggaatgaagctccagccgtcactgccgattatcagcgtgaccccgggacacacgtggcctctgggtcacgttgagctctcggtgacctttggcgactccaccaacttccgcaccgagcggatcgacttcgacgtggtggacctcaatctaccctacaatgcggtcctgggcaggcctgcgttggtgaagttcatggctgccacccactacgcctacctccagatgaagatgtcgggccccagcgtccccatcaccgtctttggcgatgtcaaggtcgtcctggcctgcgcggagcagcgcgtcgacaacttggcggcagccaccgagccgcaggccccggaggcatccgcatcccgtgcctcctag

SEQ ID NO: 56653 - DNA, 553 bp, Oryza sativa
  Clone ID: PAT_MRT4530_58542C.1
cgccatggctgataatgacatattctacactgccagctgcctcatcttccgtcgacaagcctcttcgccttcacggttggcatattgcgccgctgctgatggacatcatcgtcttcactgaccggccgcctcgtccactgtcaactagtgtcctcgcctacacggttggttggtcacaccaccgttgttgggcatctacaccttcatcgctggccgccgtcatcactgccgaccggtttcttcgcctccacggttggtgtaatccgctgccgttgttgatggcgaccatgtcttcacttccggcggctgccatcgccgccgactggtgtttttattgggattgatggacgactttctccacacatcggctacatctgctattaccgggggaacactaaaaagctaagtcaccatttatttttcttctttatttgatatttttttccgctgcctcactacaccaattggatctagatatacatatgcataatagggattcatggctttaagcttatcccctacgctttaggaatggatcagtcataacataacc

SEQ ID NO: 56654 - DNA, 747 bp, Oryza sativa
  Clone ID: PAT_MRT4530_58543C.1
atggaggcgtccgccgccgagggcggagccgcggcggcggcgcggacgctgcggtgggcggggcgcgcggggcacctcgggggattcccgcgcgccgcggtgatcgccgccgtcggggcggtcgccaaggcgtacgcgtcgctgctcaacaccaccaccgtccacaacgccgatgccctcctccgcctcgtctcctcgcggccccccggcacgccgctcctcaccgtcagcaaccacatgtcaacgatggatgacccacttatgtggggattcaagggttttccaactacagatgccaaacttcaaagatgggtgttgacagcagaggacatctgcttcaggaatgtgttcatgtcttacatatttcgacttgggaaatgtgtgccgatcacacgaggtgctggaatttatcaggatcatatgactgaagcccttgaagtgcttagcactggagactgggtcatgccagagaaatcattttttgggcgtcgaccgccagtgcctctttggaacaaggagatacatatcatcgttggagagccagtggagtttgatctgccaagcttgaagcaggcagcaagaacagtacctcaggattcatcttttgaaaggaagggttggccaagcatcatgccagacggactagatgaagcggctcagagatggctttaccagaagatatcagataagatccaatcagttatggagacattgcggaagagacttctcgacctgaagcaacattga

SEQ ID NO: 56655 - DNA, 1523 bp, Oryza sativa
  Clone ID: PAT_MRT4530_58544C.1
ttcctcaattatatcgtccatttgcagaatctgaatatttgcacgaaggcgagggcggacatgacgccccaacagcgcaatggcggcgatggcgctctttcgttcacaaccattgaataggatagggtcactgctgtaaaaaacaggaccactactagaacacgaattcctttcaacatcatcagaacataagaagcccgatctaaatataaagggaccgggtgttcctgatcaattcatttcccgtttagggtctcgtaattaacccagaggccggttcagatgcgggttccacgactctggccctattcatatatacgtacacccgagttgcgcgccgatgtggtcttttcggtacccacagacacgtcagcaagtagatcatggaagtatgcagtaggctgtgtcaagcactgactatggatttctatctctcggaatgccctggtgttcctgatcaaaacagtaaccggttagtggcccttccgtccagtacttcgcgatcctgagacggatgaagcaactctacaaccaactggcgtgccaatcagacgcggacacgggcgggcggcttggccggggcctggtggttgctgtttctatcagctgggccgtggctatgtcgtcgtcgctggacggtcccccgccgttgccacccgccgtcacgagggtcagcattgcctcggcgccggccgacaccgtggcgtcggcgtccgggctcgtcacgaagtagcgcgagatgttcctccagtctcccctcccgtacgtcttcagccccatcaagaaccgactagtgctcgtcgtggggccacgggacgcctgtccacgaggcaggcgagggggtctgaggcggtggtgagcacggacggcggcgatggggaggggttgctggtgtcttcttctggcaggttgaccgtggtgatgtcgtggatgctagaccggcgcttgtccttgccgccggagttgaggcggatgaagtacttctgcgcgtggctggccacctgcgtcggcgtccggctcgtcacgaagtagcgcgagatgttcctccagtctcccctcccgtacttcttcagccccatcaagaacgacttgtgctcctcctccgtccacgggacgcctttcttcctctcctggtccggggcgcggccgcgtttgaggtagcagccgcgcctgaacccgccgtcgctgccgtcccagtcctgcagggtgaacccggaggacgccggggacaagctgctgctgtagtgagggaacggcaccagccctgcctcgatggagccgacgtcgttctcgaggtccctgtagtggttcatcacgtctatgaccgtcttcctgggcagcatcgcggcgaccatctcccacctgttcggcgagtccaggtcgacctgtgcgagggccctctcgaacaccttgttctcctctgccgaccacgcctccgcacctcgccgctcctgcaagtaccagcacggctgcccggggaagtagggcagcggtagcacctcccgaagcgcctctgccatcat

SEQ ID NO: 56656 - DNA, 1248 bp, Oryza sativa
  Clone ID: PAT_MRT4530_58545C.1
atggaggcgtccgccgccgagggcggagccgcggcggcggcgcggacgctgcggtgggcggggcgcgcggggcacctcgggggattcccgcgcgtcgcggtgatcgccgccgtcggggcggtcgccaaggcgtacgcgtcgctgctcaacaccaccaccgtccacaacgctgatgccctcctccgcctcgtctcctcgcggccccccggcacgccgctcctcaccgtcagcaaccacatgtcaacgatggatgacccacttatgtggggattcaagggttttccaactacagatgccaaacttcaaagatgggtgttgacagcagaggacatctgcttcaggaatgtgttcatgtcttacatatttcgacttgggaaatgtgtgccgatcacacgaggtgctggaatttatcaggatcatatgactgaagcccttgaagtgcttagcactggagactggttgcattcattccctgaaggaaaaatagctcaagatgatcagccaatcagacgtctgaagtggggaactgccagtcttatcgtccgagcaccagtaactccaattgttttgcctattgtgcattctggctttgaaaaggtcatgccagagaaatcattttttgggcgtcgaccgccagtgcctctttggaacaaggagatacatatcatcgttggagagccagtggagtttgatctgccaagcttgaagcaggcagcaagaacagtacctcaggattcatcttttgaaaggaagggttggccaagcatcatgccagacggactagatgaagcggctcagagatggctttaccagaagatatcagataagatccaatcagttatggagacattgcggaagagacttctcgacctgaagcaacattgatattttggctgtttacttgcaatccggccgggcacctcctttttttgaacaataccttcttgaaatggtagaatatatagcttcattgaacagtttcagatgatgcaaagacgattgagagtaggcagtggacgctacatctgttgaggtgaaaatttgagacgacggtgagagatagaactcagcatgttagattacgaggcatttctttttcagtaggtcaagaatatttgtcaagcgcctacttttctttttattgtttggaatggtttgccatgtttacgaggcatgaataaagtcatcgcctattcaaaaaaaaaaaaaaaaaaaaaaaaaaggaaaaaaaaaaaaaaaaaagcggcc

SEQ ID NO: 56657 - DNA, 397 bp, Oryza sativa
  Clone ID: PAT_MRT4530_58546C.1
ttttgtttttttttttttttttttttttttgttttttttttttttttttttttttttttttaccggaggctaaagactttagaatttattatttcctaagaagaaacatggtttaggtacaggtaactttgggggggggacaaaaaacccccaggttatatatacactggaggggggcatacacatttcaaaggcatattaggggcttccttggtgggccaaaaaacaaaccttagaactggtttcaaaattcagactaaggaactcccaagcaaattgggaagttgaaaagaaagggcgaaccctttcaaaaccatttacagggtctggggacgaagaatttaagggtgaaccatttagaacgggatcctatccgggggggcgggccccaattggg

SEQ ID NO: 56658 - DNA, 1212 bp, Oryza sativa
  Clone ID: PAT_MRT4530_58547C.1
atggcgcggccgcttgggcagcagcaggttggcgcggcggcggctctggtgatcgtcgtggcgtgctgcgtcgtcgcggggtgctcgggcgcgcgcgggcgcggtttccgcgaggaattcgacgtgatatggggcgaagaccacgtgagggtcaccgacgaggacgacgcggccacgcggcaggtggtggcgctcaccctcgaccaagcctccggctccgggttccagtccaaggaccagttcctcttcggcgagttcagcatggagatgaagctcgtccccggcgaatcgcccggcacggtcgccaccttctacctgacatcggagggagatgcgcacgacgagatcgacttcgagttcctggggaacgtgagcggcgagccgtacgtgatgcacaccaacgtgttcgcgcaggggagagggaaccgggagcagcagttctacctctggttcgaccccaccgccgacttccacaactacaccatcctctggaaccccctcaacatcatcttctcggtggacggcaaggcggtacgggtgttcaagaaccacgaggccgccggcgtgccgtacccaagcggccaggcgatgagggtgcacgcgagcctgtggaacggcgacttctgggcgacgcgcggcggccaggtgaagatcaactggaccgccgcgccgttcgtcgcgtcgtaccggacctacgcctacagcgcctgcgccgtgccggcggccggcggcggtggcggcggcccgtgcacgtccggccagctaccgaattccacgtcgtcgccgtcgacgtgcgactgcggcggcgcgtggatggacaggcagctcgccagcgccgacggcgagcgcgacgtggcgtgggcgcgggcgaactacatgatctacaattactgcggcgacccaagcgcttcccccagggccttcccgccgaatgtagcctccatgagatagtaagaatatcccatcgtcgtcgtcgtcgtcgtcgtcgatcgccggcggagcaaaatggccggaaatgaggaaggtgactggctggcgtctgtaaaaataaataatattggccctgggggtggtaaaaaaaaagtgtaatgtagctgtggtgggtaaaattcttttttgttctctgtttcgtagtaagccactgcacgccctgttcgtgtgtaactgatcgtgtccatgcaacaattcatgtgtaatatattcctcaccacc

SEQ ID NO: 56659 - DNA, 306 bp, Oryza sativa
  Clone ID: PAT_MRT4530_58548C.1
atggtgtaccacagcttcagagcagaagaatctggtgaaatatatctcaggagctcagaattagatacaggcaaaattcctgcttccaaaccggtgccattcagacacaacaccaacagtaattctgtaccaaatcctggatccaagaccggtaaatcggacgattaccgttgcgagatgggaaccctattgtcgctgtacttgcaacaggagtgtgacaaacacaggaaagaacaagaagaaggtgactcaccaattctactgcagatgactgtcttcataatttcgttgattgatagaccatag

SEQ ID NO: 56660 - DNA, 1488 bp, Oryza sativa
  Clone ID: PAT_MRT4530_58549C.1
atgaaggaaacaaatctgacaacggtggtgctcgggagctccaagagaaaggtggcaacgacagtgccccgtgcgaatgaaggcagctacgtggaggaggccgatccgaggagattgacgacgacgacgacgacgaagacggacacggtgcgtgtgaacatcgagaagatgctggagcagctgagccggccggcgaggctggacggctactccatctaccgtgtcccggctagcgtccgcgacagcgtggacaacaagcactacgagccgaggctggtctccatcggcccgtaccaccggagcaagcaccacctccgcgccatggaggaccggaagcgcctctacctcctccggttcctccacgaccagcacgacgacgacgacggcagcggccgccgcgacggcctgctgcaggactgcgtcggcagggtgcgcaagctcgaggcgcgagcgcgcgcgtgctacttcgagagcccggccaccggtgacggagaagacgacgacgacatgttcgtcgagatgctcctcctcgacggctgcttcgtggtccagctcttcatccagtggttctgcggcgccacggatcccgtgttcgacgtcggctggaacctcccgctgctgcacaccgacctgctcatgctcgagaaccagatcccctacttcgtcctcctcgcgctctacgacgcctactctcacgaccccaaccgcccgccgtcggcgcgccccaagccgtcgctgacgaccatcatcacctcctacttcagcgagaaggaagggagacagcccgcgacgacgacggccaccgaggacgccatcgatcacctgctccacctgtaccactccaccttcgtgatgccgccacccgatcacctgccggcgccggtgcaggctgactgcggcggcaagctgccaaggacgatccgctgcgccaaggagctgaccatgcacggggtgaagttcgtgcgcaagccggagacgaccaacgtcctcgacgtcacgttctgcagggacaccggcgtcttccagatccctcgcgtcgccatcgaggactccacctgcatcaggtacatgaacctcgtcgccttcgagcagtgccgcggcgaggcggcggtggcggagaagcacctgaccagctacgtggtgctcatggactacctgatcaacacggcggaggacgtggtgatcctggacagggcggacgtgatggagaacaagctggccaacgaggaggaggccgccaagttcttcaaccagctccgcctcagctcctacatcaactacgacgaccactacctggcgccggtgtaccgcgacgttgacgccttctgccgccgcaagtggccaaaatacaaggccaaattccgccgggactacctcaacagcccgtgggcgattttcggtttctgcttggccaccacattcgccgtcatcaccttgttcaacaccatcgtcaccatattgcagacgtttttccatctctttaaatga

SEQ ID NO: 56661 - DNA, 449 bp, Oryza sativa
  Clone ID: PAT_MRT4530_5854C.1
ctgaatggctgtccatcatgatagaggaagcggtccttgtcgaatgcaagtcgaggaccggagatggatgaggaccgctggtggagcacgtaaggcgacccccatgttcgcgcgtctggcctgatgtgcatgaggatgagccttacctgaagcctgtcctctctgacatctaaaatgccacacgtcgtacctcacatcacatctgcctgcaattggacccgcgaatgaatggcaccacttgctgctctaaacgttcttggcaagatcaacggttatcccatttgggggaacccgaatctagtggagccattcctcaaggaggatgcatcgaccttcagctgcattgccccagcatttgttaatgccataacagactctgtgctcgctcatcgttataagacttctacataacttggatgctactggtccaatcattatatatactcatg

SEQ ID NO: 56662 - DNA, 357 bp, Oryza sativa
  Clone ID: PAT_MRT4530_58550C.1
atggttctaggcctggagaaggccgcgttgatgcccagcagcatgtacccgagatccttggcagtggtggaggaagaggggcagcaccgggcaccggcaataaggaaaaaagggaggcggcgacagcaccagggaggaagggaagcaccgccggctgatgcatctagaggcggcagctccggtggatggggtgagaggaggcagcattcgctgcaagaggaggtggcggcgttcgcatcgtatagaggagatggcggcgtgtgggattcgttctacgaggtaggatcatggatgaatttccttaggatttgggggtattcagccaggaaacttaccttcccggaccttgcaaaatga

SEQ ID NO: 56663 - DNA, 252 bp, Oryza sativa
  Clone ID: PAT_MRT4530_58551C.1
atggagtctctccggatagcggtaggggcggtgaagcacggcggtggcccagtggcggcggcagccctaggggcagtggtggcccagcggctcccgtcggcattggcaacccttggggcggcggcagttcccatcggcgctggcggcactaggagatgcggcggaggacggcggctcccgtcggcgccagtggccctaggggctgcggcggtccaagaggacgacggctcctaccggtgtcgacagccctag

SEQ ID NO: 56664 - DNA, 261 bp, Oryza sativa
  unsure (1)..(261): unsure at all n locations
  Clone ID: PAT_MRT4530_58552C.1
anccnaaggtttccctgggaaacaagatntgtggtctaacatatngttcccagagcaattacaaaagaggaaaatttctgcttgtacccnagngatgtgtgaaaatccctcactgtgcacaagttcagggttttttgcactcatcgttgcaatcaagaccggcacacatgggcagatgtntgcacaagcacaaatagtgcatgcactgggcacacaaggcatatgtgggtttggacgcgcgcaagccacaacaactntgcc

SEQ ID NO: 56665 - DNA, 168 bp, Oryza sativa
  Clone ID: PAT_MRT4530_58553C.1
atgtcgcacgacgacggcgcaaaaccactcgttctcgcgcagcgctggccatatttggaggcagcagaggtcggcgccaagccgccaactgtgttggcactgagatctcatgacgtaccgaaagttgccacctcggacacaatctcagcgtcaagaaagcttaagtga

SEQ ID NO: 56666 - DNA, 2540 bp, Oryza sativa
  Clone ID: PAT_MRT4530_58554C.1
agcgggagcgccggggagccgctgctgcggaagcgcaccatgaacaccacctcccagatcgccatcgtcggcgccaacgtctgccccatcgagagcctcgactacgaagttgttgagaacgaccttttcaagcaagactggcgatcaagaaagaagaagcagatatttcagtacattgttctgaagtggaccttggtgcttcttattggcctgttgactggacttgttggcttcttcaacaatcttgcagttgaaaacattgctggattcaaactgttgctcacgggtaatcttatgctaaagggaaagtgcaggtatttaactgcatttttcgcttatggaggttgcaatttggtcttagcagctgcagcggcagcaatatgtgcttacattgcacctgctgctgctgggtctggtattcccgaagttaaagcatatcttaatggagttgatgcatattcaatattggcccccagtacgctctttgtgaagatatttggttcaatacttggagtttcagctggatttgtacttggaaaggaaggtcctatggtacatacaggggcatgtattgccaacttgcttggtcagggaggatcccgcaagtaccggcttacatgtaattggctaagatattttaagaatgacagggataggcgggatttaattacatgcgggtctgcagctggagtggcagctgccttccgtgctcctgttggtggtgtcctatttgctcttgaggaagcagcatcatggtggcgaagtgctcttttgtggagggcgttctttacaacggctgttgttgctgtcgtgttgagatctcttattgagttctgtcgtagtggaaaatgcggtctctttgggcaaggtggattaattatgttcgatctcagttcaactgttgcaacctacagtactccagatctaatagcaataattatccttggaataattggtggaatctttggaggcctttttaattttctcttggacaaggttctccgtgtttacagtatcataaacgagagaggtgctccattcaagatccttctcactataacaatatcaattatcacatcaatgtgctcttatggtctcccttggcttgctgcgtgcactccatgtcccgtggatgctgtggagcaatgtcctaccattggacgctctggtaacttcaagaactttcaatgtccaccagggcattacaatgatcttgcatcactctttttcaatacaaatgatgatgccatccgcaacctctttagcaatgggactgaatctgagttccacatgtccacccttttcatctttttcactgctgtgtactgccttggaattctgacgtacggtgttgccgtcccatccggtctcttcatccctgttattctcgctggtgcaacatacgggcgcatagtggggacacttcttggatccatatccgaccttgatcctggtctttttgcccttcttggtgcagcatcttttcttggtggaacaatgagaatgaccgtgtcagtctgcgtgatccttctagagctcaccaacgacctggccatgctccctctggtcatgcttgttcttctcatatcgaagactatagcagataactttaataaaggagtttatgatcagatagtggtaatgaaaggcttgccatacatggaggctcatgctgaaccatacatgaggcacttggttgctggcgatgttgtgtctggcccacttattacgttttcaggtgtcgagaaggtgggaaacattgtccatgcgttaaggttcacaggccacaatggattcccagtggttgatgagccacctctaacggaagcacctgaattggtcgggctcgtgacaaggtctcatctgttggttttgctgaatggcaagatgttcatgaaagaccagctgaaaactagtggtagctttgtccttcaaagattcggtgcctttgattttgccaagccagggtcagggaaaggcttgaaaattcaggacctggacttcactgatgaggagatggaaatgtatgtggatctccatcccgttacaaacacctcaccttatacggtggttgagacaatgtcactcgcaaaagctgcaatcctattccgtgcactaggattgaggcaccttttggttgtgccaaagacaccagataggccacccattgtcggaattctcacgaggcatgatttcgtcgaagaacatatccacgggctgttcccaaatctcaatcctcacaagttccactcgacatcgatgggaggctgatttttaagcgttttgccgccactcgttttatgtgaagtataggaagtgttcattatatgtaatttacaaaattgtgtctgtcatttgttggagagagctcatcatctgtacatcggttgtagcatatcctcttttacaggattcatcttgtagcgtattttgtctcagcttgcttattttgagtctgacaggaagcgctctgtaaatgtagagcaaacattcggaacaccgaaattttatatcataaagttgtgctaaggcatatttgg

SEQ ID NO: 56667 - DNA, 360 bp, Oryza sativa
  Clone ID: PAT_MRT4530_58555C.1
atgaagggggaggacgaggcgcactgcttggggcagctgttcgtgatttttataattttggtcccgaaattaacaagagattgtggaaataattctcatgggcaagtgaataacagagtcctatcggagtggattgggattgtactatatcgtgctgggtttggtatctccgagttctacttggagatcaagggtttaactgaagcctacatctctaggccactaattatgggtgcttctgtccgatccaacataattacagcatatcagagtcacaacaaccctctggtgaacaccgcctacagccgcttcctctcacctatggccaagccgcatgacaagcctaagcaaggctcatag

SEQ ID NO: 56668 - DNA, 2430 bp, Oryza sativa
  Clone ID: PAT_MRT4530_58556C.1
atggaggggcagtcgcagcaccgggcgccggagagggaggggagccacaactacgacatcgagagcacggacgggtccggcgggctgtggcggcggaacggctcgtcgtcgggggcgctgctccgctacaacgacagcggcggcggccgcagcgggagcgccggggagccgctgctgcggaagcgcaccatgaacaccacctcccagatcgccatcgtcggcgccaacgtctgccccatcgagagcctcgactacgaagttgttgagaacgaccttttcaagcaagactggcgatcaagaaagaagaagcagatatttcagtacattgttctgaagtggaccttggtgcttcttattggcctgttgactggacttgttggcttcttcaacaatcttgcagttgaaaacattgctggattcaaactgttgctcacgggtaatcttatgctaaaggaaaggtatttaactgcatttttcgcttatggaggttgcaatttggtcttagcagctgcagcggcagcaatatgtgcttacattgcacctgctgctgctgggtctggtattcccgaagttaaagcatatcttaatggagttgatgcatattcaatattggcccccagtacgctctttgtgaagctgattaagtttgaaaatcttacagtggatatgactgtttttataattgattgttggaagtattatgaacctgtttgcagttggtatatatttggttcaatacttggagtttcagctggatttgtacttggaaaggaaggtcctatggtacatacaggggcatgtattgccaacttgcttggtcagggaggatcccgcaagtaccggcttacatgtaattggctaagatattttaagaatgacagggataggcgggatttaattacatgcgggtctgcagctggagtggcagctgccttccgtgctcctgttggtggtgtcctatttgctcttgaggaagcagcatcatggtggcgaagtgctcttttgtggagggcgttctttacaacggctgttgttgctgtcgtgttgagatctcttattgagttctgtcgtagtggaaaatgcggtctctttgggcaaggtggattaattatgttcgatctcagttcaactgttgcaacctacagtactccagatctaatagcaataattatccttggaataattggtggaatctttggaggcctttttaattttctcttggacaaggttctccgtgtttacagtatcataaacgagagaggtgctccattcaagatccttctcactataacaatatcaattatcacatcaatgtgctcttatggtctcccttggcttgctgcgtgcactccatgtcccgtggatgctgtggagcaatgtcctaccattggacgctctggtaacttcaagaactttcaatgtccaccagggcattacaatgatcttgcatcactctttttcaatacaaatgatgatgccatccgcaacctctttagcaatgggactgaatctgagttccacatgtccacccttttcatctttttcactgctgtgtactgccttggaattctgacgtacggtgttgccgtcccatccggtctcttcatccctgttattctcgctggtgcaacatacgggcgcatagtggggacacttcttggatccatatccgaccttgatcctggtctttttgcccttcttggtgcagcatcttttcttggtggaacaatgagaatgaccgtgtcagtctgcgtgatccttctagagctcaccaacgacctggccatgctccctctggtcatgcttgttcttctcatatcgaagactatagcagataactttaataaaggagtttatgatcagatagtggtaatgaaaggcttgccatacatggaggctcatgctgaaccatacatgaggcacttggttgctggcgatgttgtgtctggcccacttattacgttttcaggtgtcgagaaggtgggaaacattgtccatgcgttaaggttcacaggccacaatggattcccagtggttgatgagccacctctaacggaagcacctgaattggtcgggctcgtgacaaggtctcatctgttggttttgctgaatggcaagatgttcatgaaagaccagctgaaaactagtggtagctttgtccttcaaagattcggtgcctttgattttgccaagccagggtcagggaaaggcttgaaaattcaggacctggacttcactgatgaggagatggaaatgtatgtggatctccatcccgttacaaacacctcaccttatacggtggttgagacaatgtcactcgcaaaagctgcaatcctattccgtgcactaggattgaggcaccttttggttgtgccaaagacaccagatgctaagtttgaaaattatactcccttcattcacttttattaa

SEQ ID NO: 56669 - DNA, 451 bp, Oryza sativa
  Clone ID: PAT_MRT4530_58557C.1
cggacgcgtgcgctgtgtcgcctctagctttcttctgctcatcgttcacacatgacgttctctcatgcgatactcgataactggatctgtccgacacccggataggacataggcgactacataggagatcggcggatctggtgtggatgctaggagcaaggctcggactctatgagggcattgtgactgatcctagcaagctgcccaagtgggactacgatggatatagcaccgtccatgccatcattgaggacagagagggcatcctgctcccagaggctgtgttcagggacacattcatgaagggaaacaacatcattgggatgggcgagcggtacaagcaactctaacataccgatcctcaccaacaagaggctcattgctggcaagatcttcaggttcgatgcagctgtttactgggagccgtgggccgggatcgaccaagaggaca

SEQ ID NO: 56670 - DNA, 546 bp, Oryza sativa
  Clone ID: PAT_MRT4530_58558C.1
atggcgctcgccgccgcggcgcgcggggagagcaccgcgctggcgctggcgctggcgccgccgccgccggagctccacttccggtgctcgctctgcggcaaggcgttcgcgtcgtaccaggcgctcggcggacacaaggcgagccaccgcaagccatcggcggcggcggcggcgccgcccgcgcacagagacgtcgtcgttgctgctgctccggcatcatcaggccgcgtcgccgccgacgccgacgccgcctcggaggcggacgggcggcggcggcggcacgtctgctcgctgtgccggcgaggattcgccaccgggcaggcgctgggcgggcacaagaggttccactacttgcatggcccatcggtgtcggcgacggtctccagtgcagcgacggcggcgagcgtgggcgccgctttcgacctaaacgtggcgcccatcaaggagatcgccggcgagcaacgacggtgcggcgaggaggccgacgacgacgatgaggcggagagcccttcaccggccaagaagccacgacgccggccaggatga

SEQ ID NO: 56671 - DNA, 516 bp, Oryza sativa
  Clone ID: PAT_MRT4530_58559C.1
ataagcttgcggccctccggggccttgtcctctatggcgacttttcttatactcattattatcatatatctgtcctctgtgaaacatttttctgctctcaattctcccacaatatactccccaaacacatacggtgcataccctggggcgcctaaagagagcgctcactcatattaatcgcattgctctcactgccctttctccccgtgaaacatttgtagccccttctgctttagtgactcccacaactcggagagagacgccgcacgcgtagagggcgctttcgctttttctccctttccgactcctcgctctctgactcgctgctctcgagcgttctgttatctctctcaggcgcagctacagcgatctccacaatatcgggatataccgcgtgaaaccatatgtcaacaaagcgcccgcaaggccacagccaccgaaaagacgccaaccttgtcgcgtttctatatatgctccccccccgtgaggagcgtcacaaatatcagctctatagac

SEQ ID NO: 56672 - DNA, 881 bp, Oryza sativa
  Clone ID: PAT_MRT4530_5855C.1
ttatttttgaaaaggaaaaggaggattattgcgtcagcgggctagggtttcggtggaccgggcgcacggcggcggttcacgcgaacggacggccgagatcgatccatccaaaatggacggccgagatcgatcggtccacgaccggctcacggcggacagccacgatgacgtcagcgatgacgtcaccaccggcggcggcggctcggcggctcgggcttgcaagctcgccggcgaacgacggcacggcggcgcgaacagaaggcaccaacgggtagcggacggcacggcgaactcaccggcgaccaaagaagaagcggcggcgctcttcggcttgacgacggcgacggtgctccggcggtctacagcgacagcgaaggggcggacgaggacggcgacgacttggcgaccacgacggcggtcttcccgagcgacggcgacgtctggaacggcggcggcgcacggctggagcgacggcgacgacggcggcgctagggcacacggcgctaaggcgtttccgacgacgagaggcgaaggcgaaggtggcggcgggggctaggagacggcggcgaaggcccacggcggccggcgacgagaaggaaagttcgggaaaaacgaatccgaaacaaactcgaatccacgaatttccaaacgattttagccggtgtttccaaaggagaaaaggtagaggagatcgagaagatcatttcccctctattgattcggctggaaacggaaaggggcggtgggccccacctgtcagcgggcggacgcgcgcgcgcggcggcggactgggccggctgggccgaggagagagagaagagaggttttgggccgactttcggcccaaagccaaaagaagacttttaaaacctttttcaatt

SEQ ID NO: 56673 - DNA, 411 bp, Oryza sativa
  unsure (1)..(411): unsure at all n locations
  Clone ID: PAT_MRT4530_58560C.1
cacgcgctcgctcgctttgcaagcaaaacgccccaactctcccgcgcgcgtctggctcggcaccttcgccaccgccgaggcggcgncccgcgcctacgaccgcgccgcccgccgcatccgcggggccaaggccaaggtcaacttccccaacgaggacccgccactcgacgacccggccgccgacggcacagccacggcggcgccgccatcccgtgcagggagttcatggactacgacgncgtcatggcgggcttnttncaccagccctangtngtngncgagggttgtcggncgtgcgggngaggaggngnnanggtggngtacgtgaanagganttgtngntgagncgtagtaggacgngggggttggagtttggagtttgataagatnagaaggnggtggatgtgagat

SEQ ID NO: 56674 - DNA, 274 bp, Oryza sativa
  Clone ID: PAT_MRT4530_58561C.1
aaaacaaaccccccccaactgattttaacacaaggttagccggagacaggggaaagaataatttaggcccaaggggatcattggcggggaaaacaaaaatttggttgccccccaaccccccccaggggccccaaaagagggcgctttcctttttgggacgaagaaaaaagtaaaacctcccgaggggaaggaaaaccgaatatttttagacaccaataaagaggaggggaagcttctttagaacccccgcccccctaaagggttgggggccccc

SEQ ID NO: 56675 - DNA, 258 bp, Oryza sativa
  Clone ID: PAT_MRT4530_58562C.1
atggctcaaggtggtgctcatagaggaggctgttgcctactcctcttcctcgttctgcttgctctttcgttgcgaacatcctgtgttgttggacagcagagccaattcaagaagatatacattatctatcttggagagagacgacatgatgatcctgatatcgtgactggttcccaccatgacatgctcgcctctgttttgggaagacaaagaagggaaaacagcattgctttaatggaaacatggactctgaagtag

SEQ ID NO: 56676 - DNA, 362 bp, Oryza sativa
  Clone ID: PAT_MRT4530_58563C.1
gcaacactgtctacatacagtctaccatatactggcacccagtgctgaaacaaaagataaacaacggcggcctgcataaacgatgcaagctaccgttcacgctcatgccacaacattcttactacctagcgcaaactagcgtcaatgcaatggcccacgatctacaacgtgcagcactgcgaagaccgttactttgctcagactaatgctcatgctcaagattcgcttttcttcagctggccatacatatgtgaggtctatactaactgctacattgatcagaggagcattctgaccggcgaaggtgactcgcactgaatcggcacattatactgggtcaaaggggaggaaacacgcaatgc

SEQ ID NO: 56677 - DNA, 412 bp, Oryza sativa
  Clone ID: PAT_MRT4530_58564C.1
agaagaaatttgtcacctttatttaaagttgattttgaatagaatcaccaccaagattcatacttgagagagttttattttgctatttgccaaaactagttctcaattacattactctaaagtctcactttcgaactcattcaagaatcctaggtagtattgttgttgaaatctagaagtaaaggcaccgtgctcttctcccctatagttctagatagcttaagcttactcccgagagaagcggttagcattagcgaccacatcatctggttaggcgcggaatactgagttttttcctgcaaagaggctgacaaaagcgttaacgtttgtcttgattgcaatttattggcatccttcacactctgctttcttcaagacagcataaagttgtggaaagcaaacacgtgagcaa

SEQ ID NO: 56678 - DNA, 273 bp, Oryza sativa
  unsure (1)..(273): unsure at all n locations
  Clone ID: PAT_MRT4530_58565C.1
ggtaaaaaaaatgtgcaagatataacgtgaatggagagaagaggagaagtcacgattggaaggcaaatgttcgtgaagataggcacatatatgtatcgtacaatgtcctctccggttgtcgaaatgcaaataacatcatcgggggatatgatcatcaantcactagaacagagggaggaacaaaagctaaaaattaaaaccatcaacagcccgatcgaggttgcattactagatacacacattggaggcttactttccttttttcatggatcg

SEQ ID NO: 56679 - DNA, 129 bp, Oryza sativa
  Clone ID: PAT_MRT4530_58566C.1
gcaagcggtagctcagcgccgccgtttcctactccgccatgatcgctgccaccgccaccatcccgttcttacccttgtttcaccgtcctgtgcttaggtccgtgtgtctcctgcgccgggttgtggtcc

SEQ ID NO: 56680 - DNA, 130 bp, Oryza sativa
  Clone ID: PAT_MRT4530_58567C.1
tttgttttttaaaaaaatttggggagtgacccctcaaggccggcctaactggggacagactaaacccttaccactctgactgtgcctgtccttctggagatctatcatgcaatcttatagtcaacacaat

SEQ ID NO: 56681 - DNA, 292 bp, Oryza sativa
  Clone ID: PAT_MRT4530_58568C.1
ctcctgtgactaggggtcgagctcccccgacccactatctaggtcaccatcgtggccctaccctgaggggagatcgggcccaaggtagagcgggacccgcctcttgctgtgactaagcgacgggctacctctaacaccttagttagtatataatcgcgatgggtcagaccgccttctaaatactgtcacgcaaaactattgaatagccatttatgcagcggacacacgcatcaccaaatgtctaccaaactaccttaaacatatctgtaaaagccacatctttaggatggag

SEQ ID NO: 56682 - DNA, 393 bp, Oryza sativa
  Clone ID: PAT_MRT4530_58569C.1
gcccatgataatgagttgctgtaaggcaccagtatggcatgaacggcagagccccttatgtgcaaatcagctgcgtttcaaactgagaaacaaacgcaagtcaggcacacagcttaggctggtggcgcaacagtctcactatgcaggatattaacgttgttcagccatagggcagcagctacaactccagcagtttgatgatctgctactttgatgggaatctagctcaagctccagctgcaaggtgctgttggctttgaacttgccatctgagatatgggtgatctgaccctaggtactatagtgcacctattaccccccgattttcttcggaattaaaatcatttaataatccatttctagaaattatattaaaaaaaaaaaaaaaaaaaa

SEQ ID NO: 56683 - DNA, 554 bp, Oryza sativa
  unsure (1)..(554): unsure at all n locations
  Clone ID: PAT_MRT4530_5856C.1
cgtccgggnaggaagcccagnaccctagcccctcccgccgccgacgagcagcggcgcgcgagaagacggccggcgagatggggcgggacaaagcgcggaggctctccggcagccgccacttccggcagagggtggtgctggcgacgctgacgtcgaccgccatcaccatcgacgacatccgctccggcggcgccgcgccgggcctccgcccccacgaggtctccctcctccacctcctccacaagatctccgaccaccactccctcgacctcaacgagacagggacgaagctgaggtacaagccgggggtgatcgtcggcgggagggacctcgagcacgactgcggggtgcaccgggggatcggctacttccttgagccgcttatactgcttgggctcttcgccagggcgcccatctccattcggctcaaaggaattactaatgatacaaaggacccttctgtggatactttccgaatggttaccttgcatatgctcaaacaattcggtgttccttctggaggattggagttaaagattgaaagccggggagct

SEQ ID NO: 56684 - DNA, 2192 bp, Oryza sativa
  Clone ID: PAT_MRT4530_58570C.1
gatcaaacgaggtgaaggtaaacaaattgaattgatcaaacgacgacgttgaaggtaaaccaaagatggcagaccccgccggcgccggcggcgagcaggaggcgccgtcggtggaggcggcgttcgcggggcagccgccgccgccgtggtggcagcaggtgacggtgcgggcggtggccgtgagcgtggtgctcggcacgctgttcagcttcatggcgatgcggaccggcctcaccgccggcttcgtgccgtcgttcaacatgtcggcgagcctcctcagcttcttcatcatcaagtcgtggacgcggctgatggcacgctgcggcgtcgcctcccagcccttcacaaggcaggagaacgtcgtggtgcagacatgcgtgatctcctgcgccacattgtcaatctacggtggtttcacgagctacctgctggcgatgaacgagacggtggccaaggcggccggcggaggaacggacggccggaatgtgtacacgttgcacaccgggaagatcgtggccttcctcttcctcgtcaccttctccagcttgttctgcactctgccgctgaggaatacaatgatcgtggactacaagctgatatacccatctggttcagccgttgccggcatcgtcaacagcttccacacacccaagggagcaacaaaagccaaattgcaggtcaatgcgatgttcaaatccgtggccgggagcttcgcgtgggcgttcttccagtggttctacacggggggagacgggtgcgggttccatgctttcccgctgttcgggctcgaggcgtacaaggagaagttctacttcgacttctcggcgagcctcgtcggcgtcggcatgatctgcccccacctgatcaacttctccatgctccttgggtccatctcctcttccgggttcatctggcccgcgttacaggcgaagcaaggggaatggtacaccgatccttccccgaccagcttcaagggaatcaatggatacaaggtgcccatgggggtatccatggtgctcggggattgcctgttccagctaggcgccatcactgtcaaggcggtgcagcactaccgcaaggggcggcaggagcagaagctcgccgtcgatggcgcggccgatgacggcggcggcggctgtgtccccgacgacgacgacgagaacaagtggcacgccacgtacgacgagcggcgcaggaaccaggtgttcctgagcgacgggatccccgaccaattcgccgtcgccgggtacgtcgcgctggcggcgctctcgacggcgctggtgccgcgcatcttcccgcagatccggtaccaccacgtcgccgtctgctacgcggtggcgccgctcctggcgttctgcaactcgtacacctccgggctgatggactggtcgctggcgacggtgtacgggaagctcgccatcttcgtggtcggcgcgtcggtcggcgccgcgtcgggcggcgtgatcgccgggctcgccgcgtgcggcgtcatgatggtggtcatcggcgacgccgcggagctgatgcacgacttcaagacggcgtacctgacgctcacctcgccggtgtccatgttcgccagccaggcgatcggcacggcgctcggctgcgtcgtcaacccggccgtcttcctcgcgttccggtggctcgccggcgcggaacacccgccgggcgaccccaggtcggcgtacgcggcgccgatggccgtcgcctaccgcggcatcgccgtgctcggcgtggagggcgtcggcaccctgccgaggcacgccatcgcgctgtgcgccgcctgcttcgccgcggcggtgttcctggacacggcgggggcggcggcgagggcggcgcggtggagggtggggggctgggtgccgaacccgatggccatggcgatcccgttcttcgtcgggccgacgttcgccatcgacatgtgcgtcggcagcctgctgctgatggcgtggcggagggcggacaggcagggcgccgcgacgctggccgtcgtggtggcgtccgggctcatctgcggagaagggctgtggacgctgccgtcggcggtgctcgccatgctcaaggtgcagccgcccatctgcatgaagttcctctccagaagccagatccaggaggtgcggcagcacttcgtgctcggcgccgcggatatccagcccgcggtgacgctgacgcatcatcatcatcaatga

SEQ ID NO: 56685 - DNA, 520 bp, Oryza sativa
  Clone ID: PAT_MRT4530_58571C.1
acagcaaccacagccaaagcaaatctttgagcaagctaggcaaaacttagaccccaaaagaaaaaaatggaggcaaatctcaagaacagtgctagaggaggggccaaggggaaggtggtgacagtatactccaagtatgtcaaaccccagagcagcccttctgtaagtgtcacacaggcctactcctaccagccaaactactcttcctccattgatgtagctgcagctgcaaacggctcctatggtggcggcaacgtcgacgagagggcgacggcttacatcttggccgtcagagagcgtttcaagaaagaatggatgtaggaagattgtgtcaggatccattccagaagaggtttatattttcaagaatgtcttctgggtagccatgcctatgcttgcatggatgtaggtagtagctccttactatgtcatgctttcccatgttcttccttctctttttctgtcaaactacagtttgattggatgagtgtaagggatgaataacagcttctgtttcttg

SEQ ID NO: 56686 - DNA, 2592 bp, Oryza sativa
  Clone ID: PAT_MRT4530_58572C.1
ttttttttttttttttttttactcactgaatctaacatattctatttttatgatattggtgttttggcatatacatgggaatagaaagtgagaggaggcaaaaagtttttttttttttttcagaagaacgaacaacatttttcttctctacaggtgttacactttatggatgacccgcctgtttgcaaaatttcttacggggcttattgcaaatttacatgcaccaatgttggaaaaccaacattttctttcttcattttgtaaagccaggagggtagacttaattcataccagacaatttgctgctacttacactagtacaacatcaatatcattatctacaccttgtaagggctgtcgcaatttcgcttcaaagtcctccaagtactctctactgttgatctctgtcaacctactaattgttcgatccttggcaaatcctagctcattgtccacacacaagtcaggatcatcagttttctgcgaccgtgaagatctaggagaaatttttcgtgcttcagcaactgtcactatattctcaaatagttctattggtgcagcgtctgctgtacataataaccttgctttgttctcgtacataacatcaaccaatgtgacaaaccgataagctgctgttcggttctgagacccaaacttaggaatgccatcaagtgccaaggtgtgaaactttttgaacagcccaaaataatcagctgcacctaaaggcctatcacaaagatcttcaaatgggaaatatgcaatcccatttgctcccagtggaacctgcaattgccgtcccataacaacttcaactgtctgaggtctaggttcctcatctccaattaatgtttgcaacttctgtttaagaagtgagtattgttttccgataaaatagaaaccctgttcagcagaacccaattgacgatagtctactgcagagccaatgggatgtgcaatgcacctttctttcaacgtgtcaatgaaaggtaagaaaaggtctcgctgcaaaccaccctcgtaaagctgatccggagcacgattagacgttgaaacaagaataacgcctttgctgaacaaatgtctgaatagccggttcaatatcatagcatcagcaacatcagttaccataaactcatcaagacataatatgatggcctcatcggaaatctcagctgccaccacctcaaggggatctgaaacacctttatgcatcacacagtgaaattgttttgatgcaaacactgatatttcataaaaagacgaaaggaagacgcatgatggttttttccaggtactttcttgatgtttcctacttatttctaaacaacataattgctcatagaacaagtccataagcattgtcttcccagtaccaacacctccatacatatacagcccctgcaccggagaataggtagaaggctgggtaatgaggcgggaccatagccatctacgccttccagatttctcagatgactggtatctgtccagttggcaagcttcttcattctcaaccagctcctcatagagcctttgtaaatgttgaatagtatcaatctgaaagttatcaccatccacaagctcccctgatgctattctcctttcatattccaccatcggaccacctcttgcaacatctttgattgaatcagctgccacagtggaaaagctggacctcagtatttccacacttgggctcacatatctgccaatttctctattacaacataatgtgctcattgaactggaagctgaactgcacagcactagagcattctgctgcttgatcaatctattcgttgatgagtgtctctctgcatggagctggccgaatcgccggagctgtgaaccgtatctgggtatccttaggtgtagctgcttcctttcgatatgtttggagcgtcctgaggtccgctcgctgctccgcctcctccaccaccacgaggagcccctccaccgctgctgggcctccttcactgttgctctgtctcctccaatgtcaccctccttctcagtcaccgccgctgctccaccccctccagcatcgcgaggagcccgtctgtcgccgtctccactgccacgagaagcccctccgacgctgctcggcctcctttgccgccgcttcgcctcctccatcaccgccctcctcttccgccgcttcgcctcctctaccaccgcaaggaatctgtccgccgctgctctgcctccttcgtcactgtcactgctgcttctgctaccgcagcaggacctcacgtccctcgccgtgctgctcccgctcctgccatagtcgacgtcctcatttaggcccttctcgcttagcggcgtcctcaccccgccgaattcagtcggctccgtggcgccggccccgtcttcgttgtcggagatggagcgtgtccgccacacccggccatcgtgtggtgccacggcatgtatgaacaggccgacgagctctagatcatgctcgagtacatggacaagggatccctcgagggccaccgcatctcctctgaggccttcctcgccgacgtcacacgaccgccccgatatccctgactgttgttgctgcttctcgcagcaccaaagatcccccat

SEQ ID NO: 56687 - DNA, 823 bp, Oryza sativa
  unsure (1)..(823): unsure at all n locations
  Clone ID: PAT_MRT4530_58573C.1
caactaatgatctgcttgcatgctcagcttcatagtcaattttcaactaaacagccatgctgcttctgtacatcttcagtttggttgtgcataattaaatacagatacacactattaaagcaagctgaaattgctttatcagagttgatccaatcctctccggaggaggctctacatgactacatccttggagtaaatctctggtcaagatcactttacttgaccataagaaaagaatgtcaaacttttcgttccagcttgctttattgaagttatgcaggtccttgcacctgatccaccttttagtgatgaaatatttaaggagagatgtttaggctctttatcagcacatttgcagaccttgctgaaacaaacagtccatatcttccaagaagatcttgctattggaaaatgtgctgcactcagagtaagagtttttgcacgtgatgcagcaaaagcctgttacatggccgtgacatcaggaaatgaaaaaaaagatattcttacatcacttgaagagaggttattggattttgatgtcaaagttagaatgcaagctggttttgcatcctgcaatttaaggccaaatcaaatctaagatcagttccttctgagctgatattgcaggcagcagagaagccacaaactggtgttatttctcgctactgcagggtacaaaaccttagccgttgcggtcaactaaactccgcatcggggaaaaagattgccnagnnnnnnnnttaggnnnnaanaaannnctcaccngggaagttncnncaaccaaccgactaccccgaacttgcaaccaagggccaccggccgn

SEQ ID NO: 56688 - DNA, 264 bp, Oryza sativa
  Clone ID: PAT_MRT4530_58574C.1
ggcatcccaacacaacacattgtggtgacacagcaaacataatatacacacatcctcttcttcttctaccaccctccatattcctgcaagaaacaactggaggaagaatcactactccaacaccatggaggttgccatggtctgcacaagagttaacctgctcatcctcatcctttctctctgctccccatacaagtttatacagagccccatggactttggccctttgaacctccttcccaccagcaccactgcatccagtga

SEQ ID NO: 56689 - DNA, 1208 bp, Oryza sativa
  Clone ID: PAT_MRT4530_58575C.1
atggcggcccatcatcatcatcatgagcaccaccacctcttggacatgtcgtcgcccccaaacgccagcggcgccatcatctcctccttcgaccacgccgccggcctcctctccctccacgacgtcgccgccgccgccgaccaccaccaccaccacctacgaggaggaggagggggtttgcaattgccatcgccgtggtcgcagcagcaggtttccctctccctctacaacaacgctgccggcgcagcaggctcgccgccgtcgtcgttggttgcccatcagcagctggcggcggcgcagccattaatgttcagctgagggggtccaagtacctgggccctgtgaaggcgctgctcgccgagttctgcagcctcgacgttgaggccatggatggcgccaagcagcagagacctcccaatcccaatcccaagattggaaagtgggacgacgtggagggttcaggttcgtggggcaacctgtctctgagctccatggacctcctggatctcgagaggaggaaggccaggatcttgtccatggttgaagaggtggcttgccttgctcgagatcttgagcttgatcctcgaaatcctcgcattgcgggtcttcgggctccgaaactacgcgcaaaacgggacaactcaacaaatgtcttggccgagctggcgccgacgtggcgcctacgtggcagccacgcgggccgacgggaggttgaagaagacgccggccggaacggacggcggacggcggtggcgagcggcggagcgaaacacggcgatctaggcgaaagcgagcacaccgggaagttgcgcgggacgaggggagtcgagccaacggctcggatttgccgggggatgctcgacggcggcggattgcggcggcggcaaccggcggcggaagaagggggaaacggcgacaagcgtcggattaggaggaaacgcatcgagggaggccggcgacgagaggcgcttccgagctcgggcggcgacggcggcgagcacatggcgagcggcggcaacgagcgagggcagtggggccaggcggcgcggacggcgcaggcgcggcacgggcgacgaccacgcgggcgcgtgcacgcgaacaacggcacgcgggggccgagtcggagggctcggctcggcgcctcgcacgcgcgcgcggcgccacggcggaacgggcgctacacaggctttcgcaaacattttgtaagt

SEQ ID NO: 56690 - DNA, 789 bp, Oryza sativa
  Clone ID: PAT_MRT4530_58576C.1
atgtcttcaccaacaatctacatcgacacgttgttcaagaccgacgaggctagacgacggagggtgggcgaagctgatgcgaaggccacgctaccaacaccggcgcacggaccgacgaggccgtggatcgctgccggagctcacgtctacacatctacatcatcatcacaaccatgcatggagaacgcgaagcgaagacgacgagacgaccacaagcagcttaattggaggttctcttgcatgcctaaacttgcggaggtccccccccctccgcctgcatctgctgggctacctcgtgtgaatgctctgtctggggcggggacctaccgaccagctggaactcctagcagttcctcctcggtggatgtggaatcggatgagattttctctgtggcaagcatcccggttggacagctcaccccagcttttgctgaactgctctgcatgtaccccctccactatgatgtgtttgctccttttgcggatatgagaatcactgctcactatgccacagctttcatgttccctgctgcctctgagccttcacgtgtgacatgggacgccatgagagagtatctccccaacattcatttctctttgaaccccgcggggcgcggtgcaatgttcctcaggttcagtaccctagaagacagggatgcagctgtcgacttcccaggcgcgtttccgtcagaagacaatcgaatccggtggtcatattctagtattggagaaaccagaagacaacgagacgtgtttccgtcagccactggacaaactgaccgagcttga

SEQ ID NO: 56691 - DNA, 377 bp, Oryza sativa
  Clone ID: PAT_MRT4530_58577C.1
ctcccagggaggcttgttggcggcgcgggaggtgatatgtttattaattttccaaagaaacaatgggcattctcccgttttgtaaggctccgattctctacaccgtcgagttccaaaagcgtggtctcccgcatatacattgcttagtttggcttgctgtgcccaccgcagatatttcagcatctgtcatagatagcttcatctgtgctgagatacccgactttgacactgatcgcctagggtatgagctggtcagtgagtttatgatgcatggttcttgtggcgaggcaaacaaagcatgcccttgcatgaaaaatgataggtgttcgaaacactaccctaaagatttccaacgcgccacggctccagatccgtcg

SEQ ID NO: 56692 - DNA, 252 bp, Oryza sativa
  Clone ID: PAT_MRT4530_58578C.1
atggcgggcgccgccgccgccgccgccaagggttccaggacagcagccatcccagcaaaaaggagtttagcaggcagtaggctaaagaatttgatgcaaactctccaaaatgtgatcctggtagtcgtttggaagggacaatatttgaccatttcaatcttcttgaatgtagaaggttttgatatagcatttgatgaagctataccaacatcaatttggttcctcagctctttccctggtgtatcattgtag

SEQ ID NO: 56693 - DNA, 351 bp, Oryza sativa
  Clone ID: PAT_MRT4530_58579C.1
atggcactctttgagactttgaccatcataccaagccggtatggtgatccatggtatgctattgatgatgaaaacgctagaggccacggagttgcaactgccatctatcatccaccacgctatcgccatagatcccaggggcatatcccgctgctcctccaccttgatgttgctcgtccaccgctccaccacagccactcctccatcatgcaatcgccagtgatccacgctgccatagatcaactgagcggtactgctctccatcttgacatcgccaccacttgtccagctgacatccgtgaggaattggtgaggatgtatcctgattcagaagctatcatggttgattag

SEQ ID NO: 56694 - DNA, 282 bp, Oryza sativa
  Clone ID: PAT_MRT4530_5857C.1
ttatgcacttgtgggtgtgtcttgttgagtacggtggttgtactcagtcttgctcaatttttcccaacccagaagaggagcccctggatgatgaaggctttggtgtctagctcgtgcctgccgtcaagtgcctgttgtcgtcgccctagtcttccgctgtttctcgtttgtctttgtgtgtgctgggccttgcctcctgggacaaggaataatacacgcacgaaaggaacgcccggtgggttaattccggtcgtgacaagttgtcctttgctatttgtgaaa

SEQ ID NO: 56695 - DNA, 234 bp, Oryza sativa
  Clone ID: PAT_MRT4530_58580C.1
accaaaaaaatgagtaggatttggccacatataatcgccaagtccatacaataagacagaaaatcgatgagcagctttacaaaaagggtaagtctactttcgactaaataagagttaagactccaaatgcttggtgggtaattggcaactcgtaaccaaatgggagttagggtgaaaaaaaaaaaacaaccctactcatttttagctatcgaaagctggatcaaaacgggagct

SEQ ID NO: 56696 - DNA, 249 bp, Oryza sativa
  Clone ID: PAT_MRT4530_58581C.1
acccggcgagcggcggagaaggcggcgacccacagcggcggcggcggcgcgtcccgcggctccgagcggcccgctccctcggcgatgacggcggcaccctgctcccagtggagtcgagcaacagagacggcggcgacacacggatccgaggcggcgacgggcgcgtgtgaggaggcggcggggtagggcgagcggctccagcgggaggcggcgccattgggcgcgcagacactcgcgagcggagcggct

SEQ ID NO: 56697 - DNA, 412 bp, Oryza sativa
  Clone ID: PAT_MRT4530_58582C.1
cccacgcgtccgggctggttgagtgaggccaggtgaacatttttgtttaataaatgcgatgttgctcacatctgctttgtttgggcacctcagtgagaatcttttccttgtcggaaggtaaatagttttcagataagactaagagatgcatttctttctttctttcttgggatcttttccttctttttttttttttgcgagcaaaattcatcataatttgtttctgggttctgctgttctgctcctcctctttttgctgctaattcttttttcaggaaatgctgcatgattctgtaaacggcgattggttttagatcataaaccactactgtttaatcagtacttctacatctcacatttgcagtgcataaacgagctaatttttttacatttttaagtcaatgtttggaag

SEQ ID NO: 56698 - DNA, 945 bp, Oryza sativa
  Clone ID: PAT_MRT4530_58583C.1
atggcggcagcggaagcagcagcgcccatccacgatgaggctgaggacgacttaccgtacgagacaattgtgacgaggaagataaaggccaaccacaggaagtccgttgtgaagctgctgatcccagttatgaacaagctgggaaagcccgggacggtgggtggcacggggtacatcgtgtacaacgccgggcgcaagttcctgatactgacctgctcgcacgggctggacacgtggatctgcccggagcctatcagggtcttgttcgacaacctggtggtggcgcaggcgctggtgaaggtgtgtgagcggaagaaggaggtggccatcctgtccgtggatgtgtccctgaagcaccgggagctcaccgacgcgggcgagtaccctcccgtggcgttcgaccaccagccagtcaggaaaggggacccacttgtgctcctaggctacccttggccttccagcaagactggctccactaacctgggaagtttcttcggctctgtcaccaacgaggcagctcttgtcggaaaactgaaagacacccctcccgaagaacacatgatgactgtcaacgctgattactccggtgcaggcgggtcatcaggcgcacctgtttttagaggcgaaaatggcaaggttgtgggcactaatgttcacggtggcaaagaggtcttgtgctttgtcacggtgagctggattcaggatacactgaggaatttacaggaggtcaaaaagtccggacttggaccgaatgcaaccattgaggagattctggaatcatgcttcgctttgcttaaaagcgacgaagctggcccatcatcaaggatcaccaggagattttatttagaatgtatcagagattcagagtacgtagttcccgaacatatatatgagggagctcaattaatcagcgcagctcaagcctgcctctatctatttaattag

SEQ ID NO: 56699 - DNA, 1869 bp, Oryza sativa
  Clone ID: PAT_MRT4530_58584C.1
atggcgtcgccgcggccacacctcacggcgccagggacggtggccaccttgcctactccgccgcgagcggcgcttcctagttcctacctccgtttcgtgtcttcgaccaccacggcgctacgtcatgacgccaccaacaccaccgtgggcggcactcctttccttcgcgacaaccacctcgccgacgctatggaggaggatcaatcagccacgtatagcgtcgatgacgcgcttctgtcatcaggttttgggaggtaccaaatattgattctttcatatgccggggtcggcttgattgcagaagcaatggagatgatgctactatcatttgttggtccatcagtacagttagaatggaagcttacttcacatcaggaaagcatgattacaagcattgtttttgttggaatgctaataggagcttacacttggggtgtagtttcagacaactacggaaggaggcagcttagcaatgggtcacaaaagatggtctgtgaacttgtttccatgcacagcttgttccagttgatagttttagccatagttattaagaccggaccggaccggcggagaggatttctctttaccgccatcgtgactagtggagctggattcctcagtgcttttgcacctaactatgtgtcactaatttctctaagatttctagttggtattggattgggagggggacctgtccttgcatcttggttcttggaatttgttcctgctccaactagaggaacttggatggtagtattttctgccttttggactgttgggaccatcttcgaggcttctcttgcttggacagtaatgcccaaatttggctggaggtggttgctagcattatctgctgtcccatctttcgtcctgcttttattttatgttattacaccagagtcaccaaggttcctatgcatgaaaggcagagtaacagaagccatggatgtactggagaaaatggctagattgaacaatgtacagctcccctctggaaggcttgtatctgacaaaaacattgagctagatgaactttcaacatctgagtctacaacacttcttgctgatgctgaagaagatgacaccatcattgaagacaaagtttccagttttggaggtttgtccgtcgcgaagctgctgtcgccaaaattgatacgtgcaactctgctcctgtggatgactttctttggaaatgcattttcctattatggaattgttctgctcacatcggagttaagtaacggtaataggatatgtgcaaaagaggaggttgaatccatacactcaaatgatgcaagcttatacaaaaacgtttttatatctagctttgcagagattccaggatcatttttgtcagccatgattgtggataggattggtagaaagctgtcaatggcatcaatgctcttcacaagctgtgttttcttattcccactaattttctcccgaacggatatactaacaagagtctccctatttggagcccggctttgcatatctgctagctttacaattgtatacatatatgctccagagatttacccaacctctgtcagaacaaccggaattggcgtggcgagctctgtaggtaggattggaggcatcctctgtcctctcgtcgctgttgctctagtacacagctgccagcagacgacagcgatccttctctttgagcttgtaatcttcctctccgggttggctgtctcatttttcccttttgagacaaaaggctgtagacttaacgacaccgaagtcgttatgaattgatgaggtgattgtattgtcataccattttttctgtgctgagtacgaagttcccctgttaattgaacatttccagcaatgtgctaaaaaaaaaaaaaaaaaaaa

SEQ ID NO: 56700 - DNA, 176 bp, Oryza sativa
  Clone ID: PAT_MRT4530_58585C.1
atgggaagcagatcctttgacttaactgcacatgcagttgagtcactggcatatgggtcccactttgctatggcccacatggtcatcaaacggcggtaccatgccagtgcaggtggcaccccgaaggacgtcgccatcttgcaattgatcgccggcaatccctacagatcaagccg

SEQ ID NO: 56701 - DNA, 587 bp, Oryza sativa
  Clone ID: PAT_MRT4530_58586C.1
cacgaggctcttctctctgctctctcacgcacgccccagagacgaaaggcgccggcgatggtgggctgccgcagggcgcgcgccggggaggagaccggggagctggcggcttaggccgggcggcgcggcaggaggcagcacccctgccgggccagcgcatccaagcgcgcagctggggtgacggcgcggcacggcggccaggcgggtgcgcggccgggaggcgatgcagagaggtggcgttggcggaggagggagatgagggagctgcaccaggtaggaggtggtcgggcgccggtggcgaagggaggaaaccggcggcgacggcggccgatgcgacggcgacgccgatgggcgtgaggaggccgcggctgggggcgctcgtcccggtgcagggacgcggccacgcaaaagggccggaggtggcgcctgtgcgggccgatctggtcgcgcgcgggcggcgttccacccggagcggcggcgacccggatcaaggcgatgagggtggcggaggtcgcagtggttcctcggctgggcggagacagaggcggccgtgtaagctgctcgcgcgggcggtgtggccgtggagg

SEQ ID NO: 56702 - DNA, 446 bp, Oryza sativa
  Clone ID: PAT_MRT4530_58587C.1
tttgtttttttttttttttttttttttttttttttttttttttttttttttttttttttttttttttttttttttggaacggaaccggggggataaattattattacgccccccaaaattcgatatcccaaaagggccgggaaaaaaactcccggtcaacaaaaccggatggatctcctccccctccttccaaaacaaccaactggaaaaggggggagggacaaaatccgggaaatctcaaccaggaaggaacccgggagaggaaaaaaaaaaaccccttttttggaaaatgcccccaggatgagaagtttgctcgccggaattgccgttaaaattaaacaaggctgccacccttggtgggggagaagggcttgccaagcttggaaacgttaagcccggcccttgactggaaggtgggaaagaacttgggtttaaacaatttgccc

SEQ ID NO: 56703 - DNA, 575 bp, Oryza sativa
  Clone ID: PAT_MRT4530_58588C.1
ggattcaaccgtgttgtgcctgaccgattggggggttattcttagtgatttcgaagggttcaagctgttgagaatgccattacgccaatcgaatcaattagaatacataatttgttttatgcttatacgagataatgcatttggtgttgggtatgttttctaattttctgttcatttgttctgcaggtaaggcacgcaacaagagtcggtgtttccggcttgtgttatggttccaacacggttcaaggaggcaggtcacaacaagctttttctttaaatacgtaacgcataatcttcataatattatttttattcctttacgacacatgaacattttttctagtatacaaaagtaatattcacaaaatattctttttaatgttacggcttataatcaactataagtgaaataataggacatgttttagtcacttacagtggaaaaggtgtactagtactaaaatacacaagttgttcatcgccttcataatagagtttaatctatagttttgggcaccaatatggccaaaattttgaccgaaataatagtgtgtgtgggggaggggggggggatt

SEQ ID NO: 56704 - DNA, 300 bp, Oryza sativa
  Clone ID: PAT_MRT4530_58589C.1
atgcatctcagggcgttgctagcttggctgctcgtcgccgcgctgctcatggccggctccttgacctgctcctcgtcgtcgtcgtcgcgtctgctaggtggtgcagatggaggcgactccaaggcctgggccggcgccggcgatgtcgtgagagagtaccacggcggcggcgagaaggctgcggcgacggcgagacggtcgctggggctgagggcgacgaagccgatgccgccggcgccgattccgaacaggatgaaggcgaacgcgatgccggtgtccccgccggctcggatcggttga

SEQ ID NO: 56705 - DNA, 278 bp, Oryza sativa
  unsure (1)..(278): unsure at all n locations
  Clone ID: PAT_MRT4530_5858C.1
ctaaagctatttgtacncncatggnggancgtacaanacaaatgntcttcnaaaggttgtnccgggtgtggctgntctnacgnncatantttnaannttgtttagntctatcnctancttttncttgggnaancgnaaanacatgtttgggccncncancnnggtgtgcttggntcnncttttgtnngggntggnnntgnnaatcncnaatcttgtncaaaaaaaaaaaaaaaaaaaaaaaaaaaaaaaaaaaaanaaaaaannaaaaaaaaaaaaaa

SEQ ID NO: 56706 - DNA, 126 bp, Oryza sativa
  Clone ID: PAT_MRT4530_58590C.1
atgacacctttaagcagagtctgccaacaaagtcttcaatacttgacaatttatgggaatgaggatgctcaggcacatatcaatgatttagctaaagtgtacaatttattaccgcaaaaaaggtag

SEQ ID NO: 56707 - DNA, 1174 bp, Oryza sativa
  Clone ID: PAT_MRT4530_58591C.1
cggacgcgtgggcctcagtggagctcacccttatcccccccagctccagaaccttctcctctctcctctctcgctcgctcgcttctcgcggttgtcgtcggcggtagcgagctcatggcgtcggtgcagctgtccgccggcccgcgggtgtcagtgtcaccggcggcggcgctggtggcgatgccttcggtcgccgccgccgcatcgagggggcgccgcgggtaccgggggctcgtcgtgagggccgccacggtcgtgtcgcccaagtatacttctatcaaacccttgggagatagggtgcttgtgaagatcaagacctctgatgataaaactgttggaggaatattacttccaacatcagttcagtcaaaaccgcaaggaggacaagttgtagcagttggagaggggagaagcatgggcagcgacagcatagagatcagtgttccagttggtgcacaagttgtctactctaaatatgctggcacagagttggaattcgatgggtctgaccatctcattttgaaagaagatgacatcattggtattctcgacacagatgatgtgaaagatctgaagccactgaatgaccgtgttctcattaaggttgcagaggctgaagagaaaactgcaggtggtttgctattgacacaagcgaccaaagaaaagccttctattggaacagtgacagccgtaggcccaggaccattggttgaggatggcagcaggaaacccttgtcaatcactcctgggaataccgtgatgtactccaagtacgcgggaagcgagtttaagggtgaagatggcgaatatattgttctcagggtatccgacgtaatggctgttctttcctaagcagacaacgctcttgcgaaataggattttctttaagaaaacatgtgaaataggaattttgatatttagtcaaaactttgttgcactgctcttgcttggaaatggtgtatcgctgctattcctacttgatgtcactgcaaaatgcagagttcaatacaggacgtgctctttagactttggacatataaaaaaaaaaagctgctttccttggtagaagtaggtaatttgagctcaaccaactacctggctacagttttgtttagttgtgtctggtggtcagcctttgaacactttggaatttgcagcaattggtgttgccctc

SEQ ID NO: 56708 - DNA, 531 bp, Oryza sativa
  Clone ID: PAT_MRT4530_58592C.1
atggcgcgaggtattggccggtattactccggtgagggagatcggccaatgatggtggtggccggtaatggccaggagagaaggagctcggagagctcgatggtgtggaggggaaaaggggcagcctcgccgaatacttataggtggcaaaaggcggtggcgcaaggcggttccagaggggaagatcaaggagaacttcgtgacggcgccgtggaaaagaaaatgacggcgtcggctctgtgctccgattggatgtcgacggcggcgcgcacacacgtcggctgccagggagttgggcggctgggaagggaggacacggcacggcgtcggcgcgacttggcggcgaaggaagggcagcagcgacggtttcttagagaaggagaaaacggcggaggaggagggcaaggcacggcagcggcggagaaggacgaacacggcacggtgtcagcggcggcgcaagttggcggctcggctgggtgttgggccggcttgggccgaaggagaaaaagaatttcggcccaatttaagtag

SEQ ID NO: 56709 - DNA, 1653 bp, Oryza sativa
  Clone ID: PAT_MRT4530_58593C.1
atgctctcgctcgccgcctcctccctcccctccacgcggacccaccgcccggacgccgcctcgcactcctcctcctcctccgtccgcctcctccgctcgctcgcacggtcccgccgcgcggacctcgcgcaccgggcgctcctgctcttccgctcgctccagtccaccccgtccccgccgccgccgcacgtctcgctgccggccgtgctctccgcggcggccttcctctcggcgctccccgagggacgccagctgcacgcgctcgccgccaagctcggactcgccccgtcccacaccgtcgtcgccaactcgctcctccacctctactcctcctgcggcctcccgggcgccgcgctcgacctcttccgccgcatccccgacaggtcgctcgtgtcgtggaacaccgccgtcgacgccctcgtcgggaacggcgaccacctcgccgcgctcgacctcttccgggagatgcagcgggacacggagctcgcgcccgacgcgtacaccgtgcagagcgtcctcggcgcgtgcgccggcgccggcgcgctctcgctcggcgtctacgcgcacgcgttgctgctcagggagctcgggggtgacggcgacggcgaggcggtgtcccgcgacatgctgatcaacaactcgctggtggatctgtacgggaagtgcggggcgctggagctcgcgcagcaggtgttcgacagaatgcccgcgcgggacctcgcgtcttggaacgtgatgatcctcacgctggccaaccacggtcgtgtctgtgagtcggtggagctgttcgatcggatgactcaggtggagaagatggctccgaatgccatcacgttcgtcgcggtgctcagcgcgtgcaaccatggtgggctagtggaggagggcaggagatattttgcaatgatggttgatcagtacagaatcaagcctaggatcgaacactatgggtgcatggtcgatctcttggcacgagcagggttcatcgaggaagctctcgatatcgtggctggaatgaactgtcggcccgacgccatcatctggagaagcctacttgatgcatgctgcaagaagaatgccggattggagcttactgaggccatggccaagctagcactggaggttcctgatgatgctgtgagcggtgtgtatgtattgctttcgagggtttatgcatccgcgcagcggtggaacgatgtgggcatggtgcggcggttgatggtggaagagggcgtcaagaaggagccagggttcagttccattgaaatggatggcttggttcatcagttcgtcgcgggcgatacttcgcatccacaatctgaggcgatatatgaaaaactggatgaaattcagctgaagctcacatctgctggatacaagccagatttatcagaggctcctttggttgctagtattgacaatgccaagggcgccgccctccggttgcacagcgagcgtctggccatatcgtttggtctgctcaacgcgacgcctggggcacctatccggattctgaagaacctgagagtttgcaaggactgtcacacaatcagcaagctcatatcgaagctctatggcgtggagatcatcgtgagggatcgaattcgattccatcatttcaaggatgggtcatgttcttgcaaagattactggtga

SEQ ID NO: 56710 - DNA, 252 bp, Oryza sativa
  Clone ID: PAT_MRT4530_58594C.1
atgtcgccgctgctgcttgtcggtgagctagctgagctgatcgctctcgccttacatcttttccgctcccgggagctggttccttttggcgagagcatgattgctggaacggaggcacgatcgggagctagcagccgggagaggagaggggagaggggggacaggatgcatcacacagccagccagctctcccacctgtggactcagaaactgcagatgagatggggtgtgatggcaagtgacaggatatag

SEQ ID NO: 56711 - DNA, 447 bp, Oryza sativa
  Clone ID: PAT_MRT4530_58595C.1
catctcaaatggcctttgtttacacttttagccaaagtgcttgttgttatcctgttctgattcaactagacataacgttttgtttttgccatatttcagatggcaacagaagaaagtaaaaattttcaggaaaggaatatatatcttgttcttgttcccaataagatagctatacaaaaagagcaggatgagctgaacaaaaaggatactgcgatagaagacagtgaccaatcagatgaccaaccagaggagagtgaacctgtgccagcacaaccggaggaaagcaaggagactgagacagaagtctcagcaaatgtttgattgaaccataaagtcttggggatgtcttctcagatttcgtaaggtatactgcccatttttttggtctatattaaaacagtcctaatattctcatcaggaacttatttactgttctggtgacatgta

SEQ ID NO: 56712 - DNA, 315 bp, Oryza sativa
  Clone ID: PAT_MRT4530_58596C.1
gatcaggctcaagctcaagcccaagctatttggccactaaacttgccgctcaatatcccggtatctaccccaagctacaaacaactgctccactgtagcatgtcactaccgtcggtggtatctggtacttgaattgctacagtatagtagtgacaggagagaaatataattcatgcatcattcgtgtgtgacaagttgcaacactcggggtgatacaatctgaatagaaaatgtcatgcaaatttaaacataatgcctctgtaaggataaatcctagtacattgttgaaattaattatcaaaaaaaaaaaaaaaa

SEQ ID NO: 56713 - DNA, 415 bp, Oryza sativa
  Clone ID: PAT_MRT4530_58597C.1
gcctgtcaaagaaggtggtatttaggacatgccagcacaggtatcagtgtaaagatgcagtacagtgattatccagaaatccacggatcctagtagaagttgttgccccaggtcatttttacgcattcacagcaagtggtactagcattaacaggcttctcgagtatgaattttgctcgggtcccttagctatccatctgaccacaagcttttctcccccaaaataaaagcactagctggtacaagttgtatcctcaaaagtccaaaagaagttgtggcaatacacgctccagatgggtgggttcaatagttgatgtgccctctgcttttgcaataaaagcagaacgttgaacagcctttgtgacaaatatccgtagaagttaacaggttactttaagtgcactggcgttggcag

SEQ ID NO: 56714 - DNA, 441 bp, Oryza sativa
  Clone ID: PAT_MRT4530_58598C.1
gcacgagggtttgcatctttcatcctcttgtactcgctacccctttcttcttcaacatgtgagaataaatttcgttttctcccgtggcagccaaacttttaatgcatcaattgcattagttacttccaggcgtgtccacttcgacccaaccactccccacgctttggttcgtggttgccaaaacccaactcgtttccgccccttcccatccatctctcccctgtttgtttcttggccctggtcggcctccccgtgttccctccgatccgctggtcaaaatttggtgttgagtggcacggcgggatctccatggccgggaacgcgagcggggattcgccgtggttcttggcttgaggccttggggtgggtcagcggtcgccgcccgcccggtatggccgaggaacacgaccaccatgggtcgtcgcggcacatgtcggcgtc

SEQ ID NO: 56715 - DNA, 309 bp, Oryza sativa
  Clone ID: PAT_MRT4530_58599C.1
gattacaagacagaattctggtctctcaagcaccggattgaattgccagtcccagatataaaggggaagcttgatgatggtgatgattggagtgcgatggtattgtctgaggacggggatgtgcttgtgctggtttactacagacaatggctgctttacattggtactgatggcaagctgttggcgagttttcaacatgatgttgggtgccactacaatactcctctgaagcttaagcaaagccttgttccacatgcattctttccattgttaaagggttatgtcgtgaatgctcgacctttcatctga

SEQ ID NO: 56716 - DNA, 598 bp, Oryza sativa
  Clone ID: PAT_MRT4530_5859C.1
ttaagccacccccgtgctctcctccaccgtttccgccactcgccgcctctcctccccgtcggattcgtgcccgcgccgtcttcctctctctccgccgtcgccgccgagctccggttcgccgccgtagtcgctctggacctcctcccgactcggcgtcacctccttcggcttcgccgcgtccccgtcgacctcggccaccccttcgtttagcccgccgaccggggtgagccgtggaccgctcctttcgcttgccccttccctattctgtatcgggcgccgctccgccgcgctgttggtcgcgggccgcgaccatcggggcgcgggtgcgccgcctcccgtcggccgtgccggcgtggccgccttcgggcgcgccccgcggctgccatgtggggcccggccgtcagccgcccgcgccctcgggtgcggctgacgcgtgggacccacggcgccggccggtgtgagccgggtgcacccggtccaccgtagaccgtgaggctgccgcgtgggccccactcccatggacccggtccgcgcgcccctcccctcggcctggtccaccctagattaaacaaacccccaactagtggacactctactc

SEQ ID NO: 56717 - DNA, 474 bp, Oryza sativa
  Clone ID: PAT_MRT4530_585C.1
atggactccccagcgatccccacggacttctcaccgcttctccgtctggcaccccgtaatgaacaatgctatacaaaagaaaacctagaaaaagggatttatgacgtcatcgctgacgtcatcatcgccggccatggcacagttgacacgaccaccggcaaaagagggctcggttgggctatccgaggacacctacgcgtagaggacgacgacgcgaactcaccggtgcaaagaacaacgacggacaacgacgaacgacggccggcgacgaggttcaatggcggcacggttcggcttgacggcggcgatggtgctccggtggtcttcggcggctgcgaaggggcggacggggttcctctcctccgtgcgcacccgacggcggcgacggacggcagcggcgacgatgctagcggcggcggctctacgggcgacgagagagctcgggagatggggcaaacgaaagaggacgactag

SEQ ID NO: 56718 - DNA, 302 bp, Oryza sativa
  unsure (1)..(302): unsure at all n locations
  Clone ID: PAT_MRT4530_58600C.1
tatgtgccatacatactgatcacgctcgggcaaatgtcatatggggtcacttctggcgattctgatgttcgcgaattctgaaaggacatgggactactctgacgattgcccgggaagtcgaggtaggattgcacaaagacatatgactgaaaactgacagtgcaatacaggatcgcttattctaacttgngagcatataataaccaacaagcaaacaaattacttgtcgctatagaatgtaaatgaactaaacttatagcagtgtctgtccgtcggattatcatcagagcatttacatttga

SEQ ID NO: 56719 - DNA, 715 bp, Oryza sativa
  unsure (1)..(715): unsure at all n locations
  Clone ID: PAT_MRT4530_58601C.1
aaaatacaataaactcctactgtaaatccccttttctttttctntctccttctctcgtcttccttcttcttctccataaaggtcgaggggatagtgaagctccgaccgctgaggagaaggcaatcggggcggcggcgctccggtggctggagggcggtgacgtcggcgtccacgcgtgttcccgagcacgacgcacccggggaggtcggtgtctggtggagagagaaagggagatggccggaacggcgacgacaagagctcaactctggcgagtaaaagaagtggtgatggtggcttataggatggctaaaggagaggggaaactagaaaaatgggttcgtcggagggaggcaagtatggtggcgcgaggatttggttagtgttgctccggtaaaggagattgggcatggcaagatggtggccggcatgggagagagagaagaagggccggctatttataggggtgagaggcggtggtgagaggcggttcggaggaggaggtcgaggaagacacggcaacggtagcgtgaagaaaagaatgacggcggccggcttcgtttccttagcggcgacggaagaggagttggcggcggcgtgagccgtgcacggcacgcgcacgggaggaggaggcggctccgctggggatgttacagccgcggccgggagtcatcggagcgtcatccccgactccaacccgaggagcgacgccgcctaa

SEQ ID NO: 56720 - DNA, 522 bp, Oryza sativa
  unsure (1)..(522): unsure at all n locations
  Clone ID: PAT_MRT4530_58602C.1
ccctgaagatctatatgtccaagcctggagccacaagaagagagtccattcatcccagtaggaaatccgaaaccccctgctagttcgagtggaacaactttaactaagaacacgagactagaggtgattccacgcccacctcagaacctgaagatctatatgccaattttctgaggatacagacacagtccatattttagattgttttgtactgcagctgaccagtgatcactgaaatacttctcagctttctaacatgaaaagaaccatcaataccaaagagggctcggtgtagctcaagatatggttaaattttgaaccacttttgctgtagcatctaggaggttgcttggtttatctcgctaaatcattagtataccttcacttgtattctgggatcaatattattttgtcacccatttttcaggtgtaattttccacaagatgaattttagttcgtcccatctgatgttcaatgtaatanccattcattctttgatttaaaaaaaaaaaaaaaaaaaa

SEQ ID NO: 56721 - DNA, 254 bp, Oryza sativa
  unsure (1)..(254): unsure at all n locations
  Clone ID: PAT_MRT4530_58603C.1
ctcannttntaatcagggttangtctagaagctccacgttgacacatcgcacagcgccatgncgtcnggggaancgtgctgtcnccaggggccttccagnnggncggccgggcccaaactccnccngccgcanantccannctctcanaannatcaaanggcccnccccccccncctgtcnacatnnaaaaccgcnccnccnacncttctgactacggcctccgtccgccacccggggatcccccgccggagcc

SEQ ID NO: 56722 - DNA, 903 bp, Oryza sativa
  Clone ID: PAT_MRT4530_58604C.1
gggctgccaaatctatcttctatcagtcaatctgaaagacatgggcgccgctgaagtgcaagttcttctcttagctagtcacgtaaaatagagtatggacggcagacaggctagaaaaaagaggatggcaaaaccaaaagatttgcctactttgctacaatgttgatgaatcggccctgtacctcctggccaaatgtgactcacagagaggatatgggcagaaatgcagagatggaccgggactgaccttcagatgaacaactggcatagctatcactcagtcgagtaatggtggacacttgtaacgaaatctccaaacactccacgcaaacctctcaggaccctggtgattttaatctcgtgggaaatctggtgcgaaaggaacgcaagaatcttccgcaacaatgcatattcgctatcctcaatcctagcaaagatcaaggaggaagagagagcatgggtcaaagcaggggcttctatccacaggcgttcgatgttgccgtggtgcgcgaagaaaaccgggtcgcgtgccgccgagtaaggtgcgcgcccatgtcctcgtcgttcggctgcctctgatcgccggtccattggtggacggggccgtgcggcacatgctcgagtgctcaacggtgcccagcctcggttccggctggtcgccggcatggtacggtacggctgccccatgaacagctccgtcttccttgctcccgaaatcatcgtcgcctctctcgtccgccgtcgtctgtccgcagctgggagccgtctgcccgtccgctgtcgctcgtatccaaatgcccgagggatccgccgaccacggccgctgccatttttctcgtcgcgcaggatgccaccgacgctgtctgccgtgaatgtgtctgcctgtgcctggccgcttaccat

SEQ ID NO: 56723 - DNA, 488 bp, Oryza sativa
  Clone ID: PAT_MRT4530_58605C.1
atgaaaaaaacgtattcgtttccgacatttagccaaatgtacgctaatgaagcaagaatcgtgaaaaaggtaaaagaatatattcgttatcaattcagaacgatcttatgtaataaagaacgtcagcagtttgtacactatcttcagcataatacgcaatggcaacctttatttaatcacgagccttaccgagtcaatacgctcttagaaaaatattgtaaccgatcatttaataaatccgaacggctagaagcgatcttaactaattttatgttaatggaaaaattattgcctttagcgctttgtcgagcattaagtgagggcaaaagtatagaaatagctaaattaacagataatttaaagatttgtctaatggcgaatcaacttgacccattagaagggttctgggcgattacgttaagagatcatcaagatatgatgatttatcacgcaagtttttcttttattaagccgaatggcttactgat

SEQ ID NO: 56724 - DNA, 224 bp, Oryza sativa
  Clone ID: PAT_MRT4530_58606C.1
atgccgcacaaagaaaccccaaaagatgctggcagaattaccgcctgcgcgtgccccgccgaccgcgacctcgcatggcaccttcaccagaatcaccacggtccagccgtcgcgctagcagcttgcttcgccttgggcccgtgcggcagcggctcccgtggtgctagtagctgcatgcgaggcaccacggcggcgctggtgccgatgccgatgcagccgctcag

SEQ ID NO: 56725 - DNA, 339 bp, Oryza sativa
  Clone ID: PAT_MRT4530_58607C.1
atgaaccagcagctcggcgacctgctggagaccgggaagggcgcggatgtggtgtttgaggttgccggccagacattcgcggcgcggtcgccggtcttcagcgtggagctctacggtccgatgaaggagagcgaacccaccggggtcgtgtgcgtccaagacatggaggcgcaggtgttcaaagcgttgctccgcttcatgtacaccgactcgttgccgaagatggaggaggaggaaggcgtcatgtgccagcatctgctcgttgcggcggatcggtacaacctggagaggctcaagctgatctgcgaggagaagctgtgcaaggggaaactattttaa

SEQ ID NO: 56726 - DNA, 429 bp, Oryza sativa
  Clone ID: PAT_MRT4530_58608C.1
cagcaataattgacacaatttcaacaggattttttaacatagcaccacatataaacatgtccaagcataacaaagtaccacatagtcaacaacaacacattacatgtccatcaaaagcaagagctatcacagtaccacgtagaatctctcaacctgaaactgaaggtcacctttccctacttacggagtataagtttggcatatataatcagccggctagaaaacggtcggcgaatcacaccaacacgaagatttacacgatgacacgatgtaataaattaaaatacaaatgccaccatctgcttcatatagagaaatgataggcatctttctgtttcttccccactgtaattgcacggggaggggggtaactggggaaggtatatacagtgttcgaaaacttaagaaacgaagtcccatgaaaataaa

SEQ ID NO: 56727 - DNA, 588 bp, Oryza sativa
  Clone ID: PAT_MRT4530_58609C.1
atggagccgctcctccagctcggccgcgcggcggcggccagcattgagatcaacctcgacgtcgaggacggcaaggcacgcggtgcagtcaaagtcgttgacttgtgcggggacaatgtggaggagttggagacaggcgacggtgacgtcgtcggcgagagagcgaggcgaaagaagctcccgacaccttctcgttggcggcagcatcgggacagccgccaccagccatcgtgcctcccaccgtcacccgcgccggatccgccgtgccaccgctggatccgcgtgcgtggggcagagcggcggccagatgtgcttaggaggaaggcggtggaggaggaggtagagccgccgcgcctcccgcccgcccgctcccggccgcctccttatcggcagcagcaccacccgaggtcgtcgagccggcgtagccctttgcttggccaccgtcccataccgccgttgctcacgaaccaccccaacctgagcggctacttcctcactggtgccattcttccggggttgctccacggccacgcccacatccccagcgtgcgccacagccttgccgcccactacatgagaggagaatga

SEQ ID NO: 56728 - DNA, 1145 bp, Oryza sativa
  Clone ID: PAT_MRT4530_5860C.1
atgagtagagtgtccactagttggggttttgtttattctagggtgaacaaggccgaggggaggggcgcgcggaccgggtccacgggagtggggcccacgcggcagcctcacggtccacggtggaccgggtgcacgcggcttacgccggccggcgccgtgggtcccacgcgtcagccgcacccgagggcgcgggcggctgacggccgggccccacatggcagccgcggggcgcgcccgaaggcggccacgccggcacagccgacgggagtcggcgtacccgcgccccgatggtcgccgccggcgaccaccggcgcggcggagcggcgcccgagagaggggagggaagggggaaacgaaatgggcggtccacggctcaccccgggtcgacggcgacgacgggaacggcgaccggagcggaggaaggcggcggcgcggcacgggtcgacggggacggcggcgttccggcggtcggcgagcgaaacggaggggtggacgaggtcggcgaggtcgcggcgaacccgaagaaggcgacgccgaagcgggagaaggtccggggcgacgacggcggcgaaccgaagctcggcggcgacggcggagagagagagcgacggcgcgagctcgattccggcggagagagagcggcgggtggcggaaacggcggagggagggacggggagtgtttgtatagggttgggagggggagagagcggccggaggagggggaaacaggcgcggaaggtccggccgccattgatgtgccgacgaggttaggggagcggtttccaaccgaatccgagggagagagggagggaaaattggggggaaagggagagggtatctcggggaatatttccccccactttattgcgcgcggggacggcgggaggcgtcgggattctcggcggcggcggcgctagggcgcgggcggggcggcgggagcggcgggaggatagggatgacaggtgggccccacccgtcagcgagggtggcgggcgggcccgcccgtcagcggcgcgcgcgcggggagaggccgagtggtccgcggggaggaggagagagagggaaggagatgggccgagccggcccaagaggggaagggggggggaaaaagactttttagggtttttctttttataaactcattt

SEQ ID NO: 56729 - DNA, 888 bp, Oryza sativa
  Clone ID: PAT_MRT4530_58610C.1
atgctcgaagtagaggaagaagaccctgagcggctgacgatgactagtgtggacgacgaggagacagagcggggggagggagagcgccaggcggtgggcgtcgaggccagcgaacggatgggaggcggtggtggagatgagctgtcggcgcagccaaggagacgacctcgaggtggtagccgccggtggagcagccgaggccggcagcccggcagacagcagaaagcggcgccccgtcggccaggccggcggctgaaggcggagggcgtgcggtgccggccgatggtggcatgctccaagcggcagtccgccagatcggcgaggagtccgggcggagatggcgacgacagcgaggccggcactcggctagatgggatcgaccgcaacgacgacgacctcgaccgcaacgacgacgacctccagatgacgactgccagatggcggcggaggcggccgccgaggaggaaccggcagggacgtgtcccccgtactctgtgccgcgccaacgacgccacgacgaccatggcaacgccggcgcccggtgaggccgacgaccagcgggcggcgcggcctaccggcgacgtcggggtgctggtggagatcgggtcggccatgccctccagatcggcgatgacgatgtggatgtggaagggaggggaggagggggaggagagaggggaggaggagatggggcgcggcggaagacttggcgtgaggcagccgacgacggagcaggagcgacggcagggggagaggtggagagagacggccggcacgacggcgagctcggcggcggagaggaacggcgcgcggcgcggcggaggagagaggagcggcgcgcagagcaggggcggtgccagcgggagaggcggagagagacggccgacc

SEQ ID NO: 56730 - DNA, 317 bp, Oryza sativa
  Clone ID: PAT_MRT4530_58611C.1
tcctcctccttccgcggcgcagtagcgggggccacgccccgcgtgcgtctccggcgagcggcggcggcgcgccggatctggcgcggcgcgcggcgtgggatcggagggtggcgtggccgtacggtccgggcgatgaggaggagaaatggaaggggagggggcgtcgcgtcgtgcgggtgacgtggcctagtggggaggtgggtgggattgggtgtgtggctggctggtgggcccggacaactgtacggtacgggagcgtgcgtgtgacaaggacacgtcggattggaaacgtttgctgccgatacacctccgtgtga

SEQ ID NO: 56731 - DNA, 479 bp, Oryza sativa
  Clone ID: PAT_MRT4530_58612C.1
cggacccgtgggcggacgtttgttgtatgatagcgacaatgatcgtaaatctttccttgaggtagttaagcagacagtgctggatcatctaacaaaaaaatgccatccacatgttcaagtgggtggacttctttgccagactgaaaagaaggatagcagacctgaattactgcgtcgcgtagctgctggtggaggtgtgtttaaaaatgataaacgcctcaagtgccagattccaggggccaatcttaatgatattggaaaccaggcagatgatctcttggagtcaatggaatcaaggcccacaattcctgatctaaaacttctcgcttgactattcatcgtaagagaggaggctttaaatatcatgggaggtggcttgtttgatgaaaaaaaagaccgctggtttacaacgcttcctgatgcagcagggaaacttcttgagccatagctgagttgcttctcaaacccttgggaaaagc

SEQ ID NO: 56732 - DNA, 1321 bp, Oryza sativa
  Clone ID: PAT_MRT4530_58613C.1
gaaggtttttttttttttttccttgcaatttgagattctattcgatatacagattgagcattattacaacatataaaaaattatgcactgccaaaaaaatacatactggtactgctaacgcagaaacaacaatggtatagctcccgatgcatccctcttattcgcttgaaaaacactgaactaatacagtgaactgcattggcaaccgatccggtttctatgccctttaacatcaactacaactcgggacctattctccaaaaatgataaggttaaacttgcgactacatgtactgggaagtagtataatgatgaaaacacaattaaaaggtatcactgatagttttcttaccaaggtagtcttgttactatgataaacaggtctctagagtcaccgagagacaattgccaatcttggcacacaggctgctctgggtgtgctgctttctcaacatgagaatgatgctggtaaatgctttaaactagagatatcaaatagttccataaaccttaggtcagatactcttgctttggcagcagcaaagcgctgatattcatcaaatattgaagttaggcaccagcgttgcaatttcctcaagcaaccaaccacacagccagttcgatgctttccacgcttgcagtgaataagcaccgggtgatttgccacatctagcacaacttttagagcctcacggattctatcttcaggtatgttcacaaagggctccttggaaccgtcgattccgaactggaacagcctgatcccgtgggcgcggaggaactcctggttcgcctccgggtacggctccgggcagaggcacaggacggagcggaggcgaagggactcgacgaacggcaggttggagatgtcggggaagccggagcggtatacgccatgatccaccatggcgaagttgagcggcggcaccagcagcccctcccccgccgccgccgccgtcgcctcgccctcctcctggcggagcaagatcgagcagggcggcggcatggcatcgtcggtatgatccctatcgtcgtcctcctcagccagcggtggctggttcttccggtgttgggcgtcctgggtcagcacaaggctgcaggtggcctcctgccgcatagctcgctcgaagacggatgcagggaatgtgataggagagctgatggtggattcggattggattcctgctcggtggatgtggatgtggctgtggatgaagtggagtcccctccgcttgggttgggttgggcgcgtgggttggcgccggaaggagggaggaatagggcgtgcgccgtgcggtgccgacaagacgcaaagagttga

SEQ ID NO: 56733 - DNA, 1590 bp, Oryza sativa
  Clone ID: PAT_MRT4530_58614C.1
atggacatgaacagtggttggcttggcttctccttgtcttcttcctcggcgaggggttatggagacggctgtggtgagggaaatggaggtggagatggagatggctcgtgctcgtcgcctgttgcagcttcacctctcgtggctatgccgttgcactctgatggatctgtgcactatgatgctccagattggaggcatgcagaggccaaagaccccaagcttgaggacttcatgagcgtcagctacagcaacaaaagcagcagcaacctgtacggcagcagcagcagcagcagctgcggccacgccgaccagatcaaataccatcatgtccatgacgtccaagctttctcgacgccgtacttctacggccatggcggcagcggcgttggcatcgacatcaacatgaatgcgccaccggcaggctgcacaggcgtcctgccggaccaccgaccacctccgccgcagcaagaccatatcttcctgcctccccatggccagtacttcctgggcccaccgaacccaatggcgccggcgccgatgtacaacgccggcggcggcggcggcggcgtcgtcgacggatccatgtcgatctccggcatcaagtcgtggctccggcaggcaatgtacgtgccggaacggtcagcggcggcgctgtcgctctccgtgccggccgctcccccgagcgaggcgccgctgccgccggcggcgatgccggtggtccgcaagcccgctcagacgttcgggcagaggacgtcacagttccgtggcgtcaccagacatagatggactggaagatacgaggctcacttgtgggacaacacttgcaggaaggaaggccagaccaggaaaggaaggcaaggtggctatgacaaggaggagaaggctgcaagggcttatgatttggcagcactcaagtactggggtccaacaactcacataaattttccattgagcacttatgagaaggagctggaggagatgaagcacatgacaaggcaggagttcattgcccacttaagaaggcatcaccagcacgggagatggcaggcaaggattggaagggtcgcagggaacaaggacctgtatctcggcaccttcagcacgcaggaggaagcggcggaggcgtacgacatagcggcgatcaagttccgcggcctgaacgccgtgaccaacttcgacatcagcaagtacgacgtgaagcgcatctgctccagcacccacctcatcggcggcgacctcgcgtgccgccgctccccgacgcgcatgctaccaccggacgctccggccggcgccgccggcgtcgacgtcgtcgtggcgccgggcgaccaccagcagatcagcgccggtggcggcggcgcgtccgacaactcggacaccgcctccgacggccaccgcggcgcgcacctgctgcacggcctgcagtacgcgcacgccatgaagttcgaggccggcgagagcagcggcggcggcggcggagacggcgccaccaccaactggatggccgccgccgccgccgcggcgcgcccggtcgccggcatcccgaccaccgtgcaccaccagctcccggtgttcgcgctgtggaacgactga

SEQ ID NO: 56734 - DNA, 254 bp, Oryza sativa
  Clone ID: PAT_MRT4530_58615C.1
cataatggtactgttgtccaggacccagagcttggcccaaggtcaattcaaaccttcagggtgtatcagaggaaagaacgtatcaaaatgtttcttggtgtcagcgccgcaattggtggaagaaggaacaacatgcaaagattgcatgggtttgctggagcaaactgcccaaaaccatttgccaaaagacctaatattttgggggttggggaataatactgtgggtgtggtagtacatgcactggcagtggtct

SEQ ID NO: 56735 - DNA, 171 bp, Oryza sativa
  unsure (1)..(171): unsure at all n locations
  Clone ID: PAT_MRT4530_58616C.1
aagtgaacactcccactgtgttgtgtgaatctgtttgtgaaatcgagggatgttctcactgtggtttagcctcgtgactcccctttaatttagcgacgataagcactcgatgcccccctctcctatctggaatatatccanccttttatccaaaaaaaaaaaaaaaaaaaa

SEQ ID NO: 56736 - DNA, 1872 bp, Oryza sativa
  Clone ID: PAT_MRT4530_58617C.1
tcgcgaacggctataattaggcggttccaaaacgcgcccccacgcttttgcgcccacgaccccccgcgactcccccgctaattacacaactcgccaccaccgtaacgggcaacgcccagaagcgtccgcctccccctccctccgagggcgagatcggaacaaggcccccacccaaccaccgccgccgccgccaccggcgatcgccggcgacccccgggccacgggaggcgccccgccctcctcgccattggagaggaccttctctcctgctcggattcgtttgctctggtggtggtggtggggctttgctggcgcgaggccgcgcctgccatgccggagaccgggccctacggccacaagaagaccgacggcatctgcgacggcgtgtgcggcgagcctgcgtcaaaggcagttctgaccatgtcgaggctgagatgtgcacttcggggatttgatttcagagcactattggccctattgataggagtgccaattctaattttaatgatatatgctcatggtcagaaggtcacatacttcctcaggccaatatgggagtctcctcccaagcccttcaaaactatccctcattactaccatgagaatgtcaccatggcgaaactctgcaagttgcatgggtggaaagtccgggagaccccacgacgtgtcttcgatgctgtactattcagcaatgagctcgatattcttgaaatacgttggaatgaactaagcccctatgtctcagagtttgtgctgcttgagtcgaactcaaccttcactggattgaaaaagcccctgcacttcaaggaaaatcgtcatcgatttggatttgctgaatcacggctgacatatggtatgattgggggaaggttcgtgaagggagaaaacccatttgttgaggagtcatatcagagggttgccctggaccagcttattaagattgcaaaaatagaagatgatgacctgttgatcatgtcagatgttgatgaaatcccaagtggccacacaattgatctcctgagatggtgcgacgacattcctgagatccttcatcttcagcttaggaattacctctactcatttgaatttttcctggatgacaaaagttggagggcatcgatacacaggtacaggtctgggaagacaagatatgcacacttccggcagacagatgagcttcttgctgattcagggtggcactgcagtttttgctttcgctacattagtgattttgccttcaaaatgcaagcttacagccatgtcgatcggattagatttaagtacttcctgaaccctgaaaggattcaagatgttatatgcagaggggcggatctttttgacatgcttcctgaagagtacacgttccaagagatcattgccaagttggggccgattccaagcacattttctgctgttcatcttcctagctatctgctacagaatgttgatcggtacagataccttctcccagggtactgcaggagagaaagtgggtaggcacttgcagcttgcataacctgatgcgcatggggatcgtggatgatgcccctttggagaacaacatgcgagatattggttgtacctgatacaatttggctgacttagttgagcgatcgcttggcgatttgggtgagttcatgattttgtactggtgtagccaaacattggaagaaggcctgacagcatagcgcatgcttgggcgctgcgttcttgtttttttagaggagctcagcagtgtgtgtgcttttacctcctgagttttacccattacttccatggttgatatatgaactcagaaactcttgtagattgtgaactggatgacatccagaattttttttttatcttgttctgtacagtatcatttactta

SEQ ID NO: 56737 - DNA, 513 bp, Oryza sativa
  Clone ID: PAT_MRT4530_58618C.1
gggggccctttttaaaaaaggagggcccttttttaaaaaaagggttggcggggggctggtttttgaaaaaccccccctttttcagccttgggaaaaagggaccctggggggggaaacccccctggggttctttttggcccctggggaccccaaaaaccccggagggcccccccccctggaaagggcaccccgttggaaaaaaagggccaaggggcctttaaatggaattggggggggggcccgggaattgggaaaacccccggggggaaaaaccggcttttaaccgggaaaacgggcccttgcccttgaaacgggaaaaccccgcaaaacccgggccaaaacctttaaaaaagggggcacccaaggggttcccacccccggaaggatcaaaaacctccccccccctttaaaaaaaaaccttagtgggaaaccggggggccaggggtaaaccgcccccgaaaaaaaaccagggggccaaatttagggggggggtccaaaaccaaaggccttatt

SEQ ID NO: 56738 - DNA, 396 bp, Oryza sativa
  Clone ID: PAT_MRT4530_58619C.1
atgacatcgctggtgctgtcgaggtcgtcgttgccgaacgccgccgtcgccgtcgccagatccgttgttgccggacgccgccgtcatcgcgtcgtcgccagatccgcgaggtcgtcattgcgccgtcgccagctgtcgtcggcgccgtcgtcaaccgtcgtctccgaggtcgtcgttgccagacgccgtgtcatcgacgtcatcgccagccgttgtcggtgctgtcgccagatccgtcgccagccgaggtcatcgtcgcctgccgtcgtcatcgccatgccccggcggattcggccggtgcggcatgtagtagaggacgctgccgtctcgctcctgccgtcgtgctccagggtttccaaaaccgttgggaccggggttaccgcgttccggcggtaa

SEQ ID NO: 56739 - DNA, 874 bp, Oryza sativa
  Clone ID: PAT_MRT4530_5861C.1
aaaagtcctttttccccctcctccccctcttggaccggctcggcccatccctccccctctctctcctcttccccgcggcccattcggccctctctccgcgcgcgcgccgctgacgggcgggcccgcccgccaccctcgctgacgggtggggcccacctgtcatccctgtcctcccgccgctcccgccgcctcgcccgcgccctagcgccgccgccgtcgccgaatccgccgcatcccgtcgtccccgcgtgcaatcaataggggggaattattccccgtgattccctctctctttccccccatttttccctccctctctccctcggattcgtttggaaacctctcccctaacctcgccggcgccatcaatggcggccggatcttccgcgccgtttccccctcgtccggccgctctgtccccctcccgaccctatataaaccctccccgtgcctccctccaccgttttcgccactcgccgctctctctccccgccggaatcgagctcgcgccgtcgccctctctctccgtcgtcgccgccgagctccggtccgccgccgttgtcgccccggaccacctttcccctcggcgccgcctccttccgcttcgccgaatccccggcgaccttgtccacccgtccgtttcgctcgccgaccgccggagcaccgtcgaccccatccacccgagccgcgccaccgccttcctccgctccggtcgccgtttccgtcgtcgccgtcgacccggggtgagccgtggaccgccgcttcttttcccccttcccttcccctctctcggccgccgctccgccgtgcctatggccgccgccggcgaccataggggcgcgggcgtgctgcctcccgccgctgcgccggcgtg

SEQ ID NO: 56740 - DNA, 1629 bp, Oryza sativa
  Clone ID: PAT_MRT4530_58620C.1
atggcggaagagagagaaagtttcgagagtcaatgggctccctccgatatcacccgacatttcatcaagagccggctggccccaatcaaagaaagatctcgcacggcctttgaatttgacggcaagtatgaccccaaccgtgaagatcctgaatttcttgatttcaaggtcatgaaggagagaatgtacaaaattttctcaaatgcaattgtagtcagctattcgcacttgctgccagtggttccgtataacgccttcaaccctcctccaccggaattcgctctgatgagatctgaccccccgattgctcaacaccgctcacctcgtggtaaaactagccaagtcagcagaggaccgaaaattcggtctgctgatcaatcggacacttcaagacctatcggtcagtcggactttcgcaagaggaaactagccctgagtgatgatgaaggcgatgacgctgacaaaactggtggcgatagaacaaccggaaaacaatcgcgacaggcgactccaaagaagaaaacatccagtcgtcccatgccgaaaattagaaaatcttccaggaagccgtctgacatagatccttctggaaaagaccccgagccgactgacatggaggcaaacccttcaaaagaaactgggccaactgcagaggatcatccgagtgacgaacaaccggcaaccgacaatgtagaacctagcaacgagcccccgactggaaaccagtcggccgaagctgaagtgagtgctagccaggagcccccgactggaaaccagtcgggtacagaaccaaataaagatatccctgaagtagaagctcaagctgacagtcctcctaaaaaagatgccagcgtcgatccggggttcaactctcctgctaaagtgcaaggacctatccgtccccgaccggaaataatcacaggcccaatgatcggcgatgaagaagaagtcctgcggatacagccggctgaggattctcgcctacccattttagtcaagtggtgggacgacgacatgcaacctcagggtatagtgataaacaagcaaaaggaagatgaggaagtatgcttgctgaaaaaggcactcagccaggccactggcattgtaaacagaatccatcttaggaacgaggcgaagaccgtaactcttgaaaacatcacagtgcaagccaccaagattttcaacctagagaagcaggtcgaggctctggagaaggacaaggccgaactagtaaagcagagggacttggccttaaaagatgttgaagatcgcaaaatcaagtcccaggcacagtttgatgtcttagtcaacaagatcaataggcttgaaagggccagggataaagtcggtaatgccgctaccccactcatccaagccatgttcttcaataacgccggtccgagcacacttgatgcttccgagatcttcgacaagctgagagtcgctccggatacttatttcaataatatcagggaggctggaagtatgggagcaagcatggcattagctatgaccaaatctttataccccaaaatcgatatcgacgccgttgacgggtttgcagatggacaagtgaagaaacagccctcgacctcatcaataacgcgcagaaagccaccgacaagatag

SEQ ID NO: 56741 - DNA, 689 bp, Oryza sativa
  Clone ID: PAT_MRT4530_58621C.1
aaaccattaaccattgagagtgaagttcagatcccagaaaataccccttctagtcctattcagctactacttgaagcacccaatgcccatgatagtgatatggcggcgtcccttccgcctgcggacgagacgacgaaggcggcgacgacggcgacggagaaggaggaggcggccgaggtcgtcgcaccggcgccggtgggctacttctcagcgccgccgccgccgctcggggcaagctcgcgtggacgcggggcggccaatcggtgtgggcagcgaacacgacggcaggagcgagacggcagcgtcctctactacatgccgcaccggccgaatccgccggggcatggcgatgacgacggcaggcgacgatgacctcggctggcgacggatctggcgacagcaccgacaacggctggcgatgacgtcgatgacacggcgtctggcaacgacgacctcggagacgacggttgacgacggcgccgacgacagctggcgacggcgcaatgacgacctcgcggatctggcgacgacgcgatgacggcggcgtccggcaacaacggatctggcgacggcgacggcggcgttcggcaacgacgacctcgacagcaccagcgatgtcatctcgatgacgacgattggcggagagagagggagagagggatgctatcggcgtggggcccacgattggc

SEQ ID NO: 56742 - DNA, 254 bp, Oryza sativa
  Clone ID: PAT_MRT4530_58622C.1
aatacccaagtttcacatgtacatatgataatatatgagcttatttttaacttccgaaccactatactgttaaaacgattacaagaaccgcctgggtggtaaggactgggtgcaccatagtacctagggtagaaccatatctagaggcacgttaaaagccaacagagcttgagcatgagccagattccgatcaaaggagagatcaccaaactgttggagttgatgttgctgtgttatggcctgaacaatgtaaa

SEQ ID NO: 56743 - DNA, 293 bp, Oryza sativa
  Clone ID: PAT_MRT4530_58623C.1
tttttattctcctgaaaaaaaaaaacagattaataaagagggggattttttaaaactgttgttttatttttagaaccacaaagtttaatgaacaaaacgccctcctgggtgtggggtgccttcttgtcttctttcctctctcttgtcctggggggttcccccttcgtgcttttttttcttgcccccttatctgttgcggagcgtcttcctttttgggcccgggctgttgtccttactcttctcgttttgtagctgttttggtgggctactccctgccctttcgcgatttttcc

SEQ ID NO: 56744 - DNA, 642 bp, Oryza sativa
  Clone ID: PAT_MRT4530_58624C.1
atggtcctggcctatgaggttggcggcgaaggaggtacgcctctgctcagtagcggctctgccttctcgcggaggggacattgtggccccgcgcacggcagcaacacgcgcggctactaccagcgtctggcggcaacgccggtgtcgaggagtgatcctctcaagcgggaggtcgcgaggccctttgtcgtttgcaagagaatgagagacaagggattatatatgttcgagccgctaggaagcgtatcaccctactcctgggataccacatgcaccgtcttacatagtccatcattggatggggcccacatgtcctgggtcaagccgtcgtccttgccttcgaccgaaagcaaggcggtcgttcgcccccaggtgggtcccaacgccgtcctccggctgacacgggagacatccttatcattccctcttaattccatggagacttttctggattcgtgtacgagggacacgctcggctacgtgccgatgggacaggcatacctacccccactctgcctgacagggggcaggacgtgggtgcgctgccacccatctgcctatgaccggtcacagaccaatcaagcccgattgacgcaccgcctctccctccgcccactcagccaccacgtggaagccgagtga

SEQ ID NO: 56745 - DNA, 180 bp, Oryza sativa
  Clone ID: PAT_MRT4530_58625C.1
ccgaaccccaatttccacctacacccaccgcggccattcactacacccccctggacaagacgaaacggggagggctcctttttaaattatgctggcgttcgcgagctagacttccacagtccgctccacacgcattgcccgatcgcccgcccgcccggccgagagcccgagcggctagag

SEQ ID NO: 56746 - DNA, 272 bp, Oryza sativa
  Clone ID: PAT_MRT4530_58626C.1
agtaacggaatagatggagcgacccacccgttcaatgaatttgaatgaacgagtgtgcgatcagtcagagcgttgtctgcataaacatgccatgctctatgtcacagtactagaacgctctgaagctcatatggatatgcacaactagaacgccataatctatcatggaaggcgacaatgccaaggccatttatacatataatgcctatgagcgcgctgaagaagcagacatcccagccctatgggcctcatgtaggagggtagcccaagga

SEQ ID NO: 56747 - DNA, 1006 bp, Oryza sativa
  Clone ID: PAT_MRT4530_58627C.1
gttccaatagctggccagattggcatgttcttggaacatcaatcacatggcagcataactgatgtcaccatggctactacggacataaccattgctcacatcatggatgaacaacacgatatcgtcctccaagtgctagaatccgattcggccaccagctacactgttgatttcaaatgaccgtcgaatctgcatacgaccttcgtttttggcccgtgagtacttgatggaaagctctcggagccctctttccaatggatccagcctcatcaccagattctatgtcatttggccgcaatcacataaacaagcgcgcgtgtcggctagaccgtccgtctgcttattttttggaaccctaacttatcatttgtattaaatttctatttgcaattcagattgcttttatcttgttcttgcttgtttcttcgatttgcttgtaggaataagattgatctgcaccggcaagatcaacaacccacggagaagtgtatcgatcgctaaggcgcaacacaacgtctcgtacggttgtagtcggatcgtcaacgtttcttccaaatcgtagttatcacaattcaccgaaagatcggcccaaacaacagccttgagtgtcaagtgaaactcagggttcatcaattactatgtatctttgtatggacaaagagaagtacttttagcacttgtgttaacttgtgaccctgtgcacttttttagcacttgtattttgcataatattgagatttaaaaaatttagctatgcacagtggtactgcagtagtaccgttactaccatatattctctgttttgggagagtttgttattaatcatgagatcacgggttctagtcttgaatttatcaatttatttttaatttttctaaaaaagagaaaatgataggaggaaaaaaaataaaagaagggagagagaaacgatggagagaaggaaaggcgaaaaaaaagaagagatcgagagaaggaaaaaaaggagaagagatcggaggaggaggga

SEQ ID NO: 56748 - DNA, 111 bp, Oryza sativa
  Clone ID: PAT_MRT4530_58628C.1
atggaggagaagggtagtgtgatctgtggcggcagcaacatggtgcactcacatcttggaaggatatggcctgctacccagaggcctgatttggatgagtatgagttctag

SEQ ID NO: 56749 - DNA, 358 bp, Oryza sativa
  Clone ID: PAT_MRT4530_58629C.1
catatgagagctccttactggcttccatggagagggcataagggggagaaccggcacctgcgcccgagaagaaagatctcaggcacaatctgatcgttgacgatcaagtgtctgcgcagcctacatcagagggtgcctcggacgaggctgcagtagcttgctacacgagctggcgtccacttacaaggataggcctcgctgtactttcgatgtctcagcgttttctgaaggatcatgagaaagaggatacttggaggcttgtaggaaactacgcctttcagcggatgaagaaggctgattgacaaggtgagaggggaattactgatactgagtcaaagcttgaaaggctagaaatctt

SEQ ID NO: 56750 - DNA, 170 bp, Oryza sativa
  Clone ID: PAT_MRT4530_5862C.1
agtaacttgatagataatatggaaaattacattaacttatgtgcaatttattccaactaattacttcaattctccattaatatctctaggatcaaacattatttcatacagcactagagagtagaaaggcaaaaaaaaaaaaaaacagtttaggcttaacctggtgctgc

SEQ ID NO: 56751 - DNA, 154 bp, Oryza sativa
  unsure (1)..(154): unsure at all n locations
  Clone ID: PAT_MRT4530_58630C.1
gttgcgctggcgccgccctccttgccagtggatctagccatccggaggaaggaagggtcacgaagncatcaagtcatcgctgccctcatctccactctaatctagagaacaataacgccatccatgtacacacgctatcatgcgtaagcaaaaa

SEQ ID NO: 56752 - DNA, 3069 bp, Oryza sativa
  Clone ID: PAT_MRT4530_58631C.1
atgggaggcggcaggaagcgcgggcgcacgcagcgccgccacttcaagcaggggcgggagaacgtctggaagcacaacccgcagcgccccccggcggctggcggcgaaggagccgaaggaggcgctgccgaggggcgcgaagggaacccctcgtggcagcccttcgccaccgagaacccagccttcgaggactactacaaggcacagcaaattattccggagggagagtgggacgacttcatgaacatgctccggaaaccgctgccagccactttcaggattaatgcgagctgtcaattttatcaagatatttgctcacagttagaaaatgacttcaggaagtcattggaaactgaggttagtgatgagcatgaagaagatgctattcggcctttgccttggtaccctggcaatcttgcatggcatttgaatttttctcgaatgcagctgaggagaaaccaggcacttgagggttttcatgaattcttgaagcgagagaatgaagttggcaatataactaggcaagaggctgtcagcatggttcctcctttgtttctgaatgtgcaacctgatcatcatattcttgacatgtgcgctgctccaggatcaaagaccttccagttacttgagatgatccatcagtctacaaagcctggaatgcttccaaatgcccttgtggtagctaatgatgttgatgtgcaaagatgcaatcttcttattcatcagacaaagagaatgtgcacagccaacttgattgtgacgaatcatgaagcacagaactttcctggctgtaatcttgcaaagtttagttcagaaacatgcacggatgagtccaaactgcagaggttggaatttgatcgtgtattgtgtgatgtgccttgtagtggtgatggaactgtgcgtaaagctcctgatatgtggagaaagtggaatgctggtatggggaatggactccatcgtctccaagtagaaattgcaatgcgcggtattggtttgcttaaagtgggtggaaggattgtttactcaacatgttcaatgaatcctgttgaaaatgaagcagttgtcgcggagattctacggagatgtggggattctgttgaacttcttgatgtttctaatgagctacctgaattagtcaggcgtcctggacttagcacctggaaggtacgggatagagggtcttggtttggcactcacgaagatgtccctcgctacagaaagaacgtgatatcaccaagcatgtttccttcagggaagggcaccatggatagccatgtggctattggcagtgttgagatcaacacagatgtaattgatgctgatatgaaagattcaacaaacatggtagagggagaacaagaaacgaaaacagcatctgatgatgtcaataatggtggtgatcccaatactgaagagacgagcaaacttgagtctaatgaagttccaaacgactctgataaaaagtcaaattctacgtctatccgcacagaacattcaaatttccctctgcatcgctgcatgagaattgttccgcatgatcaaaacagtggggcattttttattgcagtccttcagaaaatctcccctattaatgggaaccaagaggcagaacttataaaaggcgagcacaatatttcaaaggatagggctgagaaacttgagaaaggtctcggatcagataaggtgccacataaagaaaataccgtgcagcagcaaggagttgatgatggtaatgttatggatgaacagcaaaatggagatgtggataatgaaacatcaaatggtaaaagctcagaggaagctaaagtaattgttaatgaggcagaaaatgatcaagcaggaccaagagataggaggaggaagccacagaaccaaggaaggtggagaggggttgatccagtgatatttttcaaagatgaagctacaataagaagtatagtatctttctatggtatcaaggatacatttccgcttgagggtcaccttgtgactaggaatcctgatgctggccatgttaaaagaatatactacgtgtcaaaatcagtgcaagaagttttggagctcaatgtaaaagttggtgagcggcttaagattacctcacttggcctaaagatatttgaaagacagtcatcaaaggatggctcaccatgcacatttaggttgtcttcagagggtttaccactgctgcttccatacatcaccaaacagattctctacgcttctgcaattgacttccagcaccttttacaatacagaactattaaatttcctgattttgtggatgcaaaattcggtgaagaagcttcagctttgttgcctggttgctgtgttgtagtactttgggaagggcatcagaacatagattccatcgccatggatccttctgcaatcgccattgtttgctggaaagggaagaccaatttgtgcgtcatggtttctcccctggatgggaaggagctgcttgagaggatttgtttacgttatgggctcaaaatccccaaagcggatgatgtaaaacccagcatgaagattgatggatcagacgagcagcctgatctcagcactgaggcagttgatccagaagctgtgcccgaaagcaaagcatctgacatggagattgcagatgctaaagaggtggagtaatcctgctgaatgctgatgctatccaaggccacatattatagctggatacaacatcgccccatcatttgcctaccggtattagttgagcgatgagccgccatttttcattgattctggcatttacgccgttttcctgtttgatttatcatattctgtttctgaagaatgggtgaatgaactcgcccattagtgaaagggcaccacgttgctctaaagcccatctgtccatgtcatctggtaatcgtgcacgtattgccccctccatacttccggctggctcatccacctgtaacctatcagtatcagcttatttttcttcgaagagaatgtattacagggagtcttaacctgaactcttgaacctgataaattttgatatgacaatatttcagacaaaaaaaaaaaaaaaaaaaaaaaaaaaaaaaa

SEQ ID NO: 56753 - DNA, 218 bp, Oryza sativa
  Clone ID: PAT_MRT4530_58632C.1
tcgctcgcctctccttcctcctctgctcccactccgcctcgccgccgcctccaccatgtacggcgtcggcggcggaggaagaagttttaacgcgccctacacggcattggccctttggtttatccacttggactattactactaggaggaggaggagttattgtaggtgctttttcattatggacttttagttcaattaatcattcaatttatcattt

SEQ ID NO: 56754 - DNA, 1254 bp, Oryza sativa
  Clone ID: PAT_MRT4530_58633C.1
atgcacctaatggtactcgaaacctgcaaggttggcttccaaaaatctgtagaagaaagaagagtaaattgcacccacggtacaacttggcaggcatctaaggtgatccaggacatcctggcccgcctgccgccgcgcaccatcgtgcgctgcctcgccgtctgcaaggcctggcgctccgccgtctctgccccgaccttccaccgcgccctcgccgcccaccgcccggccgctgtcgtcaaggtcacctccgaattggcatattttggcaagccatggcgctactgcaaggccttgcttctcgacacgttccgcggccgctggttcgggcccgacctagacaacacgcagccggagcggcgggagcgggagttcgtgctctggaacccgctcacccgggcctgcgctaccgtccctcccccggcgcccggcggcgaccgcggcgtcatcatcggcgcctacgcccacccggccaccatgcgcttccacctcctgcacgccgccggcgaggcggaacgtggcctgttcgccgcgacggccatccgtgtccggcgagtcggagacggcggcgcctggcgcgaggatgcaggcatctcaatccgtcagcttgcacgggaacctgcattggatggtgcagcgtggctcgggctcgaccgcgcggttgaacgtgctcgtgttcgacacagcgcgcgagaggttccggctgatggaggcgccgccgtgggacgacagccgtggcgggggggggggggggggggggaggagaagaaaggcctggccatgtcgcgggtcgtcgtcctgtccggcgtcggcaagctctgcgccgtggccgtctcgccggcgacgaacacgatggagatgtgggtgctcgacgacgacgactcctccggcggcgcgcgggcgtggcggctcgcggagagggtcggcctggtgatgatgtgggacaagcgcgacctgtcgagggctttctcgtcggcgacgcaggtgtcagcggtgcagggcgacgcggagggcgaggaggtgatcctccacaacgacggccaacatcgacgcgtatgccggcgcagggcgtggtcgacggtgtccgtctcccgcttcgccacgctgctgccgcagcgtcgtgcggcacgacgtgagcttcggcgaggcgtcgcggctgttggcccaaaaccggaagacgttggcccaaccgggagaaagccttgctacacctcaaaagctagttcaagtggtgaggggctctcccacttttaa

SEQ ID NO: 56755 - DNA, 1544 bp, Oryza sativa
  Clone ID: PAT_MRT4530_58634C.1
ccccggcgcagggatggaagcactggtctcgttggctagagcgcgagagccagtagccgcagctgcagcaagcagcagcagcagcgaagagcctgagccccagaggaggcgtgcaccgcctccgattggccggcctctcggagagagagagagagagagagatcgatcgagtcctattggccgccgcctccgcgccctggctgctcactggtgagcgagcatggagtcgaggccggggggaaccaacctcgtggagccgagggggcagggcgcgctgccgtccggcataccgatccagcagccgtggtggacgacctccgccggggtcggggcggtgtcgcccgccgtcgtggcgccggggagcggtgcggggatcagcctgtcgggcagggatggcggcggcgacgacgcggcagaggagagcagcgatgactcacgaagatcaggggagaccaaagatggaagcactgatcaagaaaagcatcatgcaacatcgcagatgactgctttggcatcagactatttaacaccattttcacagctggaactaaaccaaccaattgcttcggcagcataccagtaccctgactcttactatatgggcatggttggtccctatggacctcaagctatgtccgcacagactcatttccagctacctggattaactcactctcgtatgccgttgcctcttgaaatatctgaggagcctgtttatgtaaatgctaagcaatatcatggaattttaagacggaggcagtcacgtgcgaaggctgaacttgagaaaaaagttgttaaatcaagaaagccctatcttcatgagtctcgtcatcaacatgctatgcgaagggcaagaggaacgggtggacgcttcctgaacacaaagaaaaatgaagatggtgctcccagtgagaaagccgaaccaaacaaaggagagcagaactccgggtatcgccggatccctcctgacttacagctcctacagaaggaaacatgaagtagcggctcgaaacctagaacagtggcttctgtccaccggcattcactcttgagggtggattcttgctccagaattgtgctgccatctttcaaatgatcttcatcgtgcaaagtaattatatgtacattcctctgaatgatctatgcaccaattgttgatcctggcagggtaataatctggatgtattgagtccatcacagtgcgaatgtcacgggtagatctgctgttttcaggcaattcattcttggctttctatcccacccgttgttgttgcaagttaagctagcagtacttgtctcagtgtccgtgagacgtttgtgtaagattaggttaaactagaagttgtaatgctgtattaagtgtttgtatttctaatatgaaccgtaacaaggccagagcagaactcgttatacatacaaaaattgatggccaggtcagtgttaccgtattattatgcaatggcagaagcttgcataaggcgtggtgccactcgttgctttgctgtaaaaaaaaaaaaaaaaaaaaaaaaaaaaaaaaaagaggg

SEQ ID NO: 56756 - DNA, 379 bp, Oryza sativa
  Clone ID: PAT_MRT4530_58635C.1
cggttaattacatccacaggacgagcctatggaatacctccgattaagctgcgctttgtgatcgtcgtcttcaaaattatttgctcgccgaaggttgagctttgtttcaccaaaacacggtcatagtacactaccatcacgtccgcgtgcggagggaatttggtgaagcgggtgacttttgcctcatcggtgcccagtcatgtatcccggccttcatcaaacatggatttttgtggttgcttttgcctcgtcggtgcccagcaacggtgtatccggctcctgtctattttaggcgtgttaatagtatattgacctggccttgtcagcactcggccagatatttaatctcactgtggcgtacttgctcacgaaccgcagg

SEQ ID NO: 56757 - DNA, 1571 bp, Oryza sativa
  Clone ID: PAT_MRT4530_58636C.1
agctactggagggactcagtctgaaactgcaagacggcggtctgctctgggtcttcacaaggatgtcaaggttggtcgtctgtcagaccagtgtgccatttctagccaagtctaatccagaagccagtgccatcccaaacagagcatgtagccgaacacagtactacaggtttgccatccaaatcttgtgtcagatctgttgtaacttcatggtttttcagcacatagtccacaacccatttgcccacagggagtgtcaaggcacaaaggacagtgcaagctgatggaagagatttgctcatgccaaaagcagccaaaagaacataaagcgtgacaaccccaagagtcactaatcttgatcctgttttggtgccaattcttaccaggggagacattttcccaacagcacgatctccatcaatctgatgaaaatggctgcagaagagtatcagggtagtcgtcagcccaactagaatggatgaagcaatgactgttttactgagagggagaagagctgttccgctgtaattgaagctgctcatgtttgacaagtagaacgctgtgggtgccaatggaccaaatgcagcaaaacataatggttcacctagtcccctgtaacttagtcggaatggtgggcactgataaacatagccacagatgattgcacaggttaccgataaaatgaacctggcatccccagcttgggcaaaggcccaaaatagccccataaatccgaacaggagagaaatatttgcagcatattgcgtcatcgttcgactgccaacgatgttaacaacagattccttcttgttcttatcagccccagtatctgaatcgtaaacatcattgcttagattgagccaagtgatcacaaggactgatgcaaccaagagaacaaaataccgtttaccaaagaatgaacccacatgatggtaagcacaggcgcttccaaccgtgagtggcacaagcgccacggagtagattggcagctttgccgccctccagagcagcgtccctcgggagagctcaacgtcgtctcctgcgccttcaccggacgcggcagtagcggtagcggagcactgaaccgcgcgcggcctccttctcgcggcggcggcggcggcggaagcaacgctgctgcggcgatgatgtggaggcgcgaggtgggagacgaagagaggcgcgagggcgatgccggcgagcggcatcgggcaccgggcgcaggaaagcgagggggctcaggtcagacgcggcgttccatggagcgtgccgccgtgtcgcggccaggcgccgacgcttcggtttggtctgcatggataaggctcggtcatcggttggtagatttaggtcggctgggccgctgggatgtgaggcggtgggcagcccgcagccgcagggtcgggtcggcctccatgtcacctggcctccataccacctgtctcaattatagccggagtccaaatttcgtccttcagttggtaaaagagattcattccctaacaatttatatcagtgctggttattttggctccctaacaatttcgacggtggtttcattccaacaccgtccatag

SEQ ID NO: 56758 - DNA, 907 bp, Oryza sativa
  Clone ID: PAT_MRT4530_58637C.1
ttttttttttttttttttggggcaaactgtttatacactgccagctcattctccttatttttactagtaacagcttaggattaagaacaaactgaagaaacactgcagtattgtcagaaaacgtagcagaaacaaaggattgcgacaacacaaggtcattgactgagcccaaagccctcgactaagaagaaatacagggattcatccatcagttggggtggggtttgaagggctaggcatagcgagtagctatgaacagtgcaggatttacagtagtacagactatttgtttgttctagactttgccctcccagaggcactcaagggagggaccattgttattgtgattgcctgcatgagtattgttcagtaagagatccctgagatgaggtggtgggtgaagacccatggcagaagcacgttcccaacgctgaagacgagtaacgccaatgcaagggccaaacttcatgtccatatcaaacagtcgcaactgctcctcttgctcactgaaatcatctttaagatctaggttaccatgagaaattagtgctgatgtctgagcagtgtctgaggccccaacagaggcccctccagtgtaatgctgtgttttcttcttggaagatgacgatgctttggtgggacctcctttcttcttctgccggtaaaagtccttcatgccaccagaagccatatctgtctattcttcagttctaccaatgttttcctggaagtcttcgtgccgctccgcgtctcgctggctgccgctgcggggagacgcgaactcaccggcactctccccggcgtccggccggccggccgctcgcgccctcggtggcgctgctcgtgagccgccgcctcgcgcgcccggcggtgtcgctcgccggctagggtttgggagccctcgtgc

SEQ ID NO: 56759 - DNA, 629 bp, Oryza sativa
  Clone ID: PAT_MRT4530_58638C.1
ccggttcgacccagcgtttctttccgcgagggcggcagcaggggcgggggggtgttcgccgccctcccgtcgccgcgcgcggttgctcgcccggggacgtgttcgccgccctcccgtcgccgcgcgcggttgctcgccactcacatcccctactccctcctgccggagcgcatcacgtcggcggcggcaaacgacggggggggggggtgccggatcgtgtacgtctgccgggaccccaaggacgcgttcgtctccatgtggctgttcaccatgagcaacatggtgaagggtgtcacaacgaccacggacgaacaccacccggcggcggcggcggcggcgccatcgatcgagcaggtgttcgacctgtgctgcgacgggcggagcatcgctgttccgcagtggcaccacgtccgcgagtactgggaggagagccggaggcggccggagaaggtcctcttcctccggtccgaggagatgctgcgcgagccggcgcgcaacgtggagaggctcgccgggttcctgcggtgcccgttcaccgccggcgaggtggcggccggggtgggggacgccctcgtcggcctttgcagcatcgacccgcttaggaacgtgcgggcgaacaaggaccgggg

SEQ ID NO: 56760 - DNA, 359 bp, Oryza sativa
  Clone ID: PAT_MRT4530_58639C.1
tttaacgcacaaaatcatatatagtactttatcaccaggggttttgtctttaaaacattacattattcatgatcggctgtgatcactatctcgaggcatgcaacacagcaacggtgtgatcctactagctatgaggcaagccagctaagcctagtactgggcggcggagaagatgctggactggtggagctcaaccccgcacatcgacggcagctgcgccgcgtactgccttgccctggtcagcctgacgcgggtcatacccggctgctgttgctgctcgccgtagaagccctcctccgacgaccccttgccgtagtaccccttgctccgacgacgaccccttggcggcgtagtactcc

SEQ ID NO: 56761 - DNA, 3585 bp, Oryza sativa
  Clone ID: PAT_MRT4530_5863C.1
atgctggtatggactcaagtcggcgaaatcgtcttcccggtttacaccacgacgccgatctcaaccagtcctccaatgaccgtagacgagaacgcagtggctacgaaccaaggcgattccatgtcgaaaaatcctcccgtcgagacggagaacagaatatcgacgacatccaagctcaagaaggattctgatacggccaaaccttgtccttccgacatgaaccacgagccgacaaagatgacttccgaagccacaaggtcttggtgtcctatccacaaaaccaagaaacacaccctgcaagattgctgggttttccttaacgtccgtgctgaaattcgcgcctgcaaagaacgtggaattcagcgtacttctccaactcgggatgtctattgtcctattcacaagacaaagaatcacgacctctcgagctgcaaagtctttctcggcgccatgaaagctcagtctcctaagtcatatatccccatcagggataacggcaaggaacaaggagcgactccaacttcagatcgattcgttggggtaatcgatatcgatcctcacgaaccatcggtcttacatctcctcgaggactatgggtcatcgacaacgagcgcgccgcgggaggtattggctatcgatgacgttggcacgtcagcgcacgccaacacagtagcggggaatcaatcgactactccagcccagcacatcagggccgttcaagcgatactgagggaaactccctacgatcccgttctgaacgttgacctcgagcgttggacagaacgactacgggaatcggtgactaacctcagcaacgcgtttgaagaagccgctaccgcagcacaccaggagcagccaccaactagcgaggccaatggtgaagatccggaatggagggaatcacctcaacaagctacccctccacctcgcggcactggcgatcttcgagatcaaatcaacggccgctgggaagcacgacgcacacgagacaacgtgaatcgctctcggcgtcatgtctcttcacggcgccatgataacagaaatcgaggaaatcgctcaaacgaggaccgggaccacggcaatcaccacgatcacaacgatcgagaacgacgggggccagataatactggtcatggccgccgccgtatcgacgacgacgatggagatcggcaccgagacaacagtgcaagacgacgacaggattcccgagatccaggccgtcatcctcgtaatcacagacatccacgaaggacacacgaccgccggcaacccaccgcccccaacgctgggtgtagagctttcggtcgttccctacgtgatgtccgatggcctgagagattccgacccggagcaatagaaaagtatgatgggagcaccgacccaaaggagttccttcaagtctactccacagtactctatgctgccggagcagacgacaacgcgttagcgaactatttaccaactgcgttgaagggttctgcacgttcatggctgatgcatcttcctccctactcaatctcttcgtgggcagacctgcggcaacaattcatcgccaatttccaaggaacatacaagcgccacgcgatcgaagacgacctacacgcgttgacacagaactcgggtgaatcattgagggaatatgttcgacgtttaaacgagtgcagaaacacaattcctgaaatcaccgacgcttctgtaattcgcgccttcaaatccggtgtcagagatcgctacactacccaggagttggcgacaagacgcatcacaaccactcggagattattcgagattgttgagcaatgcgcctacgctgatgatgcgctaagacgcaagaacgataggccgaagaccgggggagagaagaaaccagccacggatacatctgagtcaagcaagaagaaaaatcgcaaaaatgggaaaaggaaagctcaagcggaagtcctcgcagcagaatacgcgaaccctcccaaacgtctagacccacaaagcagcgacacaaagaaatcatggtgcctcatacacaagacggatagacattctctggaagattgccttgttttcaaaaagtcgctcgagaagcacatggcatttgaaaaaggcaagcgagtacgcgttgtcgagatgaacgaagagacggctcctcacgaaccggactcagcgtatccagactccgacctccacgtctcacacatcttcggcggttccacaacgtactcctcaaagcgagaatataagaaagtggaacgtgaagtctgctcgacatggcaaggggctgcacccaagatgaagtggtctgagcagaagatagagttctcggaagaagaccaccccaagaccgccgttatcccaggacaatatccgatcgtggtcgaacctactattcggaacttcaaggtagcgcgagttctcattgacggtggtagctcaatcaatcttcttttcgccagcactttggacacgatgggaattccgcaaagcgagttgacaccaactgatcaacccttccatggaattactccccaatcatcgtccagacctttgggcaagattatgttgcccatgactttcggccaagccaacaacttccgaacagaacagatcacctttgatgttgctgaattcgatacagcttacaacgccatcatcgggagaactgcacttgcgaaattcatggccgcatctcactacgcatatcaagtgcttaagatgccgggaccgaagggaacaatcactattcaggggaacacaaagctggcggtgcaatgcgacaagcggagcctcgacatggtcgagcaaacgcccagcccacccgccacgaccgagccacccaagaaagtgaccaagacaaacaagacgccgaaaccagacggcgccatcaagattgttccactctccagtgccaaccccgacaagactgtcaagatcggaccgtccgacatgccgggggtccccagggaggtgattgagcacaaactcatggtgcgacccgatgccaagccagtaaagcaaagactgcggagatttgcaccagaccggaaacaagccaaacgagaagagctcgacaaacttctcaaagctggcttcatcagagaagtatttcatccagagtggctagccaatccagtcatggtgcggaagtccaacggaaaatggagaatgtgcgtcgacttcaccgacctcaacaaggcgtgccccaaggatcactttccacttcctcgaatagaccaactggtggattcaacagccggttgcgagttattgagcttcctcgacgcttactctggctaccaccaaatcagcatggcaaaagaggacaaagagaagacagcattcatcacgccgttcgaggtattttgctatgttaagatgccgttcggattgataacagctgggaatactttccagcgcacggtccagggcgcacttagcaaccagcttggcaataatgtcgaggcttacgtcgacgacatcgttgtcaaaaccaagacaggcgactcattgattgacgatctgcgggaaacgttcgacaacctccgacgatatcgcctcatgctcaatcttgagaagtgcacgttcactttctga

SEQ ID NO: 56762 - DNA, 1426 bp, Oryza sativa
  Clone ID: PAT_MRT4530_58640C.1
gcagacatttggtttttttttttttttttttttttttttttaacagaaatcaacaataggaatatgaattatattctgaatccattacaatcactttgctttgcatagagcaaggctagagccaaggacaaagccagatgatcagaatttcagaagatacatatatgtttcctttgcaataactttttaccttagcatggccattttcagagtcaccatgtgttaacatgccaaaacttctctcaggctctcggcactggtcgtcaatgctactacctttttcctttacattcagaactatgtgacaagtgaacaacatagaagcacgaactaaagaaaaaacactaaaacatggggtatgagagaacatatatgatttggtactctaacggcaagcgcatttcatatatttttgaagagctttggtgaagtttccatgcaacctcattggccgcgttctatgggcttcacgacggcgttcggccctagtccgagccatggctggctctcaggctccttcttgactggggttgcatctgaaggagaagcctggtatggcgtctttgcattaagacgatcctttctcttctcaaggaacctgtggagtgatgccttcctagcaataggcatatcagaagcattcgcgcgagcaggcttctgagcatcggcctgagctgtaggcaagctactgaccggggccggcacggccataggggccttggtgttgtctgtaacagctgctggtgcaggtgccgcggcattctgaggagccaccgggctgcccttgctagccagctgcatcaagccctttgccttgtcggctgggaagtcgttgaacacgagcaccttcccaccatagaagatggtcagctgacgcttctcaggctcttgttccctagcatcagcagcagaatcggcggtgatggcatcctgctggccaaagccggcgctctgcgggaagagctccatggtctccttcttcctctccgcctccccgggcagcaagctcatcgtcgccggcgccgccctcggagcctcaccctcacctctgatgccgaggccgagctcggcggcggcggcgccgttctggcggacgtagcggctgagcaggctgcacgccatggcgaagctcgtcgccctctccccgccgacgccgacgggcctcgcggaagccgccatctctccaagctcccttcctaactacccggcgtcgatccaatctctcctccccgccgctcgccgcgccgttcttgctgcaccaccccggctcgtcgtcgcctcgccgccgtccagctacctccgattcctcctctcgccttcctgccgctgctgctagtggttgagctgcgaggccgggaggtagacagggagagaggctcgtgcgcgagcgtttataagcaaggagaggagacggagcctcgtgccg

SEQ ID NO: 56763 - DNA, 298 bp, Oryza sativa
  Clone ID: PAT_MRT4530_58641C.1
atatggttataattccttttttttcaatctgaaatataaaggaggacgcggagaagagatggcaataatcatccaaacacgaagctgcaggtggacggatgaagagagcgattccacgaggaggatttggaggtgtccgttggccaggggcccgtcgagaagttcttttctccgtggtggaccccgggcgcaccgttgaaacagcgggctttgttggcgcctctggcccgccttagccgggcgtgcgggggggggaaaaaggtgtgtgtgggccggggcaccccggtccctggccccc

SEQ ID NO: 56764 - DNA, 605 bp, Oryza sativa
  Clone ID: PAT_MRT4530_58642C.1
ttgtcgacgagtgatactcgcggaccggatgagtagagtattggggtacgttggaacgagggtgagatcgtagtcaaggaattcgacgagatctcccagcgagttgacaccgcgtactctggctttgtaaactttggtgggtgtgctggcaattgaattggatgccttgaacccctcccagggggtcccttttataccgtggatcatcttgatccccaagaacccttccgagtaggactttggaaatcacttgactcgtagagatattttccataacctgaatcggttaccacgcaacattcatgggaacaatccgtatacatgaaggtatatcttatcggtatattctataagtcacaagataggaggtatgccttatctgtaaccctgacagtagcccccgacttcaactcaaatgaattcatgttgtcgttcgtgatccacctccgatctagcaacgctggcgaagctctccaccgatggagcccttcttccagagcaagacatggcccaagaagaaggaggtactgctccttcccttgccctaggtcatatggtagtagtagaagatttcgttcgcgatggttttctaccgccgccatcgg

SEQ ID NO: 56765 - DNA, 573 bp, Oryza sativa
  unsure (1)..(573): unsure at all n locations
  Clone ID: PAT_MRT4530_58643C.1
cccacgcgtccggagagagagagagacgccggccgtacgccctcctcctctaaatctcctccgattcgcacctcgcctcggcgagatcggatgccgctgaggaggaggaggaggcgctactaatcctctccgcccgccgcgccgaggggatcttggatcgacgaggagggggaggggagcagatgtgggcgagccggccggtggtgcacccggtggaggcgccgccgccggcagctttggcggtggcggcggcggcggtggcggtggaggccggtgttggagcaggaggtggagcggcggtggatggccgggagaacncgcaggcaccaggggtgcggatgaaggaccccctccgggncgcccgggaccgctcggcgtctgcgccgttccgnnaccggcagggctcatctccgctcgggcggnaggcgacatgggcntcgccctcaattcgngcttccgggntggctgcagctgctacctcgnctacgacgncnnnngcnngncnctctccatgatcccggccctgcccgagncctgcctnncctactgcnnnatgcggnctctccccctgcg

SEQ ID NO: 56766 - DNA, 1134 bp, Oryza sativa
  Clone ID: PAT_MRT4530_58644C.1
atggttctggatgttttcggaaaagtccgaaaatcactttcggacaagtccgaaaatacacagaagcgatttttgcctttgctgaagtttttcggaaactccgaaaatcaatttcggaaaagcctaattgacactttcactgcattacaagtggctgaagcttatttgactcatgttgcggcattatatggcatgcctaagtctattgtgtccgatagagacaagatttttactagcaagttttggcaaactctgtttaaaaggtttgagattcctttgaatttgaccactgcttatcatccacaatccgatggccagacggagcgtgtgaatcaatgtttggagatgtatttacgctgtgcagttgctgcagttccaactaagtggtgtgcatggctgtctcttgctcagtattggtacaatactagctatcactcttctttgcagtgttctcctcatcgaactttatatgggagtgagccaacttatgggatattgccggctgttcccgtgactgaatctgaggatgatgtttctgactcatctgaagctgatgcagtcctaaaggaaagagatatgttttctgctttgcttaaacatcatttggctcgtgctcaaaatagaatgaagcaaatggctgatgtcaaatgctcagatcgtgcttttcaagttgggaagtcagtacttcttaagttacaaccgtatgcatataagtctgttgtgtccagaccatttcctaaactggcgtttaagtactttggtccttttgagattgaagcatctgttggctcgatgacttatcgtttgaagttgccggctggtagtttaattcatccggttttccatgtctctcagttgaagaagtatgttcccaagtattctccagtgttttctcaattgtcgtctgctgctcagttggacattgcagagttggtgcctacggcaattttggatcgccacatggtgaaaaagggcaatgctgccgtttttcaagttttggttcagtggggtactttgcctgctgctttggcgacctgggaggacttcgatgtggtgcacaccaggtttccatctgccgtcgcttggggccaagctccgactcaaggaggggcgaatgtcacgactgatgtgtga

SEQ ID NO: 56767 - DNA, 243 bp, Oryza sativa
  Clone ID: PAT_MRT4530_58645C.1
atggcttcatggggcctcagatatctcatggaccacatggtgctgccgtcctatgaggcaaatggacaaatggggcttgtcaccatcatatcagcttatcatgacatatgccagatgctggatggtattggcctacctgaaaaggaccttgcattgatcaagcatacaggtcttgtcaatgggatgaagagatcagttgagcttaaccaagataaaaactcggaagatcctgggattggttaa

SEQ ID NO: 56768 - DNA, 2220 bp, Oryza sativa
  unsure (1)..(2220): unsure at all n locations
  Clone ID: PAT_MRT4530_58646C.1
gatagattcaaaggaaagttagcaagaggttcaagtccaatattttacaccctatactttgatccccttggtatggcttaacacaataacttctctcttgatcttgcttgcttagaggatccttccagtgtgggctagagtaaaaaaaaattgtctttggataagtccctccggttgcatgggttcacgggtcgtttctacaagacttgttaggaaattttcaaggaggatgtggtgcttgcactctctgcaattcagtaggatcatgtgttcaagtttaagttgcttaacatgacttttcttagactgttaatatggcctattagtcttatacatagttttgttaagctaatcagaaagcttatggcaaatcgcctagcacctttgcttcctaggatgatttcggtaaaccatagtgcttttgttaaaaaaaatatcttgtatactcattcacaaatggtgaaatgtctacataggaagaaagaaccttatcctcctcaagttggatatatctaaggcctttgatttagtaagttgggctttcttgcttggggtttggaagaaggttgtgcaacttgctttgtcagatgctctccacttcttccataagggtgttggtcgatggagagacaggacacactatatttcatcaaagaggcctctgacaaggggaccttttgtccctcatgctactcattttggtcatggtcatgcttaattcccttgtagttcatgccaccctggaaaatctcctacaaccgctcgttgttcagacagcaactcaccaaatttatatatgtgttgacgatattgtgatgtttctcaaacctacaagagaagatctttcccttggcaagcaaactctggaattcttttgtcatgtttcgggcctcaagaccaacattctaaaagagctctgtcactccaattcaggggattattgtggaggagctatcttgtgggataaaggattttccttgttcttatctcgggctccctcccttggtgtacaaacttaccaaggttgatcttctccctttggtggacaatgtcgctgatggtctaccgggttgaaaagcctctcttatgaaccgagcgggtcatctcatcatggtccgggtggttttaaccactatctctatttattcaatgatggctatggatcttcccaaatgggtaattaaaacccttgaaaaaaaaagaagtggttttctttggaagggacatgagaatgccaatggtggcaattgcctcatttcctgggaacgggtttgtcatccaacttcaatatgatggtcttggcatacataatctgaaatagctaggatgggttttatgcatccgatggctctagttaaaaaatgacacctcttgaccttgggcagcattacctattcaagtgccacataatgtgcactcattgtttagtgttgcagtggaatctgtaattggtaatggggagagcactaaattctggatagattgatgggtgcaaggaagaacaaatgttgagctagctcccaccttatttaatttgatccctccaagaattaggagacaacgcactgtaacacaagccgtggttgataggagatgggtgtcatatatccatggaggactcaccaaaacaggtccttttgtgaatacttgcatattttggattcggttgatgattagctctttcancctagtgtgcctgatcaaaatggaagtttacaagttcagcctcctacgctagtaagtcggcgtatgaggcttactttgttggatcatcaagttttcaccttggagacatatttggaagaattgtgcccccttatgtagcaagttcttcacttggctagcaattaacaatcggtactctttctaccacagtgaaaccattcaacatatatttagttccttgtgtcttctctcggtagatttcgacgtggattttctttaagttaggaatattctcagtcacgcctcaatcttcggcaacccgcctagcaaactggtggcacaaagtattaagagagcacctagagtttggcggaacgggatggactccttaataatcctagaagcttgggatatttggaagcaccataatgactgtgtttttaatggtggcatccttaggtcatgttctatagcaaatgagagtagttatggtgtttagttggagcgcatgctttgctggagctccttgtgaggttgatagcacgatgtgtttta

SEQ ID NO: 56769 - DNA, 604 bp, Oryza sativa
  Clone ID: PAT_MRT4530_58647C.1
tcgaacagcagtggttcgataggttccttgtcgaaccacggttgtccgacctatatttgtgtgattttccattaaaatcaaattttttttaaaaaaaaatcctataattgtcttaatagaagtttgcttgcttgatggtattaatagaagtctgcataatgtgtcttacacagaaaaattcctaatagctagctacgcggctttgccgcgtctctttctagttttctttaaaaataagtttattacgtatccataaaaggagcaaagttttatattatataaagttacttctaagtgtgacacgtaacaaaatgaaatttaaagactaacataacacccccatatctaacctgcaaaaatgatcgagacttttcttttcctctcctctcttgtagccaaatacacaatgaaaaatcgacacaaagaaaaaaatacacgatgataaattgtttttgcagatgggctgattgggccggaggccgtctgattccgggccttccggcccatccaaacgagcctttcatctgcttcccccgctatctcccacaactccacctctccacatcttctcgccaccgccgacgccgccgcggctcgcctcctc

SEQ ID NO: 56770 - DNA, 486 bp, Oryza sativa
  Clone ID: PAT_MRT4530_58648C.1
atgccctgtaactacgccgccgccgccgccgccgccatccgcgtgctccgcttcggcggcgagacccacgccgctctctccgagtctccgacccgtggccagtgttgcggagatggtgtgcggcagctgctgccgcctttccaccgcccactcgcccgctgcaacctttccaccgacgagcgggcgaactgggcgtgggcggctgcgacgtcatcgacgcggcgggaggagggccagcgtgacggccagcgaccggtgaagaggagttgggcggtggcagcgtcaccgaccgcagcggggaggagggccagcgaggagttcgttcgcactgtagtcgcgtaccaggagaagctgcaggccaccaccgccgacgtgtcgcagtgcgcgctcgcctcgccgaagttgaaccaggagatggagaagcagcgcaaggtgctcatccggagcttctcgctcgccaagaacctatggatgcgttgtgtctag

SEQ ID NO: 56771 - DNA, 1943 bp, Oryza sativa
  Clone ID: PAT_MRT4530_58649C.1
atgcagaggtcgcggagagcccttctgaagaggaaggcggcggcggcggcgaaggaggaggaggaggaggcaggggtgggcgtggctaccgcggcggccgccgggaggaggcggcggcggcggctgtacggcttctccgtctcgcttgtcgtcgcctgctgggtcgtcctgctcctgctcaaccccctcgtcggtcatgggaacggtcaacgagatgaagggatttttgcggatgaaggaagctctgatccctcgtttgattctgttgagcctaccttgagcgaaggctctgttgattcagttgtacagcaggagaatggggaaaatcatgcgttgccaggtgatagctgtgctaaacccgatgaaaatcatgtgctttctgaagagacactgctggagaaagatcagctttgctccaatgatgaggcacagggtgatagcatggatgctctgcccaaggataacgttgatcagggtgagaatcttccacggacagatgatgattctgtagttcatccagagggggaggtggagagcgaaggtgttccaagaccagcaaggttatcacgagttgtccctcctggtcttgatgaattcaagacacgagcgattgcggaaagaggaaagggtgtccctagtggtcaacctggaaatgtgatccacagaagggagcctagtgggaagttgtacaattatgcctcggcagctaaaggggctaaggtcctggaattcaacaaggaggccaagggtgcttctaacatcctagacaaggataaagacaagtatctccgcaatccttgctcagcagaggggaagtttgtcattatagagctgtctgaagaaaccttggtagatacaatcgcaattgcaaattttgagcactattcttctaacttgaaagaatttgaaatgctgagcagtctgaattatcccacagatagctgggaaacactcgggagattcactgttgcaaatgccaagattgctcagaattttacttttcctgagccaaagtgggctagatatctgaaactcaacttgcttagccattatggttccgaattctactgcacgctcagtatgcttgaagtgtatggaatggatgcggtggaaaagatgctggagaacttgattccagttgagaataaaaggctggaacctgatgacaaaatgaaggaaccagtcgatcagcaaacacaattgaaggagcccactgagggaaaagaatcctcacatgaacccctggatgaagatgagtttgaactagaagatgataaactaaacggtgattcatcaaagaatggtgctcatgatcaagttaccgagacaaggccaattcaggctggcaggattcctggagatacagttcttaaggtactaatgcagaaggtgcaatctcttgatgtgagcttttctgtcttggagcggtatctagaagaactaaatagcagatatgggcaaatttttaaggattttgatgctgatattgataccaaagatgcactcttggagaaaatcaaattggagctgaagcatcttgagagaagcaaagatgactttgcgaaagaaattgaagggattctctcatggaaactagttgcttcctcacagttaaaccagctactcttggataatgtcataatcagatcagaacttgaaagatttcgggaaaagcaggctgacttggagaatagaagctttgctgtaatattcctgagttttgtttttggatgtttagcgattgctaagctgtctataggcatgatatttaatacctgtagattatataattttgaaaaattcgatagggtaaaatctggatggcttgtgttgctgttcagcagttgcattatagcctccattttgataatacagtgatgtacctatcaactccatataattgcggctgcgctttgtaattaaaaaaaaaaaaaaaaaaaaaa

SEQ ID NO: 56772 - DNA, 1193 bp, Oryza sativa
  Clone ID: PAT_MRT4530_5864C.1
taaaaagaaaaaccttaaagtctcccccctccctctcttgggccggctcagcccatttctctccccctctctcctcttccccgtggcccactcggcccctccccgcgcgcacgccgctgacgggtgggcccgcccgccaccctcgttgataggtggggcccacctgtcatccctgacctcccgccgctccgcccgcgccaagcgccgccgccgccgccgaatccgtcgcatcccgtcgtccccgcgtgaaatcaataggggagaattattccccgtgattccctctcccttttcccccaattttccctccctctctcccttggattcgtttggaaaccctcccctaatcccgccggtgccattgatggagcccgagaacgccgcgccggtttccttcccctccggctgccctctcccccttccaaccctatttaaaccctccccgcacctcctccgtccgtttccgcctctcgccgcccttcctcctcgccggattcgagctcgcgatgtcgctctctctccgctgtcgccgccgagctccggtccgccgccatcgtcgcctcggaccacctcccacctcggcgccgcctccttcggcttcgccgcatcctcgccgacctcgtccacctctccctttcggtcgccgaccgccgaagcgccgccgtccccgtcgacccgagccacgccaccgcctccctccgctccggccgcctcctccgtcgccgccgtcgccccggggtgagccgtggaccgtcgcctcctttcccccttccctcccctctctcggccgccgtccgccgcgctggtgtcccggcggcgaccatcgggcggcgggcgcgccgcctcccgccggccgcgccggcatggccgccctcaggcacgccgagtggtgccgcatggggcccggctcggccatataaggaccggtcttcgggcctctgttgcaaagcactaccgtacttccacatgtctagtgggtaaggcttagtttgtggctcagtcctccccaacactctaaactcgccgagttcctccgcatccgcccacctaccttctccagctccaacaaccccgtggatgctttggattggttgcatgccgtggggaaaaagctagacacggtgcagtgcagtgatgaggagaaagtcgtcttcgccgcccatcagctgcagggacccgcatctctctggtgg

SEQ ID NO: 56773 - DNA, 562 bp, Oryza sativa
  unsure (1)..(562): unsure at all n locations
  Clone ID: PAT_MRT4530_58650C.1
ccggttgagatccgcccagcaaacccaccaaaccgcccgtggtgttttncntcctaccgccacgggcagcagcancggcgtgcctgtgccatgtcgagcgangtgacgtcngttccgccgacgccgacnccgccgccggtgtctaccccgccgtcncanatacantcaccggcggcgccggcgaacaaccgggcgtccccgctgcgggggatggggaccccnaacatcgccanccccctgaggaaagnggtggcnancgtnaatggctacctgggtnangtcgccaaatgacacggctcgccgaccgcgcgaccctggcttttnttcaccnaatcccgcagcggcaaccctactacnccncnttccncagcctcagctccngcatccgcttccaagcgctcgtgctccccgtcccttctcccttctcggatggactnggcgatatctgcctgaccgtggngttcgcatngcactctaccnctgtggctgcccctcaactcncnaacccntcccttgtggcncccgtncacccanncatnttnctcnccnccncctcttccgc

SEQ ID NO: 56774 - DNA, 204 bp, Oryza sativa
  Clone ID: PAT_MRT4530_58651C.1
atgatcgtcggggccagaggaaaacttggggcgaatggaaacgacttcccttcgaagcgcacgaaatccccctacctggagcgccagctgtcgaggagtgatcctctctaccaggagatcgtgggatccccctttcgtgagttcggccaggggaaaaggcccgcctctagaaatcgcgtctccgcccccaaggctgctagctag

SEQ ID NO: 56775 - DNA, 1119 bp, Oryza sativa
  Clone ID: PAT_MRT4530_58652C.1
atgaaatttcttaaccctgctcatcttgaggtgatatcttgcaagtgcaacattgatgagggccttatcgttaaagaggtgtcagaaggttctattgctgagaaacttggggttagagttggtgatgtcattaaattcttcaacggaaaacatatctcttctactgttgagttggaactactgttgctgcaaatatcagaggatcatttttacaatggaaatggccttgattccaaaatagatattgtggcccatgcgcgtgaggctactcgcgctgtcgcgctcgcgcacacctccgcaaaacccggggagagagtgggtggaggagacaacgcacgcaaaacccaaaaccctctccccggcggccgcgcgcggcgaggtccccggcggccgcggcctgctcctcgccgccgccacgcagtgcctcatccctcgccctcgagcgacacgcatacaagcttagctcgcgccgcgttcgtcgactacgcccgcacggccgtctcctccctcccgccgtacatccccgcggatctcccacttatggtattagtcaacgtgtaaatggatagacacattgtacgctgctggccatcttcggtctgtcttcccattttcttggagtgcgtcttttcttttagccttttagggattccttaaccatatagatataactatctgtgaacatggagatgatgtccatgagcatgttctagcttttcaaacacacgggcagtctccaccttcctctctcctgttcgtcctcatgcaaccatccatacctccatgctgcatcaagcacttgagtatctgcagcccgacgaggatgaaatcgtagccgacggcgagacggcgccgaatagcaggttgacgccgccgccgccgccgccgccgccgcccatcatcatgaggcgtgccgcctcggcaacggtggccgggtggcggcctgctcgccccgtacgtcgtcgtcactgtcaccgccgcgtgctctggcggctgtgcccttcgctgcacgcctactggccgacccgtccacgcgccgccgccgcagctgctgtttcacggcacaacggcgacgacgagatcgtggcggtggagggggatagcgcgacgtggggctag

SEQ ID NO: 56776 - DNA, 439 bp, Oryza sativa
  Clone ID: PAT_MRT4530_58653C.1
tgcacaacagatgttaccccatcggtgagttcgtaagcacagtccagcacaggggcaaccccttctccaatcacccgggtttcaactgagaaactgccaagtcatgcagcagcagtgctgccaacagttcaggatgatcgcgcaacagtctcactgccagccattacagtgttcaggcgattgtcacagtacagtacaacagttgctggcgttacttcgatcagactcaagttaaagcccaagctatgttgccctaaactccgtcaatatcggtattacccaagtacaagctgctcccctgtacattcccaccgtcggggtatcgggtacggaatgtaccagtatagtagtataggagacccaaaaaagtcagcatcatcggggacaatgaaacatcggggaccaatgaataaaagtcaccagtttaaaaaaaaaaaaa

SEQ ID NO: 56777 - DNA, 1736 bp, Oryza sativa
  Clone ID: PAT_MRT4530_58654C.1
cgctaaccacctccaaacccacctcgctaattagggttcttcttcctcctccactactccaccccaccaccacccacacggccccacccatggccaccgccgccggcgcctcctccccggcgcgccgccgcccgcgccgtggctccaagggccccaactccgacctctcccgcaccctcaccgactgcacccgccgtggcgacgccgccgccgccatggccgccttcgactccgccctctccggccccgacgccccgcgcctcctcgcccaccagtacaaccagctcttccacctcctcgccaccgccgacgccgactcgctccccaacgccgccgccgccgcccgccgcgtcttctcccacatgctcggctccggggcctccccctccgaggccaccatcacctcgctcgcccgcgtcaccgcctccgatgcctccaaccccgcggccgctgacgaggccttcgacctcgtggccaccatgagggacaagtacggcgtcgccccgcgcctccgctcgtacagccccgtgctcgccgcgttccgccgcgcgggggaggccgggaaggcctacgccgtcgatgcccacatggaggcctctgctgttgcccccgaggagcccgagatcgccgcgctccttgatgtcagcgccaaggcaggggacgcagacaaggtgtatgagtatatgcacaagctgagccgcaccgtggattgtgtcggcgaggagactgcggaggtgctggagggttggtttcggagcggtaaggcggcaatggcgggcaaggccgagtgggatgcttgtaaggtgaaggacgccattgtggccaatggtggcgggtgccatcggcttggatggcttgggaccggcccttggactgtgcagcgagtaagagttggaggagatggccagtgtgaggggtgtggttgccgtctagcatgtgttgacattgacgtcgaggagacgcagaggtttgccgattctgttgccagtctggcccttcagagggagaccaaaataaatttcagccagtttcaggagtggttggaagaacatggagcatatgaagctatagttgatggtgcaaatattgcactttatcaacaaaattttgcagagggtggctttagtttgactcagctggacgctgttgtaacagagctacgggatagatataatggtaaatggccacttgtcgtattacataataaacgcattgccaagcttatggaaaatgcatctaatagacacctgattgaaacctggagagcgaacggggcattgtacacttcaccaattgggtcaaatgatgactggtattggctgtatgcggcgattaggttgaattgtttgcttgtgactaatgatgaaatgagagatcacatatttgagctcttggggtcatcttttttccccaagtggaagcaacggcatcaggtcaagtacacctttagtaaaggaaaggcggtgcttatgatgccacctccatattcttcggagattcaggaatcggagatgggatcttggcatgtgcctatggaggagaaatctggtgatgacagagctaggatttggctttgtattgataggacagggcactgcaaacatccccatgaagctcctgcagcaaacggggttgtccaggatgtatctcccaccgaggcatctcatggatgtgagcagaggcgagcagaacataatggtggctccttaaccggtaaaagaaaggatagaaattga

SEQ ID NO: 56778 - DNA, 2186 bp, Oryza sativa
  unsure (1)..(2186): unsure at all n locations
  Clone ID: PAT_MRT4530_58655C.1
gcctaacgcagcagcctccccagcatgaccagggacttcttccccccggtcgctgccatcgccgcgccacccgccccgccccccgcgcgctcccgccgcacgcccccgcgcacgcgcttctccacgggctccacccccgacaccaaacaggtgacctcgccgtcaccgcggccggtgcaaccctccaatgcacccccacctccacctccaccgccacctcccccaccaccaccgccaccgccgaagttgaatacagcgccgaaaccacctccaccaccaccaccaccaccatccgtgccgtcaaacaacaatctcccaaagccggcggagccgccggccgtgccgacatcgaggcgccggttgctcaagcctctgccacccgaagggccgcgcattgccatgccgatgccgatcaccgcggcgacgacggtggacaacaacgggagcacgtcaatgcgggaaggggacaacgccgccgccgacgacgggggcagcggcgagccccggccgaagctgaagccgctgcactgggacaaggtgcgggcgacctccgaccgcgccatggtctgggaccagctgaagtcaagctcattccagttggacgaggacatgatcgaggcgttgttcatgaacaactcgacgccggccgcgccgccgagagaggtcgggaggaaagccgccggagtgccgtcgttccggcaggaggagagggtgctcgaccccaagaaggcgcagaacatcgccatcctgctgcgcgcgttgaatgtcacgcgtgaggaggtctcggatgcactgttggatggcgatgctgaatgcctggggagtgaacttttggaaacattagtcaagatggctcctactaaagaggaagaactgaaactacgagactacagtggtgacttatcgaaacttggttctgccgagcgctttctaaaggctgtgttggatataccttttgccttcaaaagagttgatgcaatgctataccgagccaattttgagactgaaataaattacctaagaaactcttttgaaactctggaggctgcttgtgaagatcttagaggcagtaggttgttcctaaaactccttgaagcagtgctgagaaccggaaaccggatgaatgttgggacaaataggggtgaggctaaagccttcaagcttgatactctcctgaaactagcagatgtcaagggcactgatggtaaaaccacattgctccattttgtcgtccaagaaattattcggtcagaagacgcaaaatctgaaaaagaaagtgccatgattagtagctctaaagatgaccgtaagcatggtctcaaggttgtatctgggctcagcagcgagcttggaaacgtcaagaaagcggctaccatggacttcgatgtgcttcatggttatgtcaataagctagaaacaggtcttgaaaagatcaagtcagtcttgcaactcgagaaaaaatgcactcaaggccagcgattctttatgtcaatgcaagactttctgaaggaagctgaaagggagatagagagagtcagaggtgaggagaggagagctttggggagagtgaaggacatcactgagtacttccatggcgacaccgcgaaagaggaagcgcatcctctgaggatattcatggtggtgagggacttcctgtcaacgttggatcaagtttgcagggaggttggccggatgcagcaggacagaacagtcattggtggatcggctaggtcattccgcatctcagcaacatcctcattgccagttctaagtctctatggacaacggagagaaaacaactccgatgatgatagttcatcgtcatagggtaagaaggataaggaacatactgaattttggaatgaacatagacgcacaaacttttacagcttatagcagatgcagcaaatgctacattgctgctacaatgacgatgacaaaggaagcacatgtgtaccgtggggaacaccatgtttaggagagatcaggggtttatacacttggatcatgtggaaattcttttgtacaaaagaataataattataacaaagctctttttgttgagtaatttgcaatcagcaggctgagaaaagagtctcactttagtaagtatctgcagttgcttgcacgataactgcaatcttcttatgtaantattatattcatctagttgccactagtactaa

SEQ ID NO: 56779 - DNA, 546 bp, Oryza sativa
  Clone ID: PAT_MRT4530_58656C.1
atggagttcggcggtgcggccggaggtgttgacggcgggaggccgttgatggtgcagcgggaggtcggcatcgacagccagctgtggaggtgcggcggagacagtagttgtgtggacagcaccgacggtagtggaaggctggcgccactggcttgcaggggaggcttcggcggcgctgactggaggccatggtggtggcgcgagtatgcatggtcagcggcgggaggtcggtgcggcgtgaggacgcgtgttggaagccggcgtggatcgcgcgacgagggtggccgtgtgacggcacgcggaggctggaccggctggggaaccggtgcagcggtatccatgcgccaacagaggtttagactgtggtggagcaatggtgtattagttgtggatagacaggcggcgggtggcaggttcctcgtgtggtttccgatggcaaatatttttttagttaatgaaaggaagcaccttgcccttgcaatgtcaacttctggagcaccaccctacggaatatcaggtttcaagcaaagggtgaacggtttttag

SEQ ID NO: 56780 - DNA, 711 bp, Oryza sativa
  Clone ID: PAT_MRT4530_58657C.1
atgaggcttcaccatctgcatgtggcctacctggatcacaaagcgtcgtcgtcctcgtcgtctccggcgccaccatccatctccccgtcgtcgatccccggatcggccgccttccctgctttctccttcaaatgcctccgcccgctcgcgcccaagatctcgctgccggagccgaggaagatgatcgcgccgccggacttcgtcgtccctcgcgccagaaacgcttccaagctgctcaactacactgtgcaggtgccggcggcggggacgacgaggtggaacccgtcggcggagcagataaaggtgctggagatgctgtaccgcggcgggatgcggacgccgaactccgtccagatcgagcggatcacggaggagctcggcaagtacggccggatcgagggcaagaacgtcttctactggttccagaatcacaaggcccgcgagcgccagaagcagaagcgcgccgccctcctcaccctcagcacgctcgacccttccttgctgcccgctaccgctaacgaaaccaaagaggcaccggagaagaaggagaaggacgtggaagatggattggcgagctgcaagcggcggtgcaaggcgtggggtgacggcgccggcgatggagacgcggtggtggcgacggaggcggccggcggctgcaccgacgaagtgaccctggagctcttcccgttgcatccccagggaaaagcttaa

SEQ ID NO: 56781 - DNA, 1332 bp, Oryza sativa
  Clone ID: PAT_MRT4530_58658C.1
tcaaactgtgcctataatctggtgaagggaggtgtaggtgccaacgacggcgacgcacactccgatgaccagtatcccgacgatcgccgccacctcgaagcggccaactcctcctcgaggcatgtagatcttgaggtagctcaggcacgggaacagcacggcgacggtgacgttcagcgaggacccgttgaacggcatgaggtagccgaagaagggcaccgtgcatgccagcaccaccgtgctgaagacgacggttgtgctggtgagcaccctggttagcctattgttttcggcatcagccgctaccgccgccgccgctgtcgacagcttctcctctatcgcggtcgtgacgggctggatcacgagcgcgtacttcgccagtggggtgatcagggtcgttaggatggcaatcctggtgtacagctttcccgtgggtaagtttagtgtcacctgcgcctgcacatcctcaccgtagatcttatatcccaacactgctgtcactgcgtagttgagactgcacaacaccgaagagatcagcaaaaccttaggaaaatccttcctggccctcattgaggagtacacggtcggaaagacgccatggccagcgaagcagacgaagtagaggctgagggcggtgggcaacccgctgagattcaagatactactgcccgccatatggaagcccttgtcggccacgccggcccagaccagcgacaccgtcagcgccaccgacgagacgagcccaaccgccgagacgtaggcaagcatgctcaggttcttgagccacgtcgtcgggaggatgacggcagccgccacgagcatgaacagctgcttcccatgcacttggtaccccaggatcttcaccaccgtgccggggaggagtttgtcgaggttgtcgccctcgaggatgaggaagctgatggcgacgaggtagagctcgacatacatgatgaggccgatagctgtccggccgtaacggccaaaggcgaggtagccgatgtccgggtagctccgtacacaacggtcggcgcgcatgcagcgatagatgagtttgccagtatagaagcagatggcgccgaccatggcgaagagcgccaagctgagccacccgccctgcgacaacgcgtacggcacggagagcatcccgatgccagatatcacgttgctcaggttgaggcaactcctcccgaaggaagcgccggtgatgcagaatgagccgccgctggtggggaggagctgctgctccacgtgctcgtgtttgccatgtaggagagcctcttcgtgtttgccatgtaggagagcctcgtcgatagggctcttatccgccgccat

SEQ ID NO: 56782 - DNA, 789 bp, Oryza sativa
  Clone ID: PAT_MRT4530_58659C.1
atgaggcttcaccatctgcatgtggcctacctggatcacaaagcgtcgtcgtcctcgtcgtctccggcgccaccatccatctccccgtcgtcgatccccggatcggccgccttccctgctttctccttcaaatgcctccgcccgctcgcgcccaagatctcgctgccggagccgaggaagatgatcgcgccgccggacttcgtcgtccctcgcgccagaaacgcttccaagctgctcaactacactgttagacacatcaaaccctacttgttcttgatcgatcgatcgatcaggttcatgatcgtgtatatatttggtttgcaggtgcaggtgccggcggcggggacgacgaggtggaacccgtcggcggagcagataaaggtgctggagatgctgtaccgcggcgggatgcggacgccgaactccgtccagatcgagcggatcacggaggagctcggcaagtacggccggatcgagggcaagaacgtcttctactggttccagaatcacaaggcccgcgagcgccagaagcagaagcgcgccgccctcctcaccctcagcacgctcgacccttccttgctgcccgctaccgctaacgaaaccaaagaggcaccggagaagaaggagaaggacgtggaagatggattggcgagctgcaagcggcggtgcaaggcgtggggtgacggcgccggcgatggagacgcggtggtggcgacggaggcggccggcggctgcaccgacgaagtgaccctggagctcttcccgttgcatccccagggaaaagcttaa

SEQ ID NO: 56783 - DNA, 333 bp, Oryza sativa
  Clone ID: PAT_MRT4530_5865C.1
atggaatatggcaacaaccgctacgcaataaatatttgggatcacaacatttatctcaagcctattggaaagcggggggattcacatttttgggctagtcttatgaaggtcaaacatgattttttccgttttggatccttcaagattagggacagctcccaagttaggttctgggaagacaaatggttgggttatcaccttagttacccggtggctacgtacctgggctatcctccaccaaccgggactgcgggatactattatagtggtatctcgacgtttggaccaggtggcacaggagttttttacccaggagcatgggtggcagtttag

SEQ ID NO: 56784 - DNA, 240 bp, Oryza sativa
  Clone ID: PAT_MRT4530_58660C.1
atgaattttactagaaaacttgcacacacttgtcgtaatatccattactcgggagttgaggactacacaacctttaacaataattttgataacatgaaatcatcgaaagtgaaaccattagaagcatttatgaaatcatcgatagggaaaggtttgacaatagtgaaatcatttacggtcatcctccacaggatgttctcacgtaggcgtgctatcactaggctacctctatctctctaa

SEQ ID NO: 56785 - DNA, 251 bp, Oryza sativa
  Clone ID: PAT_MRT4530_58661C.1
gtttaagcatataaataatgctcctctgtgatctctctataatcctttagactgtactctgctatcaacacctcgaagtgcctggtttcagatcacatgacgtgatctccgtagttttttagacgatatgtaaatatactcagaagtcagaagtgaagaaacttttgtacgtcagtatgtcgagtttatgatgacggttaggcgcagatacatcagctctaggaaatctgaatattttcctgagcattcac

SEQ ID NO: 56786 - DNA, 270 bp, Oryza sativa
  unsure (1)..(270): unsure at all n locations
  Clone ID: PAT_MRT4530_58662C.1
tcgaaactcagctgcaaggagaaggagaaggtaggctccagccatggctttcccagctctccgccgccacatccgtgccggagtttcatgggccttcccggacctacttccttcttcttaggtccatgggtgacgcttgcattcgtttgaggatgaagcaagaaaaaggtcccaaggggcattccggntggcgnacttacattcgggcttcaagcccacccaacggttattcattgggtggacgnacgnacgaacgccttgattggcttg

SEQ ID NO: 56787 - DNA, 1023 bp, Oryza sativa
  unsure (1)..(1023): unsure at all n locations
  Clone ID: PAT_MRT4530_58663C.1
tcggcagnatgtctcgtcagcattcggagctgcagctactcggacgcatgcaagattgcgcgcttaatgcatgccaaccttgcggcggataatctcacagtagaagcaatggaagccctggttgaccaagagaaaggaaaagcagatggactgaaagatccaaacgtcaaactcattgttatgccaaccagtctctctgccagcgagtggaataataattcctcagcaacaaatccccagacactcaagaagcagcattttgccagcgagcacgcagccccggatctgatccttctcgagccagaagtagtagctacatcgcctcgaaatctcttgctctcaagcggtatacgcgcagtggatcactgcatcgaaacaatgttgaatgaacactgcacaggcgaaatcttcttccatatggaaaatgccctccaaacactcttgcgcggcctaaaagcctataaaataggcgaggctcacaacaagtactctgagctcctcgaaggcatcgcaaattgccaacttggggctcgagacgctatgatgggactgataatgtgggatatcccaatgggcctttcacatgccattgggcaccagttgggcagcatttgcggcgtcatgcatggcgttacttcatgtgtgatgcttgctcctgtgctgaggtatacagcggacaggtcagataggcaaagggaggtccagaagcgggtgttggaggtttggaatagggcgttgagtgctgacgaggatgatcttgcggatgcggtaggcaattttgtcaggtatcttgagttgccgagtacgctcaaggaggttggtgttgagaagcaagaggatatcgatagggtggctgaaagtacactgacggatgtgtttggggccatggagggcatgggcggaaaggaagatgtgcttgctatcttggactctgcaagaggctaaaaacgacatcgtaggcctcagttttattttacaaattcctttttttctttcttttcaatcaatcttactcgttcagcc

SEQ ID NO: 56788 - DNA, 2442 bp, Oryza sativa
  Clone ID: PAT_MRT4530_58664C.1
atgcccagattacccctgtcgccatctatagctgactcggtcgagtcgaaacggggtcggtctctttcatcgccacacaccaccgaggaaaaaaatccccaatccctaaccctagcttgcggcggcggcggtggcggtggcggcgaaggtggcgggggaggcttcggcgacggcggcgacgaagacggcggcaacgacagcggcgacagcagcggcgacggcgggcgatggagaagtgacattggcagggaggatggcgacgccgaggaagaagttagcagtgaaaagggcatcaatgcggttgatgagttgatggacgctagctcagcttgcagagttgctattcgggtttgtccatacgttgagtttcatgacaatggtagaccagaatttcatgtttctcgtgatattaattgggtattagacaaggatacaatttgctggattaaccttattaatgatctcgttggcgagatgaggaggctcccattgattgttaatgtgagtgatgacccacgaaataggaccgagccttgtacggatcagggcaatagtcaagggccggctagtaatgaaacaggagatggacatgttgcttgtactgaccatgtattagcaactcaagagagccaagttgttggtcataaaactatcaaacctactaaggcatctagtaagaaaaaggctgatgattggggtgagagtgatgaggttgagtatgttggtgtagatgatgagaaagagaagtataacgacttggtgtcagacgatgaggcagttgatcctgactatgagccagattctgacgaagaccgagacgatttagccgttgacgacgaggagggttgtgagtcagtggcacatataaagaagcttccttacccacataattgtgctagcatagctggtgtggagaacaattgcatggccacaaattcctgggtgttggaagagatgtacaagataaagatttcctactacgttgtttgggacgatagacaaatggcacttgatgagatcctaggaaaatgggaggatagttttgatgcagcttacagcttcaaagcagaattagagaggataagtcctagatccattgtggaagttgatcatgtttcagtgaatgggaagaaccatttcagtaggatgtttgtggcactaaaaccttgtgttgatggttttttgaatggttgcagaccatatttagggattgactcaacagtactaactggaaagtggagggggcaattggcatcggcaattggtgttgatggccataattggatgtttcctgttgcctatggggtgtttgagtctgaaagtacagaaaactgggcttggttcatggataagcttcacatggcaattgggtccccagtgggtttggttctgtccacagatgctggcaaaggcattgacacaactgtgaccagagtattcaacaatggagttgagcacagggaatgcatgagacacttggtgaagaactttcagaaaaggttcagtggtgaagtgtttgagaggaatctatggtctgcctcaagagcctataggcaggacatatatgagggtcactacaatgagatgaaagaggcatgtcctagagccacagagtggattgatgacttccataagcacatttggactagaagtaaattctcacctgttagtaagtgtgactatgtcacaaataacatagcagagaccttcaatagttggatcaggcatgagaaatcactccctgttgttgatctgatggataagatcagacatatgatcatggagagaatttctattaggaaaaggcttgctgagaagctgactggacaaattctgccaagtgttatgaagacactgtatgctaggagtagggaccttggatataaactgtactcagcccacaagcacctaggggagataggtggcactggtagggacttgaagacatggaggcacactgttgacttgaacactagagaatgtagttgtaggcaatggcagataacaggcataccttgcacacatgtaatttttctgatcatttcaaggagggggcttgaattggaacaatttgttgacgagtactactatgttgcagcattcaagagggcatatgctggtcatgtggttccaatgacagacaaggcccaatgggctaagggtaatattggattgaagttacatccacctctgttgaagaggtcagctggtagacctagaagcagaaggattaagggggtggaagaaggtggagtagggaaaagaaagtacagatgcaagaggtccacacctacaagatctagaccatctgtggtcactactacaagccctataacaaggagcagggcaagggctctcaatttggatgttgcagctccacccacaaaccaggagaagaatactagaaaatctccaagcaagaaggctggtggtggcaaatga

SEQ ID NO: 56789 - DNA, 621 bp, Oryza sativa
  Clone ID: PAT_MRT4530_58665C.1
atggggcgggtggcggggatggtgatggtgctcgcgccggcggggcaggcgcggggcgggggcgcgcccacggcggcggagcgcgcgctcgcggcggtggcgcgggagcggctgctggaggcggcggagttgctggcgcggcccagggatctgttcccgaggaagccggtgcgggcgctcgtgaaggacctcggcctcgcccgcggcagggacccctccgccatgggctaccgcccgcgcagggcctccatcgccgagaggatcctcctcaccaagcgcaagatggaagaaatcaaggaggctccagtgtatccaacaactaatgtgtctcaaacaacagccacgagagcaacaactgtcttccaacatggagcttctaagccaactactgggttgcccatgaatatttcagctgttgcctcattccctgtcacaaccccacctactataccatccccaaatatcttgaagcagacacagttaaatgaatcaccatcaggagtgaaagcagctggtacctcttcaattgtttcagtaccatctgttggtcctacaaatattaaagtggaaaagggtgttaatagtcctacttgcacacaaaatggagccgttttgtactaa

SEQ ID NO: 56790 - DNA, 1317 bp, Oryza sativa
  unsure (1)..(1317): unsure at all n locations
  Clone ID: PAT_MRT4530_58666C.1
ccggccgggaatcgcatcgtcgccgaaacgacacgagcaaatcaacgcgaagaagaaaagaaaagaaatcctcccgcttcgctataaaaatcgcccgcttcccccgtcgtccgcttcaatctatgcgggcatcatctctcttcgcggaatcggtgttcactacatctgctgctgctggtcgtcgtcgttgtcctcgtctcgccgccgttcccgttaccctcttcttctccaccggtcgcggctcgccggcgatggccgaggaggcgcagcagccacgcggcgtgaaggtgggcggcatccacgacgcgccggccgggcgcgagaacgacctcaccaccgtcgagctcgcccggttcgccgtcgccgagcacaacagcaaggccaacgcgatgttggagttggagagggtggtgaaggtgaggcagcaggtggtgggcgggttcatgcactacctcaccgtcgaggtgaaggaacccggcggcgccaataagctgtacgaggccaaggtgtgggagagggcgtgggagaacttcaagcagctccaggatttcaagcccctcgacgacgccaccgcctaaacgtacatagatcatcgtccggctgctgaatcatcggcttaaagcagagccatccagtgatccaattatctgctactagaacatgttactggtcttgctggaaggtgtaatatgatgaataaaacctgctgctttgccgggtcataatagacatatcacttctgtatttcctagtgcaatacacaacattttcgcagtctaaaaaaaccgccngaatntntaaaatcnngangttanaanaaaaaaaaaanctccaaaggggggcccggtacccaattccccctanattnantcttnttanantccactgggcccnccttttacaacntcttaactgggaaaaaccctggctttccccaacttantccccttgnaanaaatcccccttnccccanttgggttttttaccaaaaaangcccccnccanttnnccctncccaanatttccccnccctaaaatggcaaagggcaantttttaacctttaatttttttttaaaatccnctttaantttttttttaanncacccccnttttttaaccaaataggccaaaaatcgggaaaatccctttttatttctaaaaaaaataaaccaaaaanaggggtaaaattttttttcccntttgggaaaaaaaaaattccnctttttaaaaaaannttnaaaccccccttccaangggnaaaaaaacctcntttcnggggnaaaaggccccctnttttaaancaacccccctntttc

SEQ ID NO: 56791 - DNA, 252 bp, Oryza sativa
  Clone ID: PAT_MRT4530_58667C.1
atggcagatcattatgtctacttgattgataaattggtcgatattgcactctgccgaggagttgaggatctggatctgacaacaaaactagaccaaatatatcaaagatctgacatagcttggtacaaatttcctttatccttgttcaccaatggcaagggattatctctgttgaaactcaaacttggccaatgcacccttagtattcccactggttttgatggattcaaatgcacatttctgatgacatga

SEQ ID NO: 56792 - DNA, 3167 bp, Oryza sativa
  Clone ID: PAT_MRT4530_58668C.1
atggcggcggcgatcgccggcgccgccgcatccaccgccgtatccatcacctgctcctcctactcctacgaagacgacggagccgccacctcatggtcgctctcatccggcacgtcgtcgtcgtcctcctcctcccagcgccagcgcccgtaccggcgcctcctccacgacgaggcgcagcgcctccgccgcgagcgccgggggcaagggagcggcgcgcacacgccccggtgggtccgccgcaccccggaccagatggcccgctacgtcgaggacgaccgcgccggccacgtgtacggccgccaagtggttgccgccgtccccacatcgctcgccgcagcgtcctctgccagcccctcctccgccgacatatgctgcaccagggcctcgattgtcgcgaaattccccttccgcgaggtgtgcatcgtgctacacgatcttcgagactgcctcaagatccgcgattttttcacctgcatgaagcatcagcagtgctacgagccgggcgatatcgcctaaaaaagccgtctcagattgtacggtcaggttgggaatgtcaaactcgccgagttgacatttcttgagattcatcaggcttggtacgagccagactcagcggcatgtggaacactcctgagcgcatacgatatatgggggttgctcagtgacatgttgacgttctacgccgcgatgcgccgccgcgacattgtgccctccatctcggtcttcaatttcatggtctcatctctgcagaagcagaaattacatggcaaggtaatccacctgtgggagcagatgctggaagccaatgttgccccaaatcagttcacatatacagttgtgatcgggtcatatgccaaggaaggtatgttggaggaggccatggatgcatttggtgagatgaagcgccgcagatttgtgccggaggaggcgacatacagccttctgatcagcttgtgtgccaagcatggcaaaggggaagaggcattggggctttatgatgagatgaaggttaagagtattgtcccaagcaactacacatgtgcatctgtcctgacactctattacaagaatgaggattactcgaaggcgctttcgctgttctctgagatggagcagaataagattgttcctgatgaagttatctatggaattcttgttaggatatatggtaagcttgggctttatgaggacgcgcagcgtatgttcgaggagattgacaaggcaggtcttttgagcgatgagcaaacttatgtggcaatggctcaagttcatatgaatgtccaaaactatgatagagcattgcaagttttggatgctatgagggcgagaaatgtaaagccatcacaattctcctacagtgctcttctccgatgtcatgtggcaaaggaagatgtggatgctgctgaagatactttcagagctctctccaattatggcccgcccgatgtgttttgctgtaatgatcttctcaggttatatatgaggcttggccatctagacaaggccagggcactcattctgaaaatgaggaaggaagctctccagtttgatgaggatctatgtgtgactgtgttggaagtttgttgcaaaaccagtataaataaggatacggataatttaactgaagtgattcagaatgaaggtagctcatcaaaggtgctaaatccaacagatagttcaacacttagtatgatgttgaaatccttgttggacaaacctgggggcttgtccagtgtgtcccaattgatcatgaaatttgctagggaagggagtacagatgaggccaaattcctctatgaacaccttactgaattgggagccaagcctgatgatactgcaatagctactttaattgtacaatatggccaggcccagcagttggaacaagcacaaaaactgtttgagacagcatcaacatcgtttccagtaggaggatctgtctacaatgcaatggttgatgcattgtgcagatgtggcaaaactgaggaggcatatcgtcttttcatggaattgatcgatcaaggtcataatggagatgccgtgacaataagcatacttgtcacacacctgactaagcaaggcaaactgtactcagctgtcagcatatatgatcgcatgatatcttctggcattcctcggtccatgcagacattcaatataatgataagtgtttatggccaaggaggaaagctggagaaggctgttgaaatgtttagtgctgcacaggaactaggcttaccgattgatgagaaaacatacacaaacatgcttagtttctatggaaaagcagggaagcatcatgaggcatccttactgttcagtagaatgaaggaagatggtatcaggcctggaaagatcagcttcaacaccatgatcaatgcctatgccacttcaggattgcacaatgaggcagagattatattccaagaaatgcagaaaaacaatcatgtgcctgattcgcacacatatcttgctttgatcagagcatacactgagggtaaatgctactccaaagctgaggaagccatccagatgatgctgagaagcaacatgaccccttcatgcactcatttcaaccatctcatttccgcctttctgaaggaaggtcagattgatgaagcccagaggatgtacaaccaaatggaggaggcaggcatacctgctgacttggcatgttgtcggacgatgatgaggatgcatctggatcacggttacgtcgatgatggcatcttgttcttcgaaacggcatgtcgacttctgaaaccggatagcttcatcctgagtgctgcatttcatctctatgaacattcaggcagggagtctgaagctggggatgtcctagatgccatcaatatgagtggtgcctctttcttgcgtaatctaaaggttggatcaaagttggagcaagtgagaaatgatacacatgcatcttgaacaagctgtgagtatcatgtcggatgaaaccgctgttaaaaccgctcgagggaggcaatataaaccagtattaataaccgagtctagttttttttttttttggtttgctattttacttgcgacatatttttgggctagtatctttcactttttcatatgtaggatcttgcatcaagattcgtattattgtatatcgaacttttacactcgattacaaatgcaccagaatt

SEQ ID NO: 56793 - DNA, 539 bp, Oryza sativa
  unsure (1)..(539): unsure at all n locations
  Clone ID: PAT_MRT4530_58669C.1
gaatcacataaacggccagtatattaccttattaggctgtgagctagttgtttcgaaatttctgatgaattcatagcatgcgaagtaggttatgcttgtttgtggcatatgatatgttggagtagtatttgatgaaaacacaaaacaaggtttgtaggtttagcttccccaggctaccatcaactatcggttctaattatgttatccatgatatcatgatcttcagcatatttatcatcaactatcgattctgcttagtggcaattttagccaaggcgctaagcgctagttaggcagcagaccagcacctggcacctaattggtgatcatgtggacctaagcaggattggccagccacctagtcaggataactcaataggcaggctaggcgttcgtatatgcaaggaaattgtgcattttgatgtaagagcaaaanttttaattgttaggttaacctgaatcttatttcgttttgtacttgtttccgagatgctgggtgttcttgcttgagtgctgtactccatgaaatccgtgagatg

SEQ ID NO: 56794 - DNA, 1123 bp, Oryza sativa
  Clone ID: PAT_MRT4530_5866C.1
gacggtggcagcgcagcgagacgccgagccggcgaggacgaacgatgacgacgacgacgaacaccggtggagttcggtcgaaggggaggcgagtccgagggcgaccttgccgctgcgatgccggaggtggtggtggtgcacacgacggcgcacgggtggaggaagggccgaccggggaaattccggcgaggtggatggagaggccgacacagcacggcggtgttccggcgaaattaggggcgacgccgtggcctggccagggaagaggacggcgttccggtgccgggagaggtggtggcgacgtcggccgacgcgcaggagactcggcaaaggcggccggaggcggaacagtggcgacaacaccactgttgccagcgggggcgcacctccgggggtctccacgtgaaacggtgggcaggccgggggagaggaggctgctgcgacgccggggaaggcgacggcacggccagccggcgtgctgacgcgacggcaggggcggctggaggtcggccggcgccggagagagagaaggagaaggcggggagaggtggtgcgggcacgggaagacgtgggaggaggctaaaatgggagaacagaggatggggattccattttataggagaggagagggagccggccacgggagaggcggggaacggcggcggaatttgtgccggcagccatggaaggtggccggggttggcgcgtccgttcccggcggtttgaatcgcgtggattttgaggagaattggcgctagggtttgcacgggagagaaaaaggaagaaggccgggcgggaggaggacgacgacccgggggtgggacccacgcggggcgcggtcagcgcgcgtgacgggcgcgtgcgcatgcgggaggagggcggctcgggcagggggcgcggcttgggccgggcggccggcccaggaggagaggagggagaggcggcccgggagagagagggaggaggagggagctgggccgaggggggaagggaagggcggcccaagagagagagggggaaggaaaaagagagggagaagatggagactttggccgcaggccaagggagagagagggaggactttgggccagacttggcccaaaggaggaaggaggatttattt

SEQ ID NO: 56795 - DNA, 219 bp, Oryza sativa
  Clone ID: PAT_MRT4530_58670C.1
atgggtagtaggaagagaggaggaggagccgtggcaatggcggtggcgatgctgctggcggcggcggcggcggcggcgagcgcgtcgcagccgtcgtcgttggaagggttccagccgctgtcgaagatcgccgtccacaaggccaccgtcgacctccacggctccgcgttcgtcagcgccacgccggcgttgctcggcgaccaggtagacgacgaatga

SEQ ID NO: 56796 - DNA, 2065 bp, Oryza sativa
  Clone ID: PAT_MRT4530_58671C.1
atggcgaccttgctgctgctggccgtggcggcggcggcggcggcgtgggtgtggtgggggcggtacgcgtggcgggcgcgggcggtggcgaggaggctggcggcgcagggggtgcggggcccgcggcgcggcgggttgctgcggggttgcaacgacgaggtgcggcggcggaaggcggaggcggaggcggacggcgtgcccatggacgtcggcgaccacgactacctccgccgcgtcgtcccgcacttcgtcgcctggaaggagctgtacggaacgccatttctgtactggtttggccctcaaccccgaatctgcgtctccgattacaacttggttaagcaaatcctttcgaagaaatatggccatttcgtgaagaacgacgcacacccagctattctgtcaatgatcggcaaagggctggtgctggtggaaggcgcagattgggtgcggcatcgtagggtgctcaccccagctttcaccatggacaagctaaaggtgatgacaaaaacaatggccagttgtgctgaatgcttgatccaggggtggttagatcatgcatcgaacagcaagagcatagaaatagaagtggaattcagcaaacagttccaagatttgacggcagatgttatatgccgtacagcatttgggagtaatagtgagaagggaaaagaagtgttccatgcacagaaacaactgcaggccattgccatagcaacaatactcaatctgcaattaccaggattcaagtatctccctaccaaaaggaacagatgcaagtggaagctagaaaacaagttaaggaacacgctcatgcaaattatacagtccagaattacctcagaaggaaatggatacggcgatgatcttcttggcgtgatgctcaatgcttgcttctcaacagagcaaggagaaaaacgagatgagctgatcctgtgcgtggatgagatcatagatgaatgcaagacattcttctttgcagggcatgaaaccacatcgcatttgcttacatggacaatgttcttgctcagtgtgtatccagaatggcaggatcggctgagagaggaggtcctgagagagtgtagaaaggaaaatccaaatgcagacatgcttagcaaactgaaagagatgacaatggtgctacttgagacactgagactctatcccccagttattttcatgtttagaaaacctatcaccgatatgcaactgggaaggctccacttacctagaggcactgcgattgtgatacctattccaattctgcaccgagacaaggaggtttggggtgacgatgccgatgagttcaacccgctgagatttgcaaatggggtcacaagagcagcaaagatcccacatgctcatctgggattctcaataggaccaaggtcatgcatcggtcaaaactttgcaatgttagaagcaaagttggtgatggccatgatcctgcagaagttctcctttgctctttcgccaaagtatgtccacgcacctgcagatctgataacacttcagccaaagtttggtcttcccatactcctgaaggctctggatgcatgagataatagttttgtatgtagctactattagtatgatttataaaatatgtatattacggggttgctagagcttcgggcgttatagttcttatccaccagaaagtacaccataaaactagaagatatgctgaagaaaggctgcaatctacattgttcagtgtattctgcatgtccagtctcttattatctataaaacttgtcaaggatatgcccagattatgtgtagaagatataaaaccttcaaagtctaatctgaattttggatggaccacctgatagcttggtctagcagctaaaaaaaaaaaaaaaaaaaactgcctgatttggagctctatatattggcctgtatgacaacagtggaaaagcaaaggttgcccactcaatagcatttatgcagtaagtccaaattgtcctttcagctttgggtgctccattgattgccacaagtcatatctaatattcaattcgtctgtatgtgaacaacatatttcttatgtgaaaatgaagta

SEQ ID NO: 56797 - DNA, 1058 bp, Oryza sativa
  Clone ID: PAT_MRT4530_58672C.1
atggatcactccaactcgcctcccgtccctgacattggcagcttctcctacagctggccgactaacaagccgctcgcgcgcgccgacgacgacacgcacgcgcggggatgcagcttcgacttctcgccgccgtcgttcgagtgctccaagcaagccgcggcgatggcccacgccgaccagatgttccgcgacggccttctcctcccactgcgagccgtacggcgtcagggaggcggcggcggcggcgacgacgacggcggcggcggcgacgtcagcggcgcccccaagcgggacgctatcccggtgctcctgcggccgcgctatgtggactcggcccagaggatcacgacgacgatccccgcgagcaagcgccacctgctgccccggctggcgtcgccaagttccccgcgttcgtctctccgcgttgcggcggctccggggtggtcgccgagctccgtcctcggactcggggcgagcaacaagctcaggctgccgtccttggggaggaggtgcggccgcgtgctgccgaggcggctctcgtgcaagtgtctgacgttcctggaaccgctatatcagaagatggcgagctgctgtgtcgggagaaggatcacgacgaggcacgcttatggccgtgccgccgccgatgagtcccgcaatattaaggtgtgcgaggatgcaatcagggacgctattctgcactgcaaaacatcactctagatgatcacgcagggggcacctggattgcacgcaggatagagcttgggccttttgggctggagtttgcattgtgttacgattgatctttatgctttgccgttgataagatttgaaaaaaaaattaatggaatcagccctagatagtgctttttcattaaatacaacaggagaaaaatactgcatctaaggataaaactgtacactatacaaagtgcggaataagctctctaaggcgcttagcgcctaccaaggcccaccaaaaaagaaaccccgtaaggggcgctgtaactgaccgtgtaacgctcggagcgggcctccaacataacccttgtgccaatttt

SEQ ID NO: 56798 - DNA, 1274 bp, Oryza sativa
  Clone ID: PAT_MRT4530_58673C.1
atgtcgtggagccccgcgaccgcgaggaagagggcattgcaaagccaagacgagcagcgagacccaaagctgcacaagcccacgcccacgcctacgcccatggagaccgccctcttctccgccgcctccctcttccgcgacgccgacgacgaccaggatgcaaagctgcacaagcccacgcccacgcctacgcccatggagaccgccctcttctccgccgcctccctgttccgcgacgccgacgacgaccagggtggacgccgatgagcaggtgcagtcggtgcagtacgaggaaagagcccacaagttccccggcatggaactgaaaataagggaattctcaagtcatcagctgaatgctaacatgctatggcctgggacgttcttatttgctgattggctggtaaagaataaatcgattctgcatggacggcggatcctggaattgggaagtgggacgggagctttggccatcttcctgcggaaggcatttcaagtagacatcacaaccactgattacgatgatggggagatccaggagaatatagcttacaactgcaaagctaatgatttgggtgtccttcctcatatccggcatacatggggagatcagtttccagttctcataccagattgggacattgttatcgccagtgacattttattgtatgtcaaacaatatccaaacctaaccagaacattatcctttctcctgaaagaatacaagggctgcagtcagaatgctggttcaagtgccagtacagccatcacgaacaaatcaggaactcaagtgcctgttaagtttcccatttttctgatgagctgccgtagaagaattggcaaggaccagtccctcttcttcgaagaatgcgaaaaggcaggcctggaagtacagcatctgggcgctcttgtgtacctcatctacaccaagcagtagcgaaaatccagtggatcatcattagggttagattgctcaaatggcaacacaaggcataaattcagtcacaagccagtaaaatggaattttctcaaatggcaacagaggaaggcctaaattcagtcacacgccagtaaaatggaaaggaaacatggattttttggtagagcatgaaactggtatttcgtcttattttccgttgacattagttttgaccgagaatttatcttctatacaccccttgtcgctgatgggtttatactgctttcctgtacacattcttatatgtggagaaatggtgaaacactgaaatgctataaaaaaaaaaaaaaaaaaa

SEQ ID NO: 56799 - DNA, 2453 bp, Oryza sativa
  Clone ID: PAT_MRT4530_58674C.1
ccccgcgctgacaccgccgtcgtctctcgccgtcgcttggcggtcctcgccgcctccgccgcagactccgccgccgcatctcttgggtgagagccaccgctgcctctctctctctcgatcgcgccgccacgctactgccgcgcgcgcccaacattgccgaccgtttacgaacgtgattgaaacgtgaccgaacgcgaacgaacgcgaacgaacgtgaacgaaacgttaacgaacgcgaacgagcgtaacgaaacgcgaacgaacgtaacgaaacgttaatgaacgcgaacgaacatgcacgaaacgttaatgaacgcgaacgaacgtgaacgaaacgattacggaacgcgaacgaacgtgcacgaaacgcttacgaacgtgtatgcacttgtactaaaagtgtgagaacgaacgcggtaacttggcccgtttagactaatacattttcctgataatgttgcagagaagacatcgtcgtcgtccctcaagccgaagtgaagagggcacacggacaacgaggtgccgcgaagaagatagagggtcggcacatcataactgaggtggacgaagacggccgacctagtgccccggcagaagcagccaagaattttgtacgccacagcggttgggttgtgagggacaacgtgcctgtcagcacagtgtactggcgcagaacaagggcatacggggataatgacagctttgtcccggactcagagaaagagatgctgtggaccacaatgctcgagacgttcacgctacccgcggggcaacaagggcaagcaatgatggccagaaacaaagacaatgccgccaagaagaagtaccatcaccacttggggtcaggcggatatagcgtcgcaatgccgaagtgggaggagatggaggcaagtttgattgagaggggtatcgaaccggccaccactaaatggccggatagatcgaagttttggtactatgctcatggtgaaacgcttaacctagttgatggctcccttgtcttcagcgatcagatacgcgaggctgccagtcgactaacgtacgcagtggtagcctcttctcagggcacattccgacccgacagagagaaggatgagctgtcactcgccctacagactcccgagcatccaggacaaacacgagggaaaggcgtgattccctggaagattggatttaaggaggacatccacacgtacaggagtcggatgaggagcaagagagatactgaggcgaagattgcagatcttgagtacagggtatcgagctacgagctcaacatgcaagaggaggtggcaaggaaggtggatgaacgtatggccgcacatcggtcccaggatccccagccgtacattcatcctgcaatggtcagcccatcaggcaattgtagcagctgcgcctcaacggggcaggtcggatcacagagcatggacgccatgcaaacccatgacgaaaccacctgccccgttgatgagatcacgcaacggacaccatgtgagctgcatattcccttcaagaacttatcaatcaaggtggcatcgggaatggccatcccaacggacccttccgggacttaccactgcaggccgattccagcaggatactcgagggtcgaagttgagctggtggaagccgcgtacgaggacctcgagttggactacccaggaggagacggtgagacgcatctacgagacacaagccacaccatcatactatggcgcaagcgtcaagaggagcttgatgctaatgtggcaggagaggtgaagaggcaactcaagcctcggagtcctaaaaagaagatacctattgacccgagcgtgaagaacttcttcaagggaatgtccacaacaaacaaggaggcattacagatatcggactatgaccgaacacttcagagagcctatcacaagaagtccaaaccagtccctcagtttggagaacaaccaaaccaagaggtcgagccgttggtgaccggcgaagattttggcataatggaattcatttcagacaccggtctaactgtggatcagttggttggaggcgcaccaatcccgaaggcggaagtggcatacaaaatggagattcaaagggcccgacggcggaggttctacgatactgggttcatcgaccctcggaaaatcaacaccgaaatgattgacaagtacaagaaagacacagaggacaatctcatgtcagaggatgccattaggaacgtcttgcatatgtcagaggacgtcgttggcgatgaggccaccactttggttgatgatgtgatcgatgccctcgttggtgacgcggtcgttgccatcgtagaggatgcagtcgatgtcatcgatgaagcgtcttgcagattaatttgtcagagcacgcgaggtgtccatctatgtgtacgagtcagcagcggcaagttgatgaagaccactggtgatgtagaatcggcgaagacgatcacatag

SEQ ID NO: 56800 - DNA, 251 bp, Oryza sativa
  Clone ID: PAT_MRT4530_58675C.1
ggggaaaaaaattgaacagggtcctggatgctggtcgggttgaacaaggaaaaaaagggggtcatttttgcagagacaaaaactaacccatttttaactggagaggggggtcatagcatccattgggcacctacacacaatatccttttttaagccggacccctggacaaacccccaccgggttggaaaaacccataatttaaaattttttaaagaatttggatccgcagaaaaacttggttggttggggc

SEQ ID NO: 56801 - DNA, 1277 bp, Oryza sativa
  unsure (1)..(1277): unsure at all n locations
  Clone ID: PAT_MRT4530_58676C.1
atggtgaagattgtcaagagcatcaagccattcaaagaggactatgagcaactgctcaaggatgctcgggacgtccaccaacgacatggctgcatagttaacgtgcttgccgtccaccccatcacaggcgagcgccatgaggtcaccgtcgatagcactagcgacggcgatgtttctgcaccgaatgaggaccacttcactgcccgtgtcgtgaggaggtacctccgtctcaaggggcggctcggtgaggtgactctccagatgctaagcgaggagtttggtggtgccatgaggctcgccgatgtcaagaagctcatgttccgcgtcagagcagtcaggctcgctgtgctcaggtggtccaaggcagtaaggatggccacctcggcggagctgctgccggagttggctcgtgtaggctctttgttccgcgccccagtagccatggtggcaccgcttgagcaagggatcaagtttgcaagccatctcatcgcgctcggctcgttgatcatgaaccggagggaggagaagtggactttcatgagggaatcagccggcaacaaacttattccgcttgcgggtgagcgcgcggtggccagcggatggggagtggcgctgggacatcgtcaacaggtggggaccggcggggagaacgggtgccgggacgggcggcagccgatggggaggacaactgacgagcagcggccggcggggagacggggcggcatacgtgccgacctgggctgccaaatatttgaagcaatggagaggaggacatggacagaggcgttcttggtggcggtgcagacggggcaagcggcggcggcggcctcgcaggcgtcgcataggcatgggagcagcggcacggatgcctccgtgacatggcaggccttgcacgacgtcgccccggacaccgcgtcggcggcagtggcggcggcggcgccgcctggggtcttgaagcagcacgactgcgcgtccttggcgtcgcccttcctcgtggcggcggcgacggcagtcacggcacagggggactggaggagccttcctattgtggcggccatccatagttcgtcaccaattcccgggactgtgccgtcggttgcgtttccctcatttccttcccccaatttcgtttgttcttcatcggtttccaccaaatcaccgagttgtgtcgaaacacgattcgtccantactcatttttatatagtgtcacaggggtttgagcatgttccgtgggtccacccccaccacacatgtatggcacttccaataagtccat

SEQ ID NO: 56802 - DNA, 369 bp, Oryza sativa
  Clone ID: PAT_MRT4530_58677C.1
cgctggaaatattagagacaaaataacattttctcagcacagacctttgtgcttatgcaataggggaactaccaagggaaagaagagcctgtttctacagctattcactaaaaatttgataaaaaaatatctacattttattcaaaatctgctaaaagtgcggcccataaaacagtcggccaatacttaatagaattcatgaaaaaggtgctgccgattctacactcattacaagaaaaacaagctttagctgaaggagctgaccattagatggctcggtgacctgggagtctaccaggaagctgaactggtacatgatatgacctgtcacgataccctgcgccagctcgttgtacacatactgctgaa

SEQ ID NO: 56803 - DNA, 339 bp, Oryza sativa
  Clone ID: PAT_MRT4530_58678C.1
attggctaatgcaacctaccttcacataattgtggggcctatacatgacgccagccagttgaccctactgcgcacatcactcactaacctgccattcacaggacgaaaatacactgatccacacagatccgcacatccgtaactgaatctctccagagaccaccagatgaccggcacattcaccattcttaccatggccaccctaatttggcgccagaacaactgcatgcgctgcgcaccaacgactcgcacatggcacgtcgactacctgaacaggagcaactcctgcacagagtgggcgaggcctcttcgactcgccaccggactggaatcatgagc

SEQ ID NO: 56804 - DNA, 468 bp, Oryza sativa
  Clone ID: PAT_MRT4530_58679C.1
tttgttttagtcaatgaatctactatttataactcagaaacactcagattggtacaaacaacagtgtaacgtctttggggtggcatacaaaaatggagcaaatacgtttacagggaagaggggcaaaagaaaatctaccgacaaataagggtgaggaattaacagatatcctacagattttgttcaaaaattttttttgccaaactaatgctgattgggtggcaatacgggtgctgaacttcaagaattccaggaacatatgctattctattcatataataaacctgttaaacctgtgttgagagtatggctggatggtgagagtcgctttccttgacgcaagctcattattggctcaccccataatttagagatcatcatggacacgctggtttgaagatgccatgagctgctgtttcaattccttgagtttttgttcattgcaaagcgctggagttgttaatgcag

SEQ ID NO: 56805 - DNA, 711 bp, Oryza sativa
  Clone ID: PAT_MRT4530_5867C.1
atgccaaatggtgccttccttactactgacataaatagtgaatatgtgatttgtctttttcgatttgcgatcgattgttctactggattttctgagcgccaagcgtcaggtggtggcccagatgacttctctgggagtcatccatttggtgacattttcactcacttgagatcttgttggcataagaaactgatgttcgatgaccaggagcaagatgagtttcactggaacctcaccccgaatggggtcttctcagtcaaatctcattatctagctctaacacataccggggttccgaatatcattagacggatttggaaggttatcaccttagttacccggtggctacgtacatgggctatcctccaccaaccgggactgcgggatactattatggtggtatctcgacgtttggagcaggtggcacaggagttttttacccaggagcatggtggcggtctagtctacggattgatagtcactaagatatacggtggtatctcgacagttggaccaggtggcacaggagtttttttacccaggagcatgggtgacggtctagcctacggattgatagccactaagatatatgtttctgttaaacttttgtgcttgggagatgttctagttgtttctttcttcttttttggctatgtgcattttatgcagaggccgggggtgactcagtttgattctatcatcttgatgtaa

SEQ ID NO: 56806 - DNA, 585 bp, Oryza sativa
  Clone ID: PAT_MRT4530_58680C.1
cttcatcttcctcgcaataggcgatcgatttgccggcttgccatggctgcacgcaccaaaggcctcgctctgggacgcgccccatgccgctgctgttcccattgatctaggatcactccggtctttcctttcatgctgaattcagtgatccagtatggtcttgtggcaaaacacatgcaaaataacatactagctagatatgtgctcctctcttacaaatatactctactttatgagtcaggctgtgtttagttcagtgcaaagtttggattttggttgaaattgaagatgatgtgactgaaaagttgtgtgtgtatgacatgttgatgtgatggaaaaggactgaagtttggatccaaactttggatctaaacacagcctcagtcagacagtaagacaaataattctattcggtctctagatatgatatgcagtggataaagtaatctatatttataacctctctaacatgagaggactgtaaaaaagaaagtggggcaacgttgctctggtgagcatcagcaacaaaactggatagtggatcatacctgagagcatcaagctgctcaccgctgattaataaga

SEQ ID NO: 56807 - DNA, 570 bp, Oryza sativa
  Clone ID: PAT_MRT4530_58681C.1
ccgggctgcaggaatcggcacgaggtcctctagccattgggtatgtcttctttttcttatgtcatcctattccctctacccatatgctgatcttggttgtgattttgagttaatttggtacgcctgcactttgatcgtggtgttgcaattgatccagcattttttgagttctcgtgctgctcttgctatttctttggcgggtcgtccgctgaatcttaccggagtttatcccttttggtgacatgttcttgggcttattgctttctgtaaatttgattaatcagtagatctctttatgctgtactttagtggtttcatgcatgggtgggactatggggagtgcaacggtgtatgagcagggttgaggaaaaccgacaagatcctgaaattctctagctctagctcttgtgacacgtaggccgtagctacgtccaagtgcaaagtccatcttccttcccccacaaatttttaattgatacagttcgtatcttctatttttagatctcctttggaatagatagtttttaatggaatagaaacaattactgtgaaaatcttataaaattccta

SEQ ID NO: 56808 - DNA, 273 bp, Oryza sativa
  Clone ID: PAT_MRT4530_58682C.1
atggctgattttgaacgacggcgcttctggcatggagcccagtgccacagtttgcgagttggagccttggaggcatggagccctagagtgccgagcgcatcgggcggagcagccaagcgcaacggcgccgaccggaggggcgacggacctgaagaggtggacaggtcggcggcggaggaatcggcagcgacggcgcgaggtagcgaccgcggtggcggggcggcgaccacgacagcggcgtcgggcagggctccacgctggggcggcgggtga

SEQ ID NO: 56809 - DNA, 321 bp, Oryza sativa
  Clone ID: PAT_MRT4530_58683C.1
atggcttggtgcaactgctctactcagttggatatctacgtcctgcttcttcagctcaaatcctcttccgaatatcttctcttcctgaatcctgaatgttgccatgttcaatttctgcaatgccaccagcagcaatacatgttgtacgacaacaatgcagtgaaacaacaatgcaactttcgttcagttattagaaggagtaagaagtccagaatcatggagatgatcggcatgtgcacagaagcaaatgctagctggatattgtcatataccctatgcatgaaggagatgcgcagtcttcttgagctccgagttggctag

SEQ ID NO: 56810 - DNA, 710 bp, Oryza sativa
  Clone ID: PAT_MRT4530_58684C.1
cttcctcgcggtagcttgcgaagccgctatatatacaactcgctttaaattctgagcctcaattcgccaccatctcctagctagatttctattgatacacgatatctcacgcccatactacgtaacctacatcaacatacatatatatacctgaggatttgggtgttttgtgcgatgatgttcgaggcggacgtgccccaccgcaatgcaaccaatcccttgtctctccgtcgaggatcagtaatgcttcacgacgattgcatcggtgagggactctcaagccccatagctgctcaaattcttgatttctgcgatgacggcctaggtgatgatctcttcgctgcagtggccactacctccgagcaatttgcagcctcttccgaggatggttcatcgtcgtccacagccacacctcccctctgcagcaacagcaatgacatcacagctgttgcagacacagctttctccccattactctccttcgactccaccctctcagccttccttgagcaagagcaaaaccctgaccaggacaccaagctacttccctccattgatgaaacctttactgcaccagcatactatccagctgccaccgaggccaacatagaacaattcagccaaataatggttccagagcatacagatgcaccaatgcccccaatgcaaacaaacaggactgccaatgccttgctgcctctagcttcagg

SEQ ID NO: 56811 - DNA, 1437 bp, Oryza sativa
  Clone ID: PAT_MRT4530_58685C.1
atggtcgaccttgagaccataaacaaagcattaccgggagataacccggattatcatggcattcataggctttttaaattaagcatgatgcttagattcctgatcatccaagctgtgaaggacagagggttcacgaggatcgatgtcgatgaatccgaccaggcgatctggagttcccatcttgctatcatccacacatatgtctcgaggttgatctcggtggtggtgcatcagacagcagggggcgcggatcttagatccggcaatctccaagaagatcttgcagccattcattttcacaggaaaataagaaagaggtctgacctctttggaaactttcctggcgcgaaagaagggcgcgcccacgcgtgcgcacgtcgtcgttggcgccacttttgtgtgtttggcggtaaaccgtggcccttcgcgcttcttccagaaaagagagagagagagaaagatgggaacgagaacaccgaggaccacatattagcagccaagaaagccaactgtgatagagatagacagcagcttgagccggccgctgggggtgcaaggcggaggcaaggctcgccggctcagtcgcgtatgtggcttccgctggggacgccggcccaacaactagcagcacgcagcaaccaagcacagcatccatctggcgcgcaggtttatgttgatgttgacagtgagcatgggactgcagagcgtcaagaaatagggacgacaaagagagccagatggagtcaccagatgaagatgttccttattgagctcctaacagatcatgacgtgccaggttttcgaacacaaaatgcttggagtaaggaagcatggacaaatattgtttgccgcctgaatacaaaattcggtacatcatttacgaccaaccaagtcaagcaaaaggagcaggatttgaagaaagattatcgcagtgttaaagatttgttggatcaaagtggttttgggtgggatagtgacagaatgatggcaagttatgctgatcgtgaggagaatataattgtgcaggtcgttatgctgaagggagaactcgccatgcattcacctacccctgtccatctcacaaaagtcccacctagctcggcacaaacaccttcagaggttcctgaatctcgacctgggaagaaacaaaagatcaaatctgttagtcctgatgatggatttcatgagagatacctaaaacttaaaaaagaagaaatagatcgatttgctgcaattgaggagaagaaattggaggatccttacagcatcaacaagtgtatcacagtgcttgaaggtttacatggtctacaaataggagatatattggtggcagctgatatcttcaaaggtaaggataatagggaagttttcttgtccttttcaagtgatgcattacgcctggcttggattagaaaggaaatcgcagcattagagtga

SEQ ID NO: 56812 - DNA, 151 bp, Oryza sativa
  Clone ID: PAT_MRT4530_58686C.1
aggattcgcttggccaacttagagcgggctatcccatttattggcaacgcctacatgctaataacaagctgcataactagaccacagcaagcacactctgctttgtgcccacttcccaaaccaaaatccggagccatgccagacatcacct

SEQ ID NO: 56813 - DNA, 492 bp, Oryza sativa
  Clone ID: PAT_MRT4530_58687C.1
gggaaaaaaaaaggaacgggtatacccaaataaaatccgggccgaaaaaaaaaaaacatggccaggtacaaaaacccaaacggccagccgggggacaaaccccaatgaaaactaagggccccagcccgcggtcaactttggacaatatctggtcaacaagggaggtcatgcggaccccccgcaaaatttccactcggggaaaggggcagccgaaaccctttccccctccaaaaaatatccaaagaaacccccctaccgggcccttcgaattcccccgaacccctacggggagctaggggcgttcgggttcaagggaaaaaatcgtacttgaccggggggccggggggaaccaaccaagggtttgcgggccggaaggtggccacggggaacctgggcgcggccgccctggtggacacctttttggaccccgggccccggaaccgcccccccgggggggggccgggccccttgggggggtacccggggggaaaa

SEQ ID NO: 56814 - DNA, 1085 bp, Oryza sativa
  Clone ID: PAT_MRT4530_58688C.1
atgagcagcggggcgccgcccaacatcggcggcggcgggccgccgccgccggcggtgctcgcgctcccgcacgggatggtggtcgtcggagacgaggccgtgcagcgagccgtcgtgctcaggcttggagtgaacttccgagcgacggtttgctcggacatcaacgccgccgtggagatgctgcttcagagaatgaaagaattggatttcgtggtgatttcagaagagttgatcattggaagctcaaggccagagatcatgaaattattacgcgaggagacagggctgaggctactcgtgctgaggaatgagggaggcaacgagtacagtttcgtgcccatcgtcaggcgatcagacacgcaacggctcgacggcggcggcgatagcctcgtcggtaagaaggacgaccaacgggaggaaacatcgacggcgcgccgagaagttgggatgcggtcgctcgcagtcgaagttggggcgcttcaccaatcaccagcccctctcacagtagcagatcccgcctccgccctcctgcacatgggcgcgctgctgggaggggatctgcgccctgagcccctgacctgctgccggagaaggaggaggaggaggactcgtcggagctctccctcgccggtgcttcttccacctcgatccacgtctccggtggctgctccggatgctgcgctgcacgccccctccgggcccgagaggcgccggcggcagcggatccaccgctcccgcgcctggcagcggtggagacggatgccggcacggcaagcggcgaagggggaggaagccggcgcggtgagcggcgcccggcggcggcggagacggaggccggcgcccagcagcggcggagacagaggccggcggtcggcatgatgggggatatatggaaatctgcgtcactgaagaggaaaagcaagcgctatggtgttaatttcttcaagggattcaaggcaacagcggcgggtctggcgcaggctcgtcaggcggctcgtggtgaagctgcaaaaggaaacaacccaagtctggaggacagatggattggcatgggagaggatggcggcttggccatggactcgtag

SEQ ID NO: 56815 - DNA, 252 bp, Oryza sativa
  unsure (1)..(252): unsure at all n locations
  Clone ID: PAT_MRT4530_58689C.1
aactnactacgttggcttatggcccccaccgtgaatggcctcctccggccacctcnnttggctccattccaaagggctcaaagttccaccgccggggctcccccgtcagccgcnncttccaaccaaantcggggctttcggcaaacttcaacaaatggcggaaanggaatcaaattncattgcnagggtnttggaccaaattgaaggggcttcaanaaattccaaaaaccntttcccttaccngccaccatt

SEQ ID NO: 56816 - DNA, 1089 bp, Oryza sativa
  Clone ID: PAT_MRT4530_5868C.1
atggcaaggtgggcgggcccgcccgccgccctcgctgacgggtggggcccacctgtcatcgccttcctcccgccgctcccgccgctcgcccgtgccctagcgccgccgccgccgcggattccgccgcatcccgccgtccccgcgcgccataatgaggggggaatcattccccgcgattccctctctctttccccccgtttttccctctctctctccctcggattcgtccggaatcgctccagcaaacctcgccggcgccatcaatggcggccgagatctccgcgcccgtttcctccctctccggccgcgctctccccctcccgacgctatataatcattcctcgtgcttcgctcttccgtttccgccgctcgccgcctctcctccccgtcggaatcgagcccgcaccgtcgcaccttctctccgccgtcgccgccgagctccggttcgccgccgtcgtcgctccggacctcctccccactcggcgtcacctccatcggcttcgccgcgtccccgtcgacctcggccacccctccgcttcgctcgccgaccgccggagcaccgtcgccctcgccgtcccgaaccgcgccgccgccttcctccgcttcggccgccgttcccgtcgtcgccgtcgacccggggtgagccgaagaccgccctttcgcttccctctcctctccgctctctcgggcgccgctccgccgcgccggtggtcgccggcggtgaccatcggggcgcggtcgtgccgcctcccgtcggccgtgccggcgaggccgccttcgggcgcgccctcgcggctgccaagtgggcccggccgtcagccgcccgcgcccgcggacgctgcagcttcggaagatccgctcttcgtggaagttgaagccggtgtttgggaaagcgagcaaggcaagtcacatcatcacctctcttcctctttcaaaacccctaaaacctgttttcggtggggtttgggtgcatgccagttgtgggaagtagcaccccggccactataaagattaagctcggcctctggtgcaaagcactaccgtacttccacatgtctaatgggtaaggcttagtttgtggctcagtct

SEQ ID NO: 56817 - DNA, 588 bp, Oryza sativa
  Clone ID: PAT_MRT4530_58690C.1
atggcgtcgtgcgcttcacaccaccaccccccagggtgggcttccacgtggggcccacatgtcatcgagggcgagatttactttgggaggggggtggggccccgtggtgcggtggtgggcgagcggcgggtggaattggaggcggagaggggaggagcggtcggtcccctggacggcgatattttgccgtcggcgtgggcgtgggccgtgcggctgctgcgcatctggggctgtgtgggttttgggtgcgcccgtgggccagcgagctacgtcaaccacatgcgcggtggggcgttatgtacgagcaaaactatggggctggaaatgacaggaaatggtgttgaggcacgagccaacgacgccaggggtaaatccatttttcacgagaccgatctgtccacaagcgagagagcccacagggcacaggccccctggtgctcaacgaaccacccgtactacggcgtccagcagatgttcgagtcgccaccggagaaattcacggcgtgcgaacggggagctgcttttgctccacgcccacctagcgtcaccgtcttccggcgacttggagactcccatcgtttggcttag

SEQ ID NO: 56818 - DNA, 515 bp, Oryza sativa
  Clone ID: PAT_MRT4530_58691C.1
gcgattaacaatcaagaatttctgcaaacaaaaaaaaatggcttgcaacaaggtagtgatctcggcgttgctcggcggcgtcgtatccgtgctgggagcaacgactacaatggcggaccaccaccaagaacaggtggtctacactaccggccagctatgtcagccaggaatcggatacccgacgtacccgttgccgcgatgccgtgcgtttgtgaagcgccagtgcttcaccccctgaacggtggacgaacacgtccggcagagggtgctgctggcagatcgccgccatcgacagcagctggagcatgttcgatgcgctcaaccacatgctgaggatcatctacagggagagcggatccagccactgctgagcactccatgttcgatgtgttcttcggctgcctgagaggagacatcgagcgcgcggcggccagtcttcctacattctgcaacgtggacatcctcaatggctgatgcagtgtctgactctgactaccgataactggctactaact

SEQ ID NO: 56819 - DNA, 243 bp, Oryza sativa
  Clone ID: PAT_MRT4530_58692C.1
ggtgtgaaatttacgaacccatcgtaatttgcagtagtctaacacttaaaccggccggagagggagggtagagacctttacatatgaggtgagagcagcgggccttgagatggaacacatccaaactgttacatgaatacatatagcatatcatatatcgatacatgagcagcataggccgaaacacagctgcctacttagattataggcagctacacacgagggcgatgcttgatcttagct

SEQ ID NO: 56820 - DNA, 403 bp, Oryza sativa
  Clone ID: PAT_MRT4530_58693C.1
ttttgggttttttttttttttttgtttttttttttttttttttttttttttttttttttttttttttttttttgagaaagaaaaaatcatcgatggggccccgggcccagggaaacaaaatggcccagggggggaaaaaggataaacacaacttaggggcttttaaccagaacacaacacaaccctgacccgatgatttgacagacgggggggatagggttaaagaaggccaatggtggaccacaaaacacgcttaaagaccaccccggggggccaggacaaggggcaggggggacccctttgggatggtataggcgggaagggggggggcatcctcgagctggttgccgggaaaaaaaaaggccttttggtctggagggaagccccccttatccgggaactt

SEQ ID NO: 56821 - DNA, 144 bp, Oryza sativa
  Clone ID: PAT_MRT4530_58694C.1
gctatcattagagaaccagacctagcgggggattcaaagcaccaaccgggcgcggtctccccaagtgttcaagtactaacacataaagtacgcaggcacgtgactaattccgtgtatccacgattcacacaatcaaacacttgt

SEQ ID NO: 56822 - DNA, 690 bp, Oryza sativa
  Clone ID: PAT_MRT4530_58695C.1
cattaattgagttgatgatatttacacccatagatgtcatagcaaacatagaattgtatcgtctgatgttttcaaagaagtggttggacaaaacacgatctcgtccagttaaacgagagagcaaaggttctggtggtggcctatatggaggcaaataaatgctccctcctctacagcatttgttgtaaatttgcaaagctgttcgtccacacccacgtacgcgttcctcataccagaatcgagcaccacaatgttggcaagtatgggtagggcctcctaaattgagaggtgtgaaaatagtaccatagaaaaaagatcattgggtggagtattattgtcgagaagctttacgatcatcgagatagaacattagtgttgagcagcaaaaattacttcggaacatgaactgtggaggttgagcctgaatatcgagcagcatcatgatcagggcgatgtcgactggcaagaaggggtacaaaatttccatcagctctggaccgccctacacggcttcgttgacatgtattcaccctatgcaaggaggtgtcattttgggcaatgtgagatgaaggagaagcgccaatagtagtactcatcccattattcctggctatccgcacatcacaatgcctggcattaacttgtggggaaatacatcggtgaacacatcgatatgaagatgagaaatca

SEQ ID NO: 56823 - DNA, 526 bp, Oryza sativa
  unsure (1)..(526): unsure at all n locations
  Clone ID: PAT_MRT4530_58696C.1
ttattttgcaatggtatgagtttgttggccgtgtttggagttttcgatggttacctgcggatttgaagctaattaactggaatatgtgtgtatttcaaaggtacaaagcattgtgcatagtctctatggatcaccaataatcactctaaagctacatttgtcagcaacgctactattgacatcatccagattttttgctgctcctaattttgatgttccaaatctctataagtgaaagattaatctcaaaacgccacatgattgatccacataatgaagaaatcagacaattcagtaaaagaaaaaataaagagatgaaaaagatatccatcagacaaaaatagtaaagcaaaggggacacgaggagggtttgagaagggggaaaaagaaaaaggaaaaaaaatgaccgacttcggcgatgccacatcgcttctcctctatgctctccgactccaccgctgcttaagtgctttcaccccatgcctcccccgccactggggacctaaattcataattggngatctag

SEQ ID NO: 56824 - DNA, 4512 bp, Oryza sativa
  unsure (1)..(4512): unsure at all n locations
  Clone ID: PAT_MRT4530_58697C.1
atgaagaaatatacctgctggaccaagcatggagagcaagaggcgcctgatgtcgcagctgaagaagtgttggatcagggtgtagagaacaccgccgcagctcgagaaggcatgttcgtaccttctcctttaggtggagagaccatagatttggacactcaatgtctatctacaatgttgcatgacattgaagacgcagaggacaacgacagagattatgagaagtttagtaagttggtggaagattgccagatgccgttgtatgatggatgcaagtcgaagcacagcaagttgtcatgcgtgttggaactgatgaagcttaaggctattaatggctggtcggacaagagttttacagaactccttgagctgttaaaggatatgttgccagaggggaacaatttacctcagacgacatatgaagcgaagcaagtattatgtccgttgggcctggaggtcagaagaattcatgcatgtccgaacgactgcattttgtattacaaggaatacgctgacttggatgtctaccctatctgtgggggatcaagatacaaacgagcaaagagtgaaggtgaaggaagtactacaaaggatggtctcaacgcccgacgagatctggaagatatgggtgttcggtcggagctacatcccataaccacggaatccggcaggcggttgtgttccttcttccatgcaatcggccagaagatcattgatcccgagggactagataaactacaggcagaacttgtgagaaccctatgtcatcttgagatgtactttcctccaactttctttgacataatggaacatcttccggtgcaccttgtgaggcaaacaaagtgctgtggtccagcattcatgacgcagatgtatccttgcgaaaggtacctggggatccttaagggttatgtacggaaccgttcacaccccgaggggagtatcatcgagagttacaccaccgaagaggccatcgaattttgtgtggactacatgtcagaaacatcttcaattggattaccacgatctcatcacgaaggaggcttgacgcatatgactgaggtggtgccgtacgttgacgaacaccttgcagttatccgacaagagaacccaggccgatcagagagttgggtcaggaataagcacatgtcttctttcaacgagtggctgaagaaccgaattgccaggttgcagaacttgcctagtgaaacacttcagtggttgtcacagggtcctgaatggagtgccaccacctggcaaggatatgacataaatggatacacctttcacacggtcaagcaagacagcaaatgcacagtgcagaacagtgggttacgcatcgaggctgctagtgacggtggtcgtcgtgatcaatactatggtagagttgagcaaatattggagctagattacttgaagttcaaagtcccgttgtttcgttgtcgatgggtcgatcttcgcaatataaaagttgacaatgaaggtttcaccactgtcaacttggctaacaacgcgtacaaggatgaaccgttcgttctcgccaaacaagttgttcaagtgttctacatagttgacccgtgtaacaagaaagtacatgttgttcgtgaagggaaaaggagaattgttggattggacaatattgcagacgaggatgattacaaccagcacgtccacggcataggtcaagaaatacctctagaagaggaggaggaagaagatgaagttcaatatgcacggccgtcacaggtgacctcacctgtgacggcccanagtgttgggcccgtcacaggtggtcttacctgtgacggctccacggttggcgcccgtcacagatcgatccagatccggcgcccactctcactcactcactctctcgaccgccgcctcgcctctctcgacctctctgccgccctctacgccctcctctccaccgccgcctcgacctctccaccgccgtcctcgccgccgccaaatccgccgccctctccgccaccctctacgccctcctctccactgcctcgacctcgacctctccgccaccatctctgccgccgccctctacgccgccctccccaccgccgcctcgacctctctgccgccctctccaccgccgccgcctctcgaccgccgccgtccatctccatcgacctctccgccgccatctccgccgccctctctaccgccatctccgccctctacgccgccctccccaccgccgcctcgacctctccaccgctgccgcctcactcactctctcgacggccgccgggacctcctctcagtcgccacgccaggaccgtcgtcaccgccaccgggatctcctctccgccgcctcctcctctcgaccgggactcgtcgtcgccgtgtgccgcctcctctgctcgtcgtctcctctccaggcccacggcgcccaggactgtcattggaagatggtctaactgctgcgggatagcggcacgtgagaacttcgggatcctccataaagatatcgggaagatcacagaagccgagaaagagcgagcttggacggcaatggagaaatggttcacatttccagccgaagcaaaggataggctcaagcggaaggcattccaaaagatgggcaaagcttggaagaattggaagtcgaagctcttcaccgagtttgtcaacccgcccggcaatcatacgccgttcgatgaataccctcaaataaccgaagcggtttgggaggaattctgctctctcaagaccacccaagagtttagggaatcaagcgaggcacatcgcctactgcaacagcggaatgagcacccgcatcggctaggcaccgcagggtacatcggcaaggaggcaatatgggcccaagaagatgcagccgctgcagcagcgaatgtccctaccccgttttcagacatccctgaacaaagagctcgcaactgggcgcgggcaaggggtaaggtcaacccggacggctctgtcacatttgagaacaaaagtgatgccgtcgtctatcaggaactgttgggcttggttactgaacaagcttcacaaagcgaggttgagtccgcgccgaagaggcgcaaagatgacatcctcacaaaggcgctcggaaccaaagaacatcctggccgaacttggggaattggtagcgatgtgccctggaagcatggactccctcagtacagatcccaatacaggaaacggaaagtctccaaggaagagagggacgctcgtttgaaggacgaacttaaggttgaggtcattcaagaactagaagctagcatgaatgcaagggtggaagaaagggttaacaaggtcctcgccgacatgaatataccccgagtcacaacacctgctgtgcaaccaactcctcgtgtacaacacgacgcgagtccgtcacagcataggagtagttgtgcatccacagaggtgccggcccctggtctcccgatcgcaccactagctgcagtggaccacatcgagggcgcagcacagtgtgtcctactagcgagagtccacccaactttcgctcctgaagtcgctgagggcatggctttcaagccctcggttacagacaaggtccacggcgtagacctgctagctgggtatgccaaggtgtccatcgatacagtaaaggacacctggtcaggctatccgctgcccgtgcccccaaatgatgaaatcatgactttgggcgatgcacgcaagacgttcatacaatggcccaaagaagacatagttgtgaagatgactcctcgtccaagtcgaccgacggagcttacacctcccaagtctaagctatcaattgaggctccccgtggaccggcattgtcagtacctcattctcccggtggagctgatatggacttggcagatatagctcaaagcttggctccaataaagaccacaagaaaggctgatagctccccaccacttgtcaagggccagaagcgtgaacgcggcaaggggaaggtcggggagttggcgccggagccaaaaaggggcaaggctgcgacgtcgatgccggtgagcaaatcggggaaggtcgtgagggcgccagcccaatttgagctaggcatgccattggtggaggacaatgtgttagctgtgatgggtattgcttgccgagagctacataagcaatacatggagctaagcaatgccaagcggaaaatgagggagtcatccatagttggacatcacgaccaccagccgttcctatcgtcgcctgcctatataactataggctttgatgacctcttcgaccttttcaggatccggaagttggacactggtcttctaaaatgctactcctttgaaatcaccaaggccttaaatatggcttggggcccatatgtggaaaagggtggtaggcacaaggagggcaagaatgaactttatcatgacaccaagtttgcatgcgcacaacagatcggagaccaatgtggttttcacgtgtgccacaacatgtcaacacttctaagagaggtgaaagatttcgaccctgaggttgttgctaatggcgaataa

SEQ ID NO: 56825 - DNA, 1149 bp, Oryza sativa
  Clone ID: PAT_MRT4530_58698C.1
ttattgcttttccaacactgttgagcaaccacgtccttcgacgtgacgcagttgtccattcgacaacagctggcgccgtccgtggggaacccagactaaaaggctgaaatgggagccttttgccacacccacacccttcgccatgttaccaataaggtacgacgtcaagggctgtgggcgaacaggttttgccacacctaggcccttcgccgcaataccaataaggtaaggcgtcaagggctgggggcgaataggttccgccatacccagacccttcgccacagtaccagtaaggtatggcgtcaagggctgctgctcccttccactactgttatcttcttgaggctggttctgctgaactggcactgattgagtagcttgctcaatgttaacttcattgcttgcattagtctctgaattgatctcacaactgatgttcaactgttgcgactgtccttgacggttgtccatcctgttcttcttgtcttcaagtcgaattgctttgtcaaccaactgctgaaaatcagaatagtcatgagagatcaacttaactgacagttcatcctttagaccttccaagaacttctcctgcctttccttgtcagtacgcacatcttctagagcataacgtgctagacggttgaactcatgaagatactctgtcacggtatgatccttttgcttcaatgtcctgaactcacgtttcttcaaagtaaccactcctgcaggtatgtgtgtcttcctgaatccttcgatgaactcttcccaagtgattggttgtccttttgctctgttcatccgaaagtgatcccaccattctgaagctggtccttgcaactgatgtgaagtgaaaacaactttctcctggtttgtgcactggagcaataccaacttcttctcaataatgtgtagccaatcaccagcttccactgggttggtagtgctagaaaaggtaggcggcctcacacgaagaaaattagctaacttgttttgaggcggcggaggattgacattattgttcccttgctggttctgcacttgttgcactaacatgttgatcaattgggtctgttgagccagcacttgagcaagggttgggttctcttcattgttattgttttcgcttctactggcgcgagtgttcaccat

SEQ ID NO: 56826 - DNA, 1401 bp, Oryza sativa
  Clone ID: PAT_MRT4530_58699C.1
atggagatggacgaagtcgggggtcgatggacatctctagggcaaatgaaggctacacgagctgcggcccggaagcatggactctcgcagtacagctcccaatacaggaaacggaaagtctccaagaaagagagggacgctcgtttgaaggccgaacttaaggttgaggtcattcaagaactagaagctagcatgaacgctagggtggaagaaagggttaacaaggtcctcgccgacatgaatataccccgagacacaacacctgctgtgcatccaactccttgtgcacaacacgacgcgagtccgtcacagcataggagtagttgtgcatccacagaggtgccggcccctggtctcccggtcgcaccactagctgcagtggaccacatagagggcgtagcacagtgtgtcctactggcgagggtccacccaactttcgctcccgaagtcgctgagggcatggctttcaagccctcggttacagacaaggtccatggcgcagacctgctagctgggtatgccaagacgttcatacaatggcccaaagaagacatagttgtgaagatgactcctcgtccaagtcgaccgacggagcttacacctcccaagtctaagctatcaattgaggctccccgtggaccggcattgtcagtacctcattctcttggtggagctgatatggacttggcagatatagctcaaagcttggctccaataaagaccacaagaaaggccgatagctccccaccacttgtcaaaggccagaagcgtgaacgcggcaaggggaagttggtgccggagccaaaaaggggcaaggctacgatgtcgatgccggtgagcaaagcggggaaggtcgggagggcgccagcccaatttgagctaggcatgccattggtggaggacaatgtattagccgtgatgggtattgcttgccgagagctacataagcaattcatggagctaagcaatgctaagcggaaaatgagggagtcatccatagttggacatcacgaccaccagccgttcctatcatcgcctgcctatataactataggctttgatgacctcttcgaccttttcaggatccggaagttggacactggtcttctaaaatgctactccttgttgtattggatcgagagtcgtcgccttagtaatcaggttgggttccttgatccatccatggtgaacgaggttaatttacgacagagcttcactgaggtggttgactatgtcaaccggtgtttatgggcccatcaagacaaggagtacatcatgtgcgcacataaccaagaaaaggttgtggaggtcgaggacattatggctttaatccatttgagggcatggctagcaaatcctgaggctagccaatatttagcatttatttttttctggaattaa

SEQ ID NO: 56827 - DNA, 3943 bp, Oryza sativa
  Clone ID: PAT_MRT4530_5869C.1
acgagtggacctccgctcgctttctccctcgccaactcgcctaccctccccacccccgcgtcggcggcggcggcagcggcagcggcagcgacggagcctcgccggcggcaagcgtactcacccgacaaaacaatgaggaggtatagtccaccttatcgcagtccaccaaggaggggatatggtggcagaggaagaagtccccctaggaggggatatggaggacggaaggaacagggttctggcagtctcctggtccgcaacatccctttaagctgcagagcggaggatcttagagttccttttgaaaggtttggacctgttcgagatgtttacctgccaaaggattattataccggggaaccgcgagggtttgcattcgtggagtttcgttgacccttatgatgcttctgaggcccaatatcatatgaatcgtcaggtggtttttggccgggagataactgttgttcttgctgctgagtcacggaaaaggccagaagagatgcgcagtagagccagagtcagagggtactctgaccatgaaggccgtcgttcatcccattacgggaggtctcgttcacgttcgcgttcccgctctccccgttatcgtggtcgtccacggtcaaggtcatactctcctgctccaagacgacgagatgactattccgcatccccacagagaaaagacacacatcgtgcaaaatctccgtaggcgtcagccaaaagaacatgaagtagacaagaagcggagatcctattctcctgccaataaagatggggaccggcgtgatgctgataatggttatgaaaagaggtcgccgccagctgacagcgatggatcccctccgcaccggaggtcccccaggcaatcctcaggatcgcctccaggatcccgctccaggtctgccgacgggtctcctgcccgcagtgactaacagaagaacactgcgcacgctgtgctacatcctctctagcttcttgttggtcagaccggaccagtttaagtaaaaacccttttgggcttgttgtaaaacttgtaatgctagcatctgtcgtggtttggtagcggaggacttggatcgtcaccattgtgtgtgctcgcttctcagtggatggagacattttgagtcgtgtgtgacgaaaccttagacttgctgcatggctttgtattgtgattaacttgaaagaatgtgacattggtgttgtgtactaccactagtgagcccttgaactgagaaaaagcaaacatacaaaaaagaaaaaaaataaaaaaataaaaagagggtgcctagcccatggcatcattacttggctttttgggcacttggttgtgttattggagctactcaggaagtagatatgctcacctacaggcggacgggagtgattcgtgtgaaggaggatcatgaaaactcgtcaaaggatggctctcatgatcaggcacacaagagggctaagaattcagcttctccaacaatatcaaaggaacaaaaatcagatgttacagccatgcaactagttctaacaccgtttggaaattgtcggcctccaccaccacctcgtctggtgatcgcaaatgggatagcttacaccattgttcacaccaaatcaggtgcaacagtggtgggtgaggtaataacagcagcagaaaaggtggatgaaatttatttgtctcaaccagtggacagtcctacacccgatcaaccttgtttgctgccaccggagttggaacgttggtccttgctgtcctctcagccggctgcagctgccaagatcaccggcgaggcctctttggcagctaccactgctgcactctccctagctgtacctcagatggctacacctacctcaaccgatgtcaatcgcagcaaggaccaactgagcaagacatcttctacacctcgttgtcgtagtgtgagatccaatgttgagaacatggatggcatcgctgcgggggatgatgactcactgctcaaggcaatgaagaggaaagcattgcgcaatttggatgacagctttgttggacgggagaaaaatccaaatcttcttcaaaaagaaaagagcgaaaggctcgttcccaaaatccaaaagcctctaaatctgtttcctcatgaaagaggggtatcagaccacacgcctttgctccttgacacaggggaagcggccttcacgggaaacattaaacagtttaaattggaactgggttggtttctacgtgatgacttctatgatcgtgttctcgagatatggaacaaactagtcaagggtcgtaatgcggtccaaagatggaataacaagatgagcgctttacgtcgccatcttagaggttgggctgctcataccagtggcgtctttaagcagaaaaaggcaaatttgcaaaacacaattgattctctagacatcgcagtagaggtacgactcctttcggatcaagaaagaattcttcttgatcaatcgagggattctttggcaagtctactccgtgaggaggagattaaatggaagaagaggatctttttcctagaccaggatgaagggaaaattgagggggttgaggccttgaaaacttatattacgagtttttataggaaactttttggaccaccagaggagaactcgttttcgcttgatgagtccataattggtgatatggctcaagtttcacaagctgaaaatgattttcttactgctcctttttcggaagaagaagtgaaagaagccatctttgcgatggagcataataaagctcctggactagatggtttcccagctgaattttaccaaaaattttgggatgttattaagcatgacctgatgaacctttttaatgaattccatactggtagcctcccaattttcggactaaattttggggtacttactctagttccaaaagttaaagaagcaaatcaaatccaacaatacagacccatatgcttgttaaatgtcagctataaaatattcactaaggtggctacaaaccgaattagctcggttgctaaccatttagtgaacccgacccaaacagttttcatgcgtggacgaaacattttagatggagttgtcatcatacatgaaacagttcatgaactacataggaagaagttgagtggggtgatattcaaaattgacttcgaaaagacgtatgacaaggttaaatggccttttctgctacaaactctgcgtatgaaagataaaaagggccttcggcaaggagaccctctctccccaatcctattcaactttatcgctgatatgctagccacattgataaacagagccaaaacacaagggcaaattgatggagtcataccacatttgattgatgggggactctccattctacaatatgctgatgacacagtgctgtttgtgaatcatgaccttgaaaaagctcagaacatgaagtcagtgcttctagctttcgagcagttgtcgggtcttaagatcaatttttataaaagtgaactgaattgttttgggacagttcgagcacccttgtttaatttagtaggttactctgttgtatactagtttggatagctttacggtttttaagcctattgtttgcaattctttccagtgaagtgtatcaaatttgtaattcgattaaaagtgtatcacagcggaatgcaaccccaataatatgagagctcgtttttgtcaattacctaaaaaaattaactcggggatggacataagaagaaataccggcttgctaagtgggacattatttgtcgtcccaaagaacaatggggggctaggaattcatgacctcgagataaagaataaagtgttgattagttatcaccttagttacccggtggctacgtacctgggctatcctccaccaaccgggattgcgggatactattatggtggtatctcgacgtttggaccaggtggcacaggagttttttacccaggagcatgggtggcgatctag

SEQ ID NO: 56828 - DNA, 294 bp, Oryza sativa
  Clone ID: PAT_MRT4530_586C.1
actaagcttcggctcatcaggcaggaggcgacgggcagggatttgggggaggcgaggtggtggagcagcggcaacactcgcgcggggccaacttggcctactgcccctctactgcgtggcaggagtggagcggcagcggccggcgggagagggcagccgccatggctccttcaattaagcagcatcaaaccactgcccaatccccacttcaaaccatgtagtgctcgccgccgcctccctgcgcccggcccgtggtcgagagtgtcagtcccagccaggcggcgccatccctaa

SEQ ID NO: 56829 - DNA, 480 bp, Oryza sativa
  unsure (1)..(480): unsure at all n locations
  Clone ID: PAT_MRT4530_58700C.1
ccggacgacccagcgcgtccgcccacgcgtgcgcaaacacatgaaaaaaaaaagagaggccacaaatatgagctcacctgctgcctatagcttactgcgtgataacaacgacgatgaggaggagcgcacttacactgctggacttcacggctacaccgtgccgctactggtgcccaatggcgctcgcatacaagaagctccactaccactactcctagcaggagctcctcggcaccaagagcaacctcctcctctgctccaaccgcatacacgccaaggtcctccgtcctcctgcacggctacggagacagccgcgctccctgcgacgtcctcgtcatcctngagtacctagacgactccttaccggacgccacccctagcctcctcccctccgcctccgacgacccgtacgcgcgcgcctcggccaggttctgggccgactactttgacaagacagtgtacccggtggcgacgcgtctg

SEQ ID NO: 56830 - DNA, 7350 bp, Oryza sativa
  Clone ID: PAT_MRT4530_58701C.1
ttattcgccattagcaacaacctcagggtcgaaatctttcacctctcttagaaatgttgacatgttgtggcacacgtggaaaccacattggtctctgatctgttgtgcgcatgcgaacttggtgtcatggtaaagttcgtccttgccctccttgtgcctaccacccttttccacatatgggtcccaagccatatttaaggccttggtgatttcagtaaaatcataatctttggacttattggagttaaggtaggtaacccggttgacatagtcaaccacctcagtgaagctctgtcgtaaattaacctcgttcaccatggatggatcaaggaacccaacgaccttccccgctttgctcactggcatcgacgtcgcagccttgcccctttttggctccggcgccaactccccgaccttccccttgccgcgttcacgcttctggcccttgacaagtggtggggagctatcggcctttcttgtggtctttattggagccaagctttgagctatatctgccaagtccatatcagctccaccaggagaatgaggtactgacaatgccggtccacggggagcctcaattgatagcttagacttgggaggtgtaagctccatcggtcgacttggacgaggagtcatcttcacaactatgtcttctttgggccattgtagggggtcccagcgccgcaccctcgctccccccgtctcacttcgagcctccaacgctcccagcgccttggcatacccagctagcaggtctgcaccgtggaccttgtctgtaaccgagggcttgaaagccatgccctcagcgacttcgggagcgaaagttgggtggaccctcgccagtaggacacactgtgctacgctctctatgtggtccactgcagctagtggtgcgaccgggagaccaggggccggcacctctgtgaatgcacaactactcctatgctgtgacggactcgcgtcgtgttgtgcacgaggagttggatgcacagcaggtgttgtgcctcggggtatattcatgtcggcgaggaccttgttaaccctttcttccaccctagcgttcatgctagcttctagttcttcaatgacctcaaccttaagttcggccttcaaacgagcgtccctctcttccttggagactttctgtttcctgtattgggagctgtactgcgggagtctatgcttccaacgcacatcgctgccaattcccctagtccggccaggatgttctttggttccgagcacctttgcgaggatgtcatcttcgcgcctcttcagcgcggactcaacctcgctttgtgaagcttgttcaacaaccaagcccaacagttcctgatagacgacggcatcacttttgttctcaaatgtgacagagccgtccgggttgaccttaccccttgcccgcgcccagttgcgagctctttgttcagagatgtctgaaaacggggcagggacattcgctactgcagcggctgcatcttcttgggaccatattgcctccttgccgatgtaccctgcggtgcctagccaatgtgggtgctcattccgctgttgcagtaggcgatgtgcctcgcttgattccctaaactcttgggtgttcttgagagagcagaattcctcccacactgcttcggttatttgagggtattcatcgaacggcgtatgattgccgggctggttgacaaactcggtgaagagcttcgacttccaattcttccaagctttgcccatcttctggaatgccttccgcttgagcctatcctttgcttcagccggaaatgtgaaccatttttccattgccgtccaagctcgctctttctcggcttctgtgaccttgctgatatctttatggaggatcccgaagttctcacgtgccgccagcttgcacttgtcccgcccgacatcgatgtatgttgttccttcggcaactgtctccgtggctgggtttgcttcttcctggatcctcgcaggtgttggggagggcgggtttgcgccgggcgttgtcatggtctggagaggagacgacgagcagaggaggcggcgcacggcgacgacgagtcccggccggcgcactgtggaggtcccagtcgagaggaggaggtggcggagaggagatcccggtggcggcgatgatggtcctggcgtggcgactaagaggaggtcccggcggcggtcgagagagtgagtgaggcggcagcagtgcagagggcggtgtagagggtggagagggcggcggagatggcggcggagaggtcgaggcggcggtggagaggagggcggcggagaggtcgaggcgacggtggagatggcggtggagatggactgcggcggtggtggtgcaggccggcgtcgggaaggtcgacggagagggtgagcggcagagaggtcggcggatttggcggcggcgagggcggcggtggagaggtcgaggcggcggtggagaggagggcgtagagggtagcggagaggtcgataggggcgaggcggcggtcgagagatgagagtggagtgagagtgggtgccggatctgtgacgggcgccaaccgtgaggtcacctgtgacggcccggtttgcaccggtattctccttggtgccctctcattgaaatcaagggtagcagccatgtactcaatgatggcatcttcttcttcgcaggtgccaccagatgactgtccagtaccaccagtgcgtataaattccaagcgcctagcggcgcccttgagtcgaacaaagcatttgcaggtgaatgggtcacggaatagcgcacaagcagcataccacacacttcctccaatttcatggccatcattttccaccaactccatgcacgcatcaaggcccatagacttctctgcttccatctgagcaacacgactctggtagctctgctctcggatgtccgcaatcctctccaaagccagtccagcggagtcgcttcgtgacttcttggaagaactccctgaggcagtagtgtttgctgctggcctctttcccttgccccggtctgctgccgttgggggtggagttggaggtggtggtctataagcagcagcgagctgcgccatgtcgatggtctgccactgaactgctccttgcggtgcctgtggggctgcccctgcgacggcggagtggtttccgacaactgtgtgcccactgaataccgcgtggtgaaggtcaatgtgcttcagaggatcattccgcttcttacactgcccccaaatgtactccaattgagccttgttcaccttcttcttgcacttggtgtacatcttgtgtattaggttctgccatgcctgcggcttgggggagttggaggtgatggtgaacgctgccatctcctccaagcagctctcaagaaacacacgaacctccatatcggtccaccggctacggccatcgcccatcttagatgactcttcctcgcggacgacgtcccaatcaatcgaacggccgacggtggcagggctcactcttcgaacaaagtcgatgacggctctaggagacttggcgcaaactttgcagagggcatgcgcgatatgaagcacgtcgtcgggagcagccttggcgctgccagcgtcggaggtgacagagtcggaggagtcctcgccggactccagatcggcgccgcggacagagatctccccacgcacacgctcggcctgaaatagagactcctcaactccgccagcttggatgccttgatgagactcttcaggccagcactgtctgtgacgggcgccaaccgtggagccgtcacaggtaataccacctgtgacgggcccaaaactctgggccgtcacaggtgaggtcacctgtgacggccgtgcatattgaacttcatcttcttcttcctcctcttctagaggtatttcttgacctatgccgtggacgtgctggttgtaatcatcctcgtctgcaatgttgtccaatccaacaattctccttttcccttcacgaacaacatgtagtttcttgttacacgggtcaactatgtagaacacttgaacaacttgtttggcgagaacgaactgttcatccttgtacgcgttgttagccaagttgacagtggtgaaaccttcattgtcaacttttacattgcgaagatcgacccatcgacaacgaaacaacgggattttgaacttcaagtaatctagctccaatatttgctcaacttcaccatagtattgatcacgacgaccaccgtcactagtagcctcgatgcgtaacccactgttctgcactgtgcatttgctgtcttgctttaccgtgtgaaaggtgtatccatttatgtcatatccttgccaggtggtggcactccattcaggaccctgtgacaagcactgaagtgtttcactagacaagttctgcaacctggcaattcggttcttcagccactcgttgaaagaagacatgtgcttattcctgacccaactctctgatcggcctgggttctcttgtcggataactgcaaggtgttcgtcaacgtacggcaccacctcagtcatatgctgtagtaccgtgaaatgagctttatcgtacaccttccgatccaacctaatagtctttcttcctacagtaccaacaccgtcaagcctcccttcgtgatgagatcgtggtaatccaattgaagatgtttctgacatgtagtccacacaaaattcgatggcctcttcggtggtgtaactctcgatgatactcccctcagggtgtgaacggttccgtacataacccttaaggatccccaggtacctttcgcaaggatacatctgcgtcatgaatgctggaccacagcactttgtttgcctcacaaggtgcaccggaagatgttccattatgtcaaagaaagttggaggaaagtacatctcaagatgacatagggttctcacaagttctgcctgtagttcatctagtccctcggggtcaatgatcttctggccgattgcatggaagaaggaacacagccgctggatcgtgtgtcgcaccttaggaggcaaaatattccttattgcaacgggcaacagctgtgtgataagaacgtggcaatcatgcgacttcattccaaccaacttaagatcttgcagtgaaacaagcctactgattcttgatgagtaaccagatggaacctttataccactcaaacatgttagcaaatcaatcttctcttctttcgagagagtgtagcaggctggaggaaggtaaaccctgccggattccgtggttatgggatgtagctccgaccgaacacccatatcttccagatctcgtcgggcgttgagaccatcctttgtagtacctgggttaagcagtaatcccattaaaactctcgcatatattcttctcgacatgcatcaaatctatgcagtggcgaacttcaagatccttccagtatggtagtctccaaaatattgacttctttttccacatgctcctctcttttgtcttttgtttttccacatgctcctctgttttttccttcgatgtgctcttctcttttcgctttccaactttcctcttttttccaaactcgttggttattcccatcactaagttgtgcacctctgtccctgttagctctgccggcggtccggctatatctctgtgtccattgaaattctttctcatattcctatacgggtgataccttgggagaaatctcctgtgacccatgtagaccgtcttgtgtgaatgcttcaaccatttgcttcttgtttcctccatacactccgaacacgcccatttccctttcacagtttggccagaaaggttgccaagggccggataatcgttgatggtacaaaacaacatcgcatggaggttgaaatactcttgtgcatatgcgtcccatgttcgtgtgccctcattccataacctttcgaagtcatcgattatcggttcaaggaacacatcgatatcgttgccaggttgtctcggtccttgaatgagcatggcaagcataatatactttcttttgaaacacaaccagggaggaaggttatagttaacaagcagaactggccatgtactgtgacgactgctcaaatcaccaaaaggattaatgccgtccatacacattgcgaaacgcatgtttcttgggtcatttgagaattcctggtaaatcctatcgattgtcctccactgtactgaatctgctgggtgcctcagcatactatcgactttccgttcttcggcatgccagcgcataagcttagcttgttccttattcgcaaacattctcttcatgcgctccgcaattgggagataccacaccacctttgctgggcctcccctctttaacttacttccttcaccttcactctttactcgtttgtatcttgatgccccacagatagggcagacatccaagtcagcgtattccttgtaatacaaaatgcagtcgtttggacatgcatgaattcttttgacctccaggcccaacggacataatacttgcttcgcttcatatgttgtctgcggtaaattgttcccctctggcaacagatcctttaacagctcaagaagttctgtaaaactcttgtccgaccagccattactagccttaagcttcatgagttccaacacgcataacaacttgctgtgcttcgacttgcatccatcatacaacggcatctgacaatcttccaccaacttactaaacttctcaaaatctctgtcgttgtcctctgcgtcttcaatgtcatgcaacattatagatagacattgagtgtccaaatctatggtctctccacctaaaggagaaggtacgaacatgccttctcgagctgcggcggtgttctctacatcctgatccaacacttcttcagctgcgacatcaggcacctcttgctctccatgcttggtccagcaggtatatttcttcatgaatctattcattatcaaatgagcatgcacttcatccttgtcttcgatcatctgttcattcttacagtccatacatgggcacaacatgtgcatgctcatcctactttttctgtcattatccgcaaatgtgacaaattcagtgaccccctctctatactcggtagacgaacgatgcgtatagtacatccatctacgatccatctccgcccagcaccgcacgcctgcgccgccgattccctctgcccgcacttccacccaacccacctgaagctttatctccgcccgggcctgcacgcctgtgccgccgattccctccgcccgcactttcacccaacccaccttaagctttaggaatatgtggggaacaaccgtaagcagaagcaggaatctgacaaactcagtaacttgaagcaaaacatcagtcgaaagaaagaaaaaaggtttcgatagtgcctgatttgaggccat

SEQ ID NO: 56831 - DNA, 1860 bp, Oryza sativa
  Clone ID: PAT_MRT4530_58702C.1
atgaccccggacgtcggctgggatccacaacgccaggatgaccagcgaccagcgccatcgtcgcctctcggacctcttctcctcgtcctcttctctcggaccagaatcgccctaggaataacatacgtcgatgttgggcgggacaagtgcaagcccacggcgccgaggactgtcattggaaaatggtctaactgctgcgggctggcggcacgtgagaatttcaggatcctccataaagatatcggtaaggtcacagaagccgagaaggagctagcttggacggcaatggagaaatggttcacatttccggctaaagcaaaggataggctcaagcggaaggcattccataagatgggcaaagcttggaagaattggacgtcgaagctcttcaccgagtttgtcaacccgcctagcaatcatacgccgttcgatgaataccctcaaataaccgaagcgttatgggaggaattctgctctctgaagaatacccaagagtttagggaatcaagcgaggcacatcgcctactgcaacagcggaatgagcacccgcatcggctgggcactacagggtacatcggcaaggagccaatatgggcccaagaggatgcagccgctgcagcagcgaatgtccctgccccgttttcggacatcgctgaacaaagagctcgcaactgggtgcgagcaaggggtaagttggggttggttgctcaacaagcttcacaaagcgaggttgagtccacgctgaagaggcgcgaagatgacatcctcacaaaggcgctcggaaccaaagaacatcctggccggactcggggaattggcagcgatttgccttggaagcatggactgccgcagcacagctcccaatacaggaaacggaaagtctccaaggaagaaagggacgctcgtttgaaggccgagcgtaaggtggaggccattcaagaactagaagcaagcatggacgctagggtggaagaaagggttaacaaggtcctcgccgacatgaatataccccgaggcacaacacatgctgtgcatccaacttctcgtgcacaacacgacgcgagcgatgcgcgcaagacgttcatacaatggtccaaagaagacataattgtgaagatgactcctcgtccaagtcgaccgacggagcttacacctcccaagtctaagctatcaattgaggctccctgtggaccggcattgtcagtacctcattctcctaggggagctgatatggacttggcagatatagctcaaagcttggctccaattaagaccacaagaaaggccgatagctccccaccacttgtcaagggccagaagcgtgaacgcgacaaggagaaggtcggggagttggcgccggtgccaaaaagggacaaggctgcgacgtcggaggcggtgagcaaagcggggaaagtcgtgagggcgccggcccaatttgaactaggcatgccattggtggaggacaatgtgttagctgtgatgggtattgcttgccgagagctacataggcaatacatgcagttaagcaatgtcaagcggaaaatgagggagtcatccataattggacatcacgaccatcagtcgttcctatcgtcgcctgcctatataactataggctttgatggcctcttcaacctgttcaggatccggaagttggacactggacttctaaaatgctactccttgttgtgttggatcaagagtcactgccttggtaatcaggttgggttccttgatccatccatggtgaacgaggtcaatttacgccagaccgtcactgatgttgttgactatgtcaaccggtgtttatgggcccaccaagacaaggagtacatcatgtgcgcacacaaccaggagtaa

SEQ ID NO: 56832 - DNA, 1298 bp, Oryza sativa
  Clone ID: PAT_MRT4530_58703C.1
ccgtcatcggtcgaacaccacacctgcgtccatggcgggaggcaggggagcccgcgccagcctccacctccacctcgcctggctctgcgccttcgcgaccaccgcgtgggcgcatggcggtggcggcggcgggggcgattctgacgccgacgccgacggcggcggcgaggggaagccggacctgcgggcgcgggggctggtggcggcgaagctgtggtgcttggcggtggtgttcgccgggacgctggccggcggcgtgtccccctacttcatgcggtggaacgatgcgttcctggcgctgggcacgcagttcgcggggggagtcttcctcggcaccgccatgatgcacttcctcgccgacgccaacgagactttcgccgacctcctccccggcaccgcctaccccttcgcgttcatgctcgcctgcgccggctacgtcctcaccatgctcgccgactgcgccatctccttcgtcgtcgcccgcggcggcggccggaccgaacccgccgccgccgccggtgcagggctggaggagggtaagctgagcagcacaaatggcaacgcctctgacccaccagcagctgatgcggcggcgcaagaccactccgtggcgtcgatgctgcggaacgcgagcacgctcggcgacagcgtgctgctcatcgccgcgctctgcttccactccgtcttcgagggcatcgccatcggagtcgccgagacgaaggctgacgcatggaaggcgctgtggacgatcagcctgcacaagatcttcgcggccatcgccatgggcatcgcgctgctccggatgctgccggaccggccgttcctctcctgcttcggctacgccttcgccttcgccgtctccagccccgtcggcgtcggcatcggcatcgtcatcgacgccaccacgcagggccgggtggccgactggatcttcgccgtctccatgggcctcgccaccggcatcttcatctacgtctccatcaaccacctcctctccaagggctacaccccgctgaggcccgtcgccgccgacacgccggcggggaggctgctcgccgtcgtcctcggcgtcgccgtcatcgccgtcgtcatgatctgggacacctgatgccgctcatgatttcggacgtttgttggttcttgcaggaatgtgtgtgtgtagtaagttcgtcgtgaaattagcatgtgtaaagtttgtgccactccaaccaaagtttcaggattatttatagctttgaatatatcatcaacgctggggcaccattgtttttgttaaaaaaaaaaaaaaaaaaaaaaaa

SEQ ID NO: 56833 - DNA, 1440 bp, Oryza sativa
  Clone ID: PAT_MRT4530_58704C.1
atggtgggttgtgagcacatggttttgagagtcgtgctcatgacaattaaggaccgactgagaagtggcgagaagtccacgggggtcgctggggagtccatgcctctggtttttgagggggtgattatgatccaggaaagggctttgaagcacaaggatcgtaccgtggcagagtatcttcatgagttcaatcgtctggcacgttatgctccagaagatcagctggttgacaaagcaattcgacttgaagacaagaagaacaggatggataaccgtaaaaggaaaatgactgtatcccaggaggcacaaggtagtagccagaggcagcgtatcaagccactccaaattagtgaatcttcttccgctggtcaaggacaatcgcaacagttgaacatcggtggtgagatcaaatcagagactaatgaaagcaatgaagttaacatcgagcaagcaaatcagccggtgctagttcagcaggatcagtcgaataacagtagtggaagggagcagcaggagccaatgcagtgccagttgcgtcttcaagagttgcgtcttcaagtgttacaactcagccaccagtttcaaagcggcatgccccgtagcctcgtcgccgcgtcgtccaactcgccgccgccgccggccgagcttcggcgaggtcgcgccgccgcccttgccgtcgccgccgcttgccgccgccgccaagaggtgcgccgaggagagaggaagcccggccgcccgtccttcttcgccgccggtcgccgtagctcgccgccgtcggtcaacccgagccgccgcccgttccccgtcgttgccggccgtcgtcggacgtcgtttgtcgttgtgtgcgccagactgagaagtggcgagaagtccacgggggtcgctggggagtccatgcctctggtttttgagggggtgattatgatccaggaaaggcgcctcttgctctccatgcttggtccagcagagccgccgcggcgcttgtcttctctgtccgccgccaccgccgattttcggtcgtgtcacgtcgtcacctcgggcatctccaagctgcgctacttccactgtaggtactgcaacagcaagccaaagccctgcctccatttcccgtccaacaaaggccccaggaaggccttcgtcgccattcacccgaggcagtccgccgttgccgcatctccaaccgctgatcccatcaccgcccgaccatgccgaagccaccgtcggtatcacaccgccaaggagaacctcagttgctctctcttcttcaccgaggatagtcggagcaccgtcgtcggcatgtcccgaagacctctgcctccaaaagctcgccaccggcttctcccttcactgtccgtcttcgtgaggcgtgagctggcaagggcaccgtcggcggggtcgggcttgctgccgcttcaccacctccgcggccctctccggtga

SEQ ID NO: 56834 - DNA, 261 bp, Oryza sativa
  Clone ID: PAT_MRT4530_58705C.1
atggtgcactgtggtgagttgtattgtgcaaagggtattgtcacgatttccccctttgcagtgctgtggtggtacttcggggcatggcaacatgtgtggaatcgtgtcttgtgggtacagcggtacatctctggccagagtaaaactattcgaatagccgtgcccgcggtcatgggcgggttgagcaatgtttttcccgggtatggttgttcaggatggttgagcctgagcagcatgggtgtgctgttcagtgttgattaa

SEQ ID NO: 56835 - DNA, 2187 bp, Oryza sativa
  Clone ID: PAT_MRT4530_58706C.1
atgtcaacgcccggcgcaaacccgtcctccccaacacctgcgaggatccaggaagaagcaaacccagccacagaggcagttgccgaaggtcatcccgcgacaacggcggtccaacaacccgaaattcatgaattgccgcaggaacaacatacgtcgatgtcgggcgagacaagtgcaagtaggtctagtagaaatccgcggtcacaaaatatatggccgaccacagtgcaagttataagagaggttgacgctagtggtaggcccacggcgcccaggactgtcattggaagatggtctaactgctgcgggatagcggcacgtgagaacttcgggatcctccataaagatatcgggaaggtcacagaagccgagaaagagcgagcttggacggcaatggagaaatggttcacatttccagccgaagcaaaggataggctcaagcggaaggcattccaaaagatgggcaaagcttggaagaattggaagtcgaagctcttcaccgagtatgtcaacccgcccggcaatcatacgccgttcgatgaataccctcaaataaccgaagcggtgtgggaggaattctgctctctcaagaccacccaagagtttagggaatccagcgaggcacatcgcgtactgcaacagcggaatgagcacccgcatcggctgggcaccgcagggtacatcggcaaggaggcaatatgggcccaagaagatgcagccgctgcagcagcgaatgtccctgccccgttttcagacatccctgaacaaagagctcgcaactgggcgcgggcaaggggtaaggtcaacccggacggctctgtcacatttgagaacaaaagtgatgccgtcgtctatcaggaactgttgggcttggttgctgaacaagcttcacaaagcgaggttgagtccgcgccgaagaggcgcgaagatgacatcctcacaaaggcgctcggaaccaaagaacatcctggccgaactcggggaattggtagcgatgtgccctggaagcatggactccctcagtacagctcccaatacaggaaacggaaagtctccaaggaagagagggacgctcgtttgaaggccgaacttaaggttgaggtcattcaagaactagaagctagcatgaatgcaagggtggaagaaagggttaacaaggtgctcgccgacatgaatataccccgagtcacaacacctgctgtgcaaccaactcctcgtgtacaacacgacgcgagtccgtcacagcataggagtagttgtgcatccacagaggtgccggcccctggtctcccgatcgcaccactagctgcagtggaccacatcgagggcgcagcacagtgtgtcctactagcgagagtccacccaactttcgctcctgaagtcgctgagggcatggctttcaagccctcggttacagacaaggtccacggcgcagacctgctagctgggtatgccaaggtgtccatcgatacagtaaaggacacctggtcaggctatccgctgcccgtgcccccaaatgatgaaatcatgactttgggcgatgcgcgcaagacgttcatacaatggcctaaagaagacatagttgtgaagatgactcctcgtccaagtcgaccgacggagcttacacctcccaagtctaagctatcaattgaggctccccgtggaccggcattgatccggaagttggacactggtcttctaaaatgctactccttgttgtgttggatcgagagtcgacgccatggtaatcaggttgggttccttgatccatccatggtgaatgaggttaatttacgacagagcttcactgaggtggttgactatgtcaaccggtgtttatgggcccatcaagacaaggagtacatcatgtgcgcacacaaccaagagcgacattggattctcctagtcatcgtacctaagtggagtagggttacctaccttaactccaataagtccaaagattatgatttcagtgaaatcaccaaggccttaaatatggcttggggtccatatgtggaaaagggtggtaggcacaaggagggcaagaatgaactttatcatgacaccaagtttgcatgcgcacaacagatcggagaccaatgtggtttccacgtgtgccacaacatgtcaacacttctaagagaggtgaaagatttcgaccctgaggttgttgctaatggcgaataa

SEQ ID NO: 56836 - DNA, 579 bp, Oryza sativa
  Clone ID: PAT_MRT4530_58707C.1
tttggtgttttttttttttttttttttttttttttttttttttttttttttttttttttttttttttttttttttttttttttaaactccaagggtggtccctttttcaatggtgacaataataaaacaaatcttaaaagtaacagtccagggggttgtcatccaaccttaatatcccctttccttcaacatgtaattaattttctgcaaaaatccctctgcattcttttcattctttggataccgagttttccattcctgaaacctttgcaaggtcccagtaaaatcaataaaaagcccctcgaccccaatttcacccacccaatacttgtactcaaaataagggtcttggtggaagtcaaaatccaaaaacattttctcttttttaaaagtgtttggatccccctccaaatcatatcaaatgagtcatggtttataattgtactggcatctaaaatcatctgataaaatgtttcaataattggccaatcaaaaaaaaaaaagtgttgtgttctaataaaaaatcactaacctgaaaattcaaagcgtttcctcccccaacaagatcgtttgggggac

SEQ ID NO: 56837 - DNA, 2778 bp, Oryza sativa
  Clone ID: PAT_MRT4530_58708C.1
atggctatccctgaagtcgatatccggcgtcttgtcttggagtatgttggcttgtatgttctggcttctgttgttccgtatattgtggtaggtgtgttgattgaggtggtcgtctgtgttgtccgtgttgatcgtgttgaacgtcgattgaggagggccgccgtcttgcccggccaccgcctcgctcgctcgctcgccgccgcgcccgcctcgtcgccgcacgggatgggaggaagcggtcgacgtgcacgtcaaggacaaccaccaggaggaggtccgccgccgcgcccggcttgccgcctcgcctgcttgcctccgtgcccggccgtcgccgagcccggctcgccgccgcgcccgctcgttgcctcgcccagcttccgcctcgccagctcgccgccgcgcccggccgccgcctcgctcggccgtaacctcgcctgctcgccgcctcgcccagccgccgcctcgcccggccgtcgccgcgctgaagaagtgttggatcaggatgtagagaacaccgccgcagctcgagaaggcatgttcgtaccttctcctttaggtggagagaccatagatttggacactcaatgtctatctacaatgttgcatgacattgaagacgcagaggacaacgacagagattatgagaagtttagtaagttggtggaagattgccagatgccgttgtatgatggatgcaagtcgaagcacagcaagttgtcatgcgtgttggaactgatgaagcttaaggctagtaatggctggtcggacaagagttttacagaactccttgagctgttaaaggatctgttgccagaggggaacaatttacctcagacgacatatgaagcgaagcaagaatacgctgacttggatgtctgccctatctgtgggggatcaagatacaaacgagcaaagagtgaaggtgaaggaagtactacaaaggatggtctcaacgcccgacgagatctggaagatatgggtgttcggtcggagctacatcccataaccacggaatccggcagggtttaccttcctccagcctgctacactctctcgaaagaagagaagattgatttgctaacatgtttgagtggtataaaggttccatctggttactcatcaagaatcagtaggttcgtttcactgcaagatcttaagttggttggaatgaagtcgcatgattgccacgttcttatcacacagctgttgcccgttgcaataaggaatattttgcctcctaaggtgcgacacacgatccagcggttgtgttccttcttccatgcaatcggccagaagatcattgatcccgagggactagatgaactacaggcagaacttgtgagaaccctatgtcatcttgagatgtactttcctccaactttctttgacataatggaacatcttccggtgcaccttgtgaggcaaacaaagtgctgtggtccagcattcatgacgcagatgtatccttgcgaaaggtacctggggatccttaagggttatgtacggaaccgttcacaccccgaggggagtatcatcgagagttacaccaccgaagaggccatcgaattttgtgtggactacatgtcagaaacatcttcaattggattaccacgatctcatcacgaagggaggcttgacggtgttggtactgttggaagaaagactattaggttggatcggaagaacagtgggttacgcatcgaggctgctagtgacggtggtcgtcgtgatcaatactatggtagagttgagcaaatattggagctagattacttgaagttcaaagtcccgttgtttcgttgtcgatgggtcgatcttcgcaatgtaaaagttgacaatgaaggtttcaccactgtcaacttggctaacaacgcgtacaaggatgaaccgttcgttctcgccaaacaagttgttcaagtgttctacatagttgacccgtgtaacaagaaactacatgttgttcgtgaagggaaaaggagaattgttggattggacaatattgcagacgaggatgattacaaccagcacgtccacggcataggtcaagaaatacctctagaagaggaggaggaagaagatgaagttcaatatgcacggccgtcacaagtgacctcacctgtgacggcccagagtgttgggcccgtcacaggtggtcttacctgtgacggctccacggttggcgcccgtcacaggtgaggccactctctcgaccgccgcctcgcctctctcgacctctctgccgccctctacgccctcctctccaccgccgcctcgacctctccaccgacgccggcctgcaccaccgccgctgcactcactctctcgaccgccgccatccatatccaccgccatctccgccgccatccagaccctcctcgccgccgccctctctgccgccatctccgccctctccgccgccctcgccgcctccttctccaccgccgcctcctcactcactctctcgaccgccgccgtcctctccaccgccatctccaccgtcgccgcctcaacctctcctccgccctctccgccgccatctctgccgtcctctccaccgccgccctcgccgccggtcgtcctctccgccgtccgtccatcgacttccccgacctccccgaccctgacctccccgacgccgggatccccgaccaccgccgaccgcctcgacctcttcgccactgcctctccgccgccgccaccaggatccaggacgactacggcctgcgccgccgtctccaagtacgccgcttctccaagtatgccgccaccctcccccat

SEQ ID NO: 56838 - DNA, 3365 bp, Oryza sativa
  Clone ID: PAT_MRT4530_58709C.1
attccaatccgacggcgccgtgctctcaaatcccgcgaggcgcctcgccgcccagataaaaatcccctcctctcccaaatcctctacgccgcggcgattccgagcagcgcaacggcgggcggcggcggcggctgccggatcgtcggatggcggaggttcgcaagtacgggctgcccaatcagccgccagatattccccagatactgctggaagctcagaatcgatggctacgtcctactgaaatctgccatatactgtcgaactacaagaaattctccattgcgcccgagccaccgaacagacctgcaagtggctcgctttttctgttcgatcggaaaatattgagatacttcagaaaggatggacataactggaggaagaaaaaggatggaaagacagtcaaagaagctcatgagaagctgaaagttggtagtgttgatgtacttcattgctactatgcccatggggaggagaatgagaacttccagagacgtacctattggttgttagaagagggtttcatgaatattgttcttgtgcactaccttgaagttaaggggaaaaataatttttccagggtggcaagcaaagtttcagccgttctaaagaagctgaagagagtgcaggattatctaatgctgatagtcctgcatgctcaaactctttcgctagtcagagccagtgtatctaaagaaaaattcggtgcaacagataattgtcgagcaagctccagataccaccctttcgttgagatgcagcagcctgtggatggagtcatgatgaataatatgctgggtgtttcagctccaagtgcaggatatcatggtgaaatgcagactacaacagctaactcagacaatcattttgctactcattatgacatagctggtgtgttcaatgaagctggagctggattaaggggcgtttccaaaactctacatgattcagtgcgttttgctgagccctatcctgaatgctcagctgagtttatggagccagcactctattcttctaatgccaccatggagtccaacaatctggatgataactcacggttggaaacgttcatgtctgaggcactctacaccaacaacctcactcagaaagaagctgatgcactgagtgctgcaggcataatgtcatcacaggcagagaataatagctatacagatgggatccggtatccacttttaaagcagtcatcactagatctctttaagatcgaacccgatggtttgaagaaatttgatagcttctcgagatggatgagtagtgaacttccagaagtagctgatttggatatcaagtccagttctgatgccttctggagtagtactgaaacagtgaacgtcgctgatggcactagcatacctataaatgaacagttagatgcattcgcagtcagcccttcactttcccaagaccagctcttcagcattattgatgtttctccaagctacgcatgcactggctctaggaataaggtcctaattactggtacattcttggcaaataaagaacatgtggagaattgcaagtggtcatgtatgtttggggacgttgaagtacctgcagaggttttagcacatggctctctgcgctgctacacaccagtacatttatctggacgagtcccattttatgtgacatgctccaatagggtggcttgtagtgaagtgcgagagtttgagttccgtgattctgatgctcgacaaatggatacttcagatccccagacaacaggcataaatgaaatgcatttacatattcgtcttgagaagttactttcgttgggaccagatgactatgagaagtatgttatgagtgatggaaaagagaagtctgaaataatcaacactattagttccttaatgcttgatgataaatgtttaaaccaggcagttccattggatgagaaggaagtttccactgcacgggatcagaatattgagaaattggtgaaagagaaactatattgttggcttgttcataaggtacatgatgaagacaaaggtcccaatgtgcttggcaaggaaggacaaggtgtgattcatttggtagctgcacttgggtatgattgggctgtaaggccaataattacggctggtgtaaaggtgaacttcagggatgctcgaggatggactgcgcttcactgggctgcatcatgtggaagggagcggacagttggggccctgatagcaaatggagctgaatctggtttattgacagatccaactcctcaatttccagcaggtagaacagctgctgatttagcatcagaaaatggacacaaaggcattgctggtttccttgcagagtctgctttgacaagtcatctttcagcacttacactgaaagaatccaaggatgggaatgtaaaagaaatatgtggcttaggaggggctgaagattttgcagagtcgagttctgctcaacttgcttacagggattctcaggctgagtcactgaaggattcacttagcgctgttcgtaaatcaacgcaagctgcagccaggatatttcaagcttttagggtggagtcattccacagaaagaaggtggttgaatatggagatgatgattgtggattatcagatgagcgcactctttcacttgtatccattaaaaatgccaaacctggacagaacgacgggtcacattctgctgctgttcgtatccaaaataagtttagaggatggaaaggtagaaaggagtttatgattattcgacagaaaattgtcaagatacaggcccatgtacgaggacatcaagtaaggaaaagctatcggaggatagtctggtctgtaggcattgtggagaaaattatattgaggtggaggagaaagcgaaggggcctgcgtggtttccaaccggtaaaacagcttgaaggtccatcaccgatccaacagcttgaaggtccatcgcagatccaaccagcaaaggaagaggaagaggatgaatatgattacctcaaagatggcaggaagcaagccgaaggcagattacagagagcactagctcgtgtgaaatcgatgactcaatacccagaagcaagagaacagtacagtagaatcgcaaaccgtgttacagaactgcaggagcctcaggcgatgatgattcaggatgatatgcaaagtgatggagctattgctgatggaggcgacttcatggctgaactggaggagctatgcggggatggggacgcaccaatgcccaccattttgtgacattgaggagttttactagatcagttaggctgcgacctctgttctttaccaggctagctgtaaattcttgtgctagatgttcagtgctcaccgttcgactctatatagcgttatacctaataccatgcgacttctatt

SEQ ID NO: 56839 - DNA, 381 bp, Oryza sativa
  Clone ID: PAT_MRT4530_5870C.1
tttctctttctccctcgccaactcgactaccctccccacccccgcgtcggcggcggcggcagggcagcggcagcgacggaacctcgccggcggcaagcgtactcacccgacaaaacaatgaggaggtatagtccaccttatcgcagtccaccaaggaggggatatggtggcagaggaagaactccccctatgcggggatatggaggacggaaggaacagggttctggcagtctcctggtgcgcaacatccctttaagctgcaggtactggaactgtataaccttaacacctttttccaatgactatattcttaatgaaataaataaatattccctctgtttctaaatatttgacaccgttgactttttagcacatgggttg

SEQ ID NO: 56840 - DNA, 2961 bp, Oryza sativa
  Clone ID: PAT_MRT4530_58710C.1
caggaattcggcacgaggcgctctcctcctcctcctcctccccctcctcctcgccccggcctccgcctccaccgtcgccatcgcagccggccccaccgcctgcgccgtcgcggagggaaactccaccgtctactgcgcctccgccaccaactcgtcctcctccgccgccgtcgcgccgttcgtcagcttctcccaggtgtccggcggcgggggggcgttcgtctgcgggctgcaggtcggggggcgcgcgctcttctgctggcccgccgcggcgccgggtcagctcaggcgggtgtacaacggcccgggccagccgtacacgactcccgatgagatgacggccaccgccgccgtcgtcgccgcccgcctcatccaatgaccccgctcctcctcctcctcctcctcccccttctcctcctcgccccggcctccgcctccaccgtcgccatcgccgccggccccaccgcctgcgccgtcgcggagggaaactccaccgtctactgcgcctccgccaccaactcgtcctcctccgccgccgtcgcgccgttcgtcagcttctcccaggtgtccggcggcgggggggcgttcgtctgcgggctgcaggtcggggggcgcgcgctcttctgctggcccgccgcggcgccgggtcagctcaggcgggtgtacaacggcccgggccagctgtcacagctcgccgtcgggggcggccatgtcgcggcgtacgacgccgcggcgcgggtgatacggtggtggcgtggcggggaccggttccctctctggttcggcggtgggttcgcctccctcgtctccggcgacgacttcacctgcgccgtggagacgagcacctccgccgtccggtgctggggcccgcgcggcggcgccgtggaggcgggttttctcaacgcctccgtctccgccctcgccgcgggaggttcccgcgcgtgcggggtgaggaggaacgacggcggcgtgctctgctccggcggtggcgtgctcgcgccgcgcgaggacctgtacgtggacggcctggccgtcggcgactcccacgcgtgcggcctcctccggccgaaccacaccgccgcgtgctggagcctcgggggcgccaccaccacgctctactacccggcggtcggcacggcgttcgagctcctcgtcgccggcggtaacctcacgtgcggcctcgtgtcggccaacttcagcctgctctgctggtcgagggatgggttggtggcggcggaggtgaacctgccgccgatcctccccggcgtctgcgtctccgacaacagctcgtgcaaatgcggcccgctcccggactccgggaggttctgcaaggtctccggcgacgtcatctgcagaaggttctgtgacacgtcgccgccgccgccgccgccgtctcctcgtacgccgtcgccgccggcgaccccgagctcgagacgcggcgtgtccaaaggctggatcgcgttcgccgtcgtcggcgcggtgggctgcttcgcggggctctgctccatcgtctactgcctcctcttcggcttctgcagccacaagaaggtgcacaactctgtccagcccaacatcgccagcaacaacaacggcggcggcggcggcggcgccgccgcagctgtcggcagtggcgcgccgagcccgtacgggtcgccgaacgggtcgctcggccgcctgcggcggcagctgtcgcgcgtgatgacgcggcagcggagcgggccgtcgtcgttcaaggaccccgccgaggagttcaccttcgcgcagctcgcggcggcgaccaaggacttcgcggcggaggccaagatcggggaggggagcttcgggacggtgtaccgcggcaagctccccgacgggcgggaggtggccatcaagcgcggcgagtcggggccgcgcgcgcgcaagttccaggagaaggagacggcgttccggtcggagctggccttcctctcgcggctccaccacaagcacctcgtcggcttcgtcggctactgcgaggagagcgacgagcggctgctggtctacgagtacatgaagaacggcgcgctctacgaccacctccaccccaagcccaacggctcgtcctcgccgtccccgtcgccggtggccacgtcgtggaagctgcgcatcaagatcctgctcgacgcgtcgcgcggcatcgactacctccactcgtacgccgtgccgccgatcatccaccgcgacatcaagtcgtcgaacatcctgctcgacggcagctgggtggcgcgcgtgtcggacttcgggctgtcgctgatggggccggagacggaggaggtgaagcacctgtcgatgaaggccgccgggacggtggggtacatggacccggagtactacggcctccaccacctcaccgtcaagagcgacgtctacggcttcggcgtcgtcatgctcgaggcgctcaccgggaagcgcgccatcttcaaggaggccgagggcgggagccccgtcagcgtggtggactacgccgtccccagcatcgtcgccggcgagctcagcaaggtgctcgacgcccgcgcgccggagccgagcgcgcacgaggccgaggccgtcgagctggtcgcctacacggcggtgcactgcgtccggctggaggggaaggaccggccggcgatggcggacatcgtggccaacctcgagacggcggtggcgctctgcgaggacagcgccaccggcggcggcgccgccggccatggcaacagctcgtccagcgccagcctctccatcacgtccatggagttgagtaggatggattgattgagattagtagcttccctaattcaaatccagagtttcaaattgtgattagccccggaaggagattttaaaatttgttgcttcacttcattttttttagaggagaacatcatttgtgtgattctctcacacattttgttcatggtggctgtacatgattttgtattgaactgatttctcttttcatag

SEQ ID NO: 56841 - DNA, 339 bp, Oryza sativa
  Clone ID: PAT_MRT4530_58711C.1
atggcccacatatcagatattaaactgataagaacagatactacacttgatcttagccaaaaggccgagaaaggtccatccgatgacatggcatgccacggtgacgcctacgtgtcggtgaggaccccacatgctccgtcggctccgccacactggcctcctcgctgcgggcgaagccgtacccacctcggcccggccaggcagcctcagccggctctccgcgtcaagctccgccgcctccgcctccgtgccgcaagcgacgccgcactcgcctcgcccgaggccgcttcctcggcaccctccgcgccgcaagcgacgccgcggcttctgttcaattag

SEQ ID NO: 56842 - DNA, 346 bp, Oryza sativa
  Clone ID: PAT_MRT4530_58712C.1
attttgttctcagagacaccgttgttgcatatgtttgcaaatgctctcatgtatttcagtgccatactgagtgagtgatccacattgagattcaaaaaaaaaaaaaaaaaaaaaaaaaaaaaaaaaaaaaaaaaacaaaaaaaaaagaaaggaaacaactcaaagcgccgcaaaaaaaaaaaaaaaaaaaaaaaaaaaaaaaaagggggtctgtttaaacgaataaaactttattatgtggttctacaccggcaaaaattattaaaatgggcaaccaaaaaaaaaaaaaaaagggcggattttaaccacttcaaaaagggaaaaaacaacagctttccaaataaaa

SEQ ID NO: 56843 - DNA, 243 bp, Oryza sativa
  Clone ID: PAT_MRT4530_58713C.1
gtacagtcgggacgggcagctgtacactgacctagcctcgcgctccaagtgtccagtgcattatccacatgccgcggccgagccgcgaccactccactccccacgccggcgagtgcaccacggtgaaccgcctctcacggtccagcttccaacctgaccttagcgggtcgctcccgagcctcatctactcgtacacgcgtcactcgccgtgagagactcgtccacgcgcacacgagccagacc

SEQ ID NO: 56844 - DNA, 277 bp, Oryza sativa
  Clone ID: PAT_MRT4530_58714C.1
gaaaaaccttaattcttcctgcaagaaacctattgtccctgtgtcattgctgaagatattgtagaagttagcgttaatggtgactggaagctttacattgacatttcgtgctgttgcacttgatgtgtagtttgtacatgatgcttagttaacattttccctctgttgcacttgctgcggttggccatgtcgcgctctgcactcttcggttgttcagacatgagagtttacaataattcagtattggagaagttggtaaaactgtcagattgttgcc

SEQ ID NO: 56845 - DNA, 172 bp, Oryza sativa
  Clone ID: PAT_MRT4530_58715C.1
tcggccaccgccacctttgcgccatactgcctcccatctctcttgtcaagtcgtcagccagccagcctgccccgtcgtgcctccactttcccaccaatttaacacgattccaaaccacggactccatctggaccgtccaccagcgcatcccacggtcacctcccgtccccac

SEQ ID NO: 56846 - DNA, 213 bp, Oryza sativa
  Clone ID: PAT_MRT4530_58716C.1
ctccatgaatcatagcgtatcatatcctccgagatagaggtgcgtcgagtttcctgtcgacgagtgcgatggaaccaatctccgacatcgccgtatttgaggatgttcttttcgtctcggattcaatccagccgaagggattagtctcggcgatttcattgatttaatcttcaaaatcatttggctttgccgtttcagtagttagattgtttt

SEQ ID NO: 56847 - DNA, 193 bp, Oryza sativa
  Clone ID: PAT_MRT4530_58717C.1
gaagcgacagcaacctaaacaacgtatcaatcaacacaatggcggacgctgaagctcaagccggcgaggcggtgccaacctgcacctgacgaggtgaccggagagaaggtctccaagtctgagctcaagaagagacagaagcagcgtgagcgtgacgccaaaaaggctgagaaggccgctgctgcccctccca

SEQ ID NO: 56848 - DNA, 479 bp, Oryza sativa
  unsure (1)..(479): unsure at all n locations
  Clone ID: PAT_MRT4530_58718C.1
gaaaatggtgatttctgtgtaaccactacgaatcatcactcagaaattgcagcttgtgtgcacattttccatggtcttgtttgataatcttgtgattacaccaaagattgccggcatttgtaagtaaattattcagaatttcagattacaggaaaggaatgtgaagcaaaatacgccttccaagatagaaggcgtatttgtgagcgaagaaaatgtgaatagaaatacgccttgtaaagtaggaggcgtatttgtaagcgcggagagaagagagcatatgccgttgatctcgtcgacgagaagagcggcggcggcggcggattcgatcgctagtagtcgtcgaggcggcggccgatggcgagggcgcggacgaagcaggcggaggcgccgacggcgaggccggcgaacgccgggggcacgatcatgtcggcgccggaccgcaccgncatcctcgccggcacgcacacgaagtccccccc

SEQ ID NO: 56849 - DNA, 1564 bp, Oryza sativa
  Clone ID: PAT_MRT4530_58719C.1
agcgaacaaaagccatatattgtaacgaattactacctagctagttaacctggtctctccagagcaagctacccgttagtcttgatcagctagctctagctagtagttagccatgaaggtagagcaggacctccacatgagccggggcgacggcgagaccagctacgccgccaactcaaggcttcaagagaaggccatcctgaagacgaggccgctgcttcacaaggccgtcgaggaagctcacgcgtcgctctccggcctctcccgcgcgcctgcaggcggcaagatggtggtggccgacctcggctgctcgtcggggcccaacactctcctcgtcgtctccgaggtgctcagcgcggtggccaaccgctcatcatgcgaccacaagtcctcgctggtggcggacgtccagttcttcctcaacgacctccccggcaacgacttcaacctcgtgttccagtccctcgagctgttcaagaagctcgccgagatggagtttgggaaggctctgcctccctactacattgccggcttgccgggctctttctacaccaggctcttccccgaccgctccgtccacctcttccactcctcctactgcctcatgtggcgctccaaggtgcctgacaagctagcgagcggtgaggtgctgaacgcgggcaacatgtacatctgggagaccacgccgccgtcggtggtcaagctgtaccagaggcagttccaggaggacttctcgcagttcctggcgctacgccacgacgagctcgtctccggcggccagatggtgctgacgttcctgggcaggaagaacagggacgtgctccgcggcgaagtgagctacatgtatgggcttcttgcccaagctctccagtccctagtccaagagggacgtgtggaggaggagaagctggacagcttcaacctgccgttctactcgccatcggtggacgaagtgaaggcagtgatcaggcagagcgggctgttcgacataagccacatccagctcttcgaatccaactgggatccacaggacgacagtgacgacgacgacgtggcgacgctggacagcgttcggagcggcgtcaacgtcgccaggtgcatcagggccgtgctcgagcccctcatcgctcgtcatttcgggaggtgcatagtggacgacctgttcgacatgtacgcgcggaacgtagcacagcacctcgagcaggtgaagaccaagtaccctgtcattgtgctctccttgaaggcaagacgctgaacctatccgttcgtcggctcgtggtacacgatgttgcattttataagtagcgtgccagtgtgtgttgttggggaccgattgatcacccagctgctctgcaaattgggtctgccatagcctttgtctagctttgagtcgtttgtcgttgtaagttaaatgcgacgtgtgcgtgagtcagtaaaagtaaaatgaactagcccacgcgaatacgcgggcatgtatcttaagttgtgtttatatgggtagaaaattaatctaattatttctatcttgattgaaaaaaaaaaaaaaaataaaaaaaaaaaaaaa

SEQ ID NO: 56850 - DNA, 1311 bp, Oryza sativa
  Clone ID: PAT_MRT4530_5871C.1
atgggtttcttgtttgccaggagcagcggctacagctttgttgctcttgccctcctggcgtgcgtgctgctggcgccgtgccaggcggcgaaggcggggctctcgatcaagttctacgccaagacgtgccccggcgtggacaccatcgtgcggtcggtggtggcgcaggccgtcgccaaggagccccggatgggcgcctccatcatccgcctcttcttccacgactgcttcgtcaacgggtgcgacgcgtccatcctcctcgacgacacgctgacgttcacaggcgagaagaacgccggcgccaacatcaactccgtgcgcgggtacgaggtcatcgacgccatcaagtcccaggtcgaggcggcctgcaagggcgtcgtctcctgcgccgatatcgtcgcgctggcgtctcgcgacgccgtaaacttgctcgggggaccgacgtggaacgtgcagctgggcaggaaggactcgcgcacggcgagcgggaccgcggcgaacgccaacctgcccggcccggcgtccagcggggcgtcgctcgtggcagcgttcgcggggaagggcctctcggcgcgcgagatgacggcgctgtccggggcgcacaccgtggggcgggcgcgctgcctcatgttccgcggccgcatctacggggaggccaacatcaacgccacgttcgccgccgcgctgcggcagacgtgcccgcagtccggcggcggcgacggcaacctagcgccgttcgacgaccagacgcccgacgcgttcgacaacgcctacttcaagaacctggtggcgcagcgcggcctgctgcactccgaccaggagctgttcaacggcgggtcgcaggacgcgctggtgaggaagtacgccgggaacgccggcatgttcgccggcgacttcgccaaggcgatggtgaagatgggcggcctcatgccggcggccgggacgccgacggaggtcaggctgaactgccggaaggatatgaccaattttattatcctcatttgtggtgctcattttcctcttaatttgcaagtgtttggagggttgcttttcatcttaccacaaaagatggagaagaccgatgacgtcgtcttcaccggccacatcaaggacgatgacgacatcccgccgccctcccgcgctacaatggaagccgaggccgcgtccctcctcgtcgccctcgtctcacgtgccattaccgcctgtcgcgttgccaagcgccgcccgccgccgacccgtttcaacgctgccaccgcagcttctgccagcggccctcgtctagactactgcgttgtcatccgccgcccctaa

SEQ ID NO: 56851 - DNA, 303 bp, Oryza sativa
  Clone ID: PAT_MRT4530_58720C.1
atggcgaagcctgagcagcagcaggtggaggaggaaggctttgatcttccgtttttcatggaggaggaggaggcggaggtggaagcggcgaagcagaagcggcgggaggaaagcctaaagccccagcgggagaggcaaatgacgtcgacggaggcgaaggagaggtgggcgaggagaaaagaattgtcgtccaagttgttcgagtatgatcccaagacaggaaccagcttctacacccgcgcatggttcctcgacctcaccaccttcgacctcgacaaagagagtgggattgcagttagctga

SEQ ID NO: 56852 - DNA, 3233 bp, Oryza sativa
  Clone ID: PAT_MRT4530_58721C.1
ttgcaggatcaaatcaactggacgctcacgaacctaaaagcaagattttagacctgcactgaagttaagcagatcttccaggccagtgtgtgttttttgcatcaacacgcttttggcacgcccagtgggacaacttttctcatggcagaaaaacaatcaccggcatcgacaggcaagcctccaaaccctccgggggccaagcatccaaaacctccggggaccaatcaatcatcatctgaggttgagactgggaacatcgtcccagtcaccatagacaagttatcaccagaacagaaggagtttaagcaagtgatgaagagtgctcagcagcaattcatgaactcgttcaaggaaacctgctagggaacattcattcagaagtaaaaggtgaaggtggttgctgccgatgaacctgaaacaagttcatcctaaggggactaaaggtgttgcgaatggctcggatgataaaggtgagggtcctcaagatggtacggtcgaggagcctttgagatgcaacaattttcaagaccaggttgactatgctgttcaacatgccttgatcaactaatcgggggtgattatcaatactttatcaaatatgattaagtctgtggttgatagcacgatagctgagcatcaaaacacggggccagtctttctaccaggtggcgtctttccacagtacaggaatttggtgacaggcaaccagcaacataccaccaatgcaccaccggttcagccgacggcaatggtttcagttccagcaccagctgcaccgtcatcagcacaaaggcaggtgattaatcctcatgtcttgaccagagagcaaccacagcatgttggacagaacattaatcgactgacccaggagcaggtagctacaatgttcgcgccaactcagccgactgtcgagctagtacagtcgacaccgattaggcagcaggttatccagccgattaggcagcagacggtacaacagataccaacaggatagagaacgcctattgctcagcaaaatccacctgttggagcccagtttgtacctgccccatcaaaagccttaggccgacatgattgcagatgtgatgagggagtagtttgggcttaagccaaaggactctggaaatttgtatcggcacccttatcctgagtggtttgaaagagttccactgcctaaccgatacaaggttccagatttttcaaagttttcaagacaagacaatgtttcgacatatgagcatgtcagccgattcttggctcagtgtggagaggcatcggctgttgatgctttgagggttcgattgtttcctttgtctttgtccggatcagcattacatggttttcttcattgccttacacttctgttcaaggttgggccgatttggagaagcaattccatagctacttctatagtgggacccacgagatgaagctctctgacttgataggagttaggcagaggcatgatgaaaccgtgcaagattatatttagagattcagagatatgaggaacaagtgttatagttttgccttgacagattctcagttagccgatctcgcattccagggtttgatagctcagatcaaggagaaattttcatctcaggaatttgaaagcttgtctcatcttgcacagaaggtgaccctacatgagcaaaggtttgtagaggctaagaagaatttcaagaagatcaatcatgtatatccttatatgtatgattccgaagtggcagcagctgaatgggtgaggagcaaaaaggttgtgccatgtcaatgggtgaagagttttggaaaagaggaaaggtatgactttgatatcaccaaggctgataagatttttgatttgctacttcgggagaaacagatacaacttcatgctggtcacataatcccatcggctggggagctagggaagagaaaatattgtaagtggcataactctggttcccatgctactaatgattgcaaagtctttaggcagcagatccaagcagctattgagggagggaagataaaatttaatgattcaaagaagccgatgaaggtagatggacatcctttccccgtcaatatggtgcatacagctgggagagcagccgatgggggaaagaattcggagttctcaattgaattcagcaaggattatcaataaataccaaaggaagcatgataagcagtaggaaagatatcacgaagaagatgatggtgggatgagactaccgtcgattgaggattgccctggatgcagtgacaatgcagggagttcaagccgatcttgcactaaaggaaatcggctgagtcagaagaggttgtctgttcatcagaggttgggctcacttaatcaggatcgtcatcaagatgaaaacgaggacagaaaaacacaatggtgtccttcttgtattttttataaagaatcagaagagaagggttcaaaagaccaagcaagaatggcgcgttaagagtaaggttacaacaaccgatgaggtggaagctgacaaggcgaagaagctggctaaaggaaagagtgttgcatctacatcggtaaacatggtgtttatattgcctacagaatttgaagctaggcaagccgatgttgatgatgtagaggaggcctctgctaggttgattttgtcaccagaacaagcattttttgagaagccagaggggacagaaaatcggcatctcaaaccattgttttgtcaatgggaagccgatgtctaaaatgatggttgatggtggggctgcagtaaatttgatgccatatgctaccattcaggaagctaggtaggaatgcagatgatctcatcaagacaaacatggttctcaaaaattttggtggcaatccatcggataccaagggagttttgaatgtggaactgacagtcggcagtaaaactgttcctacaacgttttttatcatcgatgggaagggttcttatagcttgttgctcggaagggattggattcatgcagattgagccgactatgcaccagtgcttggttcaatggcaaggtgacaagattgagattgtgccagccaacagccaatggaagacggagaccccaaattattactttgagggtgttgtgaagggttcaaatttctacaccaagggcacggtggatgatctcgatggcaagttgggacatggtttcatgtcggccgatgatttggaagaagttgatatagatctaggagataggccaaggccgacattcatcagcaaaaaatt

SEQ ID NO: 56853 - DNA, 564 bp, Oryza sativa
  Clone ID: PAT_MRT4530_58722C.1
atgggcctcgcgagctctcgcccgccgctcgtctccgcgccggcgacggcgacggcgaggctgcctcctcaccgccaccgccgccgccgcctctatctcagtgccacctcatgcgcttcgaccaattcctactcctccagcgtcctgtcccatggaggaacctgtgctccgcgctccctagtggcggcggagttgcagtcgcagtcgcggccgcctccgctcgccgccggcgtgtccgtacggggagacgccgcgacggggctcgcgttcctcctcttcgttctcgctgtggtgatgagttcctttctgtcactggccatcttctcatttccaacatggagagctctgaagcgattggaaattgctgtgcataaattgtcgaaagtagttgcagaagaggtaccaggaacactatcttcactaaagctatcatgcctggagatcaatgatttaactagccaactaaagaacttcagacaaaggctcatgataaatatatttggaaacaacagtagtgttgatgcaagatcacagactggatggccaaaacggggaaaaatatga

SEQ ID NO: 56854 - DNA, 3217 bp, Oryza sativa
  unsure (1)..(3217): unsure at all n locations
  Clone ID: PAT_MRT4530_58723C.1
cgcgcacactgccactgcgagtgccgttcccctcctcctcctcctctctcccatggcggaatcctcgagccgccccacgaaaccctaaatggcgagccggcggcgccgccacgcccctgtgccgtagcctcgccgcagcgagctggtcggaagatttctctcaatccgtgtagaacacagcgtcacctctcgatccgccaagtggtgggggagtaggaagcgtgtcttctccgggaggcgcgcgccatggggagcgatctgaaggagatgaagtacaggcggaggattgggctcgacgagcgggcgcaatgcagcgagcagagggcgctcgactggcacgcgctgaagcaggacccagtggagttgctccgcaagctggacgagctgagggagcagatcacgaggacctgccagatcgtcgagccgccgcgggagcaccgtcgggcgggccgacgagcgctctcgctgctccctgagaaccctgagccgccaccaatgccagggtatcaccgctcacgctatggtggtgggcggtatgggcacggcttgccgccgagcccctacgagccgctgcgccctgagattggggagaggtactccagacagtcaagtgggcggtatcggcagtatcaagggaggcaatgggatggctgtggagttggacatgggaattacaatccttcttatacatgttcctgtccgcattgtctacatggacagagaactgcaccacaagaagagcacattccaatggcgagatactttgctgggcagcatgagtgctaccggtttgaaaggtcgccatctgtctcatcggactatgaccggaggtccgtagcatcatcattgtactcgcatcggtcggtttcaaagaagagagcagagtatttccggaagaaggcagagcatctttgccgtcctgtttatggcgccgccccttttgttgtgtgcagttcttgttatcagctgttgcaggttccaatggaaaagtgtatggggaggaatcggctgcagtgtgggtcttgctctcagattgtcagtttgaagcgtgaggagaaagttatccccttctcaccatcagcatccttttgtgtgcccaaaattgagcaaggttcaaatgatcaaactaggcgagattttgagcaccagctcaatgagtttgccaattctgccttttataatttgaatgagcatagcagcatgcaaatcaacatagactttggtgatgatcattcagtttcttcttccattagtcatgacaggactgagaaaggatgtggatcaagcaggagcattcagttaaaaacagatgggctcttgttgtctccaagcagatctggagatattgagagcccgaaggatatattatgcgaaagagatgctgaatgtcaggtagaaccttcagatgctcgagtcagcccatgttccccagttttagaggacaaacttgttgatccattgtgcagccaggaaaaggataataatagtgaggacctaggcatggctaatatatctgatgtaaattgcaaaggagaacacaaagttaatgatgatgatgatgggagtcttagtatgggaagtgaacagaagagaaaggaatgcgatgaagattcccttgtagatgaaagcatgtgcaaaacccatgaacagaagagcaaggacgatcactctagccctgaagatgttagcaaaactcatgaatttgatagtacaaaagataatattagcagtgctgtagatggaaatgaaaaacatgagtttgaaagcaaaaaagatgataccaatagtcttgaaggtgaaagtttgaacaaggaacatgagcaaaagagcaaagaagacgaaaatagtggccttgaaggtgagaatgttaagaaggggtttgacaaaaacaacaaagaaagtgaaaatagtgcccttgaagatgccaatgccccccttgaagatactagaaatgcctctgatgcggcgagcttaagcgagatatctgaagaaaagaaaacagaggaagaaaatggaagtttggaccagccttttgttgaagatggcaatgcctttgcagagagtgggggatcatcatttaatgagcgtacaaattctggtttttcccgtggttcttctgagactgcattagaagaagatcagccctcaactggaaagagtggggattcgtcattttttgctggtttcctgaagaagggtttcaaggacctttctttatttaatcagtccatggacagcgttaaggtttcaattaatggccatcctatctctgaaagagctcttaagaaggcagagaaaaaagctggtcctgttgagcctggctcgtattggtacgactaccgtgctgggttttggggtgtcatggggcgagaatgtatcggcattatccctccattcataagagaattcaattacccgatggccagtaactgtgctagtggggatagtggtgttttcgtgaatggcagagaacttcatcagagagatctagatttgcttgtaggaagagggcttccacgcatctctggcaaatcatattctgtagagatttctggaaatattactgatgaagaaactggcaagaagctacgcagtcttggcaaacttgctcccacgattgagaagctgaagcgtggttttggcatgcatgtccctgaagagtttagatagctggatagtgggtctattattactcctacccctcgtagctgcaaattggaggcaagtttgtgatatctactaatagtgagattgaagctttttaagtgtacctcaagcctggactacgcagcaagttgtggtgtccaagaagctggtagatcacatgttcccatgattttactattaataatcttcctcctactaattccaaacctccatgccttttactgaaacgattcgatctaccaggcagctctaacttctctgctctgcctgtatatgtttcttatctgtgctatcaccatgttggtatgttgcctcaccatgggaagcattaggtatatgtgcaattgtcggcttgtaatatattggtagagctatacatttttctaatatatatttgtaaatatatactggtgaaaaaaaaaaaaaaaaaaaaaaaaaaaaaaaaccccagcggggcccctttgccccctcccgcccatccctccccgcatcacattttctgacaccatggtgctaaaaaactagtccggaagcccagcatggnnnttgt

SEQ ID NO: 56855 - DNA, 453 bp, Oryza sativa
  Clone ID: PAT_MRT4530_58724C.1
aagacctacatcacaccaggatagagctaggtgagctgcagagacagtccgctccgggacggcgttgccagccacaaccaactttcactaacaggggcatatgttcaccgcccgcttacacaatggctgccgctccgccatctgcagcttcggcaacctcagaaatgtcggcaacatcaggtgcatgcacgtgtagacaattgacgtcatcaagaagttcggacaccctgttatacctgccaccgctcacctgtgtagacctcctcaagcagatctactacctgctgctatccaagtgggtgccctgcctcgagttcatacatggttggatttctctaccgtgagaaccacagatcccacacatactatgatggcatgtactgcaccatgtggaagctccctatgtgtcaatgcactgacaccacctacttgctcatggagcttgagtaggcc

SEQ ID NO: 56856 - DNA, 425 bp, Oryza sativa
  Clone ID: PAT_MRT4530_58725C.1
aaagggggcaaccccccccttgaaggggccaaaaacccaaaaaaggggggttttaacccaaaacgaaccccatgaggtttacctggaaaaaaaagggcaattctaaaaggggggttccccaaaagaaaacccaaaaaaaaaatttggcccgggccctaaaaaaccgggaaaaaccctttttttttttccgggggggagggggaccccccccaaaccttatttttctgaggacaccaaccatttccttttttttttttttggccctttggggggggccaaattttttttttgccccctttagggccccccttggccttgccacctttgaaaaccccagggacccccctctaaaagggagcaaaaccaacaacccccctgaaaaagttcccgacaaaggccaccccctggggggattcccccttggg

SEQ ID NO: 56857 - DNA, 493 bp, Oryza sativa
  Clone ID: PAT_MRT4530_58726C.1
cgctacacaccactactctcacaacaatggctaggagcgtagccgtggtggtgttgctgtcgatggcgacggtcactgcgacgcaggggcggttttcttttgtgatgtcggtttttctctcttcaatagctctaaacttttactccttcatttagatgttatgttatgattttattctttttattcttattagttttcatttgatatattttttacattttgttttactattttactattcgttcattattactttcattttaacttctattttattttcttattattattttttattttatttttttttttttatttaattttttttttattatatgcgtttattttttatgttttttttttttttttttattttttaccttttctttttttttttttcttttttatttttatattattttctttttttgttttttttatttttaattttatttttattcttatcttttttttaattttttaattatatttt

SEQ ID NO: 56858 - DNA, 281 bp, Oryza sativa
  Clone ID: PAT_MRT4530_58727C.1
gcggcgccttttttggtgttgagaaaccgtgggggctgtcatttctataatgataacatatatacgcacattggcaccattaatcacttacacttgccttacaatgatgaatgggaaaccactacaagagctcaggggtttcgaacacatgcacctaaagcacgcaagcctttaagacgtgccatgcagaactactgggagtagaacagcatgagtacatatgtcaagatcattcaggacaggtgactggaccggtctcaaaatctactgtggactgggct

SEQ ID NO: 56859 - DNA, 1394 bp, Oryza sativa
  Clone ID: PAT_MRT4530_58728C.1
atgaatagcaaaaagcctacaaacgaaaataagaagaaaaccaaaaaagccgcagaaagaaggagaaagaagatagagaaaaacaagagaaccgcacaaacgaagagaatgtaccctccagtacctaccacgcatccgcaaccgtcgcaaggttcgctccgcgcgcggtggctcgtcgacgccgtagacctcgccacgggacgcgcggagcgactaaaaaccaccgcggattgggtcgaggggggtaattcgtccggtttacataattgggaggaactggcctaccagtacgcagcgcaaggtgcgtgcctggcgctggtggcgcggaggaagaaggctctcgagggcgtcgccgccgccgccctggagcgcggctcgccggacgtcctcgtcctgccggccgacgtctccgacgccgaccagtcgagacgcgccgtcgaggagacagtcgcgcacttcggcaaattgaaccatctggttgccaatgccggtatctggtcctcttgctccttcgatgaagtcaccaacataaccgctttcaccaagatgatggacgtgaacttctggggatccgtgtacccgacctactatgccctaccacacctcaaggccagcaaagggaaactcgtcgtgtcgtgctccgcggcaggaacagtcggcacttcaagaatgagcttctacaatgcaaccaaagcggcgcaactgaggttctacgaaacattgcgagccgagctcgggtcggaggtcgggatcacagttctcacccctggctacgtcgaatccgagattaccaagggcaagggcatccagagcggcggcgatgtcgccgtcaacgaggaagccagagatgagcagatcggcgtgttcccggtgggccgcgtggcggagctgggcgaggtggccatggacggcatccgggccggcgactggtacgtcacgtggccgtcgctgttccggccgctgcagctggtagcctgcctcgcccccggggtgctggactgggcctgccgcgcgctgtacggcaccaggaagggggcacgaccgccgctcgggaagaggatcatggaggccaccggcatgaagcgcctcttcccggaggctctccgccgcaacccagccatcaagacagaggacgaggaatattgcgacggcgaagaaggctacggcgccgctgacgatgccgccgcggcgtacctactgcaatgcaggaagggtttgcgagccgcacatacgtacatacgttgcatttttagcctttcggattcaatcctgtaataaaattgattgatactagtagtaccaagtgaaacttaatttacggtagtgaactagggatcttccaaaaagaaaaggtttaattggatccatacccctacaaatatatcatttaagat

SEQ ID NO: 56860 - DNA, 375 bp, Oryza sativa
  Clone ID: PAT_MRT4530_58729C.1
atggccgtcgtcgaccaccggggcgacaaggagaacgtgccgccgcagtcggccgctgctgccgccgcccgcctccacggcgccgtcgccgtcaagaagctcaagctgaagcggctcggcaaggagcgtaggcgggtaccgctccgggacatcaccaacctcttcctcgccgccaccgccgccgctgactctgcggaggctccgccgcggtggcagccgctggaggggtcgtcggagcgtccggaggcagaattcccgcccccaccggcgccggcgccggcgacggcgacggcgacggcgactgcgcagagctggctcgctggtggcgtggtgttgaagccggggagatgctctctccggaaggagtttagatag

SEQ ID NO: 56861 - DNA, 3405 bp, Oryza sativa
  Clone ID: PAT_MRT4530_5872C.1
cgggtttcggcagatttggtcgaagggcctcatgccatccgccaacacttaacaacccgagagaaaagtactgggatcttgatggctgtgtacggtccggcccaagatgattttaaatctagtttcttggcggagttcgttcgtacatgccaacaaaatcatctacctactcttatagggggggacttcaacatcctgagaagtagtgtggaaaaaaacaatgcccgttacaactctctttggccttttctcttcaatgctgtgatcgatagctttgacttacgagaaatcgctctttcgggtaggcaatttacatgggcaaattcgcttcccattcctacttatgagaaactagacagggtcctcacatcaacggaatgggaatccaagtaccccctggttttggttcatgctcttgacagaggggtgtcagaccacacgcctttgctccttgacacaggggaagcggccttcacgagaaacattaaacaatttaaattggaactgggttggtttctacgtgatgacttctatggtcgtgttctcaagatatggaacaaaccagtcaagggtcataatgcggtccaaagatggaataacaagatgagcgctttacgtcgccatcttagaggttgggctgctcataccagtggcgtctttaagcagaaaaaggcaaatttgcaaaacacaattgattctctagacatcgcagcagaggtacgactcctttcggatcaagaaagaattcttcttgatcaatcgagggattctttggcaagtctactccgtgaggaggagattaaatggtaccaacgctcgaaagtctcggacgtactcttacgagataacaacacaaaatatttgaacttgatagccaacggtaaacataggaagaagaggatctttttcctagaccaggatgaagggaaaattgagggggttgaggccttgaaaacttatattacgagtttttataggaaactttttggaccaccagaggagaactcgttttcgcttgatgagtccataattggtgatatggctcaagtttcacaagctgaaaatgattttcttactgctcctttttcggaagaagaagtgaaagaagccatctttgcgatggagcataataaagctcctggaccagatggtttcccagctgaattttaccaaaatttttgggacgttattaagcatgacctgatgaacctttttaatgaattccatactggtagcctcccaattttcggactaaattttggggtacttactctagttccaaaagtcaaagaagcaaatcaaatccaacaatacagacccatatgcttgttaaatgtcagctataaaatattcactaaggtggctacaaaccgaattagctcggttgctgaccatttagtgaacccgacccaaacagctttcatgcgtggacgaaacattttagatggagtcgtcatcatacatgaaacagttcatgaactacataggaagaagttgagtggggtgatattcaaaattgacttcgaaaaggcgtatgacaaggttaaatggccttttctgctacaaactctgcgtatgaaaggtttttcgcccaagtagaaatcttggattgaacctttcatttccgggggaagcgtggcagtcaaagtcaatgatgatgtcgggcctttttttcagactaaaaagggccttcggcaaggagaccctctctccccaatcctattcaactttatcgctgatatgctagccacattgataaacagagccaaaacacaagggcaaattgatggagtcacaccacatttgattgatgggggactctccattctacaatatgccgatgacacggtgctgtttatgaatcatgaccttgaaaaagctcagaacatgaagtcagtgcttctagctttcgagcagttgtcgggtcttaagatcaattttcataaaagtgaactgtattgttttggtgaagcacttgattatagtgatcaatacaaccagctctttggctgccaggtcggcaacttcccattccgttatctgggcattccaatccattataggaagttgagaaatgcagaatggaaagaagtggtcgagagatttgagaagaaattgagtagctggaaaggaaaacttctttcgttgggaggacggcttactttgattaactcagtacttagcagtctcccaatgtatatgatgtcatttcttgcaattcctagtggggtacttaaaaaacttgatcaccttcgatctaggttttattggcaaggggatggacataagaagaaataccgacttgctaagttggacattatttgtcgtcccaaagaacaaggggggctaggaattcatgacctcgagataaagaataaagcgttgattagtaagtggttatacaaactacttaccaccaatggaatatggcaataactgctacgcaataaatatttgagatcacaacctttatctcaagcctactggaaagcgggggattcacatttttgggctaatcttatgaaggtcaaacaggattttttccgttttggatccttcaagattagggacggctcccaagttaggttctgggaagacaaatggttgggtaatgcctcgttaagagaacagtattcttgtctctataacatagttaggcataaactgtcaactatcgtacagattttccaaaccaatcccccgtgcttttcatggcgacgggatttaattggtgcaaaactagctgcttggcataacctattgcctcgcatagctgatttggttctggacaaggagcaagatgagtttcactggaacctcaccccgaatggggacttctcggtcaaatctcattatctagctctaacacataccggggttctgaatatcaatagacggatttggaaggtgaaagtacccctaaaagttaaaatcttcctttggtatttacgtcggggcgtaattctcaccaaggacaaccttgctaagagaaattggaaaggcagcaagacatgttgtttctgtcacaaggatgaaactatccaacatttattctttcagtgccgcttatctcgcttggtgtggtctgtaattcatttggcttctaatctgaaacctccttgcactgttggtcatatgtttgggagttggctatcatgtgtcctcaaagaaatgaggaatctgcttttgatgggtgcaacagctctgtgttggtccatttggctaagtaggaatagagtaatttttgataacaagatggtgtcttctcctttgcatgttatcactttagttacccggtggctacgtacctgggctatcctccaccaaccgggactgcgggatactattatggtggtatctcgacgtttggaccaggtggctcaggagttttttacccaggagcat

SEQ ID NO: 56862 - DNA, 375 bp, Oryza sativa
  Clone ID: PAT_MRT4530_58730C.1
atgacaaagccacgcaatcgccatcacccgtatcccaaggcactcctgcgcaagaagaaggccggtaacaaggagggcgagatggaatggaactgcaagaactgcggccggatcaagatcaagtcggtgcgggagggcgacgtgcaatcgccatcacccggatcccaaggcgctcctgcgcaaaggctggatcaaggtcaagtcggtgagggagggcgacacgcacaatgccgcctgcaccgccaagaagaagagagccgaggcggaagctcaatgaaaggaggaggccgccagggcggcagcagcagaactcgcggcgggggcttcgaagagcgcgaggcgcaaggcagccaagtgagatggtcttcaaggtga

SEQ ID NO: 56863 - DNA, 522 bp, Oryza sativa
  Clone ID: PAT_MRT4530_58731C.1
atggggccattgtgctgtgttggcgttgaaaaaaggctaggccgagcttgtcgcattggtgttgtcgaggacgagaggacatcgtgctgcgttaccattgtggaatccaaggagcgtcgagcgagcgccgccgcggcgcctccccctgcttactgctgccctcgcttctgctcctcggtcccgcacctgcctccgccttcccagtccgcgtgctccatcgccgctgctcccgcagccccgcgtgaggcgtccttggcggagggcacgctgtgcatgtacataatcccggacgagacccgtgatggtgctggacatgccggaatcgtcgccggaggcctagcatccgggcagagcgaagaaggcaaggcggtgaatcttgacgctgctgctgcggtcaccgtgcgctgcacgctcatctccgcaaccaccgtcaccgccgcgttgccttgggccacgacgccatcgatccgcatccgcctcgcggtggtgcagatgggggaaggaatgcggtggcgcaaatag

SEQ ID NO: 56864 - DNA, 597 bp, Oryza sativa
  unsure (1)..(597): unsure at all n locations
  Clone ID: PAT_MRT4530_58732C.1
aagggccccccttgnntnagnaagttgnnttttttnacggggaacanaaaaaccccnggaaaagggggggcggnaanggacaatnggaancnccccaattttnggggnaangnaaccnacncaggggtttaagggttggnggggccnaaggagggaacccngggcattttttccggtntntttgggtttnanaaaagtnanggnggggnagtttntaaggttttnttgccaaaaancccccggggtgggaggngtttngtggcaaanaaacccnttttttttaaaaaaagcccngnttaantgtttatttttgnttnggggnantttcccncccngntttgggngttcccnnnttgtttnttnttttttgantttaccnnccnngntttgnttttgtttttgtttnacccgatttttttttgaantgaagtaagngngggatttnntangaatanangttgttggggggggnaaangngnangnaaaanatgggngntccngntatatatnaaaaaaaaaaaaaaaaaaaaaaaaaaaaaaaaaaaaaaaaaaaaaaaaaaaaaaaaaaaaaaaaaaaaaaaaaaaaaaaaaaaaaa

SEQ ID NO: 56865 - DNA, 1584 bp, Oryza sativa
  Clone ID: PAT_MRT4530_58733C.1
ttaaaaccccggcccatgaatttaattttggggcccccataaaaaaaatataacgttgcaagcaagcggaagtaaacttgggtcccctaaaacggccccccccatttatttttttttttttatttttttttatttattttttttttttttatttttttatttttttttttttttttttttttttttttttttttttttttttttttttttttttttttttatgagaacaaaacttataccatatttgacaaaaaaataattatttttcagagtacaactagacatgtagacacaccaaaaactattttaaattacaatatattagacgcacacaccttcgatacaccatttaaagttgttggcactattgtatgttctttttaaaagcctattgtacatgcagatcatttcttcatttgggagataaggaaggttgatgagcatataggccatgtaacatgtgatgggccacaaatttgtaagcggcttcagtaagatgcactccatcccacgagatgtatgtcgatgggttagtgcaaagatttgttgacgggccaccgcaactgaacaatgagttggagttgtagggcccaccatccccacagcatgcaaccaagacagtctccttcttgaacccatggacagcagggtgatgggtgatttctaaagcggtgttgtagtaatcaccatagagtacggtaactgttggatcacgacggatctggtgcaacatgcgttttagtgcacggttgtgataccccgagaagtcattcaaccactttatgcatccgaaggcatcatagtcttgcggacttgacttactttggaacatagtaagataacttggaacacaccctataggaaaatttccaggaaccacaatcgtcttggctcctagatcaatcaggaccttgatggcattttcaatcttggctatgacttttggcaccaatggatagatctcattggtaaatgatcggttctgggagaaggggtgattatagtcattgcctccaacctcacccattagaaatagggatttagacataatttctttgcgttcttggtctgtagagccaagagaattaagcacgctcttgaaccactcgagctgcacgtccagcgagaatggaggtatgatggtgaggttgagccccatctgcttgaagaagtcctggctcagcgccgtcgctccggccaccgcgaagttggccccctgccggaagtcctccggcgacttcgcccggaggaacggcgtcaggaacggcagccccagatcatccgctaggaagtcgacgatgagcctgccgtcgcagaagcggccggtggggtggccgaagaaggtctcgccgtaggggagcctgttgaaggaggcgtcgggagggctgatggtcgcgaggttgccggcgtcggtgatggagtcgccgaagctgaacatgcgcttgaagccgccgcagccgccattgctgccggcgacgtcggcggtggcggaattcgtgcagaggagaagaaagagcaggagcatcgtcgttgtcatcggcgacgagagggagaaaggcctgaaagaagccatcatgtggtatc

SEQ ID NO: 56866 - DNA, 261 bp, Oryza sativa
  Clone ID: PAT_MRT4530_58734C.1
atgccaccggaggaggacacgaggccggaggtcgctcagagcggcggcgagggatggccagaggcggtaaagatggttgcggctcgggttggcagtggaggtggaattccaacgatggaatggggaaacggagtggagaacgagcttgcccgcaaggcggcgaagccggcagtggaggcggcacagcacagcggcggcgggagcggcggtggcccgtggctggaggcgacgagaggctgttgtggctcgggtgcacggtga

SEQ ID NO: 56867 - DNA, 885 bp, Oryza sativa
  Clone ID: PAT_MRT4530_58735C.1
atggagcggggcgggccctgcgacggcctctgtcgcttccggattcacctaggcacgagaggggactgcccgttacctgctggggacgggggccggcgcgaaggcggtggggtgtggagggccggccggcgcgggggcggcgcggagtgcggtgaggcggcgggagccatggctagtgaagacatgatcgaagatcctggagacacctgcatccgggtcctcaaaaggatgcaggctgatctagtgatactagtagcctcaagaaaggcagagaaagcgccaaacgggaaggaagagagccacaccgagcaaaaggtatgccggtgccaaccagcacacaccctaggtccacccctgaaaaggcacattaggagcaagtcgggacggagggtgagctcccagctacagccgaaggagaaggaagcagtacgttccccctgcgacgtcatcctccagtgcacgacggtgggatattccgctgcggacaaggccgctcctaggagacccacaacatcgctgctcgccctggcaacggcggcgtcgtcgccgtcctcagcggaagtgacaacctcgactgtcccagcgacttccggaggaagcggcgtggtacgcaaaagagacagcacggtgggaacgacgcaaggcggggaggcagcacgattttcgggagaagcagtttttcgctctctgacggcgacacaatttcagaaggcggagcattgcgcggaggcgtgggggcggcacggcagttgcgcgggccacgtccactcgcggcaaaagcgtggctccaactcctggcaacgtcgtgtgcagtggataaggatccacgtccctggttggatgagaagatgggtcaagccaaattggtggctcttgggcctgtag

SEQ ID NO: 56868 - DNA, 1266 bp, Oryza sativa
  Clone ID: PAT_MRT4530_58736C.1
atggcgccgctgtacacggcggcggcgctggggtacgggtcggtgcggtggctgaaggcgttctccaacgagcagtgcgccgggatcaaccacttcgtggcgctctacgccgtgccggtgctcatcttcgacatggtgtccaccaacaacgtgtacaagatgaacggccgcctcatcgccgccgacacgctgcagaaggccgtgctgctgctgggcctcatggcgtgggcgctctgggagcggtcgcgcgcgcgcggcgccggggccaaggccaaggcggcggtgtcgtcgccgctgcagtgggtcatcacctgcttctccgtcgcgtcgctgcccaacaccatcatcatgggcgtcccgctcctcaacggcatgtacgggcccgtgtccaaggacctcatgaagcagatcgtcgtcatgcagttctgcatctggtacaacgtcatcatcttcctctacgagtacatggcggcgcgtagatcggcctcggcgccgccgccggcgtcgtcggagggcagcgccaagatcagcccttcgtcgccggtgaaagctgctgcggcggcggcggacacaaacggcaatgctgtcgcggccgaccggccgcaagaagtggcggtgaacatcgaaatcacggagatggcggcgtccacggcacgagacggcgtgtccggcgagacgacggcggccgccaaggaggtgagctctggtgaagttgctccggtggaagaggaggaggcgtctgcgccagcgccgtcgatgaagcacgtcatctggatggcggtgaagaagctgctacagattccgaatacctatgcaagcttccttggcctcatctggtctctaatcgcattcaagtgtggattctcgatgccaaaaatcgtcgaggactctctgttcaccattcgtaccaccgctgtaggcctaagcatgttttcttcagggacgttcatagcgcggcagtcgcggttcgtgccgtgcggatacaagatagcgtcgttctccatggtcatcaagtttctgataggcccggttgtgatgctgttcgcctcgctcgtcatcggcatgcacggcacacttctgcacatcgctgttgtgcaggcggctctccccctggcagtgacatcatttgtgtacgctgaagagtacaagggttattcttgggatatttatatcacttcctgtgacaattgtttactatattctgttggggctgaagacagaatacaaacagtaaaaatactgaaggatgacaacaaggtgaattga

SEQ ID NO: 56869 - DNA, 666 bp, Oryza sativa
  Clone ID: PAT_MRT4530_58737C.1
atgcccctgcccccgctccccgcattgtccaccgggtggaaaacctcacctgcccccgcccccgcccttaccctcgccccagtaggggacccgacgggtaagcggggccccgtaccacccacatgggtagcaactctagggcacctactgcggcggctagaggcggtgcaccacaacaaggtgatgattgagggcagcgacaaggtgtctacaaccgaggatgatggcgacgtggtggcaccggctaggagctgcgatgaagaggtggtgtcgactatgggtagcgtgttgcgaggaggcaacaccagccgagggtggagttcaagttatggatcttggtgtcacttgaattctagtgatggacttagaaatgttggattcaagaccgaggacttcctcctagggcttttcacgcaatattcacctcagatgcacagaaatgtgaagacactgttgaaagccttccgaaagactgctccgccgaaggacctgacattcactctcgaaaaattattttacaaatctatttatatatttaagaactcaggatatgggtgtggcatgcgggtgtactgggactctaggaggcatggatgcaagccaacttgtactctgggtctctttagaactccagacaaactttactctgtcacatcgaatgtttga

SEQ ID NO: 56870 - DNA, 216 bp, Oryza sativa
  Clone ID: PAT_MRT4530_58738C.1
atgcagtctccccagcctccgcacggaaatcgtacggagcccgtgcagcttgcaaaagttgcgcggagaaggctcagtgaccgtgcagcaaccaggccgcggtgccccgcggagcccgtgaatccgtacgaaaatatcacggccgcctcctacctccgtacggtggccgcacggaaaagggcatacgggcaggctctagatgtgacggacacctga

SEQ ID NO: 56871 - DNA, 5175 bp, Oryza sativa
  Clone ID: PAT_MRT4530_58739C.1
atggccttctcccccagccccgacacccacccgcggcggcgcccggcgccgcgctcctcccacccagtagatcctccactccatatctcttccccagttcttgaatgcttccccaccagccactcctcgccaggtcttttcccaaccattcaaagctcctcctgtccgttagaggagggagagctcattgaagaaagctgcttagatcctatcccctctgaagatagagaagagatcctccatggatctgacatccaaccaccagccctttctttgggcacagctcgagtagctcggcgcctaccgattgcaagtcgtcttaatccctcaatccttggccgacctcctccgacttcaagagttctgagcagcagtaaggttgttgatttgacaaggcgcaataaccatgccttccattcccaaagcagcgttccttcccaggcacagcaagagcattcatggcaggaagtcaagcaaaagttctggtggaggaagaaatccccattcaattcctccaacaaccaagagattatggctgcaaggaagctgagatttctcaaacacacagaagatgagggccagaaggtggaaatcggcacctttgccgatgacatccgctcggctttctacatccatcgttccgacattcagatcacaaaattccatccagaagatttcttcctcactttcgttaatcatagcgatcgtgaggaggttctgcaagaaccaagattggtgacccgaagcggaagagtgtatcatttcaatccttggaatgaaaggcgaaatgctgaagttgttgacattcgctaccacgcccgagtctgcattgaaggtatcccgatgcatgcaagatcagaagacatggcggcaaagctcataggctgcaaaagctcagtgcactacatagaagaatactcccgtcgccggaacttcaaccgtacttttgatctttggatttggagcttagacttgagcaccatcccaaaggccacccagttcacaatcacaaggccagatagagaagcaagggctactgagatcccttttcctgacctggagccatcccagccggctccaactgatacaaagaaaggcctcacttatccggtcatcattcacatagacactgtccaggacctcttctctcgacagggtcgggtcttcatgtggcactatggagtgcctgatgatgtcacccggatgaggtcgatggctcacccaattcaagcctgcagaacccttccggcgccggagagaaggtctgatgatgaagacgaccacgagcagcgttcaagaaggaggcatagaagtcgctctctttggaaccgcttaggcggtcgttcgtcaagcaaaagcagagagcctggtcttgacaaccggagttcatacaatcaagagacaaggggaagacagagagaacgagctgctgacatcaatagaagtagaagccgacatctgtccaggtcggtcaaacctggagaaacaagaatcaggcgtcaatcggcgacacctccgcatctctctgaccctgctccagcagacaaggtttcctccccctgcaaacctttcagccattcaagagatagcagccctgaaaatgggcattgctctgcagttgcttctcctcctctcgaacctctctcacctgacatattgcctgtgtcacaggagcaaggggcgttgctcatgcttaaaaggcacctagatcctatgctgcatgaggctatggtgggaggttcaatttattcccctgacactactctgccacgccctgcttcccctgtttttgttctttcatctgctgcagaaccacaagagaacttagtggatgaggcccagcatgatgtggagacattcctagcagaggtgaccacgcccattcagcagccactgctgtctgcgccaggaacaaagctgcgtcgaccctgccgcaataaggtgaccactcctattcaaaggcatagtgcaagattggcactgaaagtcagacgcagtacaaagcttgaattaattgcacaagaaattcttgcaaagcaatttggtgttcttgatgataacaagcttttaagtgatcaaattaagaaactctatttgcagcattacaagaagccgctctccccagcagacatgaagacaatcacgaccctggtggaaaacggaggctgcaaaggagttcgtctgcgcgctaagaaggcggcctctatgctagactgtttcattctaaactggaatgttagaggcttgaacaaccaagctagaaaaggaagtgttaagcttttggtagaacaaatgaatgcaacaatagtctgtcttcaggagacaaagatgaatgaaatcactgatgttgatgttctacacattttgggtaatcgtttcagaaatgattttgcctatctccctgctgatggcactagagggggtattctgcttgcctgcaatgacaattttttcagcctctccaatgttgttcagaagcagtttagcctcacagcaacagtaaccatgaaaaacgataatgctagatggtccttaactgtagtttatgggccacaacaagatgctcagaaaattgaattccttgctgaactccaggaagttgaacagatggtttcccttccttggcttttaattggagatttcaacctaatctacaaaacctcagataagaacaatagtaggctaaacaggggaatgatgcagcgtttcaaaggtactctggacaggttggggataaaagaacttcacctttcagggagaaaattcacttggacacaggagtgtgctaacccaacccaaacaaaaattgatcgtgctttctgttgtcctgattgggatgtcctctttgactctgcgcacatgtctgcactctcttcgtcctgctctaaccatgcccctttattcataactggctgtatggaaagagaacaaaataattccttccgctttgaatcttattggctcaagctcccagatttccggcaagtaactgcagagtcctggaataggccactacagactaccaatcctttcgtgcgactccatttaaaattaaaaaggcttgcaagagatcttagaagatggaaatcaaccagaataggagatataagattgcaattggcaattgcaaatgaagtagtctttcaactggatgttgctcaagaggatagagtattatcggaggaagaacagtgcctccggaaactcttaaaatcaagggtgcttggactggcagctttagagagaatacgactaaggcaaagagccaggatcacttggttaaagcatggagacgttaactctaaattcttccaaatcaaagcaaatggtagaaagagaaaaaatcacatacagatccttcaaactccagatggctttgctgtaactaaagatcaaaaggaggaagaattgaagcgttacttcacacaaaaattaggagcctttgctctcagaaatcagagattaaacttggctgctctcaatctccctacgcttgatctctcagatctcgatgataacttcactgaagaagaactcaaaaatacaatctctgacttgcctttggaaaaatctcctggaccagatggatttattggagcctttttcaaacaagcatgggacataataaaaacagatctcattcaagctatttccttctttggagatatgggatgtgcaagactgcaagaactcaattcggcacatatctgcctcatccctaaaaaggcggatgcaacaaaagcggaggatttccggccaataagtctaatgcatagttttgcaaaaatagtagctaaattactagcaaacagacttacaccaaaattagatgagctagtttctcaaagtcaaagtgcattcattaggaaaagagcaatgcatgacaatgtcctgtttgtgcagaacatgatcaaatcgtttcacaggaaaaaaaagcctactcttttcctcaaagttgacatatcgaaggctttcgacacagttaattgggcatacttgctagaggtccttcaaatctttggctttggacataaatggtgcaactggatttccaacctactgggtactttctcttctgcggttcttcttaatggtatcccagatgccagtggacttcacacaaacatggaaaaaacagagatcttcccgataagctgtaacggagtcaacctagatgactgcctttccatcttcccagccgtctgcaagcccaaacctttgggcgggcttggaattctcaatttagagaaattcgctcgggctttaagacttcgatggctctggtacgaatggaaagaggaaaataaaccctggatcaatatggaaattccatgtgatgagatggacagaaatctcttcagagcaagtacacaaatttccctaggaaacggaaagaaatgcaagttttggtcagacaattggctgcaaggatacgctcctaaagacatagcgccgacattattcaaattagcaaagaggaaaacaaactgcgtagcctttgagctgcacaacaatcactggatcacttccctaagaacaatcacttcaataaatgagatcaatgagctggtgcacctaggcagtaagctgcatgagatcagattacaccccaattctttggatagtatcacgtggaagtggactaatcatggtgaatactctgcaaaaagcgcttatgaaatgcagtttgtaggatcagttgccaacacaaattttatgccactttggagagctgaagcggaacctaagcatcggttctttggctggttaattttacatcaaagaactctcacagctgaaaacctccttttaagacattggccatgcgattggatttgcagcttatgtacagatgcttttgaggacgcaaaccatttggcaaaggagtgcagtttcactaacacggtttggtcccaagtttgtagctggctggacatcatgcagaccccaaatcaactacaggatgcaaacattttagaatggtggacctcaatcatacattcaacttatggaaggagaagaagaaaactgataggggcactttttataacttggtggcaggtgtggcttgagcgcaatcgaagaattttccatcaaaagcaactaagtgccacccaagtagctttcttagtaaaggaaaatatagatgccattcagattttgcgccatacataa

SEQ ID NO: 56872 - DNA, 188 bp, Oryza sativa
  Clone ID: PAT_MRT4530_5873C.1
ggaggaagtatgttcttgctgagagattcctatgctctaaccttacctacacctgccatctcaaaaatttggtagcctttcacacggataaaacgagatggataaaaagattgctctataaaataagagcgggtacaataatgaacggtattagtttcacgtaggattttgtgatgaaattggaggag

SEQ ID NO: 56873 - DNA, 535 bp, Oryza sativa
  Clone ID: PAT_MRT4530_58740C.1
ggcacgaggattatactagactgtatttgctgcagagatagatgcaaagaatttgctctgcaaaatgcagaggattcaccaatttttagaacatgatgcctttttttttagagaaaaggctctgagagcccgctttactcaaagcttaaaagagatttgatacagctgctgggaacaccagcttaacaaaagagtgctaaaacacccgacaaacacagggtatctaaaacagaaaaaactgccctaagacatcccaggtttaacacttgaacagacatagcctgtgccaggaaaacagaaacagcgtaatcatcaacccatgctttcagtctttggtttcttcattgccttcatccagctgcttctcctgcgtggatttgtcgaattttggcatcgagcaagcccctaccccctggcttcttccagttgatccttccatcttctcgggtaccaatggtctccactgtttcaaaaacgacaacatcttagtgtttagaactattattatcattaatggttactagatgtgatatgt

SEQ ID NO: 56874 - DNA, 407 bp, Oryza sativa
  Clone ID: PAT_MRT4530_58741C.1
cgggggggggggaattaacaattcacatggctcagttacatatgatagttcgctacagtttacaaaagctcatgcttcagtccaggccacagtacaagtaacgctcgcattcatatatactttgtcaaaaatcataacagaggggaatccatgggagtatgggacagcccggcataaactttttactcatgtccaattagtaacacgccgggctcctcagcttgctatttttaggagcttgctcgaccacgggccagggctgccacaacataacaatttggacatttccagttcctacgagaagaaaatccaacaatttgaattctcactgaacttttatcttcaacaaatactttttttgttgaaggattccattgtcaggttagctgggaaggccgggataaaat

SEQ ID NO: 56875 - DNA, 439 bp, Oryza sativa
  Clone ID: PAT_MRT4530_58742C.1
atcagatgttaaaacacatgattttgtgtgacaaactcaacaccttaggttacatgaaatttactctagatacaatggctatcaatttatcaaagtaaccaatcagacaatgtgatagaacatacagaaactcccagctggaggaagatttgcacatcccaacaaatgaaatcaacgaaatgtagacaggtacaggaagctattagcaacactacttgtctaacctagttggatagtataacggagcaatcacgtgcaatcgcataggatgatacaaactacagaggatcgatgtgatctcaaacgcaaaattttgagatcaacccaaagctcaatcagcacatttacaggcacgctctgacaccacaatgttaaactgctagatgactgctctatggagaggcagatcagaggagggataatcgactccagtcaactt

SEQ ID NO: 56876 - DNA, 1023 bp, Oryza sativa
  Clone ID: PAT_MRT4530_58743C.1
atggctgaactgtttgacggtgggaattatgaagctgtggtgtccgaattgaaagtccacaacgagctgcagaaggacaaagctgcagccatggacacctacttgggcaggcatgacaagaagaaggatgatgagatggcacgcacgcgggaggtgaccgagcgcatcatggcattgagtagagagtgctgggtcacagaggagaccccaaagctgtgggttggtatgttgaagatgctgaaggatcgagatgcagtcaatgtctttgagctgtccaatcctgaaggaagaaagtccctccttgaacaccttgcacgggaggacgtgcggcctgaacctgcggatacaggggatgaagatttcgagaaagagttggatagagttatgatggagtactttatggacgattttgcggacaccgtgttcctgtacgaaaagaagcttgcagacaggaagcggtgttacaacatgtttagaatgacccctgatatgttctatagtcttcatgatctgttggttgacaaatatgagttgaagtctagcaataaatccaaaagtattgaggctttaggattgtttctttggatggctggggctccacagtcagttaggcaagctgaggacagatttgagcgctcactaggaacagtgcacaacatgtttcacaaagttctggcaagccttttgaagctagttgctgacataattaaaccacgtgacccgcagttcacaactttacattccagactgaggaaccctaggttctatccttatttcaacgactgcattggggcaatagatggaacccacattcctgttcaggtgtttgctgctgcatggaagtactatctggtggactcggggtacccaaaccggattggttacctggcgccctacaaggggaccaagtaccatcttcaagagtttcaaaacgccgcagaaccagaatgtaaacaagaggcaagcagattggtggagacaccttggcgcgatttggcggacacacctccaggggagcagtga

SEQ ID NO: 56877 - DNA, 386 bp, Oryza sativa
  Clone ID: PAT_MRT4530_58744C.1
tctcgtgacggagcaggaggacgtgcagaaggtttggtttgtgcggatgctggacgaacggcagcgggatctcttagcaaaggtgtcagcgtactgcgcggcccgaggttgacgagcatatgcgtgcgcgcatctaatctatcaattaattgccgatgatgtcgatcagaaggatggatgcatgcatatgccggacatagtacattcgatgatagcaactgacataaatataatgtatgcttgcgatcaacgctggttgctggatcgaccgcattgtgtatgggtggcgtgcggcttatgcacgtttgcaacgcaccgccaagagctgccttctacactgggtgaactacctgcatccaaggcttaaacgagggaagatgatcccc

SEQ ID NO: 56878 - DNA, 2358 bp, Oryza sativa
  Clone ID: PAT_MRT4530_58745C.1
atggaggccactgcgacggcggcgcagggactacgggactggtcgtctctcccgttggacatgctcgtgctcgtcctggatcggctcgggtggtcgacccacccgagcttcgcattgacgtgccggcactggcgctccgccgtgtcgcccttctacccggcgtggatcacgcctctcctcctgagcgccgccgacatcggcgtcacgaacgtcaggtactacagcccctactaccacaggtgtttcgagatcgccgacacgctcctcaaggtgcccaaaattgcggctaggatctgctgctccagtggacaacacctcacgctgtgtctacctagattgatcctccaagccgatctcgtagccggcaccatgtatgagctgccagagatgcctttctattcattcgagtttattgtctacgatgagcacgcgcggaggatgtattgcgtcaacacgacgtacgcgctacagctcgcccgtgcgacccaacaagacgacggcgagtgggggccctgggaattaacggactttgacgtggaaggaccgcaacttctggcggcgccgatcagcaacccggtgctccatggtggtttgttgtatgttcttggtgaagacgggaagatggcggtgtatgatccatgcaaccacgacaataattttacagttcccgataaacctaagggctttggaatcaaacaccaagttgatagccacctgtttgagtccgaccaaggcgcgctcatggctgtcctcgtcggctacagtggtgcgcctatccatgtcgtcaagctcaacgaagagacgatggagtgggagaagatgcggtcattggaaggacatgcgttgttcaccgggacatacacgacaatgttgaggaagactaagcttagattgatgcaaaacaaggtgttcctcccgaggctgtatgactggcctgagactatccatgtcgacattgttacacgtgatggcgaaacagcatttgtaccaaagtcatccagttcgtctaacaccaaggagatcacctcggacataaatatttggttctacgagtttgggcagcaagacgcaagagagttttggggatcggagagagtagattatagtatttgggttgattttagtactaattgatgttgcttgagtggatgaaaaaagacagcgcagacagaagggcgacagtcacaaaattggagtcactccctgcaacgccattagacaagcacaacgtcgggaagggaaaaaactgatggagaaagcaaagttttgctgcacgaagctttgttcaggaaacgggggaaacaagagctctgctgctgcttcttcttcattctttttcttcttccatttgtgtctgtcccctctcgtcttcttcttgtgtcctctctctccgtcctccaccgcctcctccgcctcctcgcctcccgcggcgtcttctccgagcacacctcctcctccccgcgccgcttctcgctcaccaccgtcagccgcaccctcgtcccggccggcgggggctcctccgccgcgtcctacgccgactacgtgctgcagcaccaccaggacgagctcgtccgcgcctggtccctcctccacgaggccgtcctcgaccccgccggctccgagcccttcgcccgcgccaacgccggcgccctcacctgcgagccggtggtgccggacacgacggacggcaccatgttgttttgggcattcatagcattagagtaatggaaaggtgtagcagtttacgattgctagcatgcagttagcagtgtgcccactaccaccaacgttttggtacatgatggaagggggaatcaacaatcactgcccaaacatatgtggggagtatattcattcatataacaattatttcttaatagctacggtcacaaacattaacactgttgtttgaaacgttcgccgctgctggacaacattaatcctctttcttatcttctgctgtggtagtagtagtactagcgctttggggttcaactagaggttttgattcacttgcaccttcattgttctttgccgcaggcttaaacgggcaagcaggcggggctctttcaggcctcctgtattcccatccaaatagccgataaatcttgctgaggatgaggtggaagagcaaggggagggcgttgacgacggggatcaagaagaggggaagcaagcacgcgaggcaaaccatgtcgccggatcgagtcgccttcgtgggatggctggctgctcgccttgcccttgacttggaagctggaactaggagaactcttcttctgaatcgcgaatccaggccgggcggctgctctgctcccagtcgcctacagactgacattctctccgaggccgtcgtgc

SEQ ID NO: 56879 - DNA, 2565 bp, Oryza sativa
  Clone ID: PAT_MRT4530_58746C.1
atggctgaggtgcatctatcgagttttgcaatctccgttcttggaaaagcggccttttgtgctgccagcgagattaaatcagcgtggaatttcaagaaagaagtgaggaagttggaaagatctctgaagtccatctgtggtgttcttaaagatgcagagcgcaagcagtctacttcttgtgctcttaaagtgtggctggaagatttaaaggatgtcgtctacgacattgatgatgttctggatgatgtggccaccaaagatttggagcaaaaggttcataatggtttctatgctggggtcagtcggcagcttgtttacccattcgaattgagccataagataacagtagttcgtcaaaagcttgatgagatagcagctaacagaagggagtttgcattaacagaggagatcatagatacgcaatttttcagtagcaataccagggaaacacattccttcatcaatgagttagacattgttggtagagacgaagcgaaaaacaagattgttgaaatcatactgagtgctgcggatgcatatgctttttctgtgcttcctattgttggtttaggaggcatagggaaaactgcactggccaaactagtgtacaatgatatgaggataaagaaaatgtttgagaagaacttatgggcttgcgtatctaatgtatttgatctaaagaagatactggatgacataatccagtcagatacaggtgaaagcaacaaacaactgagcctgcaaacgctacaaaacaagcttcgtgggtttttacaggaaaacaaatatttactagttctcgatgacatatggagtgataatgttaatgactgggaacaacttaaaaacctcctatctagtggtggaagaggaagtgttgttgtagttaccacacgtaatatgaatgttgcgtcggtggtgaagacgttggagccatactatgtgccagagctttcatttgatgaatgtatgcaggtatttattcgctatgcattcagagatgaggaaaaaaaggacacactcttgttagaaattggcaaatgtattgtggagaaatgccacggtgttcccttggcagctaagacattggggtctgtactgtttggtaaacaggatgttaaggagtggttgcgtattaaggatgcaaatctgtggaatattgagcaaaataaatgcgatatattgccagccttaaaattgagttatgatgcacttccacctcatcttaaggcatgcttctcttgcctatctgtttttccaaaagactacgtgattttgagagagcttttaattatgttctggatggcactagggttattgcataaaaccagagaaggagatgaaatagaaactattggaggacaatactttaatgaactggatcaaagatctcttttccaagaccattatgttatttataatggctcaattcaaagttgtaaaatgcatgatcttgttcataatcttgcgatgtttgtgtgccataaggagcatgctattgttaattgtgaaagtaaagatttatctgaaaaggttaggcaccttgtgtgggatcgcaaggacttctcaacagagattgaatttcctaagcacctgagaaaggcaaacaaggcaaggacatttgcaagcattgataacaatgggaccatgactaaagcttttcttgacaacttcttgtcaacctttacactcctgcgtgttcttattttttctgacgttgattttgatgagctaccgagttcaattggaaatcttaagcacttaaggtacctggatctacaatggaatgggaaaattaagttcttaccgaattccctatgtaagttggtgaacttgcaaacactgcaacttagtcggtgcgaccaattagagaagatgccaaaggacgtgcatagacttataagccttagattcttgtgcctcacactgaagaataagtatttatcagaacatgatggattttgtagtttgacttcactgacatttctgttcttaaattcatgtgctgagttatcatcattgacaaatggatttggtagtctaacttccctccgaaagctctacatcttcaactgtccaaagttggctactctaccctcgaccatgaatcaactctccacacttcaaacattatcgattaataattgccatgagctggatttgttggaaccttcagaagccatgggtggcctggcttgccttgatgtgctccagcttgttgggcttccgaagctagtctgttttccagggagctttatttctgctgctacctctcttcaatattttggtattggaaattgcaatggattaatgaaactgccagatttcattcaaagtttcacttctctcaagaaaattgtgatcaatggctgtcctgagttgagcagaagatgtgctgttaaatcaggggaagacttccatctcatttcccatgttccccaaataacaattgacaagaaaacatatcggaaaattactccatcacatccagaatgttcttcaaaatgtgtgattagtcaccgaaggaaaagtctatctgtgactgtcaagctatattcctgctag

SEQ ID NO: 56880 - DNA, 168 bp, Oryza sativa
  Clone ID: PAT_MRT4530_58747C.1
ttaaccagggtgtcccggtgtccacaggaagagagccccctctgtgagaccctctgagaggccccctcagacccctcgctcctgtgagaagagaggtgaagagacggagaggtttcgcagagagagggccccagaggtgttgagaagagaaggggatattgacagtcc

SEQ ID NO: 56881 - DNA, 1299 bp, Oryza sativa
  Clone ID: PAT_MRT4530_58748C.1
atggtgtctagattactgggtatcattatttggggttatatgctatggaagagaggtgggccgctgatggtgacagctcagtacgggggtgacttctcgaagtaccaggagggcatcggaaagagggcaaagcatgacaatgaggtggagacatcgaaaggcaaggagaagcggcgtgagggcgtcggccatggcgccgcggcgcgaaggctgccggtgtcggcgacgccgctcggcacggcgcacgcccgcaagagaaagaaggagggggcgccgcggcacaaccgctcgacggcagcgcactcaccctcgagtggctactccttgatgggttacattaaagatattccgaccctgaaaggagataactacgaagaatggaaaagagaactcgaccttgcttttatcttgggagaggtggactgggtgttgactaccccatgtcctatagaacctgctgaaattttcagaggtgaaaaagagtcagatgctgaatggcaaaagagagagagggacaatgcttccctcatcatgtcgtatgacattgagcatacgaaatggtccttagccaacaagaattgtttggctgcggtaaagaacacgattgagccaaccatattgggctcaatcccagagtatgacactgtctctaagtacctcgaaagtataaagagccagtttagtggttcttcaaagttttatgcgacacagctgataaagcagcttgttacagagaggtaccatggaggtggtgtaaaagaccacattcttaggatgagcaacatggcttccaaattgaagcaaaaagatttgggcatctcagatgactttctggtccatctggttttgtcctcattgccaaagaactttgacaaccttgttgtcaactacaaaataagtacagagaattggaatattgaagagctcatctctaattgtgtgcaagaggaggaaagacacaaagagaccaatggtgactccattaaccttgtcaaagataacaaggaaaagagccacagcaccgtcgccgtcacgaccgccatcgccgccgccgcccacgtcaagcagagcgacgacaacgacgatggctgggacttcctcttcatccaacgcgttaaccggtccaacttgcaaggcacctcgtggcatggaggggcggagtgcccgccagatcggtcgcaaagaccgatccaatctgctgtggcgccgggaaaagaagccgatggcggcgggccgacggaggggtcggccaagcgggacctgaaagcaaccgaggagatctacgaggcagcagcttag

SEQ ID NO: 56882 - DNA, 337 bp, Oryza sativa
  Clone ID: PAT_MRT4530_58749C.1
tctaaaccgctctagcaactgaaagtctgaaacggtcgtctcctcgagtctgaactctcgagtctcaaccctcgtcgtcgtcgtctgcacccaatctctcccatttccatttccatatacatttcctcccaaaaaaacacacaagacgaaaaaaggagaaaaatcgcaactttaccattcggtccaaactggcgacatccctttctccctcccttgtgcagcatcaaactcgttcaaaggttagccttttgggggttcctctcgtttgactgacccggcgtgtagtgcagacgtgaagtcgtaggtgtctggtccagcatcctcgctcttcttggct

SEQ ID NO: 56883 - DNA, 144 bp, Oryza sativa
  Clone ID: PAT_MRT4530_5874C.1
atgtcgctgagctcgacgcggaggtacaagaacgagtcaccggtggaggggatctcgtgcatgctggcctccgccgcctccgacgagcggctcccgaggcggtcaaccagccgtggcacggtggccgtgagcgcgccgtcatag

SEQ ID NO: 56884 - DNA, 822 bp, Oryza sativa
  Clone ID: PAT_MRT4530_58750C.1
atggcgcctttcaagaccatcctcctcgtcgtcttcttcgcgctcttcgccgtctcctcgctgcagccgtcggcagccgtcagggacgcccaggtgttcaagccaaccgtcgcaaatgccgacgtgacccagccatcagcttcgctggttggattgccaggtctgcccccattgcaaccactcccgacgatccaaatcccaggtctcccaccgttgccccaacttccaacgatccaaatcccaagccttccacaactgcctccacttccaacaatccaaatcccagggcttccgacattgccacaacttccgacaatcccagggcttccacaactgccgacacttccgacgatccaaatcccggagctaccaccattgccaccattgccgtcagtctccatcacaccgggatcaccaggtgcaccagcacgaatccccattagctcccagagcgcactggctgcagcgcctatcgcaccacagcagccaacggagtgcttgtcgtcgttgatggcgctgatgccgtgcatggagtacgtcaccaaggccgatgtgccggctcccccaagcgtctgctgcgacggattcaagtcgctcgtggagaaggcgcccatctgcctctgccacggcatcaacggcaacatcagcaagctcatgccggcgccgatcgatctcacgcgcattatgtctcttccggccacctgcggcgttgccccgcctgttgaggctctcaccaagtgcttcacgggaccagtgccgccgttgatgcctgcttctactcctgctgctgctccatctccatctcccgaaccatcaacgtaa

SEQ ID NO: 56885 - DNA, 354 bp, Oryza sativa
  Clone ID: PAT_MRT4530_58751C.1
atggtcgccgacgtgctctcgccgcccggagggccgctgcagaggcctcgagaaaaaggtgaagttcgtgacgccggcgtcggcgcttgtgcgagcctgctaggcggcggacgcggacgggacgacagtgccgtgggagaaggagcaggggtctctggtctccgcggcgggcggcgggaggtggtcggagaagccggagctgagcaaggcggcgcagttgttgggaggcagcggcgcagtactcgggaggcagcggcgccgtgtcagcgttggcgtcgtccacggcagggccttggtactggagcagtagaggagcatgtaccagagccgacggatggtttgttggatcattga

SEQ ID NO: 56886 - DNA, 386 bp, Oryza sativa
  Clone ID: PAT_MRT4530_58752C.1
cttccctacaaatccacaatgaccacaagcaaggagaggtattgatacaagcttgcctgctgatgcataaccacaaaaccagacagattttggagttttgaccctcggagcttatgagaaatcataatgctcatggcatcagaaatacaaacgcaaagatttcggtacatactgcagtgcataacttcgttcaaatcgattaaattcacttctattacatgcatttgacgctaaataagaaaaaaaagacctagcatggtacacaagcgtcgaatctacattgcaaaggtatatattagacacgatacaccttcgatcatatcatatgtaacaacactggcccgatcgccatcttgttgctacattaccaccaccatcaccaccta

SEQ ID NO: 56887 - DNA, 249 bp, Oryza sativa
  Clone ID: PAT_MRT4530_58753C.1
tagtcgttggtcgaggcgaggaggaggaggaggaagaaggagtttgcgagttggggccactaggacgcgcatgatcgaacaggaagcccgaacgcaatgagcgtgcgcgaggcgccatccgagccaccacagcgacccccccctagactcgtggctggacttgcgacgaccggcaagcgtggcgacggcttctacccacatctaccaaggtttccagcacgtcggagaaacctgaccacgcgacgggtc

SEQ ID NO: 56888 - DNA, 182 bp, Oryza sativa
  unsure (1)..(182): unsure at all n locations
  Clone ID: PAT_MRT4530_58754C.1
gttttgtntggggttgaattaattattgacctggggccacacacaacgccacttttgttggggtgggaaaccttttgaaggtgtgactccgccacanaacttgaggattanatgtgcccaattcaccatttttatttatacaaccagaaattcaattgaattaaaaaaaaaaaaaaaaaaaa

SEQ ID NO: 56889 - DNA, 377 bp, Oryza sativa
  Clone ID: PAT_MRT4530_58755C.1
tcacccatttggaaatcgttggcaccaccacgctgcagatacttcctctggctagtggtgctacgttgatgctacaggctgatcaatcgagggctacctcatccaggtcattgtgtactttgcgatcaacacgaggaaaccgttgaccacatcttggtggactgccttgaatcgaggcagctatggtagataatctcgacgcactcgggcacacaagctacttgccattgaacgttgtatctttccacgcttggttatgcgacagtcggaagatggtaccaaagggacagcaacaaggctttgatacaattatcacactagagcatggttaatttagaaggaacgtaacaaccttgtctacgggcaatgatcttata

SEQ ID NO: 56890 - DNA, 372 bp, Oryza sativa
  Clone ID: PAT_MRT4530_58756C.1
gggaccaaaattttaaatttccagaaaggggccagccaccctttgcaaaaggataaggattccttccccattctaaaccaatttccaggtaaaaaaggtatccccttttttttagggccaaccccccccaaggggggggggggggctctttgcccaaactggggggtttcccgggtccccaccaggagggaaaaaaaaattattggccccctttttttcccccttttccccaatttttatcccttctttttccaaaaaaaaaattttttttcctttttcccccccccacaccaaaattattttacccggttaaaatcccccttatcccacaaaaattttaccccggtccggtcctcccgccaaaaaaccaaa

SEQ ID NO: 56891 - DNA, 1355 bp, Oryza sativa
  Clone ID: PAT_MRT4530_58757C.1
ctctcactgagctcctctgcttctcgcatccatggccgccgccgccacgggccctgtccccttcaaggacgccgacgacgacggcacgctcgccgccgccgaggcgcgctcgcctctcccgaaggaggagttcggcgacctcgtcgcggcgctgccgcggaaggagcagtacctcgacgggcggctctacgaggggttctggctgccggagcactacgcgccggggatcatcgcgttccgccgccgcttcacgccgcgcgccgacgacgtggtccttgccagctaccccaagtgcggcaccacgtggctcaaggcgctggccttcgccgccatgacccgcgccgcctacccggcggacgaacacccgctgctccgcctcaacccgcacgacgtcatcccgttcgtcgaggacgtcttcaccgacggccacgaggccaagctcgacatgctcccctcgccgcgcctcatcaacacgcacacgccgtaccagcttctcccggagtcggtcgtcgccggcgacggcggcggcggatgcaaggtcgtctacatctgcagggaccccaaggacatggtcgtgtcgctgtaccacttcatgcggcgcctccagcccgacctgtcgctcgccggcgtggtggagtccgtcgccgacggcacggtgccgttcgggccgatgtgggaccacatcctcggctactggcgggcgagcgtctcccgcccggaccgggtgctcttactcaggtacgaggacctgctccgcgacggcgccgccggcgagcacgtcagggcgatggcgaggttcatggggcggccgttctcggccgccgaggaggccgccggcgccgtagcgagcgtcgtggagttgtgcagcttcgagaggatgaaggcgctggaggtgaaccggcggggcacggcggggtcgtacaagagcatgccgcgcgacgccttcttcaggaagggcgtcgccggcgactgggcgaaccacatgtcgccggagacggcagcgaggctggacggcatcttccgcgaaaaattccgtggcacagggctcaccattgttccatgacacggatcgagcagttggccagcgacgtcgtcgtcagtcactgacatgtgggccatagcaaagtggaacccacatgtcaatgacccaactgcatgtcagaggatctgcttccgtgtgcttcatttcattgtgattttgctgctgtttcggacatttttgtttggcatcgcttgtttttatttgtgattacccacttttctcggttccaatcatggaacggagatgtgacgaaaggcgcatcgaataaagaaatgagagtgattcgggcttgaaaaaaaaaaaaaaaaaaaaa

SEQ ID NO: 56892 - DNA, 1201 bp, Oryza sativa
  Clone ID: PAT_MRT4530_58758C.1
atgacctttgaagcacttaggcgtagacatctgcaactggatgaaatacaagagactagcaaacgggctgacctgaaggctggcgccatcatgatggcaagcaatatcagggctaatgtgggaaaaagggtaggacttgttcctggagttgaaataggggatattttctatttccggatggagctatgtatcatcgggttgcatgctcctagtatgggtggcattgattatatgagtgctaaatttggaagcgatgaggattctgtggcaatatgtattgttgcagcaggtggctatgagaatgtggatgatgacacagatacactggtgtacagtggttcaggtggcaatagtaggaacagtgaggagaggcatgatcaaaagcttgagagaggtaaccttgctctggagaggagcctgcataggaagaacgagatcagggttgtgcggggcttcagggatccattttgcctgactggaaaaatctacatatatgatggcctctataagattcaggagtcctggaaggagagaacaaagtctggtatcaattgcttcaagtacaaactgctgcgtgagcctggacagcctgatggagctgcattgtggaagatgactcaaggatggatagacaatccagcaagcagaggcagggttatattacctgatctatcatctgcggctgaagctctcccagtttgccttgtcaatgaggtagaccatgagaaaggacctgggcatttcacctatgccagtcaagtcaaatacttgaggcccctcagttctatgaaacccttacagggttgcggatgccagagtgtttgcctgcctggtgatcccaactgtgcttgtggacaacataacggaggtgacttaccttacagctcatcaggacttttggcgtgccgcaagccaataatttatgaatgcggtgatgcttgccattgtactacgaattgccggaacagagtgacccaaaaaggggtcagatttcactttgaggtcttccggactgcaaatcgaggctggggtcttcgctgctgggatcccattcgtgctggtgcatttatctgtgagtatactggtgaggtcattgatgagctcaaagttaatctggatgacagtgaagatgattacatttttcagactgtatgtcctggtgagaagacattaaaattcaactttggtcctgaattgattg

SEQ ID NO: 56893 - DNA, 3256 bp, Oryza sativa
  Clone ID: PAT_MRT4530_58759C.1
atggatagggcgtcgaatttcatacctggtccttatcaagaactcgtggatgccaaaccaattagatcgttagctcctatgttccctgcacccttgggaatcaatgtcaaccagtcaagcaccccgcctttggtatgtgtcactccggttggccaatttcctgtcggttttggttctggaatccttcctacctttggttcaactactgccttcactaccacagcaaatggggtttcttatacaagctacaccaataatggagctattgatgccactcctatctcggcatataagaccagaccaggcattgtatcacttgatggcgatgaaccttactcaggttcagcatctggacggaagtccaagagatcatctggttcagctgctgatggttcaaatggagttaagttcaagcgccctaagccagtttacaagaattttgttgctggcaaggagcttgcctttttaccaccttcatccagtgatcccagggaggttgtggaagcagtccacatgacctttgaagcacttaggcgtagacatctgcaactggatgaaatacaagagactagcaaacgggctgacctgaaggctggcgccatcatgatggcaagcaatatcagggctaatgtgggaaaaagggtaggacttgttcctggagttgaaataggggatattttctatttccggatggagctatgtatcatcgggttgcatgctcctagtatgggtggcattgattatatgagtgctaaatttggaagcgatgaggattctgtggcaatatgtattgttgcagcaggtggctatgagaatgtggatgatgacacagatacactggtgtacagtggttcaggtggcaatagtaggaacagtgaggagaggcatgatcaaaagcttgagagaggtaaccttgctctggagaggagcctgcataggaagaacgagatcagggttgtgcggggcttcagggatccattttgcctgactggaaaaatctacatatatgatggcctctataagattcaggagtcctggaaggagagaacaaagtctggtatcaattgcttcaagtacaaactgctgcgtgagcctggacagcctgatggagctgcattgtggaagatgactcaaggatggatagacaatccagcaagcagaggcagggttatattacctgatctatcatctgcggctgaagctctcccagtttgccttgtcaatgaggtagaccatgagaaaggacctgggcatttcacctatgccagtcaagtcaaatacttgaggcccctcagttctatgaaacccttacagggttgcggatgccagagtgtttgcctgcctggtgatcccaactgtgcttgtggacaacataacggaggtgacttaccttacagctcatcaggacttttggcgtgccgcaagccaataatttatgaatgccctgacaagtgaaattctacagggacctcagttctatgaaacccttacagggttgcggatgccagagtgtttgcctgcctggtgatcccaactgtgcttgtggacaacataacggaggtgacttaccttacagctcatcaggacttttggcgtgccgcaagccaataatttatgaatgcggtgatgcttgccattgtactacgaattgccggaacagagtgacccaaaaaggggtcagatttcactttgaggtcttccggactgcaaatcgaggctggggtcttcgctgctgggatcccattcgtgctggtgcatttatctgtgagtatactggtgaggtcattgatgagctcaaagttaatctggatgacagtgaagatgattacatttttcagactgtatgtcctggtgagaagacattaaaattcaactttggtcctgaattgattggtgaggagagtacatatgtatcagctgatgaatttgagccactgcccatcaagattagtgcaaaaaagatgggaaatgtctcacgtttcatgaaccatagttgttccccgaatgttttctggcagccagttcagcatgaccatggagatgacagccacccacatatcatgttctttgcactgaagcacattcctcccatgacagaactgacttttgactatggtgttgctggatctgagtcttcaggttctcgtagaactaagaactgcttttgtggatcatcaaactgccggggagtattttaattgatggatgtatcttcattgtgttggatcaacacacaaacctatttgccagaacttcctgcctgtacccccagattcgagctctggtattattccctgagaatgacgatgggtttcaacatgaactgtgaagagacagtaaattaccgtcgatttgaactgcatagacagttaaattatggttaaactctgttgtgttgatgccgcacttggtaacttggtggcctctgtacaccaccttttgttccatattttgtgggggcatgtatttgatattattgctgcaaatcgtctgtaatccatctgcacccatcctttgtaggctagcgtcagttttaactggaactctagcaattagttgtgacctgtcagatgcagtcatgtacaatgtgccggtttaggatcaccttgcattttcgctctacttcatttctatgtattctgcaacccagttttcagatgcttccatcagtaatatacttgataggagacttgcatcaaaagattatgactccatagaagatcaaagaaaccaaatagaagttgtagcaaaatatgagattccacttcctgtgttgaaaacaacgaacaatgacatatttccatcagcctctatctttgccaaccatggtatttcaaatggcaatctctctgctttgtccacaactgatgctttgcagatggagctccctttaatccaatttgatccaaacaaccagttcgtttactcaagggcttatgcgatgcacctaacaaactttgctttattaaatgatcaatcagaagaattactaaatgatactgatgtattgaactatgtggtgatgaaagaagagctttctggagggagtttgagtcctactattaatatgccatgtgaagcacataactccatggctgcctctaatgagctggtagtgccacaatatgaaggagatgctccacctcttcaagatgatttcacatcatatttctatttgaatgatactaatctatccatattcgaagacacaaatgaattgtttttggaaaacaagttggatactaaaggtaactga

SEQ ID NO: 56894 - DNA, 225 bp, Oryza sativa
  Clone ID: PAT_MRT4530_5875C.1
atggcggagtgcgaaacttactcggagacggtacatgacaaattcggaacattaccaaatatcccggacttggggggcatgatcaaatcaactggcacgctcatacatccgaaggcgagctttggacctgaacttggtgctccgcgccgctggcgcgatgctgagccaggtggtgccgcaggtgatgtatctacgcggacgcggagccaggtgggggtcgtgtaa

SEQ ID NO: 56895 - DNA, 791 bp, Oryza sativa
  Clone ID: PAT_MRT4530_58760C.1
atggctacactgttgtcagagcagggcgtggaatctgttacgaagctggtgaatctaaaatgggtgtccaaaggaaggctagatttgcctggccagcgtcagttgtcgagattggtttggcttaggacattgtcggagatatgggccgaggtctgtgaccggcctgttgccggccacgtccgattggacgggcggccgtgcccccacgtcgcctctgtattcggcggagtggaggcatcggcggtggagctatcatggacctctgccttacttccctcgcaggacatgatggttattgccgagatctacatgagatgcgcggtgaggttcttggtgtcgatcagagcggccgcctccacgcgggtgctggcgaaccgtctgggccaatcgaggaatctctcaacgacgagcgacatgttggggaaaggcggtgaggtagaccggcgaggcggcactgcgggcaaagctacacaggtggaatccaccagtggcgcgacggaagtattggcgaagcaggcagggtccggcggcggtgagaacatgagcgtgcagtggtagctcaggaagtgcagcgcgacaagcagcaggagtataacgagcaggaggactatagcggtggccgatgagtagtcggtgccagggaaagagacgatgggagatgccttcttccgtttttgtgttaaacagacaagatggcagccatccttgctgcccatggactcagcctctcctgcatccaagccaagcagaagcagagctctcggcatggcggcgccggcggtcttcaccat

SEQ ID NO: 56896 - DNA, 1518 bp, Oryza sativa
  Clone ID: PAT_MRT4530_58761C.1
atgccgatcgagggaggggctagtgcggcgccaagtgggggtgaggatgaggatgagggtgtccccatcccatcccgtcggctgggcgtggaggtggagtcccgtgtcgcgagttcggccgccgctgccctgcgccgatctccatccccgtcggttgtcctgctgcttccgccgcatcctggagctgccgccatgtccgacatggagtccatgacagcccttatggagtctacaggctccaagctgcagctgcttcagcgtgcatttgccgagcttgagagccagagtgctgtttcattgaacttaaagtggaagcaacttgaggaccatttccatggccttgagcagtcgcttaagaaaaagtttgatgagctgaaagagcaggaaaaggagttcaaggagacagtcacgaaatcggagcagatgcttgagcaacaagaggctgctgtcgtggcaaaggaactgacttctcttgaaagactgcagcagaaaagggatgctgcgttggctatgatcttcggcaagtcaaagctgaacttgtctatgcctgtaatcaacccaatcagcaaatctgtgagtaacaatgctgtgttaaatggcaacatcgctagcctgtggcccaaacctgcaactgcgcatggtgcatacctgcaagatggaaacactgctgtgaagcctcgttctcaacttgttatcctctgtgaagaaatgaatgttaacgggcttcataagttcatatcagacaatcgcaaagacttaacatccatccgtgaggaaattcccgttgcacttaggggagcaactgatccatatggcttggtgttagcttctctagaagacttctattttggagacaatcttatattggatggtaaaaaggatggaaaccttctgggtgtacggaggacgtgcctcatgttgatggaatcacttgctcagctgcaaactgatgctactactggtttcatatcaaaaggccaaatgcttactgctagtattaaggagagagcgaaaaagatagcgcttgagtggaaatccaagttggatagccttgactttgatgctagcaatgggaactgcctggaagcacatgcgtttcttcaactcctggctacctttgctatattttctgaatttgcggaagacgagctgtgtaagcttctcccatcagtcagtcgtcgtcgccagacacctgagctttgtagaatacttgggttgtcacagaacatgccaggtgtcattggagttttgattgaaaatgggagaactattgatgcaaatgaaattaatgaacgcgagttgtctgccttgaaagctgttatcaaatgtattgaggagcacaaacttgatgagaaatatcctatcgacccacttcagagaagagtcatccagctagagaaagccaaggcagacaagaggagggctgttgaagctggaaagccacagtctaagaggcctcgtgccaacggatcaatggtgagcccgttaggaaaccgtagcagctgcgcctcaacgggg

SEQ ID NO: 56897 - DNA, 470 bp, Oryza sativa
  Clone ID: PAT_MRT4530_58762C.1
ttcgaattagtgatttacctttttacctctgggaaacagttaacccttaacataagtgagctgttctgtttaggaggggcccaagaaaaagaagtggtaaattgtcagattttaacttgtaaaaatgatcaagggggtttaggatcctagattcaggatgcatgaatgttgctctgttgggtaaatggctttggcgcctaaaaaatgagaaaggcatttggcaagatttgatattagctaagtatctaggtcaaaagactttatctcagaaaaagctaagacctggagattctcaattttggagggggttaatgaaagttaaagagagattcttaatgttatgtgagaagaatgtgggtaatggcaaaagaactttgttttgggaggatagctggctgggaggaagaccattagctaaacaattccctaatttgtataatgtttctcttacctccccgttgattgtttgg

SEQ ID NO: 56898 - DNA, 2214 bp, Oryza sativa
  unsure (1)..(2214): unsure at all n locations
  Clone ID: PAT_MRT4530_58763C.1
cagtggggacaaacgcccacaacccaccaccacgtctagggttccgccgctcctccggccgccgccgccgccgccgtcgacccccctcggctgggcgtggaggtggagtcccgtgtcgcgagttcggccgccgctgccctgcgccgatctccatccccgtcggttgtcctgctgcttccgccgcatcctggagctgccgccatgtccgacatggagtccatgacagcccttatggagtctacaggctccaagctgcagctgcttcagcgtgcatttgccgagcttgagagccagagtgctgtttcattgaacttaaagtggaagcaacttgaggaccatttccatggccttgagcagtcgcttaagaaaaagtttgatgagctgaaagagcaggaaaaggagttcaaggagacagtcacgaaatcggagcagatgcttgagcaacaagaggctgctgtcgtggcaaaggaactgacttctcttgaaagactgcagcagaaaagggatgctgcgttggctatgatcttcggcaagtcaaagctgaacttgtctatgcctgtaatcaacccaatcagcaaatctgtgagtaacaatgctgtgttaaatggcaacatcgctagcctgtggcccaaacctgcaactgcgcatggtgcatacctgcaagatggaaacactgctgtgaagcctcgttctcaacttgttatcctctgtgaagaaatgaatgttaacgggcttcataagttcatatcagacaatcgcaaagacttaacatccatccgtgaggaaattcccgttgcacttaggggagcaactgatccatatggcttggtgttagcttctctagaagacttctattttggagacaatcttatattggatggtaaaaaggatggaaaccttctgggtgtacggaggacgtgcctcatgttgatggaatcacttgctcagctgcaaactgatgctactactggtttcatatcaaaaggccaaatgcttactgctagtattaaggagagagcgaaaaagatagcgcttgagtggaaatccaagttggatagccttgactttgatgctagcaatgggaactgcctggaagcacatgcgtttcttcaactcctggctacctttgctatattttctgaatttgcggaagacgagctgtgtaagcttctcccatcagtcagtcgtcgtcgccagacacctgagctttgtagaatacttgggttgtcacagaacatgccaggtgtcattggagttttgattgaaaatgggagaactattgatgcaattaatttggcttatgcatttgagctgactgatcagtttgaaccagtcgaattactgaaagcttatctgaaggaggtcaagagtatgtcacatgtcaagaccggaaagatgtctccgggagtacagaatgaaattaatgaacgcgagttgtctgccttgaaagctgttatcaaatgtattgaggagcacaaacttgatgagaaatatcctatccccccagacctgcttcagaaaagagttatccagctagagaaagctaaggcagacaagaggagggctgttgaagctgccaaagccacagtctcgtgccaacggatcagtatatgcgccacatattactagctttcctgacaaaagcttctaccaggccgctgcgccacagaggcattcctacccttacgagaggcagtatgtatatggtgctgaggcccatcatcaccccacaatgataagctcagctccctatggcatgtcacctgcccacacaacatactatggtaatggctatcaggttcagtaccaggtaccatatatccactgatggagagagcgccgtgtcctctttcttaactatgtagcttttaacctgctactatgtgttgtagttgtatcaatccactagctagactgcctagctgaaattagttcgaccactcctgtgtgtgctgagtggccagtgtgaaaatctgttaatttccctgacgacttatgacataatttactcctaatgtttagttaaataatttgcttttgttttaaaaaaatttgcttttgtttcaaaatatagcctatggcatatatatgttggagttgaaaaaaaaaaaaaaaaaaaaaaacccggaatcccgcgccctccttcgtggtcctgccccccgggtcctttctgtggcactngaaacaaattgttgtcccaaaaaaaaaaaaaaa

SEQ ID NO: 56899 - DNA, 2138 bp, Oryza sativa
  Clone ID: PAT_MRT4530_58764C.1
gacgcccacaacccaccaccacgtctagggttccgccgctcctccggccgccgccgccgccgccgccgacccccctcgatctcctccccgagccgccataggtggtggcgggggcgggggagctagcatccgtccgtcaacgcacatcgtcactgctgcttcctgaaatctgccaccatgtccgacatggagtccatggctacacttatggagtccacaggctccaagctgcagcagcttcagcgtgcatttgcagagctcgagagccagagcgctgtttccttgaacttaaagtggaagcaactggaggaccatttccatgggcttgagcagtcgctcaagaaaaagtttgatgatctgaaaaggcaggaagaggagttcgaggagacggttgcaaagtcagagcagatgctggagcaacaagaggctgttgtcgtggcaaaggaactgacttctcttgaaaaactgcagcagaaaagggatgccgcgttggctgtgatctttggcaagtccaagctgaacttgtctacgcctcttatcaacccaatcagcaaatccgtgaataacaatgctgtgtttaatggaaacatcggtggtagtctttctgttaagtggcccaaacctgcaactgcgcatggtgcatacctgcaagatgaaaacactgctgtgaagcctcgttctcaacttgttgtcctctgtgaagagatgaatgttaacgggcttcataagttcatatcagacaatcgcaaagacttaacatccatccgtgaggaaatccccgttgcacttaggggagcaactgatccatatggcttggtgttagcttctctagaagacttctattttggagacaatcttatattggatggcaaaaaggatggaaaccttctgggtgtacggaggacgtgcctcatgttgatggaatcacttgctcagctgcaaactgatgctactactggtttcatatcggaaggtcaagtgcttactgcaagtatcaaggagcgtgcaaaaaagattgctcttgagtggaaatccaagttggatagccttgactttgatgctagcaatgggaactgcctggaagcacatgcgtttcttcaactcctggctacctttggtatatttgctgaatttgcacaagatgagctgtgtaagctacttccctcagtcagtcgtcgtcgtcagacacctgagctttgtagaatacttggattgtcccagaacatgccaggtgtcattggagttctggttgaaaatgggagaactattgatgcaattaatttggcttatgcatttgagctgactaatcagtttgaaccggtggaattactgaaagcctatctacaggaggtcaagagtgtgccacatttcaagactggaaagatatctctgcaagtacagaatgaaatgaatgaacgagagctgtctgccttgaaagctgctattaagtgtatcgaggagcacaaacttgatgagaaatatccgattgacctgcttcagaaaagagttatccagctagagaaagctaaggcagacaagaggagggctgttgaagctgcaaagccacagtctaagaggcctcgtgccaatggatccgtatatgcgccacatactagctttcctgacaaaagcttctaccaggctgctccgccgcagaggcattcctacccttacgagaggcagtatgtgtatggtgctgaggcccatcaccatcccacaatgataagctcagctccctatggcatctcacctgcccacacaacatattatggtaatggctatcaggttcagtaccaggtaccatatatccactgatggagagagcgtaatgtgctctttcctaactatgtactagcttttaacctgctgctactatgtgctgtagttgtatcaatccactagctagactgcctagcttaaattagttcgaccactcttgtgtgtgctgagtggccagtgtgaaaatctgttaatttccctcacgacttatgacataatttacttctaatgtctagttaaaataatttgcttttgtttaatatatagcctatggcatatatatgttggagttgagatagtcccagtactgcagaattctggaattatgtgctctgcttggtggaattatccactaattc

SEQ ID NO: 56900 - DNA, 2041 bp, Oryza sativa
  Clone ID: PAT_MRT4530_58765C.1
tcacgaggccagggtggtggtggggcagttgtcgacgccgcaggcgaggatgtcgcggtagttttttttttttttttttcagtctcagatcaaattggattgataagccaagcatcccaaattctcaatgtcacaatgtacaaattggcttacggcacagcagcagtaagcaacctgagcttcggcgagatcctcacgaggccagggtggtggtggggcagttgtcgacgccgcaggcgaggatgtcgcggtagtcgcgggagacggtgaagctgtcgtgcacgctgccgtcgcggctccggacgtactcgaacagcagcgccgtgtggttgaaggccgtcagcttggcgaacccgtagtcccggtcctggacgtggctccaccgcgcccgtacgccggcgtagtccgccaggctcgccccgccgccgcccaccaccacgtgcgtcgtcgccgtgaacgcgccgctgtagtggctcgccgccttcgccacgcacacattctcgtagactgggcaggttctctcgtagccatggacatggccgtacatggcgatgtcgaccttgtacttctgccagagcggctggaggctctccctgcccatgggctcctccggttgtgccctcctcgacgttgaaagctagctgatgagtagccgataaaacggtgggccgatggaatattcagccacggaatgtttcctggtcggtcgagcgccagaattgctaacggtcgattgaagctacgtagaacatattctgagctggtacaccgcattcaccacctgaatccaaattcccatagaaggaacctgatccaggccaatctctttcatggttgccgcttccaaccatgtaaggcacactggatgcaatgggttcaacttgtgcggtaaattgatcccattgtgacagataaccattggcatagcagatgtccccaatatgtattaccatatcaatattcttcaaatctttaattagctggtaggtcgtgttcagtgaaccaggctcgaagtcattgaactcatttgaaccatcggcctcagccttccccatatctccaaaaatgactacacgctgcaaagagtcttcccctggataaggaggtgcttggaagctatactcatgtccccaaataatagagccatctgatagccgatgcccaattctgtatgtatacttgaaattaggccacagatccttgaggaaacttgtatgtatgaaaccaggatcgcgccatccaactgtcctagcaggaggaccgcacatagtgctgcgactgaacgtaagggtgcctgcaggagaaaggctttggatttgcccttgtaggccccatttgacaaatggtgtagcctcattggtgccatatccacttgtccaagtcactgtcatttcattccaggattttccttgcgctaggcgtgggtacacaggggcctttgggttcgtgaaggttactctctttgagtgtgcaatgagctttggatttgagaggcctccagaaaacaatgcaaatgaaaaatcctccctctgattgattagctgaagcttcatggatccctttcctgtcttctcatagtcaagattcttgtagtttgcaaatataaactttatgggagctgtacatagaagtggtggttcaacccattggctctctgatggacaagtagaatcactgaaattagcaggagagaacaccccaatccaatcatccttcgatggcttggggttgttataggtaagagtcacccattctctgtcctgtccctcgaggccgaggaggagcggcgaggcgtcgacggaggcacccggctggatcgcgaaggtggtccggtggatgccgatcctcgacagcggctgctccccgcctcttcctgccgccgcgaccgcgccggcgaggctgagcgccaccagcgcgtgcagcaccgccgccgccgccgccgccatcacggcctctcgctcgctttgctccccccaaacgcagcaagagattggtacagcgaggaggaagatgattaacgcagagctggcacggaggaaag

SEQ ID NO: 56901 - DNA, 354 bp, Oryza sativa
  Clone ID: PAT_MRT4530_58766C.1
atgacatgggccaaggcgaatcaacaccgtggccttgaggcgaagcggtggttggatctcctgacgcgtggcattgccccggccttgatcggagtggcggtggcaggacctagagggggaacggcgatgggccgacttggagatgaagcggtggcgcggtgcgcccaaacgccctaccgccaggtgcggctcgacccactcggaccccggctgacacaggaacagccccgccgcgccgcctcgctccgacacgaatgttacctcctccccgccatcaccgatgaactgcggtgcgttaaagttcacggatacgccgtcccgtgtggcgcgctcggcatactccaccagcggtag

SEQ ID NO: 56902 - DNA, 215 bp, Oryza sativa
  Clone ID: PAT_MRT4530_58767C.1
gtgacgactaaggcggacaagacggtgggggtggaggtgatgtaaccccatgcgtgccgtgtctgatacgcttgcgatcgactcattctaccgtatcctttacgtttaattgatacacctttcagttgtggtaaatggcattgttaatgctttgttagactttgtttaaaacctctacgatgttttatcaaaactggatatggtatgataacatg

SEQ ID NO: 56903 - DNA, 3831 bp, Oryza sativa
  Clone ID: PAT_MRT4530_58768C.1
atggccacccaaactcaagttctgcaagctatcgcgaacaaccaaggcgaccgcggagggtcaagctttggagagtttatgaggaccaagccacccacattcgccacagctgaagaacctatggatgctgaagattggttaaggatcattgagaagaagctaactcttgttcgagtacgtgaggccgataaagtgatctttgcggcaaaccaattggaaggaccagccggagactggtgggacacgtacaaagaagcccgagaagaagatgccggagaaccaaactgggaggaatttaccacagccttccgtgacaacttcgtgcctgctgcggtgatgcggatgaagaagaatgagttcaggagactacagcaagggaataccacagtacaagagtacctgaaccgtttcactcagctggcgcgctacgcgactagagatcttgccgacgaggaggaaaagatcgacaaattcattgaaggcttgaatgataaattacgcgggcccatgattggacaagaccacgatagtttccagagtttaatcaataaggtcgttaggctggagaacgaccggaaggtcgtggagcacaatcgtaaaaggaggcttgccatgaaccgctcgcctcagaccgcaccccagcgtcctaaagggacaacctcctcggcatggagaccaacagtggtgacaaccagtcgacctgccgcctccagcaatttccacaggccggttaccattcagaaccgcgctcctgcaccgaatcaggccgccactggatcagtaaggccaggaagctatttcaactgtggagagtacgggcatttcgccaataaatgtcctcatccaaacaagacacccattcgcaccggagctaatgcaacggctattcacgggactgctacccctgctgctggacgagcaaagcatagaggaataattgactgtagacatagagaagttaccctgaccacaccctggggatcggatatgagagcaaccatggatcaagatcctaggctaaccgaacgtgccggaggtatatttaccatgctacccctaaagggaatgcccgtagtgcagcgatttcctgatgtgttcccagaagatttacctggaatgccaccagatcgtgacatagagttcattattgacctgatacccggaactgcccccatatccaagagaccatatcggatgccggtcaatgagttagaagaacttaaaaagcaaatcagggagttgcaagagaagggatttgtacgccccagttcatcaccttggggagccccagtgttatttgttaaaaagaaagacggtagcatgagaatgtgtgtagactaccgatcactgaacaaagtaactattaaaaacaagtatccactaccatggattgatgatctttttgatcaactcaaaggagctaaggtgttctctaagattgaccttcggtcaggataccaccaattgaaaattagaaccggggacatacccaaaaccgcgttctcaacacgctatggattatatgagttcaccgtaatgtcgtttggtttaaccaacgctccggcatactttatgaatcttatgaacaaagtgttcatggactacttggacaaatttgtggtggtattcatcgatgatattctaatctactctaaagatgaggaagaacatgcggaacacttgcgattggtactcgagaaacttcggaagcataagttatatgcaaaattcagcaagtgtgagttctggttaaaagaagtcgcttttctaggccacgtaatctcggccggtggagtagcagtggattctgctaaagtggaggctgtcacggaatggaaagcacccaaatatgtgactgaaattcagagttttctaggcttggctggatactaccgacggttcattgaagggttctctaagatagcccgaccaatgacacaactactcaagaaggaaaagaagtttgtgtggtcagaacagtgtcaggaaagctttgagcagctcaaagaaaagctgacctcggcacctattttagttcttcccgacatcaaaaaagactttgttatatattgtgatgcttcaaggcaaggactaggaggagtattgatgcaggacgggaaagttgtggcctatgcgtcacgacaattgcgaccacatgaggaaaactaccctacccatgacctagaactcgcagctgtggttcatgcgctaaagatttggagacattatctaattggaaaccattgcgatatctacactgaccacaagagtctaaagtatatcttcacccagtcagatctcaacttgaggcaaaggcgatggttagaattaatcaaggactatgatttagaggttcactatcacccaggcaaagcaaacgtggtggccgacgctctgagtcgtaagagccattgcaatcatgtgagaatggaagggatggtccctgagcttagggaggaaatagctcagctgaacctacatatagtacgtcgtggacggataaacaccctagacattcaacctcttttgagaacccaaatagaagaagcccagaaggacaacgaggaagtccgagaggtttctccgatgaggggaacaaaaaggtttaaggtcaaaggaaaactggcaccaagatatgtgggaccattccagatcatcgccaagcgaggagaagttgcatatcagttacagttaccagagaatatcgcggatgtgcacccagtcttccatgtgtctcagctaaagaaatgtttacgagtgccggaggagcaagctccgctggaagagattcacattagcaatgatctcacatatccagaacacccgatccggatattggatgaagccgaaaagaggactaggagcaaacccctcctctgccgcgttgccctcgcgccccgcgcgccgcgcgccgtgcgccgctccgcctcccctctgccgtcgccgtcgccatcaccgcgcgtgccgccgtcgcctcgccgcccgcccgtcgccatcgccgcctgccgccgcgccgacgtcaccgagccgccccgagcccgcgccgacatcgccacccccgtgccgcgcgtgctgccgtcccgttgccgcgtcgcctcgagccccgcgccgccgtcccttcgccacgtcgccgcccgtcgccgtcaagcccgcgccgcgccgcgccgcgccgtcctatcattgctgtcgcgccgtgccgtcgtgtcgccgcccatcgcatcccgccctgagccgcgcgccaccgctgtcgccgtcgccatcgacgtcccgtcgccgcgcgcgtcccatcgccgctgccgcgccgcgcgccgtctcgtcgcctcgcgccgcgagcccgccgcctcgcgccccgcgccgccgtcgtttcacccctcctcctccttcccctctctttattcccctctcccctataaagaccccggcccaatcccccccttctccaccccactccattcccacctcttctccctcttccccttctccacgcgccgccgtcgtcgcgctgccgcgccgccgttgtcgtgccgccgcgccgccaccttcgaagccgccgcgccgtcgccccggagccgccgcgccgtgcgtcgccgccttgcgccgccatcgccgtcgtcgccgccaccgccgccgccgagcccgagggagttgcggatccaagcgaaggccaagacccgcaagactctgagcaaggtgcgctacgatgggacagccgttgaggtagggccgagaagcgtgccctacatcggtgtcgccattgaagcgggagatgaagcctcggaggatccctatgcctactaccaggagggagatgaagacgatggcgctcagtag

SEQ ID NO: 56904 - DNA, 4365 bp, Oryza sativa
  Clone ID: PAT_MRT4530_58769C.1
ttaccagttttcaaatagatgcgggtattccgtcctcaagaattctttgctttcccaagtggcttcatcctcagtgtgattactccactgtaccttatacatacgccatactttgttcctagtcctcttttctgcttcatccaatatccggactaggtgttctggatacgtgagatcattgctaatgtgaatttcttccaacggagcttgttcttccggcactcgtaagcatttctttaattgagacacatggaagactgggtgcacatcagcgatattctctggtagctgtaactgatatgcgacttctcctcgtctagccgtgatttgaaaaggtcccacatatcttggcgctagttttcctttgaccttaaaccttttcgttcccctcatcagagaaacctttagataaacgtaatctccttccttaaattccaggtttcttcttcgggtgtcggcgtaactcttctgtcgtgattgtgccacttttagacggtctcgaatcaggcgaaccttttcttcggcctctttgataatgtcaggttcaaataccgcccgttcacctgtctcggaccacatcagtggggttcgacatcgtcgaccaaacaatgcctcattgggtgacatctttaggcttgcttgaaagctgttgttgtaggagaattcggcgtagggcaaacatctctcccagtccttgctaaaatccagagcacaagccctcagcatttcctccaggacctggttggttctctctgtctggccatctgtctgtggatgataagctgtgctaaatgcgaggtaacttcctagggcttcatggactttctcccagaaatgtgaggtaaactgtgtgccccgatcagatgtaattttcttaggtacaccatgaagacatactatcctggtcatgtataactcggctagcttagcactgctataatttgtcttaacgggaatgaatctcgccgtcttggtgagtcgatccacgatcacccaaatggaatcatatcctgttgcggttttgggcaatccaacaataaaatccatacctatctcatcccatttccattcgggaatcctaaggggttgcagcaagcctaccggtcgctgatgctcagccttcaccttttggcacacgtcacagagtgctatgtattccgccacatctctcttcatgttgggccaccagtatccttccttcagatcttggtacatcttggtacttccggggtgcaatgaatatgccgattcgtgagcttcctttaaaattaatcccctcagtccaccctgttcgggtacgtaaattctctttttataccatagaacatctttttcgtcggttgaaaattcctttgcacgtcctgtagctaagcgttccttcacctctcggacttcctcgttgtccttctgggcttcttctatttgggttctcaaaagaggttgaatgtccagggtgtttatctgtccacgaggtactatatgtaggttcagctgagctatctcctccctaagctcagggatcatcccttccattctcagatgattgcaatggctcttacgactcagagcgtcggccacaacgtttgctttgcctgggtgatagtgaacttctagatcatagtccttgattaattctaaccatcgcctttgcctcaagttgagatctgactgggtgaagatatactttagactcttgtggtcagtgtagatatcgcaatggtttccaatcagataatgtctccaaatctttagcgcatgaaccacagctgcgagttctaggtcacgggtagggtagttttcctcatgtggttgcaattgtcgcgacgcataggccacaacttttccgtcctgcatcagtactcctcctagtccttgccttgacgcatcacaatatataacgaagtctttcctgatgtcgggaagaactaaaataggcgccgaggtcagcttttctttgagctgctcaaagctttcctgacactgttctgaccacacaaacttcttttccttcttgagtagttgtgtcattggtcgggctatcttagagaacccttcaatgaaccgtcggtagtatccagccaagcctagaaaactccgaatttcagtcacagatttgggtgctttccattctgtgacagcctccactttagcaggatccactgctactccaccggccgagattacgtggcctagaaaagcgacttcttttaaccagaactcacacttgctgaattttgcatataacttatgcttccgaagtttctcgagtaccaatcgcaagtgttccgcatgttcttcctcatctttggagtagattagaatatcatcgatgaataccaccacaaatttgtccaagtagtccatgaacactttgttcataagattcataaagtatgccggagcgttggttaaaccaaacgacattacggtgaactcatataatccatagcgtgttgagaacgcagttttgggtatgtccccggttctaattttcaattggtggtatcctgaccgatggtcaatcttagagaacaccttagctcctttgagttgatcaaaaagatcatcaatccgtggtagtggatacttgtttttgatagttacttcgttcagtgagcggtagtccacacacattctcatgctaccatctttcttcttgacgaatagcactggggctccccaaggtgacgaactggggcgtacaaatcccttttcttgcaactccctaatttgctttttaagttcatccaactcattgaccggcatccgatatggtctcttggatatgggggcagttccgggtatcaggtcaataatgaactctgtgtctcgatctggtggcattccaggtaaatcttctgggaacacatcaggaaatcgctgcactacgggcattccctttaggggtagcatggtaaatatacctccggcacgttcggttagcctaggatcttgatccatggttgctctcatatccgatccccagggtgtggtcagggtaacttctctacgtctacagtcaattatccctctatgctttgctaaccaatccatacccagaatgacatcaagagtttggggtattagcaccataagattggagggaaataccacatcccgaaggcggatgggtacgtcaatgcaagctgtatccactgctatctcacccccaggtgaatgtactaacattggttgtcttagtttaactctgattaaattgtgttgttgacttgctttcaaagatataaatgaatgcgatgctcccatcagtacgccttggtcttcctgggcctcttcagctcgaacgtggttcacttgcccgcgtccaaattcggtagcggtcctgttagtctgcggagtcctgaatagacctcgtccagcagcaggggtagcagtcccgtgaatagccgttgcattagctccggtgcgaatgggtgtcttgttcggatgaggacatttattggcgaaatgcccatactctccacagttgaaacaacttcctggccttactgatccagtggcggcctgattcggtgcaggagcgcggttctgaatggtaaccggcctgtggaaattactggaggcggcaggtcgactggttgtcaccactgttggtctccatgccgaggaggttgtccctttaggacgctggggtgcggtctgaggcgggcggttcatggcaagcctccttttacgattgtgctccacgaccttccggtcgttctccaacctaacgaccttattgattaaactctggaaactatcgtggtcttgtccaatcatgggcccgcgtaactcgtcattcaagccttcaatgaatttgtcgatcttttcctcctcgttggcaagatctctagtcgcgtagcgcgccagctgagtgaaatggttcaggtactcttgtactgtggtattcccttgccgtagtctcctgaactcattcttcttcatccgcatcactgcggcaggcacgaagttgtcacggaaggctgtggtaaattcctcccagtttggttctccagcatcttcttctcgggattctttgtacgtgtcccaccagtctccggctggtccttccaattggtttgccgcaaagatcactttatcggcctcacgtactcgaataagagttagcttcttctcaatgatccttaaccaatcttcagcatccataggttcttcagctgtggcgaatgtgggtggcttggtcctcataaactctccaaagcttggccctccgcggttgccttggttgttcgcgatagcttgcagaagttgagtttgggtggccataactccggccagagtggctaagtcgggtgtctgagtttcgtcattgctggttgttgcccgacgtcggcttgccat

SEQ ID NO: 56905 - DNA, 280 bp, Oryza sativa
  unsure (1)..(280): unsure at all n locations
  Clone ID: PAT_MRT4530_5876C.1
aactcaaaatacaaaatatccattttttatcatcttccaaaggttttgggtagcaaaaatacatatgcccactaattttacattcctccaaattacaaagattatacccagacaattctaaactttgtatacttaagagccctctactacctcanttacgaaggggtgcacggaataacttttgttttcttcctcgcttgattgatcgacaaaaatacttttgcaaaaattacctaattaattaatcgtcgtgctctctaacataaccaatattgtttat

SEQ ID NO: 56906 - DNA, 4251 bp, Oryza sativa
  Clone ID: PAT_MRT4530_58770C.1
atgcaggacgcagcacgggaggccttcctccgacttagctctatccacctagctgagttggcgagtactgagtttgctcaccacccgtttcgagaggagagcaactccttctgcacagttcaggacacaccttgctgctacaacccgatagtgacccgattgtcacgatgggctgaggcagtagacgacttttacgaggaggctttgttagagatcgacgaccagcagaggcgtgtgggagagttagagaccgaggtgactgacctcacagcgcagcagcttcagctggaagaggagcaccaggcttggggcagtgagatagactcactgaaggcacagctccaggatgagacccccgttccctgcatcacgttcctccgaggccctcgcacccttagcactgcctgcaagagcacccgaccctcgggcaagaagcccaagccagatccagaggccactatttccgagccgtggggactcagatggtttttggatagtatgcgagacacacacaccccctttttcttacctagattgacgagtagcttgatgatggccagccgacgtcgggcgtcaaccatcaatgaagaaactcagacacctgacctaaccaccctggccggagttatggctactcaaacccaacttctgcaagccattgcaaacaaccaaagcaaccgcggaggatcgagctttggagagtttatgaggaccaagccacccacgttcgctatggcagacgagcctatggaggcagaagattggctacgtatcatagagaagaaactgacccttgtccgggtacgcgaagccgacaaagtgatcttcgtagtaaaccaactggagggacccgctggtgattggtgggatacttacaaggaagctcgggaagaggatgctggagaacccacttgggaagagttcactgcagcattccacgagaacttcgtgcctgctgcggtaatgcgtatgaagaagaacgagtttagaaggctgcgacaagggaacacaacggtgcaggaatatctgaaccgattcactcaggttgcccgctatgcaattggagacctcgcagatgaagaagaaaagatcgacaagttcatagaagggctgaatgatgagttgcgtggacctatgattgggcaagatcatgagagtttccagagcctaatcaacaaggtcgttaggctggagaacgatcaaaggactgtagagcacaaccgcaagaggaggcttgctatgaatcgcccacctcagggattgcttcagcgactcaagggagccacttcgtctgggtggaaaccccctattgtggcgaccaaccgccccgccgcacctagcaatttcaacaggctgtatgggcactacaccaacaactgccctcatccacgcaaaactcctgtccgtactggtgctaatgcaatgactgttcgtggaactactacccctgctgccggacgaggtctattcaagactccgcaaactaataggaccactatcggatttggacgcggacaagtgaaccatgttcgagctgaagaggcccaggaagatcagggcgtactaatgggtatgttctctatcaattctgtcccggttaaagtcctcttcgattctggtgcatcgcattcattcatatctttgaaggctagtcaaaagcacaacttaaccctagtgggacttagaaaacctatgatagtacactcacctgggggcgagataattgtgagtcatgcttgcatagacgtacctattcatcttagggatgtggtgtttccctccaaccttatggttttgataccccagaccctagatgtcatattgattatggattggttaacaaagaacagaggggtaatcgactgtagacgtagggaagttaccctgaccacaccctggggatcggatatgagagcaactatggatcaagatcctagactaaccgaacgtgccggaggcatatttaccatgctacccctgaaaggaatgcctgtagtgcaacgatttcccgatgtgtttccagaagatttacctaggatgccaccagatcgtgacatagagttcattattgatctgatacccagtactgctcccatatccaagagaccttatcggatgccagtcaatgagttggaggaacttaaaaagcaaatcagagagttgcaagaaaagggatttgtacgccccggttcgtcaccttggggagccccagtgctattcgtcaagaagaaagatggtagcatgaaaatgtgtgtggactaccgctcactgaacgaagtaactatcaaaaacaagtatccactaccacggattgatgatctttttgatcaactcaaaggacctaaggtgttctctaagattgaccttcgatcaggataccaccaattgaaaattaggactagggatatacccaaaaccgcgttctcaacaagatatggattgtatgtgttcaccgtaatgtcgtttggtttaaccaatgccccggcatactttatgaatctcatgaacaaagtgttcatggattacttggacaaatttgtggtagtattcatcgatgatattttaatttactccaaagatgaggaagaacatgcggaacacttgcgattggtactcgaggaacttcggaagcataaattatatgcaaagtttagtaaatgtgagttctggataaaagaagtcgcttttctaggccacgtaatctcagccggtggagtagcagtggatcctgctaaagttgaggccgttacggaatggaaggcacccaaatctgtgactgagattcggagttttctaggtttggccggatactaccgaaggttcattcaaggattctctaagatagcccgaccaatgacacaactactcaagaaggaaaagaagtttgtgtggtcagaacagtgtcaggaaagctttgagcagctcaaagaaaagttgacctctgcgcctattttagttcttgctgacatcaggaaagactttgttatatattgtgatgcatcaaggcaaggactaggaggagtactgacgcaggacggaaaggttgtggcctatgcatcgcgacaattgcgaccacatgagaaaaactaccctacccatgacctagaacttgcagctgtggttcatgcgctaaagatttggagacattatctgattggaaatcattgcgatatctacactgaccacaagagtctgaagtatattttcacccagtcagatctcaacttgaggcaaaggcgatggttggaattaatcaaggattatgacttggagataaacaccttggacattcaacctcttttgagaacccaaatagaagaggtccagaaggacaacgaggaaatccgagaggtgaaggaacgtctagctgcaggatttgcaaaggaattttctaccgacgagaaggatgtcctatggtataaaaagaggatttatgtacccgaacagggtgggctgagaggattaatcctaaaggaagctcacgaattggcatattcattgcaccccggaagtaacaagatgtaccaggatctgaaggaaggatactggtggccctacatgaagagagatgtggcagagtacgtagcactctgtgacgtgtgccagaaggtgaaggctgagcaccaaagaccggcaggtttgctacaatcccttaggattcccgaatggaaatgggatgagataggtatggattttattgttggattgcccaagaccgcaacaggtgaacgggcggtatttggacctgacattatcaaagaagccgaagaaaaggttcacctgattcgagaccgtctaaaagtggcacaatcacgacagaagagttacgcggacacccgaagaaaaaacctggagtttaaggaaggagattacgtttatctaaaggtttctccgatgaggggaacgaaaaggttcaagatcaaaggaaaactagcgccaagatatgtgggaccttttcaaatcacggctagacgaggagaagttgcataccagttacagctaccagagaatatcgctgatgtgcacccagtcttctatgtgtctcaattaaagaaatgcttacgagtgccggaagaacaagctccgctggaagagattcacattagcaatgatcttacgtatccagaacacccggtccggatattggatgaagccaaaagagggctaggagcaaagtgtggcatatgtacaaggtacaatggagtaatcacactgaggatgaagccaccttggaaagcgaagaattcttga

SEQ ID NO: 56907 - DNA, 951 bp, Oryza sativa
  Clone ID: PAT_MRT4530_58771C.1
atgggccaggtgaagggaacgctgaggaggatccaacaactgccatttgacaaggataaggccaccggccggattacgagcttcttcgagcccgggacggctatcagcacgaaagggtgcccaaagctgctgtactgcaagtcgaccctcccagaaccaaagaccaccacagctgtgccggggaaggggaagcaaattgttgaatctgccagccccgactctagagcccagaagaaggacatgacctgtccgaacacctggcagcggtatagatggccaaaaggcccgaggcccgacggcccggcccacggcacggcagcggtggcggctgagatgactgcggcaatgtcgcgatcggcgatagacgggacaaagttggtgggattgccaggtgcagctgctcaaggtccgttcggtccgccgctgactagcatccccaagatcggacctcatcgatttgctcgggtctcaacccaagtcgacccgaataaaaccgctacttcaggagaaggatccggtgcgtctgcccaaatgacatccgaagccactgttggagctacggccgctgccatcgaccagctgggtgagggcggtgacgctgcagatggcgctccaggatcttcctcattggatgctggtgcaaagtcatcctcctcgttgggtgccgctaccgatcagtcgggtgaggacggtgatacaaccgatgctgctctggggtcttcttcaccgggtactggcgccaagtcttctgccatgggaagggcaaagaggctgcggataaggacgacgtcactgaggagattgctcaagtccgaaaaacgtcaaacggtcaaggcgaagagccaggccctaaagctcattttccacaatgtggagggggtggagagtatccgccgggcggtccagcgggcggaggaccagcgccagagggaggcgaaggatacccactag

SEQ ID NO: 56908 - DNA, 225 bp, Oryza sativa
  Clone ID: PAT_MRT4530_58772C.1
atggtcatgtcatcagcagacagccatgttcccacgtcgcgcctgcttctggcggaagtggagcgccacgtcaactggcgctggatgccgtgccaccgtggatgggaggctgagtcggcgtgccaacgtgcattcaacgccgtgctatttggcgctgaggtgtctaagttcagcgccatacgatttggcgctgaacaaaagggttattttttaaataagttttag

SEQ ID NO: 56909 - DNA, 461 bp, Oryza sativa
  unsure (1)..(461): unsure at all n locations
  Clone ID: PAT_MRT4530_58773C.1
ttcacgcgtccgcgcgtcttgcacacgcatgcatatccatcgatcgatcatatgcgctttttagtcgtcacttgtccaactagctagctctacttccatatatcgatcgatcgttcgtccaatggcggcggcggcggcctgcacgaagctgccgttgctgctcctgctcgtcgccgtcgcagcgtcgtcggcgtcgtcactaacgccgctgcacgcggccgtgccggcgaagggacctcgccccggcggcagcgttaccttacacctcgaccaccgccaggtgatggtggacaatggcatcgtgcaggtgacgctgtcaaaccctgggggccacatcaccggcgtcagatacaacggcgaacgcaacctgctccactacgacggagaagccaactccgccgggtctgngatgtggtatgggaacttcctggggtcaatagtccaagagcatgatcgatatg

SEQ ID NO: 56910 - DNA, 4977 bp, Oryza sativa
  Clone ID: PAT_MRT4530_58774C.1
ttaccagttgccgaatagatgcgggtactccgtcctcaagaattcttcgccttcccaggtggcttcgtcctcagtgtgattactccattgtaccttgtacatacgccacactttgctcctagtcctcttttctgcttcatccaatatccggatcgggtgttctggatatgtgagatcattgctaatgtgaatctcttccagcggggcttgttcttccggcactcgtaagcatttctttaattgggacacatggaagactgggtgcacatcggcgatatattctggtagctgtaactgatatgcgacttctcctcgcctggcgatgatctggaatggccccacatatcttggtgccagttttcctttaaccttaaacctttttgttcccctcatcggagaaacctttagataaacgtaatctccttccttaaattccaggtttcttcttcgagtgtcggcgtaactcttttgtcgtgattgtgctacttttagacgatcacggatcaagcgaaccttttcttcggcttcttgaataatgtcaggtccaaataccgcccgttctccagtctcggaccacattagcggggtacgacatcgtcgaccaaacaatgcctcattgggtgacatctttaggcttgcttgaaagctgttgttgtaagagaattcggcgtagggcaaacacctctcccagtccttgctaaaatccagagcacaagccctcagcatgtcctccaggacctggttggttctctccgtctggccatctgtctgtggatgataagcggtgctaaatgcgaggtaacttcccagggcttcatggactttctcccagaaatgtgaggtaaactgtgtgcctcgatcagatataatcttcttaggtataccatgaagacacactatcctggtcatatacaactcggcgagttttgcactgctataatttgtcttaacgggaatgaatctcgccgtcttggtgagtcgatccacgattacccaaatggaatcatatcctgttgcggtcttgggcaatccaacaatgaaatccatacctatctcatcccatttccattcgggaatcctgagaggttgcaacaaacctgccggcctctggtgttcagccttcaccttctggcatacgtcgcagagtgctacgtattcggccacatctctcttcatgttgggccaccagtatccttccttcagatcttggtacatcttcgtacttccggggtgcaatgaatatgccgattcgtgagcttcctttaaaattaatcccctcagtccaccctgttcgggtacgtaaattctctttttataccatagaacatctttttcgtcggttgaaaattcctttgcacgtccggcagctaagcgttccttcacctctcggacttcctcattgtccttctgggcttcttctatttgggttctcaaaagaggttgaatatccagggtgtttatctgtccatggggtactatatgtaggttcagctgcgccatttcctccctaagctcagggaccatcccttccgttctcagatgattgcaatggctcttacgactcagagcgtcggctacgacgtttgctttgcctgggtgataatgaacctctaaatcatagtccttgattaattctaaccatcgcctttgcctcaagttgagatctgactgggtgaagatatactttagactcttgtggtcagtgtagatatcgcaatggtttccaatcagataatgtctccaaatctttagtgcatgaaccacagctgcgagttctaggtcatgggtagggtagttttcctcatgtggtcgcaattgtcgcgacgcataggccaccacttttccctcctgcatcagtacacctcctagtccttgcctcgacgcatcacaatatacaacaaagtctttcctgatgtcgggaagaactaaaataggtgctgaggtcagcttttctttgagctgctcaaagcttccttgacactgttccgaccatgcaaacttcttttccttcttgagtaattgtgtcattggtcgggctatcttagagaacccttcaatgaaccttcggtagtatccagccaagcctagaaaactccggatttcagtcaccgatttgggtgctttccattccgtgacagcctccactttagcagggtccactgctactccaccggctgagattacgtgacccagaaaagcgacttccttcaaccaaaattcgcacttgctgaattttgcgtataacttgtgctttcggagtttctggagaaccaatcttaagtgttccgcatgttcttcctcatctttggagtagattagaatgtcatcaatgaataccaccacaaacttatccaagtaatccatgaatactttgttcataagattcatgaagtatgctggggcattggttagaccaaacgacattactgtgaattcatacaacccatagcgtgttgaaaacgcggttttggggatatcctcggtcctaatcttcagttggtggtatcctgatcgaaggtctatctttgaaaacaccttagctcccttaagttggtcgaagaggtcatcaatccgtggtaggggatacttatttttgatagtcacttcgttcagtgatcggtagtctacacacattctcatgctaccgtctttctttttaacaaataacactggggctccccaaggtgacgaactggggcgtacaaatcccttctcttgcaactccctaatttgctttttaagttcttctaactcattgaccggcatccgatatggtctcttggatatgggggcagttccgggtatcaggtcaataatgaactctatgtcacgatctggtggcattccaggtaaatcttctgggaacacatcaggaaatcgctgcactactggcattccctttaggggtagcatggtaaatatacctccggcacgttcggttagcctaggatcttgatccatggttgctctcatatccgatccccagggtgtggtcagggtaacttctctacgtctacagtcaattactcctctatgctttgctaaccaatccatacccaaaatgacatcaagagtttggggtattagcaccataagattggagggaaataccacatccctaaggcggatgggtacgtcaatgcaagctgtatccactgctatctcacccccaggcgaatgtactaacattggttgtcttaatttaactctggttaaattgtgttgttgacttgctttcaaagatataaatgaatgcaatgctcctgaatcgaagagaactttaattggagtggagttgagtgaaaacatacccatcagtacgccttgatcttcctgggcctcttcagctcgaacatggttcacttgcccgcgcccaaatccagtggtggtcctgttcggttgcggagtcttgaataggcctcgcccgacagcaggggtagtagtgccgcgaacagtcattgcgttcgcgccagttcggacaggggttttgcgtggatgagggcagttgttagcgtagtgcccgtatttcccacagttgaagcagtccacattcttcttggccccaggggcagccaaagttggtgtaggggtgcggttctgaagtgcaactggcctgttgaagttgctaagtgcagcgggacggttggtcaccatgacagggggcttccatccggacggagtggctcccttaagtcgctgaggcattgtctgaggtgggcgactcatagcaagcctcctcttgcggttgtgttccaccgtcctttgatcgttctctagcctgacgaccttgttgatcaggctctggaaactctcgtgatcctgcccgatcataggtccacgcaattcatcattcagcccttctatgaacttgtcgatcttttcttcttcatccgccaggtctccaattgcgtagcgagccaactgagtgaacttgtttagatactcctgcaccgttgtattcccttgccgcagtcttctaaactcgttcttcttcatgcgcatcactgcagtaggtacgaaattctcgcgaaacgctgcagtgaactcctcccaggtgggttctccagcaccgtcttctcgggcctccttgtaggtatcccaccaatcaccagcgggtccttccagctggttcactgcgaagatcaccttgtcggcttcgcgtaccctgactagagtcagtttcttttctatgatgcggagtccccacggctcggaagtagtggcctctaaatctggcttgggcttcttgcccggaggtcgtgtgctcttgcgggcattgctgagggtacgagggcctccgatgaaggtaatgcgggggacaggagtcgcgtcctctgaaggatcagtgatgtccggctctatctctggctcggtgtcggtcccctctgtctcggagtcgacctgaatcggagtctctaaactggaccctggctggagctgtgccttcagcgagtctatctcgctgccccaagcctgatgctcctcctctagctgaagctgttgtgctgtgaggtcagttaccttggtctccaactctcccatacgcctctgctggtcgtcgatctccaacagggcctcctcgtagaagtcgtccacagcctcagcccatcgggacagtcgagtcaccatcgggttatagcagcaaggtatgtcctgaactgtgcagacagagttgctctcctcccgaaacggatggtgagcaaactcggtactcgctaactctgcccagtgaatagaactaagtcagaggaaggcctcccgggctgcgtcctgcatcgcggtctccggtaagtcacgacggtggcgtgtcgagaagctgtagtctgactctgaagggactcgcggatgaacctcaatccggccctcccaaaagggtccacattgtctcactcggtagatcggaaatctggggtaccgaaggcgcctcatcacccgatgtagctctatgacgtatccctctgagcggggtacgcccat

SEQ ID NO: 56911 - DNA, 5454 bp, Oryza sativa
  Clone ID: PAT_MRT4530_58775C.1
ttaccggttttcgaatagatgtgggtactctgtcctcaagaattcttcgctttcccatgtggcttcatcctcagtgtgattgctccattgtaccttgtacatacgccacactttgctcctagtcctcttttcggcttcatccaatatccggatcgggtgttctggatatgtgagatcattgctgatgtgaatttcttccagcggagcttgctcttctggcactcgtaaacatttctttagctgagatacatggaagactgggtgtacatccgcgatattctctggcaactgtaactgataggcaacttctcctcgcctggcaatgatctggaatggtcccacatatcttggtgccagttttcctttgaccttaaacctttttgttcccctcatcggagaaacctttagataaacgtaatctccttccttaaattccaggtctcttcttcgagtgtcggcgtaattcttttgtcgtgactgtgctactttcagacggtcacggatcaaacgaaccttttcttcggcttcttgaataatgtcaggtccaaataccgcccgttccccagtctcggaccacattagcggggtacgacatcgtcgaccaaacaatgcctcattgggtgacatctttaggcttgcttgaaagctgttgttgtaggagaattcggcgtagggcaaacatctctcccaatccttgctaaaatccagagcacaagccctcagcatgtcttccaggatctggttggttctctctgtctggccatctgtctgtggatgataggccgtgctaaatgcgaggtaactccctagggcttcatggactttctcccagaaatgtgaggtaaactgggtgcctcgatcagatataatcctcttaggtataccatgaagacacactatcctggtcatgtacaactcggctagcttagcactgctatagtttgtcttaacgggaatgaatctcgccgtcttggtgagtcgatccacgatcacccaaatggaatcatatcctgttgcggttttgggcaatccaacaataaaatccatacctatctcatcccatttccattcgggaatcctgagaggttgcaacaaacctgccggcctctggtgttcagccttcaccttctctcggacttccttgttgtccttctggacttcttctatttgggttctcagaagaggttgaatgtccagggtgtttatctgtccacggggtactatatgtaggttcagctgagctatttcctccctaagcttagggaccatcccttccattctcagatgattgcaatggctcttacgactcagagcatcggctacaacgtttgctttgcctgggtgatagtgaacctctaaatcatagtccttgattaattctaaccatcgcctttgcctcaagttgagatctgactgggtgaagatatactttagactcttgtggtcagtgtagatatcacaatggtttccaatcagataatgtctccaaatctttagcgcatgaaccacagctgcgagttctaggtcatgggtagggtagttttcctcatgtggtcgtaattgtcgcgacgcataggccacaacttttccgtcctgcatcagtactcctcctagtccttgcctcgacgcatcacaatatataacaaagtctttcctgatgtcgggaagaactaaaataggcgctgaggtcagcttttccttgagttgctcaaagctttcctgacactgttctgaccacacaaacttcttttccttcttgagtagttgtgtcattggtcgggctatcttagagaacccttcaatgaaccttcggtagtatccagccaagcctagaaaactccgaatttcagtcacagatttgggtgctttccattccgtgacagcctccactttagcaggatccactgctactccaccggccgagattacgtggcctagaaaagcgacttcttttaaccagaactcgcacttgctgaattttgcatataacttatgcttccgaagtttctggaaaaccaatcgtaagtgttccgcatgttcttcctcatctttggagtagatcagaatgtcatcgatgaataccaccacaaacttatccaagtaatccatgaatactttgttcataagattcatgaagtatgccggggcattggttagaccaaacgacattactgtgaattcatacaacccatagcgtgttgaaaacgcggttttgggaatatcctcggtcctaatcttcagttggtggtatcctgatcgaaggtcgatctttgagaacaccttagctcccttaagttggtcgaagaggtcatcaatccgtggtagtggatacttgtttttgatagttacttcgttcagtgatcggtagtctacacacattctcatgctaccatctttctttttaacaaacaacactggggctccccaaggtgacgaactggggcgtacaaatcccttctcttgcaactctttgatttgctttttaagttcttctaactcattgaccggcatccgatatggtctcttggatatgggggcagttccgggtatcaggtcaataatgaactctatgtcacgatctggtggcattccaggtaaatcttctgggaacacatcaggaaatcgctgtactacgggcattccctttaggggtagcatggtaaatatacccccagcacgttcggttagcctaggatcttgatccatggttgctctcatatccgatccccagggtgtggtcagggtaacctctctacgtctacagtcaattactcctctatgctttgctaaccaatccatacccagaatgacatcaagagtttggggtattagcaccataagattggagggaaataccacatccctaaggcgaattggtacgtctatgcaagcatgactcacagttatctcgcccccaggtgagtgtactatcataggctttctaagtcccacgagggtcaagttgtgcttttgactagccttcagagatataaatgaatgcgatgcaccagaatcgaagagaactttaaccggggtggaattgatagagaacatacccattagtacgccctgatcttcctgggcctcttcagctcggacatggttcacttgtccgcgcccaaatccagtggtggtcctgttcgattgcggagtcttgaataggcctcgcccgacagcaggggtagtagtgctgcgaacagtcattgcattcgcgccagttcggacaggggttttgcgtggatgagggcagttgttagcgtagtgcccgtattccccacagttgaagcagtccacattcttcttggctccaggggcagccaaagttggcgtaggggtgcggttctgaagtgcaactggcctgttgaagttgctaagtgcagcgggacggttggtcaccatgacagggggcttccatccggacggagtggcttccttaagtcgctgaggcactgtctgaggtgggcgactcatagcaagcctcctcttgcggttgtgttccaccgtcctttgatcgttctctagcctgacgaccttgttgatcaggctctggaaactctcgtgatcctgcccgatcataggtccacgcaattcatcattcagcccttctatgaacttgtcgatcttttcttcttcatctgccaggtctccaattgcgtagcgagccaactgagtgaacttgtttagatactcctgcactgttgtattcccttgccgcagtcttctaaactcgttcttcttcatgcgcatcactgcagcaggtacgaaattctcgcgaaacgctgcagtgaactcctcccaggtgggttctccagcaccgtcttctcgggcccccttgtaggtatcccaccaatcaccagcgggtccttccagctggttcactgcgaagatcaccttgtcggcttcgcgtaccctgactagagtcagtttcttttctatgatgcgtagccagtcttctgcttccatgggctcatcggccgtagcgaacgtgggcggcttggtcctcatgaactctccaaagcttgaccctccgcggttgccttggttgctcgcgatagcttgcagaagttgagtttgggtggccataattccggccagagcgtttaagtcgggtgtctgagtttcgtcattgctggttgttgcacgacgtcggcttgccatcataaataaccggagtccccacggctcagaggtagtggcctctggatctggcttgggcctcttgcccgggggtcgtgtgctcttgcgagcagtgctgagggtgcgagggcctccgaggaaggtgatacagggaacaggagcctcatcctctgaaggatcagtgatgtctggctcgatctctggctcggtgtcggtcccctctgtctcggagtcgacctggatcggagtctccaaattggaacccagctgcggagaaggtgtagggatcagtggagtgtgaaccaactccggaacaggtggctgtgtcgctgtagggtccactaggtagggcgctgactcagtagctagcatactagcctctcccagaagagcgtggaacgccggtgggtacggcggggtgaggaagaagtagcggtcacggcctaccgctgtggaagtagaagcccctgtagtgctgatcttggctgctcgaagctgctcctccagctggctgacgtgctcctgactctctctcagctgctcctcaagagtatccatcatcccgcggcgatcgttgtactggtcggataactgctggaactgatcgccgtggacctggagctgtgccttcagtgagtctatctcactgccccaagcctggtgctcctcctccaactgaagctgctgtgccgtgaggtcggtcacctcagtctctaactcccccacacgtctctggtggtcgtcaatctccaacagagcctcctcgtagtagtcatctactgcctcagcccatcgtgacaaccgagtcaccatcgggttgtagcagcagggcgtgtcctgaactgtgcaaactgagttgccctcctcccggaacgggtgatgagcaaactcggtactcgctaactcagctcggtggatagagctgagtcggaggaaggcctcccgggcagcatcctgcatcgcggtctctggcaggtctcggtggtgacgtgtctgaaagctgtagtccaactcggaagggactcgggggtgaatctcgacccgagcctcccaaactgagccacactgcctcactcggtaagacgggaacccagggtatcgcagacgcctcaacatccgatgcagctcaatgacatacccctctgattgaggtaagctcaactcccaggtagcgggtgaatccgaatctgccatcggtgagttcgccgcgtcgccctctacccgttggtgccctccgttcgcgtcgtcgagccgtcgttcgccggcgagcttgcgctcccgagccgccgccggtgctgacgtcatcgctgacgtcat

SEQ ID NO: 56912 - DNA, 439 bp, Oryza sativa
  Clone ID: PAT_MRT4530_58776C.1
gagcattagtaaatctgcaggtcacccatttgcaggaacagaatcaaccgtgttctgaactcaaaacatgacgtcacatactgatattggcggagctacacctaattacccctgatattgcaggctttacaaggcctgtgctacatgtgcattgctatctagaatcagactctataccgaaacaaaccggtgcacaccatgaccttattattcgaagcagggcgactcggagcctcaaattaggggccagcaccgcatgtccactggagcgggactactgtcaaggtaccaaggacacaagttgatttggacctccacccaaaaatgcggcttaagaccatggccaggggcacatgcacctaaaattgtctctgaagcgagacccaatcactcattgatcgccggatggcatctccctagacggcctcgcctgatagga

SEQ ID NO: 56913 - DNA, 1365 bp, Oryza sativa
  Clone ID: PAT_MRT4530_58777C.1
atggggagcatgagcacaccggcggcgagcgccaccacctcgaacatcgaggacaacaacaacggcgggcaagtgctcctgttgccgttcccggcggcgcagggccacaccaacccgatgctccagttcgggcgccgcctcgcgtaccacggcctccgccccaccctcgtcaccacgcagtacgtgctctccaccacgccgccaccgggggaccccttccgcgtggccgccatctccgacggcttcgacgacgccagcggcatggccgcgctcccggaccccggggagtacctccgcaccctggaggctcacgggtcgccgacgctggcggagctcctcctctccgaggcgcgcgcggggcggccggcgcgcgtgctggtgtacgacccgcacctgccgtgggcgcgccgcgtggcgcgcgccgccggcgtggccaccgttgcgttcctgtcgcagccgtgcgccgtcgacctcatctacggggaggtgtgcgcgcggcggctggcgctgccggtgacgccgacggacgcgagcggtctgtacgcgcggggtgtgctcggcgtcgagctggggcccgacgatgtgccgccgttcgtcgcggcgccagagttgaccccagccttctgtgagcaatcggtcgagcagttcgccggactggaggacgatgacgacattctcgtcaactccttcactgacctcgagccaaaggaggcagcatacatggagtcgacatggcgtgggaagacggtcggcccgttgttgccgtcgttctacctcgacgacggccggctgcggtcgaacacggcatacgggttcaatctcttcaggagcaccgtgccatgcatggaatggctggacaagcaacctcctcgctctgtcgtccttgtgtcgtatgggacaatctccaccttcgacgtagccaagctggaggagctcggcaatggcctttgcaactccggcaagccattcctttgggttgtcaggtccaatgaggagcacaagttatctgtccaactccgaaaaaagtgtgagaagagaggactaattgttcctttttgcccccagctggaggcaattgttaatggcataccgcttgtggcaatgccacattgggctgaccaaccaaccatttcaaagtatgtggagagcttgtggggcacgggcgtgcgagtgcagctggacaagagcggcagcttacaaagggaagaggtagagagatgcatccgggaggtgatggatggtgacaggaaggaggactacaggaggaatgctgcaaggttgatgaagaaagctaaggagtcaatgcaggaaggagggagctctgacaagaatattgctgaatttgctgcgaagtattcaaattga

SEQ ID NO: 56914 - DNA, 4122 bp, Oryza sativa
  Clone ID: PAT_MRT4530_58778C.1
atgtggggcccacatgtcggtctccagagtggaggggcggctggcgggctggctgggccggcttggccacggggcgtgacagataccgagccagagatcgagccagacgtcactgatccttcggaggatgagacacccgtcccccgcatcaccttcctcggaggcccccgcactctcagcactgcccgcaagagcacccgacccccgggcaagaagcccaagcccgatccggaggccactatttccgagccgtggggactcagcaacgatgaaactcagacacccgacttaaccactctggccggcattatggccacccaaactcaacttctgcaagccattgcaaacaaccaaggcaaccgcggaggatcaagctttggagagttcatgaggaccaagccacccacgttcgctacggcagacgagcccatggaagcagaagattggctacgcatcatagagaagaaactgactcttgtcagggtacgcgaagccgacaaagtgatctttgcagtaaaccaactggagggacccgctagagattggtgggacacttacaaggaagctcgggaagaggatgctggagaacctacttgggaagagttcactgtagcatttcgcgagaacttcgtacctgctgcagaatatttgaacaagttcactcagttagcccgctatgcaattggagacctcgcagatgaagaggaaaagatcgacaagttcatagaaggactgaatgatggattgcgtggacctatgattgggcaagaccacgagagcttccagagcctgattaacaaggtcgttaggctggagaacgatcagaggactgtggaacacaaccgcaagaggaggcttgctatgagtcgcccacctcaggcagtgcctcagcgactcaagggagccactccatctggatggaaaccccctattgtggtgaccaaccatcccgctgcacctagcaacttcaacaggccggttgcaattcagaaccgcactcctacaccaactatggctgcccctgaagccaagaagaatgtggactacttcaactgcggggagtacaggcactacgccaacaactgccctcatccacgcaaaactcctgtccgtactggcgcaaatgcaatgactgttcgtggtactgctacccctgctgccggggacgtggtgtttccctccaatcttatggtcttaatacctcagaccctggatgtcatactgggtatggattggttaacaaagaacagaggggtaatcgattgtaggcgtagagaagttaccttgaccacaccctggggatcggatatgagaacaactatggatcaagatcctagactggccgaacgtgccgaaggcatattcaccatgctacccatgaaaggaatgcctgtagtgcaacgatttcctgatgtgtttccagaagatttacctgggatgccacccgatcgggacatagagttcatcattgacctgataccaggaactgcacccatatccaagaaaccgtatcgggtgccagtcaatgagttggaggaacttaagaagcaaatcagagagttgcaagaaaaagggtttgtacgccccagttcgtcaccttggggagccccagtgctattcgttaagaagaaagatggtagcatgagaatgtgtgtagactaccgttcattgaacgaagtaactatcaagaacaagtatccactaccacggattaacgatctcttcgatcaacttaaaggagctaaggtgttttcaaagatcgaccttcaatcaggataccaccaactgaaaattaggaccggggatatacccaaaaccgcgttctcaacatgctatgggttgtatgagttcacagtaatgtcgtttggtttaaccaatgccccagtgtactttatgaatcttatgaacaaagtgttcatggattacctggacaagtttgtggtggtattcatcgatgacattctaatctactccaaagatgaggaagaacatgcggagcacttacgattggtactccagaaactccggaagcataagttatatgcaaaatttaacaagtgtgaattctggttgaaggaagtcgcttttctaggtcacgtgatctcagccggtggagtagcagtggaccctgctaaagtagaggccgttacagaatggaaagcacccaagtcgctactcaagaaggaaaagaagtttgtatggtcagaacagtgccaggaaagctttgagcagctcaaagaaaagctgacatcggcacctattttagttcttcccgacaacaggaaagactttgttatatattgtgatgcttcaaggcaaggactgggaggagtactgatgcaggacggaaaggttgtggcctatgcattgcgacaattgcgaccacacgaggaaaactaccctacccatgacctagagctcgcagctatggtccatgcgctaaaaatttggagacactatctaattggaaaccattgcgatatctacactgaccacaagagtctgaaatatatcttcacccagtcagatcttaatttgaggcaaaggcgatggctggaactaatcaaggaccacgatctcgaggttcactatcaccctggcaaggcaaacgtcgtggccgacgctttgagtcgtaagagccattgcaatcatctgagaatggaaggaatggctcctgagcttaaagaggaatatgcccagctaaacctacatatagtgcctcgtggacggataaacacccttgacattcaacctcttttgagaacccaaatagaggaagctcagaaggacattgaggaaatccgagaagtgaaggcacgcctagctgcaggacgtgcacaggagttttccaccgatgaaaaaggtgttctatggtacaaaaagaggatctatgtacccgaacagggtggactgagagggttaatcctaaaggaggctcacgaatcggcatattcattgcaccccggaagtaccaaaatgtaccaggatctgaaggagggttactggtggcccaacatgaagagagatgtggccgaatacgtagcgctctgcgacgtatgccagaaggtgaaggctgagcaccagagaccggccggattgttgcaaccccttaggattcctgagtggaaatgggatgaaattggtatggattttattgttggattgcccaggaccgcaacagggtacgattccatctgggtgattgtggatcgactcacgaagacggcaagatttattcccatcaagacaaactataacagtgctaagctcgccgaggtgtacatgaccaggatagaaaaagtacatgaagccctaggaagttatcttgcttttagcacagcttatcatccgcagacggatggccaaacggagaggacaaaccaggtactggaagacatgctgagagcttgtgcattagattttagcaaagactgggagaggtgtttgccctacaccgaattctcctacaacaacagctttcaagcaagcctaaagatgtcccccaatgaggctttgtttggtcgacgatgccggactccgctgatgtggtctgagacaggtgaacgggcggtatttggacctgacattatcaacgaggccgaagagaaggtccgcctgattcgagaccatctgaaagtggctcaatcacgacaaaagagttacgccgacacccaaagaagaaacctggaatttaaagaaggggattacgtttatctaaaagtttctccgatgaggggaacgaaaaggtttaaggtcaaaggaaaactagcgccaaggtatgtgggacccttccaaatcacggctaggagaggagaagttgcatatcaactacaactaccagaacatatcgccgatgtgcacccggtcttccatgtgtcccaattaaagaaatgcttacgagtgccggaggagcaagctccactggaggagattcaccttagcaacgatctcacgtatccagaacacccggtcaggatattggatgaagccgaaaagagaactaggagcaaagtgtggcgtatgtacaaagtacaatggagtaatcacaccaaggatgaagccacttgggagagcgaagaattcttgaggatggaatacccgcatctattcgaaaacaggtaa

SEQ ID NO: 56915 - DNA, 671 bp, Oryza sativa
  Clone ID: PAT_MRT4530_58779C.1
atttcatcgcgctcgcgcgccccgcccgtttcgcctcggccgcctcctccaccgactccggccgccgctgcctgcggcgcgggcctgtgaggcggcatatccttttactagtggaggcctgacagaattatataaagactgctgaaaatgtctgagttccttgaccttgaggcacaagatgggataaggatgccctggaatgttattccaggcacgagggaggatgctttgagctgtgttgttcctatttctgctatctatactcctctgaaacaagttcctgatatccctgttctcccatattctcccctccgttgccggatgtgccgttccattctcaaccctttctccattgttgactatgtcgcaaagatctgggtttgcccattctgctttcagcgcaatcacttcccacagctttactcctcaatctcagaaagcaatctccctgcagaacttttccctcagtacaccacagttgagtacatatccactgctgaaactggccctgtagtgccaccggttttcatgtttgttgttgatacttgcatgattgaggaagaaattggttatttgaagtctgcactcacacaagttgttgagctattaccagataattcccttgttggattcattacttttgggacatatgtacaggttcatgaattggg

SEQ ID NO: 56916 - DNA, 240 bp, Oryza sativa
  unsure (1)..(240): unsure at all n locations
  Clone ID: PAT_MRT4530_5877C.1
cttaggggaacagacctaaatcgatcatcatatgctcttagtcccatatgaaggactcctgctcgccgattaaacggatcagagcttctcacatagcatagaaacttacgaatgcgaaagaccgctaacttcctacagaagctaagacactccttacagccacctcatcacatntctcctgctccatcccattgggctctctggcacatgccaccagtgatgatccccggcagcctccct

SEQ ID NO: 56917 - DNA, 1401 bp, Oryza sativa
  Clone ID: PAT_MRT4530_58780C.1
atggggagcatgagcacaccggcggcgagcgccaacggcgggcaagtgctcctgttgccgttcccggcggcgcagggccacaccaacccgatgctccagttcgggcgccgcctcgcgtaccacggcctccgccccaccctcgtcaccacgcggtacgtgctctccaccacgccgccgccgggggaccccttccgcgtcgccgccatctccgacggcttcgacgacgccagcggcatggccgcgctcccggaccccggggagtacctccgcaccctggaggctcacggtgcacgcacgctggcggagctcctcctctccgaggcgcgcgcggggcggccggcgcgcgtgctggtgtacgacccgcacctgccgtgggcgcgccgcgtggcgcgcgccgccggcgtggccaccgctgcgttcctgtcgcagccgtgcgccgtcgacctcatctacggggaggtgtgcgcgcggcggctggcgctgccggtgacgccgacggacgcgagaggtctgtacgcgcggggtgtgcttggcgtcgagctggggcccgacgacgtgccgccgttcgttgcggcgccagagttgacaccagccttctgtgagcagtcgatcgagcagttcgccggactggaggacgacgacgacgtgctcgtcaactcattctctgacctcgagccaaaggaggcagcatacatggagtcgacatggcgcgcgaagacgatcggcccgtcattgccttcgttctacctcgacgacggccggctgcggtcgaacacagcatacgggttcaatctcttcaggagcaccgtgccatgcatggaatggctggacaagcaacctcctcgctctgtcgtccttgtgtcgtacgggacagtctccaccttcgacgtagccaagctggaggagctcggcaatggcctttgcaactccggcaagccattcctttgggttgtcaggtccaatgaggagcacaagttatctgtccaactccgaaaaaagtgtgagaagagaggactaattgttcccttttgcccccagctggaggtgcttgctcacaaggccacaggttgtttcttgtcgcactgtggatggaactcgacattggaggcaattgttaatggcgtaccgcttgtggcaatgccacattgggctgaccaaccaaccatttcaaagtatgtggagagcttgtggggcatgggcgtgcgagtgcagctggacaagagcggcatcttacaaagggaagaggtagagagatgcatccgggaggtgatggatggtgacaggaaggaggactacaggaggaatgctacaaggttgatgaagaaagctaaggagtcaatgcaggaaggagggagctctgacaagaatattgctgaatttgctgcgaagtattcaaattga

SEQ ID NO: 56918 - DNA, 5133 bp, Oryza sativa
  Clone ID: PAT_MRT4530_58781C.1
atggcagattcggattcacccgctacctgggagttgagcttacctcaatcagaggggtatgtcattgagctgcatcggatgttgaggcgtctgcgataccctggattcccgtcataccgagtgagacagtgtggctcagtttgggaggctcgggttgagattcacccccgagtcccttccgagttggactacagcttccagacacgtcaccaccgagacctgccagagactgcgatgcaggatgccgcccgggaggccttcctccgactcagctctatccaccgagctgagttagtgagtaccgagtttgctcatcacctgttccgggaggagggcaactcagtttgcacagttcaggacacgccctgctgctacaacccgatggtgactcggttgtcacgatgggctgaggcagtagatgactactacgaggaggctctgttggagattgacgaccaccagagacgtgtgggggagttagagactgaggtgaccgacctcacagcacagcagcttcagttggaggaggagcaccaggcttggggcagtgagatagactcactgaaggcacagctccaggtccacggcgaccagttccagcagttatctgaccagtacaacgatcaccgcgggatgatggatactcttgaggagcagctgagagagagtcaggagcacgtcagccagctggaggagcagcttcgagcagccaagatcagcactacaggggcttctacttccacagcagtaggccgtgaccgctactttttcctcaccccgccatacccaccggcgttccacgctcttctgggagaggctagtatgctagctaccgagtcagcgccctacctagtggaccctacagcgacacagccacctgttccggagttggtgcacactccactgatccctacaccttctccgcagctgggttccagtttggagactccgatccaggtcgactccgagacagaggggaccgacaccgagccagagatcgagccagacatcactgatccttcagaggatgaggctcctgttccccgcatcaccttccttggaggccctcgcaccctcagcactgctcgcaagagcacacgacctccgggcaagaggcccaagccagatccagaggccactacttctgggccgtggggactcagcaatgacgaaactcagacacccgacttaaacactctggccggagttatggccacccaaactcaacttctgcaagccatcgcaaacaaccaaggcaaccgcggagggtcaagctttggagagttcatgagaaccaagccgcccacgttcgctactgccgacgagcccatggaagcaaaagactggctacgcatcatagaaaagaaactgactctagtcagggtacgcgaagccgacaaggtgatcttcgcagtgaaccagctggaaagacccgctggtgattggtgggatacctacaaggaagcccgagaagacggtgctggagaacccacctgggaggagttcactgcggcgtttcgcgagaatttcgtacctgctgcagtgatgcgcatgaagaagaacgagtttagaagactgcggcaagggaatacaacagtgcaggagtatctaaacaagttcactcagttggctcgctacgcaattggagacctggcagatgaagaagaaaagatcgacaagttcatagaaggactgaatgatgaattgcgtggacctatgatcgggcaggatcacgagagtttccagagcctgatcaacaaggtcgtcaggctagagaacgatcaaaggacggtggaacacaaccgcaagaggaggcttgctatgagtcacccacctcagacagtgcctcagcgacttaagggagcccctccgtccggatggaagccccctgtcatggtgaccaaccgtcccgctgcacttagcaacttcaacaggccagttgcacttcagaaccgcacccctacaccaactttggctgcccctggagccaagaagaatgtggactgcttcaactgtggggaatacgggcactacgctaacaactgccctcatccacgcaaaacccctgtccgaactggcgcgaatgcaatgactgttcgcggcactactacccctgctatcgggcgaggtctattcaagactccgcaatctaacaggaccgccactggatttgggcgcggacaagtgaaccatgtccgagctgaagaggcccaggaagatcagggcgtactaatgggtatgttctctatcaattccaccccggttaaagttctcttcgattccggtgcatcgcattcatttatatctctgaaggctagtcaaaagcacaacttgaccctcgtgggacttagaaagcctatgatagtacactcacctgggggcgagataactatgagtcatgcttgcatagatgtaccaattcgccttagggatgtggtatttccctctaatcttatggtgctaataccccaaactcttgatgtcattttgggtatggattggttagcaaagcatagaggagtaattgactgtagacgtagagaggttaccctgaccacaccctggggatcggatatgagagcaaccatggatcaagaacctaggctaaccgaacgtgctgggggtatattcaccatgctacccctaaagggaatgcctgtagtacagcgatttcctgatgtgtttccagaagatttacctggaatgccaccagatcgtgacgtagagttcattattgacctgatacccggaactgcccccatatccaagagaccatatcggatgccggtcaatgagttagaagaacttaaaaggcaaatcagagagttgcaagagaagggatttgtacgccccagttcgtcaccttggggagccccagtgttgtttgttaaaaagaaagacggtagcatgagaatgtgtgtagactaccgatcactgaacgaagtaactatcaaaaacaagtatccactaccacggattgatgacctcttcgaccaacttaagggagctaagattaggaccgaggatatccccaaaaccgcgttttcaacacgctatgggttgtatgaattcacagtaatgtcgtttggtctaaccaatgccccggcatacttcatgaatcttatgaacaaagtattcatggattacttggataagtttgtggtggtattcatcgatgacattctgatctactccaaagatgaagaagaacatgcggaacacttaagattggttctccagaaactccgaaagcacaagttatacgcaaaattcagcaagtgcgaattttggttgaaggaagtcgcttttctgggtcacgtaatctcagccggtggagtagcagtggaccctgctaaagtggaggctgtcacggaatggaaagcacccaaatctgtgactgaaattcggagttttctaggcttggctggatactaccgaaggttcattgaagggttctctaagatagcccgaccaatgacacaactactcaagaagaaaaagaagtttgtgtggtcagaacagtgtcaggaaagctttgagcagctcaaggaaaagctgacctcagcgcctattttagttcttcccgacatcaggaaagactttgttatatattgtgatgcgtcaaggcaaggactaggaggagtactgatgcaggacagaaaagtggtggcctatgcgtcgcgacaattgcgaccacatgaggaaaactaccctacccatgacctagaactcgcagctgtggttcatgcgctaaagatttggagacattatctaattggaaaccattgcgatatctacactgaccacaagagtctaaagtatatcttcacccagtcagatctcaacttgaggcaaaggcgatggttagaattaatcaaggactatgatttagaggttcactatcacccaggcaaagcaaacgttgtggccgacgctctgagtcgtaagagccattgcaatcatctgagaatggaagggatggtccctgagcttagggaggaaatagctcagctgaacctacatatagtaccccgtggacagataaacaccctggacattcaacctcttttgagaacccaaatagaagaagcccagaaggacaacgaggaagtccgagagttgaaggaacgcttggctgcaggacgtgcaaaggaattttcaaccgacgaaaaagatgttctatggtataaaaagagaatttacgtacctgaacagggtggactgaggggattaattttaaaggaagctcacgaatcggcatattcattgcaccccggaagtacgaagatgtaccaagatctgaaggaaggatactggtggcccaacatgaagagagatgtggccgaatacgtagcactctgcgacgtatgccagaaggtgaaggctgaacaccagaggccagcaggtttgttgcaacctctcaggattcccgaatggaaatgggatgagataggtatggattttattgttggattgcccaaaaccgcaacaggatatgattccatttgggtgatcgtggatcgactcaccaagacagcgagattcattcccgttaagacaaattatagcagtgctaagctagccgagttatacatgaccaggatagtatgtcttcatggtgtaccaaagaaaattatatctgatcggggcacacaatttacctcacatttctgggagaaagtccatgaagccctaggaagttatctcgcatttagcacagcttatcatccacagacagatggccagacggagagaaccaaccaggtcctagaagacatgctgagggcttgtgctctggattttagcaaggactgggagagatgtttgccctacgccgaattctcctacaacaacagctttcaagcaagcctaaagatgtcacccaacgaggcattgtttggtcgacgatgtcgtaccccgctaatgtggtccgagactggagaacgggcggtatttggacctgatattattcaagaagccgaagaaaaggttcgcttgatccgtgaccgtctaaaagtagcacaatcacgacaaaagagttacgccgacactcgaagaagaaacctggaatttaaggagggagattacgtttatctaaaggtttctccgatgaggggaaacaaaaaggtttaa

SEQ ID NO: 56919 - DNA, 456 bp, Oryza sativa
  Clone ID: PAT_MRT4530_58782C.1
ttgttttttttttccagccatcaaggacgcagatttttcgtttccagcgtccctgtacgtgggggctcaaaagcctttcagtttcagttctgaacacaataaaacctcgatggatatacagctagccacggaaggaattaaaagtcccttcatacttaagttacgccgatgagcttagcagcactgcaaaccgctgctttctccagtcagtagtaagcaagctttcagttcatgtgccgtgtgccttgccctttgtttcaccagattgcccagaagcaatttgcaccgtacatggaaattggcccccctcatcatcattcatcttctttctttttcgtcttttctttcacatttgaaacccatcctgagatggcctgatgcttaggtcctgagaacccagggacgggtactccatttggtaaacttcactgaattgatccattaatgagtggggca

SEQ ID NO: 56920 - DNA, 2590 bp, Oryza sativa
  Clone ID: PAT_MRT4530_58783C.1
ccggttttcgaatagatgcgggtattccgtcttcaagaattcttcgctttccaagtggcttcatcctcagtgtgattactccattgtaccttatacatacgccacactttggtcctagtccttttttctgcttcatccaatatccggactgggtgttctggatacgtgagatcattgctaatatgaatttcttccaacggagcttgttcctccggcactcgtaagcacttctttaattgagacacatggaagactgggtgcacatcggcgatattttctggtagctgtaactgatatgcgacttctcctcgtctagccatgatttgaaaaggtcccacatatcttggcgctagtttccctttgaccttaaaccttttcgtgcctctcatcggagaaaccttcagataaacgtaatccccttccttaaactccaggtttcttctttgggtgtcagcgtaactcttttatcgtgattgtgccacttttaaacggtcacggatcaggcgaaccttgtcttcggcctctttgataatgtcaggtccaaataccgcccgttctccagtctcggaccacatcagtggagtacgacatcgtcgaccaaacaatgcctcattgggcgacatctttaggcttgcttgaaaactgttgttgtaggagaattcggcgtagggcaaacatttctcccaatctttgctaaaatgcaaggcacaagctctcaacatgtcctccaagacctggtttgttctctctgtctggccatctgtctgtggatgataagctgtgctaaaagcaaggtaacttcctagggcttcatgtactttctcccagaaatgcgaagtaaactgcgtgcctcaatcggatataattctcttaggcacaccatgaagacatactatcctggtcatgtacaactcggcgagcttggcaccgcaataattggtcttgacgggaatgaatcttgccgtcttggtaagtcgatccacgatcacccaaatggaattataccctgttgcggtcttgggcaatccaacaataaaatccatacctatctcatcccatttccactcgggaatcctaaggggttgcagcaaacctgctggacgctggtgctcagccttcaccttctggcatatgtcacagagtgctacgtattctgctacatctctcttcatgttgggccaccagtatccttccttcagatcctggtacattttcatacttccggggtgcaatgaatatgctgattcgtgagcttcctttaggattaatcctctcagtccgcccttttcgggtacatagatcctctttttataccataagacatctttctcatcggtcgaaaattcctttgcaaaccctgcagctaggcgttccttcacctcttggatttcttcgttgtccttctgggcttcttctatttgggttctcaaaagaggttgaatgtctagggtgtttatctgtccacgaggtactatatgtaggtttaggtgggctatttcctctttaagctcaggagccatcccttccattctcagatgattgcaatggctcttacgactcaaagcgtcggccacaacgtttgctttgcctgggtgatagtgaacctctagatcatagtccttgaataattccaaccatcgcctttgcctcatattgagatctgactgggtgaaaatatacttcaaactcttgtggtcagtgtagatatcgcaatggtttccaatcaaatagtgtctccaaatctttagcgcatgaaccacggctgctagctctaggtcatgggtagggtaattttcctcgtgtggtcgcaattgtcgcgatgcataggccacaacctttccatcctgcatcagtacccctcctagtccttgccttgatgcatcacaatatataacaaagtctttcctattgtcggggagaactagaataggcgcagaggtcagcttttctttgagctgctcaaagctttcctggcactgttctgaccacacaaacttcttttccttcttgagtagttgtgtcattggtcgagctatcttagagaatccttcaatgaaccttcgatagtatccggccaaacctagaaaactccgaatctcagtcacagatttgggtgccttccattccgtaacggcctcaactttggcaggatccactgctactccaccggctgagattacgtggcctagaaaagtgacttcttttaaccagaactcacatttactaaactttgcatataatttatgcttccgaagtttctcgagtaccaactgcaagtgctccgcatgctcttcctcgtctttggagtagattaagatatcatcgatgaatactaccacaaatttgtccaagtaatccatgaacactttgttcataagattcataaagtatgccggggcgttggttaacccaaacgacattactgtgaactcatacaatccatagcgtgttgagaacgcggtcttgggtatatccccggtcctaattttcagttggtggtagcctgatcgaaggtaaatcttagagaacaccttagctcctttgagttgatcaaaaagatcatcaatccgtggtagtggatactttttgc

SEQ ID NO: 56921 - DNA, 432 bp, Oryza sativa
  Clone ID: PAT_MRT4530_58784C.1
tccgtccgcatcccggtcgccccgcgtccgcgtaggcagcagtgcagccagtggcaacccccttcttccatcacccgtgtttcaactgagaactgccaatcatgcacacatgctgccaacactcagatgatcgacaacatctcactgccaggccattacatgttcagctttgtgccagctacggctcaacagtttgctagcgtctacttcgatcagagcaactcaagcccaacttgttggccctaaacatgccgcattgcggttctcccagctcaacactgctccctgttgcttcccaccgtcggggttctggtttgaattgtgcgttagtgtcagggagaaatttagtctgcttctcggtgtgacagttgaacattgggtgatcactcttcttttttgtatgctgttttccgtttgcctttgttggtttct

SEQ ID NO: 56922 - DNA, 3911 bp, Oryza sativa
  Clone ID: PAT_MRT4530_58785C.1
ccagttgccgaatagatgcgggtactccgtcctcaagaattcttcgccttcccaggtggcttcgtcctcagtgtgattactccattgtaccttgtacatacgccacactttgctcctagtcctctaatctgcttcatccaatatccggatcgggtgttctggatatgtgagatcattgctaatgtgaatctcttccagcggagcttgttcttccggcactcgtaagcatttctttaattgggacacatggaagactgggtgcacatcggcgatatattctggtagctgtaactgatatgcgacttctcctcgcctggcaatgatctggaatggccccacatatcttggtgccagttttcctttaaccttaaacctttttgttcctctcatcggagaaacctttagataaacgtaatctccttccttaaattccaggtttcttcttcgagtgtcggcgtaactcttttgtcgtgattgtgctacttttagacgatcacggatcaagcgaaccttttcttctgcttcttgaataatgtcaggcccaaataccgcccgttctccagtctcggaccacattagcggggttcgacatcatcgaccaaacaatgcctcgttgggtgatatctttaggcttgcttgaaagctgttgttgtaggagaattcggcgtagggcaaacatctctcccagtccttgctaaaatccagagcacaagccctcagcatgtcctccaggacctggttggttctctccgtctggccatctgtctgtggatgataagcggtgctaaatgcgaggtaacttcccagggcttcatggactttctcccagaaatgtgaggtaaattgtgtgcctcgatcagatataatcttcttaggtataccatgaagacacactatcctggtcatgtacaactcggcgagttttgcactgctatagtttgtcttgacggggatgaatcttgccgtcttgttgagtcgatccacgatcacccaaatggaatcatatcctgttgcggttttgggcaatccaacaataaaatccatgcctatctcatcccatttccattcgggaatcctgagaggttgcaacaaacctgccggcctctggtgttcagccttcaccttttggcatacgtcgcaaagtgctacgtattcggccacatctctcttcatgttgggccaccagtagccctccttcaaatcctggtacattttggtacttccggggtgtaatgagtatgccgactcgtgagcttcctttaaaattaatcccctcagtccaccctgttcgggtacgtaaattctctttttataccatagaacgtcttttccgtcggttgaaaattcttttgcacgtcctgcagctaagcgttccttcacctctcggacctcctcgtttccttctgggcttcttctatttgggttctcaaaagaggttgaatgtccagggtgtttatccgtccatgaggcactatatgtaggttcagctgagctatttcctccctaagctcagggaccatcccttccattctcagatgattgtaatggctcttacgactcagagcgtcggccacaacgtttgctttgcctgggtgatagtgaacctctaaatcatagtccttgattaattctaaccatcgtctttgcctcaagttgagatctgactgggtgaagatatactttagactcttgtggtcagtgtagatatcgcaatggtttccaattaggtaatgtctccaaatctttagcgcatgaaccacagctgcgagttctaggtcatgggtagggtagttttcctcatgtggtcgtaattgtcgcgacgcataggccacaacttttccgtcctgcatcagtactcctcctagtccttgccttgacgcatcacaatatataacaaagtctttcctgatgtcgggaagaactaaaataggtgccgaggtcagcttttctttaagctgttcaaagctttcctgacattgttctgaccatacaaacttcttttccttcttgagtagttgtgtcatcggtcgggctatcttagagaacccttcaatgaaccttcggtagtatccagccaagcctagaaaactccgaatttcagtcacagatttgggtgctttccattccgtgacagcctccactttagcagggtccactgctactccaccggctgagattacgtgacccagaaaagcgacttccttcaaccaaaattcgcacttgctgaattttttgtataacttgtgctttcggagtttctggagaaccaatcttaagtgttccgcatgttcttcttcatctttggagtagatcagaatgtcatcgatgaataccaccacaaatttttccaagtagtccatgaacactttgttcataagattcataaagtatgccggggcgttggttaaaccaaacgacattacggtgaactcatataatccatagcgtgttgagaacgcggttttgggtatatccccggtcctaattttcaattggtggtatcctaatcgaaggtcaatcttagagaacaccttagctcctttgagttgatcaaaaagatcatcaatccgtggtagtggatacttgtttttgatagttacttcgttcagtgagcggtagtccacacacattctcatgctaccatccttcttcttgacgaatagcactggggctccccaaggtgacgaactggggcgtacaaatcccttttcttgcaactccctaatttgctttttatgttcttctaactcattgaccagcatccgatatggtctcttggatataggggcagttccgggtatcaggtcaataatgaactctatgtcacgatctggtggcattccaggtaaatcttctgggaacacatcaggaaatagctgcactacgggcattccctttaggggtagcatggtaaatatacctccggcacgttcggttagcctaggatcttgatccatggttgctctcatatccgatccccagggtgtggtcagggtaacttctctacgtctacagtcaattactcctctatgctttgctaaccaatccatacccaatatgacatcaagggtctcacccccaggcgagtgtactatcataggctttctaactcctcgtccaccagcaggggtagcagccccgtgaatagccattgcattagctccggtgcgaatgggtgtcttgtttagatgaggacatttgttggcaaaatgcccatactctccacaattgaaacagcttcctggcctcattactccagtagcggcctgattcggtgcaggagctcggttctgagtggtaaccggcctgtggaagttgctatgtgcggtaggacggttcgttgttaccaccgttggtttccatcctgatgaggcagctcctttaggatgctgagttgccacctgaggtgggcggttcatggcaagcctcctcttacgattgtgctccacaaccttccggtcgttttccagcctaacgaccttattgatcaaactctggaaactctcatgatcttgcccaatcataggcccacgcaactcatcattcagcccttctatgaacttgtcgatcttttcctcttcatctgcgaggtctccgattgcgtagcgggtcaactgagtgaaccggtttagatattcttgcaccgttgtgtttccttgtcgcggccttctgaactcgttcttcttcatacgcatcaccgcagcaggcacgaagttctcatgaaaagctgcagtgaattcatcccaagtgggttctccagcatcttcttcccgagcttccttgtaagtatcccaccaatcgccagctggtccctccagttggtttactgtgaagatcactttgtcggcttcgcgcatccggacaagggtcagtttcttctctatgatgcatagccaatcttctgcctccat

SEQ ID NO: 56923 - DNA, 4266 bp, Oryza sativa
  Clone ID: PAT_MRT4530_58786C.1
ttaccagtcttcgaataggtgcgggtattccgtcctcaaaaattcttcactttcccaggtggcttcatcctcagtgtgattgctccattgtaccttgtacatatgccacactttgctcctagtcctcttttcggcttcatccaatatccggatcgggtgttctggatatgtgagatcattgctaatgtgaatttcttccagcggagcttgctcttctggcactcgtaaacatttctttagctgagatacatggaagactgggtgtacatccgcgatattctctggtaactgtatctgatatgcaacttctcctcgcctggcaatgatctggaatggtcccacatatcttggtgccagttttcctttgaccttaaacctttttgttcccctcatcggagaaacctttagataaacgtaatctccctccttaaattccaggtttcttcttcgggtgtcggcgtaactcttttgtcgtgattgtgctatttttagacggtcgcggatcaagcgaaccttttcttcggcctcttgaataatgtcaggtccaaataccgcccgttctccagtctcggaccacattagcggggtacgacatcgtcgaccaaacaatgcctcgttgggtgacatctttaggcttgcttgaaagctgttgttgtaggagaattcggcgtagggcaaacatctctcccaatccttgttaaaatccagagcacaagccctcagcatgtcttccaggacctggttggttctctccgtctggccatctgtctgtggatgataagctgtgctaaatgcgagataacttcctagggcttcatggactttctcccagaaatggtaggtaaattgtgtgccccgatcagatataattttctttggtacacaatgaagacatactatcctggtcatgtataactcggctagcttagcactgctataatttgtcttaacgggaatgaatctcgccgtcttggtgagtcgatccacgatcacccaaatggaatcatgtcctgttgcggttttgggcaatccaacaataaaatccatacctatctcatcccatttccattcgggaatcctgagaggttgcaacaaacctgccggcctctggtgttcagccttcaccttctggcatacgtcgcagagtgctacgtattcggccacatctctcttcatgttgggccaccagtatccttccttcagatcttggtacatcttcgtacttccggggtgcaatgaatatgccgattcgtgagcttcctttaaaattaatcccctcagtccaccctgttcgggtacgtaaattctctttttataccatagaacatctttttcgttggttgaaaattcctttgcacgtcctgcagctaagcgttccttcacctctcggacttcctcgttgtccttctgggcttcttctatttgggttctcaaaagaggttgaatgtccagggtgtttatctctaaatcatagtccttgattaattctaaccatcgcctttgcctcaagttgagatctgactgggtgaagatatactttagactcttgtggtcagtgtagatatcgcaatggtttccaatcagataatgtctccaaatctttagcgcatgaaccacagctgcgagttctaggtcatgggtagggtagttttcctcatgtggtcgcaattgtcgcgacgcataggccaccacttttccgtcctgcatcagtactcctcctagtccttgccttgacgcatcacaatatataacaaagtctttcctgatgtcgggaagaactaaaataggcgctgaggtcagcttttccttgagctgctcaaagctttcctgacactgttctgaccacacaaacttcttttccttcttgagtagttgtgtcattggtcgggctatcttagagaacccttcaatgaaccgtcggtagtatccagccaagcctagaaaactccaaatttcagtcacagatttgggtgctttccattccgtgacagcctccactttagcaggatccactgctactccaccggccgagattacgtggcctagaaaagcgacttcttttaaccagaactcgcacttgctgaattttgcatataacttatgcttccgaagtttctggagaaccaatcgtaagtgttccgcatgttcttcctcatctttggagtagatcagaatgtcatcaatgaataccaccacaaacttatccaagtaatccatgaatactttgttcataagattcatgaagtatgctggggcattggttagaccaaacgacattactgtgaattcatacaacccatagcgtgttgaaaacgcggttttggggatatcctcggtcctaatcttcagttggtggtatcctgatcgaaggtctatctttgaaaacaccttagctccctcaagttggtcgaagaggtcatcaatccgtggtagtggatacttatttttgatagttacttcgttcagtgatcggtagtctacacacattctcatgctaccgtctttctttttaacaaacaacactggggctccccaaggtgacgaactggggcgtacaaatcccttctcttgcaactccctgatttgctttttaagttcttctaactcattgaccggcatccgatatggtctcttggatatgggggcagttccgggtatcaggtcaataatgaactctatgtcacgatctggtggcattccaggtaaatcttctgggaacacatcaggaaatcgttgcactactggcattccctttaggggtagcatggtaaatatacctccggcacgttcggttagcctaggatcttgatccatggttgctctcatatccgatccccagggtgtggtcagggtaacttctctacgtctacagtcaattactcctctatgctttgctaaccaatccatacccaaaatgacatcaagagtttggggtattagcaccataagattggagggaaataccacatccctaaggcggatgggtacgttaatgcaagctgtatccactgctatctcacccccaggtgagtgtactaacattggttgtcttagtttaactctggttaaattgtgttgttgacttgctttcaaagatataaatgaatgcgatgctcctgaatcgaagagaactttaactggagtggagttgagtgaaaacatacccatcagtacgccttggtcttcctgggcctcttcggctcgaacgtggttcacttgcccgcgtccaaatcctgtagcggtcctgttagtctgcggggtcctgaatagacctcgtccagcagcaggggtagcagtcccgtgaatagccgttgcattagttccggtgcgaatgggtgtcttgtttggatgtggacatttattggcgaaatgcccatactctccacagttgaaacagcttcctggccttactgatccagtggcggcctgatttggtgcaggagcgcggttctgaatggtaaccggcctgtggaaattgctagaggcggcaggtcgactggttgtcaccactgttggtctccatgccgaggaggttgtccctttaggacgctggggtgcggtctgaggcgtgcggttcatggcaagcctccttttacgattgtgctccacgaccttccggtcgttctccaacctaacgaccttattgattaaactctggaaactatcgtggtcttgtccaatcatgggcccgcgtaactcatcattcaagccttcaatgaatttgtcgatcttttcctcctcgtcggcaagatctctagttgcgtagcgcgccagctgagtgaaacggttcaggtactcttgtactgtggtattcccttgccgtagtctcctgaactcattcttcttcatccgcatcaccgcggcaggcacaaagttgtcacggaaggctgtggtaaattcctcccagtttggttctccagcatcttcttctcgggcttctttgtacgtgtcccaccaatctccggctggtccttccaattggtttgccgcaaagatcactttatcggcctcacgtactcgaacaagagttagcttcttctcaatgatccttaaccaatcttcagcatccataggttcttcagctgtggcgaatgtgggtggcttggtcctcataaactctccaaagcttgaccctccgcggttgccttggttgttcgcgatagcttgcagaagttgagtttgggtggccataattccggccagagtgtttaagtcgggtgtctgagtttcgtcattgctggttgttgcccgacgtcggcttgccat

SEQ ID NO: 56924 - DNA, 139 bp, Oryza sativa
  Clone ID: PAT_MRT4530_58787C.1
gcactggcaacccgctgttcccagatatcgctctactacgcacccggacagggaggacttaagtgctcttgaggactatcaccacctctacacctacctcaaacatactgtgggatacacagcaatcactagagattaa

SEQ ID NO: 56925 - DNA, 227 bp, Oryza sativa
  Clone ID: PAT_MRT4530_58788C.1
aagtgcaaggccaagtgaaaagactttcaatagaatgccactgagacacagtgttgcggagaaaaaaaagaatgcccctgagacacagatggcaatgaaatgaatcatgaagggtttgagggcttgtaacttgttagtcttgaatatatatgtccaacccaaaccatattgataaatctattgaagatttgaaggcgagttatttgcaaaaaaaaaaaaaaaaaaaa

SEQ ID NO: 56926 - DNA, 1179 bp, Oryza sativa
  Clone ID: PAT_MRT4530_58789C.1
tgaggagtaagcgtattggcgatgcactaaacttcttcaacttcattcgtgacaagaagacacctggcaccaagctgtacaatgtattcatatctggtctatgtgaagctcagaagccagagcaggcaatggtgttctggagggaagcgagggagaagggtttagtcccaagcatcagctgctatgaacagcttgtgctcctgttgtgctctgtgaaagattatgacaatgtcgtaaaggttattgatgacttcaaagaaacaggtcgccctgtttcggctttcttgtgtaacgtgcttctgttgcacacattgaggggcagtgaccaggctaaggcttggaaacgttcagagcaggcaacagtgaaaccagaagagatccaggtaagggggtaggacggttcttgattggcgaacttattatgatgtttgcaggtggtattaggaacatgaatgacttagaggatttagaagaggacctagaaaaacattttccagttgatgtttacacttataacatgttgctgcgagggttgagcatggtggggaggatggactctgcctgtaacttgtttgagaggctgtgccgcaaggggtatgaaccgaatcggtggacttttgatataatggtacatggcttctgcaagaatagtgacagggatgaggccgagagatggatggaagcaatgcaccgaaatgggttctatcccacatggtacactatgaggatatataacaatttagcgttgcgatcaactgatcataaagtcatctcatttgtataagtaatcatctctctgccaccgctttcatgccttggtctgctgtgatcctatgacttcactggaacaggcctaatttttgaacatcagatctgtacctgtggaagtttattcctaaatttaacatcactatcctctgaaccacatctcacctggcccaacacagttccaagatgcgtctaggatatcagttgacatgtaatctagttttacacaattttgcgatcacatgatatttttgtgcccagaattttgaggttttagctatccgatcattcggtattgtttcatttggttgtttaacaaccattagggccccactgtaatcagtaagttatatcaagcaatggtcattctttttcatctggaatttaagcactagaaaatagaagttgaat

SEQ ID NO: 56927 - DNA, 392 bp, Oryza sativa
  Clone ID: PAT_MRT4530_5878C.1
ctttccgactagagcagctgacgagtgaggtgcgtgcgagtttcctcaagttccacatccggctggtgggcaaggtgctgggagagttcccgcccaaggggctcacgcggctgtcggagaaggtgcccttggcgttgggggccaaccccaacggagcggcaaggccagggggcaaaccggacgcaagcagggcatgggtggacaactcacaagctccgcaggggggggagcccaccaccaacgtggtgttcatcctgcacctggaggacgagaaggccatgcacggggcgagggagacgctgcgcaccaccgtgctgaggcagcaggccgcgcataggttgggagaggacgcggagatggtgccctacctgggctttttcctcctggaacct

SEQ ID NO: 56928 - DNA, 240 bp, Oryza sativa
  unsure (1)..(240): unsure at all n locations
  Clone ID: PAT_MRT4530_58790C.1
gtctcctccgctccttgagccatctcgcggccgaacaggggagggggcgccgatctccatctggcgaggagagcaggggaggggatcctggtgaggactacaaaggagggattcaagtttgagtctggattangttgnctgcatgtctttatacaagattgagcttgaccacaaggacatgttccatgattttttcatagttttttttttgaagagttttgcttcatttctttttatttt

SEQ ID NO: 56929 - DNA, 786 bp, Oryza sativa
  Clone ID: PAT_MRT4530_58791C.1
gaaaccaaagctgcaagtagccagccagaggaagaagaagaagaagctagctagcttctcgggaaggaggagggaacggagatcggaggcggaggctccaagaaagcagcaagaaagtgcgaaactctgaggaggaaggagaagggaggttgaatcgatcgatcgatggctcggcggccgacgccgagggcaatctacagcggcggcaattctccttggattgagagtattgttgttcttacattacagcttgaaaatgagggtaagggggaagacatgccagtgcattattgtgacggacggattgcaaatccaacacttctgtcagtttctgaaagtacactacatgaactggcaacgccattggcgggctaaatctagatcacaccgcagcgctggctgtcacggcgatccacatctaagtagtcggccacaacataacttccaacagagtgctggttggctgcaatgttcatcaggccatcgtttcctgcttctgcgaaggccgcaacttgctgctggtgaatccatcagcaacaagcttattgacagcatccctcagcttctcataatcctccgttacattgtaaacttggtgtgagatcctaacataccctgtgactgcatcaccattcttatcctttgccatttcttgagcttctactcttctcgaaccgcagtatattggcacctcccccataaaatccttcctcaacattgttctcattctcatcacatcatcatcactttcaacgaccaagcaaccaggaataccaaccataacca

SEQ ID NO: 56930 - DNA, 418 bp, Oryza sativa
  Clone ID: PAT_MRT4530_58792C.1
ctgcctgattgcacacaatgcagggaactgctgctgggccaccgtcgatagtctatgcacgatgatcttccaactggcctatgaacatttgggcaacttgtagattgtttgtctttcacatgctgattttagtaaatgtgaatatatatgtatacctgataatcctcgaggtctcgctggcaagtgtttcggatgtccatgccaatgcagtagaaggtatggctccatgagtctttctgtgccagatgcttcacatgtatttgaaagctatagagcattatttgcacttgaagtcagatggataccattcttaatgcaataggaatgtatcaagcatgctccattcctctgccatgcacctgtcaccagaaaattagttctgccagttgattgaaagggcaagtaggtagcgtatcac

SEQ ID NO: 56931 - DNA, 2926 bp, Oryza sativa
  Clone ID: PAT_MRT4530_58793C.1
ctagatcacaccgcagcgctggctgtcacggcgatccacatctaagtagtcggccacaacataacttccaacagagtgctggttggctgcaatgttcatcaggccatcgtttcctgaggtactagcaaagttaccggtgtagcaaatgaacaactgtcctaacttgagtagaacacagggtctcacaaaggtcttctgcgaaggccgcaacttgctgctggtgaatccatcagcaacaagcttattgacagcatccctcagcttctcataatcctccgttacattgtaaacttggtgtgagatcctaacataccctgtgactgcatcaccattcttatcctttgccatttcttgagcttctactcttctcgaattgtagtatattggcacctccaccataaaatccttcctcaacattgttctcattctcatcacatcatcatcactttcaacaccaaggcaaccgggaagaccaaccataaccatgctaccgcacagctctggtggtgtgccaagaaaagtcccccatgcctcagcaagcatcttacccatctcgatcactttttcatggttacggctccttattccctcgatgccaccttcaaatcggttaacaaaatcaatagattcaggcactacaagctgtgcactgtaatcccttgtcccaatccatccactctccatgggaagcccattgccgtactcgtgcgacaccacaggatggtggagctgggaggctatcggatcatcctttcgggtgtgcaagaaagccacggcaggcgggcagaagaaccacttgtggagattgctggtgtaaaaatcggccccaatatcgcgcacatcaacagggacctgcccaatggagtgcgcggcatctataaacaccttatcgacaccctcttctcggcagatggcaacgagctccttcaccgggatgacaacgctaggcatggaggtgatgtggtcgatgaccgcgaggcggaccttgcgccccccggccttggccacatcgagcgcggcgcggaactcggcgatgatggcgtccgcggacgcgacggggaacgggagcggcacctcgacgacggtggccccggcgcgggcgacgtaggcgtggatggacttcttgacggcgccgtacgcgtagtggagcatgagcacggcgtccccgcgggagaacctcccctcggcgaagctccacgcggcgtgctgcagcacgatggcggcggcggtggtggcgttgtcgacgagggagacctcggcgacgtccccggcgttgacgaggcccgcgacggcagcccgcgagcggcggagccccggctggagggcgtggaagtagaagtcgtcgggctgggcgatgaagaggcgctgccaccgcgcctgcgcgtcgaggagggaggacgggcagcacccgaagctgccgttgttgacgcgcgccaccccggcctcgtggtgctcgaactccgcccggatctgcgccgccgagatcaccgacctcggccgcttcgccggcggcgggcgcggcgccggcccgttgccgttccccttcccgttcccgtacccgttctcggccgcccccgccgccgccgccgccgccgcgtcgtcatccggcgggatcgacgccatcgctcgccgcgccgccgcgttagggtttggttggttggtttggttggattggattggagaggtggtggaggtggagatttggggagaggagagaagtgaatttgcggattgggaatgggggcttctcgcgtcgcgagccgtgtcgagttcgagttcgaaccgcgccggccgaggcgaggaccggaccggtctcggtcgggccggcgatcgccgagctgcacctgcacctgcaccccgaggagaggagaggagcaatggcggcggggtaccgggcggaggacgactacgactacctcttcaaggtggtcctcatcggcgactccggcgtcggcaagtccaacctcctctcccgcttcacccgcaacgagttcagcctcgagtccaagtccaccatcggcgtcgagttcgccacccgctccctccaggtcgacggcaaggtcgtcaaggcccagatttgggacaccgccggccaggagcgataccgtgctattactagtgcatattaccgaggtgctgttggagcgttgcttgtctatgatgtcacccggcactcaacctttgagaatgttgagcgctggttgaaggaattgagggaccatacagacccaaacatagttgtcatgctagttggcaacaagtctgatctgcgccatcttgtagcggttcaaaccgatgaagggaaggcattcgcggagagagaatcgctctatttcatggagacctctgcgctcgagtccaccaacgttgagaatgcatttgcagaggtcttgacccagatctaccgcatcgtgagcaagaggtcagtcgaagcaggtgatgatgcaggttctggtcctggcaagggtgagaagatcaatataaaggatgatgtttcggcggtgaagaagggcggctgctgctcgggctaagctcttgctgtattttttttgggacctgtgtgagcttgtgttatcgccgttccaagcgactgagaaattgttagtagtattagcaacttctatgttacgtagagagtttattgctataactgaaaggtttggccagatcagtttagatcttcctattgttgtatggtctccgcggcaactggggcatggtgttggttttcatgtgaatccattgcagccatgcttgaactgttgaatcaagtagaaatatgttttacgcttgcacgctgttgatttggtaaaaggggaaatgataagcagagtgtacacttgtactacatggtgggatgcaatttggcacgcaagcaaataaataacttacatttttagtgaaaaaaaaaaaaaaaaaagcggcc

SEQ ID NO: 56932 - DNA, 561 bp, Oryza sativa
  unsure (1)..(561): unsure at all n locations
  Clone ID: PAT_MRT4530_58794C.1
ctgtgactctagtagcagtcgctctcgtcgtcgggtcttttacaatttctgcgggctaccttcatccacacctcggatcggtggatcgaccgatcgatcgacgggtggtggcacgttgttttcttctccatccatccatccatccactcggtggctatggcgtagggaggaaaatcacgaaaaagagggtcactcggacggattcttttctctctctctctcttttcttcttcttgttctacttctttaatcttcttcttctctgctgctctgccgtccatggtggtatggtggtgatgtggtggcgtgcaaggtgaggtaaagggggtgtggtggtggtcggctcggctgtttatccatccatccatgngatgccggtgaggttggcggcgcgcccgccgcgccgccgccgtgtcgaatgggtttgttcacgccgtcgtgcggtggtgcttctctccgctcttcttctggctgttcaccgtcgctctcgtcgncgccatccacctcgcctccacctacatctctccctccanagacgaagaggacaaggagaagaaggcg

SEQ ID NO: 56933 - DNA, 471 bp, Oryza sativa
  Clone ID: PAT_MRT4530_58795C.1
atgctctggtgcgccaccgacatcgcctctcattctcgcgctgttggcaccacctccttttcccgtcacccctcgctgcctcgtctccttctcgggggcgctgatgggcgatcagccgtgcgcccacgcgatcatatgggcatggaaggcactaggaataaacacccctccttcagcgacatggttcccgagaatcccgacgccatcaacgcgatcacattcacgcccaaccgccgctcacgcctcacgtcctcacgcgagatcgcggccgctggcaccaacgccgtcgcaacaccgcagccatctcgtccgaggccgccgtccgctggccgttttcacgcacttcctcttccgccgcggccacgcgacgcccatgcgaggccgaggtgccgaggcgcagccgccgagccgcgcaggtttcttgccgttgccgtcgctcattgttttgtacttctactgatgcctgattga

SEQ ID NO: 56934 - DNA, 204 bp, Oryza sativa
  Clone ID: PAT_MRT4530_58796C.1
atgctgctcacgggacaacaaaaaccacttattgaacacaataacttgaaaatgatggagccagcacttatcccacacgaatcaattaacagtcgcaaggggaaattctgcagaggcaggaaaaccatcacacctgagctgggaaatgcatgtggccaggagacagagtgctggatgcgcggccaatcgcccggtcaagcatga

SEQ ID NO: 56935 - DNA, 498 bp, Oryza sativa
  Clone ID: PAT_MRT4530_58797C.1
caccccaacaagcaaatgttattaacaaaggaaagctccattaaatcctgtaaacaaacaagggaacatttattttccaaaaaaaattatttgagctgggcaacccacacaagataaaatcgaataacccaaaagctcaaagcctaggaactttggggggcacacaaaccctatgagcggggactaaagaaaacatggaaatggccttttttttaatccccccttggttcctccctcgatccatgggggaaacatcaacattgctttaatttcaggcgggtggcatgggcctagggatgcaacaggggaagcgggctttacggacattggtaaaaatctccatttttgcactttcaagcatacaaacgatttcagtaaaggcggggcgaacttaagggttcgcatcccaacaaagagtcatgatggggcttaaagcaggcaggcagtcctgggggatcactggccgagcacccttgttcaccacaaaaaaagctgcct

SEQ ID NO: 56936 - DNA, 342 bp, Oryza sativa
  Clone ID: PAT_MRT4530_58798C.1
tccccgggaggctgtcccccacacgaaccgtgtgtgattaatatggtgggcgcggggatatccactgctcgtgaagtgtggccaaaatcgcgctaggatgataaggaaatgaaccttgtataatgagaaatggaaatgaaatgaaaattgtgggcaaaacgccaaatttgcggtgtgctgctaatgtactggtgaaaagtgttgcttataaatatgcaagttgctggaatggctaaggacaatccctccacagatgggtgctttcctatttttggtggttgcccagttccacaatgtgactgttgggtaatccctcttgggagattgcatgcaaataatgag

SEQ ID NO: 56937 - DNA, 990 bp, Oryza sativa
  Clone ID: PAT_MRT4530_58799C.1
atggcggcggtggaagtgaccgctagatccgcgcctagaaatggcggggaagtgaccggtggcggggtctactgctggcgatcgacggcggtgcccggtggcacggcggcgggcgaggttaaattagatatcctaattaagcaaagcaaaatggaatatatatggagcagtacaatggtgttgccgcggcgtggcaggcagctagctggccggccggcagccacgccaccgtctactatacgccgctacggtgcggacgacgaggcggcgccggcgagcgcatgggtgcggttgaggacggacatgaggcgctgcagcctgagatcctccctgaactgccggatgaaccgctccgccctcgcgttcacctccgccttcccttccacctccgcgaacgcgcgcctccccttcgccgcctccctcctcttcctcggcctctcctccgccgtagcagcagcagccacctcgccggcggtggcagcagcagcagcagcagcttgtggcggcggcggccgaacggcggccaccgctggatgcgcgtgcgcctcgtccaatccaatgggattctcctccgccgcctctgcattccctgacgccgccggcgacgtcggtggacctacggtgatgtcgtcctcttgcacaccggagatcgcgtggacgaaggagaaggcggagaaggaccgtagccgctccatgaccatggacgacgcgctgcgagtgagcctgcgcctggtcgacgacggcggcggcggcggcgcctgctcatgcgcccgggacgacacagcgacggcgccgacaacgacggtgaacaggacgaaccacgcggcgcccgggctgagccacggcggcagcggccaccaccacaacgacggcgacgacgacgactcaaccgcggccatcgatcttgtcacacacactctcactacaccccggtctttgctttcttgcagttgcagcgatctgctcgtcctcgaaacctctgtatattaa

SEQ ID NO: 56938 - DNA, 222 bp, Oryza sativa
  Clone ID: PAT_MRT4530_5879C.1
aattctatcttgaggttaaaatggcaacagtgcatttgtttcaaatacaaaggtttccagcacgacaaaaagggtcttgaaagtggatacagatttaattgtaccatgaaaataaacagattcactgccagactatacctctggcaagactgcgcgcaactaccatgagtcctgactgtgagaggacaaaacacgcaaactgaggaccaaacctttcaaaaa

SEQ ID NO: 56939 - DNA, 192 bp, Oryza sativa
  Clone ID: PAT_MRT4530_587C.1
atgaaggtgaaagccaaggcgcagctgaaagttcagagactgggacgggacggaaaccgtgtgcaggggtcttcctcctgtctcagctccagcaagcacgacacaggaacgcgtttatttgacctcgagtcgtcgacgcaggccactgcagctgacaaatacccaaagctggaacaggagaaccaggtctaa

SEQ ID NO: 56940 - DNA, 560 bp, Oryza sativa
  Clone ID: PAT_MRT4530_58800C.1
gttatttgattcataatagagtaggagctcacggaaatgagactctaggtctccttaatcaacaacaaaacccttcgtcgcaacaggttcagtatcagcaaggaggatcagctcagcctcagtttgctcctcagtacaatcaatttgagcctatacctcaacaagcacaaggggtgcctcaccagagaccttgggccgatatgtttgcagatgtgatgagagagcagtttgggcttaagccaaaggatactcgaaacttgtatcggcatccgtaccctgagtggttcgagacggttcaattgcctaaccgatacaaagttccagatttttcaaaattctcaaggcaagacagtgtttcaacctatgaacgtgtcagccgattcttagctcagtgtggtgaggcatcgactgttgacgctttgagggtcaggttgttttctttgtctttatccggaatggcttttactaggttttcttctttgccatacaattcaattaacagttgggccgatttggagaacaatttcatagtcacctctgtagtggggttcatgagatga

SEQ ID NO: 56941 - DNA, 3033 bp, Oryza sativa
  Clone ID: PAT_MRT4530_58801C.1
atggttgctctgctactctttcccatgctgttgcagctactgtccccaacttgtgcacaaactcagaagaacatcacattgggctccactttggcaccccagagtcctgcctcttcatggctatcaccctctggcgacttcgcatttggcttccgacctgtagagggcaacacctccttctacctcatcgccgtctggttcaacaagattagcgataagacagttgtctggtatgccaaaaatactgaccaagatccatcgatagtagaagtgccatctgattcttttctccaactcactaatgatggtgcactctcactgaaagaccggtctggtcaggagggctggaatccccaggttaccagtgtggcatatgctagcatgcgcgacaccggcaattttgtgctccttggtgcagacggcacgacaaagtggcagacctttgacatgccgtcagacaccatcttgcctactcaggtgataccttgcaacaagactcgcaacaagtcactccgtgcccgactcgacatcaatgactactccagtggtcggtttctccttgatgtgcaaactgatggaaaccttgccctgtatcttgttgctgttccctctggatccaaataccagcaatattggtccactgacacgactggaaatggctcagagttggtattcagtgagactgggaaggtatactttgcactgacagatggtacacagatcaacatctcatcaggtgcaggaattggatcaatggcagactacttccatcgcgccacactggaccctgacggtgttttccggcaatatgtgtacccgaagaaagcgaatgcaggcatcctaggtggtgagacatggacagcagtgagcatgcagccccagaatatctgccatgccatagtttcagatgttggcagtggcgtctgtgggttcaacagttactgcacctttgatggcaccaggaatcagattgcaagctgccaatgcccaccatggtacaagttcttcgatgagcagaagaagtacaaagggtgtaagcaagactttcaaccgcatagctgcgacttggatgaggcaacggcacttgctcagtttgagctgagaccaatttatggtgtggattggccactgtctgactatgagaaatatgagcccataggacaagatgattgtggaaggctgtgtgtgatcgactgcttctgcgccatggcggtgtacaatcagagcaccagcacttgctggaagaagaagctccctttgtcaaatgggaatatggctgactatgtccagaggaccgttcttctcaaggtgccaagtagcaatagttcgcaatccatgatcagtacaagctccaacaaatggaagaggaacaggaagcactgggtcctagggagttctttgattcttggaacctccatattggtgaactttgcactcatctccattttcctttttggtacttactgtagaatagccacaaaaaagaatatcccattgtcacaagcatcaagtaaatcccaactacccttgaagaccttcacttacaaagagctggagaaggcaacggctggcttccatgagattctaggtgccggtgcctctggtgttgtgtacaagggccagttggaggatgaactcaagaccaacattgcagtgaaaaagattgacaagctccaaccagaaaccgagaaggagttcatggtagaagtcgagaccattgggcagacattccacaagaatttggttagattgcttggtttctgtaatgaaggagccgaaagactgctagtttatgagttcatgaccaatggccctctcaaccgtcttttgttcgacaatagtcgcccacattggaacacccgagttcatatcgcgcttggggtggcaagaggtttgctctacttacatgacgaatgtagcaagcaaatcatccattgtgacataaagccgcagaatatccttcttgatgacaaccttgtggccaagatttcagactttggcctagcaaagcttcttttgacaaaccaaacaaggacaaacaccggtattcggggtactcgaggttatgttgcacctgagtggttcaagaacattgggatctctaccaaggttgatgtttatagcttcggagtgatactactagagcttgtttgctgtaggaggaatgtcgagctagaggttgtcgatgaggaacagacgatagtgacttactgggccaatgactgctaccggtctgggaggattgatttgctggtagagggcgatgatgaggcgatctacaatattaagaaggtggaaagatttgtgacagtggcattgtggtgccttcaggaggacccaagcatgcgacctaacatgctaaaggtgacacaaatgcttgatggtgcagttgcaatccccagtcctcctgatccctgttccttcatcagctcacttccatacgcttctaaatgtggatacgactttttgaagaactacgaagattgcactctaatgactcggcaacaacctgatgatgtgaaaggaaaaggaccaatgtttgttgagacatacatacaacaacagctgaacgaaaagcaagtggcaaactccaccaaaggtgaagcaggcgctgggataataatcagggattgtcgaggcctcgtgctactggcttcctgtaagaaactaccacggtgcagctcagcaatgcaagctgaagccttggtgtgtctggaaggtatccggcttgctactgaatgggtgaatatgccacttatcttagaatcagataatacaagtgttgtcgctgagttaaacgcgaccaatgtctcaagagcagattggagtggcataatttcagatgttaaagcggcaatgttatgtttagctcaggtgcaagtgcacaggataaagagagattctaataagatagcttatgctttagcccaactggtaatgggatcaggaactaatacggtctggagattgtgttcccctgcagaaattcttgatctcttgaaccaggaatgtaaccctctgttttctcattaa

SEQ ID NO: 56942 - DNA, 2802 bp, Oryza sativa
  Clone ID: PAT_MRT4530_58802C.1
atggatgaaactgaaagtacgtatctgaaacattgcagaaaggttgtgtacatgggccatcgtcgattccttattgcaaaccaccctatacggaagaaaggcaatcacttcgaacggaaggcagaccaccgtactaagcctaaacatcacaacggaaaatctgtgtttactatggtgaatgatctgaaagtagtatttggaaagggacccgaaagccaacccatcgagagtgaaaatgctgcttgcctgcttgctattataattcgtggtatctttcctaataatattcgggcaacaataacaaagctatgtgctttcaagaacgcaatttcgcagaagatcatcgatccagacagtttagcagcccttcaggaggacgtggtgcaatgccttgtcagctttgagttgatctttccaccatcattcttcaatataatgacgcatcttctatgtcaccttgtgaaagtgatcggtattctcggtcctgtgtacctacacaacatgtttcctttcgagaggcacatgggcgttctaaagaagtacgttcataaccgttctcatccggaagcaagcatcgtcaaaggttatggaacagaggagatcattgagttctgcgtacattttcttgaagaccttcatccaatcggggacatggatagcaaaccaaagaagggaaaatggcccgacgagccaagacgctacgtgtttctcccacgcaaaaggaaaatcgttggagtcgacgataagactgacgaaaattacaatcagtttgaggagcaacctccgttcgcggtgacggtcgactcgagcaccctcctatcaaaggaggacaccccttactcactccatctaggcgtggttccttccaaatatggatttcaagaggacatccacacatataggagtcgcatgaggagcaagagagataccgaggctaagatcgtagatcttgagtacagggtctcaaactacgaggcaaggatgcaggaggaggtgtcaagacaggtgggccaacgcctggctgaacagcggggtcaggatacacaaccgtccattctgcccatcatggtggtgtcaggcatggccataccaatggacccttcagggacataccattgtaggtcgattccacctggatacacagggacataccattgcaactcgattccacctggacacacgaggctcaagatagagctggtggaacgaaccatcgaggatttcgagctggacatccccggaggagacggggagacgaaactaggagacacagcccacgccattatactctggcggaagaggtcccgccaaactcatcccgcgctgtcaagttcaaataagaaggcaaaacttgacgagccaaggctccccgctctcaagaaaagggcgtatgactgcactccggaggagatcgacgaatctgttgcagcggaagtgaaggtacacttcaagcctcggagtccagaaaagaagattcctatagacccgacgactaagcagttctttctgaagataagcgcaccggtcaaagagatcgtacttttggactatgatcgaacaatgaagaaggctattattatgaagtctagaggaagagagtccaaagcactccctcagctggggcatcaaccacaacaagacgttgagccgttgttgccacctggcgaacaagagataagacaatggacgaaacagacaggaccaaagagggagcgattgcttcaagacacacctatcgaaaaggccgaattgaagtacaaatttaccctcgatgaactgcttgtcaagcctgatcaagtgaacaccctccctacacagatgtactggtaccatcaatggtacatggaaaaatcatcgaggggtagagagatgttcggagcgagggtgatttacatgagggaaaacctcacccacgcagatttcataagggttattcaagaacaactgatgggattcatcaacgagcagattattgatcccgcgggagaattctattatgacggaaagcctcttcttcaagctgagaaaatagtgatcataacaagagacgatgagaagcaggtggagacgggtcggcaacctcgacgacggcgtgcacggccaagcagcggaggcagcatccacgaggaggccgattcacagctgcacgagaaaatcgtcatccatgtcgatgctgacaacgagatggtcggcgatgaggctccaccgtacaaggagagtacagagtttggctgcagggctcaagcaagagaaacgaataattgcagtagaagccgagcaaggtgccctctccctgctcacagcatgttcgacaaaatgtctatgagagcaagaagatctgaagcgttggttctgttgcggtgggtcagccccgttgatgacatcaatcctgcatgggcagggagctgcgtacatcacgatgagtcggctagctacaagaattggataaacaatgatgggaatagtagtgctagaccatcagctggtggattgattttcttgtggatgagtaatttatttcctgaaaagaaaaagtctaagagtaatttatttactcaaggaagatggatgatgaaaaggcacaaattcttgtattttgagctctcgattcgttatgatagtaggttgtacacttatgcaaacaatgctgcaacgtcccttctctggggtggcgaaggtcacgatcgacctcgttcggcgggcagcaacaatggactgcaggcccggcgaccagtgactggcgctggccgcgcctctcaggtcgccgtcgatggggatggaggccttcgacaaagctgttaa

SEQ ID NO: 56943 - DNA, 5409 bp, Oryza sativa
  Clone ID: PAT_MRT4530_58803C.1
ttatttgtttccaatcccacctaaccagttgtagaatagatgcgggtactccgtcctcaagaattcttcgctttcccaggtggcttcatcctcagtgtgattactccattgtaccttgtacatacgccacactttgctcctagtcctcttttctgcttcatctaatatccgaatcgggtgttctgggtatgtgagatcattgctaatgtgaatctcttccagcggagcttgttcttccggcactcgtaagcatttctttaattgggatacatggaagactgggtgcacatcggcgatattctctggtagttgtaactgatatgcaacttctcctcgcctggcgatgatctggaatggccccacatatcttggtgccagttttcctttaaccttaaacctctttgttcccctcatcggagaaacctttagataaacgtaatctccttccttaaattccaggtctcttcttcgagtgtcggcgtaactcttttgtcgtgactgtgctacttttagacggtcacggatcaaacgaaccttttcttcggcttcttgaatgatgtcaggtccaaataccgcccgttccccagtctcggaccatattagcggggtacgacatcgtcgaccaaacaatgcctcattgggtgacatctttaggcttgcttgaaagctgttgttgtaggagaattcggcgtagggcaaacatctctcccagtccttgctaaaatccaaagcacaagccctcagcatgtcctccaggacctggttggttctctccgtctggccatccgtctgtggatgataagcggtgctaaatgcgaggtaacttcctagggcttcatggactttctcccagaaatgtgaggtaaactgtgtgcctcgatcagatataatcctcttaggtataccatgaagacacactatcctggtcatgtacaactcggcgagttttgcactgctatagtttgtcttgacggggatgaatcttgccgtcttggtgagtcgatccacgatcacccatatggaatcatatcctgttgcggttttgggcaatccaacaataaaatccatacctatctcatcccatttccattcgggaatcctgagaggttgcaacaaacctgccggcctctggtgttcagccttcaccttctggcatacgtcgcagagtgctacgtattcggccacatctctcttcatgttgggccaccagtatccttccttcagatcttggtacatcttcgtactttcggggtgcaatgaatatgccgattcgtgagattcctttaaaattaatcccctcagtccaccctgttcgggtacgtaaattctctttttataccatagaacatctttttcgtcggttgaaaattcctttgcacgtccggcagctaagcgttccttcacctctcggacttcctcgttgtccttctgggcttcttctatttgggttctcaaaagaggttgaatatccagggtgtttatctgtccatggggtactatatgtaggttcagctgcgccatttcctccctaagctcagggaccatcccttccgttctcagatgattgcaatggctcttacgactcagagcgtcggctacgacgtttgctttgcctgggtgataatgaacctctaaatcatagtccttgattaattctaaccatcgcctttgcctcaagttgagatctgactgggtgaagatatattttagactcttgtggtcagtgtagatatcgcaatggtttccaatcagataatgtctccaaatctttagcgcatgaactacagctgcgagttctaagtcatgggtagggtagttttcctcatgtggtcgtaattgtcgcgacgcataggccacaacttttccgtcctgcatcagtactcctcctagtccttgccttgacgcatcacaatatataacaaagtctttcctgatgtcgggaagaacaaaaataggtgccgaggtcagcttttctttaagctgttcaaagctttcctgacattgttctgaccatacaaacttcttttccttcttgagtagttgtgtcattggtcgggctatcttagagaacccttcaatgaaccttcggtagtatccagccaagcctagaaaactccgaatttcagtcacagatttgggtgctttccattccgtgacagcctccactttagcagggtccactgctactccaccggctgagattacgtgacctagaaaagcgacttccttcaaccaaaattcgcacttgctgaattttgcgtataacttgtgctttcggagtttctggagaaccaatcgtaagtgttccgcatgttcttcctcatctttggagtagatcagaatgtcatcaatgaacaccaccacaaacttatccaaatattccatgaatactttgttcataagattcatgaagtatgctggggcattggttagaccaaacgacattactgtgaattcatacaacccatagcgtgttgaaaacgcggttttggggatatcctcggtcctaatcttcagttggtggtatcctgatcgaaggtctatctttgaaaacaccttagctcccttaagttggtcgaagaggtcatcaatccgtggtagtggatacttattttttatggttacttcgttcagtgatcggtagtctacacacattctcatgctaccgtctttctttttaacaaacaacactggggctccccaaggtgacgaactggggcgtacaaatcccttctcttgcaactccctgatttgctttttaagttcttctaactcattgaccggcatccgatatggtctcttggatatgggggcagttccgggtatcaggtcaataatgaactctatgtcacgatctggtggcattccaggtaaatcttctgggaacacatcaggaaatcgctgcactactggcattccctttaggggtagcatggtaaatatacctccggcatgttcggttagcctaggatcttgatccatggttgctctcatatccgatccccagggtgtggtcagggtaacttctctacgtctacagtcaattactcctctatgctttgctaaccaatccatacccaaaatgacatcaagagtttggggtattagcaccataagactggagggaaataccacatccctaaggcagatgggtacgtcaatgcaagctgtatccactgctatctcacccccaggtgaatgtactaacattggttgtcttaatttaactctggttaaattgtgttgttgacttgctttcaaagatataaatgaatgcgatgctcctgaatcgaagagaactttaactggagtggagttgagtgaaaacatacccatcagtacgccttggtcttcctgggcctcttcagctcgaacatggttcacttgcccgcgtccaaatccggtagcggtcctgttagttgatccagtggcggcctgattcggtgcaggagcgcggttctgaatggtaaccggcctgtggaaattgctggaggtggcaggtcgactggttgtcaccactgttggtctccaagccgaggaggttgtccctttaggacgctggggtgcggtctgaggcgggcggttcatggcaagcctccttttacgattgtgctccacgaccttccggtcgttctccaacctaacgaccttattgattaaactctggaaactatcgtggtcttgtccaatcatgggcccgcgtaactcgtcattcaagccttcaatgaatttgtcaatcttttcctcttcgtcggcaagatctccagttgcgtagcgcgccagctgagtgaaacggttcaagtactcttgcactgtggtattcccttgccgtaatctcctgaactcattcttcttcatcctcatcaccgcggcaggcacgaagttgtcacggaaggctgtggtaaattcctcccagtttggttctccagcatcttcttctcgggcttctttgtacgtgtcccaccagtctccggctggtccttccaattggtttgccgcaaagatcactttatcggcctcacgtactcgaacaagaattagcttcttctcaatgatccttaaccaatcttccgcatccataggttcttcagctgtggcgaatgtgggtggcttggtcctcataaactctccaaagcttgaccctccgcggttgccttggttgctcgcgatagcttgcagaagttgagtttgggtggccataattccggccagagtgtttaagtcgggtgtctgagtttcgtcattgcggagtccccacggctcagaggtagtggcctctggatctggcttgggcctcttgcccgggggtcgtgtgctcttgcgagcagtgctgagggtgcgagggcctccgaggaaggtgatacggggaacaggagcctcatcctctgaaggatcagtgatgtctggctcgatctctggctcggtgtcggtcccctctgtctcggagtcgacctggatcggagtctccaaactagaacccagctgcggagaaggtgtagggatcagtggagtgtgcaccaactccggaacaggtggctgtgctgctgtagggtccactaggtagggcgctgactcggtagctagcatactagcctctcccagaagagcgtggaacgccggtgggtatggcggggtgaggaagaagtagcggtcacggcctactgctgtggaagtagaggcccctgtggtgctgatcttggctgctcgaagctgctcctccagctggctgacgtgctcctgactctctctcagctgctcctcaagagtatccatcattccgcggcgatcgttgtactggtcggataactgctggaactgatcgccgtggacctggagctgtgccttcagtgagtctatctcactgccccaagcctggtgctcctcctccaactgaagctgctgtgctgtgaggtcggtcacctcagtctctaactcccccacacgtctctggtggtcgtcaatctccaacaaagcctcctcgtagtagtcatctactgcctcagcccatcgtgacaaccgagtcactatcgggttgtagcagcagggcatgtcatgaactgtgcaaactgagttgccctcctcccggaacgggtgatgagcaaactcggtactcactaactcagctcggtggatagagctgagtcggagaaaggcctcccgagcagcatcctgcatcgcggtctctggcaggtctcggtggtgacgtgtctgaaagctgtagtccaactcggaagggactcgggggtgaatctcgacccgagcctcccaaactgggccacactgcctcactcggtatgacggaaaaccagggtatcgcagacgcctcaacatccgatgcagctcaatgacataaccctccaattggggtaagctcaactcccaggtagcgggtgaatccgaatctgccat

SEQ ID NO: 56944 - DNA, 376 bp, Oryza sativa
  unsure (1)..(376): unsure at all n locations
  Clone ID: PAT_MRT4530_58804C.1
nagctttcctatagaatttttttacaaaaaacgtaccgatgagtagttcgggaagcgtgcgtgtggactcttaaagccttgaaagcaatctttgtcgtgtacttgaatnaccgttactctgtaatactagaagatgttgatgtctcaacatcagctgtagattttttatggaaccgaatcaagtcaactgttctttacttctttgtccgtgcacatcacagaaatnagtctctgtcagtgtcagggacaggcaagttgctgcaatgtggcattgccaactaaccctattttgtgatggttaagtggtagtggcttggctgatgtttcgctttgcagttctctattcgtttgtcacctgtcattgctagctagtaaa

SEQ ID NO: 56945 - DNA, 2961 bp, Oryza sativa
  Clone ID: PAT_MRT4530_58805C.1
ttaccagttttcgaatagatgcgggtattctgtcctcaagaattcttcgctttcccaggtggcttcgtcctcagtgtgattactccattgtaccttgtacatacgccacactttgctcctagtcctctttttggcttcatccaatatccggatcggttgttctggatacgtgagatcattgctaatgtgaatctcttccagcggggcttgttcttccggcactcgtaagcatttctttaattgagacacatggaaaactgggtgcacatcagcgatattcttcggtagctgtaactgatatatgacttctccccgtctagccatgatttgaaaaggtcccacataccttggcgctagttttcctttgaccttaaaccttttcgttatcctcatcgaagaaacctttaaatagacgtaatctccttccttaaattctaggtttcttcttcgggtgtcagcgtaactcttctgtcgtgattgtaccatctttaaacggtcacggatcagatgaaccttttctttggcctctttgacaatgtcaggtccaaataccacccgttctccagtctcggaccacattagtggggtacgacatcgtcgaccaaataatgcctcatttggcgacatctttaggcttgcttgaaagctgtttttgtaggagaattcggcatagggcaaacatctctcccaatctttgctaaaatccaatgcacaagctcttagcatgtcctccaagacctggtttgttctcttattctggccatctgtttgtgggtgataagctgtgctaaacgcaaggtaacttcctagggcttcatgtactttctcccagaaatgcgaggtaaactgtgtgcctctatcagatataattctcttaggtacaccatgaagacatactatcctggtcatgtataactcggctagtttggcactgctataatttgtcttaacgggaatgaatctcgccgtcttggtgagtcgatccatgatcacccagatggaatcgtaccctgttgcggtcttgggcaatccaacaataaaatccatacctatctcatcccatttccattcgggaatcctaaggggttgcagcaaacctgccggtctctggtgctcagccttcaccttctggcacacgccacagagtgctacgtattctgccacatctctcttcatgttgggccaccagtatccttccttcagatcctggtacattttggtacttccggggtgcaatgaatatgccgattcatgggcttcctttaggatcaatcctctcagtccactctgttcgggtacatacatcctctttttataccataggacatccttctcgtcggttgaaaattcctttgcaaatcctgcagctaggcgttccttcacctctcggatttcctcgttgtccttctgggcttcttctatttgggttctcagaagaggttgaatgtccaaggtgtttatctgtccatgaggtactatatgtaggtttagttgggctatttcctccttaagctcagaagccattccttccgttctcagatgattgcaatggcccttccgactcaaagcgtcggccacaacgtttgccttgccggggtgatagtgaacctctaagtcataatccttgattaattccagccatcgcctttgcctcaagttgagatctgactgggtgaaaatatacttcagactcttgtcgtcagtgtagatatcgcaatggtttccaatcaaatagtgtctccaaatctttagagcatgaaccacagctgcgagttctaggtcatgggtagggtagttttcctcatgtggtcgcaattgtcgcgacgcataggccacaacctttccgtcctgcatcagtactcctcctagtccttgccttgatgcatcacaatatataacaaagtctttcctgatgtcgggaagaactaaaataggcgccgaggtcagcttttctttgagctgctcaaagctttcctgacactgttctgaccacacaaacttcttttccttcttgagtagttgtgtcattggtcgggctatcttagagaatccctcaataaatcttcggtagtatccggccaagcctagaaaactccgaatttcagtcacagatttgggtgctttccattccgtaatagcctccactttagcaggatccactactactccaccggctgagattatgtggcctagaaaggcgacttcttttaaccagaactcacacttgctgaattttgcatataacttatgcttccgaagtttctcgagtaccaatcgcaagtgtttcgcatgctcttcctcgtctttggagtagattaaaatatcatcgatgaatactaccacaaatttgtccaagtaatccatgaacactttgttcatgagattcataaagtatgccggggcgttggttaaaccaaacgacattacggtgaactcatacaatccatagtgtgttgagaacgcggttttgagtatatccccggtcctaattttcaattggtggtatcctgatcgaaggtcaatcttagagaacaccttagctcctttgagtagatcaaaaagatcatcaatccgtggtagtggatacttgttcttgatagttacttcgttcagtgaacagtagtctacagacatcctcatgctaccatctttcttcttgacgaatagcactggggctccccaaggtgacgaactgggacgtacaaatcccttttcttgcaactctctgatttgctttttaagttcctccaactcattgactggcatccgataaggtctcttggatatgggagcagttccgggtatcagatcaacaatgaactctatgtcacgatctagtggcatcctaggtaaatcttctggaaacacatcaggaaatcgttgcactacaggcattccttttaggggtagcatggtaaatatgcctccggcacgttcggttagtctaggatcttgatccat

SEQ ID NO: 56946 - DNA, 4408 bp, Oryza sativa
  Clone ID: PAT_MRT4530_58806C.1
atggcaagccgtcgtcgggcaacaaccagcaacgacgaaactcagacacctgacctaaccactctggctggggttatggccacccaaactcaacttctgcaagctatcgcgaacaaccaaggcaaccgcggggggtcaagctttggagagttcatgaggaccaagccacccacattcgccacagctgaagaacctatggatgctgaagattggttgagggtcattgagaagaagctaactcttgttcgagtacgtgaggccgataaagtgatctttgcggcaaaccaattggaaggaccagccggagactggtgggacacgtacaaagaagcccgggaagaagatgctggagaaccaaactgggaggaatttaccacagccttccgtgacaacttcgtgcctgccgcggtgatgaggatgaagaagaatgagttcaagagattacggcaagggaataccacagtgcaagagtacttgaaccgtttcactcagctggcgcgctacgcaactggagatcttgccgacgaagaggaaaagattgacaaattcattgaaggcttgaatgacgagttacgcgggcccatgattggacaagaccacgatagtttccagagtttaatcaataaggtcgttaggttggagaacgaccggaaggtcatggagcacaatcgtaaaaggaggcttgccatgaaccgcccgcctcagaccgcaccccagcgtcctaaagggacaacctccttggcatggagaccaacagtggtgacaaccagtcgacctgccgcctccagcaatttccacaggccggttaccattcagaaccgcgctcctgcaccgaatcaggccgccacaggatcagtaaggccaggaagctgtttcaactgtggagagtatgggcatttcgccaataaatgtcctcatccaaacaagacacccattcgcaccggagctaatgcgacggctattcacgggaccgccacccctgctactggacgaggtctattcaggaccccgcagactaacaggaccgctaccggctttggacgcgggcaagtgaaccacgttcgagctgaagaggcccaggaagatcaaggcgtactgatgggtatgttttcactcaactccactccagttaaagttctcttcgattcaggagcatcgcattcatttatatctttgaaagcaagtcaacaacacaatttaaccagagttaaattaagacaaccaatgttagtacattcacctgggggtgagatagcggtggatacagcttgcattgacgtacccatccgccttaggatgtggtatttccctccaatcttatggtactaataccccaaactcttgatgtcattttgggtatggattggttagcaaagcatagaggagtaattgactgtggacgtagagaagttaccctgaccacaccctggggatcggatatgcgagcaaccatggatcaagatcctaggctaaccgaacgtgccggaggtatatttaccatgctacccctaaagggaatgcccgtagtgcagcgatttcctgacgtgtttccagaagatttacctggaatgccaccagatcgtgacatagagtttattattgacctgatacccggaactgcccccatatccaagagaccatatcggatgccggtcaatgagttagaagaacttaaaaagcaaatcagggagttgcaagaaaagggatttgtacgcccagttcgtcaccttggggagctccagtgctattcgtcaagaagaaggatggtagcatgagaatgtgtgtggactaccgatcattgaatgaagtaactattaagaacaagtacccactaccaaggattgatgatcttttcgatcaactcaagggagctaaggtgttttcaaagatcgaccttcgatcaggataccaccaactgaagattagaaccgaagatatccccaagacagcgttttcaacacgctatggattgtatgagttcacagtgatgtcgtttggtctaaccaatgccccagcctacttcatgaatcttatgaacaaagtattcatggattatttagataagtttgtggtagtattcattgatgacattctagtctactccaaagacgaggaagaacatgcggaacacttacgattggtgctccagaaactccgaaagcacaagttatacgcaaaattcagcaagtgcgaattttggttgaaggaagtcgcttttctgggtcacgtaatctcagccggtggagtagcagtggaccctgcaaaagtagaggccgttacagaatggaaagcacccaagtcggtgaccgaaattcggagtttcctaggcttggccggatactaccgaaggttcattgaagggttctctaagatagcccgaccaatgacacaactacttaagaaggaaaagaagtttgtatggtcagaacagtgtcaggaaagctttgagcagctcaaagaaaaactgacctcggcacctattttagttcttcccgacatcaggaaagactttgttatatattgtgatgcgtcaaggcaaggactaggaggagtactgatgcaggagggaaaagttgtggcctatgcgtcgcgacaattgcgaccatatgaagaaaactaccctacccatgacctagaactcgcaactgtggttcatacgctaaagatttggagacattatctaattggaaaccattgcgatatctacactgaccacaagagtctaaagtatatcttcacccagtcagatctcaacttgaggcaaagacgatggttagaattaatcaaggactatgatttagaggttcactatcacccaggcaaagcaaacgttgtagccgacgctctgagtcgaaagagccattgcaatcatctgagaatggaagggatggtccctgagcttaggaaggaaatagctcagctgaacctacatatagtgcctcatggacagataaacaccctggacattcaacctcttttgagagcccaaatagaagaagcccagaaggacaacgaggaggtccgagaggtgaaggaacgcttagctgcaggacgtgcaaaagaattttcaaccgacggaaaagacgttctatggtataaaaagagaatttacatacccgaacagggtggactgaggggattaattttaaaggaagctcacgagtcggcatactcattacaccccggaagtaccaaaatgtaccaggatttgaaggtgggctactggtggcccaacatgaagagagacgtggccgaatacgtagcactttgcgacgtatgccaaaaggtgaaggctgaacaccagaggccggcaggtttgttgcaacctctcaggattcccgaatggaaatgggatgagataggcatggattttattgttggattgcccaaaaccgcaacaggatatgattccatttgggtaatcgtggatcgactcaccaagacggcaagattcatccccgtcaagacaaactatagcagtgcaaaactcgccgagttgtacatgaccaggatagtgtgtcttcatggtatacctaagaagattatatctgatcgaggcacacaatttacctcacatttctgggagaaagtccatgaagccctgggaagttacctcgcatttagcaccgcttatcatccacagacagatggccagacggagagaaccaaccaggtcctggaggacatgctgagggcttgtgctctggattttagcaaggactgggagaggtgtttgccctacgccgaattctcttacaacaacagctttcaagcaagcctaaagatgtcacccaatgaggcattgtttggtcgacgatgtcgtaccccgctaatgtggtccgagactggagaacgggcggtatttggacctgacattattcaagaagccgaagaaaagattcgcttggtccgtgatcgtctaaaagtagcacaatcacgacaaaagagttacgccgatactcgaagaagaaacctggaatttaaggaaggagattacatttatctaaaggtttctccgatgaggggaacaaaaaggtttaaggttaaaggaaaactggcaccaagatatgtggggccattccagatcatcgccaggcgaggagaagtcgcatatcagttacagctaccagaatatatcgccgatgtgcaccccgtcttccatgtgtcccaattaaagaaatgcttacgagtgtctgaagaacaagctccgctggaagagattcacattagcaatgatctcacatatccagaacacccgatccggatattggatgaagcagaaaggaggactaggagcaaagtgtggcgtatgtacaaggtacaatggagtaatcacaccgaggatgaagccacctgggaaggcgaagaattcttgaggacggagtacccgcatctattcggcaattgg

SEQ ID NO: 56947 - DNA, 4703 bp, Oryza sativa
  Clone ID: PAT_MRT4530_58807C.1
atgcaggatgcagcccgggaggccttcctccgacttagctctatccaccgagctgagttggctagtactgagtttgctcaccacccgtttcgagaggagagcaactccgtctgcacagttcaggacacaccttgctgctacaacccgatagtgacccgactgtcacgatgggctgaggcagtagacgacttttacgaggaggctctgttagagatcaacgaccagcagaggcgtgttggagagttagagaccgaggtgactgacctcacagtgcagcagcttcagctggaggaggagcaccaggcttggggcactgggttgcagtatggagactccgatccaggtcgactccgagacagaggagaccaacaccgagccagagatcgagccagacatcactgatccttcagaggatgagacccctgttccccgcatcaccttcatcggaggcccttgcaccctcagcactgctcacaagaacacacgacctccgggcaagaagcccaagccagatccagaggccactacttccgagccgtggggactcagttcccatcaaaacaactcccttaatgggataaaaccataagagctagttagaaaattatgatacttacttaatcggcctacacagatggcaagccgacgtcgggcgtcaaccagcaatgaagaaacttagacacctgacttaaccaccctggccggagttatggccactcaaacccaacttctgcaagccattgcaaataatcaaggcaaccgcggcggatcgagctttggagagtttgtgaggaccaagccacctacgttcgctacggcagacgagcccatggaggcagaagattggctacgcatcatagagaagaaactgactcttgtgcgggtacgcgaagccgacaaagtgatcttcgcagtaaaccaactggagggacccgctggtgattagtgggatacttacaaggaagctcgggaagaggatgctggagaacccacttgggaagagttcactgcagcattctgcgagaactttgtgcctgctgcggtaatgcgtatgaagaacgagtttagaaggctacgacaagggaacacaacggtgcaagaatatctgaaccggttcactcagttggcccgctatgcaattggagacctcgcagatgaagaggaaaagattgacaagttcatagaagggctgaatgatgaattgcatggacctatgattgggcaagaccatgagagcttccagagcctgatcaacaaagtcgttaggctggagaacgatcaaaggactgtagagcacaaccgaaagaggaggcttgctatgaatcgcccacctcagggagtgcctcagcgactcaagggagccccttcgtctgggtggaaaccccctattgtggcgaccaaccgccccgccgcacctagcaatttcaacaggccgattgcgattcagaaccacacccctacaccaactttggctgcccttggagccaagaagaatgtggactgtttcaactgcggggagtatgggcactacgccaacaactgccctcatccacgcaaaactcctgtccgtactggcgctaatgcaatgactgttcgtggaactactacccctgctgctagacgaggtctattcaagactccgcaaacaaacaggaccgctaccggatttggacgcggacaagctagtcaaaagcacaacttaaccctagtgggacttagaaagcctatgatagtacactcacctgggggcgagataactggatgtggtgtttccctccaaccttatggttttgataccccagaccctggatgtcatattgggtatggattggttaacaaagaacagagggaagatttacctgggatgccaccagatcgtgacatagagttcattattgatctgataccaggaactgcccccatatccaagagaccttatcggatgccggtcaatgagttggaggaacttaaaaagcaaatcagagagttgcaagaaaagggatttgtacgccccagttcgtcaccttggggagccccagtgctattcgtcaagaagaaagatggtagcatgaggatgtgtgtagactaccgttcactgaacgaggtaactatcaaaaacaagtatccactaccatggattgatgatcttttttatcaactcaagggagctaaggtgttctctaagtttgaccttcgatcaggataccaccaattgaaaattaagaccggggatatatccaagactgcgttttcaacatgctatagattgtatgagttcacagttatgtcgtttgggttaaccaacgccccggcatgctttatgaatctcatgaacaaagtgttcatggattacttggacaaatttgtagtagtattcatcgatgatattttaatttactccaaagatgaggaagaacatgcggaacacttgcgattggtactcgagaaacttcggaagcataaattatatgcaaagtttagcaaatgtgagttctggttaaaagaagtcgcttttctaggccacgtaatctcagccggtggagtagcagtggatcctgccaaagtggaggctgttacggaatagaaagcacccaaatctgtgactgaaattcggacttttctaggcttggccggatactaccgaaggtttattgaggggttctctaagatagcccgaccaatgacacaactactcaagaaggaaaagaaatttgtgtggtcaggacagtgtcaggaaagctttgagcagctcaaagaaaagctgaccttggcgcctattctagttcttcccgacatcaggaaaaactttgttatatattatgatgcatcaaggcaaggactaggaggagtactgatgcaggacggaaaggttgtggcctatgcgtcgcgacaattgcgaccacatgaggaaaactaccctacccatgacctagaactcgcagttgtggttcatgcactaaagatttggagacattatctgattggaaatcattgcgatatctacactgaccacaagagtctgaagtatatttttacccagtcagatctcaacttaaggcaaaggcgatggctggaattaatcaaggattatgacttagaggttcactatcaccccggcaaggcaaacgttgtggccgatgctttgagtcggaagagccattgcaatcatctgagaacggaagggatggcccctgagcttaaggaggaaatggcccagctaaacctacatatagtaccccacggacagataaacacactggacgttcaacctcttttgagaacccaaatagaagaagcccagaaggacaacgaggaaatccgagaagtgaaggaacgcttagctgcaggacgtgcaaaggaattttcaaccgatgaaaaaggtgttctatggtataaaaagaggatctatgtacccgaacaggggggactgagaggattaatcctaaaggaagctcacgaatcggcatattcattgcaccccggaagtaccaagatgtaccaggatctgaaggaaggatactggtggcccaatatgaagagatgtggccgaatacgtagcactctgtgacgtgtgccaaaaggtgaaggctgagcatcagcgaccggcaggtttgctgcaaccccttagaattcccgagtggaaatgggatgagataggtatggattttattgttggattgcccaagaccgcaacaggatatgattccatttgggtgatcgtggatcgactcaccaagacggcgagattcattcccgttaagacaaattatagcagtgccaagctcgccgagttatacatgaccaggatagtatgtcttcatggtgtacctaagagaattatatccgatcgaggcacacagtttacctcgcatttctgggagaaagtacatgaagccctaggaagttaccttgcgtttagcaccgcttatcacccacaaatagatggccagacagagagaacaaaccagctcttggaggacatgctgagagcttgtgctctggattttagcaaggattgggagatatgtttgccctacgccgaattctcctataacaacagctttcaagcaagcctaaaaatgccacccaatgaggcattgtttggtcgacgatgtcgaaccccgctaatgtggtccgagacaggtgaacgggcggtatttggacctgacattatcaacgaggccgaagaaaaggttcgtctgattcgagaccgtttaaaagtggcacaatcacggcagaagagttacgccgacacccgaagaagaaacctggaatttaaggaaggagattatgtttagctgaaggtttctccgatgagaggcacgaaaaggtttaaggtcaaaggaaaactagcgccaaggtatgtgggacctttccaaatcacggctagacggggagaagtcgcatatcagttacagctaccagagaatatcgctgatgtgcacccagtcttccatgtgtctcaattaaagaaatgcttactagtgccggaagaacaagctccgctggaagagattcacattagcaatgatctcacgtatccagaacacccgatccggatattggatgaagccgaaaagaggactaggagcaaagtgtggcgtgtgtacaaggtacaatggagtaatcacactgaggacgaagccacctgggaaagcgaagaattcctgaggacggaatacccgcatctattcgaaaactgg

SEQ ID NO: 56948 - DNA, 353 bp, Oryza sativa
  Clone ID: PAT_MRT4530_58808C.1
ggctatttgtataactgcacaggatatcatgaagccaagggggggcttttaacactgcaaaggcggttacagaccctgatgagtatgaatcacttactttgggtagcttaccacccacctttcaagggatgaaagtctatgtcacagaggagcaagagctgattatggaaccatcttttaaatgggctgcaaacccaaatattactgttgctgtaaaagcctatggcttgaaagctactatccacattgtggatctacaagtatttgcatcacctcgcattactctgaagccattggtgcctacatttccctgctttgcaaaaatccttgtctcactcatggagaagccacat

SEQ ID NO: 56949 - DNA, 2724 bp, Oryza sativa
  Clone ID: PAT_MRT4530_58809C.1
atgccactagatcgtgacatagagttcactattgacctgatacccgggactacccccatatccaagagaccatatcggatgccggtcaatgagttcgaggaacttaaaaagcaaatcagagagttgcaagagaagggatttgtacgtcctagttcgtcaccttggggcgccccagtgttattcgtcaagaagaaggatggtagcatgagaatgtgtgtggactaccgctcactgaacgaagtcactatcaaaaacaagtatccattaccacgaattgatgatctttttgatcaactcaaaggagctaaggtgttctctaagattgaccttcgatcaggataccaccaattgaaaattaggatcggggatatacccaagaccgcgttctcaacgcgctatggattgtatgagttcacagtaatgtcgtttggattaaccaacgccccggcatactttatgaatcttatgaacaaagtgttcatggattacttgggcaaatttgtggtagtattcatcgatgatatcttaatctactccaaagacgaggaagagcatgcggagcacttgcgattggtactcgagaaacttcggaagcataagatatatgcaaagtttagtaagtgtgagttctggttaaaagaagtcgcctttctaggccacgtaatctcagccggtggagtagcactggatcccgctaaagttgaggccgttacggaatggaaggcacccaaatctgtgactgagattcggagttttctaggtttggccggatactatcgaaggttcattgaaggattctctaagatagctcgaccaatgactcaactactccagaaggaaaagaagtttgtgtggtcagaacagtgccaggaaagttttgagcagctcaaagaaaagctgacctctgcgcctattctagttctccccaacaataggaaagactttgttatatattgtgatgcatcaaggcaaggactaggaggagtactgatgcaggacggaaaggttgtggcctatgcatcgcgacaactgcgaccacacgaggaaaattaccctactcatgacctagagctagcagccgtggttcatgcgctaaagatttggagacactacttgattggaaaccattgtgatatctacactgaccacaagagtctgaagtatattttcagccagtcagatctcaacttgaggcaaaggcgatggttggaattaatcaaggactatgatctggaggttcactatcacccaggcaaggcaaacgttgtggccgacgctttgagtcataagagccattgcaatcatctgagaatggaagggatggctcctgagcttaaggaggaaatcgcccagctaaatctacatatagtaccccgtggacagataaacaccctggacattcaacctcttttgagaacccaaatagaagaagcccagaaggacaacgaagaaatccaagaggtgaaggaacgcctagctgcagggtttgcaaaggaatttttgaccgatgaaaaagatgtcctttggtataaaaagaggatctatgtacccgaacagggtggactgagaggattaatcctaaaggaagctcacgaatcggcatattcattgcaccccggaagtactaaaatgtaccaggatctgaaggaaggatactggtggcccaacatgaagagagatgtggcagaatacgtagcgctctgtgacgtatgccagaaggcgaaggctgagcaccagagaccggcaggtttgttgcaaccccttaggattcccgaatggaaatgggatgaaataggtatggattttatagttgggttgcccaagaccgcaacagggtatgattccatctgggtgattgtggatcgactcaccaagacggcaagatttatccccgtcaagacaaactatagcggtgccaaactcgccgagttgtacatgaccaggatagtatgtcttcatgatggccagacagagagaacaaaccaggtcttagaggacatgttgagagcttgtgcattggattttagcaaagactgggagaaatgtttgccctacgtcgaattctcctacaacaacagttttcaagcaagcctaaagatgtcacccaatgaggcattgtttggtcgacgatgtcgtactccactgatgtggtccgagactggagaacggacggtatttgggcctgacattatcaaagaggccgaagaaaaggttcgcctgatccgtgaccgtctaaaagtgacacaatcacaacagaagagttacaccaacacccgaagaagaaacctggaatttaaggaaggagattacgcttatctgaaggtttctccgatgaggggaacgaaaaggtttaaggtcaaagggaaactagcaccaagatatgtgggaccttttcaaatcacggctagacgaggagaagttgcatatcagttacagctaccagagaatatcgcggatgtacacccagtcttccatgtgtctcaattaaagaaatgcttacgagtgccggaggagcaagctccgttggaagaaattcacattggcaatgatctcacatatccagaacacctagttcggatattggatgaagtagaaaagaggactaggaccaaagtgtggcatatgtacaaggtacaatggagtaatcacactgaggatgaagccacttgggaaagcgaagaattcttgaagacagaatacccacacctattcgaagaccggtaa

SEQ ID NO: 56950 - DNA, 1470 bp, Oryza sativa
  Clone ID: PAT_MRT4530_5880C.1
acggccgtccggccggcagctcgtggtcaagtcttatctgccttcctccctcctctcgccttccgcctcgcgtgcgctccaccaccgaaaaaaaggacaggttccacataaagaccaacgagtaaaagcttgatctgtccggtgccaaccaatcaacaaacaagtttcatgtctgatctcgacgttcagcttccatctgccttcgatccgtttgctgaggcaaatgctgaggactccggcgctggccctggagcaaaggattatgtgcatgtgcgcatccagcagcgcaacggcagaaagagtctaactactgttcagggcttaaagaaggagtacagttacaacaagatcctcaaggatctgaaaaaggagttctgctgcaatggtactgtagtccaagatccagagcttggccaggtcattcagcttcaaggtgatcagcgtaagaatgttgccacgttcctagttcaggctgggattgctaagaaggacaacatcaagattcacggtttctaagctgcctatagatgctcgtatgcaatatcgtgtgctgccagatattgggaagcctctgaagctaccagttactgttctctatatttgaagtcataagactatttgttgctattaaagcgattcttgcttgatgcaagttgtgtcctcattatgcactaccggcatattatgagtatggtttgtctgggatattgtcaatctaataaaagtacttgctatgggactgaaaaagaaaatgattagtaatggtactgtatcctactgatagtgtgtggcggcgcggtgattctgattaaagctttagaggatggaacagacatggatgaagaagacgctgagggaagaagggccttacattttgcgtgtggttacggtgagttgaaatgcgcagagatccttctggaggcaggtgctgctgtaaacgcactggataagaacaagaacaccccactgcattacgctgctggatatggtcggaaagaatgtgtggatcttctgctgaagcatggcgctgctgtcacgccccagaatctggacgggaagacccccatcgaggtggccaagctgaacaaccaggatgaggtcctcaaggtgctcgagatggacgctttcctataaagaaaccaatgccaaatctcacgctcatcatcaccggctcgtcgctttacagttcagatttttactgcatacccaaatcatcatcgactcttttagctttggttttggtgtggtggtggtacattcgttgaatcgttgctatgtttggtgctccgatttgtaatctgtttcacttccccgttacactgcatcactccgtttcatcctttgtattcctatgttgctgagtctggtgttgcagacgttgctcctgtttttctcaaaaaaatcgtgtcagattggtagtttatatagataagagatgcactgccccggtgtaaaaaaaaaacaaaaaaa

SEQ ID NO: 56951 - DNA, 201 bp, Oryza sativa
  Clone ID: PAT_MRT4530_58810C.1
atgagagaagaagtcaagtcgtcatccttaccacctacaggcaagcctgttggccatggacgcttcagtctgagtggaaaaggagatgggtacattgggaaagttgtcaagggctcaatctcccaaagcgacacccttggctgcctctctccggcaaacgccaatgtgagtttggccaacgagcagcatcaagatcactaa

SEQ ID NO: 56952 - DNA, 4291 bp, Oryza sativa
  Clone ID: PAT_MRT4530_58811C.1
ttggatttcgcttagatgcgggtaatctgtctccaagaattttttgctttcccaagtgggttcatcctcaggaagaatactccaatgtaccttggacatacgccacactttggtcctagtccttttttttggttcatcccaaatccggactgggtggtttggaaaagtgagatcaatggtatatgaattttttccaacggagcttggtcctccggcacttgtagcactttttttaattagacacaggaaaactgggtgcacatcagcgatatttttttggagctgtacatgatatgcaacttctccttgtctagcgatgattggaaaaggtcccacatatcttggtgctagtttccttaaccttaaacatttttgtacctctcatcggagaaaccttcagatatacataatccccttccttaaattctagatctcttctccgggtgtcagcgtaactcttttgtcgtgattgtgccacttttagacggtcgcggatcaagcgaaccttttcttcggcttcttgaataatgtcaggtccaagtaccgcccgttctccagtctcggaccacattagtggggttcgacatcgtcgaccaaacaatgactcattgagtgacatctttaggcttgcttgaaagctgttgttgtaggagaattcggcgtaaggcaaacatctctcccagtccttgctaaaatccagagcacaagccctcagcatgtcctccaggacctggttggttctctccgtctggccatctgtctgtggatgataagctgtgctaaatgcgaggtaacttcctagggcttcatggactttctcccagaaatgtgaggtaaactgtgtgccccgatcagatataattttcataggtacaccatgaagacatactatcctggtcatgtataactcggctagcttagcactgctataatttgtcttaacgggaatgaatctcgccgtcttggtgagtcgatccacgatcacccaaatggaatcatatcctgttgcgattttgggcaatccaacaataaaatccatacctatctcatcccatttccattcgggaatcctgagaggttgcaacaaacctgccggcctctggtgttcagccttcaccttctggcatacgtcgcagagtgctacgtattcggccacatctctcttcatgttgggccaccagtagccctccttcaaatcctggtacattttggtacttccggggtgtaatgagtatgccgattcgtgagcctcctttaggattaatcctcgcagtccaccctgttcgggtacgtaaattctctttttataccatagaacatctttttcgtcggttgaaaattcctttgcgcgtcctgcagctaagcgttccttcacctctcggatttcctcgttgtccttctgggcttcttctatttgggttctcaaaagaggttgaatgtccagggtgtttatctgtccatgaggcactatatgtaggttcagctgagctatttcctccctaagctcagggaccatcccttccattctcagatgattgcaatggctcttacgactcagagcgtcggccacaacgtttgctttgcctgggtgatagtgaacctctagatcatagtccttgattaattctaaccatcgcctttgcctcaagttgagatctgactgggtgaagatatacttcagactcttgtggtcagtgtagatatcgcaatggtttccaatcagataatgtctccaaattcctcctagtccttgccttgacgcatcacaatatataacgaagtctttcctgatgtcgggaagaactaaaataggcgccgaggtcagcttttctttgagctgctcaaagctctcctgacactgttctgaccatacaaacttcttttccttcttgagtagttgtgtcattggtcgggctatcttagagaacccttcaatgaaccgtcggtagtatccagccaagcctagaaaactccgaatttcagtcacagatttgggtgctttccattccgtgacagcctccactttagcagggtccactgctactccaccggctgagattacgtgacccagaaaagcgacttccttcaaccaaaattcgcacttgctgaattttgcgtataacttgtgctttcggagtctctggagaaccaatcgtaagtgttccgtatgttcttcctcatctttggagtagatcagaatgtcatcgatgaataccaccacaaacttatccaagtaatccatgaatactttgttcataagattcatgaagtatgctggggcattggttagaccaaacgacattactgtgaattcatacaacccatagcgtgttgaaaacgcggttttggggatatcctcggtcctaatcttcagttggtggtatcctgatcgaaggtctatctttgaaaacaccttagctcccttaagttggtcgaagagatcatcaatccttggtagtggatacttgtttttaatagttacttcgttcagtgatcggtagtctacacacattctcatgctaccgtctttctttttaacaaataacactggggctccccaaggtgacgaactggggcgtacaaatcccttctcttgcaactccctaatttgctttttaatttcttctaactcattgaccggcatccgatatggtctcttggatatgggggcagttccgggtatcaggtcaataatgaactctatgtcacgatctggtggcattccaggtaaatcttctgggaacacatcaggaaatcgctgcactacgggcattccctttaggggtagcatggtaaatatacctccggcatgttcggttagcctaggatcttgatccatggttgctctcatatccgatccccagggtgtggtcagggtaacttctctacgtctacagtcaattactcctctatgctttgctaaccaatccatacccaaaatgacatcaagagtttggggtattagcaccataagattggagggaaataccacatccctaaggcggatgggtacgtcaatgcaagctgtatccactgctatctcacccccaggtgaatgtactaacattggttgtcttagtttaactctgattaaattgtgttgttgacttgctttcaaagatataaatgaatgcgatgctcctgaatcgaagagaactttaactggagtggagttgagtgaaaacatacccatcagtacgccttggtcttcctgggcctcttcagctcgaacgtgcttcacttgcccgcgtccaaatccggtagcggtcctgttagtctgcggagtcctgaatagacctcgtccagcagcaggggtagcagtcccgtgattagccgttgcattagctccggtccgaatgggtgtcttgtttggatgaggacatttattggcgaaatgcccatactctccacagttgaaacagctccctggccttactgatccagtggcggcctgattcggtgcaggagcgcggttctgaatggtaaccggcttgtgaaaattgctagaggcggcaggtcgactggttgtcaccactgttggtctccatgccgagggggttgtccctttaggacgctggggtgcggtctgaggcgagcggttcatggcaagcctccttttacgattgtgctccacgaccttccggtcgttctccaacctaacgaccttattgattaaactctggaaactatcgtggtcttgtccaatcatgggcccgcgtaactcgtcattcaagccttcaatgaatttgtcgatcttttcctcctcgtcggcaagatctctagtcgcgtagcgcgccagctgagtgaaacggttcaggtactcttgtactgtggtattcccttgccgtagtctcctgaactcattcttcttcatcctcatcaccgcggcaggcacgaagttgtcacggaaggctgtggtaaattcctcccagtttggttctccagcatcttcttctcgggcttctttgtacgtgtcccaccagtctccggttggtccttccaattggtttgccgcaaagatcactttatcggcttcacgtacttgaacaagagttagcttcttctcaatgatccttaaccaatcttcagcatccataggttcttcagctgtggcgaatgtgggtggcttggttctcataaactctccaaagcttgaccctccgcggttgccttggttgttcgcgatagcttgcagaagttgggtttgggtggtcataactccggccagagtggttaagtcgggtgtctgagtttcgtcattgctggttgttgcccgacgtcggcttgccat

SEQ ID NO: 56953 - DNA, 455 bp, Oryza sativa
  Clone ID: PAT_MRT4530_58812C.1
caattaaaaattaacaaaaacccatggaaatttcaacatcccggggattaaaataacaaaaggtttccaagcccccttaccccccatttgtcccaggaaggctttggaaattttatatttttaaaaaaaaacgggggacaaacacgggccaggaaaacgggaaacactacccccccgggatcccatcctaaagaaaaaaaaaaacccaaaggaagggccccgtaataaaacccccctttaaccagccaacccttttttatctgggaaaaaaaaaggacaaaaagttacatagttccccaaagggactaagttaaaaaagcccggggctttttaacaaaggatgaagctaaaacttttccttcatcaaaaaaaggaggcgaaaaccgaagtttaaaatggttttcacaaaaaaacaggacctaattttgatccaagggagaaaaaaaggccccccc

SEQ ID NO: 56954 - DNA, 746 bp, Oryza sativa
  Clone ID: PAT_MRT4530_58813C.1
ataagcagcagccattcgggcttcttttttcttcttgtcattaattatttattaacccggctaaggaaataaataaagtttagtagcactatatatgtaggagtagatatagctaggagatagagagtccagcgttaaataaactgaggacagcttggatttctcatctccattatcttgcattcttgttcttggtttgcatctcttcttgctctttggaggatttactactattgagtagtagtgatcatgagctaccaaggtcctcctcccggcactgcagcgtacccgccaccggggacggggtacccaccgccggcgtacggcgcgccgccgccagtcgccgccgactacggcgggtatcagcagcagcagccgccgccgccgccgcaggactcgcagagccgcggcgacggcttcttgaaaggatgttgtgctgctctctgctgctgctgcctgctcgacatgtgcttctgatgagaagatggcatcaaggatgatgtgatactctacttatagagcagcttgtgatcgtcttttcacatcatttgtgctgtgtcatgatcgagattttttaagtatgtggtgagatgtgtgcatctagtattatgtagttactgttcttggatcatttggatttcatgtgttgtcaaattcaaaagtggatccattttgtatcattcatcgtaatctgggacacttctgtttatcaatgatttcgattttagtactatacgaatcaccct

SEQ ID NO: 56955 - DNA, 4293 bp, Oryza sativa
  Clone ID: PAT_MRT4530_58814C.1
ttaccagttttcgaatatatgcgggtactccgtcctcaagaattcttcgctttcccatgtggcttcatcctcagtgtgattgctccattgtaccttgtacatacgccacactttgctcctagtcctcttttcggcttcatccaatatccggatcgggtgttctggatatgtgagatcattgctaatgtgaatctcttccagcggagcttgctcttccggcactcgtaaacatttctttagctgagacacatggaagactgggtgcacatccgcgatattctctggtaactgtaactgatatgcaacttctcctcgcttggcgatgatctggaatggtcccacatatcttggtgccagttttcctttgaccttaaacctttttgtttccctcatcggagaaacctttagataaacgtaatctccctccttaaattccaggtttcttcttcgggtgtcggcgtaactcttttgtcgtgattgtgctacttttagacggtcacggatcaagcgaaccttttcttcggcttcttgaataatgtcaggtccaaataccgcccgttctccagtctcggaccacattagcggggtacgacattgtcgaccaaacaatgcctcattggttgacatttttaggcttgcttgaaagctgttgttgtaggagaattcggcgtagggcaaacatctctcccagtccttgctaaaatccagagcacaagccctcagcatgtcctccaggacctggttggttctctccgtctggccatctgtctggggatgataagctgtgctaactgcgaggtaacttcctagggcttcatggactttctcccagaaatgtgaggtaaactgtgtgccccgatcagatataattttcttaggtacaccatgaagacatactatcctggtcatgtataactcggctagcttagcactgctataatttgtcttaacgggaatgaatctcgccgtcttggtgagtcgatccacgatcacccaaatagaatcatatcctgttgcggttttgggcaatccaacaataaaatccatacctatctcatcccatttccattcgggaatcctaaggggttgcagcaagcctgccggtcgctgatgctcagccttcactttttggcacacgtcacagagtgctacgtattccaccacatctctcttcatgttgggccaccagtatccttccttcagatcttggtacatcttcgtacttccggggtgcaatgaatatgccgattcgtgagcttcctttaaaattaatcccctcagtccaccctgttcgggtacgtaaattctctttttataccatagaacatctttttcgtcggttgaaaattcctttgcacgtcctgcagctaagcgttccttcacctctcggacttcctcgttgtccttctgggcttcttctatttgggttctcaaaagaggttgaatgtccagggtgtttatccgtccacgaggtactatatgtaggttcagctgagctatttcctccctaagctcagggaccatcccttccattctcagatgattgcaatggctcttacgactcagagcttcggccaccacgtttgctttgcctgggtgatagtgaacctctaaatcatagtccttgattaattctaaccatcgcctttgcctcaagttgagatctgactgggtgaagatatactttagactcttgtggtcagtgtagatatcgcaatggtttccaattagataatgtcttcctcctagtccttgccttgaagcatcacaatatataacaaagtctttcctgatgtcgggaagaactaaaataggtgccgaggtcagcttttctttgagctgctcaaagctttcctgacactgttctgaccacacaaacttcttttccttcttgagtagttgtgtcattggtcgggctatcttagagaacccttcaatgaaccgtcggtagtatccagccaagcctagaaaactccgaatttcagtcacagatttgggtgctttccattccgtgacagcctctactttagcaggatccactgctactccaccggccgagattacgtggcctagaaaagcgacttcttttaaccagaactcacacttgctgaattttgcatataacttatgcttccgaagtttctcgagtaccaatcgcaagtgttccgcatgttcttcctcatctttagagtagattagaatatcatcgatgaataccaccacaaatttgtccaagtagtccatgaacactttgttcataagattcataaagtatgccggagcgttggttaaaccaaacgacattacggtgaactcatataatccatagcatgttgagaacgcggttttgggtatgtccccggttctaattttcaattggtggtatcctgaccgaaggtcaatcttagagaacaccttagctccgttgagttgatcaaaaagatcatcaatccgtggtagtggatacttgtttttaatagttacttcgttcagtgatcggtagtctacacacattctcatgctaccgtctttctttttaacaaataacactggggctccccaaggtgatgaactggggcgtacaaatcccttctcttgcaactccctgatttgctttttaagttcttctaactcattgaccggcatctgatatggtctcttggatatggaggcagttccgggtatcaggtcaataatgaactctatgtcacgatctggtggcattccaggtaaatcttctgggaacacatcaggaaatcgctgcactacgggcattccctttaggggtagcatggtaaatatacctccggcacgttcggttagcctaggatcttgatccatggttgctctcatatccgatccccagggtgtggtcagggtaacttctctatgtctacagtcaattattcctctatgctttgctaaccaatccatacccaaaatgacatcaagagtttggggtattagcaccataagattgtagagaaataccacatccctaaggcggatgggtacgtcaatgcaagctgtatccactgctatctcaaccccaggtgaatgtactaacattggttgtcttagtttaactctggttaaattgtgttgttgacttgctttcaaagatataaatgaatgcgatgctcctgaatcgaagagaactttaactggagtggagttgagtgaaaacatacccatcagtacgccttggtcttcctgggcctcttcagctcgaacgtggttcacttgcccgcgtccaaatccggtagcggtcctgttagtctgcggagtcctgaatagacctcgtccagcagcaggggtagcagtcccgtgaatagccgttgcattagctccggtgcgaatgggtgtcttgtttggatgaggacatttattggcgaaatgctcgtactctccacagttgaaacagcttcctgtccttactgatccagtggcggcctgattcggtgcaggagctcggttctgaatggtaaccgacctgtggaaattgctggaggcggcaggtcgactggttgtcaccactgttggtctccatgccgaggaggttgtccctttaggacgctggggtgcggtctgaggcgagcggttcatggcaagcctccttttacgattgtgctccacgaccttccggtcgttctccagcctaacgaccttattgattaaactctggaaactatcgtgatcttgtccaatcatgggcccgcgtaactcgtcattcaagccttcaatgaatttgtcgatcttttcctcctcgtcggcaagatctctagtcgcgtagcgcgctagctgagtgaaacggttcaggtactcttgtactgtggtattccctttccgtagtctcctgaactcattcttcttcatccgcatcaccgcggcaggcacgaagttgtcacggaaggctgtggtaaattcctcccagtttggttctccagcatcttcttctcgggcttctttgtacgtgtcccaccagtctccggctggtccttccaattggtttgccgcaaagatcactttattggcctcacgtactcgaacaagagttagcttcttctcaatgatccttaaccaatcttcagcatccataggttcttcagctgtggcgaatgtgggtggcttggtcctcataaactctccaaagcttgaccctccgcggttgccttggttgttcgcgatagcttgcagaagttgagtttgggtggccataactccggccagagtggttaagtcgggtgtctgagtttcgtcattgctggttgttgcccgacgtcggcttgccat

SEQ ID NO: 56956 - DNA, 478 bp, Oryza sativa
  Clone ID: PAT_MRT4530_58815C.1
actaaaatcgaaatcattgataaacagaagtgtcccagattacgatgaatgatacaaaatggatccacttttgaatttgacaacacatgaaatccaaatgatccaagaacagtaactacataatactagatgcacacatctcaccacatacttaaaaaatctcgatcatgacacagcacaaatgatgtgaaaagacgatcacaagctgctctataagtagagtatcacatcatccttgatgccatcttctcatcagaagcacatgtcgagcaggcagcagcagcagagagcagcacaactgcaaaaaaaatcacatcgacagagacagaagctttagaggcaagaacactcacaattatcctgataaaaaatggatcgatgttttgatcttctcttttggtgtgtggtttctttcttaattaccatcctttcaagaagccgtcgccgcggctctgcgagtcctgcggcggcggcggcg

SEQ ID NO: 56957 - DNA, 4932 bp, Oryza sativa
  Clone ID: PAT_MRT4530_58816C.1
ctattgagcgccatcgtctgcatcaccctcctggtaataggcatagggatcctccgaagcttcatctccggcctcggcggcggcggcccaaggcggcaacgctcggtaccacacctggcgcggcgcggtggcttcgaggcgacggcgcggcgcatgaaggcggcggcgcggcgcacaacggcggcggcccatggagaaggaggagaagggggaaaatggaaaggatgggtgtggggtggaaaaggggaggggccgggttttataagggcgtgggggaggggcggacggcctcatggcgacgcgacaggcggtgcgcggtgtggctggcggcgatggcgacgggcgggcggcgcggcgcggggctcggcgcgacggcgacggcgatgcaacgatgacgggcgagcggcgcggcagggtgcggggcgcgaggcggcgacgcgacgggcgagcggcgcgcggggcgcgtggcgcgaggcggcgacgcgacgggcgagcggcgataggacggccgacggcgacggcgcggcagcggcggcacggggcgcgagataacgcgacggcgacggcgacggcgatgacacgcggcgacgggcggcgacgtgacggcggcgcggggctcgaggcgatggaacggcagcgcggggctcggggcggccacgcgcggggcagagtgggaggggggttagggcggtcttcgaacagatgcgggtattctgtcttcaagaattcttcactttcccaagtggctttatcctcagtgtgattactcaattgtaccttgtacatatgccacactttggccctagtcctcttttctacttcatccagtatccgaactggatgctctgggtacgtgagatcattgctaatatgaatttcctccaacggagcttgctcctccggcactcgcaagcacttctttaattgggacacatggaagactggatgcacatcggcgatgttttctggtagctgtaactgatatgcaacttctcctcgtctagcgatgatttggaaaggtcccacatatcttggtgctagtttccctttaaccttaaacatttttgtacctctcatcggagaaaccttcagatatacataatccccttccttaaattctagatctcttctccgggtgtcagcgtaactcttttgtcgtgattgtgccacttttagacggtcacggattaggcgaaccttttcttcggcttcttggataatgtcaggtccaaataccgtccgttctccagtctcggaccacattagtggggtacgacatcgtcgaccaaataatgcctcatttggcgacatctttaggctcgcttggaaactgttgttgtaggagaattcggcgtagggcaaacatttctcccaatccttgctaaaatccaaagcacaagctctcaacatgtcctccaagacctggtttgttctctctgtctggccatctgtttgtgggtgataagctgtgctaaaagcaaggtaacttcctagggcttcatgtactttttcccagaaatgcgaggtaaactgtgtgcctcgatcggatataattctcttaggcacaccatgaagacatactatccttgtcatgtataactcagctagcttggctccgctataatttgtcttgacggggatgaaccttgcagtcttagtgagtcggtccacgattacccaaatggaatcgtaaccagttgcggtcttatgcaatccaacgataaagtccatacctatctcgtcccatttgcattctggaatcctaaggggttgcagcaaacctgccggtcgctggtgctcggccttcaccctctggcatacgtcgcagagtgctacgtattctgctacatcccttttcatgttgggccaccagtatccttccttcaggtcctggtacatcttcgtacttccggggtgtaatgaatatgctgattcgtgagcttcccttagaattaatcccctcagtccaccctgttcgggtacgtaaatcctcttcttataccatagtgtttccttctcatcaattgagaattctttcgcacaaccagcggctatgcgctccttcacctcttggatctctccgttgtccttctgggcttcctctatctgggtcctcaaaaggggctggatgtccaaggtgtttatttgaccataaggaactaaatgtaaattcagttgggctatttcctccttaagttcaggggttatcccttccatcctcagatgattgcaatggctctttcgacttaaagcgtcggccacaatgtttgctttgcctgggtgatagtgaacctctagatcataatccttgattagttccaaccatcgcctttgcctcaagttgagatctgactgggtgaaaatatacttcagactcttgtagtcagtgtagatatcgcaatggtttccaatcaaatagtgtctccaaatctttagctcatgaaccacgactgctagttctaggtcatgggtagggtaattttcctcgtgtggtcgcagttgtcgcgatgcataagccacgtcctttccttcttgcatcagtactcctccccagtctagaataggcgccgaggtcagcttttctttgagctgctcaaagctttcctgacactgttctgaccacacaaacttcttttccttcttgagtagttgtgtcattggtcgggttatcttagagaacccctcaatgaaccttcggtagtatccggccaagcctagaaaactccgaatttcagtcacagatttgggtgctttccattccgtaacagcctccactttagcaggatccactacaactccaccggctgagattacgtggcctagaaaggcgacttcttttaaccagaactcacatttactaaactttgcatataatttatgcttccgaagtttctcgagtaccaaccgcaagtgctccacatgctcttcctcgtctttggagtagattaaaatatcatcgatgaatactaccacaaatttgtccaagtaatccatgaacactttgttcataagattcataaagtatgccggggtgttggttaatccaaacgacattactgtgaactcatataatccatagcgtgttgagaacgcagtcttgggtacatccccggtcctaattttcaattggtggtatcctgatcgaaggtcaatcttagagaacaccttagctcctttaagttgatcgaaaagatcatcaatccgtggaagtggatacttgttaaatcccttctcttgcaactctctgatttgctttttaagttcctccaactcattgactggcatccgataaggtctcttggatatgggagcagttccgggtatcaggtcaataatgaactctatgtcacgatctggtggcattccaggtaaatcttctggaaacacatcgggaaatcgctgcactatgggcattcctttcaggggtagcatggtaaatatgcctccggcacgttcgattagtctaggatcttgatccatggttgctctcatatccgatctccagggtgtggtcagggtaacttttctacgtctacagtcgattactcctctgttcttcgtcaaccaatccatacccaatatgacatccagggtctgaggtatcaaaaccaaaaggttggagggaaacaccacatccctaagacgaataggtacgtctatgcaagcatgactcacagttatctcgcccccaggtgagtgtactatcataggctttctaagtcccactagggttaagttgtgcttttgactagccttccgagatatgaatgaatgcgatgcaccagaatcgaagagaactttaaccggggtggaattgatagagaacatacccattagtacgccctggtcttcctgggcctcttcagctcgaacatggttcacttgtccgcgtccaaatccggtagcggtcctgttagtttgcggagtcttgaatagacctcgtccggcagcaggggtagtagttccacgaacagtcattgcattagcgccagtacggacaggagttttgcgtggatgagggcagttgttggcgtagtgcccatactccccgcagttgaagcagtccacattcttcttggctccaggggcagccagagttggtgtaggggtgcggttctgaatcacaaccggcctgttgaaattactaggcgcggcgggacggttgggtgccacaatagggggcttccacccagacgaagtggctcccttgagtcgctgaggcactccctgaggtgggcgattcatagcaagcctcctcttgtggttgtgctctacagtcctttgatcgttctccagcctaacgactttgttgatcaggctctggaagctctcatggtcttgcccaatcataggtccgcgcaattcatcattcagcccttctatgaacttgtcgatcttttcctcttcatctgcgaggtctccaattgcatagcgggccaactgagtgaaccggttcagatattcctgcaccgttgtgttcccttgtcgcatccttctaaactcgttcttcttcatacgcattaccgcagcaggcacgaagttctcttgaaatgctgcagtgaactcttcccaagtgggttctccagcatcctcttcccgagcttccttgtaagtatcccacctatcaccagcgggtccctccagttggtttactgcgaagatcactttgtcggcttcgcgtacccggacaagagtcagtttcttctctatgatgcgtagccaatcttctgcctccatgggctcgtctgccgtagtgaacgtgggtggcttggtcctcataaactctccaaagcttgatcgtccgcggttgccttggttgtttgcaatggcttgcagaagttgggtttgagtggccataactccggccagggtggttaggtcaggtgtttgagtttcttcattgctgattgacgcccgacgtcggcttgccat

SEQ ID NO: 56958 - DNA, 1189 bp, Oryza sativa
  Clone ID: PAT_MRT4530_58817C.1
agaaggaggcgctgcgcgaggccttcgacgtcctcgccgcctgctcgcccttcccgctccccttcgcctggggcgacctcgactcctacatctcctcgctccagtcgggttcagcaggtggctgacggtgagacaatggaggccaaatcggaggagcaaaatgaggctaaggtgacatctatggagcatgacatcgaggagggcgacgagaaagcgtctcgagaacaagagacgtgggcggcggaccggtcgaagctgctcctcgggcccaagatcgcgtcggggtccaacagccgcatccaccgcggcatgtacggggagcaaccagtggccgtgaagatcatgcacgcgccagtgggcgacgacgacgacgacgtgcaggtccggcgtgagatggaggcgcagttcgacgccgaggtgtccctcctgtcgcggctgcgccaccccaacgtcgtgcggctcgtcggcgtgtgccgggagccggaggtgtactggatcatcaccgagctcatgcgacgcggcacgctcagcgcgtacctgcacgggcgggagccctactcgctgccgccggagaccatcgtccgcctcgcgcttgacgtcgcccgtggcatggagtacctccacgcgcgtggcgtcgtccaccgcgacctcaagccggagaacctgatgctcgacggcggcgggcgcgtcaaggtcgccgacctgggcacgtcctgcctcgaggccacctgccgcggcgacaagtgctcctccaaggcgggcacgttccggtggatggcgccggagatgatccacgacaagcgctgcaaccgcaaggtggacgtgtacagcttcggcctcgtgctgtgggagctcaccacctgcctcgtgccgttccagaacttgagccccgtgcaggtcgcctactccgtctgcgacagggacgccaggccgccgctctcgccgtcgtgcccgccggccatcaacagcctcatcaagaggtgctggtccaccgaaccagcgaggcgtcccgagttcaaacagatcgtgtccgtgctggagagctacgaccgctgcctccggcaaggcctgccaatgactgctggccttcaactgacgcccaagaaggaagccgtctcccctccgcaaggacggatgccgtccctgccgccggcccacgtcgagctcatccacaagcccgacgactgcg

SEQ ID NO: 56959 - DNA, 4410 bp, Oryza sativa
  Clone ID: PAT_MRT4530_58818C.1
ccagtcttcgaataggtgcgggtattccgtcctcaaaaattcttcactttcccaggtggcttcatcctcagtgtgattgctccattgtaccttgtacatacgccacactttgctcctagtcctcttttcggcttcatccaatatccggatcgggtgttctggatatgtgagatcattgctaatgtgaatctcttccagcggagcttgctcttccggcactcgtaaacatttctttagctgagacacatggaagactgggtgtacatccgcgatattctctggtaactgtaactgatatgcaacttctcctcgcctggcgatgatctggaatggtcccacatatcttggtgccagttttcctttgaccttaaacctttttgttcccctcatcggagaaacctttagataaacgtaatctccctccttaaattccaggtttcttcttcgggtgtcggcgtaactcttttgtcgtgattgtgctacttttagacggtcacggattaagcgaaccttttcttcggcttcttgaataatgtcaagtccaaataccgcccgttctccagtctcggaccacattagcggggtacaacatcatcgaccaaacaatgcctcattgggtgacatctttaggcttgcttgaaagctgttgttgtaggagaattcgtcgtagggcaaacatctctcccagtccttgctaaaatccagagcacaagccctcagcatgtcctccaggacctggttggttctctccgtctggccatctgtctatggatgataagcggtgctaaatgcgaggtaacttcctagggcttcatggactttctcccagaaatgtgaggtaaactgtgtgtctcgatcagatataatcctcttagatataccatgaagacacactatcctggtcatgtacaactcggcgagttttgcactgctatagtttgtcttgacggggatgaatcttgccgtcttggtgagtcgatccacgatcacccaaatggaatcatatcctgttgcggtcttgggcaatccaacaataaaatccatacctatctcatcccatttccattcgggaatcctgagaggttgcaacaaacctgccggcctttggtgttcagcctttaccttctggcatacgtcgcagagtgctacgtattcggccacatctctcttcatgttgggccaccagtagccctccttcaaatcctggtacattttggtacttccggggtgtaatgaatatgccgattcgtgagcttcctttaaaattaatcccctcagtccaccctgttcgggtacgtaaattctctttttataccatagaacatctttttcgtcggttgaaaattcctttgcacgtcctgcagctaagcgttccttcacctctcggatttcctcgttgtccttctgggcttcttctatttgggttctcaaaagaggttgaatgtccagggtgtttatctgtccacggggtactatatgtaagttcagctgagctatttcttccctatgctcagggaccatcccttccattctcagatgattgcaatggctcttacgactcagagcgtcggccacgacgtttgctttgcctgggtgatagtgaacctctaaatcatagtccttgattaattctaaccatcgcctttgcctcaagttgagatctgactgggtgaagatatactttagactcttgtggtcagtgtagatatcgcaatggtttccaatcagataatgtcttcaaatctttagcgcatgaaccacagctgcgagttctaagtcatgggtagggtagttttcctcatgtggtcgcaattgtcgcgatgcataggccacaactttcccgtcctgcatcagtactcctcctagtccttgccttgacgcatcacaatatataacaaagtctttcctgatgtcgggaagaactaaaataggtgccgaggtcagcttttctttgagctgctcaaagctttcctgacactgttctgaccatacaaacttcttttccttcttgagtagttgtgtcattggtcgggctatctttgagaacccctcgataaacgttcggtagtatccggccaagcctagaaaactccgaatttcggtcaccgacttgggtgccttccattccgtaacagcctccacttttgcagggtccactgctactccactggctgagattacgtgacccagaaaagcgacttccttcaaccgaaattcgcacttgctgaattttgcgtataacttgtgctttcggagtttctggagaaccaatcgtaagtgttccgcatgttcttcctcatctttggagtagatcagaatgtcatcgatgaataccaccacaaacttatccaagtaatccatgaatactttgttcataagattcatgaagtatgctggggcattggttagaccaaatgacattactgtgaattcatacaacccatagcgtgttgaaaacgcggttttggggatatcctcggtcctaatcttcagttggtggtatcctgatcgaaggtttatctttgaaaacaccttagctcccttaagttggtcgaagagatcatcaatccttggtagtgggtacttgttcttaatagttacttctttcagtgatcgatagtctacacacattctcatgctaccgtctttcttcttaacaaatagcactggggctccccaaggtgacgaactggggcgtacaaatcccttttcttgcaactccctaatttgctttttaagttcttttaactcattgactggcatccgatatggtctcttggatatgggggcagttgcgggtatcaggtcaataatgaactctatgtcacgatctggtggcattccaggtaaatcttctgggaacacatcaggaaatcgctgcactacgggcattccctttaggggtagcatggtaaatatacctccggcacgttcggttagcctaggattttgatccatggttgctctcatatccgatccccagggtgtgatcagggtaacttctctacgtctacagtcaattactcctctatgctttgctaaccaatccatacccaatatgacatcaagggtctgtggtatcaaaaccataaggttggagggaaacaccacatccctaaggcgaataggtacatcaatgcaagctgtgtccacggctatttcacccccaggtgaatgtactaacattggttgccttagtttaactctggttaaattgtgttgttgacttgctttcagagatataaatgaatgcgatgctcctgaatcgaagagaactttaactggagtgaagttgagtgaaaacatacccatcagcacgccttggtcttcctgggcctcttcagctcgaacgtggttcacttgcccgcgtccaaatccggtagcggtcctgttagtctgcggagtcctgaatagacctcgtccagcagcaggagtagcagtcccatgaatagccgttgcattagctccggtgcgaatgggtgtcttgtttggatgaggacatttattggcgaaatgcccatactctccacagttgaaacagcttcctggccttactgatccagtggcggcctgattcggtgcaggagctcggttttgaatggtaaccggcctgtggaaattgctggaggtggcaggtcgactggttgtcaccactgttggtctccatgccgaagaggttgcccctttaggacgctggggtgcggtctggggcgggcggttcatggcaagcctccttttacgattgtgctccacgaccttccggtcgttctccagcctaacgaccttattgattaaactctggaaactatcgtggtcttgtccaatcatgggcccgcgtaactcgtcattcaagccttcaatgaatttgtcgatcttttcctcctcgttggcaagatctctagtcgcgtagcgcgccagctgagtgaaacggttcaggtactcttgtactgtggtattcccttgccgtagtctcctgaactcattcttcttcatccgcatcaccgcggcaggcatgaagttgtcacggaaggctgtggtaaattcctcccagtttggttctccagcatcttcttctcgggcttctttgtacgtgtcccaccagtctccagctggtccttccaattggtttgccgcaaagatcactttatcggcctcacgtactcgaacaagagttagcttcttctcaatgatccttaaccaatcttcagcatccataggttcttcagctatggcgaatgtgggtggcttggtcctcataaactctccaaagcttgaccctccacggttgccttggttgttcgcgatagcttgcagaagttgagtttgggtggccataactccggccagagtggtcaagtcgggtgtctgagtttcgtcattgctggttgttgcccgacgttggcttgccat

SEQ ID NO: 56960 - DNA, 612 bp, Oryza sativa
  Clone ID: PAT_MRT4530_58819C.1
cccacgcgtccgcccacgcatgcagaagaatagtagaaaagtacttcaagatggagagagttcctgcagttcatctggcagtggtgctcctggccttctgctgcctcatccatgcatcatcaagtgctgaaactccactcccacctgccctcaaggtgatgcagcgttttgaagcaactccagtctctagcagaggagatgatcaggctgccgccgtcatcgccggagaaccggaggccggcgaggtcaacggcaggatggaactggagctcaccgattacccgggctccggcgccaacgatcggcactcgccatgggggcaggagaggagaaactgagcagcagcagcaaaaaatcttcagagaaaacttcatccatggtcactttcttcagagagaaaattcagactttgtacctgtaccatatcatgtatacttaattatctctactattttctacacaactgttacagtgtttctacaccctgtgtaacatgaaagagaggatttgggagttaattaacgactgataatcagtcgccggcaccataatattataacaattaattataacatttctagtaagttttttagtcaaagttgttatttgttt

SEQ ID NO: 56961 - DNA, 611 bp, Oryza sativa
  Clone ID: PAT_MRT4530_5881C.1
atggataccaaggaaaagagggttaatattgaaaccgatgaatcttatacagtgacattccactgtgccatatgcatggaatacaagcctatgaatagtcgcttccattgcgaaggttgcccccactatttctgcttcaaatgtgttttagatcatattagttaccgtgtattgggtggtgatgcccatgtttgctgccctgagccaggatgtactattggtgagcttacctacgagaagtggtacaagcatgtcaggggtgatgtgcgcaaagcttgggaatctgcaaacctaagggattctgctatgctaaaaaggtgtggaagttgtggaaaatttttggaaggggtcactttggacgggatggagggtggtagggatgattgccttgatccgctgcataccctggcaattgcaaaaggtcttctctatgcaaatattggctggtttcctcttgcttctatcctcttgagctgtattttttcaccccgtgctagcgcccggccggagccgtccgctcggctgccgtcgcagggttggtagtcgcagggccggcggcggtggatccggccattgcgcgttgcagtcgccgtcgccgagctcgccgccat

SEQ ID NO: 56962 - DNA, 941 bp, Oryza sativa
  Clone ID: PAT_MRT4530_58820C.1
cgtggttctttttacctcttcctccctttcacgcgcgccgactggcagccgactttgccgcgcgccgagccgccgcgcgtcggtctcgggatcgatcgcgcgtgcccaaccgccttggcgcgctgccgcccgtccaacgccttcaacccaccgtcgccgcaccaatctcgacgacgacaaagccgggacgacgaccgccgcatgaaatcactgctcgacgccgtacactcccgtccaagccgccgtcgggtgcgatttcgtttctacccgggataaatcgcgccaattcttgcattcacccccatgccggctgttttcaccctcgccgccgccgcgcgtcatgctcggattggcgccaacacgtcgccagcgatttccacccgcggtcaagtcaatccttcgccggtaagtattcgaacgtggcctcccgccactcaaatcgatcttgcccgccctctttcagcctctgccgccctcgccgcatcaagccgagcatcgccgcccccgcgctgctctgccggtcgctggtgctcagctttcaccttctggcatacgtcgcaaagtgctacatattctgctatgtctcttttcatgttgggccaccagtatccttccttcagatcctggtacatcttcgtacttccggggtgcaatgaatatgctgattcttgggcttcttttagaattaatcccctcagtccaccctgtttgggtacgtagatcctcttcttataccatagcgtttccttctcatcaattgagaattctttcgcacgtccagcggccatgcgctccttcacttcttggatcacttcgttgtccttctgggcttcctctatctgggttctcaaaagagggtgaatgtccagggtgtttatctgtccacgaggtactatatgtaggtttagctgggctatttcctctttaagctcaggagccat

SEQ ID NO: 56963 - DNA, 857 bp, Oryza sativa
  Clone ID: PAT_MRT4530_58821C.1
atggaggcaaactcgccgccagctaagaagaaacccacctcaaggacacatcgccgcctcgactgcggtcagcacataatttgtgccctagccatggtcacgcccacgttctcacttctatatctcttctcccgtccgtcctccctcctcccgcgccacaccgtcggctcgccacccactgccacgccgcatccccgctcagccggccactccgccgctagcaccagcacggaaggggttgggatgggagtgagaggagagccccaccaacgcctccgccgcaccccgtcgtcatcacggcaccctgctccgctgtcctgctgcatttacattgataagaaaggggagagagtttggtatagagtagggatgacaagtgggtcccacttgttttattaatttatttgatgaccgggtcaaacgttggtcaaaaagtcaacggcgtcatacattaaaatacggagggagtgttgtgatacgcataggctacgatagcataaatgggggatacccgtagaccggatatagagggtattggggtacgctggtacgaggatcgacgagatcgtagtcgagttgattcgactagatcacccggcgacttggctcctgtaggctccggcttcgtaggctgtggtggatgtgttggcggtaaggttttctgccttaggtcctcccggggggtcccttttataccgcaggtcagctagtctccaagtaggactcggagacatcagactcggtacaatacaatgacgacccagttctatccgagtaggactctttccatctgtagactccatgatggacttccttaacttatgctgagaacgttcgtatacgcgcaagcataccat

SEQ ID NO: 56964 - DNA, 381 bp, Oryza sativa
  Clone ID: PAT_MRT4530_58822C.1
atggctgtccttccaagctcaatagcagctgattgcaccatggctcgtagcctttccaagcgatggaggcaggcaggcagcaagcaggacggcaggacgccggcggcgcggcgagctagcgattgtttcctcctcggatgggagccgccgtttggctgcctcggcgtcgtcgccggcatcggcgccgccggcaccaacgtctatggggctaagctcagcgcaggtccggaggaagaagaaggacgagacacgggttcaacgggttacggcggttctaaaccaacccgtgaaaaattggaaaaacggatggcgatgattatggacactggttctccaagagacaacaatgaagagttcggcaaggccaaatctggtggctag

SEQ ID NO: 56965 - DNA, 681 bp, Oryza sativa
  Clone ID: PAT_MRT4530_58823C.1
atggcggcggcggcggcggcggcgacggcagcgaggatactcgagctggaccccgcgcacccgcgcgccggccgcgtcatcgacgacatcgtgcgtacggagaagcggatcttcccgaagcacgagtccctggcgcggaccttccacgacgagctcaagcgccggaacaccaccctgatctactcagccgcggccgccaccatccccaccactggagacgccgccgccgcctccgacgaggaggaggaggtcgtcgggtacgccatgtacacgtgcgccacctccctctgcgcctccatcaccaagctcgccgtgaaggagagccggaggaggcagggccacggcgaggcgctgctgatggccgccgtcgagggctgccggaggaggcgggtccagcgggtgtccctccacgtcgacccggcgagggcggcggcggtggcgctctaccgcaaggccgggttccaggtcgacgccaccgtcgtcggctactacgctccacgcagggatgcgtaccggatgaaatgcaaatggagcaatatgttcttcgccaattgtgatagggaaatgctacgggacggtatcctgttcgaacgggatgctatctctaaagatcgcctgatacctgtttcagctattgtcgctgactgtgaatattgcttaaaagtcagccagttcagttga

SEQ ID NO: 56966 - DNA, 1378 bp, Oryza sativa
  Clone ID: PAT_MRT4530_58824C.1
atgggctgcaactgcctcgtcggcaagggcggcaacacgaggccagccgccacgacgagcgcgcggccgtcgtcgtcgcggtgcgcgcactgcggcgcgggcctcgccgtgccgcggccggggccggggggcgctgccgccgtcaccaccgtccggtgcgcgctctgccaccgcatgacgtgcgtcgaccggcgcggcggccgcgacctgggcggcggcggcggtggcggcgcgctcgaggcctcgtcgtcgtcgtgggcgccggcggaggcgtcgttcctcaggcgagacgcgccgtccggctacccgttcgtccccgggaggaagcgcgcgctcctcgtcggcgtcagctacaagggctccagctacgagctcgaggggaccgtcaacgacgtcgactgcatgaggcgcctcctcggcgagagcttcggtttccccgccgattccatcctcgtgctcaccgaggagctgggcgagggcgacccgtcgaggtcgccgacgagggcgaacctgctggcggcgatgcggtggctggtggaagggtgcgacgccggcgactcgctggtgttccacttctccggccacggcgtgcagaagctggacgtgaacggcgacgaggtggacggctacaacgaggcgctctgccccgtggacttcgagcggagcggcaagatcctcgacgacgagatcaacgagaccatcgtccggcccctcgtcgccggcgcgaagctccacgccatcgtggacacgtgccacagcggcaccatcctggacctccccttcctctgccgcctctcccggacgggctactggcagtgggagaaccactgccgccgcccggagctcgccaagggcaccagcggcggcctcgccatctccatcagcggctgcagcgacgatcagaaatccgcagacagcagcggattctcgtcggagcaggcggcggcggcggcggcgatcggggcgatgacgtacagcttcatcagggcggtggagtcggagcccgggacgacgtacgggcggctgctggcggcgatgcgggcgacgatccgggaggggcagcaggggagcagcgtccggcggctcctccccggccgcctcggctccttcgtccgcaagatgatcccgtccggcggcgtgcaggagccgcagctttgcgcgtcggaggtgttcgacatctacaggaaaccgtttctcctgtgacaaagcggttttctcttttcccgccacggattcggttttaccgcgcgctgaacctctctgctttcattcatctgcctgcctctgaaattctctgaacatttcgacaatgtcattatcttacgaatatgcattgcgtgtgaatataatgtggcgcggcgccgggttggattggatt

SEQ ID NO: 56967 - DNA, 538 bp, Oryza sativa
  Clone ID: PAT_MRT4530_58825C.1
atggccgggtcgtcagcaactttgtcgcccagtgtgaagtttatatctggtgacactgaattgttggttatggtcgtgcaggcactgaggaaggagcccttgacggtgtacggcgacggtaagcagacgaggagcttccagtacgtctccgatctggtggaggggttgatgaagctgatggaaggggagcacgtagggccattcaacctgggaaacccaggggagttcacaatgctggagcttgccaaggtggtgcaggacaccatcgacccaaacgcgcggatcgagttcaggccgaacaccgccgacgacccgcacaagcggaagccggacatcagccgcgccaaggagctcctcggctgggagcccaagatccccctccacaagggcctcccgctcatggtccaggacttccgcgaccgcatcttcggcgaccacaagccccactccgtcgccggcgacaactgaatctgaatctgaactcgatcgatcttatcttaccggcattttctggagaagttgatcaagatatacacag

SEQ ID NO: 56968 - DNA, 196 bp, Oryza sativa
  unsure (1)..(196): unsure at all n locations
  Clone ID: PAT_MRT4530_58826C.1
gacccacgcggccggagaggttgagagnacangcgggcggggggagggggagggcacgcccgcggccgggccggcgcgccgagcgcgatggggtggcggtggcgcaaggcctacggngccctcaaagactccaacaaggcgcggcctcggcgagggccgcagcgacctcacggagttggataaagcaatcgtgaag

SEQ ID NO: 56969 - DNA, 253 bp, Oryza sativa
  Clone ID: PAT_MRT4530_58827C.1
ttgacgcgtgggctccagcctccgcctccgccgccgccgtcagccgccgagctcctcccgcgcgctccgagcccatcatggcggacgtcgaagacgagacggaggtcgccgccggagcacagtcaaagaagaggacgtgccggaagcacagataccggagcgacaatctctaaactgatggcgaaacattcagcaaagagctgctaaagctgttgatgacaggtacactgattgagttccagataaacgtgga

SEQ ID NO: 56970 - DNA, 265 bp, Oryza sativa
  unsure (1)..(265): unsure at all n locations
  Clone ID: PAT_MRT4530_58828C.1
cccctttctcnacccctcttcctcctcgattccngcngcctcgtcgcagnacngnagggagaggggtcgtccccctcccctagtttagtatagtagtcgggctagtctcgttaggtcgggtttttcccgtttctcgtttctatngcgatggaagttgaagacggtggcggtggcgcgattgaggccggtgacgtggaggcgacaaggttngcgacngcngcagcnggaatccggttcgcggcagctggctgcnngaatccaatct

SEQ ID NO: 56971 - DNA, 421 bp, Oryza sativa
  unsure (1)..(421): unsure at all n locations
  Clone ID: PAT_MRT4530_58829C.1
agaattattaggatttctagagtcttctnttgtaaccttttaaatatagctatataggtgtgggcagagccttccatttccctatcattccctcataaggatgggtgagattaggcaagtgtcttccaatttgttctcaccaaaccaaaatcttgtgaaatcgacatttatgttgatttaagcaccctcttgatgatctttcgcaaattgcaagcaaatcacagagatgcacaggttattttcagacttagttgtgtgtctgtctgtgtgtgatagatagaaagaaagcatcaattttggaagggtgcanagggtggtgcgcatgtcaattcttggtgcaaatctctgaattatagaaatgcctcanatactgtcgactggcagcgtttggtgaaaattctgaaacttttgtttcgggttt

SEQ ID NO: 56972 - DNA, 1208 bp, Oryza sativa
  Clone ID: PAT_MRT4530_5882C.1
atagtggatccccgggcggtcctctcatgcctcactcgcctagaacccctcctcctcctcccgatctccgaggcaatcctcctcgaattccccgcgccccgatctccccctgacgccaccctcctcctccgccccggatcgccccgcccgatctcgccgcggggtcgaatttccccttctcttgtctccgatcagggccgcctcgatcgaaggcggcgccgcgccgaccatcccaccttgtttggttgtaatttcttcttgtcgcgtgaggaggggggcgtggcggcgggggagagcgcgtgagcgggcgggagatgggggcgccgaagcagaggtggacggcggaggaggaggccgcgctcaaggccggcgtggcgaagcacgggacggggaagtggaggaccatcctccgcgacccggaattcaccgcgctcctgcggctgagatccaatgttgacctcaaggataagtggcgcaacttgagtgtcactgctggaggatatgggtcaagagagagggcaagggtagctttgaagggaggcaagcgagggcctaaggcccttgctgaaccgatggatgccgacgaaaagaaccctgacattgatgataatgcaatcattgatgcacaaccgttggcagtggttgttgagcccatgcaacttgagagtactccagagaaagagaaatcagttgctaggcttgatgaccttattttagaagctataaagaagcttaaggaaccgtctgggtctaatagaacaacgatttcttcatacattgaggagcaatactggccacctgaagattttcaacgattactttctacaaaattgaaagcattggttgctactggaaaattaatcaaggtgaatcaaaagtacaggattgcaccaagttcgaactcttcaggtggaaagagcatcaaggtgtattccactggagaaatgaacatagaaaataataatgttagacagctgagtaagccgcaagtggatgctgaacttgataagatgaaaagcatgagtaaggaagaggcagcatcatttgctgctagggcagttgccgaggcagaagcagccattgctgaagctgaagaagcagcaagggctgcagaggccgcagaagccgaggctgacgctgcaaaggcttttcttgatgctgttgtgaccacgatgcaaaacagaaatcatgcttctgcggtatactga

SEQ ID NO: 56973 - DNA, 354 bp, Oryza sativa
  Clone ID: PAT_MRT4530_58830C.1
ggtgcgcgtgatgtggttctatctggcagagccgtgtacccctcctatgactgacccatcaccagaccacatcagagacacctccctttctactgtcttcccctctacctgacccacagccagatccaatatcgtcttcgcaccactgcacccatatcttactctacagtctgaacctatatatgattctatatctaactctcttgcggactccgaaccatctgcggagcctgacccgaagctatagcacattgtgaccgaaaacacgatcctcaacatgctccacatcgtggcctagatccatctgcgttctctaaccgaaagcaacatgctcaacaggctccacaggctgac

SEQ ID NO: 56974 - DNA, 2521 bp, Oryza sativa
  Clone ID: PAT_MRT4530_58831C.1
cacaatttatggatggtaattacaggagatgaagaatcaagaaccggcttcacaacttctaaaaaaaaagaaccggcttcaatttcatccatgtacattggtatcctgttatgctgacgacggcctagatttatctgtctaggatcaggaacaattattggaccagtaaatggtggccattcaatttgatttccataaggaagaaattgtccagcccaggtaatagcaagtgcttgagaagagtagaatggattgatcaactgattttcattaagatttctatgtttgcaaactgccaagacatgagcacatggaacacctgtcaaatttggcttttgacaatcacaattgaagtccctcagtgtgtaaacctcatggtttccttgttgcattgggactaactcttgtcgacctttacctcatatattccaacttcatctccatacgagattacattcatatgtccagccttatttcctcgcttcactaatagcttatcaaccctttgagaccattgcttgccattgttaagtaaattaacaacatttcgccttctctcaacaaaccattctaagcactttgaaaatgtttcctccacaatggctgccaccggtaacctccgagaaaacttaaacacattgttcaatgactcagatccattgcttgtcatcattccccaacaatatcctccatccttgcattgaaataccttctcgggcttttcttgctcatctttatcttcctgcaagtgctttccaacctttttaacatatgttattgcctcaggacaaatatttgcaattgatgacattccttcatcaaattttctaggtttctttttcttcactgtccacttaaatgtcttgagcactatttcattgcgacaaaatttccatagattctcagctacatgctgtgagcaaaggcggtgcacacattcaccggcgctctcattccatccaatgtggggctgcttaaacaaccattttatggctttatgtcgatcagatataacacacagaaacttaactttccatagcctattacctcacttcgtagccatctcataaaccacccccagtttgcactatcttccttttccacaatagcaaatgcaagaggtagtagttgattgttagcatcatatccacaagcaatcaacaatctacccttgtacctccctaacaaaaagcatgcatcaacacttataactggccgtaggtagggaatggcatcgatacaaggtccaaatgcccaagcaacacttttaaatgctcgccgtccttcctgagtcgttggctttgacaaaaggacatactttgtacctgggtttttagcttttatagcttgtaagaaagggatgaggaggccatatgaaccttcccaactaccgaaaagttgtgctattgccttctctctgcctcgccataatttactataagatggcttcgcatttctatatctctgttggactagtgacctcgcgttttttctactcaattccaggtcatcctttaatgcatcacatatcacattagcaatcatagaagatgataactgagcatgatcaaatctatcagccggtgctcgacaggtgtgagcatagggacatttccttatcatccaacctgaacctatttttgttggaattgcatagagtctccacatgtagctattatcagtgcattcagctactagtttagactgactacttgtgctatacttgatttctgaatttttacatatatgaaactcgcctatagcaatttgtaggcgctcttttgaatcaaaagtctttccttgtgctagtgggttagaaaattgattcttacgtccaaagaaactctcgtctgctgttgtcttccacaacacagatatatcactaaatgctttataggattttgtccagatgcacgcataaaaggaaatgcattgacagaatgaacaactcgtggttctgggggactcatcatctgaactattatcaagggcagcatcaaaatcatgctcgttgtcatcatccagtccaaatttgtcctcaccaagatctgtctcctcacctgcatatgtgtcttctgcagcattgtcatcatctatagttggttgtgtttcgcaatccacattatcctgacttgatcttgcttccgtagaggtgcatttgacataaagctcaacaacctgcccacatttcttctcaaatatcatcttccatcccctatcttcataaataggaatcaattgaaaatattgtggtccaggatttccgatatcaaatcgagattggatactcattggacaattatcctcagtgtacccaagggcttgaaaaatttcttttttgacttcctcaaaggttttaacctcaactgctggaaaagttatttttggaggaatattatattccgcacccttagctccatgttgtattttcccatcaacatacactagaacaataatcattttttctccgccaactacgtggacgtccaggattgcttgctgaaggcggttgcggggcatt

SEQ ID NO: 56975 - DNA, 243 bp, Oryza sativa
  Clone ID: PAT_MRT4530_58832C.1
atggacatctctagggcaaatgaaggctacacgggctgcggctcggtagtcgagatgtcatggcacagggccggcctgaagcgcctttgtaataatgaaaatgcaaattttctcggtcgcgacagccgcaaggggatgtgcggagccatggttcctggccacacgacgatggagccgccgacgagggaggagcgtgtcatctctcaccggccggagtgtctgccaggcttagtgtcgggctga

SEQ ID NO: 56976 - DNA, 1422 bp, Oryza sativa
  Clone ID: PAT_MRT4530_58833C.1
atgattattgttctagtgtatgttgatgggagaatacaatatggagctaagggtgcagaatataatattcctccaaaaataacttttccggcagtggaggctacaacctttgaggaagtcaaaaaagaaatttttcaggcccttggatacactgaggatcattgtgcaatgaatatccaagctcggtttgatatcggaaatcctggaccacaatattttcaattgattcctatttatgaagacaggggatggaggatgatatttgagaagacatgtgggcattcggaaagggatggctcaggtgttttgttggagccagaagacacatatgttggtgaggatagatttggactggacgatgacaacgagcaggattgtgatggtgcccttgataatagtttagatgatgagccaccagaaccacgagttgttcattctgtcaatgcatttccttttatgcgtgcatctggacaaaatcctataaaagcatttagtgatatatctatattgagggagacaacagcagacgagagtttctttggacgtaagaatcaattttctaacccactagcagaaggaaagtcttttgattcaaaaaagcacctacaaattgctatagataaagatgagcaagaaaagctcgagaaggtatttcaatgcaaggatggaggatatcgttggggaatcatgacaagcaatggatctgagtcattgaacaatgtgtttaagttttctcggaggttaccggtggcagccattgtggaggaaacattttcaaagtgcttagaatggtttgttgagagaaggcgaaatgctgttaatttacttaacaatggcaagcaatggtctcaaagggttgataagctattagtgaagcgaggaaataaggctggacatatgaatgtaatctcgtatggagatgaagttggaatatatgaggtaaaggtcgacaatgagttagtcccaatgcaacaaggaaaccatgaggtttacacatggagggacttcaagtataaggtagttttgcaacccaacaacacaccatcttgtgactgtcaaaagccaaatttgacaggtgttccatgtgctcatgtcttggcagtttgcaaacatagaaatcttaatgaaaatcagttgatcaatccattctactcttctcaagcacttgctagtacctgggctatacaatttcttccttatggaaatcaaattgaatggccaccatttactggtccaataattgttcctgatcctagacagataaatctaggccgtcgtcagcataacaggataccaatgtacatggatgaaatgcaaggaagacgacttggacaccaggcacaccgttccacaagagatagtgacaatttaggtgcaacgtcgagcagaacacatgttgatggaccctctggcaccatatag

SEQ ID NO: 56977 - DNA, 1501 bp, Oryza sativa
  Clone ID: PAT_MRT4530_58834C.1
gtgaggtcactagtccaacagagatatagaaatgtgaagccatcttatagtaaattatggcgaggcagagagaaggcaatagcacaactttttggtagttgggaaggttcatatggcctcctcatccctttcttacaggctataaaagctaaaaacctaggtacaaagtatgtccttttgtcaaagccaatgactcaggaaggacggcgagcatttaaaagtgttgcttgggcatttggaccttgtatcgatgtcattccctaactacggccagttataagtgttgatgcatgctttttgtcagggaggtacaaggatagattgttgattgcttgtggatatgatgctaacaatcaactactatctcttgcatttgctattgtggagaaggaagatagtgcaaactaggggtggtttatgagatggctacgaagtgaggtaataggctatggaaagtttatgtgtgttatatctgatcgacataaagccatgaaatggttgtttaagcagccccacattggatggaatgagagcgccggtgaatgtgtgcaccgcctttgctcacagcatgtagctgagaatctatggaaattttgtcgcaatgaaataatgctcaagacatttaagtggacagtgaagaaaaagaaacctagaaaatttgatgaaggaatgtgatcaattgcaaatatttgtcctgaggcaataacatatattaaaaatgttggaaagtacttgcatgaagataaagatgagcaagaaaagctcgagaaggtatttcaatgcaaggatggaggatatcgttggggaatcatgacaagcaatggatctgagtcattgaacaatgtgtttaagttttctcggaggttaccggtggcagccattgtggaggaaacattttcaaagtgcttagaatggtttgttgagagaaggcgaaatgctgttaatttacttaacaatggcaagcaatggtctcaaagggttgataagctattagtgaagcgaggaaataaggctggacatatgaatgtaatctcgtatggagatgaagttggaatatatgaggtaaaggtcgacaatgagttagtcccaatgcaacaaggaaaccatgaggtttacacatggagggacttcaagtataaggtagttttgcaacccaacaacacaccatcttgtgactgtcaaaagccaaatttgacaggtgttccatgtgctcatgtcttggcagtttgcaaacatagaaatcttaatgaaaatcagttgatcaatccattctactcttctcaagcacttgctagtacctgggctatacaatttcttccttatggaaatcaaattgaatggccaccatttactggtccaataattgttcctgatcctagacagataaatctaggccgtcgtcagcataacaggataccaatgtacatggatgaaatgcaaggaagacgacttggacaccaggcacagaagccggttcttgattctccatctcctgtaatta

SEQ ID NO: 56978 - DNA, 436 bp, Oryza sativa
  Clone ID: PAT_MRT4530_58835C.1
tcccacacagaagaagttgcacatatccccatatcctctgccacacccacccccctacacttgacaaaacagagaattaggcctaatacccatggcaaataggtgacaattggaaaatacccatcacatatgtgaataacatgtgggtcctaggttaaaatatcaatgtcataggcaataattttttcaaaccctgttgtgatattttcattggtaccaagatactaattctagatgtctttctcagtgttgtgataggagctgtatgcattcaatgtttctcttaggtgttagctaaatatgcaaggaataagatgtaaccatgtcctctgtttttgttctttcatgagttgtaacgaaattcttttgttcttttacactgagcatgaaacaagttatgatataagagaatgcttgtttgaaaaaaaaaaaaaaa

SEQ ID NO: 56979 - DNA, 996 bp, Oryza sativa
  Clone ID: PAT_MRT4530_58836C.1
cccaatgctagggcagggtgcctttgccgccatccaaatcgacaccgggagtctgccgccgccgccgtccgcctcaacctctggagtctgttcctccttccgactaagcgtagggactacccacgaggcaaatggcgcggcaccgctaaggcagggggccgccgccgccgccgccgtcgtccacctcgacgccgggagtccgccgtcgccgtccaccaccaccggaagaccacgccaccgcctgaatcgacttttgaagttctgagaggtggctgccatcggccgcttccatccgtagcttgctgtcttccctggaggctgcagctgttgtctgcctcgactcctgccaagtgctgtcatcttatacttgaagtccctccgtgtgtaaacctcatggtttgcttattggcttaggactaactcattgtcgacctttacctcatatattccaacttcatctccatacgagattacattcatatgtccagccttatttccttgcttcactaatagcttatcaaccctttgagaccattgcttgccattgttaagtaaattaacagcatttctccttctctcaacaaaccattctaagcactttgaaaatgtttcctccacaatggctgccaccggtaaccttcgagaaaacttaaacacattgttcaatgactcagatccattgcttgtcatgattccccaacgatatcctccatccttgcattgaaataccttctcgggcttttcttgctcatctttatcttcattcaccgacgctctcattccatccaatgtggggccccagtttgcactatcttccttctccacaatagcaaatgcaagaggtagtaattgattgttagcatcatatccacaagcaatcaacaatctacccttgtacctcccatcacaatcctgctcgttgtcatcgtccagtccaaatctatcctcaccaacatatgtgtcttctggctccaaagaaacacctgagccatccat

SEQ ID NO: 56980 - DNA, 767 bp, Oryza sativa
  Clone ID: PAT_MRT4530_58837C.1
agtgcttgagcatgacaaatattttgaaacaaagagagtaactactcagtatcaatatatccacaataaaatttctacttgtatatactactccatacttataaagaaaatcgtttaggacaatgtttaaagtaaacattgggaatataaatcatgaataactctcaagttgctgagtttgaaaatgtaaaaattatatgtatagatttgtcttgaaaaatattttcataaaaatatacatatatcacttttcaataaatatttttataaaaataaaaagttaaaattgtattttggagatcatgtcgctgtcctaaacgatttctttttacgagtatggaggaagtatatattttcacattccattgtattctattctcacgcctccgatcctaacctttccatgtcttggcaccaaagtcacagtcacactctcatcttgctcggcacctaggtcctttaagatatcattcagtgccaccctcatggtggtttgtacccctctccgtgtcacattgttttgcgtgttgtgatgccttaaacacacaaagctcccgaccatctcccgtccacatggctcgattttcttgggctccctagcattgacaaacacattaaacttgcacacgccatctgctggatgtgctcgaccaccagcacctccttttgtgttgccccttttggctggcttcacaacattagcgggcgtcttacctttgggggcaccacattgccaagggatactggaaacatgacgggcttttcga

SEQ ID NO: 56981 - DNA, 456 bp, Oryza sativa
  Clone ID: PAT_MRT4530_58838C.1
ctcagcatcgccccgccacgtcggcagggggatggcgccaaagaggctggcgctgtcctgtctccgctcccgcatgggacctagtgagtgagtggagctccgcaccacccgacgatgaggacggtcgaaggcagagagtggcgaggacgcgtggacttcggcgggacattgtctgtagggcatcggccgttagccgtcgccagtcagctaggagtaacgacgagggctagggacggcgagctccgacagagcagcatgctacgagcacgccggccaccggcttgggcagcaacgaggcaaggaaggtcgacaacttgggacagcgaggagggtcgacaacacggtggttggggttggcagcgcaccggcgccgtcgagaatgggggtgatggcgtgccacgctgcaccaagtgcctgactcgcctgttgcatggagcagcttgggcagacggctaa

SEQ ID NO: 56982 - DNA, 336 bp, Oryza sativa
  Clone ID: PAT_MRT4530_58839C.1
atgctgaactggaggaacagtccgtggaagcgacggtggaacctcccaaacgcggacgaagaagggaagagtaccaacacttggcgtcttggtcagtggatcatcccgaagagctcgtactccagaacctccctccgcgccgcccaacatcagttggccctggaagaagtagatcacgtcggggtcgttgggggtccaaatggtcaccacctgttcgtccggaggaccatggatctgcacgtaccgcatcttgttgcccgcgctcgccttgatgcagcggggcgcttggcgatgtcgccctcccctccggtggccagctgcacgcagaggaagtag

SEQ ID NO: 56983 - DNA, 246 bp, Oryza sativa
  Clone ID: PAT_MRT4530_5883C.1
atgcccctcgggccctcgcgccgctttgccccgacgcccctgcccaactgccacgtggcggggggagcgagcgggaggggacccaggctgaatgaccggtctgtgaccggcctgtcgccggtcacgtctgactggacgggcggctgtgcccccacgtcgcctctgtccccggcggagtggagggctgtcccccgtgtcaggcgggggacggcgctgggtcccgctcaaggacgagctgcggcttag

SEQ ID NO: 56984 - DNA, 557 bp, Oryza sativa
  Clone ID: PAT_MRT4530_58840C.1
gtgttttgtttttttaattaaaatagtagaaagatataggaattcatataaacaaatttgagtatcagtaattagtatacaggttagttagaatataattacatcatacttacactataattacatactaatattacatactaattatatatgtaatttagagacttataatgtaaatacatgctgactatcttttggtgaaaaaaatatagcgtctttatatagctactcccaaaaaaaaaccaatagatgtgcaagacgaagaaaccacatctctaatcttgagaagctgtaaaaagaacttcaacaactaaactctgctgacggtaaggaattaaccagcgaagaagaacagcatgcacacttcttgcaaaatcatttccctttcttaaagcattgttcttatctgcacaagctaaagcttattagcttctcatctcacaacaaacaaactaagaggaacagcaccatcccaacaagaatttgttgggcaatgcaacacgacaatgtaccagattttgcagatggaagcgagaaaccagcccacgacccacagt

SEQ ID NO: 56985 - DNA, 477 bp, Oryza sativa
  Clone ID: PAT_MRT4530_58841C.1
atgtcgtgccgcgcggggacgccggggagcgcgccaccgccggtgcagccgtggcccctacttcctctgcgtgcagctggccaccggaggggagggcgacatcgccaagcgccccgctgcatcaaggcgagcgcgggcaacaagatgcggtacgtgcagatccatggtcctccggacgaacaggtggtgaccatttggaccctgcacgatcgagtgcacgcacggtggcggcgcgagtacgaggtgccctttgtcgagacctgggacggcaagaggtacaagaggagcgaaatggagcgcaagggccaactgatgttgggcggcgcggagggaggttctggagtacgagctcttcgggatgatccactgaccaagacgccaagtgttggtactcttcccttcttcgtccgcgtttgggaggttccaccgtcgcttccacggactgttcctccagttcagcatggtgcatttcttctt

SEQ ID NO: 56986 - DNA, 404 bp, Oryza sativa
  Clone ID: PAT_MRT4530_58842C.1
ctatccttcttctctgtctttcgttcaggatggcagagtcttttctgatggtgccgaagaccaccaccgcaatattgtcggcgaacggtgccatgaacaaggaggacccggtcaactggaacgcggccttctccgacatgcgctacaaggaggttgaccaggagtagagtatggcgatgcagctccgcgagccgaatgacaagatctagtgcaaccgcttccgcgtgctccacttggtccaccgctactacgaggaggtcgccgacggcgtgaacaccgagctgctaaaggccgactgtcctaaggtgtactccagcctcgagggcatccatatgcatttgggccacggcggcgacatctacggcgtcaccaccggctgttgtggcacctaccaccgtcgtacc

SEQ ID NO: 56987 - DNA, 384 bp, Oryza sativa
  Clone ID: PAT_MRT4530_58843C.1
atgccgggctgtctggccgcaccatcctgggggttgctgcccgtgcctacctgggtactggccatcagcgtggccgtgggctggctgcccatgccgccggggctggctaactgcgcccgcctaggactagccggccgagcaagcctggagctggccactcgtgctggcagggtgctggcctcctgcgacggcctggcctcccgtgccgccggtccatgtcctcctgcgggcctgagggctggccatctgggggcacccgccagcgccactcccttcaggggcgcgcctggggcagccgtgccacctggagggatggcatccgtgccgcctgaggattcgtcgtcctcgccgcccgggggtcaccatccacgctgccggccatag

SEQ ID NO: 56988 - DNA, 5076 bp, Oryza sativa
  Clone ID: PAT_MRT4530_58844C.1
atggagaggacgacggaggatgatgagaggccgacggttcctctgctggagcctaagccggcgagcaacgaggaggaagaagaggttggatcggtgaggcggcgagtggtggaggagaacaagaagctgtgggtggtggcgggtccttccatctgcgcccgcttctcctccttcggcgtcaccgtcatcagccaggcgttcatcggacacatcgggggtaccgagctcgccgcctacgccctcgtctccaccgtcctcatgcgcttcagcaatggcatcctgcttggcatggcgagcgcattagaaacattgtgtggacaatcatatggcgccaagcaatatcacatgttgggtgtctatctacaacgctcatggctagttctcttctgttgtgcagtcatccttctcccggtctatatcttcacaactccactcctgattgctctcggtcaagatcctgagatctctgccgtcgctggcaccatctctctatggtacatccccgtaatgttctcttacatatgggcattcatgctccaaatgtacctacaagcgcagagcaagaacatgattgtcacttaccttgccttcctcaatcttgggattcacctcttcttgtcatggctcctaacagtcaagttccaacttggtcttgctggggtcatgggatccatggtcatctccttttggatccctgtgtttggccaactcgcttttgtcttctttggtggttgccctctaacatggacagggttctcatcctctgcttttactgatcttggtgctattatgaagctttcgttatcgtctggagtgatgctttgtttagaattgtggtacaacaccatattggtgctcctcactggttatatgaagaatgcagaggttgctcttgatgctctttctatatgccttgcatacatatttactgaaagtaaggcagtagcagatgaagtcgctgatcttgctccccttctagctttctccattttgttgaatagtgttcaaccagtgctctcaggtgtcgctatcggatcgggttggcaaagtgtagttgcctatgttaatgttacatcgtactacttgattggtatccctcttggtgcaatactaggctatgtgctaggatttcaagcaaagggcatttggatcggcatgcttcttggaacactagtccagactcttgtgcttctattcatcacacttaggaccaattggaaaaaacagctgggttccagtttggagactccgatccaggtcgactccgagacagaggggaccgacaccgagccagagatcgagccagacatcactgatccttcagaggatgagacccctgttccccgcatcaccttcctcggaggccctcgcaccctcagcactgctcgcaagagcacacgacctccgggcaagaggcccaagctagatccagagatggcaagccgacgttgggcgtcaaccagcaatgaagaaactgagacacctgacctaaccaccctggccggagttatggccacccaaacccaacttttgcaagccattgcaaataaccaaggcaaccgctgtggatcaagctttggagagtttatgaggaccaagccacccacattcgccacagctgaagaacctatggatgctgaagattggttaaggatcattgagaagaagctaactcttgttcgagtacgtgaggccgataaagtgatctttgcggcaaaccaattggaaggaccagccggagactcgtgggacacatacaaaggagcccgagaagaagatgctggagaaccaaattgggaggaatttaccacagccttccgtgacaacttcgtgcctgccgcggtgatgctgatgaagaagaatgagttcaggagactacggcaagggaataccacagtacaagagtacctaaaccgtttcactcagctagcgcgctacgcgactagagatcttgccgacgaggaggaaacgatcgacaaattcattgaaggcttgaatgacgagttgcgcgggcccatgattggacaagaccacgatagtttccagagtttaatcaataaggccgccactggaccagtaaggccaggaagctgtttcaactgtggggagtatgggcattttgccaacaaatgcccccatccaaacaagacacctattcgcaccggagctaatgcaacggctattcacgggactactacccctgctgttagacgaggtctattcaggactccgcagactaacaggaccgctaccggatttggacgcgggcaagtgaaccacgttcgagctgaagaggcccaggaggaccaaggcgtgctaatgggtatgttttcactcaactccactccagttaaagttctcttcgattcaggagcatcgtatttatttatatctctgaaagcaagtcaacaacacaatttaaccagagttaaactaaggcaaccaatgttagtacattcacctgggggtgaaatagccgtggacacagcttgcattgacgtacctattcgccttagggatgtggtgtttccctccaaccttatggttttgataccacaaactcttgatgtcattttggctatggattggttagcaaagcatagaggagtaattgactgtagacgtagagaagttaccctgaccacaccctggggatcggatatgagagcaaccatggatcaagatcctaggctaaccgaacgtgtcggaggtatatttaccatgctacccctaaagggaatgcccgtagtgcagcgatttcctgatgtgttcccagaagatttacctggaatgccaccaaatcgtgacatagagttcattattgacctgatacccggaacggcccccatatccaagagaccatatcggatgccggtcaatgagttagaagaacttaaaaagcaaattagggagttgcaagaaaagggatttgtacgccccagttcgtcaccttggggagccccagtgctatttgttaagaagaaagacggtagcatgagaatgtgtgtagactaccgatcactgaacgaagtaactattaagaacaaatacccactaccaaggattgatgatctcttcgatcaacttaagggagctaagatgttttcaaagatagaccttcgatcaggataccaccaactgaagattaggaccgaggatatccccaaaaccgcgttatcaacacgctatgggttgtatgaattcacagtaatgtcgtttggtctaaccaatgccccagcatacttcatgaatcttatgaacaaagtattcatggactacttggataagtttgtggtggtattcatcgatgacattctgatctactccaaagatgaggaagaacatgcggaacacttacgattggtactccagaaactccgaaagcacaagttatacgcaaaattcagcaagtgcgaattttggttgaaggaagtcgcttttctgggtcacgtaatctcagccggtggagtagcagtggaccctgcaaaagtggaggccgttatggaatggaaagcacccaagtcggtgaccgaaattcggagttttctaggcttggttggatactaccgaaggtttatcgaggggttctcaaagatagcccggccaatgacacaactactcaaaaaggagaagaagtttgtgtggtcagaacagtgccaggaaagctttgagcaactcaaagagaagctgacatcggcacctattctagttcttcccgacatcaggaaggactttgttatatattgtgatgcatcaaggcaaggactaggaggagtactgatgcaggatggaaaggttgtggcctatgcgtcgcgacaattgcgaccacatgaggaaaactaccctacccatgacctagaactcgcagctgtggttcatgcgctaaatatttggagacattatctgattggaaaccattgcgatatctacaccgaccacaagaatctgaagtatatcttcacccagtcggatctgaacttgaggcaaagacggtggctggaattaatcaaggactacgatctcgagatttggagacattatctgattggaaaccattgcgatatctacaccgaccacaagagtctgaagtatatttttatccagtcggatctgaacttgaggcaaagacggtggctggaattaatcaaggactacgatctcgaggttcactatcaccccggcaaagcaaacgttgtggccgacgccttgagccgtaagagccattgcaatcatttggaaatggaagggatggcacctgagcttaaagaggaattggcccagctaaatctacatatagtgcctcgagggcaggtaaacaccctggacattcaacctcttctgagaacccaaatagaagaggctcagaaagacaacgaggaaatccgagaggtgaaggaacgtctagctgcaggatttgcaaaggaattttcaaccgacgagaaggatgtcctatggtataaaaagaggatttatgtacccaaacagggtggactgaggggattaattctaaaggaagctcacgaatcggcatattcattgcaccccggaagtacaaaaatgtaccaggatctgaaggaagtatactggtggcccaacatgaagagagatgtggcagaatacgtagcactctgtgacgtgtgccagaagaccgcaacaggatatgattccatttgggtgatcgtggatcgactcaccaagacggcgaggttcatccccgttaagacaaattacagcagtgccaagctagcagagttatacatgaccagaatagtatgtcttcatggtgtacctaagaggattatatctgatcgaggcacacagtttacctcacatttctgggagaaagtccatgaagccctaggaagttaccttgcgtttagcacagcttatcatccacagacagatggccagacggagagaaccaaccaggtcctagaggacatgctgagagcttgtgcgctggattttagcaaggactgggagaggtgtttgccctacgccgagttctcctacaacaacagctttcaagcaagcctgaagatgtcccccaatgaagcattgtttggtcgacgatga

SEQ ID NO: 56989 - DNA, 288 bp, Oryza sativa
  Clone ID: PAT_MRT4530_58845C.1
tgaagtaggacctccatctccaccatatataatctccatggtatcactaacccttatccatagttttgcttgcctcttcccaatccttgtgtgcctgaaaatagtctctgcagtctgcacgcgaggacaatggcctcgcgtcaccagctgcagacgatgcagttcacggacccggcatctcgcagcccacgtccggtcggcggcggcgtccatggccagccgccgccgacgcccatgtcgtcgccgttctcctcgcggaagccaagctgtgttaagactgatctttga

SEQ ID NO: 56990 - DNA, 339 bp, Oryza sativa
  Clone ID: PAT_MRT4530_58846C.1
atggagtggtcccggagcgccgagagtcgtggcgtccagggaaaaccgcatcgcaagatcatccgcgatgacaagaagaagcgcatccaggccgggatcgcgagcgacgacgagggcgatgatgaggtcgtcgtgttctccgagaaggaggaggctgcgatggctaagatcttcgacaaggaagatgagatcattgttcagatgtaccataattcattgaggataaaaggtagcaacacctttataatttatgagatggatcagttggaagcaggtcaacctgcaagtattcttattgagcacatcggtgatgatctcgtttccccagattatggctaa

SEQ ID NO: 56991 - DNA, 893 bp, Oryza sativa
  Clone ID: PAT_MRT4530_58847C.1
gctgctgccccgacgcgctgctcgctgccccactctctccccattcccctccacgccgccgccgccgccgccgcgtggatggccggagtttccgccgcctccgccgccgggaagatcgggagcttcctctccaagaggccgtacgcgccgccgtcctgggcctcgcacctgtcccccgccccctcgcagaccttctcgctcggccatttcccgacgccgatccacaagtggaatctgcccaatttgccgaatggcacggaggtgtggatcaagcgagacgacatctcaggcatgcagttgagcgggaacaaggtccggaagctcgagttcctgatggcagatgccgtcgcgcagggcgctgactgcgttataactgtaggtggcatccagagcaatcactgccgtgccaccgcagtggctgcaaagtatataaatcttgattgttatctgatactgcgcacatccaagcttcttgtggataaggaccctggtttggttgggaatctccttgttgagagattggtgggagcgcatattgatcttgtttcaaaagaagaatatggaaaaattggcagtgtggctttagcggacttgctgaaaaagaagcttttggaagaaggccgaaaaccatatgttattcctgttggtggatcaaactctctaggaacttggtattgttttctgttcaatcctaactattgaaccatttttgcattttcaatttctttgtgcgtttatagcatactttgaatattcctcagggactattattattcatggattggtgtttgccatcagtctatcagaaaagaagagattagtttgtatttgaataaacattagggcatcacttttttttggcaaatttctaatggtcaatatactatgttgga

SEQ ID NO: 56992 - DNA, 7332 bp, Oryza sativa
  Clone ID: PAT_MRT4530_58848C.1
ttacaggttttcgaataggtgggggtattctgtcttcaagaattcttcgctttcccaagtggcttcatcctcagtgtgattactccattgtactttgtacatacgccacactttggttctagtcttctttttagcttcatccaatatccggactaggtgttctggatacgtgagatcattgctgatatgaatttcttccaacgtagcttgttcttccggcactcgcaagcacttctttaactgagacacatgaaagactgggtgcacatcggcgatattttctggtagctgtaactggtatgcaacttctcctcgtctagccgtgatttgaaaaggtctcacatatcttggcgctagttttcctttgaccttaaaccttttcgttcccctcatcggagaaacctttagataaacgtagtctccttccttcaattccaggtttcttcttcgggtgtcggcgtaactcttctgtcgtgattgtgccacttttagatggtctcgaatcaggcgaaccttttcttcggcttctttgataatgtcaagtccaaatatcgcccgttcacctgtctcggtccacattagtggggtacgacatcgtcgaccaaataatgcctcatttggcgacatctttaggctcgcttggaaactgttgttgtaggagaattcggcgtagggcaaacatctctcccagtctttgctaaaatccattgcacaaactctcagcatgtcctccaaaacctggttggttctctccgtctggccatctgtctgtggatgataagctgtgctaaacgcaaggtaacttcctagggcttcatgtactttctcccagaaatacgaggtaaactgtgtgcctcgatcagatataatcctcttaggtacaccatgaagacacactatcctggtcatgtacaactcggtgagtttagcactgttatagtttgtcttgacggggatgaatcttgccgtcttggtgagtcgatccacaatcacccagatggaatcgtaccctgttgcggtcttgggcaatccaacaataaaatccatacctatctcatcccatttccactcgggaatcctaaggggttgcagcaaacctgccggtcgctgatgctcagccttcaccttttggcacacgtcacagagtgctacgtattctgccacatctctcttcatgttgggccaccagtatccttccttcagatcctggtacatcttcgtacttccggggtgtaatgaatatgctgatttgtgagcttcctttagaattaatcctctcagtccaccctgttcaggtacataaatcctctttttataccataggacatccttctcgtcggttgaaaattcctttgcaaatcctgcaactagacgttccttcacctctcggatttcctcgttgtccttctgggcctcttctatttgggttctcaaaagaggttgaatgtccaggttgtttatctgtccatgaggtaccatatgtaggtttagttgggctatttcctccttaagctcaggagccatcccttccgtcctcagatgattgcaatggctcttccgactcaaagcgtcggccacaacgttggccttgccggggtgatagtgaacctctagatcatagtccttgattaattccagccatcgcctttgcctcaagttgagatctgactgggtgaaaatatacttcagactcttgtggtcagtgtagatatcgcaatggtttccaatcaaatagtgtctccaaatatttagcgcatgaaccacagctgcgagttctaggtcatgggtagggtagttttcctcatgtggtcgcaattgtcgtgatgcataggccacaacctttccgtcctgcatcagtactcctcctagtccctgccttgatgcatcacaatatataacaaagtctttccagatgtccggaagaactaaaataggcgacgaggtcagcttttctttgagctgctcaaagctttcctgacactgttctaaccacacaaacttcttttccttcttgagtagttgtgtcattggtcgggctatcttagagaatccttcaataaaccttcggtagtatccggctaagcctataaaactccgaatttcagtcacaaatttgggtgctttccattccgtaacggcctcaactttagcaggatccattgctactccaccggctgagattacgtggcctagaaaagcgacttcttttaaccagaactcacatttactaaactttgcatataatttatgcttccgaagtttctcgagtaccaatcgcaagtgttccgcatgttcgtcctcatctttggagtagattagaatatcatcaatgaatactaccacaaatttgtccaagtaatccatgaacactttgttcataagattcataaagtatgccggggcgttggttaacccaaacgacattactgtgaactcatacaatccatagcgtgttgaaaacgcggtcttgggtatatccccggtcctaattttcaattggtggtatcctgatcgaaggtcaatcttagagaacaccttagctcctttgagttgatcaaaaagatcatcaatccatggtagtggatacttgttcttgatagttacttcgtttagtgaacggtagtctacacacatcctcatgctaccatctttcttcttgacgaatagcactggggctccccaaggtgacgaactggggcgtacaaatcccttttcttgcaattctctgatttgctttttaagttcctccaactcattgactggcatccgataaggtctcttggatatgggagcagttccgggtatcagatcaataatgaactctatgtcacgatctggtggcatcccaggtaaatcttccctctgttctttgttaaccaatccatacccaatatgacacccacggtctggggtatcaaaaccataaggttggagggaaacaccacatccagttatctcgcccccaggtgagtgtactatcataggctttctaagtcccactagggttaagttgtgtttttgactagcttgtccgcgtccaaatctggtagcggtcctgttagtttgcggagtcttgaatagtcctcgtccggcagcaggggcagtagttccactaacagtcattgcattagcgccagtatggacaggagttttgcgtggatgagggcagttgttggcgtagtgcccatactccccgcaattgaagcagtccacattcttcttggctccaggggcagccagagttggtgtaggggtgcgattctgaatcgcaaccggcctgttgaaatttctaggtgcggcggggcggttggttgccacaatagggggcttccacccagacgaagtggctcccttgtgtcgctgaggcactccctgaggtgggcaattcatagcaagcctcctcttgcggttgtgccctacagtcctttgatcgttctccagcctaacgaccttgttgattaggctccggaaactctcatgatcttgcccaatcataggtccacgcaactcatcattcagcccttctatgaacttgtcgatcttttcttcttcatttgcgaggtctccaattgcatagcgggccaactgagtgaatcggtttagatattcctgcaccgttgtgttcccttgttgcagccttctaaactcgttcttcttcatacgcattaccgcagcaggcacgaagttctcatgaaatgctgcagtgaactcttcccaagtgggttctccagcatcctcttcccgagcttccttgtaagtatcccaccaatcaccagcgggtccctccagttggtttactacgaagatcactttgtcggcttcgcgtacccggacaagggtcagtttcttctctatgatacgtagccaatcttctgcctccataggcttgtctgccatagcgaatgtgggtggtttggtcctcataaactctccaaagctcgatccgccgcggttgccttggtcatttgcaatggcttgcagaagttgggtttgagtggccataactccggccagggtggttaggtcaggtgtctgagtttcttcattgttggttgacgcccgacgtcggcttgccatctgtgtaggccgattaagtaagtatcctaattttctaactagctcttgtggttttatcccattaagggagttgttttggtgtgaactgagtccccacggctcagaagtagtggcctctggatctggcttgggcttcttgcccgggggtcgtgtgctcttgcgggcagtgctgagggtgtgagggcgtccgaggaaggtgatgcggggaacaggggtctcatcctctgaaggatcagtgatgtctggctcgatctctgctcggtgtcggtcccctctgtctcggagtcgacctggatcggagtctccaaactcgaacctagtaccccaagcctggtgctcctcctctagctgaagctgctgcactgtgaggtcagtcacctcggtctctaactctcccacacgcctctgctggtcgttgatctctaacagagcctcctcgtaaaagtcgtctactgcctcagcccatcgtgacagtcgagtcactatcgggttgtagcagcaaggtgtgtcctgggccgtgcagacggagttgctctcctctcgaaacgggtggtgagcaaactcagtactcgccaactcagctcggtggatagagctaagtcggaggaaggcctcccgggctgcatcctgcatcgcggtctcaggtgaatcgtgatggtggcgtgtcgaaaagctgtagtctgcctctgaaggaactcgtggcctcatgtcagcttgtgcctcccatccaaatccacactgcctcactcggtaagtagggaacctcgagtatctcaaacacctcatcatacgcgatggcgacaccactgtagacacccgcctcgcggacgtggcgcggcactcggtgcggtgcggcgtcaccgaggtcggcggcgtggcggctcaaatgcggcggcgcgaaggcggtggcgtggtggcacaacggcgacacgggggtgacgcgacggtggcgcggcggcgcggggcgcgaggcggcgataggacgcgcgcgcggcgatggaacggcgacagcgacggcgcggcagtggcggcaaggggcgcgaggcggcgatggaacgcgcgcggcgacgggacatcgacggcgacggcgacaacggtggcgcgcggctcggggcgggacgcgacgtgcggcgacgcgacgggcggcgacacgagatcgaggcggcgacagcgacgggtgttacacttcagtcattcatcgatatcatcaatgacctccgagtacgtgggttgtcggggtatgaagtcgctgccgacttcattggtttgaacagcgaaaccgtggagcgccgtgttggccaggtgatgatgagcggccccacgatggcgagcaacgtccctgcccctctttgcgagaaaggggcagctgagggcgaagctgcaatcaacgctctccctctaactgacgtcatcgggccgctcgtggaccaccaggcggcggcatcgctgaaggaggacgtcgccaaggaagcgtccgatgttgcccccgttgctgccacgaccagtggcggcaccgttccgaagaaggggaggaagttttcctccgtgctcggtaaccgtcggaaagcacccactccatcggcctcggatgcgtctcccccacctccgcgacggcagaggctggtgacacttggcgagaagcggctcgtcttgatggccattacgggaatttttcatagggcggtgtgggcgaaggcggcacaagacgggtctggagggaactctagtgcgtctcctgcagtggccttgacagatgtcgtggtcgtgcccaggagccgtgaggcgacgcccagcggccctgccggcgaccttgtgcctgctcgaggcccacccgctgacgtcctcacctgggaggagctccaaatcgagatggggcgcatcctccaggctggcgctcgtggcataggtcgcgagattgcggcggcgagggcggcggcggcttcgtcggcgaacgaacgcgccgacaagttggcgcgttacctggcggaggttacctacactggtctgcaccagctcaccggggagtgcggtgtcatgattctcatttacattgagaacatggagatcatgaagagccgccagagccgcaaccggtcagaccgagccgtggacggtctgaccggccactacactgcggtcagaccggccaggttgcccggaagtacgaagatgtaccaagatctgaaggaaggatactggtggcccaacatgaagagagatgtggcggaatacgtagcactctgtgacgtgtgccaaaaggtgaaggctgagcatcagcgaccggcaggcttgctgcaaccccttaggattcccgagtggaaatgggatgagataagtatggattttattgttggattgcccaagaccgcaacaggatatgattccatttgggtgatcgtggatcgactcaccaagacggcaagattcatccccgtcaagacaaactatagcagtgctaaactcgccgagttgtacatgaccaggataacagatggccagacggagagaaccaaccaggtcctggaggacatgctgagagcttgtgcgttggattttagcaaagactgggagaggtgtttgccctacgccgagttctcctacaacaacagctttcaagcaagcctgaagatgtcccccaatgaagcattgtttggtcgacgatgccggacgccgctgatgtggtctaagacaggtgaacgggcggtatttggacctgacattatcaatgaggccgaagaaaaggttcgcttgatccgtgaccgtttaaaggtagcacaatcacgacaaaagagttatgccgacacccgaagaagaaacctagaatttaaggaaggagattacgtttatttaaaggtttctccgatgaggggaacaaaaaggtttaagattaagggaaaactagcaccaagatatgtgggaccctttcaaatcacggctagaagaggagaagtcgcatatcagttacagctaccagagaatatcgctgatgtgcacccagtcttccatgtgtcccaattaaagaaatgcttacgagtgccagaagaacaagctccgctggaagagattcacattagcaatgatctcacgtatccagaacacccgatccggatattgggtaaagcagaaaagaggactaggagcaaagtgtggcgtatgtacaaggtacaatggagtaatcacactgaggatgaagccacctgggaaagcgaagaattcttgaggacggagtacccgcatctattcgaaaactggtaa

SEQ ID NO: 56993 - DNA, 432 bp, Oryza sativa
  Clone ID: PAT_MRT4530_58849C.1
atggatgtcgcgcacgccgccaccgcatggtcaaacggcgtcgtcgcccggccccaacagccacacatgggcaaagccatcgccctgtcgcgcctgcgcgaacccatcgcatccacccgcgccacagttctcggctgcacctgcgcccgccgcgttgccatgcctggcgccccggccgcgctcaccctccagccgcttgcagcgttggccattcgcgacgtcggccgcccaccatggccatctacccgctccaccactcgcagcgtgggcatccatagcgcccactgtgccgcctcacccctgctgtccgaagcgcaccaattcaagctctccaacctgcacttcgtcaacgagcacgtggcacgaaagggaaaagggagtcctgttgttagtgtgcggcagtgtggcctccatcctcgggatgtcagatga

SEQ ID NO: 56994 - DNA, 539 bp, Oryza sativa
  Clone ID: PAT_MRT4530_5884C.1
cccacgcgtccgctgacgcttgggccgttgaggtctaggggaatggcgggccgggcaccattcatatcttgaagcttaaccctgactcggacgcatggagcgtatgcaataccaaaatagtggtgtgcgacagcgcaactcaagtgctgaaggctgaggtgttggaggctaatagcagggtgggcagacctgaagtcgctactcgacggatacgaagctctaggccacctgcgacgccacctgcgtgggcaatctcacggtggagtaccagctcgaagactgcgcctcactgttgacggagcaagagaagatgatcgtacacggatacttgagcatgctacagatgatctaggtgtacctcgtcactgaccctgctgagatctgctaaaaatatagtggtcatgttactgatgcgtggtctcatgtgagaagaatcatactgtgtttaaggttatgtaataaccccaagaatgtgtttatgctttgtgagtgtataaaatacacatacgaacgtgctagcgttgatggctaatatatat

SEQ ID NO: 56995 - DNA, 1031 bp, Oryza sativa
  unsure (1)..(1031): unsure at all n locations
  Clone ID: PAT_MRT4530_58850C.1
aagttgcaacgaagctatactcacattcctcttcccttgtcttcgccgcatcgacttatcgcttcccctatcaaccctcagaacccctcccctccccccccccccccctcccccgaaaacctccgcccgccatggcgaccgccgcccaggccgccgccgcggcgttcctctccttcctctcctcctccccgctacaatttctcttgatattccggttccatctgtctatattggggagctgacacgggtttaggtggtcatcacgagcggtgaggtcatttgcaatggcggagctggaggctcggaagatgaggtacccaaccactggcactgaaggactcctcatgggcatccttgtcgagggaactagtgatgcagcaaaacttttgcgtgctaatggaattacgctgctcaaagtgcgcgaggaggcagcaaatgtgcttgggaaatcagaaatgttctactttagtcctatgcacccaccattgactgaagctgcacaacgagcgcttgattgggctatcaatgaaaaactgaaatcaggtgaagatggagaagtaaccgccaatcatctgctcctggggatatggtcagataaagagtcagctggtcataaagtattggcttcccttggttttgatgatgagagagccaattcactggccaaaacggctggtgaagaggctgctatgagtcctagatagcaaaaggagccttatagtttactactgaacttccctgtgatgcaatgtgcttgcgtttggaacctcaagtaacttcttggcgactccagtatcatggcccacgcattaagttaacttgaagagattgcttctacaagttttagggctttattaagattgttagactgaatgcaatatgtcagactcccctattgcccatacctgtaaaagcagtgcaatgtattttcaaaatgagcatttctgttgcttgctcagctggattggtgcaattctattaaaagatccttttgaaagataaaaaaaaaaaaaaaaaaaannnnnnnnnnn

SEQ ID NO: 56996 - DNA, 4822 bp, Oryza sativa
  Clone ID: PAT_MRT4530_58851C.1
cgggctgaggaattcggcacgaggaatctaacaagtttgcaccctctagatggaaagatggcagatcaggattcaccaccactgggagatgggcgtaccccgctcagagggatacgtcattgagctacaccggttgatgaggcgcctacggtaccccagatttccgatctaccgagtgagatggtgtggacccgtttgggaggctcgggttgaggttcatacacgagttcctttagagtcagactacagctttccgacacgccaccgtcacgacttaccggagaccgcgatgcaggatgcagcccgggaggccttcctccgacttagctctattcaacgagctgagttagcgagtaccgagtttgctcaccacccgtttcaagaggagagcaactccgtctgcacagtccaggacacaccttgctgctacaacccgatagtgactcgactgtcccgatgggctgaggcagtagacgacttctacgaggaggctctgttagagattgacgaccagcagagacgtgtgggagagttagagactgaggtgactaacctcacagtgcagcagcttcagctagaggaggagcaccaggcttggggcagtgagatagactcactgaaggcacagcttcagacagaggggaccgacactgagccagagatagagccggacatcactgatccttcagaggatgagactcctgtccaccgcatcacctttgtcggaggccctcataccctcagcactgctcgcaagagcacacgacctccgggcaagaagcccaagccagatccagagatggcaagccgacatagggcgtcaaccagcaatgaagaaactcaagtacccgacctaaccaccctggccggagttatggccactcaaacccaacttctgcaagctattgcaaacaatcaaggcaaccgcggaggatcgagctttggagagtttatgaggactaagccacccactttcgctacggcagacgagcctatgggggcagaagattggctacgcaacataaagaagaaactgacccttgtccggatgcgcgaagccgacaaagtgatcttcgcagtaaaccaactggagggaccagctggtgattggtgggatacttacaaggaagctcgagaagaagatgctggagaacccacttgggaagaattcactgcagcttttcgtgagaacttcgtgcctgccgcggtgatgcgcatgaagaagaacgagttcagaaggctgcgacaaggaaacacaacggtgcaagaatatctgaaccggttcactcagttggcccgctacgcaatcggagacctcgcagatgaagaggaaaagatcgacaagttggagaatgatcaaaggactgtagagcacaaccgcaagaggaggcttgctatgaatcgcccgcctcagggagtacctcagcgactcaagggggccacttcgtctggacggaagcccactattgtggcaaccaaccgtcccgctgcgcctagcaatttcaataggccagttgcggttcagaaccgcacccctacaccaaccctggctgcccctggagtcaagaagaatgtggactgcttcaactgcggggagtatgggcattatgccaacacctgcccacatccacgcaaaactcctgtccgtactggcgctaatgcaatgactgttcgtggaactgctacccctgctgtcggacgaggtctattcaagactccgcagactaacaggaccgctaccggatttggacgcggacaagtgaaccatgtccgagctgaagaggcccaggaagataagggcgtactaatgggtatgttctctatcaattctagcccggttaaagttctgttcgattctggtgcatcgcattcattcatatccctggaggctagtcaaaagcacaacttaaccctagtgggacttagaaagcctatgatagtacactcccctgggggcgagataaccgtaagtcatgcttgcatcaacatacctattcgccttagggatgtggtgtttccctccaaccttatagttgtgatacctcagaccctggatgtcatattgggtatggattggttaacaaagaacagaggagtaatcgactgtagacgtagagaagttaccctgaccacaccctggggatcggatataagagcaactatggatcaagatcctagactggccgaacgtgccggaggcatattcaccatgctacccatgaagggaatgcccatagtgcagcgattgcccgatgtgtttccagaagatttacctggaatgccaccagatcgtgacatagagttcattattgacctgatacccggaactgctcccatatccaagagaccatatcggatgccagtcaatgagttggaggaacttaaaaagcaaatcagagagttgcaagagaagggatttgtatgccccagttcgtcaccttggggagccccagtgttattcgtcaagaaaaaagatggtagcatgagaatgtgtgtaaactaccgttcactgaacgaagtaactatcaaaaacaagtatccactaccacggattgatgatctcttcgaccaacttaaaggagctaaggtgttctctaagatcgaccttcgatcaggataccaccaactgaaaattaggactggggatatacccaaaaccgcgttctcaacacgctatggattgtatgagttcacagaagagcatgcggagcacttgcgtttggtactcgagaaacttcggaagcataagttatatgcaaaatttagtaaatgtgagttctggttaaaggaagtcgcctttctaggccatgtgatctcagccggtggagtagcagtggatcctgctaaagtggaggctgttacggaatggaaggcacctaaatctgtgaccgagattcggagttttctaggtttggccggatactaccgaaggttcattgagggattctctaagatagctcgaccaatgacgcaactactcaaaaaggaaaaggagtttgtgtggtcagaacagtgcaaggagagctttgagcagctcaaagaaaagttgacctctgcgcctattctagttctccccgacaataggaaagactttgttatatattgtgatgcatcaaggcaaggactaggaggagtactgatgcaggacggaaaggttgtggcctatgcatcgcgacaactgcgaccacacgaggaaaattaccctacccatgacctagaactagcagctgtggttcatgcactaaagatttggagacactatttgattggaaaccattgcgatatctacactgaccacaagagtctgaagtatattttcacccagtcagatctcaacttgaggcaaaggcgatggttggaattaatcaaggactatgatctagaggttcactatcacccaggcaaggcaaacgttgtggccgacgctttgagtcgtaagagtcattgcaatcatctgagaatggaagagatggctcctgagcttaaagaggaaatagcccagctaaacctgcatatagtacttcgtgggcggataaacaccctggacattcgacctcttttgagaacccaaatagaagaagcccagagggagaacagagaaatccaagaggtgaaagaacgcttagctgcagggtttgcaaaggaattttcgaccgatgagaaagatgtcctatggtataaaaagcgaatctttgtactcgaacagggtggactgagaggattaatcctaaaggaagctcacgaatcggcatattcattgcaccccggaagtactgaaatgtaccaggatctgaaggaaggatactggtggcccaacatgaagagagatgtggcagaatacgtagcgctctatgacgtatgccagaaggtgaaggctgagcaccagagaccagcaggtttgttgcaaccccttagaattcccgaatggaaatgggatgaaataggtatggattttatagttgggttgcccaagaccgcaacaggatatgattccatctgggtgattgtggatcgactcaccaagacggcaagattcatccctgtcaagacaaactatagcggtgccaaactcgccgagttgtacatgaccaggatagtgtgtcttcatggtgtgcctaagagaattatatccgatcgaggcacacagtttacctcgcatttctgggaaaaagtacatgaagccctaagaagttatcttgcttttagcacagcttatcatccacagacagatggccagacaaagagaacaaatcagacggtagaacgggcggtatttggacctgacattatcaaagaggccgaagaaaaggttagcctgatccgtgaccatttaaaggtggcacaatcacgacaaaagagtcacgctgacacccgaagaagaaacctggaattcaaggaaggagattatgtttgtctgaaggtttctccgatgagaggcacaaaaaggtttaaggtcaaagagaaactagcgccaagatatgtgggacctttccaagtcatggctagacgaggagaagtcgcatatcagttacagctaccagaaaatatcgccgatgtacacccagtcttccgtgtgtctcaattaaagaagtgcttacgagtgccggaggaacaagctccgctggaagagattcacattagcaatgatctcacgtatccagaacacccggtccggatattggatgaagccgaaaagaggactaggagcaaagtgtggcgtatgtacaaggtacaatggagtaatcacactgaggacgaagccacctgggaaagcgaagaattcttgaggacggaatacctgcacctattcgaaaactggtaa

SEQ ID NO: 56997 - DNA, 4845 bp, Oryza sativa
  unsure (1)..(4845): unsure at all n locations
  Clone ID: PAT_MRT4530_58852C.1
atggacgcgagggggggaaaggttgggcggcggcttaccgacgacggcgacggcaacggcggcgacagcgacggtggcggggaagggaaagagataaggggaggggaagacgtgacggcggcgcggggctcggggtgggggcgcgcggcacggggctcggggcgggacgcgacgggcgacggcgtgcggcgcgcggacgagcgacgacggcgacggacgagcgacgcgacggcgatggacgagcggcgacgggacgggcaacccgacggcnnacggcgcgcggcgcgtggtncgncanacgacancggcgcggggcgcaaggcgcaacggcgacggacgagcggcgacgggacgggcgacgtgacgggcgacgcgacgggcgggcagcggcggcgcgcggcgcgaggttcgggcgcgggcgcggcagtggtgcgcggcgcgaggcggcgtcagcgcgtcaccggcggcgcggggctcgagatgacgcgacggcagcagcggcgacgcgacggctacgcggcgcggcgatggcgacggcaatggcgcgcggcgggacgaggcgcgaggcgcgacggcgacggctcggggcgcgaggcgcgcatggcaggggaggggaaggggctagggaacctcgtcgaacacctagaggctaatgaatacctcagtgtgattactccattgtaccttgtacatacgccacactttgctcctagtcctcttttctgcttcatccaatatccgaatcgggtgttctggatatgtgagatcattgctaatgtgaatctcttccagcggagcttgttcttccggcactcgtaagcatttctttaattgggatacatggaagattgggtgcacatccgcgatattctccggtaactgtaactgatatgcaacttctcctcgcctggcggtgatctggaatggccccacatatcttggtgccagttttcccttgaccttaaacctttttgttcccctcatcggagaaacctttagataaacgtaatctccctccttaaattccaggtttcttcttcgagtgtcggcgtaactcttttgtcgtgattgtgctacttttagacggtcacggatcaagcgaaccttttcttcggcttcttgaataatgtcaggtccaaacaccgcccgttctccagtctcggaccacattagcggggtacgacatcgtcgaccaaacaatgcctcagtgggtgacatctttaggcttgcttgaaagctgttgttgtaggagaattcagcgtagggcaaacatctctcccagtccttgctaaaatctagagcacaagccctcagcatgtcttctaggacctggttggttctctccgtctggccatctgtctgtggatgataagctgtgctaaatgcgagataacttcctagggcttcatggactttctcccagaaatgtgaggtaaactgtgtgcctcgatcagatataatcctcttaggtataccatgaagacacactatcctggtcatgtacaactcggcgagttttgcactgctatagtttgtcttgacgggaatgaatcttgccgttttggtgagtcgatccacgatcacccaaatggaatcatatcctgttgcggttttgggcaatccaacaataaaatccatacctatctcatcccatttccattcgggaatcctgagaggttgcaacaaacctgccggcctctggtgttcagccttcaccttctggcatacgtcgcagagtgctacgtattcggccacatctctcttcatgttgggccaccagtagccctccttcaaatcctggtacattttggtacttccggggtgtaatgagtatgccgattcgtgagcttcctttaaaattaatcccctcagtccaccctgtttgggtacgtaaattctctttttataccatagaacatctttttcgtcggttgaaaattcttttgcacgtccggcagctaagcgttccttcacctctcggacctcctcgttgtccttctgggcttcttctatttgggttctcaaaagaggttgaatgtccagggtgtttatctgtccatgaggcactatatataggttcagctgagctatttcctccctaagctcagggaccatcccttccattctcagatgattgcaatggctcttacgactcagagcgtcggctacaacgtttgctttgcctgggtgatagtgaacctctaaatcatagtccttgattaattctaaccatcgcctttgcctcaagttgagatctgactgggtgaagatatactttagactcttgtggtcagtgtagatatcgcaatggtttccaatcagataatgtctccaaatctttagcgcatgaaccacagctgcgagttctaggtcatgggtagggtagttttcctcatgtggtcgcaattgtcgcgacgcataggccaccacttttccgtcctgcatcagtactcctcctagtccttgccttgacgcatcacaatatataacaaagtctttcctgatgtcgggaagaactaaaataggcgctgaggtcagcttttccttgagctgctcaaagctttcctgacactgttctgaccacacaaacttcttttccttcttgaatagttgtgtcattggtcgggctatcttagagaacccttcaatgaaccgtcggtagtatccagccaagcctagaaaactctgaatttcagtcacagatttggatgctttccattccgtgacagcctccactttagcaggatccactgctactccaccggccgagattacgtggcctagaaaagcgacttcttttaaccagaactcgcacttgctgaattttgcatataacttatgcttccgaagtttctggagaaccaatcgtaagtgttccgcatgttcttcctcatctttggagtagatcagaatgtcatcaatgaataccaccacaaacttatccaagtaatccatgaatactttgctcataagattcatgaagtatgctggggcattggttagaccaaacgacattactgtgaattcatacaacccatagcgtgttgaaaacgcggttttggggatatcctcggtcctaatcttcagttggtggtatcctgatcgaaggtctatctttgaaaacaccttagctcccttaagttggtcgaagaggtcatcaatccggggtagtggatacttatttttgatagttacttcgttcagtgatcggtagtctacacacattctcatgctaccgtctttctttttaacaaacaacactggggctccccaaggtgacgaactggggcgtacaaatcccttctcttgcaactccctgatttgctttttaagttcttctaactcattgaccggcatccgatatggtctcttggatatgggggcagttccgggtatcaggtcaataatgaactctatgtcacgatctggtggcattccaggtaaatcttctgggaacacatcaggaaatcgctgcactactggcattccctttaggggtagcatggtaaatatacctccggcacgttcggttagcctaggatcttgatccatggttgctctcatatccgatccccagggtgtggtcagggtaacttctctacgtctacagtcaattactcctctatgctttgctaaccaatccatacccaaaatgacatcaagagtttggggtattaataccataagattggagggaaataccacatccctaaggcggatgggtacgtcaatgcaagctgtatccactgctatctcacccccaggtgaatgtattaacattggttgtcttaatttaactccgcgtccaaatccggtagcggtcctgttagtctgcggagtcctgaatagacctcgtccagcagcaggggtagcagtaccgtgaatagccgttgcattagctccggtacgaatgggtgtcttgtttggatgaggacatttattagcgaaatgcccatactctccacagttgaagcagctccctggccttactgatccagtggcggcctgattcggtgtaggagcgcggttctgaatggtaaccggcctgtggaaattgctggaggcggcaggtcgactggttgtcaccactgttggtctccatgctgagggggttgtccctttaggacgctggggggcggtctgaggcgggcggttcatggcaagcctccttttacgattgtgctccactaccttccggtcgttctccagcctgacgaccttattgattaagctctggaaactatcgtggtcttgtccaatcatgggcccgcgtaactcgtcattcaagccttcaatgaatttgtcgatcttttcctcttcgtcggcaagatctctagttgcgtagcgcgccagctgagtgaaacggttcaggtactcttgtactgtggtattcccttgccgtagtctcctgaactcgttcttcttcatccgcatcactgcggcaggcacaaagttgtcacggaaggctgtggtaaattcctcccagtttggttctccagcatcttcttctcgggcttctttgtacgtgtcccaccaatctccggctggtccttccaattggtttgccgcaaagatcaccttatcggcctcacgtactcgaacaagagttagcttcttctcaatgatccttaaccaatcttcagcatccataggttcttcagctgtggcgaatgtgggtggcttggtcctcataaactctccaaagcttgaccctccgcggttgccttggttgctcgcgatagcttgcagaagttgagtttgggtggccataattccggccagagtgtttaagtcgggtgtctgagtttcgtcattgctggttgttgcccgacgtcggcttgccat

SEQ ID NO: 56998 - DNA, 1004 bp, Oryza sativa
  Clone ID: PAT_MRT4530_58853C.1
atagtggagattaatgttttatgtattaataatgtattaggcttattttgttgatacagatgtaattccatttattaaaaaggcatctagcaacaatgatagtttcagagcgaggtcacgatcgatcgatcgccggcggcgtgcgtgcgtgtgcaggcttctggcgaccgtgtcggcggcggcgttcgtcgtcggcgcgttcaggagccagagcggcgagcggcggcggagggaggacgggtcgcgctcgaggcggcggcggcggcgccgtgctgggaggagcgccgcctgggcgtcgcggcggcggggcagccggagcaggtgagggaggaggaggtggtggtggcgaaggcggtggtggcggagggggtgaaggtggtggtggagggtcagggtatggtgagggctatggacaaggaggtggagcttctggtggaggttatgggcagggtggaggaggtggaggtggtggtggacagggcggtggtagtggatccggttatggatctggttatggccaaggtggtggagcatctggaggaggctatggaaaaggtggtggaggcggagggggtggaggacagggtggtggggcaggatcaggctatggatcagggtatggttcaggctatggtcaaggtaggggagcttctggtggaggttatggacaaggtggtggaggcggcggtggtggagggcaaggtggtggaaatggatctggttatggatccgggtatggttctggatatggtcagggtggtggagcttctggtggaggctatggacaaggtggtggtggcggcggtggtggaggacaaggtggtggaaatggatcaggctacggatctggatacggttctggctatggtcaaggtggcggagttcatgctggaggctatggacaaggtggagggggaggtggcggtggcggccaaggaggtggttcaggtagcggctcaggctatggatctgggtatggtggcggcgccggtggaagtccatag

SEQ ID NO: 56999 - DNA, 4413 bp, Oryza sativa
  Clone ID: PAT_MRT4530_58854C.1
atggcaagccgacgtcgggcaacaaccggcaatgacgaaactcagacgcccgacctaaacactctggccggaattatggccacccaaactcaacttctgcaagctatcgcgagcaaccaaggcaaccgcagagggtcaagctttggagagtttatgaggaccaagccacccacattcgccacagctgaagaacctatggatgctgaagattggttaaggatcattgagaagaagctaactcttgttcgagtacgtgaggccgataaggtgatctttgcggcaaaccaattggaaggaccagccggagattggtgggacacgtacaaagaagcccgagaagaagatgccggggaaccaaactgggaggaatttaccacagccttctgtgacaactttgtgcctgccgcggtgatgcggatgaagaagaacgagttcaggagactacggcaagggaataccacagtacaagagtacctgaaccgtttcactcagctggcgcgctacgcaactggagatcttgccgacgaagaggaaaagatcgacaaatttattgaaggcttgaatgacgagttacgcgggcccatgattggacaagaccacgatagtttccagagcttaatcaataaggtcgtcaggctggagaacgaccggaaggtagtggagcacaatcgtaaaaggaggcttgccatgagccgcccgcctcagaccgccccccagcgtcctaaagggacaaccccctcagcatggagaccaacagtggtgacaaccagtcgacctgccgcctccagcaatttccacaggccggttaccattcagaaccgcgctcctacaccgaatcaggccgccactggatcagtaaggccagggagctgcttcaactgtggagagtatgggcatttcgctaataaatgtcctcatccaaacaagacacccattcgtaccggagctaatgcaacggctattcacggtactgctacccctgctgctggacgaggtctattcaggactccgcagactaacaggaccgctaccggatttggacgcgggcaagtgaaccatgttcgagctgaagaggcccaggaagaccaaggcgtactgatgggtatgttttcactcaactccactccagttaaagttctcttcgattcaggagcatcgcattcatttatatctttgaaagcaagtcaacaacacaatttaaccagagttaaattaagacaaccaatgttagtacattcacctgggggtgagatagcagtggatacagcttgcattgacgtacccattcgccttagggatgtggtatttccctccaatcttatggtgctaataccccaaactcttgatgtcattttgggtatggattggttagcaaagcatagaggagtaattgactgtagacgtagagaagttaccctgaccacaccctggggatcggatatgagagcaaccatggatcaagatcctaggctaaccgaacgtgccggaggtatatttaccatgctacccctaaagggaatgccagtagtgcagcgatttcctgatgtgttcccagaagatttacctggaatgccaccagatcgtgacatagagttcattattgacctgatacccggaactgcccccatatccaagagaccatatcggatgccggtcaatgagttagaagaacttaaaaagcaaatcagagagttgcaagagaagggatttgtacgccccagctcgtcaccttggggagccccagtgttgtttgttaaaaagaaagacggtagcatgagaatgtgtgtagactaccgatcactgaacgaagtaactatcaaaaataagtatccactaccacggattgatgacctcttcgaccaacttaagggagctaaggtgttttcaaagatagaccttcgatcaggataccatcaactgaagattaggaccgaggatatccccaaaaccgcgttttcaacacgctatgggttgtatgaattcacagtaatgtcgtttggtctaaccaatgccccagcatacttcatgaatcttatgaacaaagtattcatggaatacttggataagtttgtggtggtgttcattgatgacattcttatctactccaaagatgaggaagaacatgcggaacacttaagattggttctccagaaactccgaaagcacaagttatacgcaaaattcagcaagtgcgaattttggttgaaggaagtcgcttttctgggtcacgtaatctcagccggtggagtagcagtggaccctgctaaagtggaggctgtcacggaatggaaagcacccaaatcggtgactgagatccggagttttctaggcttggctggatactaccgaaggttcattgaagggttctctaagatagcccgaccaattacacaattactcaagaaggaaaagaagtttgcatggtcggaacagtgtcaagaaagctttgagcagctcaaagaaaagctgacctcagcacctattttagttcttcccgacatcaggaaagactttgttatatattgtgatgcgtcgaggcaaggactaggaggagtactgatgcaggagggaaaagtggtggcctatgcgtcgcgacaattgcgaccacatgaggaaaactaccctacccatgacctagaactcgcagctgtggttcatgcgctaaagatttggagacattatctgattggaaaccattgcgatatctacactgaccacaagagtctaaagtatatcttcacccagtcagatctcaacttgaggcaaaggcgatggttagaattaatcaaggactatgatttagaggttcattatcacccaggcaaagcaaacgtcgtagccgacgctctgagtcgtaagagccattgcaatcatctgagaacggaagggatggtccctgagcttagggaggaaatggcgcagctgaacctacatatagtaccccgtggacagataaacaccctggatattcaacctcttttgagaacccaaatagaagaagcccagaaggacaacgaggaagtccgagaggtgaaggagcgcttagctgtaggacgtgcaaaggaattttcaaccgacgaaaaagatgttctatggtataaaaagagaatttacgtacccgaacagggtggactgaggggattaattttaaaggaagctcacgaatcggcatattcattgcaccccggaagtacgaagatgtaccaagatctgaaggaaggatactggtggcccaacatgaagagagatgtggccgaatacgtagcactctgcgacgtatgccagaaggtgaaggctgaacaccagaggccggcaggtttgttgcaacctctcaggattcccgaatggaaatgggatgagataggcatggattttattgttggattgcccaaaaccgcaacaggatatgattccatatgggtgatcgtggatcgactcaccaagacggcaagattcatccccgtcaagacaaactatagcagtgcaaaactcgccgagttgtacatgaccaggatagtgtgtcttcatggtatacctaagaggattatatctgatcgaggcacacagtttacctcacatttctgggagaaagtccatgaagccctaggaagttacctcgcatttagcaccgcttatcatccacagacggatggccagacggagagaaccaaccaggtcctggaggacatgctgagggcttgtgctttggattttagcaaggactgggagagatgtttgccctacgccgaattctcctacaacaacagctttcaagcaagcctaaagatgtcacccaatgaggcattgtttggtcgacgatgtcgtaccccgctaatatggtccgagactggggaacgggcggtatttggacctgacatcattcaagaagccgaagaaaaggttcgtttgatccgtgaccgtctaaaagtagcacagtcacgacaaaagagttacgccgacactcgaagaagagacctggaatttaaggaaggagattacgtttatctaaaggtttctccgatgaggggaacaaagaggtttaaggttaaaggaaaactggcaccaagatatgtggggccattccagatcatcgccaggcgaggagaagttgcatatcagttacaactaccagagaatatcgccgatgtgcacctagtcttccatgtatcccaattaaagaaatgcttacgagtgtcggaagaacaagctccgctggaagagattcacattagcaatgatctcacatacccagaacacccgattcggatattagatgaagcagaaaagaggactaggagcaaagtgtggcgtatgtacaaggtacaatggagtaatcacactgaggatgaagccacctgggaaagcgaagaattcttgaggacggagtacccgcatctattctacaactggtaa

SEQ ID NO: 57000 - DNA, 495 bp, Oryza sativa
  Clone ID: PAT_MRT4530_58855C.1
atgtcattctcatcatctcgctttcttcaactctcttcccctcttcttcctcctctcttccctctcctgtccccgaggcggcacgcggcgcccgggcgaggaggggtagctcacggcggccgggcgaggagggaggcggcgcgcgacagctgggctaggaggaaggcggcgcgcggcggctgggcaaggagggaggcggcgcacggcgaccaggtgaggagggagggctccgacccggatgtgaccatcaaggacgtcagcgatagcaaccggacgaggagggaggcggtgtgcggtggccgggcaaggaaggaggtggcgcggcgcggccgagcaagaaggggcagcgttgttctgctgggcatcgcgggcatagcggccgacggagtggagctactgcgctcatcggcgatctcctcctctgcctcttcctcctctggtcacctccgcgcgtccgcggcttgccaccgctctgttagcaacctcctcctctga

SEQ ID NO: 57001 - DNA, 360 bp, Oryza sativa
  Clone ID: PAT_MRT4530_58856C.1
atggccgtggtagggagggccgtaggtggaagggtgggagaggccagcggtgggaatgccggaaggtgcggatctggtgacagggagctcaataacggcaaatctggcggcttggggctcggtaacggtagcaacgacgatgactgtggcatgtgggtggaagggtggaagaggctggcggtggggagggcgacgggtgtggatccattgatggggagctcaacgtggggttcggtggtggacgatccgacgggggacggcagggaagggctcagacttggatggcggtggatgagggctcgggctccagcgacggtggcggcagcggcaacgatgggaggggtggatccgataacttaa

SEQ ID NO: 57002 - DNA, 2351 bp, Oryza sativa
  Clone ID: PAT_MRT4530_58857C.1
gcaaaaatccaaaggactcaagggtcattatctttgcacattaccgagaatgcgtcaaagaaatattgtgctccctaagaaatattgatggtgaacttgtgaggcctgctgcattcattggtcaaagttctacaggtgatcaactgaagggccagacacagaaaatgcaacaagctattttgcataaattccggtctggggaatacaatattttagtggcaacatcaattggtgaggaaggactagatattatggaggttgatcttgtggtttgttttgatgccaacatctccgcattaaggatgattcaacgtatgggaaggactggaaggaagaacgaagggagagttgatatcctttttttggagatgaaagggtacttaagtaagcaaggaaatactaaaactatgaagaagttattgcgtgatcgtcgcagatttgaataccatgatagtcctaggatggttccacatgtttataatccagaagttaagtttgttgaattatccatagagaagtatattccttgctcaaagaaaagcaaagttgatgtgaatgtcgcatctccaatctttaataagatgtcagaggatgatggtcgattgattgctcggtactttggtgcatgcaaagaagatttctggaagccatctcttgttacatttcctagcttccaggtttcaccatgtgatatctacagagtgccacattcgttccgaacaacgaacatgctaattgatgctatgcaacaacttcaagatctttctttctctaggacaaagtgtgcaagccctttggaaggacctgctgatgtaccagttgtaatggatgaggcacccgaaggcctattcggtgctgatggatcgaaagagtggagattagtagccatggatgttagcggttatgtctcaatcacctttgtacctgctctaccgaggacatctgaattccataaggatgccaggaatgtaaattggcaccaaaaggtccagaacaagaccacgtccgtcaaattggctgctgacatcagtagaccaacgattgaattccattgccttgcaggttttgcttattcaagtaaacctatccttacagatgagtttggtttagttccccattcacctgaatacactgaaagatatggccgcactgatgacagacatgtacatggaactccacctcctaaaacattgcaaaaggttgatttttcaaaatcacacagtgagggagcaaaggccaatgagttgaaatctagaaatggacctctgaactttgaggggaaagggcaatttttttctgagatatccaaacttgctgtctcaccaggagagaatgccctagatcagactcaagcaaacaaagaagagcggatgcatccatcaaatgtgaaaatacatagtccagctgctcatactccaatggcaaatctactatgtgatagtttctctgatgattggcagcttaggtcaggaggggacacaccagggtcagtccgggaagcacccaagtacaaaagactttgcaaatatgctgacaagatcaaaagagtttcctccatgtctttagatgacagatatgatattgctgctggaggaaaccacaattttgctaccaaaagaaacaaaaggagggccaagatgtgtctggatacctttattgatgatgaagctgaggtgtctgaagatgctgatgtttcagcggatgagggtaatgatcatagtgaagataattatgaagacagttttattaatgaccaggctactcctacgggccaatttacccaaagcgtacatcatggtgaaaacagtggtgacatgatggccttctacaggcggtcgctgcttactcagaccccaatagtgctgccctcaaggtaccaagatgtccctgacaattctgcttcaagaagcggaagcgcaagtgcgagctgttcttcagagaacttgcacaattctatggagactccacaagggatccatcaaccacaccacaccattggccctagtcctctaggggaccaacaaagctttgtggctagggccagctcaataaaggaacaaggtgaaacaagtctagcccattgtgagtcatccaccacattagactgcagaaagaggaagctaagtttccaacaagctgcctccatccctgttataaaccttgaaccggaactggcaccggcaccggcaccacaaccttcctcacacattactactggagtcaacaataacttcgtttgggacgacgatgatttcttcgagagccttgatctcgatgcaatcgaagcacaagcgaccgaactctggagactcaagaaagaacaatccacacagagatcctttgggaactag

SEQ ID NO: 57003 - DNA, 6468 bp, Oryza sativa
  Clone ID: PAT_MRT4530_58858C.1
ccggccgggaaaaccctagccactactgttcccccatcccttctcttcctttcccttgcccttgcgccgccgccgctttgccttctcctcgccggcgacgacggcttgcccctcgagcttttttgccgtccatcacgcgagggtggacgggggagttaacttttggctgccctctactgccatccaaaaaccctagccgcaccgaagtcgccgcctcctcacaaactcctctgcgcgttctccttcgtccaggcgctgctgtggtcgttggtgaatcgtcgacgccgtggtgaacctgcggagggaccagaccacgtggggctcggggcgaggtttggccgtgacgcctgtcgtcgcttcgtcgccctccccctgcccaatctctccatctctcttcccagttaagcagggagagtggtcatgatgcagaacgagggcgagagggtcgatctgctggccctgccactcgatccgttcaagtaggggtgggtggtgatggagatcaaccagggctgctggtgatggagaacgacaacgaggtgatcgatctgctggcctatcgctagatccgccgatgcaatccttctccatctccacatctgcttggcgcccttctgcttgcttttgaagctccgctgtcagtcggcgctgctaagtttgcgcattgccagactcggctagcatctactaatttttctttggtgattgacattacattttttatttgttctttgaaagaaaaatgaacctttcagttcctttccatgctgaaatttcatacattgagtgccagttacaccaaaagaactgaatgcgtggagccacaaggttgcaggcaggtcaatatactttggagctgtgatctgttgctctgtagatcctgtgcagtcagaggtttggtttgctttgtaaggacgaattgattttttgaaactagaaactcaagtgaatttggcacacaccattatattgttcttattttgcatctgattttgaggtgaagttcacttggtcagttaagttatagccaccaaaggttccatatcagattccacatatctaaatgctcatttatattacatgaaatacttcatgaaccatttgtgcattttgtaggttgtacaactggaaccttccatcccataattatggatatgaattggtaaataactctgtaaattaaagaaaaaattccttttaagcttttgtacataactctgtaaatattttcgtgtcaaaaattacagatggtgatagtgaaattatatacgatagcgaaagtaaaaggcaggtcaatatactttggagctgtgatctgttgctctgtagatcctgtgcagtcagagttcgccactgctggcgaggacgcggacccgtcctctggcgccgcagcggcggcagcgtcggcggcgggcaggcgggtgtacgtgaggaggtcggtcaccggtggggcgaggcaggagtgcaggaccgccgccactgggcaatcaaaccgatttgttaccatggtgaacacccagaagcgagtatatatgggattcacggtgacgaggacgagcaggtcgctggtggcgccgtcgtcgccgacgccggcggagacgctgccgctgtcggtgctcgaccgcgtggcggggcgccacctggtgcagtcgctgcacgtgttcgaggccggcggcggaaacggcggcggcggtggcgagccggcgagggaggcgctggggaaggcgcttgtggagtaccacccgttcgccgggagattcgtggaggtggtgggggccgacggcggcggcgaggtggcggtggtcggcgtcggacggtggcttgccggctgcaatgatgtggacttcgactgggaggcggccgtgcaggagatcgacaggcgatgcgccctcgcgtcttcttccgccgcgtcggagtcggcaccgccgccggagccctcggcggcggccggcacgcggcagttgacgctcgaccgattcgtcgactccttcaccaggaggagacagatggcggcgatggagagggggccgcctgtgcctgcttcgccgcccgcagcggcgccgatcctaccgagtggcgccaggggcccccctgtgcctggttcgccgcccgcagcggcgccggtcccgccgagtggcggctgggggcgccccagtgaccgcgccggtgaggggtgctcgcgtagagcggacgaggatgtcgtgcctaagccctgcggcgttgctctggaccacgaggcagcgcgaacttggatttatccaactaatgtacaagtccgagagtaccaaaaaaaatttgtagagaaggctttatttaccaatacactagtggctttaccaacagggcttggcaaaacttttattgcagcagtagtgatgtataactactttagatggtttcctgaagggaaaatagtatttactgcacctacacgtcctcttgttactcagcaaattgaggcatgccataatacagtgggaataccacaggagtggacaattgacttgaaggggaatctaagcccctcaaagcgatcatgcttttggaagtctaaaagagtgttctttgtcactccacaagttctacagaatgatatacaatctgggatatgcatggtgaatcaactcgtttgcttggtgatagatgaagctcatcgagcctcgcgaaattatgcttactgtgttgtagtccgtgagttggaggcagctcgtgtgccgttaaggattttagctctgactgctacaccaggatcaaagcaaccagctatacaaaatgttatcaacaatttgcgcatttctgagttggttcactgtgatgaaagtgatcctgaagtcagccgttatattcagaggcgcacagttgaacctttagaggtgtgcatggacagtgataaatttataccagttggcgatgaggctgaacaagtcaatgataagcttttggatgttatacgtccacatcttgttaaattgcgttctgctagggtcattgatcacagggatgcttcaaattggagtccacaccagttgcgcatgttaaaggacaaatttgatcaagcacccccgccaaatattcctttagcagacaaaaaggaaattggtatatcttttcaagctctaaccttactttatggcattatgaaaatgcttttgagctatggtatcaaggcagcacatcagtcaatcgaagccaaatataaagaaggatcatggaaggtgcttacaagaaataacacatttttggaagtaaagaaaactatggagaacttcttatctcaaggcattctcagtccaaaagttcggacattggtagaagtgttgctagatcacttccgcaaaaatccaaaggactcaagggtcattatctttgcacattaccgagaatgcgtcaaagaaatattgtgctccctaagaaatattgatggtgaacttgtgaggcctgctgcattcattggtcaaagttctacaggtgatcaactgaagggccagacacagaaaatgcaacaagctattttgcataaattccggtctggggaatacaatattttagtggcaacatcaattggtgaggaaggactagatattatggaggttgatcttgtggtttgttttgatgccaacatctccgcattaaggatgattcaacgtatgggaaggactggaaggaagaacgaagggagagttgatatcctttttttggagatgaaagggtacttaagtaagcaaggaaatactaaaactatgaagaagttattgcgtgatcgtcgcagatttgaataccatgatagtcctaggatggttccacatgtttataatccagaagttaagtttgttgaattatccatagagaagtatattccttgctcaaagaaaagcaaagttgatgtgaatgtcgcatctccaatctttaataagatgtcagaggatgatggtcgattgattgctcggtactttggtgcatgcaaagaagatttctggaagccatctcttgttacatttcctagcttccaggtttcaccatgtgatatctacagagtgccacattcgttccgaacaacgaacatgctaattgatgctatgcaacaacttcaagatctttctttctctaggacaaagtgtgcaagccctttggaaggacctgctgatgtaccagttgtaatggatgaggcacccgaaggcctattcggtgctgatggatcgaaagaggtaattccccaggaatattgtggtttggaagttttatccggtgaagctgcatggagtaaaaatgttctcgtaccaagtttaccgattaagaaatatcctgtccactctttcttcagtggagattatgtagccatggatgttagcggttatgtctcaatcacctttgtacctgctctaccgaggacatctgaattccataaggatgccaggaatgtaaattggcaccaaaaggtccagaacaagaccacgtccgtcaaattggctgctgacatcagtagaccaacgattgaattcgattgccttgcaggttttgcttattcaagtaaacctatccttacagatgagtttggtttagttccccattcacctgaatacactgaaagatatggccgcactgatgacagacatgtacatggaactccacctcctaaaacattggtaagtccaaaagaaatatgccacaaaccctgcaattctaaaccagtgagcccaggtctgtcaggtcaagaagatatggagcttagtccaagactaacatattatattgaagaaggaattgttcctgagtctccgatgcttgaagttggccacaaacatttagagacagacagtgctgcaaatgctgattttgtgcagcaaaaggttgatttttcaaaatcacacagtgagggagcaaaggccaatgagttgaaatctagaaatggacctctgaactttgaggggaaagggcaatttttttctgagatatccaaacttgctgtctcaccaggagagaatgccctagatcagactcaagcaaacaaagaagagcggatgcatccatcaaatgtgaaaatacatagtccagctgctcatactccaatggcaaatctactatgtgatagtttctctgatgattggcagcttaggtcaggaggggacacaccagggtcagtccgggaagcacccaagtacaaaagactttgcaaatatgctgacaagatcaaaagagtttcctccatgtctttagatgacagatatgatattgctgctggaggaaaccacaattttgctaccaaaagaaacaaaaggagggccaagatgtgtctggatacctttattgatgatgaagctgaggtgtctgaagatgctgatgtttcagcggatgagggtaatgatcatagtgaagataattatgaagacagttttattaatgaccaggctactcctacgggccaatttacccaaagcgtacatcatggtgaaaacagtggtgacatgatggccttctacaggcggtcgctgcttactcagaccccaatagtgctgccctcaaggtaccaagatgtccctgacaattctgcttcaagaagcggaagcgcaagtgcgagctgttcttcagagaacttgcacaattctatggagactccacaagggatccatcaaccacaccacaccattggccctagtcctctaggggaccaacaaagctttgtggctagggccagctcaataaaggaacaaggtgaaacaagtctagcccattgtgagtcatccaccacattagactgcagaaagaggaagctaagtttccaacaagctgcctccatccctgttataaaccttgaaccggaactggcaccggcaccggcaccacaaccttcctcacacattactactggagtcaacaataacttcgtttgggacgacgatgatttcttcgagagccttgatctcgatgcaatcgaagcacaagcgaccgaactctggagactcaagaaagaacaatccacacagagatcctttgggaactaggcaagcatcagagataagccttctcccctttgatttagggatctgagatcgtgagagctcatgctggtgaagagtcattcagaatgttttatctagctgttggaccagatcatcctggaccatggtcaggaatcctgggatggcaacagcatcaacctaccagcccgattactcgtgggcttttcaaggtttgagcttgcagatcacagtatcaggcaacaagatattcaggtgaacactgtttttccgcccataattacatcctataccattgggatatttatggggagcttggaagatcaggacatgacgaagcgagttttgtaggggcatggactgttaatatgaatgtatgtatgtgcatacatcccgtacatatttatacaccctgtatcacactagttttctctctgtaaatataagttcttttcctgtatacttccaaaacaacaaaaaaaaaagggcggcg

SEQ ID NO: 57004 - DNA, 947 bp, Oryza sativa
  Clone ID: PAT_MRT4530_58859C.1
tcaccgctcaagcaaaactttgtcttctctctctccggctattcctccgacgcaaaagcgacttccaggcgacttcatctccggcgagatctccgcccgcagcaatgtcatcctccaccaacccatctgatgcgccatcagcggagtacgctgagagaaagttccacccgagaaaagttggaccacatgggccgatgaccccaactctcatagatatcagcatgatcacgggtctggatgtcacctcatcggccaaccctatgagtttgaatacaaagaacaaatatgacttcaagaccaagagcataggcggctgccgcgagggcgcgcccgagggcggcctcgccggcgcggccgacgggagcggcacgcccgcgccccgatggtcaccgccggcgaccaccggcgcggcggagcggcgcacgagagagaggagggaagggggaaggcgaacggcggtcctcggctcaccccgggacaacgacggcgacggaaacggcggccgggcggaggaagacggcggagcggctcgggatgacgacgacggcggtgctccggcggtcggcgggcggaacggagatgcggacaaggtcgacggcgatgcggcggagccgagggaggtggcgccgagccgggaggaggaccggagcgacggcggcggcgaaccgaagcggaggaaggcggcggcgcggttcgggatgccgagggcgacggtgctccggcggtcggcggacgatgcggagcggcggacggggtcggcggcaacacggcgaagcggacggaggggtcgccgagtcgggaggaggtccgaagcggcgacggcggcggaacggagctcggcggcgacggcggagagagaggagcacggcgcgagcacgattccgacgacgagggcgagcggcgagcggcggaaacggaagagcggagcacgggggacgattttatag

SEQ ID NO: 57005 - DNA, 388 bp, Oryza sativa
  Clone ID: PAT_MRT4530_5885C.1
ctggtagcatcacatacgctaataatggattaattaggctcaatagattcatctcgcaaattagtccagggttatggaataggctttattattagtctatgtttaatacttctaaatagtgtccaaacattcgatgtgacagggattgaaaaattttagccccatccaaacccaatctaaaccattattgttattactttttattgtgcattactaccattccaccattccatcgtgatgttactacaagtgtaccataacaactatattttatgcagtaacatagcgtgtaggtattactgcaataacatgtgggtaactaccgaacacatgtccaagaactaccatccaccttgaactagcaaagctaagtgcaagtgatatattt

SEQ ID NO: 57006 - DNA, 1110 bp, Oryza sativa
  unsure (1)..(1110): unsure at all n locations
  Clone ID: PAT_MRT4530_58860C.1
agttggattagccccgtttgttgatatcaggtcacatatatggcaccanccggcacttcaccatcattgtagcaccaatgagctacaccagcaggcaacgcgataacatctccttgtctgaaacggtgaatcttttgatgttcatccttgaacttatggctttggctttgactttcggtcaattgggcttgccctgattgttggaactgctgctggtaggtctcaggacagcctgggaaagtcggccctgttatacctcatcctcagatgatatatctagtgatccaccactagtgtaatgatgcagtagtagctgtcatcgcggccgcgggttttttttttttttttttgtttgtggaactggtagatcaagaattaatccctttctgaagattctatatgcagttaaacattcagatatcaacatgcccgtgtcaggaacaatgacatccttaagcatatctagtcccaagaatctctgaaaaaaaaaaacttaatacgtttgcaatcgcatcagaaaaccgttgaataattcaggcgcatatgcatattgatcatggaagagatcgaattgaattagcagcagcaagaggtgtgtggtcatggctgctggctggtgcaattggtggcgccacagtcgcaggtgtggggggagaaggcgcagacgccgaagggcttgccggggatgttgcagtcgatggcgtagcagcaccgggtgtccacgcagctgctcgcgttcgacgacgcgcagcaccggcagcccatgcacagctcgaacggctcgtacgccgccgcctccgtgccgatcgccgccggccggtacatcaacctcttcaccggcacgtcgtacttcatcaccatcttcttgtctggtccttgggcggcctggaggaaggaggagctgaagatgaggaagacgaccatggcgaggccggtgagagagatggagacatgaggatcttttgccatggtcaattactttgtctctctggaaagaatggaagaacactgagatgcaatgcaaagggggaaacggttgggttttgggtcagatatactactactaatgaatagtactattgtttggcaataaggcaactccccggccgg

SEQ ID NO: 57007 - DNA, 371 bp, Oryza sativa
  Clone ID: PAT_MRT4530_58861C.1
tgtccgcccaaaaaagagagtctctttttgttggacaaaggtggtggaactattatcttgagcttcgcttaagccatacatcaagtggtgaagcctacactgctccgagttgcggttgagcgcacaatgacacaaagagcagcagcttctaatgcgttacgtcacaaaagatttgttggggaagtcacaatacagtacaatctctgcaacgagccatggttgaaatacagcataagcattgtggcagacaagggattgaaaaagtcattatatccttctgcgaggctgaaaaaaggcgaagtcatatacttggaaacacattataataggtatgagctagttttcgcaggtatgagctgatggtcatcgcg

SEQ ID NO: 57008 - DNA, 666 bp, Oryza sativa
  Clone ID: PAT_MRT4530_58862C.1
cgcgggttttttttttttttttttgtaaaaaacttaatacgtttgcaatcgcatcagaaaacagttgaatgattcaggcgcataagtatattgatcatggaagagatcgaattgaattagcagcagcaagaggtgtgtggtcatggctgctgttggctggtgcagttggtggcaccacagtcgcaggtgtggggagagaaggcgcagacgccgaagggcttgccggggatgttgcagtcgatggcgtagcagcatctcgtgtccacgcagctgctcgcgttcgacgacgcgcagcaccggcagcccatgcacagctcgaacggctcgtacgccgccgcctccgtgccgatcaccgccgcctgcatcgccgacggccggtacaccagcctcttcaccggcacgtcgtacttcattgccatcttcttgtctgatccttgggcggcctggaggaaggaggagctgaagatgaggaggacgaccatggcgaggccggtgagagagatggagacatgaggatcttttgccatggtcaattactttgtctctctggaaagaatggaagaacactgagatgcaacgcaaaggggaaaaatggttgggttttgggtcagatatactactaatgaatagtactattgtttggcaataaggcaactccccggccgg

SEQ ID NO: 57009 - DNA, 714 bp, Oryza sativa
  Clone ID: PAT_MRT4530_58863C.1
atgacgcttctagcgtcattgttgctggcccggcytaggctgggctgggttttcactcgccgctcaccacctgtgagtccacggctagcgccccaatgctccaccgccgtccatcctctaccgacatatgggaccactgcaccggcacccctccaccggccagccttcgtgcatcgtagaccgcaccgcactcactggcagctcctcctccttgtaccgtgcccgcccccgtcaccgcaggccgcgcctcaccacgccaggccagcctcgtccaccgccggccgcgcctcctcgcgccaggccggcctcccgccgccggccacgcctccacacaccacgccagcctcccgccgccagctgcggctcctcgcgtcgtgccgagctccgctgccaccgcctaatcaaatttcattgctatctcttgttgtcaccggtctgggtgaccagggccggtctgaccgctgcccaagtgccggtctgaccggctggtgtagccggtttgaccgccgcctcaaagctagtgtggcacttgatcatctccgagccgggtcatcgcttgttactcttggaggttgccgcctcctagatggctcttggaggagttgcccgtcctctccgtgggctggctcccgccttgcctactccttgacgaagggggtgtgtggtgacttcgtggttgagcggtggagttgggctcgcctcaatggggagtag

SEQ ID NO: 57010 - DNA, 406 bp, Oryza sativa
  Clone ID: PAT_MRT4530_58864C.1
tatttttgatgaaaacctttttttttttttttacttaggctgtatattttttttagggggatatttttcacttggtcctttgtatcacatgatacaatgaacatgttttcaaattcaccctcaactcaacaatagtttacgcgccatttaacacattcttccagcctcaaaaaacaacaccctcttctccccggaaaagaaaaaataaacccgcggccaggcagggtcgccggaaacaagaagaatacaggctggcgcgaccactagggggagccggagatgaccgtgagcaaaaagacgccgcagagggtccagaggcgcttggcgaggggccctacggggcccgaaccgatgatgaatgcatcggatgaaaaaccacagactgaggaacagggccagccgcccg

SEQ ID NO: 57011 - DNA, 1169 bp, Oryza sativa
  Clone ID: PAT_MRT4530_58865C.1
atgttgaagaaacttatttatattctgtagatatatataatatccatctcactgcatatatacgcaataagtattagaacaccatgcgtgcccagaactgtactgggcaaatatatccgcttattcagtcattcattcataccaaatccaaccacagcgatatctcgaccgtccgatcagcgatcagtggttggcgatgatctcctgagccttgatctcgtactcaaagccatagctgctgacctttgagctgtccgccgaccagatgaacaatcccggcagcttcccctgccgctgcaactccttcgctccggcgatcccctgctccggccagagcagcccggcgacgtcgccggtcttgaagctggcgagcaccttgccgcccgggtagttcgccgcctgctcgtcgtagaacatcacgtacgtcggcacgtcggtgttgtcgccgtagccgtagaactggaagttgacgaggtcgatcacgccggcgtagcgccgccacagcggctggtagtagcgctgcaccacggcgtcctcgaacggcgcgatggaggtggtgatgttcgggtgccgcgccttgagctcggtgaggaggcggccgatgcactccacgaacgtgtcgacgccggcgccgccgtcgtcgttgaagtgctcgtagtcgacgtcgacgccgtcgaggccgtaggcgtcgatgatgccggagacggaggcgacggcgttggccacccacgagtcgacggaggtcggggagaagaagaccttggcggtgtcctgcacgctgtcgccgccgaggccgaccatgacgctgacgttggggtgcgccgccttgacggcggcgacgtcggccggggacaggttggccgtgtcccagtacggcgagaacacgccgttggtcggcgccggcgtggcgccgccggccgggctcgtgtagtcgatggcgaaggagaggatgaagttgaagctgaggtttgggttgatgggcacgtcggagaagcggactccggtgaactgcgcgccgatgtactcccggaacaggtacccgttcgtcatgggagaagcgcacgccggtgaactgcgcgccgatgtactcccggaacaagtagccgttcaccatggccgccgatctagctagcgagtagggctagcgatcgagctgtgcctcgtgctgc

SEQ ID NO: 57012 - DNA, 1130 bp, Oryza sativa
  Clone ID: PAT_MRT4530_58866C.1
acatcctaggaatcttataaaggtacctgtttctaaaccgacaccgtttactaggtgccggtttgaaaatctgacatccatatatcgccgattaccaatcggcacataagtccatttcttatttagcacgtaagtcgtgcataatgacgctcgatatataatacgaccattatttcgcaatttatttgctcttatttcataagtattatcacgaccgttcgatggacgatcagtggttggcgacgatctcctgagccttggtctcgtactcaaacttgtagctgctgaccatggagctatccgctgaccagatgaacaaccccggcagcttcccctgccgctgcaactccttcgcgccggcgatcccctgctccggcgagagcagcccggtgacgttcccggtcttgaagctggcgagcagcttgctgccggggtagttcgccgcctgctcgtcgtagaacatcacgtacgtcgccacgtcggtgttggcgccgtagccgtagaactggaagttgacgtagtcgatcacgccggcgtagcgccgccacagcggctggtagtagcgctgcaccacggggtgctcgaacggcgcgatggaggtggcgatgttcgggtgccgcgccttgagctcggtgaggaggcgaccgatgcactccacgaacgtgtccacgccggcggcgaagtgctcgtagtcgacgtcgacgccgtcgaggccgtaggcgtcgatgaggccggagacggagtcggcggcgttgcgcacccacgcgtcgacggacgacgtcggcgcgaacgtggcgttgacgccggtgttctggacggtgtcgccgccgagggcgaggatgacgctgaggttggggtgcgccgccttggccgcggcgacggcggccggggacaggttggccgtgtcccagtacggggcgaacacgccgttggctggcgccggcttggaggactgcgtcgccatgaagtagtcgatggcgaaggcgaggatgaagtggaagctgaggcccgggttgacgggcacgtcggagaagcgcacgccggtgaactgcgcgccgatgtactcccggaacaagtagccgttcaccatggccgcccacgcgtccggcgagtagggctagcgatcgagc

SEQ ID NO: 57013 - DNA, 375 bp, Oryza sativa
  unsure (1)..(375): unsure at all n locations
  Clone ID: PAT_MRT4530_58867C.1
cttcntggggttgtggnntgcggntccggatgttgagtnccgctgctncgtcggcggcctcgcctgagccaccgacaaccgctccctcgaagccgccttctccaccttcggcgaaatcctcgaatccaagatcatcaacgatcgggaaacgggaagtctcgcgggttcgggttcgtgacnttctcnancgacnggccatgcgcgacgccntcaagggatgaacngnaatganctcgacggnccgcaacatcgccgtctaccaagctctagtcncncctctccggtnggnggnggnngaagccggttctgcctncncggcagaaagcnganggntccgtngtnnccggcggctacngtcgttggcnngggngtggc

SEQ ID NO: 57014 - DNA, 940 bp, Oryza sativa
  Clone ID: PAT_MRT4530_58868C.1
gcacgagggtcgcttctgggcgattcgattcgattcgaggatggagaagaagaagagtaataccgataacaacctggaggtgttcctccaggccgccactccatgcctgcgctggcgctccgcctccatggaatgtttccaagatcccagcaaagtttggcaactcgacaagaagaaagacgaggtcgattacttcgcgcttgaggatctctgggagcattacgctgagagcagtgcgtatggccttgctgttcctgtccgtcttgaatccggcaacaccatcacccaacattttgttccctacttatctgccattcagatatacacctccaccaagtctctccttgctttctccagaggcagcgcagggagcgagagtgattcttggagtgatgatagtacaggcgacaagttatcaagatcatgggatgctgctatgtctgatgacgacgactcaagccatgatagctctgaatcggtttctgcaaagcaaggtgccggctgcctgaattttcagtacaacgagtggagctcgccctacgagagagtcccgctagcagataaggtggcagagctggctcagcattatccatgcttgacatctctcagcagtgcacaactttcaccttcgagctggatgtctgtagcatggtacccgatttatcatatcccagctcgtggaaacctcaaggggttatctacgtgtttcctaacctatcattccctctcctcagttttccaagataatgttgaggaggggaggagcgttgttggtgtttcgccgtttgggctggcgacgtacagagcggaagggaagctgtggacatcgtcgaggagctctgatctcttctgggcagcgtcttcttggctcaagcagctgcgagcttaccatcctgacttcatcttcttcacgtctcactgccggcaatctgcattctga

SEQ ID NO: 57015 - DNA, 402 bp, Oryza sativa
  Clone ID: PAT_MRT4530_58869C.1
atgacttaccttttctccttcctctttaccctttctctctctctcaggtctccgctcctcctttgcgagcgacaggggatagatgtcgacgagggagcgtgtggtggtgaccggtggtggatggcagtgacggcggtgggacggagcacgggcactcaatcagacaaaaacatggagtgttccaacgtccagacgttcaacgaaagcaaaccattattacacaataaccaaatatacaattatctcccacaagattatgacatgaccgacgacgatatttgtgctcaaataacaatagagacatcgtcatcaactgatgtgctggtcaaaataaatgatatagctccgaagcaagatcaactattacccatattagatgagaacgaatacctagatgacaat

SEQ ID NO: 57016 - DNA, 278 bp, Oryza sativa
  Clone ID: PAT_MRT4530_5886C.1
gattttcggatccagaaggatcagagagggagagagtaagagctctctggttctccagctcttttgtagcttcttcatacatagatccataaaaacacaggagtagggtattacgcttctcagcggcccgaacctgtatacatcgcccgtgtcttgtgtgcttccattctcgcgaaccttccacacacagactaggagcttagaatctcacccagggcccccggccgaaccggtaaaggggggcctgcgtggtctcccggtgaggagccccacgctcc

SEQ ID NO: 57017 - DNA, 798 bp, Oryza sativa
  Clone ID: PAT_MRT4530_58870C.1
tatgcagttcctgaacagtggaaacaattgtttaagcggcgacaggatgtactacaagaacatcatgtagataatgatgcaaaagatgctcatgagaaggacttggagcggaagcgtaatttgctattcattcttgctattctaacagcaactgtcacatatcaagctggcctgaaccctccagttcttgtactgtcatcaacaaatgatgcactagaaccgccagccaggtcacggagatggttacagaagttttttgggcttgctgattctcaaaagtcactagcaagtccaggtcagtcaaaaaatgaaagtgacaagtcagatccccttatcaatgaaaagaaagaaaagaggcataagtacttgatgctgcttgcaattcttgctgcatccattgcttaccaagctggtctgaacccacccgggggtttctggtcagaggacagtcgtgatggctacaaggctggcaacccgctccttaaggacatacactccagacgctatatggtgttctatgtttctaattccatctctttcatggcatctattgctgtaatcatgcttctgctgagtaaatctgtgagaaagaataaggttccactccaagcattgttcttgatcatgatactagacctgttggctctgatgacagcttatgcagctggaagctgcagaaaggtcagaacatcaatatttgtcttcttggtagtatgcggggtggtgctataccttatgattgtaattattttattgagtggtatcgcaaaatggctgaaagaaaggaaaggttgttga

SEQ ID NO: 57018 - DNA, 3438 bp, Oryza sativa
  Clone ID: PAT_MRT4530_58871C.1
atgacggagggtgtctctgacatgcaacctcaccgggggagtgagagcatagctgaggcggatggcggacaccctcagagtgagattgttgagagcaatagcctccctactccagaatcgcgcgatgatggtcagatggcagatgaagcagccgacatcgaaagccagcaagatagcaagatggttgaaattaaagaccaagattctggcaacagctccagcaggtcagcatcactcaatagccatgaagtcaggatcaagactgattttgtgttcttgtggaggttgcgaaagtatttgctacttcttgctgtgctagctgttagtgtcacatacaatgctggactgagtccaccagggggattttggacggacgacagccctgtccatcatgctggtgatcctctccttccatctaaattcttccagcgatatgaagcattcttttactgcaatgcaacagcctttgctgcatctctggtcttaatcatcttgcttctaagtaggggtgtggccaatcagcatttatggcttcgtgcgatgcaggttaccatgatattggacctctttagccttatgggggcctatgctgcagggagttgcagagctctaaagtcttctgtttatatattggtgctagttttatctgttttcttctatgttggaatccacattctagtattcataagggtggttccaaaatggttaaaagagggtgtacaaacatttatgcatcaaactgtacagaagctgcaaagaatgctgaagcaagttctaaccatttgtcatctccccaagaagcaaaggagcaaccaaaatgataaggaagaaatcgaggaagctcgtaagttcatattgatgctctcaacttttgctgctactatcacataccaagctggaatgagtccacctggtggcttttgggctgaaaacagtcatggctaccgtccagctacttttgttcttcgcaggcacaaccttcgccgcttcaatattttcacctgttccaatgcaacttcttttgtggcatctttggtcacaatcatattacttctgagcacagaattgagccggcatgggataaggactcaggcattgtttgtgtgtgtcatagccgaactgtttggtctgatttttgcttatgctgcaggaagctgcagggatgttgcaacatcactgtctgtgatcttcataattgttgtggttttaatatgtgccttgatccttgttatgttctttcaatccagaactgtaacaatttggatcgataatgcattgagacctagatttgaccattttctagaaatgctttcatggccacgggaaaaccggttatcagatggaaatcgagaaggacccttgtcaagttctcggcaggatacagatcatggaaatttgggtgaccaatcaactgaagatgtaaaatctgcaccaaccaatgatttggaaagcataaaagatagcatacccaatatggcaaatcaacttcatgatcagaaagataatttggccattgcaacagtacactcttcatcagcagatgtaccaagtagaaaaggtcctctgccagagcaggtcttgtccgaaccaatttcagcacttggtgatcggacagtatcagctgatgtgcctgacactgaacataatatagccaagtgccagagggatcgtgaagaacaaactcaagaactgagcggtcatcatgatagttcagaggctgatggagaagtcagaaagtcggaggatggcattgtgagcaataatgatggcacaaaggataaaggtagaatcagtggtgacagcgagaaaaacccagatgatgttcgtcttaagaagtcacgcacatacctattgcttcttgcaattcttgcagtttccttgacatatcaggcgggtataaatccaccaggtggcttttggacatcaaatacccctagtcactcagctggtgatcccatccttgaggataattaccataagagataccttgcattcttttatttcaacgcgattgcctttctagcttctcttgtcatgctcattatgctcctgaacaggaagatgagcaacaaggttataaaacgccgtgcactacaaacggcgatgataactgacttacttgctctattgggggcttttgttgttgggagctgcagggagaaaacaaagtccatttacatatcagtggtgatattttttgtagtagttgcatatacttttcttcatgttttggcttcaaagtatgcagttcctgaacagtggaaacaattgtttaagcggcgacaggatgtactacaagaacatcatgtagataatgatgcaaaggatgctcatgagaaggacttggagcggaggcgtaatttgctattcattcttgctattctaacagcaactgtcacatatcaagctggcctgaaccctccaggtggcatttggcctgatgggagtggcaaacctggcaatccagttcttcaagatagccatccaaagcgttatgatgttttctactattcaaatgctctctcatttgtgtcatctgtggctgttatcatactacttgtcaatagggaatcgtgcgagcatggaatcaagtcctacgcactgcgtgtctgcttgatagcgggtttgcttggtctcctgattgcttattctgcaggaagcttcaggaaagtaaaatcaataggttatctcattatcataactgctgcagttctcatctgtcttttaattcaagttcttgtactgtcatcaacaaatgatgcactagaaccgccagccaggtcagggagatggttacagaagttttttgggcttgctgattctcaaaagtcactagcaagtccaggtcagtcaaaaaatgaaagtgacaagtcagatccccttatcaatgaaaagaaagaaaagaggcataagtacttgatgctgcttgcaattcttgctgcatccattgcttaccaagctggtctgaacccacccgggggtttctggtcagaggacagtcgtgatggctacaaggctggcaacccgctccttaaggacatacactccagacgctatatggtgttctatgtttctaattccatctctttcatggcatctattgctgtaatcatgcttctgctgagtaaatctgtgagaaagaataaggttccactccaagcattgttcttgatcatgatactagacctgttggctctgatgacagcttatgcagctggaagctgcagaaagataaggaaagtgaaggaaaacgattgtagctgtgttgactttctgcacttctccagaaccttatcaagttctgcaatcccaaacgcaagaggatctctgagggtagcaaaaagaaaaggaacatgggatggtatagatgcacataactcgcatcaggacatagcaaaatactgtaaatggtcctgttctcaaagaatgctgccctag

SEQ ID NO: 57019 - DNA, 489 bp, Oryza sativa
  Clone ID: PAT_MRT4530_58872C.1
cgacccgggttccggggcttttcggagggaagtacgccccacctccagctttttcttttcccaagctctggtgtcgtcctccccaacgggtcttcatcttctcccgtgagaccaggcggcgattcgggatgcggtgcagggccatcgttctctggcactccaccagcgcccaggtggatgaggaaccggaggggatggggctggcacttctgtccggcggcggcgcctgcggtgatccggtccactgctcccccagcactgctgttgctgctgctgctttcctctctttcttgctctggtttttctcctctcatggcggttgctctgtctagagattactcctcctttgaaatccttttcagttttggttggattaattggagttcgctttctgcgcgattgcaattgttcttgattgatttgtttggctcataatagtccaaggcgctgtccttgttgctcttcgcataaaaaaaaaaaaaaaaaaaa

SEQ ID NO: 57020 - DNA, 474 bp, Oryza sativa
  Clone ID: PAT_MRT4530_58873C.1
atggcggagcccaaaacagctatcgataaagagcttgttgttcttgctgacgcttccagttttcaagcaaaaccatttgaattagcttcagaatttgagtctccagcgtacgtgcacgactgcacggtgtatgtccacctagggaaaaggatgccgggttgccgaccgatcgctcggcttttcttatgggagaagctagcagtagcatatgcatatgcacggttggtctggatcggaccacacgtcacacatatgcatgatttgaggtccaggaacgcccaaggtgatcgttccatcgagttggcatctgcacctacgcatagaaacatgaatgaacagtacacgcatgatcttaaaattgagatcctctgcagtaaaatgcacgatgtttttgtcagggtccacatgtcagtgacaaagtcacgtgtctttgaccgcaagcgggatgtatctggtgtatttgtgattttatag

SEQ ID NO: 57021 - DNA, 393 bp, Oryza sativa
  unsure (1)..(393): unsure at all n locations
  Clone ID: PAT_MRT4530_58874C.1
nggggaaaccctnccttgggtcgggccttgtgnctcntttnagttgatatagggggtnngagtnnccctcatcnnacgccaccctncgcncccccanctncaanggttnggcannccacggngctctgatcnttanggcccaccttatgcccctgggtacatttcnnaagtntttttngaaaanngnccncttnaaacngtcggngtcagggtngtcgntaaggtcatgganactgttggcctcgcctgngtcctgacctggtggggaactngcnccaaccccttngaataaantnttttagtcgcccagttttatatnaggnggcccaatatnaaggcncnatnaaggcgaaaaaaaaaaaaanaaanaaaaaaaaaaaaaaaaaaaaaaaa

SEQ ID NO: 57022 - DNA, 627 bp, Oryza sativa
  Clone ID: PAT_MRT4530_58875C.1
ggcctgcggtccaatcaaacgatcattcctgtgttttttctgtattttgcaattctctgttttacacttcaattcctatcaggatgaatgaactgtactttttttatggaaaggcataggaagtcccgtagtagttgcatcaattaagtcagaaaaccttggccagaaagaatttaaagaaaaaaaaatctgaatattgttctcctaattacctgtgttttggagaactaaactaacaagaaaacgtaacatggatgggggacataaattacagatcgtcgggtggtggcagagtgtaagaatactttattccccacacttcttagacaaacgaggaacaaatttcgccaggcaaatgaggaacaaattgaaaggaacaaaactggaagagacttggaaaatacagtacctgcatgtcttgttggtcgtgagtcttgtcaatccatacagatctttataccaatcagtccatacacataatgtttaggtgttataacggcatcaatggatcttcttaatctttagcgagtgatgcttgccattttctgtaggattcctcttaatatatacagtgtttatagtcgtcttgacatgttcacagccatcacactccacttttccaggctt

SEQ ID NO: 57023 - DNA, 573 bp, Oryza sativa
  Clone ID: PAT_MRT4530_58876C.1
atgggagacgactacatttggccgacgcggcatcatttggtggaggggtcggagaccggcttggtgcagagaagcgcagccgttggcagcggaggccggctcggcgcgagaggcagtggcgcggccggcggtggaggaggcgacctaggtgtgaggaggagttgctggtgggtgtggcgcggtcttcggcgcgtgaaggctggccggcgggggacgccggtgctggggtcccacatggaactagggaagacttaccttcgtcggactcaagacggccgggcggcgtcgctggcgcgtggccggtggaagcctggctgcctgcctgctgctgctgtgctgccgcgctgccggcgccggggtggcgcgtgcgaggaggacctgaccggggacccggggacggcgggctgcggcagcgacacgacgcgagaccgcgacggcgcgatggggagacgggcggcggggcagggcgaccggcgacggcgccggcgcgtcggtctcacgttcccgtcccgtctcggcgtctcctgccgcggctccttttattgggccaatgggcctgaaaagtggggatag

SEQ ID NO: 57024 - DNA, 319 bp, Oryza sativa
  unsure (1)..(319): unsure at all n locations
  Clone ID: PAT_MRT4530_58877C.1
gccnggatttnggcaggttttactaggntttttgccgatccgcttcccttccnccgcgccaccctctactctaccctactcctcccgcttcctccgcgcctacctncgtgctcgcgaggccgcccgccatgagggacctccagctctcgctgaaccagacccagaggtgncgcctcgaggccgcgctccacgagctccagaccntcgcccccaccnccnccgtcaccntcgcggacaccatccccgtcaacgacgaggacaacattctcaaggggcatgggacgtcggatcaggacggggaggtggtggcgacgctgtn

SEQ ID NO: 57025 - DNA, 443 bp, Oryza sativa
  Clone ID: PAT_MRT4530_58878C.1
ttttgtttttttttttttttttttttttttttttttttttttttttttttttttttttggaaaaaacaagctttttactcccagtagcacaggcctggtgaatataagcataacatatttttatcccatcctacggatctaatggtctcaaaagggggttttttttttaactaatttttaaaacctaaaagaccgggtccacaccagccaggtatatggaggtataggcaaatatatatatataggggggggggggggtatatatggataagcccgccgccgaaaaataaccgggggacacctgggagggtaacccattgggggggcaggaggatctcgccgggatcggggtgcctgagctagggggctatttcatgggacaccttgccggcctttaatgggggggggctttccgccgggaagcattttcccaggtccggggg

SEQ ID NO: 57026 - DNA, 450 bp, Oryza sativa
  Clone ID: PAT_MRT4530_58879C.1
aaatggcagggggtggacatcgcgttccgggtggacgccggctccaaccagtactacctcgccgtgctggtcgaggacgaggacggcgacggcgacctgtcggcgtcgtggggcgcggtgtggaagtacaactccgggccggcgccgctgcaggcgccgatgtccatccgcctcacgtccggctccggccggacgctcgtcgccagcaacgtcatccccgccgggtggcagcccggcggcacgtaccggtccatcttgggcacttgggcgttggctccggtccatgtaccgatcagccagcgtggtccggggctccgggccgtcgcgggggataacgcgacttgtgctggcttccgcgagaaatttaaaatgatctatgaaggaaatcatgaccgccatggtggcagcgccacggcaatcgagctcgagataggagaaatgatgccacgg

SEQ ID NO: 57027 - DNA, 108 bp, Oryza sativa
  Clone ID: PAT_MRT4530_5887C.1
aataggcagctagttggtgttcaaattcatttgtggtatatggtcatgtgaagggaagacagatcaacacctctcattcccactagccaccttttttagcttttcagt

SEQ ID NO: 57028 - DNA, 822 bp, Oryza sativa
  Clone ID: PAT_MRT4530_58880C.1
atggcattggcagccaagctcctcccgtccatcgtcgcgttcgtggctctcgcctgctgcgtcctccgctcatccgtcgcgtccgtcgaccaccaccggaagctctccggctggtccatcggcggcgcgacgtggtatggccctgccaacggctctggaaccgatggtggcgcgtgtgggtaccagggagacgtcgggcagccgcctttcaactccatgatcgccgccggcagcccgtccatctatgagtccggcaagggctgcggctcttgttaccaggtgaagtgcagcggcaacccctcttgctccggcaagcctgtgaccgtcgtcctcaccgacctgtgccccggcggcgcgtgcctcgaagagcccgtccacttcgacctgagcgggacggcgttcggcgccatggcaaaacccggccaggacgatcagctccgcaacgccggcaagctcccagtccaatacgctagggtgccgtgcaaatggcagggggtggacatcgcgttccgggtggacgccggctccaaccagtactacctcgccgtgctggtcgaggacgaggacggcgacggcgacctgtcggcggtggacctcatgcagagcggcggcagcggcggcggcggatcttgggcggcgatgcagcagtcgtggggcgcggtgtggaagtacaactccgggccggcgccgctgcaggcgccgatgtccatccgcctcacgtccggctccggccggacgctcgtcgccagcaacgtcatccccgccgggtggcagcccggcggcacgtaccggtccatcgtgaacttcaggagggaggattga

SEQ ID NO: 57029 - DNA, 390 bp, Oryza sativa
  Clone ID: PAT_MRT4530_58881C.1
gcacgaggatagttctttcactcgatgtgtttagtaaatcttgccctctatattttcctccagtatccagtactcccacggaacaaaatgggtaatggagaaaaaataagtgcatatgcctatgtgtggtacatgtacaagctgttattagctgcacaaactatgaagttttccatcgggtgccaagctaaatgtgtcacctttgatgtcatgttacatttagtgccctcccggccgtcagatcttggtccatcttgacctgcaggggaagagaatttgcagagcacacgctaaaagcttcagttctaaagtagaggcgtcactgaaagaatgcacaaagacacattaaaagaataacttgatgaattattcgaaccttttctctggatt

SEQ ID NO: 57030 - DNA, 1584 bp, Oryza sativa
  Clone ID: PAT_MRT4530_58882C.1
ccacgcgtccgctgatctccatctcgcgaggagggcagagcagggcgccgatcctcaatctcgcgaccggagcaggggaggggttcctgcatcctgaaaggtggagctcaaatcattagtgccccatttatctcgtaccaaggactttggtgcctcattttgtgaaaataagaaatttctgtgagctgcttcgcaactgtcctactcagggggctacacctgatctagcaactaagattatgaactttgagcggatctcataggatttgtaaagaattcttttgttggagtagttttttttatttgaaacaatgaaggatcatctaatggtaaatgttgatgatctaatggcgcctgaatgctttgagaccactggggcagccaagaattcatcaggggaagccgctgcgcaggcacccactacagtgcatacctttttggcagttggagaaagcatggcccctgaagaagaacctcttctgcagttggtggaatgtcgcatttgtcaggaggaagacagtataaaaaatctggagagcccatgtgcctgtactggcagtctaaagccatatgaacacggttacactgcacctactaggcctcatcctgatgaaactaccattgacatcagtggtggctggaccattactggtactgcatttgacttgcgtgatcctaggatccttgcagttgcacagaaccacattatggaagctgaatacgatgattactctgccacaaatgccagcactgctgctttttgtcgctctgctgctctagttttaatggctctgttattattgagacatgcgctgactctaactgatgaagatgacgatgatacttctgcaatgttttcactttttctattgcgtgctgctggatttctgctaccattctatataatggcttgggcagtgagtatcttgcagcgccgcagacagcgacaggaggcggctgccttagcagcaactgaggtggcattcattcttcagtctgggcaaggaaccggagtgcatttcaccattgcaccggattcgccgaccacaccgcagcacgagccacagccttgaaggagtggcttggtcggctgcagccgggcagtgctcgaatcgcccaaggctagaattcatcgacggctgctgctactgtcaagtgcagaaaccacagatacatttgttcgcgcgtgtgtgcgccagtgtactagtagtagagtgtaaaggcgcatttggtttggtgtctctctcccagtttgcgctccggatttcgcttgtgcgttttgcttgtcggcccgggagtaacgtggtgtgtatataaagcaacaacgctactttgattaagtgttctgtaattgttccaagatggaacgggcactctacaagtgcagtttcttctctgcccatctcgttgtctacttgctcatgtcatctgatgctagtgcaaaactttgttgagaaaaatggtattgtctgtgtctcaaaataagttaatatgatacaggatgcgacatattttagtattaaaaaaaaaaaaaaaaaaaactcgagactagttctctccctcgtgccgattcctgcagcccgg

SEQ ID NO: 57031 - DNA, 642 bp, Oryza sativa
  Clone ID: PAT_MRT4530_58883C.1
ggcgaattgggcccgacgtcgcatgctcccggcgcatggcggcgcgggaattcgattagaattcatgtctcggcctctcgtgatcgtcaccgccgtcatcggcatcgtcatcgtttcgtgtcgtagtttgtagatcgtcgttaattgtttcttcgttaatcgctgtctcttggtgctgtatcggcatttgttctatcatcagtatgatggtccattcacgaagttatcatgttttacgttgataaacggagagagagatagagtgagcacaaagagcaaaagagaagaagaagaagaagaggaagagtaaaagtaagagtaagagtaagagtaaaaataagagtgagcgtggaccaagtgtaagcttcagcgtggaccaaggtaagctttgagcgtggaccaagtgtaagcttcaatcgaattcccgcgccgcgaattcactagtgattagaattcatgtctcggcctctcgtgagcgtggaccaagtgtaagcttcaatcactagtgaattcgcggccgcctgcaggtcgaccatatgggagagctcccaacgcgtggatgcatagcttgagtattctatagtgtcacctaaatagcttggcgtaatcatggtcatagctgtttcctgtgtgaaattgtta

SEQ ID NO: 57032 - DNA, 520 bp, Oryza sativa
  Clone ID: PAT_MRT4530_58884C.1
gtgataaaaaggcagtgttgatcgggattaaatctccttgatttcattccacactcccctgctcaaacacctccagatccgaatgcgcttcttctctgatccactcaggtaggtgcccatcacattccagctcagcctgaagcaaggcaagttcgacagggatagctccctcaggacatcaatcgctggcagggcttctttttgagtctaccgcacattcagctcaaagaccttgatgaaagcgtcagatgcgactgcgagtaggtagtaggagcggccattcattagtgcccaggaaatgtcattaatggtcctggtttccttgatctttggcacactaattttctataggggcttggccaagttgttattgaaattaacaaaagccacagtgctgatcacctaaggcttcacctcctcttcctctatggcatctttgaatatcttcatcccattcagcactttcttgggtgatgattaaagatttttgcagcccactgcgaaaaagcctcatcttcct

SEQ ID NO: 57033 - DNA, 1392 bp, Oryza sativa
  Clone ID: PAT_MRT4530_58885C.1
atgagcaaccacgtctccacgagcgccataaccgtgagccatgtcgcgatgcatgcccaggtgacggggatcgaggagagggaaagcaagcacacactactgggaagagtgatctttgctagcggcagctggcggggccgcgcccggcggcgactggcggggcagcgcgtggcggcgccggcggggccgcaggccagcaacacggcggcagtgccgtcgtttgcgcgcaccatcgcaacggccggggcagcgtccgcccgttccgccgccgccgaccaccccggcgccggcggcctcgtcgccgaccgctggaccctgccgaccgctccctccgccggcggcagcagtggagcggctgcggtcggggtcgtcctgttctgggccatgcctggcaaggggaaggatgtcgtcgtcgtcgagcaccacggcggcaggaggaccgcttcggaggcagctggcggcggcgcgctgttccaggcgacggcggtgaacggcgtgccgttccgcggcaaggtcggcgtcctcggcgagccgattcccgtccaagtcaagataaagagctctcttttcaccgccaccaccgaccaccccggcgccggcggcctcgtcgccgaccgctggaccctgccgtccgctctctccgccggcggcagcaggggagcggctgcggtctgggtcgtccccttccgggccatgcctggcagcctcggcggcaggagcaggtggaccgcttcggaggtgcccggcggtctgctccaggcggcgaccttcgtcgtgtacagagccaagtccacgtcggcggtcgccggcgtgaaggacgcggccaagactcgatttctggatcgcgccggcgccgcgcttgccggcgagcggcttgtgcggctgctgctggggccgacgacatccccggagaggatggctgtcgttgctgccctgaaaagggtgcacaagctcttgtttggcgatggttctgtgcggctgatgcctcctcagcgtcccctcccgtcctccgccaccaaccgatttgccgaggagctgcgcgccgcgggagtgatggatgtcaatggcaaagtcaatcaaggtgaagctctgggagcagcagtgggtaagattgtggaggccttggaacaacacagtgcttatatgatgaagtaccaccagagagcaggcgccaaggacatggtgctccatacacttttcttcgtagcacagatcctgttgatgacttactccagcttatcagagttgcttgaagacgttacagggcacaagacatgggagagtttgtccatccaggttcagcagaagctccattgggcggggcggccatccgcctgcgaagataattttcgcaggcggacgttggctagtctgatccgcctgcgaaaatag

SEQ ID NO: 57034 - DNA, 793 bp, Oryza sativa
  unsure (1)..(793): unsure at all n locations
  Clone ID: PAT_MRT4530_58886C.1
cgcagcgactcactccccgactcccccatggcgccgccgacatggcgtccgtcccggcggcgctccggcgagcggcgacgctggcgcggtggtatccggcggcgatgttctcgtcggggatcgtccccgagaacaagcccatcctggtgcgtgacttcgtgaggtcggcgctgtacgaccccaaccatggctacttctccaagcggtcgggacccgtgggcgtgctcgactccagcatccgcttcaaccagctcgacggtaggagtgcgtatatgcagtaccttgataagttgtacaagaagcatgacatcgcttggttcactccagtggagctcttcaagccatggtatgcctatgcaatagctgcatcaatcctccgtacagcaaatctttcagtcccactgaagatttacgaaattggtggtggttctggcacatgtgcaaaatgcatacttgactacatgatgttaaatgctccaccgaaagtatacaatactatgaaatacatctcagtagaaattagttcctctctagctgagaagcaattggaaactgttggtgaggtgcgaagccatttgtcaaagttcatggnnttgagtgtcgtgacgcaactgacagagctggatggggccgcaaggatcctcaaccttgttggngtgttaatggcttgaggtacttgacaatctaccacatgaccttgtctattcgccagatcaggtctctccatggatgggagtatggatttgaaaagtaaatggcagttcacaaggcttctgagtatacaaaccattac

SEQ ID NO: 57035 - DNA, 359 bp, Oryza sativa
  unsure (1)..(359): unsure at all n locations
  Clone ID: PAT_MRT4530_58887C.1
gccgtccatgattagtttagtactgtncgtggcgtatcagnccagtgttgctncatatccgtacgtacggatcganttcacccttgcgttgcatnttcattcgattgacgattggctgtgaatttgtaattgggagtatacatgcatcgaaagaatttcaggaacaggttatgtacttatgggaagatcgttatatgtatatgtcttctgaatttctgatcgattggatttctctagctggctagctgaaatggtattgtagatcttggagctttcaagcaccaagcctgtctcatctttggatcaaattaatggctcattgctgttgttattgctgttttcaaaaaaaaaaaaaaaaa

SEQ ID NO: 57036 - DNA, 1693 bp, Oryza sativa
  Clone ID: PAT_MRT4530_58888C.1
atggcgccgccgcacatggcgtccgtcccggcggcgctccggcgagcggcgacgctggcgcggtggtatccggcggcgatgttctcgtcggggatcgtccccgagaacaagcccatcctggtgcgtgacttcgtgaggtcggcgctgtacgaccccaaccatggctacttctccaagcggtcgggacccgtgggcgtgctcgactccagcatccgcttcaaccagctcgacggtaatcctcctttctacctgcttcttggatcattctattgcttggaccggatttggatgtgggagtttggtaggagtgcgtatatgcagtaccttgataagttgtacaagaagcatgacatcgcttggttcactccagtggagctcttcaagccatggtatgcctatgcaatagctgcatcaatcctccgtacagcaaatctttcagtcccactgaagatttacgaaattggtggtggttctggcacatgtgcaaaatgcatacttgactacatgatgttaaatgctccaccgaaagtatacaatactatgaaatacatctcagtagaaattagttcctctctagctgagaagcaattggaaactgttggtgaggtgcgaagccatttgtcaaagttcatggttgagtgtcgtgacgcaactgacagagctggatggggccgcaaggatcctcaaccttgttgggtgttaatgcttgaggtacttgacaatctaccacatgaccttgtctattcgccagatcaggtctctccatggatggaagtatggattgaaaaagtaaatggcagttcacaaggctctgaggtatacaaaccattacaagacccactagtttcccgctgtgtcgagattactggcataaatgaagagaaagtgtctgtgagagacaaattatcacttgctgcaaaaggagttgtgtcaaaagtattcccaaagcctcggagagcttggttaccaactggatgcttgaaaatactagatactttacatcaagctttgccaagcatgtcccttatagcttcagatttcagctatcttcctgatgtcagtatacctggcgatagagctccattggtttcttcaaagaaggacgggaggactttggatcatcgcaactatcttgaggctcagggtgacgcagatattttcttcccaaccgatttctggcttttggagaagatcgaccatgactgctctggtttctcaaaacagcaaaagaaccccggtgcatttaaaccagttaagacgaggagaaccatcattcttgattctgctgccttcatggaagagtttggactgccgttgaagactaggaccaaagatggatataatccactccttgatgatttcaggaacaccaagttctatctaagcgttcctacccataacaagaaatagtcatcatatattatttcttgttatattttagtctattcgttggtcagatcatactatcccatgcggataaaaatcgactttcgcattcttttagagaacaggaaagtcttttagtcgaccgaagaatcgcaagtttgatttgtccatttctgtacttcacaagctgcatggctgaaaagtggattatagtgtactacacaggatgtcaggcctgcttctttgtgacacggcttataatttgagaacttcattttataaataattttgagtcttttctattgtt

SEQ ID NO: 57037 - DNA, 204 bp, Oryza sativa
  Clone ID: PAT_MRT4530_58889C.1
atggagaaggctgccccaagcgccacgtggccctcccccgaggggggatcgggcccgaggtgcccacctacccgcatttatgacgacccgagcggtcgcgccacgccgcatgcggcgtgcagtgtactcaaccggtctgtgaccggtcgaatgaccgatgggactggctaccggagtcggtcctcccgctctggtcaaagctag

SEQ ID NO: 57038 - DNA, 457 bp, Oryza sativa
  Clone ID: PAT_MRT4530_5888C.1
cgtagtcgtgataccaaacatcaacgatacggctatagcacttcacctttgggtgcccacaaaaggatgggttttttggggaaagattactaggacgggattctgggatatcatcacctgtcgtctacctctaacaaatccgtgggatacacaaaaaacaaaaagaagtttctctgaaaccggagtagagtgcaccgacagctccggtactcctcaagaattcctcctagaaatctacactcgccgaggtagaagtcgaagagagcgccaaacttccgggcactcctccagagattccctaactctctacctattttctaatgtacaaaagatacaatagaatctcttataattcagctcaaagttgtgtgtattggaatgagagcctctcatcttttataggctccaaatgacggttatgaccatgggaaatgaccaaaataccctccaaccatca

SEQ ID NO: 57039 - DNA, 653 bp, Oryza sativa
  Clone ID: PAT_MRT4530_58890C.1
tgagtgactattacttttgctcaacctgctttgcttgctatgtctggacttagtctcgaactcttggcttttgcttataccagggatgaatttcctgtacttgacatcccttagcatatcttgatcttcttgggtaagaagaggtgatgaattgctgctggctttgtttggagataatgtgattgtatggcccctttgtgtaggcgatcgaacaggagatttgatgggagaccgctcgccattagcggatttagatcgactaataagatgatgaagccatgcaacaagctcgaggatatgtgtttcggtcttttctttgtcagcatggtacagtgtctcaattcgggtcaggtccatttgtcctgttggtttgcagttcacttctgaccctgtatttgcccactctccaacccaaccaaaaccatggtgagccttggtggtgttatttgcaattgggacaagccaccgcaaagtcttctccatttcagccttgatttgagcagcagtaacctcttcattgaccacaaatgaattcaccttagaacgcaaggacgattttacagtcggtggcaaactttggtataatgcatctcttgtgtttggaggaatagaactagatcgagaaacctgccaattaacgccccacgcgtccg

SEQ ID NO: 57040 - DNA, 440 bp, Oryza sativa
  unsure (1)..(440): unsure at all n locations
  Clone ID: PAT_MRT4530_58891C.1
gctcagcagncacggggcgggggggggagggaccaacaacaaatccggcaagaactcatcggcgaccaccaccatcggcagcggcggcggcggcgacggcgacgacactacggtggtgggcgacgtgcttggagcttttttctcgactgtgtacgggatatctaagcaagggaggggatcgtcnccggcnaagaagagctcgtccccgtcaccaaggaagaagacaagggcaagctcgagtgagcgagcgagcttgcttcactgtagtggcaagctccccgactttgtcacgtactgcgtactttagttgattaggagtttaagtatatagtgtttgcgaataatgtttcctgtatttagtgttaatcacggatccacggctgtgtatatatatgttacaatccgcagatgtgtgaaataaacttgataattagtctatc

SEQ ID NO: 57041 - DNA, 495 bp, Oryza sativa
  Clone ID: PAT_MRT4530_58892C.1
atggcggccgcggcggcggcggcggtcgagcagcatggccagcaggaggcgtgccctaactccgacggaccacctcccggagatctactacgacgacgagccggaggcgctgctggtgcacgtcaacggcatcctcaaggccacctgggcaaatcctgggccaagttccgcgtcgagtacggcagcaacggcttcgtcgaggtggagtacgacgtcgacgagttcgaggagacgcagcggctgcaggaggagcggaggctgtggcgggcacatgtctgggagaaaatcttcgccgatgatccaccggaggaaggcgagttcgccgagtatgtcagcgtctataatcaagagacgagggcgttcgaggtgagacccaaggaattggaggaaggaaccaggacgatcgctgtgttcgacaaggtgaagatgaagcttgcatgcctgcaggtcgactctagaggatccccgggtaccgagctcgaattcgccctatag

SEQ ID NO: 57042 - DNA, 672 bp, Oryza sativa
  unsure (1)..(672): unsure at all n locations
  Clone ID: PAT_MRT4530_58893C.1
gaactcacgaatagtccacaagctagaggtgacctcaagagaaaagcttgcaggaaggctgacccaagaatttggataacgctcataggatagccacgatgatactatgtgcaaatcggtgggatcccacctaaatttgccgataaccacagcgagaccggaatttggcaagcctaatggcaggcacgtaggaatatacatagcaaactttctaaactaacaataccggaattgggtccaaagatggaggcaaccaaattgccaatctatccaagcaacacatagggatcctatgagactgccctcctcccacaatgtcccaatccaaaaatgtgtgtgtgccctgctgtgtgtgtgcccggcctgaaaagttgtgagtgccagcccataggtgaccatgaaactaggcatnanagggctgtgtgcccttgcataaactgtggctgtccacgtggcctaccactacctactaccctcgctagataccaccttgattgtggagagcctgtggttggctggggtgttggcaacctgctgctgtgtgnaaccctgtgntgatccangatgcnggttntttttccctagtgggtttgtcaaaaaacttgtaaagatagngctactcccaatccgagatgcagtttctccaaacataatttttggtttgnaaaaaaa

SEQ ID NO: 57043 - DNA, 123 bp, Oryza sativa
  Clone ID: PAT_MRT4530_58894C.1
atgaagaaggagaaattgtcatcttgcctcctaagtattgaagtcttcaatgtggtctccaagtgtaataccatgaagaaggagaagttagttgccggtggtgcatactcgcttggtagatga

SEQ ID NO: 57044 - DNA, 2502 bp, Oryza sativa
  Clone ID: PAT_MRT4530_58895C.1
ttactgatgttgtgtctcaacagtgtgtggtgttgcaaccattgcgtgtaggttctgaatcccagctgaaacaatcaagtacttttcctcattaacacatgcatctgaagcaaggcttgtcattgccctgcataatgcgttgaatctcagcttgcttgttgccgggactccaattgatggtgctggaccattgtactcatcacgtatttgcaatgtcgcttgctctgaccaccatttcagcaagtacttacttggaatctcatggatgttaaggacagccatcaccctcaagatgtgtgagcaaagaagtccatctctttcaaatttgtggcacgagcaggagtaggttgagtgtgctgcatcaactgtgaccctatattttttacctgttctttctatgtcacttggcataacattatatattatgtcggggacttcttgtgttttttctgcatccagccttgtagtgtaaaactgcgatgcttgtttctcaatcagtgaccttgaatacattctaggttctgttgtctctactctgtagccctccctgtcctctctgtcaagccttgtctcaattatatgctcatattgtttgacaaagatccacactgaatcttgtgggtgtacaaataatttgaatagtccatttagaccttctgatctccctgtcgtcccagtaaaagggaaaaaacttgtgttaaagtataccggagcccacatttcttttgtttcccacaagttattcaaagtttggtttccatggaggtcatattcatctaccattttttgccaatctgatagaaactgatctattgtttcagagtcatatatgcatctatacagagcttcacggaagcctttctttgaagtatacacgggcaggagttgctgatctgcttttgttgtcacgtgccataagcaacatctatgaattgtaccggggaacacctttttaatcgctgctctcattgctttatctcggactgtcatcactgaacctaccttctgtccattcattgcttgcatccatgtttcaaagacccatatgaatgtttcagttgtttcatcacaaatcaaagcacatccaagcaatattgtttgcaggtggttattaattccaacaataggtgcaaatggcatgttgtaacggttagtcataaaggttgtgtcaaagaagacacagtctttatagctttgatacagtttccgtgttctgccatccacccaaaacaacgccttcaacacgttgtcttcatcatattggaaataatcaatagtcattgcaacatctttgagtgaaacttgttgtctcatgtctgaaggctgaactacaatatttccagcatatatacagttttgttcttttgtttggatatgcatcggatgcttcaagattatcataatcatatcccataggaaattcaagaggtagtattgttgttgtagcatggtacctgcactcacattacagttacacttttacttcaaaccttagatgtgttcatgttccctgttgttctctaaattactcatgtggtttttataggataacatgttttcatgaccaaaagccaaaagagctttgcaatcatactttgcatcctttggtcgtttcctcttcccttccaccagcaagggagccttctttttgttaccttcaagcaggggcggattttccttgttctcttcagaaatgaagctactgccaccagcactatcttttgtggtattttctggcttacgtgcatgaacacactcaaattctctccttatcaaatttcttcgatgctttttttcccctgatgatgcctggctgtttctagatgatgcaattcttgttccaaatcctagcttataagcataagcgttgtaaacatttcttgcctcttccactatatcgaactccattccaatgtatggaacaattggtggggaacaaacaacatccttttctttttcatcattttcagatgcatcttcatccaattgttcatcaatttcaacagtcacagcagccacatctgtgttgtcaacactttccacatccacaaccaagtcagtttcatgcccagaggatttggataatagcacatcaaggaagccaccagatgagcttggtgcttggacatcaatcaaattcgttgcattatgcattggggttgttcctctgtttgcactagatgagctcggcgaaaaatccctctcaacttggtgtatcagatgagccatggcgtcggtggcgaagttgcagggcggtgactgcgtgtggtgtggcggcacgtcggcgttgttgcaggcttcgccggcgcgaggaggataggggcgcgagggatagggtcgccggcgctggagagaatcgccggtggcagcgcagcgccagtcgctccgcgaagatctcccctcgtgcttgccatcttcaccaacacctacacatctcctgaagcgtgctaatgtggatacctttatagtgttcagatcgttgaccccgcttttggttgccat

SEQ ID NO: 57045 - DNA, 1236 bp, Oryza sativa
  Clone ID: PAT_MRT4530_58896C.1
atggcggcggcgactccggcgaactccggggagggcggtggcttgatgaggttcactgaggcgagaggagtcccagggtggcgacggccaaagctagggcgccctggagcggcggcgcgccatgcggctggcggcggccgaacagagcagcgacgccgggaggcggtgccggcaacgttccagcgatggattggatgggtaaagagaggggaatgggagtactcggcatggagaatccgattttaccttcgatttcagaggattgacgatctattcaaattatttgtacacccgcaagattcggtgtggatctttgtcaaaaaatatgagcacataattgagacaaggcttgacagagaggacagggagggctacagagcagagacaacagaacctagaatgtattcaaggtcactgattgagaaacaagcatcgcagttttacactacaagtatgtttgcagacaaattccagtatgaaatatatgaagcaacagggctggatgcagaaaaaacacaagaagtacccaacatcatgtataatgttatgccaagtgacagagaaagaacaggtaaaaaatatatggtcacatttgatgcaacacactcaacatactcctgctcgtgccacaaatttgaaagagatggacttctttgctcacacatcttgagggtgatggctgtccttaacatccatgagataccgagtaagtacttgctgaaacggtggtcagagcaagcgacattgcaaaaatgtgatgagtacaatggtccagcaccatcaattggagtcctggcaacaagcaagctaaggttcaacgcgttatgcagggcgacgacaagccttgcttcagatgcatgtattaatgaggaaaaatacttgattgtttcggctgggattcagaacctacaaacaatggttgcaacaccacacactgttgagacacaacatcagcaaggtattttgcctagtcaacaagccccatcaagttcagctaagaatccaccaacaaagaaaagaacagggaggccagcagaaaaaactcacaggatgaagccaataggggaacaaataactgaaagcagcaagaagaggaggacaaaaaagaagagctcatgctcatattgctttgatgagacacacaatgtttcaatatgccagtatctcaagatagcgaacatgcgagacgctctactaaaccaaaaaatggtgcaagagacggagttgacaatctga

SEQ ID NO: 57046 - DNA, 1281 bp, Oryza sativa
  Clone ID: PAT_MRT4530_58897C.1
acaataatccttaacttgctgaaacataactgtacaaactaatgaaacaaaacaaaatgttacagatcgatgtccaagcaccaagctcatctggtggcttccttgatgtgctattatccgaatccactgggcatgaaactgacttggtgagttgtccttggatttgaaacattgcaaatgtaggggggaaatattttgttttgaatgtggctgctgtgactgttgaaattgatgaacaattggatgaagatgcatctgaaaatgatgaagaagaaaaggatgttgtttattccccaccaattgttccatacattggaatggagtttgatacagtggaagaggcaagaaatgtttacaacgcttatgcttataagctaggatttggaacaagaattgcatcatctagaaacagccaggcatcatcggggggaaaaagcatcgaagaaatgtaaagtatctgaaaatggagacaacaagtggagagtcattgctttccaaccagaacacacgcatccgatggtgaagcgccttggaagaaggagatattacagatctcacaggcatatctcaaatgaagactatgaattttctaaagactttgcatgatcgaaacattgcaacatcgcagattttggcgttgttaggagatttgcacggtggtgtgaggaatctaactttcactgctaaagatgtctcaaatttgaggacaaaattgagacaacaagtttcactcaaagatgttgcaatgactattgattatttccaaaaaaaaaaaactcaagcagataacccctccttcttctatgctgcaagatatgatgaggacaacgtgttgaaggcgctgttttgggtggatggcagaacacggaaactgtatcaaagctataaagactgtgtcttctttgacacaaccttaatgactaaccgttacaacatgccatttgcacccattgttggaactaataaccacctgcaaacaatattgcttggatgtgctttgatttgtgatgaaacaactgaaacattcatatgggtctataaaacatggatgcgagcaatgaatggacagaagccaggttcagtgatgacagaccgagataaagcaatgagagcagcgattaaaaaggtgttccccggtacaattcatagatgttgcttatggcacgtgacaacagaagcagatcagcagctcctgcccgtgtatacttcaaagaaaggcttccatgaaatatatagcaaggtgaaacaataaaaaacttacaacaagcaaggggaggcact

SEQ ID NO: 57047 - DNA, 404 bp, Oryza sativa
  Clone ID: PAT_MRT4530_58898C.1
tttttttttttttttttttttttttttttttttttttttttttttttttttttttttttttttttaaaaaaaatttaaatttaaccccaaaattaaaaaaaaatttaaaaacggttaaaggggtaacccataccattctcaacccttgccagggattgaaagcgggggggagctggggggttgggggagcactgaaagtggaaaaaaaagggaaacgcccccaaaggggaaccaaaacgtaaaggaatccgaaaggggggaaaaattggcgggggcaccaaaagggaaggggaacccgaacctaacacgcgaaaaaggcaaaaatgccaaaaaggaattggcggccccggggctttgaagggaaaggggcccccgcggctgccgggggaaagacactgacgccc

SEQ ID NO: 57048 - DNA, 183 bp, Oryza sativa
  Clone ID: PAT_MRT4530_58899C.1
atggggaaggcgcggcgcgcggcaatgccatgctccgacgccgttgagatcggggtggggtttttcgtgggcgatggcgatggcttcatcagcctcgacgagttcgccgccctcaacgccaccgccagcggcgacgttgccgccgtcgtgacggttggagctgatgcagcgcgaatcctgtga

SEQ ID NO: 57049 - DNA, 4089 bp, Oryza sativa
  Clone ID: PAT_MRT4530_5889C.1
atgagggtttacacacatatgccgcgttacaagcctgagtacctgtttggtgttgagggttttgtccaggagttgcgtacgatgtcctttgtcattggatttgggactgcccctttttatgcccagattcctcatgatcgtcatgaagagaagtgccgagtcaaagtcaccttgaacagtaatagtgaagatatcccctcagtgatgttcgaagctggaggaagaaactacatccatgcatgtcaggaggtggcaaggatcgccataggagagctccgtgatcgctacagtgatcaattggccgacactgagtatcgctatcatcctcgccaaccccagggaagtgaccgtggcagttaccttgagactgaaggaattgagaatgatgctaccacaaagcatttggttgagatgctgtgggctatggatgaaagtcgtgcagagactgtgttagcggctcaagatcgtgaagaccggaatcgtggaaagatttgcaagttagaagacaaggtggatcgtttggagaaggaattagccgcattgaagggagaagcaccgccgcagaaggccaggattcgtcttaccgcaaggaagagagctctatttgtccctcgctatcaactggcgccaaagaataagttagcagaatttcttcgtgtgaggccgcctgttttctctagtaccactaatcctgttgaagctagtgattggctgcatgccatagagaagaagttggatttacttcagtgtactgatcaggagaaggtctcatttgcatcacatcagttgcatggccctgcctctgaatggtgggatcacttccgccttaacaggactactgctgaacctatcacttggcttgaattcaccgctgctttccggaagacgcatataccatcaggagtagtgtctctcaagaagaaggagttcaggtcgcttactcagggatctcgctctgttacggagtatctgcacgagttcaatcgtcttgctcgttatgctccggaagatgtgcgcaatgatgaagagcgccaggagaagtttttgggaggacttaatgatgagctttcttacccactcatggttggagattatcctgatttccagaaattagtggataaggctattcgtcaggaggacaagtacaatcgcatggagcagaagaaacgtcggattgctcaattcaagacacaacagggaaataatcagaagtcgcttcttactttaggaccccagcccatgccacagggaggttcttcgtctgttgttcgtccgcagcgtcagttcttcaacaacaatgctggcaacaacatcagtaatcaagcactctctttgcaacgtagcccctctgtcagaatagaaattcaaggagtaccatttctggccaatcttatcttgttagaatccaaagaccttgatgtcatcctagggatggactggttagccagacataaaggtgtgatagactgtgccaacaaaaaagtaactctcaccagctatgatggtcgagttgtaactgttcatgcattgtcatctgagtctttaaggtcaagactgaaccagataactttggaagagattcctatagtccgggagtatcctgatgtgttcccagatgatttacctggtatgccgcctaaaagggatatagagttcagaatagatttggtacctggaacaactccgatccataagagaccttatcgaatggcagccaatgagttggcagaagttaagaggcaagtagatgatttgctacagaaaggatacatcagaccgagttcatcaccatggggagctccggttatttttgtggaaaagaaagaccatacccagagaatgtgtgtggactatcgtgcactaaatgatgtgactatcaagaataagtatccactacccaggattgatgatttgtttgatcagcttaaaggtgccactgttttctccaagatagatcttcgatcagggtatcatcaggtgagaatcaaagaggaagatatacctaagacagcttttaccactaggtatgggttgttcgaatgtactgttatgtcttttggacttaccaatgcccctgctttcttcatgaacttgatgaataaggtgtttatggaatacctagacaagttcgtggtggtctttatagatgatattcttatctactctcgaaccaaagaagagcatcaggaacatcttcgccttgcattggagaagctacgagaacatcaactgtatgctaagtttagcaagtgtgaattttggttgtctgaagtgaaattccttggtcacgtcatctcagccggaggagttgccgtcgatcctagtaacgtggaatccgtaaccaattggaagcaaccaaagacagtttcagagattcgcagtttcctaggcctcgcaggatattaccggaggtttatagagaatttttccaagattgctaagcccatgacacgactgcttcagaaagatgtaaagtacaagtggtcggaagaatgtgagcggagttttcaagagttgaaaagtcacttattatcagctcctattttgattttgcctgatccaaagaagggttttcaagtgtattgcgatgcgtccaaacttgggttaggttgtgttctgatgcaagatgggaaggtggttgcctatgcctctcgacagttacgtccgcatgagaagaactaccctactcatgatattgagttagctgcagtcgttcatgcattgaagatttggcgtcattatcttttcggtactcgtacagaagtgtacaccgatcacaacagttcaaaaggtttcgttgcagctttagaagcgaagctcactctaattgatcaagttagagaagctcaaattaatgatccagatattcaagagatcaagaagaatatgagaagaggaaaagctatcggtttcttggaggatgagcaaggaactcgagtcaaggcagaacatcagaaacccgccggtttgttgcagcctttgaagattcctgaatggaaatgggaagaaataggtatggattttatgactggtttacccagaacgtcatcaggccatgattctatttgggtgatagtcgacagacttaccaaagtggctcattttattccggtaaagacaacctattccggaagtcgtttggcggaattgtatatggcaaggattgtgtgtttgcatggcgtccctaagaagatagtgtctgatcgaggcagtaagtttacttcaaatttttggaagaaacttcaggaagagatgggttctaagctgaactttagtactgcttatcatccgcagacagacggacaaaccgaaagggtgaatcagattttggaagacatgttgagagcttgtgctttagatttcggtggaagttgggataagaatctaccttatgcagaattttcgtacaacaacagttatcaagctagtttacagatggctccttacgaagcactgtatggtcggaagtgccgcactccgcttttgtgggatcaaacgggagaacgtcaggttttcgggacggatatcctaagggaagcagaagaaaaggtaaaggtcattcaagaaagattgcgagtggctcagtctcgacataagagttatgccgacaatcgccgtagagatttgagttttgaagaaggagactatgtgtatcttcgtgtcacgcctcttcgaggagttcatcgttttcacaccaagggaaaattggcaccgtgttttgtgggaccttataagattgtcagtagaagaggagaggttgcttatcagttagaattacctcaatctttggcaggagtccataatgtgttccatgtgtcgcaattgaaaaagtgtttaagggtacctaccgaagaagctaatcttgaacagatagaagtccaagaggatctgacctatgttgagaaaccaatccgtatcttggaaacaagtgagagaagaaccaggaatcgagttatccgtttttgcaaagtccagtggagtaatcactcggaagaagagtcaacttgggaacgagaagatgaattgaagtcagctcatccgcacctgttcgccagttcttccgaatctcgaggacgagattctgtttaa

SEQ ID NO: 57050 - DNA, 351 bp, Oryza sativa
  Clone ID: PAT_MRT4530_588C.1
ccgccgggcccttaccttcgtcctccgctccgcctcccgccttcgcgccgcctccccttccccgtgcccgcgccgtgcgccgttccacccccaccgtcggccgttccccgtgggctttctcctgaaccgcgccgccgccgtctacgcgtcgtccgccgcggcgcaggcggtccccgcgcctccccccgcgtcgggcaaggccaccgggggcggcaagatcaccgatgagttcacgggcgctggcgccgtcgggcatgtgtgccaggtgattggcgccgtcctggacgtgcggttcgacgagggcctgcccccgatcctgaccgcgctggaggtgttagaccacaacatccg

SEQ ID NO: 57051 - DNA, 164 bp, Oryza sativa
  Clone ID: PAT_MRT4530_58900C.1
tataattccaacacacccggccaggactgtatcggggactgtaaaagtacagggatgcttcggatccggatacgtgcaaagcgacagacacgaatgcaccgtctcatatagtgtacagtgactgctatccgctgacagtggggcccagatacacgcagtgctat

SEQ ID NO: 57052 - DNA, 1206 bp, Oryza sativa
  Clone ID: PAT_MRT4530_58901C.1
atggatgtgtctccggcgccgccatgggcggagctcccggacgccgtcctgctcggcatcgtccgccgcatcccatgcgcgttcgaccgcgcccacgtgggagaaatctgccgctcatggcgcaggacgctgctacagatcccgccaccgcggccgctcccggggatcctcctcctgacaccccacgggcctaccctgtccttcgtcgtcgccggcgacgcctggtgcacccaccccgccttcgtccccgaggccttccgccgcgcgcgctacttcggctcgtacgacgactcgtggctcttcctcgccgttggccaagacaacggccacgcgctcttcaacctcaccgactcccaggaggaggaactgcccaactggggcaccttccaactccacgaccgcgagcttggggccgagattctcctcgtcgccgccaccctctcgtcgagtccaaatgtacacggatccgtcgccggcggcatcctcacggctgaccttccgcccgccaactccatggagcacatcgcgttctggcgcacgggttctgatgtgatgtcaaaggccatcagggcaagcggggttgggccattggaggacgtcacataccacgacgaggccttccatttcctcaccctggacgacatcattgtcgtgtgcagagcgtcgatggcagagccagggtcaccaggcaagatcgtggtcgtggatgaggtgcatgtgagtatcgagctgggcaacatcgcgccacgcgatgaactcggttatcgcgacctgcgcatcgtagccagctacctcgtggagtcccgcaatgacctgctcatggtcgagaagctagctcccaacttgctgtcgccggcatcggcgttccgggtgttccagatgatcaaggagaggttacacgacggccaggttcgttactcatgggaggagctgacgaccaagctggatggccggatgctgttcgtcggacaaggttgctccagatcatatgaggcggctaactaccccggtttggacgcaggcgtctacttcttggatgatcggagcacccgccacgaccccaagattccatttcaagaagcccgcgcacggcggtatctctgcagcgacaacgggaaatggtcaggaacacctccccagatcaagctctgcgttccggatccaggcccatcgaaccactctcctcccgtttggtttttcccttga

SEQ ID NO: 57053 - DNA, 315 bp, Oryza sativa
  Clone ID: PAT_MRT4530_58902C.1
ttgaaagctattgatggaggcacagtacaagattcatatgagattgcatttgatgcatcacacacagaatgctgtcagtgggcagtcaggttctgaacatttggacacaagcagttcagcatgcacagcactgatgaagctagcaagcactagcaacacaaagacacaatatatttcagcatctcttacaataaacccatgcagttttcatgacatcactgggtgagagtcatgaacaagtgtaactctagattgatcaaatttactgattatcatttgaaaatatttgccatggaaaaaaaaaaaaaaaaaaaa

SEQ ID NO: 57054 - DNA, 991 bp, Oryza sativa
  Clone ID: PAT_MRT4530_58903C.1
acggcacgagggtataagggtaggcggcgccgcggcggaggggggctcagcgcgcgggggccggtgaaaccttcccggcggcgcgcgagtctcgcggggggaggagagcgatgtcgaagcggcagggtcccccgaagcatcagaaccgctacgcgtggaagcccaacctcgggcagaagatcaacgagaccgagcccggcggcaggttccgtcctttgtcggagatcaccggcgtctgccagcgctgcaaggaccaaatcgactggaagagaagatacgggaagtacaagcctatcgttgagccggcaaaatgtcagaagtgtgggaaacggaacgtccgacaggcgtatcacaacgtctgcacggcttgctccaaggaccttgggatttgcgcgaagtgctgcacttgtgttaaagcgcttgtcggaagggatcttagtgaacaggagagtgagcgcaaggaactagaggaggccataagaggtgctagggagagggagaggcgcacacttcttcgccttatgaacaaaggtggcggggagagcggaccgtcggttccaaagattgctgacagaagtcgtgaaggggacattttccctgctgcatcccttgacgaatatgctgaacaagctagacagcaagatgattcagatgaagaagaggccagggattttgtagaagattaattttagaactcagaaaccttttcttttgcaaaaggatttatatagccttatgtggtgatttacattacatggtgggtaatcccacccactgcggaaaacaagtgtattagttttggcagatatatttccgtctatcagatgtttatcagtgtgtgctcccattccgtctgtgcttgttcaaactgaagaattggaaagtagcatatattgcggtttttccggtttaaaaaaaaaaaaaaaaaaaaaaaaaaaaaaaaaaaaaaaaaaaaaaaaaaaaaaaaaaaaaaaaaaaaaaaaaaaaaaaa

SEQ ID NO: 57055 - DNA, 420 bp, Oryza sativa
  Clone ID: PAT_MRT4530_58904C.1
tagtggatcccccgggctgcaggctgagacagctgaattacctcaaattggttcaggacgacattaggggtttcatcataaaaaaagggcacttcccagaacttattgacctatgccttgtagtgggaaacccaaatctgcctacaatcgaagaaggagcttcgccgaaacttgtttcacttcagctgctctgtcaagctctagatggtctctctggcatcaacatcggatggctcaaacgacttgaggaagttgcccttgattgcaaggtcaatccagacacaatagagacttgggaaaatgaagccaagaagcatccaaagaggccaaaggttttgttcctagaaaggatcgatccaaatgacgaggattccatggtgaaatacgtcgcgtccgaaagaccagcagctaggacgggat

SEQ ID NO: 57056 - DNA, 279 bp, Oryza sativa
  Clone ID: PAT_MRT4530_58905C.1
atgagggtcatccagcaagaagcctttgtggtggctggactgcgaggcagcaacggcgaagcagaggtggtgccacatgaggcaaaggccgccggagaggaggcggtggccaagtgcatggtggaggctagcagcgaagaggcaacgtcacctgagatggaggggcccctaggagacgttatagtgcgactgtgcgaggtggaagccaccgagatagaaggcgctggagtgttgccttgtgttatcggcggaagagccagtttacatgtttgggcctga

SEQ ID NO: 57057 - DNA, 390 bp, Oryza sativa
  Clone ID: PAT_MRT4530_58906C.1
atgccgaggctcgcgcacaacaacatcaagagcacgaacatactgctcggcaaagccggcaaggcatggctcgcggactacggcctggcgcgggtggtctcgtccctagcggccgccgccgcgagctcggcgtggtaccgcgcccccgaggcacccccggtgccacggccgtgggcgtcgcagaagggcgacgtgtacgcgttcggcgtggtgctctcgtgcccgggcagcgagcttcccaacggcgacgccgccgtgcccaccagctgcggccacggttgcgtcatcccccttggcgaaaccagcgggcacagcaacagcagcgaggaaaagatgagccgggcagctgtggtagcaattgtggccggggatttcgccggtacaggttga

SEQ ID NO: 57058 - DNA, 1323 bp, Oryza sativa
  Clone ID: PAT_MRT4530_58907C.1
atggtctcctctacttccggaggactctcgccgccggcggttgtgctggccgtggcggttgtgctgtcggcggcggcgtcacgggcgctggcggcgccgtgctacccgcgcgtgttctgcttcggggactcgcttacagacaccggcaacatcgctttcctctacggcaacgactcccgccggccctcgctgtggccaccctacggcgagaccttcttccaccgcgccaccggccgctcctccaacggccgcctcatcatcgacttcatcgctgaagcgatggggctgccgttcgtgcggccgtactggggcgggcagaccgcggggaacttcgccagcggggccaacttcgcggtgggcggcgccacggcgctcagcccggacttcttccgggagagaggggtgcccatggacgacgacaccgtgcacctcgacatggagatggagtggttccgtgatctgctcggcatgctctgcaccggcggcgacatggacggttgcaagggcatgatgaatcaatctcttttcttggttggagaaatcggaggcaatgattacaaccttcctcttatgagcggcatgtccattgaaaagattcgcaacttcactcctagtgtcattgccaaaatttcttccataatcaccttgagttcgcaggaattgattggacttggggccaagacactagttgttcccggtaacatcccaattggatgtattccaatgtacctcatgcaatttgagagtgataagaaggaagattatgagccaaagataggttgccttaggtggatgaatgagttctcgcaataccacaacaaacttcttgtagatgaattggaaaacttgcgcaagcttcatcttgatgtgaccatcatctatgccgattactatggagctgccatggaagttttcctttcccctgaacgatttggaattgaggatcctttggtcgcttgctgtggtggaagaggaccttatggtgtatctgcatctgtacgctgtggatatggcgaatacaaagtgtgtgatgacccagcaaaatatgcatcgtgggatggcttccatccatcagaagctgcatacaagggcattgcaattggcctgctacagggttcatacactcaacctccaattgttagcatcactaattcttgtccgcagataattggccttggttcctctgttgaacacaaggccatgtacgacttgtaattctgtaattatattttgttattattatacacaatatgtgattaaaatatgtaaaggaatattgtggtattgttgtctcattatagaaccacagtactgttctacatc

SEQ ID NO: 57059 - DNA, 1720 bp, Oryza sativa
  Clone ID: PAT_MRT4530_58908C.1
ctagtggatccccgggctcctcacatcgccagctcgtccgcttgccccgcaccgcaaccgcggcgcggaggaggagagctctcgcgccgcgcgtgcgcgcgcgcgtgcgggcgtgcgcgggcgatcgaatccgatcgccatgaccggcgccgacgagccgtccatcacccgctggaccttcgaggacttcgaggtctactacgaggtgcgcctcggcatccgccgcgagcccgggggagatgaagacggcgacggcgacggcggcggaggtcgcggctacgcgccgcttggatccggctccgcgggcagcacccgcccctccgcggcgcacgccaacggcggcgccgacctggccgtcttcgagcagttcgagcggctggagaggaaggtggagctgcggaatggagcaattgaagctgggcctccgcagaaatccctacttccttcttttgaatctgcagaaatgcgcaatttagctgagacattgttgagggatatcattcgtgggagtccagatgtcaaatgggaaagcattaaaggtttggagaatgcaaagcgtcttctgaaagaagcagttgtgatgcctataaaataccccaagtacttcaaaggtctgctatcaccttggaaaggtatattgctttttggtccaccaggaacaggaaagacaatgctagcaaaagctgtggctactgagtgcaaaacaaccttcttcaatatttcagcctcatcaattgtcagtaaatggcgtggtgattcggagaaactagtgaaagtcttatttgagcttgcaaggcatcatgcaccatccaccatttttctcgatgagattgatgctattattagccaacgtggtgaagctcgtagtgaacatgaagccagtcggcgattgaagactgagctattaatacagatggatgggttaactaagacagatgatctcgtttttgttctagccgccacaaatttgccatgggaactggatgcagcaatgttgcgccgtttggagaaacagcaagaagctagacatgccatgtttgaagagctcttgccatctgttcctggcacaatgaatatcccatatgatgttcttgtggagaaaactgaaggatattcaggctctgatatacgccttgtgtgcaaggaggcggcaatgcaaccccttagaaggttaatgtcggttcttgaaggaaggcaagaagaagtgcctgaggatgagttgcctgaagttggtccagtaacgacagaagacattgagcttgcactaaggaatacacggccatctgctcatcttcatgtacatagatacgaaaaattcaatcaagactatggcagtcatgtcctcagctaaaggtgagttgcaaaagcaaaggttatttgcacaacatagattgctgaatttcctccttgaagcttgaactgttccctagtattgtggaaatcctcctgacggaatcttgccgataagacttttcatttgcacctagtatggttgatagaatgctgaattaccgctgatgtatttacaactaatgagcattctctttacacaatatttgttcctgtaccatgtatattatcatttgtttgacgaataataagctatttgggtaatccttgccctttcggaataagaaagaaacattgtacatttgtactgggtaccaaaaaaaaaaaaaaaaagaaacaggtttaaaagaatccaggctaaggaaggggg

SEQ ID NO: 57060 - DNA, 591 bp, Oryza sativa
  Clone ID: PAT_MRT4530_58909C.1
atgggggcagggatcggaattaacccacgggtgatccggaggggccccagatgtgagaggacgggcgtggaccgagtccacaaaaagtgggccccacgaatcagcagctcaaacggagttgatccaccgtgtactgagaccacaaggtggtccatgggactgccatgcgggcccgccacgtcgatggttagggcgaccacaggcatgcgcaggcacaacagattggcagctagcgccagcctgatggtcaccacaggcgaccactcgacacggcggcggcataagaggcggcggaagggacggggaaaagggaaggggcctcaccgagcacccaaacaaggaaggctgcggtgcgcggggctcggcgacggggagatggcggctactccgcttgtggtagcggtgaggacgaagattcggggctcccggcgtagacagaggggcagccgcggtgcatcggtccctggggaacaatggagaatgggctgggcggacttggtgagaagggatggcgagaggccaggaagaatgggtgaactcatccgacgtggtgtcaaagggattccggtgacgaggagcttcgaggaatag

SEQ ID NO: 57061 - DNA, 344 bp, Oryza sativa
  Clone ID: PAT_MRT4530_5890C.1
gtataccctttacctttggatatacgtcatgcatcgatatggtatatctgcgcgtatacggacgttctttgtacacactaaggaaattcatcatggagtccacatatggaaagattcctactcggatagaactgggtcgttattgtatcgtgcagggtccgatgtctccgagtcctacttggaggccaactgacctgtggtataaaaaggacccccaggaggacctaaggcatcgaatcttaccgccaacacatctaccatagcctacgaagccgaagcctataggagccaagtcgccgggtgatctagtcgaaccaactcgactacgatctcgtcggtatcat

SEQ ID NO: 57062 - DNA, 525 bp, Oryza sativa
  unsure (1)..(525): unsure at all n locations
  Clone ID: PAT_MRT4530_58910C.1
gtcanaaaacncccaacgcanttcttcaattcaaaaaaantgcccaaacaaaccangggtntnntcatnncancaaanttttttaacacccnacntcaaaaaaacnctaatgcaataaaaaaacttgaagcncggatnactaacaantttcncgcttantcaaccnccncnatnttggggccaacaccgtctgccgcctgccgggggaaacatcttcctcgtccatgccgccggncatttncgcnccagcnccctgntncatcttgggnaaananggggttgcaaaagcccnccaccccttcntnttgtcantcgaacncnnccccccnccgnnaactngttncccnccccccnctngatngctnatcaanggctncctccaatttnctcnttttccntgcnnggaantccaaggcaaanttcccccccttaaangnntttnccntttttttagngttntcccccaccntttnttnggaacccccttntcttttnttcccccccccgaatttttttcccngcccc

SEQ ID NO: 57063 - DNA, 588 bp, Oryza sativa
  Clone ID: PAT_MRT4530_58911C.1
atggcgattgctcgagctcgctacgtcaacaggagggccgttgaatttacccattttccacgcttgcgtacttcttatcttaatcaggaacacggaaatgtcgccgtcgtgatagggggggccgagaaatcgaaatgctcgagaggtgggggtggaagcaccacggagaggagcggagagggagggcgcggatcatcaacggcgagccgcgagccgcacgggaagcgcggcacatgcagatgtaggcaatggcgcacggcggcgcggcctgaagccctgaaccgcgcggagaacgacgctctccgtctctccgagtcccttccgtgcgagaagccactaccgcacggtgcgcgcggggatgcagccatgcaggacgaacggggcgcgcgggggagtgcaggccgcagtccgcagtccgcagggcaagcggtcataataggccgttcgcagaagcgtaaggaaggcctttcatggctcatctgtcacttgggggttgggcggctgggcctactttgcgattgggcctcagccatacgttccttagcggaaaaagtacaccaaaggtccctcagcttgtcatcgggatag

SEQ ID NO: 57064 - DNA, 1476 bp, Oryza sativa
  Clone ID: PAT_MRT4530_58912C.1
ggcagcaaaaaaatagaaaactcttttttttttcaatttagcattgttcaggttgcctcaacttattccttattccttgtcctggttctacagtgaaactctcatcaggtcagtattcacctttccaatttatgaaagctgttaagaaaaaaagtttattcaagggaaaactacctatacttgcttataattaaaatttgccttccttattttagcacaacaaatcatatccctaattttttttttctggcatggataattgcaatcataccatagttctaactctccttgtcctcttccttcgctactcgaatcatgctcaacgccgatatatttgtcccgaacaacttatcccttacagccatgtactccggccatgtcacggcctgatacacggccttgctctccggcgaccccgccgccacgagaggtgtcaccttcatgtcggccggcggaccgaggaagtagggcatggagatccggtctctctcccggttcacgacggcgcggtggaacacgctgtggaagcgcccgttggtgagcacatggaagagatcgccgacgacgacgatgagcgcccccggcgtccccggaaccgtcacccaccggtccggccggtggcggagcagctgcaaccccggcacggggctctgcaggatgaaggtgaagaagcctgagtccgtgtgcgccgccagcccgaccacccggtctggatctggacacctagggaacatgttgaggtgaatcgtcgacgtcaacgtttcgcggatcttccgctcggtctcgccgccgggggcatcgttgccggcgagcccgagcgccttgaagaacatggcgaggagcctctcgcccagagctctcatcgacgagtcgtactcctccatggcggagcagaagcggtggtagtcgtcgccggcgtcgggccagacgcggcggaactcgtcgcggatggcagggggagggaaggtgtagccctcggcccacatctgcttcgggtaccggaggaggtacggcggcacgccgtagccggtgttcccgccgccgggccgccgcgccccgcgcgccttgtcgtccgccggcagcgcgaacagccgcgccgcctgcgcctcgacgcgcgccagggcctccgcggtcacgccgtgcccgacgagcaggaacccgccccactcctccgccgcgcgcgccaccgccgccaccgcggcgtcgtcgccgccgctcatgtccaccaccggcaccgcgtcgccgccgtccgcgtccgccgccgccaccggcgcggtgtccttctcgtgcatccccttccacacgtgcgactccggcacgcgctccgccccgcggaagttgaagtaggcggcggcgacgccattgtcggcggcggcggccagcggcgaggtcggcgaggtcggcgaggtcgacgacgatgtcatgatctgcatgaactcgttggtaacgcacaaaagcggacgcctagtgatgtac

SEQ ID NO: 57065 - DNA, 715 bp, Oryza sativa
  Clone ID: PAT_MRT4530_58913C.1
ccggccgggacgacccagcttggatgtgtgcttacagaagtcatcagtgacaaaatggagaagcgatgttccattcttgcactacttggcttagtactgctgttctccaacgttattgctgagggagcaggcctgaacaaagcgatcttttctcgcaaaggtctgaaagaagaacgcaaactagctgtcactggaacagcctcatcccttggcggtttacaagggcaatcgtcaagcaccggtgttggaggtgttagcagcaacaatgctgaaagtacaaattctgaaactggagactcttcgtcagcctacacaccgatgagtactgccaccaccacagactcccaccatgacatgtccatggatcagtatcggaagatcatccacaacagccagatgaacaaaccgtaatgaccatggattgtcccgaaggacgtaccattggtgcagcatcgtccttatacttcatggggtatcaagttatgcaacgaagtataacaagagtcttttaattaatgtatatatataaactcgggtattattatatgctggacttggcttgtataaatctacctggtgccttcggctatataaacaaatatttatgcatgtgtttcgcatgcatagtaatgtatgcgctagattatgtgtcgaataaatcagatgggagatgcccatggtttatggttaaaaaaaaaaaaaaaaaaaagcgggc

SEQ ID NO: 57066 - DNA, 404 bp, Oryza sativa
  Clone ID: PAT_MRT4530_58914C.1
tcgtgcaattgtgtttttcaggcgtacgcgctacgaaaggccaaggaagaactcgaaatgtaattttggtctttcgctttgcaggcccgacaaaaaaagtgaagagcaggcaaagtgctaaggctgggggggggcacggcaaaaaaaaccacaaaaaaacgggggggacaccaagggatcggatataggggctttgaaaaaaaaggaacggtaaaaaaaagaaaaaaaaaacaaaccggccaaaaagttgaggctgtaaaaggtttacaaaaaaaggggggccaaaaggggctagaagggccccaaagccaagggtaaaacgggtttacaaaaaaaaaggaggccaacccccggggaaggggagtaggggttttaaaaaagaaccccaagtggaaaagttgtcc

SEQ ID NO: 57067 - DNA, 1956 bp, Oryza sativa
  Clone ID: PAT_MRT4530_58915C.1
attcttgaggtgaaaaaaatagaaccacctgtaaactttattaaattcttctcatggttgatcagttctcttgatggaaccgcgatttgctatcatcctgtttctctgtgagtaaacatttttcgatatttgatctacttgtgaatactgggctctccatttgaaaaaagaaatgggcaaaaattgaaagaatgtgcaactctgcaggaaatatcctccatacatccaatgctagtatgctactacctgtatcgatgaatttttatccattccacctccagaagcccttatcagcaggccgctggttgctgcctgaagatgaatcgtcggactctgcatccttttcaagccgaagcgattcggactccttttccagggtctccatcttctgcagcctttgttgaagatccgaaatttcgtgctcaagctgcgacgctcttgcgtattaagcagataggtgattgcggaatgagtcaagttcgttagctaaaacctcctccagactggaactctgcagatcttcctggttaagtttatttattatttttctctccaccaccttaaccgcttaccaccaagattctgttttctgcgagatcttaatattctttacatcttgaacttcttcaactgcaaatatgacccctctgttaaaattttctccaacttatgcaaatacatttgtatcacggtcattttgttgcccagatggcacaccgcactttcgacttgacttgagagcataaatctcacttgttgggggtgcacggccttcaagaccagtaacgactgaccatacaaatgttgacatgttaagtacaagtgtttctgggacacctttcttgttattaccacctccagtaataaaccagttctcaccaaccgtaacacctgcatgccctgctcttggttcgggagtaataccctgatgttctggtcttgaccattccatcgtctgcatgtcaaggagatgtagatcactgaaacatgtagaatgagaacccccgccaaatatcaagagataacgatcagcatagcacgcagcagcatgctctgaccttggagaagggggtgtgcctgtggtctcaaattcatcccaagtcatggtctcgagatcaagaacgtgcaggtcattcagaagggatctcccatcaccttcacctccaaacactactaatgtgcctccaacaagagtcactgattggccaccgcatgagctcggtgatctgccataagtgcgcaaggttgaccaggtgcaagtttgtggatcaaactccttaacactgagactttctgtaggttcccttgtgtgtcctgcaagacagaggatcttgtttccccatggaaccagtgcatgaccagcacaaggaggaagcgaagctgttccagtcaagtctgaaggttcttctgattgtattttagcttctagcttcgaccatgataaacatttgaaatccagaacctgcatgtcaccaaggtaacggccattgtgatttccaccaaaaacatacatcttttcctgaaccacagcagctgcatgcttgtagcgaggtttcggaagcggtccagaaacagggatccgtgcccactggtcataagaacttatggaacagaggccttccatggtgatttccttgtcctgaacatcaaccatcttcccattctccaccacgagtactttggactcctcggaggccgatttaacggggtgcgacacttttgcactcgccatcccgccgcgccgcgcccggaaggttccagaggaggcgaggggcttcgaagcagatcccgtggtccgcctcccctcgcgccttccccggccgccgacgcctagaaggttcgggatccaggcgccctcgggggagatgggtggaagcgggcggaagcttctagaaggttcgagatctggcgcggcggctgctgctgctccggcgacccgcgaaatcggacgcgtgg

SEQ ID NO: 57068 - DNA, 218 bp, Oryza sativa
  Clone ID: PAT_MRT4530_58917C.1
atggtcgctcggaatctcgccgtcaagtcggctttggacaccatcaagttcagtaagacgatgcagcgctgccgcctgcgcatcggcgaatttgaacgaaatgttcagtaccaggttcgtgttagcagtgagatgaggaaattcctccccattgacaaatacataatgcagtttcagcggggatcctctagagtcgacctgcaggcatgcaagcttga

SEQ ID NO: 57069 - DNA, 344 bp, Oryza sativa
  Clone ID: PAT_MRT4530_58918C.1
tgtttctggtcaatatgtacgggaagctcggggcctttggcagcggacgccggctgttgatccgaaagcctgaacggaacatggcgcactttcgtcactgctcgatccaggccgcacgctttagagcggtgattttgatggtaccgcgggtctgttcaggaggctgtggtggctggggcaccaggagaaccaaactacggttaccaccatgctgaagctagctattgacatggttgcaggaaggcttggcgagggtgggcactcatgtgcgtcgaaacagcgccatgatcaccacgtctttgtagggttaggggtggttgatgcctattccttatagcggggtt

SEQ ID NO: 57070 - DNA, 466 bp, Oryza sativa
  unsure (1)..(466): unsure at all n locations
  Clone ID: PAT_MRT4530_58919C.1
tggggttgatttttgcagacacacagaattggggacagacctctgttgttcatcttaggtgagaatgtatttacagactttctttttttctgctgggcaacactggcaatctattctggcattaatctctctctctttcgctacttcttgatttggtcggccattccatgtggaatttgtttgtacgaatttacgatttatttatttatttattttcgattatcgagatcgatgcctgtgatctacttcattacgatttagacagcttaattttaccgtgaagaggaggcatactaaaaaaggaatttcctttcttttgctcttgcttcttgtgatttcaactttcagaaatgcacatactaggaaaattacttgggcctattggacgatatcagtgggaggaactggagcccacatgctcttcttctcgaggggcacctaaacaagtcctcctcatcatcacant

SEQ ID NO: 57071 - DNA, 557 bp, Oryza sativa
  Clone ID: PAT_MRT4530_5891C.1
gtccccccggccgcgggacgccggcgcgcgcgctcccggaggcccgcgtgagggcggccccgctcggccccgcctggctcctggtgagtggcccctgcgccgccgccgcgtgccgcccgcgggcgcctgctccgttctggggatggccccgctgctcggggcctcccccggccggtccctccggctggggctgcgcttggtcggcggcgcctgtgggttccggcgctcggcgcgcctggccgcggcctgcgccggcgaccgccccgccgccgcccccatcgtccccatcgccgacggctgcgccaccttcgcgcggggcccgcccaggccgccgctcggctacctggccctctccgtcgcactcggctgcaggtgggatttctgtcttggcggccgggtgacgcccgccggctcgggccggtgggtgctcgggagcggggccgagcccggcgcccccctcggggcggcgcccggcccccgcgtgggggccccaggcggtcgccccgctcccctgcccgagcgcgccgccaagaagctgccggcgacgaccaccatcg

SEQ ID NO: 57072 - DNA, 1461 bp, Oryza sativa
  Clone ID: PAT_MRT4530_58920C.1
atggagctcatcatatcatctatcacaggtgatctaaccagtcgatttatctcctttctgatcaacaagtttttatataatctgttctccggggaaaaggtgaaaaggctagagcaactccttcgaagagttcacatggttgtcgaggaggcagatgggcgatacatcaccaaccgttgtatgctcgcacaactgaagacgatagtcgcagccatgtacagtggctaccatgtgctggatactatcaagtacatgaagaacaacgaaggtgcgaatgatctgaagaaattcagtatggagttacaaggtgcactgcaaaacatagagactgtaattggtgatatcaatgagtttgtaatccttctggctagatgtgagcgcatgtcccataggccctatgatgcctatctttacatcgacaatttcatgtttggtcgacatgtggaaaagcaccatctgatcaacttcttactggaaaacaacattcttggtcctccagctgtaataccggttatcggtggtcataaagtagggaagaggacacttgtaacgcatgtatgcaacgatgagagaattcgctctcatttccctcttatttttcacatcagtggagcgaacctttcaagaattacagaaaatggaaatctatctgcaaggacattgataattgtggagttcatttcagatgtagatgacaatgactggataacgttttattcatctatggcaaaccttaacagaggaaacaaagtgataatcttaactaaaatacaaaaattggagaggttcggaactgtcaagcccattaccgtagatagactggtgtatgaggagtacagatacctattcaagacactagcttttggaagcgcgaacccgatggaccatccacaacttgtcccaatagttgaagaatttgcaatgctattgcgaggcaggctcatccaagccaacatacttgcagatgtattgagaaagaatttgaatgttcatttctggctttttgcattgaaaggggtccaaattacagtcaagaagtatttgtccatgtatggtacccatccgcatgagctttttgatcaaggccatccagtacatttgacagactatgtattatatcctgcagatactacagaaaatgccccaaacaatgatttacctaagttgacatttggcgacttgataacaggccgcatttttccaccaaagggcaattttaatctagtttcatgggagtccagaataccaccatacacttcatttgttcacatggctcgcttttctccaagtcttgcggaagataaaccggaatcacacctgtcagggaggaaacgtccaagatcgtgggaagcccttgccagcgcggggataatcgtgatcattcccgagctggccaccacgcgccggatcaagccaccgctgctggctctcgtcctggcctcctgggctgccagtagctag

SEQ ID NO: 57073 - DNA, 934 bp, Oryza sativa
  unsure (1)..(934): unsure at all n locations
  Clone ID: PAT_MRT4530_58921C.1
ccagtgcgctgctaaacacagtacaagncaaagngcccaccacaacgacacagcaagtgagaaacacatgaacacaggncagagntnagacatcacccagacaacgcacacagcctgagtcgcacagaggtcgtagngaccgacacgggtcaaaacaggtcgagacantacacagcacttactaaacacgaacatatacaaaacaaacacgtgtgacaaacacacacacgaataacagcacaacaaggggggaaacaaaacacaanaggggttaaagaggggaatgtgaggcacagcacccgtgaaagcaagccanacgaaccaatacccnnctacgagacgcggaacgcgctgacaaccgacagaacacacaggtgacaacagaaaacactacngacgtcgncgancaaatgatactcaccngaaagaaccacaaaggacaccgtcacaaaacatcaacatcacacgacaaaatcttaatccccccggaaaagaaccacactactaaaaaaaattgaaaccggaaaagngaaaaacaaaataacgntctggggggctcgggttttgatacctgtcccaccgggacncacaattgcccantactcaacttgttgcngatttcgaatctntttaaaacgggaatntttatatcatcccactccacgcttccttgtcaccccaaaacatctcatacggggaaaggggttttccaaacccttttactcccatattaantttattcggaaatggggaaaactccccatctttaaacgggacccccccccccgttgcacggggataanngaataaattnnacctataaagggggggcttttgggggggggtgtttcatttgatatctcacgttttaanttaccgggtggttcacctaaacttattccccaaatttttgtggatttccgaatatggaata

SEQ ID NO: 57074 - DNA, 411 bp, Oryza sativa
  Clone ID: PAT_MRT4530_58922C.1
atggtggcggcgccggtgatgagctccggcgtggaggacgcggctaccggtgatgagctaccgatggaggacgcggtcgccggcaacgagctccgacgtggactagggacgggggaggatgcggctgtcggcgacgaggttcgggttcggtgtggagcgtggacgggggaggacgcggccaccgccgcccctcctctcttcgtcgatgtctcccccgccatcggctcggccgtgatgcgccgttgcctcgacgcgacccagacgaggtcctcgagctcactgcgcagggctcgtcgccggcggccgcgtcctcctctcgtcaagtgggtcctcttccctggccctcgtcagaggtcctcgctggcagccacctcctcctcacagctcaggcgtgagctcagctttggatag

SEQ ID NO: 57075 - DNA, 257 bp, Oryza sativa
  Clone ID: PAT_MRT4530_58923C.1
attgatctcccctctttttttttttttggggcccaaggccgcccccaccaagattcatcctttcatttccttggagcaaagcaaaagcaaaagcccaaaaagaaggaagggaaacccccccccaaagccgaaagcgtattggcgggggaatggattccacctaccccctccaccttggcgttgccaccctccttggggccttttttgccgccgccttcgcctattttttgccccgaaagacccttgaccatctcctt

SEQ ID NO: 57076 - DNA, 463 bp, Oryza sativa
  unsure (1)..(463): unsure at all n locations
  Clone ID: PAT_MRT4530_58924C.1
tctttgncgcgtgggttnaaaaaaaaaaggggggggggggggggggggaaaaaaaaaaaaaaaaagggggaaaaaaaaaaaaaaaaaaaaaaaaaaagggcgcccacatcaaacagatccaaactttacctacccgtgcgtgcccacttcttaagcttttcttttttctcacctcaaatccaattccctggggggtttgtttggggggcccncactaaccaaaaccctncccttccccaacttaatccccttccancacatccccttttcttccccttttcataatactctaaaaaaccctccccctttcccccttcccaacaattacccaaactcaattcccaaatccccctccccctatanctcccccttcagccccccatttttacccccttttctcancctcaccattccacttcccatcaccctaaccccccttcctttccctttcttcccttccttc

SEQ ID NO: 57077 - DNA, 666 bp, Oryza sativa
  Clone ID: PAT_MRT4530_58925C.1
atgaaggggtatacggcgcgtttagttgacgaggaagtcgaactcgaggcccatacggaggtggatgagcagcagcagcaggaggaggcgcggagcgtgcggtgcgagtgctgcggcatggcggaggattgcaccccgggatacgtccgccgcgtccgggcgcgcttcgaggggaggctggtctgcgggctgtgcgcggaggccgtgagcgagcggcggcggcgcgagccggcgctgacggtgggcgaggccgtcgagtcgcacgcgtcgctctgcgacaggttcaaccgcaccgtgcggctcaaccccacgctgtcgctcgtgcgctccatgcgcgacatcgcaaggaccaactgcctcagccggcatcgctccgcgcgagcggatgcctgcgccgccggtggcgcctccaagcagatcggcagggttaaagaaatttcgctgattattttggtaattgtcatggtgattatattggcactgtatattgttcttgtaaccatttgtttcaagggtatgacggtctggccgggcagctattggaacaaccatcttaatcacgccttggtacttactgaccctctaagggcaatgccagttttaagagacatctacatagaaaagtttgcaatgaaccctgcaacctaccgtctggaaatatgttaa

SEQ ID NO: 57078 - DNA, 447 bp, Oryza sativa
  Clone ID: PAT_MRT4530_58926C.1
atgctactccacgtctcatctgactgtacccttagaaaggatgacaaaagatgaaggaggctagtgattctctgcaccgcctcgctatcggggtgcatacactacagctatctatccttgtccttgctactctcgttctgtactctattatgatcttaacatctgatgacggatttatgaaattttggaggtgatgctatgttcattaggaacaaaatgtgctccccctactagagccgagtattgaaactcttgctgctgctatccgacaaaaacaaacaaaaaaaaggaggacctccacttctaccttttgatgactttagtgcatgttaattgcaagattgccgaaagcatgtgtcatattctgtgtatctatgcatgaatagatgatcgcttaaccattccacacaacatatttgcctgattgatacatggtcatgaccgaga

SEQ ID NO: 57079 - DNA, 850 bp, Oryza sativa
  Clone ID: PAT_MRT4530_58927C.1
atgaagttaagcatgaaacgaccccgtacaaccacacttctcgaatggattttccctccccgggtgcgccagaactcctctcactgctagaaactgtgtacgcctagagtacatgaggatgaaaagttcatggagcgggtactgccaatgcgaggttatcgaaaagctttgccgtgacgcgtctcatgtgttgagacaaggctcatgtgttgggcagtcgcggggtgtgggtaaagtgtacatccactgcagtccacttcctaagaagagggaaggtgggcgtcctcagaaaaccataacgattcaatggcgggaagctatccttgggatcacaatggatggtggacagaaccgtcgttgtttaaatacaaacactggccaagcacgcttaacccttgagttctttggaaatcggcttccggaaaagaagttgcaacttgttgatatgagtattctattaatcctattaagccctaggctgggatgttacactggcgctgagcttggccagaacagcgccaaataccatggcgctgagccttgccagtgtggcggcccagcttttcccccacgcctacgtggcatggatctcagcgccacctacattggcgctaagatggccaacctcagcgccatttccttttgtgctgagcttcggcctttagccgcccgcgccaggctcgcccaagcaatcgctctgtgcggccaggtcggggatttcagcgccaagtacactggcgctgagatagccgcctgtgccgggctcgcccaagcatcccctctgtgcggtcgggtcggggatctcaacgccagctataatagcgctgagacattcaatttcagcgcttag

SEQ ID NO: 57080 - DNA, 2937 bp, Oryza sativa
  Clone ID: PAT_MRT4530_58928C.1
ttaccccaccgtttgttccatgctgctgtattttccaaaaatcatgctctcattggcttcccaccatttctgcgcctgatcctctccaaagtgcttccgactgaaccggatgcgcttgatgcacttcttcccaccgggggatgtaaccactgtcgcgtaaaccccgcgctcgatctgctcgatcacaccgttggaatcggtaggagcagtggtggcatctgttccctcggtgcatctggtgctgccgttggaagttcttctgcaattctgatgcgtaaccgagtaattcgccatggaagcaattgaaggttgtgtgcattccctatccacctgcctgctgttgtggtgatctctgttgctcttcgactgttgaaattcgctggtgaatacatttttgtcaggtgggtctggtaattctgcttttagtgattttgcactggcgatgtggctaggcatgattctggagttgtctaatttctcaccagccaaaaggttctttgataaaaaatcatgctgatcgatcaaaaccttaattatgtctttagcagctttgcacttcgcagcctcatccttggcaattaaccaagtctcctcgacttttcgtttgtacagctgaactttcaggctcctttggcggcactgttttgcaagagtagttacctgctcttgaagctgtttcacttcttccaataatatattttccatcaagtctaattccgcttttgaatcattagcagatttgagcaaagagctggcaggtttaggtgccattgtctcattcattacccgtacaatagaaccagagactgtctgtttattcaatgttgaacaataaggaatgctctctctcacacatctgaattgactggggcactctactaggccccatcttaatgtcctcacatgatctggcacagccaaattctgacttctctgatgggggctttgtgctgatgccattttctccataattgcatttgcttccttgaatatgcgcgccaattttggcgtatatgatcttatttctattggacatacctcatccttttggatcttctgttgtggatctaattttctatgctcctcaactttctgcatttgactgaaacatgcatcacaaacacggtaccttttgctcctatctggtgcaagagctgctctggaaaccttgttattgctgcaggaattgcagaacatggaaccacagttgtaacagttgtgcttcttcctcgtaaagccaaatgttagctggcagttgctgcacacagattggtccttgcttgagagtggcctatgtaaacaaattgccatagtgaagttgaaaccacaagctatactatgcacctgcttgtcttccaaggcctcgaccagagtcgggtagctcctgtcaacatagtcacctaaaccaagttgcccttctgttcctttgccccatgtaaacacctttccattcattgtcaaaactgctatatgtgaagagcctgatgatatctctctgacaaactctgtcttaagtggcccctcaattaaacaaatagatgtgtcctcagacagagggttccctaatcgtccgtgttccttgcttccaatggtaaaaacaacaccggttattgtaagcacaatggtttgtgcttttgcacaggatacctgagcaaaatcaaaatcattgagtggctcaacacaagttggtacaagtttcatctttttgtcagcatgacccagcttccctctatccgcatcaccccatgtgaacagcttcccactaggagcattgctcttgacagtgcccattctttctacaatagcagctgtgtgccatggtccacacgcaatggccttggctcgtacccctttcagggactccacttgtttgggccgagcaacggtcagcgtgtcaccatgtccaagaacaccaaaggttccatctccatatgcgaagagctggccagcagaggatatgatagccgtgtgccaatgaccacatgcaatcttcaagattgagatgccatccaaaggaccaaacaatttatgtgggaaccattggcttctttgatactgatcaccccacaaacccaagcagtgagtcccttcaccccattcataaagttctcctgaaattgaaactgcacaggtgtgctttgctccaaatgcaatagccttcactcgtgtagaggcaagagactcgataattttaggatctgatacactgacactcactttgtgccccaatctcccaccattatccacaccccaggagaagacctctccctgcttagtaactatcgctgcgtgtttctctccacaagcaacgctctgcacatcaataatatgtgtcgtgtttaataaccttggaagtgaaacattggcttttgatacatctccatgatctaaaacattgccaggaacttctccccagacaaagatgtccttcagagaagttgctccatatgcaacatgtaacccctcagatgatttttgtttaggcagttgggtaattatttgctcgttaagtttgtcagcaacttttatatccctgcaactgtgttttaccctattaaccacatcgggagtgaccttttccatgtagtagtctaggtctgaccatgtcctctgccttggagagaagaatggttctgagaaatccagattgctttgcaaaacatttttctgcatcagcctaggactgccatatattgagtgtactgtcttatgtccaagaactacacttgagacagagctcaagttcaaacgcttttccctgtctttggaataccacatgagcattttctcatctgaagatagcctgaatgggcataacttgggcttccctctcttcccacatttcaggagatgtgcacccttcttcagagcaacaagcgctatatcctgctcgactcctctagctgcagggctcctcccctcaaagctcccagccat

SEQ ID NO: 57081 - DNA, 459 bp, Oryza sativa
  Clone ID: PAT_MRT4530_58929C.1
ccacgcgtccgcgctctcgatctcctacagaagctatagtagccagcaaatcaatcgatcgatccgtacaatggcggccatgaagatgaacaagattgccgtggcggcgctgttcctcgtcgccgtggtggtggcgggcggcgccggcgctagcgcccacgtcggggttggggttggggctggggccggcgccgacgccgccctcggggttggcgccaacgccgccggcgccgccggggctggagttggggctggaattggagccgccgccaacgtcgccgggtctctcaccggcgccgccggcgtggcacccaaggtgcatgtgtgagatcgatcgatccatcgatcgatcgagcgcgcggcggcgtcatctccactactccatccgcccgtagcaacgccggccatcgatccacgaccattcgccgtccattgtttttgttgtaataatcaaagttt

SEQ ID NO: 57082 - DNA, 319 bp, Oryza sativa
  Clone ID: PAT_MRT4530_5892C.1
atgggtctcttcgaggacaccaaccaacctctgcgccccaaggacatccagctcgcgcgccgcatcagaggcaagaggggcctagcccttgccttgcctggaggcttcttccgtgttcctggcaaactggcacactgcttcaggttccatgtacatatggcatggcatgtgtcaggcatcaccagtgagatggcctttgatacaattgcgtcttggcgtgaaaagacagtccgcggtgcttgtccagacatcgcatgcaagaagcatccagctgtacagcatgataaaataaaggatctgctcgacattgatcctggag

SEQ ID NO: 57083 - DNA, 342 bp, Oryza sativa
  Clone ID: PAT_MRT4530_58930C.1
atggcgagccggatgtgcgagtgcggcggggcgccgaatccgagccagatccgtgccgagttcgccatcccatccggcggcgacgagaggagctcgcccgcagaggtggtgaagcgacggcgccctcgccggccgacgtcgagctcccccgccgccgagctcccccgccgccgattcctccgccgcccgcttccgcgtgccgacctcgccgttgtttcatgggaggtgggaggagggagaggagggtggtgcgccggcgagcgccaagccccgccgcctctcccgtcggtagcggaggagctcggcccggcttggggctatggggtggggaaaaaggagtga

SEQ ID NO: 57084 - DNA, 1049 bp, Oryza sativa
  unsure (1)..(1049): unsure at all n locations
  Clone ID: PAT_MRT4530_58931C.1
tacgcctgcaggtatctcggtcccgggaattcccgggtcgacccacgcgtccgcttaatttaatttctctcttcatcatcttttcgctctcgatctcctacagaagcaatagtagccagcaaatcaatcgatcgatccgtacaatggcggccctgaagatgaacaggatggccgtggcggcgctgttcctcgccgccgtggtggtggcgggcggcgctggcgctagcgcccacgtcggggttggggctggggctggggccgacgccggcgtcggcgccgccgtcggggctggcgctgacgccgccctcggggttggcgccggcgccgccggcgccgccggggctggagttggagctggaattggagccgccgccaacgtcgccgggtctctcaccggcgccgctgagggcgccgccggcgtggcacccaaggtgcatgtgtgagatcgatcgatcgatcgagcgcgccgcggcttccatctccacgactccatccgcccgcagcggctccggcgatccatatttttataaattcgcagtcgattgtttgttgttaatcaaagtttggttaatttatccgtcgagtgtttggttgtttatttcatatgcaaacctcgcgatttgtgataaataattaccgaaatgtatgtgtgtgtggggtgctaattcatccttcactccattaatttgttataaatatatatccttgtactagtgtaaatgtaataaagatcttaagttatgggtggatcatcatatactccccccgtcccaaaaaaaaaaaaaaaaaaacaaagactaggagctgccgcggnaagcgcccccccccggncgtggcaagcgcgaggtgcaagcggggtcgccaagcttccggtactactagaagaatgccgccgccgccgccttcggcgaacatcgaggtcaagcaccaacaacgcaaatatgatctgtggatgaactcctggaacttttatcaatgcagtgcgggcctacaaaagaacaaattatacccctaaggaatgaaagatgaatcagatgggttattaatca

SEQ ID NO: 57085 - DNA, 869 bp, Oryza sativa
  Clone ID: PAT_MRT4530_58932C.1
aagttagatctttataacatttacacaaaatatatggatatatatttatattacaaattaatggagcgaccgagcgaaggatgaattagcaacgccccaggccggacacacatttcgggggttaattaattatcacaaatcggcgaggtttccatactcgtaaaggaagtcgttttggacagcgacacggtctttaaaacataactttgatatcttatttctataaaattatttattaaaaagtgatatatgcatgcttttataaaagtatttttcaagacaaatttattcatataatttttacattttcaaactcaacaacttgagagttattcatgatttatattcctaaggtttgaattaaacattctcctaaacgacttttttatcagtacggatggagtataaaataaacaaccaaacacttggcggttaaattaaccaaactttaattattaacaacaaaaacaatggacggcgaatggtcgtggatcgatggccggcgccgctacgggcggatggagtcgtggagatgtacgccgcgccgccgatcgatcgatcgatcgatctcacacatgcaccttgggtgccacgccggcggcgccctcggcggcgccggtgagagacccggcgacgttggcggcggctccaattccagccccaactccagccccggcggcgccggcggcgttggcgccaaccccgagggcggggtcagcgccggccccgacggcggcaccgacgccggcgtcggccccggccccagccccaaccccgacgtgggcgctagcgccggggccgcccgccaccaccacggcgacgaggaacagcgccgccacggcaatcttgttcaccttcatggccgccat

SEQ ID NO: 57086 - DNA, 1018 bp, Oryza sativa
  Clone ID: PAT_MRT4530_58933C.1
ctgcctctgcctcctcctccataaggaaggagtacatcacaggatacagatccagactccagagccccatagagagagaaaattcagctactcctagatgagaccctgagtgagagaagaagcaaagaaacaacaacaagaagaaagagagatctccctcttccatcaacaatgccaccaccatcaatcaccaccaccaccaccaagctgttcttgctcctcctcctcctccatggaggccactgcctgaagagcttggacatggccatggagatggagatggattcagaggctcacagcaggatgctgtgggagtccagcagcagcaacggcaggaggtacatcagctacgacgccctgaggagcgacgtggtgccgtgctcgaggcagggtgtcccttactataactgcaggatcatgaccaccgccaacccttacacccggggatgcgagaccatcaccaggtgcagggatgtggatccgtgattactactgcactgcctgcttgttttgctggatgatcttgccatgagaggaattgcaggagtggctacctgagatgcaaatcttggtttttattttttttttgtttttcttttaccctctcttctgttctttcttcttctttatgttctgcatttgctgaatcattgtaggtgattcatggatgatttacatgttcaaagatcttatgagtatgtatatgtaagatctggttgcaagctataatattataaggaagcttggatcaggggaggtgtgctgctttgtgcttgaaattgtcggcattgataagatttgatgccatcaattgacatggaaattgctccttttcttcgtttgtacaattgtactggtatgttaaagttggtatacgcaattgagcacgttgaatcttttcggatgctcatcgtttcttcaattttttttaatagctagtcgtgtgatgaaacctggttcgttcttgtttaataaagatattgctttgcagtgttttcaaaaaaaaaaaaaaaaaaaa

SEQ ID NO: 57087 - DNA, 199 bp, Oryza sativa
  Clone ID: PAT_MRT4530_58934C.1
ttgctttcgatcgccggcgactaccgaatctgtgccggtcgttaggaaggagagcggctatggcagcgatggcattcctgtaccggcgtgtccttcctttcgttgttggctgtatgatattatttattattaatcttttttgattttctttatttctttttatattttaatttttcttctattttttctttactttttt

SEQ ID NO: 57088 - DNA, 144 bp, Oryza sativa
  Clone ID: PAT_MRT4530_58935C.1
atggcgacgatgcggcgcctcggcggcgtgcggcagcagtaccgcccacgatttgctccagcccgcgtcgcttgtgccaccagctcaccggttgccaccaacgccaagcgcccaagcagcagccctactgccctagcacgctag

SEQ ID NO: 57089 - DNA, 542 bp, Oryza sativa
  Clone ID: PAT_MRT4530_58936C.1
atagaaatgacaaagactacttggattgtatccatattaatttccctagttctacttggacaaggggacacctatggatataaatacaaggccccataggaggaggagaggggacacgaaacaatagatcaagacataagatcaacatataagccaacatgtgccaagacaagacactagatatcgacttcagagataaacatggctagtgccctacggtgtctacggatactgtcaggagagacatagcgttgtctttgatctcgccagatgcggattcgaggaggaaggctatcctgttgtcgactacgagtcagcacttcagaccttaagtcgacaacagttagataggctaccccaaatattgtactgtctcgcatatatcctagtaccaacgatccccatactatgcaaataccggaatcgcgacatcaaacgtcgacattatacacccctcccttagaataactattctacacccccttccacctcccatccccgtcccgcctgtcgctcctctctccctccgattcccctttttt

SEQ ID NO: 57090 - DNA, 137 bp, Oryza sativa
  Clone ID: PAT_MRT4530_58937C.1
acgttttctactacgagttaactgataggtggggcctgtcctttctgcgagtcctagcattgggcgacgctgagtggtgctacctgagggacggtgaggggtatggtattagatctgacgcccacggcacaggaggt

SEQ ID NO: 57091 - DNA, 217 bp, Oryza sativa
  Clone ID: PAT_MRT4530_58938C.1
agaggtgtcagtttgtcactggatagttgttaaaagcaatccaaacacacaatgtatcagcttaagacagaatgtacaggaaataacggagccacttattgactaaaccacaccctgaatccggtccttactcaaagtacaaaaccagagatctctcttgcatttacgccataagcgactctaaattggcctacattctactactatcaattttcac

SEQ ID NO: 57092 - DNA, 3506 bp, Oryza sativa
  Clone ID: PAT_MRT4530_58939C.1
ggtcgtggtgcggttgccgcggcgtgctgctcgattcgtgttacgactgatccgagcgggtttttccggcgatcatggcggacgcgcccgccaccggcggcggattccccgcgcaggactaccccaccatcgaccccacctcgttcgacgtggtcctctgcggcaccggcctcccggagtccgtcctcgccgccgcctgcgccgccgccgggaagacggtcctccacgtcgaccccaaccctttctacggctccctcttctcctccctccctactcccttccctcccctccttcctggtcccccctccccctcccgacgaccccgccccctccccttccccctcctccgccgccgccgtcgatctccgccgccgcagcccgtactcggaggtggagacctcgggggcggtgcccgagccgtccaggcgcttcaccgccgacctggtgggccccaggctgctctactgcgccgacgaggccgtcgacctcctcctcaggtcagggggaagccaccatgtggagttcaagagcgtggaggggggaaccctcctctactgggacggcgatctctacccggtgccggactcgaggcaggccatcttcaaggacaccaccctccagctcagggagaagaacctactcttcaggttcttcaagcttgtgcaggcccacattgccgcgtcggctgccggcgctgctgaggcgggggagtaaatccaatcctgcaaagggctttgtattctacatgacagggttatcgttgaagatatctgttccatattacagtgttccccaaagtcacggtaagaaatattgcagcaagggggagccctttacgttggtgagatttgccaggtttctctttgactagattgcagatgcctacattgttccatcattggtacgacatattatgatactggtaaaacactcaagagagagcgatgcagatgtccttggcattttgacatttggagaacatcataccacatgaaccgcttagtgtgattactacatccatatggttctctgaattctatgctgaatttgttggcacataggagtactgtactacataggaaggatactgctgagttctatgctaaatctgtgtatttttggtgggctgcctgaatcattgtacaagcgaacgacagaaatggatatcaaatgaggtccctccgagagggagttgcattaaaaagatagggaaatatgcataatcagcagctctgtgagacaagatacatcaaatgttctggttgttttccccccaaagtcactagaagaggagcaaattactgctgttcgggtgcttcagttgagcagcaatttagcagtatgccctcctggaatgttcatggcatatctctctactccctgtactgatgccttcactggaaagaaatgcatcagcaaagcaatagatgctcttttctcaactaaggtttctaatgatttggaagatcatttggagaaaaacagtgaagaaaataaggagagtgtgaagccaaccctactctggagctgtgtgtatgtacaagagattatacagggaacatctggtactgcattgtcatgccccatacctgatgaaaatatggactacaggagtatacttgaatcaacaaaaatgccctggtgcagaatcattaatctttcctgttcactgatatttgtcctaatgaagagttcctgcctagaaattcagctcccaaatatgcttctgataatgactctgattctgcagagtaaatccaaacttgcaaagggctttgtattctacatgacagggttatcgttgaagatatctgttccatattacagtgttccccaaagtcacggtaagaaatattgcagcaagggggagccctttacgttgattccacgtaatcgcgagagagagagagaagagaagagaagcgcgcagtgtccagacgcaaccgatcagtctcgcttctcgcctcgtctcgtctccttcctccgacgcgcggaaccttctagaagcttctccctccggtcgggggatgccgcgctgaccccctaccgtggttatgctggcgtcaaagctctggtcgaggctcgcgtcgccgtcttcccccgcctcgccgcgcgccctttcttcttcttcatcggcggcggcggcggcgaggtacctactgccgagctctgggatgccggcccaagaaaggtcgccgggtcaccccagtggcggcgacgcgcggcccggtgcggggctcgggctcgccgagactgggtgtggcgcggccggtgcgccgcgaccgctgccgctgccgtgctcttcttcgtcggacaatcccgcattatacatgaccttccaagaagtgtgaaaattgtggaagttgggccacgagatgggctacagaatgagaagaacatagttccaacacatgtaaagattgaactcatacagagactggcaacctctggattatcggttgttgaggcaactagttttgtctctccaaaatgggtaccacagctagctgatgctaaggatgtgatggatgtagtccggaatattgaaggtgtaagccttcctgtattgacaccaaaccttaagggatttgaggcagctgttgcagcaggtgcaaaagaagttgcagtatttgcgtcagcttctgaagcattttccaagtcaaacataaactgtaccattaaagagagccttgctcgctataaagatgttgctcttgcagcaaaagagctaaaaatccccatgcgagggtatgtttcttgtgtggttggatgcccagtagaaggatatgtgccaccgtcaaatgtagctcatgtggctaaagagctttatgacatgggctgctacgaggtttcacttggtgatacaataggcgttggtaccccaggcaccgttgttccaatgcttgaggctgttatgttctttgttccaaaggagaagcttgctgtccatttccacgatacctacggccaatcgctttcaaatatcctcatctctctccagatgggtgtgagcgttgtggactcttccgtagcgggcctcggagggtgcccatacgcgaaaggtgcatcgggcaatgtggcgacggaggacgtggtgtacatgctgaacgggctggggatcagcaccaatgtcgacctgggcaaggtgatggccgccggcgagttcatctgcaaccatctggggcgccagtctgggtccaaggcagctatcgctttgggaagcaaggttgctactgccaacgcatccaaactgtgaggttcactaacattcactgatgcagtctttcggaggatgcgtttcagacatacaaatgtatacgataaataaaggcgaaattggttccatgctattcaagtgacctgggatttgtcggtgctagaaaactaaaatcgggatcgttgggtgatgtaagatcaattttgccagaaataaatggactgatgggattgttgattgataaaaaaaaaaaaaaaaaaaaaaaaaccaaaaaaaaaaaaaaaaaaaa

SEQ ID NO: 57093 - DNA, 1425 bp, Oryza sativa
  Clone ID: PAT_MRT4530_5893C.1
tcaacggctttcttggaacgaaggaattttataggaattagttgtttcatcaaaatttcccgcgaaaattcctcttttccaaaggagcccgaaactggcacaccatattccatgaaccgagatcaacggaattaacaaatctgacttgtgattataacaatagtttaactttgaatacggatcttcagcgaagacaactataaaaataggcaggccgaacaaaatatcagaggtgacattattcattctgagtagaatcgtgggcaatgccacagtttcctatgcttcatgagacaaatttcatacagatgaaacaaacagaacaaagacaggcctgacaaatgagacctttgaattcattcttgagagagctacaattgttcttgggtaaatttcagcatatgcggctactcaccgcttcaaggccaatgaaggcagacatcctgcaaatgggaagccatgctacgcagcagcaccagcctcctctttcctcttgcgagcccacctcgggctaacctcgataagacggtgcggcattagctgcttctcctttctggtcagcttcttatagttgctgactctgagtttcgcgatctttgcctcttcctcagcggtagcctctcgaaccactactgtcagtctgcacctcggtctcaccatgacgccacaccgccctttggcatggtaggacaacctcttcaggtaaagtcctttcccaacaaaagcctcttccacaataagtttatcaggatccagtccgtgattgtgagctgcattggcacgagcagaatgaatcacctgatatacagtttttgcagcccttttaactgtcacttgcaactgcaacagggcatcttccacacgcattcctcgaaccagctttgctaccagattcaccttcttggggctctgcttgatatccttcttgatggcttggaccttcagccgcttaacaattgctccctttttgtcagtttgttctccatcaccaagtggaggtgtcaaaggagaagaaacaggaaccatagcatcatctgcagcaagcaggttccttgtggtagatattccagcattgcggatcagctgatggaagttcagcgcgactcccctggatgcaaaagcttgtgccctcaaaaggtttgcatattggcccaagccaaacggagcattcacgccgccactgctgccgctatagctggcagcgaacacacggccgtcctgcttcgccgccgcctccgccgccgcgctgagccggcgaagaacggcacgagcgccgcccgccgcccgccagcccaccatggccaaagaacctgatctcctcctcgggcgctttcagctcccggagagagaggggggatacggcggctgcggcggagaagggagggaagagacggcggcggcggcgtgggttttggggggagtaag

SEQ ID NO: 57094 - DNA, 855 bp, Oryza sativa
  Clone ID: PAT_MRT4530_58940C.1
gcgaatgccagccacagacttcttgttgatgggaaaaaaaagcgttatgtaggtatcagattggcatctggtcaggatattttgtgccaacagttgatactcgatccatcatatgaaattccttccttggatatgccaagtgatgcaccagtatcaaatttgccaagaaaagttgctaggggaatatgcataatcagcagctctgtgagacaagatacatcaaatgttctggttgttttccccccaaagtcactagaagaggagcaaattactgctgttcgggtgcttcagttgagcagcaatttagcagtatgccctcctggaatgttcatggcatatctctctactccctgtactgatgccttcactggaaagaaatgcatcagcaaagcaatagatgctcttttctcaactaaggtttctaatgatttggaagatcatttggagaaaaacagtgaagaaaataaggagagtgtgaagccaaccctactctggagctgtgtgtatgtacaagagattatacagggaacatctggtactgcattgtcatgccccatacctgatgaaaatatggactacaggagtatacttgaatcaacaaaaatgctgttcactgatatttgtcctaatgaagagttcctgcctagaaattcagctcccaaatatgcttctgataatgactctgattctgcagagtaaatccaaacttgcaaagggctttgtattctacatgacagggttatcgttgaagatatctgttccatattacagtgttccccaaagtcacggttagaaatattgcagcaagggggagctctttacgttggtgagatttgccaggtttttctttgacta

SEQ ID NO: 57095 - DNA, 626 bp, Oryza sativa
  unsure (1)..(626): unsure at all n locations
  Clone ID: PAT_MRT4530_58941C.1
gcgcccacgcgtcttctcgcctcgtctcgtctccttcctccgacgcgcggaaccttctagaagcttctccctccggtcgggggatgccgcgctgaccccctaccgtggttatgctggcgtcaaagctctggtcgaggctcgcgtcgccgtcttcccccgcctcgccgcgcgccctttcttcttcttcatcggcggcggcggcggcgaggtacctactgccgagctctgggatgccggcccaagaaaggtcgccgggtcaccccagtggcggcgacgcgcggcccggtgcggggctcgggctcgccgagactgggtgtggcgcggccggtgcgccgcgaccgctgccgctgccgtgctcttcttcgtcggacaatcccgcggaagagaatccttgcacaagacagatataccaaagacagctaatgccgcatcggttcaagttatttttgggggagaaacgtcattttacatatgcaaatggtgcttcactgaatccgcagaactacagatatttttcatcttcttctggccaacagagtataggaattggtaacaagattatacatgaccttccagnaagtgtgaaaattgtggaagttgggccacgagatgggctacagaatgag

SEQ ID NO: 57096 - DNA, 468 bp, Oryza sativa
  Clone ID: PAT_MRT4530_58942C.1
atgggcaggggcagggcggcgtcattgtcggcgacaggaagaagggtgaagggcaagatgcccctcggcatggaggacagccacatcgcagagttccatcgcctggaggacggcaatgaggttggcctcttcgtcgtgttcaacggcctctccgacgccgacgtcgccacctacctcggcgagcacctttccaccctcctccgcgaacagggcttcgggaccgataccatggacgccatccgccgcgcctaccaccgcacagactggaaggtgctaaggacgacgacggaggagggtgacagcgaggagcggagcgggcgccacagcggatcgacagttgctcgtggaccaagagccgctccaggagcacggcgcgagcgccgctgcggattcgtgacggagatgcatggcgatatgccccgcgtggacgcgcagctggcgatgtcgcgcgcattcggcgaccggtaa

SEQ ID NO: 57097 - DNA, 1455 bp, Oryza sativa
  Clone ID: PAT_MRT4530_58943C.1
atggataagctcgatggctctgcccgtcttatgatagtttccgatcttgaccagacaatgattgatcacaatgatccgaagaacttgtccttgcttaggttccaggcgctatgggagtccgagttctcccaagattctctactggtcttctcgactggaagatcacctatcagttacaggggtttgagaacacagaagcctttgatcactccagacatcactatcatgtctgtgggcactgtgatagcatatggtgaagagatgattcatgatgttggctgggctgaattccttagcaacaaatgggatagggatatcccagagaggagtcagggtcctcataaggttagcttttttgtcgacaaggagggtgctcgggaagttatggattctctccctgagacgttaaatcggcgtgggctagatgttaaaataatcttcagtagtggtgaggcccttgatgtattaccacaaggtgcaggaaaaggccaggctcttctatatttgctgaaaaagttcaattcagatgggaaaccaccaaacagtactcttgtttgtggtgactctggcaatgatgcagaattattcagtgtcccatctgttcatggtgtcatggtcagcaatgcccaagaggagctgcttcagtggtatgaagaaaatgccaggggcaatcctatgatgattcatgcaaccgagaggtgtgctgctggcatcatgcaagctattggacacttcaatttaggacctaacgtttccccaagagatcttgaattcccttacccgaagttagacgccatcaaacctgcagatgttgtggtgaagttttatgttctctatgaaaaatggcggcagggtgaggttcaaaaggccccattcattatccagtatttgaaaaggattactcatcctaatggaacaactattcatccttctggaagggagtgttcacttcatgcatccattgatgcactgagttcatgttatgctgataaacaaggcaagaagttccgagtatgggtggatagaattgtcgcttcatcaatcggtacaattaattggctggtgaggtttgacaagtgggaaatggaaggcaatgttcggtattgctgcctcacaactcttctgctgactatgaagcctgagactgaagatggcttcgagattacacacatccacaagacctggcttgaaggatactctgcaggaaatgagcatgcatgcatcctgtaggccatttaaatacatgcaacttacacagaaacatgaggaaattttcatcaggagtcaagatagaataacaagtgtactcactgttgcgtggatttgatcccaaatactcgtagtgttatactggggtactcacaaatggattgatgctcttgctgattcatgtacagttcatgaaattaagcaaataaactcactgtaccagaaattttctcgatgtacatggat

SEQ ID NO: 57098 - DNA, 417 bp, Oryza sativa
  Clone ID: PAT_MRT4530_58944C.1
atggtgcgttgcggtggattgtgttatgcaaggggtattgtcacagctcctttccgagaggaagagttctacaatgatgctgatgcgtcggtgtggcgcggcggcggggcgtcgcggcggtggcgtgtcccggcggtggcgtggcgcggcggcgtgccgaggcgggggcgacggcgtggcagtggcgtcggcatcgtcgacagtgccggcgcgacgtcgtcggcggtggcggccgcatcgaggtcggggtcggcatcggcgggaggcggagtcggggtcggccgcgtcaacgtcggcggcggcgtcggcaacgaggcggcggcagtggcggcgaaggagaagccgagatcagggaaaaaccttctaagtgttgatggagaagacgggggcgcgcatcgggaatatatatacccgtag

SEQ ID NO: 57099 - DNA, 595 bp, Oryza sativa
  Clone ID: PAT_MRT4530_58945C.1
ccggccgggagccttctacatactcaaacattacagtcaacttctaccaactataatcccaccacattgaagatcattgtcttcttcgctccccatgctatagatcgcttggatcccctctgcgatagttaacgctgatactcctgtgcaccagtgaaaatcaaaatgcacgcgcatcccagtgctggatgaacaaacgctctataccatgaggtgagaacaaaaggaaaaaaggcagcacagagctccacccccttcttcccttcacccaggtttcatctgacaatctgccaagtcatgcagcatacagtgtctgcctgcagctcattgatgatcgctcaccagtctcactgacataacattagcaatgatcaagcgaatgtgcagcagctactaatacaacagctagctgacgtctactgcgatcaggttcctgctcaattcccagctatgtaaaccccgtacaacttcgccgtgcaatatgcgaatatctacaccagctaaacaatgctccctgcagaatgcctaccgttcctgttatccggtatcgaattcgatgagcatagtagtacaggagagaaaaataaagtcatgc

SEQ ID NO: 57100 - DNA, 147 bp, Oryza sativa
  Clone ID: PAT_MRT4530_58946C.1
atgcaccaagcaaatagcaagcaacagtatctaaaccaatttgaggtggaattgagcgaagtagctgagtattacaagcttctagaaggttctatagagggagacaagaagagtgtagtggctggtaggaagaaggagaagttttaa

SEQ ID NO: 57101 - DNA, 141 bp, Oryza sativa
  Clone ID: PAT_MRT4530_58947C.1
atggcggcccgtcggcaggctagcagcggcacacacacctcaaatcgagggggccaaatgtttctaggggcgaatcgacgtcggcagcgcacgcaggtgttcgacgcactctccccgacgtccagcggctcccggcgttga

SEQ ID NO: 57102 - DNA, 552 bp, Oryza sativa
  Clone ID: PAT_MRT4530_58948C.1
cccacgccgtccgcccacaccctccgcccacgcttgcggcaccagcactacgctgaagcttgagatcaccttagctgaggtatacatggcctgcacgccaccatggccctctcgtccccgcgcgctggccggcgacggctcgctcgcgacgagtgtatacggcgaggggcgcatacaccatgcccaagtcggcggcgaatcccaagccctgccgcattctgggagcccgtggtaccgcgccaaccgcgtggctctacctcagcgccgctctccagcgagccgccgagctacctgaccggcgagttccccatgcgactacgctgtgctacacctgcactgctctacgacaccttataactatccacgagaacctggagctggtcagtcatccacgccaggcggactatgcttctcgccaaccctgaccatgcaagcactctctgcccgcctcatcgatcttctatggtctgctgccaaccgacaatgacagtgctgaaagattgagaccaaatgctctaggccctgtccttgttacgttcgggcctgatcgcg

SEQ ID NO: 57103 - DNA, 249 bp, Oryza sativa
  Clone ID: PAT_MRT4530_58949C.1
atgcgggcagagtactaccctatctcctccctcgtcctcagcgctagtacagcggaggcggcggccatgggagtggacgacggtggcggagacctctcggatgagcgggcgagagctggcggcgagggcacaggcatgaaggtcacgaaccctgcggacattcccgggggtggcctcgatgcgacggcggcggcgcggcagcctagatgtgcgacggcggcgcggcgcagatggccagcacaaacgacg

SEQ ID NO: 57104 - DNA, 567 bp, Oryza sativa
  Clone ID: PAT_MRT4530_5894C.1
aaagtggcaaggatcgccatagaagaactccgcgatcgctccagtgatcagttggccgacactgagtatcgctaccatcctcgtcaaccacagggaagtgatcgtgcaagctaccttgagactgaaggaattgagaatgatgctaccacaaagcatttggtggagatgctgtgggctatggatgaaagtcgtgcggagactgtgttagcagctcaagatcgtgaagactggaatcgtggtaagatttgcaaattagaggacaaggtggatcgtttggagaaggaactagccgcgttaaagggagaagcaccaccgcagaaggccaggattcgtcttacagcaaggaagagagctctttttgtccctcgctaccaattggcgccaaaggtccgtgtggtgaagaaagaagttaccctagccctagcggatcctccggtcatcatcataagtgatgatgaagaagaagaatccaagcgcacccattccaaggtcgagtggggagcaactcaagatgatgaagacgagccgaacgagccttcaatcaactccgatgcccggaagaactag

SEQ ID NO: 57105 - DNA, 417 bp, Oryza sativa
  Clone ID: PAT_MRT4530_58950C.1
atggggatgcgggcagagtactaccctatctcctccctcgtcctcagcgctagtacagcggaggcggcggccatgggagtggacgacggtggcggagacctctcggatggtggccgttgttcctcattatttttcaacaaggatgaacacttaggcagatttgcccaggttaaattcattggtgaagttattgtggaaacagaacatcacggagctgcaaagaaggagctccaagcaccagccagctcgagtgcaccgacggacagagagcgggcgagagctggcggcgagggcacaggcatgaaggtcacgaaccctgcggacattcccgggggtggcctcgatgcgacggcggcggcgcggcagcctagatgtgcgacggcggcgcggcgcagatggccagcacaaacgacgtga

SEQ ID NO: 57106 - DNA, 1274 bp, Oryza sativa
  Clone ID: PAT_MRT4530_58951C.1
aacgagactgcaaatgaatctgtatatatattcgtctgtttttctttttacatcgtgtgacgctatgatgccgtgtgcggtgtgctacaatgaactcgatcgaccgatggatcgatctctcacaacctgacccattccgtgccgtcgatgaaggtgagcgagatgaagggcttggcctcctcgtcggtgagctcgcgtgaccacgacaccctgccggagaagctcgcgccggggcccgtgcacttgtactgcccgtagaacaccgtcagctcgcggttggggtcgccccagttgtaccagccacgggggatgatgatgtcgtccatgtaggtgtaggcgaagacgacgcgggagaaggtgccccaggcgcggccgaggtagagcgcgccggatcccgtcacccggcagttgacgaacgagaaccccgtgtcctccagcatgctctgccggttctgcgctgtcagcgcgccgtagtcccgcgcgatcgcatgcacgtggcaatcctcaaacagagagagcgcattgccaaagatgaaatccacggagccttcgatgtagcattccttgtagtagtgccggcccgagtgatcgtacagcgtgtcctgcgcgcccaggaacctgcaccccacgaacgccgcgttgtccgccgacacccgcagcgccaccgcctgcttccccgacgcccccggcttcggcaccggcgacgtgttcttgaaagtgatgttcctggcgaggaagtactgcgcgttcacggcgaacgacgcggagctgtatgtgccgagcggccgtcccgcccggccggacggactgtccgcggtgtcaccccactgcacgatcgtcttgtcggcgccggcgccctcgagggtgatgaacgcgcgcatcggcgatatgttcaccttctccgtgtaggtgccggcgttgaccttgatgacgacgcggacgaggttgatgatcgggagcgagtcgacggcggcctggatggtggtgaagtcgccgaacgccgggttcttgtcgacgacgagcgagtaggaggggaacgcccgggcgagcgcgtggtggaccgtgctgtgctccagcccgcccatgtaccgtacccactccatgaactgccgctcgatcgcctccacccgcgtcgcgttctccgggaacgacggctgctgcttccccgccgccctccctggccgcacgccccgtgtgtgccccgccactccgcccggcgccacggcggccagggcgacaatgcacgccacgagccggacgggcgccacggccat

SEQ ID NO: 57107 - DNA, 249 bp, Oryza sativa
  Clone ID: PAT_MRT4530_58952C.1
atgacaaaattaattaagtaataggcctatagaggagcaaagtggtggcggttgatgagacatctaaaaactattaataaaacaccaaatagaatcctaatgacgattaaaaggaaggacgacgggcatgtcgtgaagcaatcagtcaggatctcaatgataataaagaaggacggcaacgggcgagtcgtagaggagtacagtaacaaagttgctgacgttttggcggaacttcaggaaagtaaaaaa

SEQ ID NO: 57108 - DNA, 352 bp, Oryza sativa
  Clone ID: PAT_MRT4530_58953C.1
ggagatggtcgtctcagctgctagctcatcatcatcctcctcctcattgatcttcttttttgaattctgaacaactctgcctgctgcattttttctgatttctgaaatgatgctctgctcgatcttggcattctgaagtctgaaattgctactgcagctggtattatcttgagctgcttttcacttctgctgaaatgtcgaattgtcgatgtgcctgtgcttggaagatggtgcttgtgttcttgtaagataattttggattatgatgtcgaatgcatgctcctggagaacgctggcagttgctgctaaaaaaaaaaaaaaaaaaaaaaaaaaaaaaaaaaaaaaaaaaaaa

SEQ ID NO: 57109 - DNA, 627 bp, Oryza sativa
  Clone ID: PAT_MRT4530_58954C.1
atgctaggcaggatcatcttctgcgtggtgatcgccgcggccgtcctcgccgtcgtcctcctcgccaccgtctccccgctgccggggcgccacaagggcggcggcggcggtcgagaccatccgtggactctcaccgtgtacatccatacgacgacggcggcggcggcagcggcagcggcagctggaaccgtgtcgccgccgcagcgacaacagcaggcgagcgcgttcgtgttccggcaccggatgacggcggggccggagagcgcgtcgaggacggtgggcgcggcgacggggttcgtgctccctgccgaggccgccggctcggcgatgtcggtgttcgacacggtgcacctggcgttcgacgtgtcggggatgtccgggagcgtctgcgtccaggcggcggcgggggacggcggcggcggcgagaaggcgccacggccgacgaggcggcgcggggagtgcggtgacccggaggtgctgcgggtggtgggcggcacgggcgacttcgcgttcgccgcgggcggggatggcgtgctccgcgcgctgtgcgcgccgcggctgttcggtggcgcggccgcggcgaaggtgttgcggcttgagctgagcgttgcgcacgccaagggctag

SEQ ID NO: 57110 - DNA, 3850 bp, Oryza sativa
  Clone ID: PAT_MRT4530_58955C.1
atgcgggcggggctgaaggacacactctttcccgacgacccgttccgcgggctcggcgggatgccgcacgcgcagcgcgcatggcgggtggcgagttacttcgtgccggcgctggactgggacgcggggtactccgcggcgagcttctggtatgacctcctcgccgacgtacacagattcgtgcttcctgctgccgttggtgtacgcggtgatggggagctcgaggaacctcggggtggggccggtggccacgtcgtcgctgctggtggcgtccatcatcggcggcaaggtgagggcttccgacgacccacggctgtacacgtagctcgtcttcacgtcggccttcttcaccggtgtcctgctggccactcttggattcctcaggccggggatcctgatggatttcatgtcacggccggcgatcaccgggttcatgggcggcatggcggtcgtgatcatgctgcagcagctcaagggcatcgtcggcatgacgcacttcaccacaaagaaagtctccgcgttcgtcgtcggggccgttgcgctcatcgccacgccgttcgccgtcccttccgcgtcgttcacccgtgacgtcgggcgcgccgttgccgagcgcgcggagcgtgacggcggccatggacggggagaggcgaaggcggcccgcgaggcgggagaccgccgggggagaagtgggacccgtggcggccgcgaggacgcgaaagtggaggaggaggagcgcgagcaccggggagggaggcgcagcgcggcgcggcggggagagaggagaaaacggtgcgcgctcatgccggccattactccctaccgcgagaggtgctcgttcatgtttgattctgcagctctaactgaagatctaaccgatcattcgctccctcactgcgtgtggttcagtttctttatgtacttagatccttcagcaatgggttgtggcaaaaatgtgccaagtgttgattactattattatgagctagcaaactttttttctgatcttctctgtaccgttcctatttatttatcttatggtatgcctcgctaccctggaccataccctatgatgcgccctggctttccgccacgcccgatgcctccagttggtgttatgccgcttcaacgaccaccaattattcctgggattcgtggtgcacctcctgtggttccccctactgcccgaccacctactccagctgttacacctcctgacaaaccgccaactgcagtttatgttggcaagattgctccaacagtggacaatgaatttctcctttcacttctccgtctttgtggccctgtcaagagttggaagcgtacgcagaatccaagtagtggaaagcctgtatcatttggcttttgtgagttcgaatctgccgaaggcatccttcgtgcaacgcggctgctcaataaattgagcattgatggacaagaacttgtggttaacattaatgatgccaccaaagagtacctgaagaaacatgttgaagaaaagaagaaagcacaagaaaagaccaaagaaatggaagatggaggtggtagtgggactactgctgtcactggaaatgaattgtcaaagcctgtttctgatgaaacagagacagggacaggagatgctggtgataagggcaatgaagaaaatcctaagaaatttgggattgttacagaggaagattctaaggctgataaggatgttgctgaaaaaattagtagtatgattgaagagtggttaaagactagaccaccaccgccacctcccccagttgaacaatctgctgacatctcttccaaacacaagaatggagagtatagtgtagatgtgacaaaaaatgattctgaagataagagtggcactggaagtgataaaagggcagttaatgagaccgaaaggatagaaactgggtctcctgataagaggaaggagagagagcgtgataaggagaagcgggacaaggataaagaacttgaaaggcatgaacgcgagcgagagcgagaaagagtcaggagagacagagagaaggatattaagtataaagaagtggagaggttgtacaaggagcgcctcaaggagtgggaatttagagagagagaaaaagaatatcaaagacaacatgagaaggaacgagaaaaggacagggaacgtgagcgcaaaagggagatcatgaagcaggaagatgatagtgatgaagaggacaataggaaaagacgacgaaggagcagtggcacacttgaagagcggaaaaggaggcggctgcgtgaaaaggaggaagacttagcagacaaattaagggaggaggaagaaattgctgaagcaaggaggcgagctgtagagttgcaacaacaagcggatgaagcggctgcagcggcagcggcagcggcagtggtggcagaatctgctacagttatggaggttgatggcgatgatggaaaggaaagagatgcacaagacaaaccagctgttgtggatgttggtaacaatgatgcctttgctaatggtgttgattccggtgttaataatggtaaagataacattggtgatgacaaaaacatgacacctggtgaaatttcggataccaagcataataccagtgctccagcaaagaaacttggttttggtctgattggctctggcaagcggacatctgtaccttcagtttttgctgaagaggatgacgaagataatgatgataagcgggcaagacctttagttcctattgattactcaacagaggaactgcaagctgttcaggccaattcttctactggccaaccaaatattgtagcagctgctgaatttgccaagcgcatattggtaacaaaggatgataaatctgatgttgagaaggataggagttggagatcaagtgatagaacgaaccaaagggatagagatagaaatgatcaagatgttggtcgcaccagtgatgagagaagggaaaagacacatgaccgagagaaagataagcaagataagccaaagtctgagaacaagaatattttggatgcaaaacaattaattgacatgattccgaggacaaaggaagagctttttgcctatgatattaattgggcgatatatgacaagcatgagttgcatgagagaatgaggccctggattgcaaagaagattattgaatttctgggtgaggaagaatcaactttggtggattacatcgtctcatgcaccaaagaccatgtccaggcatcaaaaatgttggagcttctacagtcaatcctggacgttgaagctgaaatgtttgtccttaagatgtggaggatgcttatatttgagatcaagaaatggctgaatgggcgcacaaccttttctgcaatgccttcctctgcacttgcaagttggagactttgctcgcgaaatgaccgaaatgccccttcctcaccttcgtcctcctgctcttacgacatcgtcatcgtcatcaccgtattcctcctccgaggagaagtcgtcggcgtcctggtcggcgacaggtttcttgaggaggttgagggtgaaggaaggcggcgcaaaggggtcaaggcaggcgcgacgggcgacctggtactaggggcagtcctcgttgacggcggagaggtcaatgcagcgaggtggtcggcggcggccttggtgctagcggagagggtgtcatggttgacggccgaggccgctgtggcggcgtcgacggaagagggtttcctacccccgcccctcccccaccgccatcgccctgtctgccttttccccaccacgccgtgcccaccgcagcatcaccgcacgcaaaccatcgccgttgccggggaagaagtcctcaccgccttcggcctctcttccgggcatgtgaaaaaagactag

SEQ ID NO: 57111 - DNA, 5241 bp, Oryza sativa
  Clone ID: PAT_MRT4530_58956C.1
atgcgcgccccgccgtctgtcaccgccaaggatgtggagcgtgtcctcgctgatgagttcggcctgcgttctggggagattgcgatgtcactgcatttccgggaggccttcctcctcaagttcaaacatcaccggcactgtgaagaagctgtgaagaaaggttttgctaagggccaagggatagaagtccatttcatccaatggcgaagcctgaagaacgccgctggttctgccctcatgtacagagtgaagctctgtctcgatggcgtgccaatgcacctgtgggcgccggacatcgccgagcgcatcatcagcaggacctgcactctggagtcagtggagacggacctcgtccaccctgtggacgctggcgacacgagggtgatctccctatgggcttggatgccaaacccgagccgcatcgacaagcgcgtgtgggtgacaatcacgcgtcaaacccgtgaccccctacttgagtcagtcaccatctcggagacgccaccggagcactggcagcaaggcgtcaagcacccggtgttgttccatattgaagagattcacgactacacggcggcggcggtggacctccgcaatccgaagtcatgcaggctagcgacacgtacgctccctccgtggcatctgggcgttcttgatggacaacgggctccgccgtgcctcttcgagaacttccctcaccaccccccaacgccgacgacctatgctttccgccaggggcgggcggagggcgtagaggacaatgccggtctcgcgagggagccacacgaccaaggaagcaggacggcaagggaagctgccgccagggatggcggatggcgtcagcacgacggggatcgtgataggcgtcgagaggaccatgatggacgccgtgatgaccgggatgtgcggcgcaacgctgacagacgccgggaacgcaggggaagatacaacaatgaccaccccggcgccggtcacggccctgggtggcggcgagatgatgatgacgatgaggagcgcggccatggccgtgacgttgcgcaaggacgcggcgggctgcgggagcctgatgttcacttccgacgggagcgcacgcgttcgccaagagctcgtgaccgtggcggcaatgatcggcgtgatgggcgccgtagacaggacgacatctgcgaggagcctggcgatctcgggggtggcgaccgcgacaacgacatctctcctggccttgccatggcgggggaattccagccaccaagatcgctctcccctctgcctctgctccgtgggttcgggaatgaagcccgaggccatctcagtggcctctgcggaaggggccctatgccagctcgtcctggcggctgggttgcgattgccattgacaagctgtcagcgccagcaaccattgttgcgccagggggtgtcgtcactccttttgctgctgccagccccgtggcgccgacggacaccctcgctcttgatgatcctgcaaatgccgagcaagctgaaccagcgcgacaggctgctgcaaatgacccggtcgacgatctgcaagcaacactggggcccactgtgcaacctgaggcggcgatacacacgccgatgctctctacctcggcagtcgacttccctcagtgtgccgacgtgaacctgcagacgccgcctccacccatgccacgacaggacaggcacaggagttcaagactagcccagcaaccaacggtcggcctgccgtcggggttgaaggcacagctgaacctgtgccgccgaatggggttgacgccggaggaaggaactctcaccgacaaagtagtggctgacttcaaagccatgttcaacgcaccactgccgcaagacaccatcgatgccctcgagcagctgttcggtctgaatagggaggatgcaaaggcggcggacgcgtggcgtgacgaatggacacgcgtgaatgtcctgagcgacggcacttcgattcggggaaacatccctattccgcagcaattccgtggctctacccccactagcgattcttcggtgccgcatttccgcaccttcttcgtgccctcttcccactcgtgcgacaaagctgattctctgatgtgctgccgaagaacggttgcctgcggcgctgatgcggcgccggctcctgcgactttgcgaagaagatcgcctctggtgcgacgaggccgaacgggctcaacttggccaaacaggcccaactggtctgcctcgccatcccaagcaggccaagctctccccgctagcccgtgtacgctgcaccagcccagaccgggtagaagagcaacggttagagaaacgctgcaaacggcgaagccccacatcgcctacctgcaagagacaaaaatgagtaatattgatgtagctattgttggatctctcggtgggagctacctacggtcttacaattataagccagctacaaggccttttggaacacgtggaggtatactggtactctggaatgaagacaccgtcgacctctctaacttcgtcctaggcaccttctccctcactgccactgttctcctaaaagagtgtcaaaccactttcctccttaccgtggtatacgggcccacaagagatagagcgaaacaagcctttttacaagaattgcgagacaccaagcctagaaacgactccaagtggctcctagtgggggacttcaatataatttacaaggcctcagataaaaacaatgccaaccttaacctgcgacaattgagaatatttaaagaaaccctcaacgcttgcgagctcaaggagatcacactacaaaatcgtcgatatacctggagcaatgagcaagataacccgactctggataccgcctttgagaagcacctcctccatgtgctctcgacttcgctctcagatcactgccccctcttattatcgggacaaggagacgcgccgcgcgctagaaccttccgttttcagaactactggattcaccttccaggtttccaggagatcgttgctcaagcatgggctgtgagccctccatatcatgaagttcatcacagactctaccacaagctgggcgcaacagctggtagactgaaagcttggagcagaaatctcatctcccaaggaaagatgcacctccacatggccctcgaggtcatccttcagttagatatagcacaagagtcaagacaactcagtcaagctgagctcaacctaagacggggcctcaaggacagagtcatgggactgtctataattgaaagagctcgcaaaaggcaagcttcaaggatcaccaatctcaaagaaggcgatgcaaacacgaaatatttccaccttaaaatgaatgcgcgaaggagaaaaaaatttattcaacggctccgcgtggggaatatttggaaattcaagcatgaggaaaaagcggccatcattaaagatcacttcgaagcttttctagcgcgcccgccaccatgcctggtagacttcgattgggatgccctgcagttgccacctgtagacttggcaatgattaacgggcccatcaccgaagaggaggaaggagctgaaggcataggcgacttcaggccaatcagcctcattcatggcatcggaaagctaatctcaaaagttcttgctcttcgcctccaaccccacatgggctccttgataagccaggctcagagtgctttcattaaaaaaaggagcattcacgataactttatgtacgttcggaatctggcaagaaaattccaccaaacaagaacaccagcgttgctgctcaaattagacatctccaaggcttttgattcggttagatgggactacctcattgaccttcttcaacgaagaggattcacaaccagatggacaaactggatcacaaatctgctaatctcctcaacgtcaagggctcttcttaatggttgcccaggaattccaataaagcatggtagaggactcagacaaggagatcctctgtcgcccttgctctttattctggccattgaccctttccatcacctactggagaaagcaacaaaccttgggctactttctactttgcgcggcagagcaccaagattcagaacctccctttatgctgatgatgcggccatctttgtaaaccctagtgtacaagatatgacgaatctaacagaaatattgcgagctttcggaggagtttcaggtcttcgaacaaacatgagcaaaagccagattgcccccattcgttgtgggaacattgaccttactgatgtcacgagcatcttcccggcagctttgacaagcttcccaatgaaatacctcgggctacccctagtggtaggtagattgaaaaaggtccacattcagccgctgatagacaagtgccagtccagactagccccctggcaagggaggctaatgtcatctgctgctaggatctgcttaacgaagtcagtcctcacggcacaaccaatctaccacttaacatctctgaaactacccgatgataccctcaaggacattgacaaaatcaggaggaagttcctctgggctgggggtgaaagtatttccgacggcaaatgcaaagtcaactggaaaaggaagaatgccccgttgaatgaagaacaagatagcattcgttggaatctaacggcgaatgggaaatactcaacaagatcggcatataggctgcaattcatgggagcggcaagatctgctttctaccaatcaatctggaaagcatgggcgccgccaaaatgcaaattcttctcttggcttgctacccagaacagactttggacggcggatagattggggaaaagaggctggcaaaatcaaaagatctgccccctgtgctgtgtaacggatgagtcagccctgcacctactggccaaatgtagagtcactaagagaatctgggccgaaatccaacaatggacacaaactgacctccaattgagtaaatggaatgactgcccctccgtcgaactttggtggaaccttgttgctgaatcccctaatactccacgagcccctctgcgaactctgctgatgcttgtgtcctgggagatttggggggagcgtaatgcaagaatctttcggagcacagcctccacccctgcctcagttatagcaaaaatcaaagaggaagggagagcctgggttaaagccggagcgacaaagctacaggagtttggaattttgggagatatcacctttttccgtttgcgggttggcttttggctgaccctgtacatattttctcttgttttcctgctcctctattaa

SEQ ID NO: 57112 - DNA, 1120 bp, Oryza sativa
  Clone ID: PAT_MRT4530_58957C.1
cttaatgatatagagtttatggaaactatgtgtagtgtcttgggttgggactggccttatgccatcccaatgcagcattgcacccacaccaccccaaacggcagttatagacgcgaaacaccgtgatgttcaacagtcaccaccccggttagctactttgcttcacttacaaaaaggacacccattatggttctgggtatcgaagtctctgggcaaaatgtgagaacacctgtggactcagggaaccaaaggctcttggacaaaaagtgaggcgccttggacaaaacgtgtaggagaggaccagagcgccttgcccaccttgcgaacacccatgctgttcacctagcctctgtgcttgcagatgccttcaaggacgccagagcttcccgtaatgcatcctccatctcagagttccctggatccaacttcaatccatcgtaaagtgtttcgcaagcactctcgtagtccttcagtagcatcagagcagcaccctgtcggtagtaggcctttggccagtcaggccgcaatttcctgcattcataagcatccaacaaagccttgcctccattacccatgtgatgccagcaaaggcttctatttgagaacaaggttgcatcatcagggtaaaggtccagtgccttactgtagaatcctgttgcagaaagataatcctttttctcgaccgccttattccccaatgactttaactctgttgctttccttttactgacaggctcaccattatcagaaatgttacggttggcaccagtctcttccattgagtaattgcactcatttgagccaccctttgcagcagttgagatgcagtctccactgacaacagcaccagcctcaatcaggaggtttacacatttcaattcaccagcagttatagcagtagctagaggtgtcagatgaccatctaccatcttgttaaatgatgacacaaaaatcagaacttctggaatctgaactcctgaatctgcattgtggtccaataaaatcttcatagcaccatctttccctttactagcagcaacatgaagtggtgtgccacggtttgcgactgtgtccacacaagctccttttgcaagcaatagctgtactgttccacaatctc

SEQ ID NO: 57113 - DNA, 1371 bp, Oryza sativa
  Clone ID: PAT_MRT4530_58958C.1
agaaaacctcccgtctctcggctcctccgctccttgcgccatctcgcggctgaacaggggaggtggcgagcagagcagcggagagcaggggaggggatcctgcaggttttctttagaatggcgacatctttggatatgtcactggacgatatgattaagaacaacagaaattctagggggagaggaaggggtaggtcacagggaggaggtcgaggcagaggtgatggccaaaggttcagctatggttcagggcgtggacgtggtgctggcaccttccgtggaaggggagtaggagtgccttcacgaaggccacttggtgttagtactcggtcatcatcgtatgctattgccaagtcattcaacaaaaccaaggatattgtatggaggcaagatctgtttgaggacagcatggttgctgctggcctttctgtgacagaatctagtacaaagctgtatatttcaaacttgcactatggagtgacaaaagaagatatacaggaacttttttccgagatgggtcatttgaagcattgtgctgttcattatgataacaatagacgcccaactggttcagctgaggtgatattcactaggaggagtgaagcagttgcggctttaaaacgatataataatgtgcgccttgatgggaagccaatgaagatcgaagtgataggagcagatttgggtatggctgctccttcagcaccccgtgttagtgttgtccctggtgcaaggggtagaggacagcgagaagttgtaatgatgcctggtgggagtgggtttggtcgaggtgcagctggttcatctaatttcattcctgggtggaagcgtaacaattttgcacaaagaggtgggcaaggccgaggtcgtggccgtggacgtaataactttgggcgtgggcgtgggcgtggctatgttcggaagggacctgtggagaaatcagctgagcaattggacaaggagctggatagctatcattccggggcaatgaatgtcgactaagatgtcacctggatctcggtggaggcgtgaaatttgcagtttgttatataagtatctgtttacatttaccgctgagttataatagctggtgttatgtcagttattattcaagctttaatattaggtttcaactgcaaattcttgttctaggctagtcactactccattatattattataactggattgtaactgcttgcccaaaaaaaaaaaaaaatctagtttttcatttctttacccctgcccattatactacagtgcatggatcagtatggaatgatgcaggggttgataggcacatcacattttcgatccaccatagccagaaatttgagtaatctgttttactaaaaaaaaaaaaaaaaaaaaa

SEQ ID NO: 57114 - DNA, 489 bp, Oryza sativa
  unsure (1)..(489): unsure at all n locations
  Clone ID: PAT_MRT4530_58959C.1
ggcagcagganncggcacgagtcctnccccacntacactgagtgatcantnnagtgttgntgcntacnnatngcngccnctgtcanggnnncacngggncnnaaaccatctgcatctcnctnacnnnaacgtccnaacctncgcaaggaaaaggacaanggccangccatcnnngatcnnactggccnaccanagcacngaagaaacanacatcccntcccnancggccngcnngaggagtggtgttcaangaacgtgtnnatccanctggtaanggtanccaanggaaaaggtctntnncagttngcccncncgtangnagcnaatgttgnanggtacngnccnatanangncccggnggaatggncntccacnggngnngtctntcttngncgacaggcangtttantantttgggcngacacncnntntcgannantagtntgcggtgctggnctngtcnanaanactgctgccnggcttanctaa

SEQ ID NO: 57115 - DNA, 531 bp, Oryza sativa
  Clone ID: PAT_MRT4530_5895C.1
ggaacaaaacagggggggcattttattggggcttcaaaacctaaaaacaaaccccccccaaagttccccaacccgggggggattttttgttgggacccccccaacctatttcattagacccccccccaaaggccccgtccccccccctattgaaaaacccggggggggccggggggggatcccaaggggggaaggccccggcccctccccccctattattttaaagggttggggccggcccccccgattggggggaagctttagcgaccccccccccggggggggcccggaaaatggggtccccccccgcaggggggcccccccgggggttggcatgggcctggaaaaaaagggatgggcacccctcaggcccgggttttttaaaaacaacggagggggggggaaggaccaaaaatggccccggacggaaaaccccctggaaacccggttttccaagggtacaaacgaccggaacccaacccgcccctggaacaaaaacccccaggctgggggccttaacggcccaaaacg

SEQ ID NO: 57116 - DNA, 372 bp, Oryza sativa
  Clone ID: PAT_MRT4530_58960C.1
atggtgatggcatatgatcctaacaatccttgtatggctgtgggtactatctacccaggcatgcctgagtttaggattgcaatgaggcaatttgctattaacaaggagtttgaattggatttggttaaaattgacccagtttcaattcaagaagatcctgcctccttgcttcttggatttgtactcttctaccccttccccacaactcgggcaacaaatgagagcgcggagattgcagcgcaaagctatcagcagcagggcatagcggggacggtgaaggtcgcggggagttatttacagtggaacttgtattgcttcgacttctccgtcttcgttgtcgtcttggtgatggagggcttctacgcctcctag

SEQ ID NO: 57117 - DNA, 538 bp, Oryza sativa
  Clone ID: PAT_MRT4530_58961C.1
gaaatctagcgaaatttcacctttgcctcctgaaagactaaatatagttaattagatgtagtcatgcagacatggttgaagatgttgaaatagaaagtagtccacttcatggtatttgatatcctttgcaggggggtggtgtaatggcaaagcaagttgcaaatatgtgttgcattatccacaattgaagctgagttcattgtagcgaaaaaagcaaaccaagagctattatgtctaaaaaagttagttagtgaacttgggtttgatcaagaaaagtatttgctattttgtgacaactaaaatgctatcaccacttgagtaagaatacaagtttttactcaaggtgaaagtacattgatgtgcgttatcattggatttgttatgtattcttaacaaatgcggcttgaggaagtctacaccgatgacaatgaggctgatatgatgaccaaggtgatgacaaaggagaagctcaaagctcactagtatgactgccagaagccattgaggtcttccatgatgttgggaggtggaatttgtt

SEQ ID NO: 57118 - DNA, 478 bp, Oryza sativa
  Clone ID: PAT_MRT4530_58962C.1
ctgttactccattatggactccgcgacaaggatctcatccagctgttctgttgtaaaagaattcctgatgatcacagtgctcttattcgtgataagcagaactcgtataatcaggtcgactccaaagcggtatgatcgtcctactgaagctaaaaaagccgatggagagacttaaaatttattatggtgatgttatttggacgttattgcacacaaattttttctcttctttttcccataatattcctatggagtttatgtgcctagcagtctgagcggggaagaagcgctccggcttggtttgttattgtaggggaaaatgcagccaacatcgggtacagtggagcctaatagtaacagaagtgacatagaactaacacaatttttagcaggcagtcagaaaaaaggacttgtattcatcagttgaccatgctactactgcatactgtagtactatgagtaaccaaattttgaagct

SEQ ID NO: 57119 - DNA, 135 bp, Oryza sativa
  Clone ID: PAT_MRT4530_58963C.1
atgcggcagctcgagctgcgcatggacgatccaacggctcaggaagtgacgtggctcaatatgggcgatgacgggacggtgattttccctgatgcaagtagcctcgtctgggttgttaaggaccgaacatgttga

SEQ ID NO: 57120 - DNA, 463 bp, Oryza sativa
  Clone ID: PAT_MRT4530_58964C.1
aaaaaggggaaaaggattttatttaaatttaaaggaccctaagtttcaacaggcacacaggaggagggaggactttattttaaacaaacaaactattatatgggtacaattaaggcccaaacccccccaacggggggaaggctccggggagcactatagtagttgggggaaaacccacatagggggggcaaggggaagggaaaaaaagttggggcttgagcttgggtctgaccaaaggaaacccccctaaattggtgcagttgtagctggtgcaaaatcggtggaaaaaaacaaagggccgggaagggaaattggggggctaccacccggagcggggggaaacactgggggggaaagaatggggggttaaaaaaaggaaacgaaactggttgccaaaagggggttgccactatgctaaacgggggccttaaaaacccacgggatgggctgaacacttgttgct

SEQ ID NO: 57121 - DNA, 594 bp, Oryza sativa
  Clone ID: PAT_MRT4530_58965C.1
tttttttttttttttttttttttttttttttttttttttttttttttttttttttttttttttaaaggacctttttggaaaggcaacatatgccttatgaccaatcccgggataaacaggaggggggcccacaagaaattcatcctttttaaaaatgaaaaacggggctttcccaaaaaaattaaacaatggctaaaaaaattggaaaaaaattggggcccaaaattacaaagggggcccccggggaaaaaggggtttttttcttcaaaaaaaaaaactgggaaaacttgggggagttaacccccttggggaaaaacctcagttcctttttagagagcaaagcaaaggtaacctgagtggtaaaacccccacaatgggaaaggggggggggagcccacaagcagcagtcacaggaagcgaggaaagggccatggaccaaatgtttgggggcagtgctgaccattggctccacaaaaaaacaacgggggttgttgcctccacaggggggggcgcaaaacaggggctccaagggaagggaggggcacaggtggctcgacaatgacaaaaccacccggggtccccggcaagtaaggc

SEQ ID NO: 57122 - DNA, 1441 bp, Oryza sativa
  unsure (1)..(1441): unsure at all n locations
  Clone ID: PAT_MRT4530_58966C.1
atgggcgcggtcgtcagccacgcctccgccgcggccccgcctcccccacccacgggctacgcgcccttcgtggaccccgcggccgcggcggcgccgccaccggcggagaaggacgcggcggccgacgaggagaaggtggactacatgaacctcccctgccccgtcccctacgaggagatccagcgcgaggccttcatgtcgctgaagcccgatgtcttcgagggattgcgcttcgatttcaccaagatgctcaacccgttcttcggattgagccacagcggttttggctgtatcgtgacaatccttgtgcgcctcagtgtgtccatgggatccatggagctcccatcgcagggggcggatgtgatcaaggtccccacctccaactacgagttcggcgcaaactttatggatcccaagatgatgctcattgggagggtttcgcacgacgggagggtgaccgcgcgcgttaagtgcgatctattggaaaatctttgcctcaagataaatgctcagttgacgaacgagccccattactcccaaggcatgtttagctttgattataagggcaaagattttagatcacagttccaacttgggaataatgccttctatggagggaactacatccagagtgtaactaagaacctctccttgggaactgaagctttctggcttgggcaacaaagaaaatcaggagttggctttgttgctcgatatgacacaaagaaaatggttgcaactggacaaattgcaaccactggattggtttcactcagttacgtccaaaaagtatcagaaaaggtttcccttgcatctgattttatgtacaatcatatggcgaaggatgtaacagcaagtttcggctatgattatatgttgagacagtgtcgtctgagggggaagattgataccaatggcgttgtttctgctcttttggaggagcggttgacccccggcgtgaatttcgttctttctgcagagcttgatcactggaagaaagattacaaatttgggtttggtatggttcttggagagtgaggcagtgtcggcggtttcttcggagacgcatgtacgattatagcagttggcatttgtcgacagaactaagacaattttagttttgcattcatttgttttcagttcttcatgggtttgctattgtctacggcaccttttttaattgtactggcctcattacttaaaaaggctcgattaggataatgtagttatgagatggtgttggattgcagtagcaaacctgaatataattcaaacgtgttgctcttttttttgtgcgatatcgcgttcaccgttttttgtgcggtatcgttagttgtactgtactaaacaaaaataaccctcttattgtgacaagattgagaagtatcttgtcggttattctcgcccanatttccccccccctnggttcccctaaatccca

SEQ ID NO: 57123 - DNA, 463 bp, Oryza sativa
  Clone ID: PAT_MRT4530_58967C.1
atgcgcagcgaggttcttagtgtcaatcaaagcgatcgcctcagccgtacgacgcggcgtcgtgcatgccatgtcgcatatgacggcgagccgcctagcccggttaaggaatctcatagcggtgagcgacatgtcagggaaagatggcgaggttgacctgcgaggtggcgccgcggccaagactggatgggcggaacccgcccgtgccgcggcggaccgcatgatgggagtatctgcagagctagctgcaacgcacgagattatttccacaattacattaaaaatatagtttctatatgtcgctattcggacgtgtcgtcggttcaacttcatgcattttattcatgattaatatacgttgtaggatgctctcctacaatagggatggaaacggatcggaaacggacggaaactaactttatcatgtttttaagattttttttacatgttcttctttgaaaaa

SEQ ID NO: 57124 - DNA, 265 bp, Oryza sativa
  Clone ID: PAT_MRT4530_58968C.1
cacgcagctcgccgaccagagacagagagagaccatctgctagcttagctgccatggccgcctgcaccgtctccggcctagccggcgccaccctaggccgacggtcggccttgttcaccggcttgaccacgggcgcccgggtggctgccaggaacccactggtgaccaggaacctggaaaggaacggcagggtcacccgcatgacggttacggaggactggcttaggagggacctggacgggatcgggttcgggctgatcgggtg

SEQ ID NO: 57125 - DNA, 617 bp, Oryza sativa
  Clone ID: PAT_MRT4530_58969C.1
gtgcgcgcccgtccaaagccgccgccgagtccgattttgattctacccggggtaaatcgcgccaattcttgccgcacggttggattaaagttagacggtggtttcccctctcacaattcaaaccaaccaccgccgtgctgaccgatttaactcttaccgccaccgtgcgtcgcacccggattggcgctaacacgtcgccagccgattctatccacggtcaagccaatccttcaccgcatattggaccctaaccgaagccctacgtcgagctttacctcatcgcaccgagccgagcaccgtcgcccctgctctgctctgttcttcgccgccgcaaagtttttccagccgcaatccgtcgtttcaattgatctcgccgctagcccacccacataccaaattaacccctccgccgccgctcgccgtcaccggagaaccctagctacctcccctccttggctgcaacccctttcctcctctatcgcccgtaatggggaacggctggaggttgaagaagagaagagagagagagactgacaggtcttgaggattcttctgacacactagataatatcaatcaatctcaggacatcgagcaaggcaagttactatctaccttt

SEQ ID NO: 57126 - DNA, 926 bp, Oryza sativa
  Clone ID: PAT_MRT4530_5896C.1
tcatcccccctcctcccgccgctcccgccgcctcgcccgcgccctagcgccgccgccgccgcgaatcccgccgcccccgtcctccccgcgtgcaatcaataggggggaattattccccgtgattccctccccctttccccccccaattttccctccctctctcccttggattcgtttggaaaccctcccctaatcccgccggcgccattgatggagcccgagagcgccgcgccggttttcttcccctccggccgccctctcccccttccaacccaatataaaccctccccgcacctcctccgttcgtttccgcctctcgccgcccttcctcctcgccggaatcgagctcgcgccgtcgctctctctctccgccgtcgccgccgagctccagtccgccgccatcgtcgccccggaccacctcccacctcggcgccgcctccttcggcttcgccgcatcctcgccgacctcgtccacccctccgtttcgctcgtcgaccgtcggagcgccgccgtccccgtctacccgagccgcgccgccgccttcctccgctccggccgccttttcgtcgtcgccgtcgacctagggtgagccgtggaccgccgcctcgtttccccctttccctcccttctctcggccgccgctccgccgtgcctatggccgccgccggcgaccataggggcgcgggcgcgccgcctcccgccggccgcgccgccgtggccgccttcgggcgcaccgagcggctgccgcgtggggcccggctcggccataaaggaccggtcttcgggcctctgttgcaaagcactaccgtagttccacatgtctagtgggtaaggcttagtttgtggctcagtcttgcctcctgggacaaggaataatacacgcacgtaaggaacgcccgttgggttaattccggtcgtgacatccg

SEQ ID NO: 57127 - DNA, 852 bp, Oryza sativa
  Clone ID: PAT_MRT4530_58970C.1
tcttgttggttgcaggatcaaaccaactggcatgccccgaaccgattggccttagagcgtttgtcttgaacaaacaaaggctggtttccatcaagaaatcgggttaatgaaggaaggggggaagaaaagcgtgtcaaagtggaggcgaggactttggaggtgattactatcaaagtggggtctcatgatatgccaataccttctaaagatggagccaaggcgattccaagcgacgaaccgaagccgggaccatctctgccggtctaaccaccggccacacgctagtctgaccgggccgactggccagtctgaccggtggtttacaaccggtcctgactggtctccagcgccgatttgacagtagatttgctagaggtggttcgggtgcttcatcgtcttcaagcaaaatcaatagggggcataatattcctcatggaacatagccgaaatcaaggcggatgcctaggaatttaacggctactcaaaagaggaggttgcaacatcttcggactcaagagttaaaagagagagaagccgaagagtggagggatagaagatttaatgagttgtgactgccgccaagaaaagatgaccaactggttgttaaagatgaattgccgccaaaggaagacatggacataaacatggtgtgtatgtttcctatggagttttgtgctatggatgaggttgaagtttttcaactttcactaggtccaagagatgcggtttttgggaagcccgatgagtctaaccgtcatatgaagcatcttaatcttaagggtcatattgatgggaatctctaggatgttggtggatggaggtgccgccatgaacttgattccatactcattt

SEQ ID NO: 57128 - DNA, 1255 bp, Oryza sativa
  Clone ID: PAT_MRT4530_58971C.1
agactcggtcactgtggaacaatggcgtaaacaaccagtgctacaagcatgaagcatgtacatcagaatatcagattctttcagcaccaagcctcaagttcagcaaaacaccattgcacatgctattcaggcagtagcacaataacaacagagttgtgctgattactgtgccatgtaatacatccatcacaggggtcgacaggtgcaatgcaatgcaagggaataacaagcgaagatgcaggtaactgagttgagtatgtagctggttgcttgctagctatgccggctgcgaggcgcgagcacgcgccgctgctgccctctccaaggccctgagccggtttgcctccatgcgcgccctctgctcttcggtcagctgaatcttgcccggttggttctgcgcttctcgtggtggatcatcttgtggtttcgcttcctttggagccatggccggtgtggtttcctcggctgttcctccaacagctgggatttgtggctcatcagcttccttattgtagatttcattaaggagatcttcttgcatgggatccacatcgttgctttcgaccggtatgtctatatcttcttgcacctggtccacgccatggttttcggtcgccggaacttcagtcccaaaaattgggtcttcagctgtggctccatctggttcgccctctgggatgacttcgaccggcggttcatgcagtagggtaggatctccccctctggcaaccctgtccctcagttcagaaacgcatctcctaacacggttactagcccccactttctcgacttttcgcacaaactgatcaaaggagtaataaggaatcaagcgagagtgccagtctgtgtatagcttgatcagattaccaagatcctctacctcgtggccggggcgggcgcggggtttgaaggccttggggaagtagcggaggacgaagccaaggccgtcatcggagagcagcaagtccggagtgagcttgggccgcgtcgccctctccttcttcttcttcttaccctgcgcctggccgccactcccgtcctccccttctgccgccgccgccgccgcggcactcttcccgaacctcggcctcgggtaaggggcgaagcgggaggcgctgggtttggggttggggttagggttagggttgtcggtggatgcagcgccggcgccggcgggctcggaggggcagtcgcgggaccagtggcccggacggccgcacttgtagcagccggtgggcaccgccgccgccatcca

SEQ ID NO: 57129 - DNA, 1734 bp, Oryza sativa
  Clone ID: PAT_MRT4530_58972C.1
atggccgcgagcaaggctgcagcagcgaaccagccgctggagatggacgctgtcgtcaatggcggcgccggctttgaccttagtagcgattcatacaagttaaatcttctaatcaatggttgtgaggagcggatgagggcgcgggcggagcggctcgccggggaggtgcgccgcaggatgttcgccgccggcggcggcaacggcgacggcgagggcggagttacgatgagcgtggccgaagcggcgacgctggtggacacgctcgaacgcctcggactagatgggcacttccggcacgagattggtgtgctgctggggcgtctccgccgcgaggaggcggattttgcaggcagcgacgacgacctgtatactgttgcccttcggtttcgtctgcttaggcagcatggggtctgggtatctgcaggtacatgtgttcgcgacaagttcagagatggtacatgtagtttcagctcaagcctacgtgatgacccgaggggcttgctgagcctgtacaacgcagctcacatggcagcacctgtagagatcgccctagacgacatcatcgccttcgcgaggtgccacctcgaggccctgtccatggaaggcgagctcaaatcgccattggctgagcaggtctcccgcgccccggacatcccactcccacggttcccaaggcggctcgagaccatgagctacctcgtcgagtatgagcaagaggacgaacacgacgacatgctgctggagctcgcgaggctagaattcgagctcacgaggtgtcttcaccttgaggagctcaaggctctctccttgtggtggagagagctttacgagagcgtgaagctgagctatgctcgagatcgcctagtggagtcctacttctggacatgcggcgtgttccatgaggaggaatactctcgtgcccggatcatgtttgccaaggtatttggattgctgtccctgatggatgatacctatgacgtccatgctaccttggaggagtgctataagctcaatgaagctatacagagatgggacgagggcgcgatttctattctgccagaatatttgcgcatgttttacatcaagctgctgagcaactttgacgagttggaggctagcttagaaccacacgagaagttccgcgtgtcctacgccaaaaatgcgtttaagctgtcgtctgaatactacctccgtgaggccaaatggtcgaacaccaagtacacgccgagcttcgccgagcacctggaggtgtccgtcatgtcgtcgggcttcccgatgctggcgccggtggtgctgatgggcgtgcacgacgacgccgccgtggcgaccgcggcggcgttcgagtgggccaccgccgccggcgtccccgacgtggtcatcgccgccagcggcgaggtggcgcgcttcctcaacgacatcgcgtcccaccgcgtggggaagaacgagaaggacgtgccgagctcggtggagagctacatggcggagcacggcgtcggcgaggaggccgccctcgcggcggtggcggcgatggcggagcacgggtggaggacgatcaaccgggcgttgatggagatggaccccgggctgctgccggcggcgcggctcatcgtgaacctgacgaggacgctggaggtgatctaccttggtggcagggacggttacaccttcggcggcgacatcaagggcctcgtcgtcagcctcttccttgatccggtcgccgttatacgtatttga

SEQ ID NO: 57130 - DNA, 917 bp, Oryza sativa
  unsure (1)..(917): unsure at all n locations
  Clone ID: PAT_MRT4530_58973C.1
acttaaataatatttataataggtagnataggaagtaggagtacacatcatcaaaagttacatagcttatcatcaaaagttatatagtttatcatttaggcgcgtacatacgagacaaacatactatttataagtgtaaacaactataagacagttgacaaaggcacacggacagtaggaataaggtaaagatcgttctttcttcgaattgtagcacccaactcctccatcatgtccaccttggttggcgagatgccatcagggagctcccaatcaaagtggtaaagcaatgaggctagagcgagctccatgattacttctgcaaatgccatgccagggcacatccttcgtccagctccaaacggtataaattcaaagtttgttcctttgaagtctatatggccatcctcaaatcgttcaggtatgaatgtctcagcatcctcccaatacttaggatctctacctattgcccatacgttaacaagcacagtagtacctatggggatatcgtaacccatgacctcacatgtctcccgacattccctagggagaagtagtggcactacaggatgtaaccttaaggtctctttgataataagttttaagtacttcaattcaactaagtcatcttcagatatcgtttgctttcctttgatgacgttacttaactcagcttgtgcgttcagcatcactcttggattcattatgagctcagccaacgcccattgaagtgtattagctgatgtctcgctcccagcaccaaaaagttccaggacgacggcttgatattgcccatggtgagaggcatctggaggctcccatccttctgaaccctgagaagcacatcgacgaggtcctcgtcgtcgtccacggcgccggcggccctccgctcctcgtggggatcctctagagtcgac

SEQ ID NO: 57131 - DNA, 1038 bp, Oryza sativa
  Clone ID: PAT_MRT4530_58974C.1
atggctctaattagggagaagaggtttagccagatgaacctctcgctgcacgtcccgtcgcgtgtacccttccaagatgcggcggcggccgcccggcgacaatgcccaccaccggtcgccgcggcgtcgacgtcgtcgacgccggcgtcccgagccagccagttccggctcgccgacttcgagagggtcgccgtgctcggccgcgggaatggcggcaccgtgtacaaggttcgccaccgcgagacgtgcgcgctctacgcgctgaaggtgcagcactccgccggcggcggcgagctcgccggcgtggaggcggacatactcagccggacggcctccccgttcgtcgtccggtgccacgccgtccttccggcctccgcctccgcctccggcgacgtcgcgctgctcctcgagctggtggacggcgggtcgctcgcctccgtcgcggcccgcgccggggcgttcccggaggcggcggtcgcggaggtggccgcgcaggcgctgtccgggctggcgtgcctccacgcccgccgcgtcgtccaccgcgacatcaagccgggcaacctcctcgtcagcgtggacggcgaggtgaagatcgccgacttcgggatcgccaaggtggtccccccgcgccgcggcggcgagcaccgcgcggcgtacgagtacgagggcacggcggcgtacatgagccccgagcggttcgactccgagctccacggcgacggcgccgaccccttcgccgccgacgtgtggggcctgggcgtgaccgtcctggagctcctcatggcgcgctacccgctgctccccgccggccagaagccgagctgggcggcgctcatgtgcgccatctgcttcggcgagctcccgccgctgcccgacggcgcggcctcgccggagctccgggcgttcctcgccgcgtgcctgcacaaggaccacacgaagcggccgtccgccgcgcatcttctcacccaccagttcgtcgccgggaggaacgtggcggcgtccaagctcgcgctccggcggctagtggccggagcgtga

SEQ ID NO: 57132 - DNA, 1603 bp, Oryza sativa
  unsure (1)..(1603): unsure at all n locations
  Clone ID: PAT_MRT4530_58975C.1
accgccgttgggcattccccacccccctcttcccctcctctcctatcccctgtgttccccccccgcccgccctcgcgttctccctccccctcttctcttcgtgcgtgcgcgccgcggccgcggttcctcgagctgcacgttcattccgcgctcccccctcgtccgccgcctgtcctcgcccccgctcgcccttgctcgtccctcgctcgcgtttcttttccgcgcgtctctccccccctccccgctcctccgctccccttcctccgcccctcacctgctccgccgtttcgtcccgcggccctgcctcgccacccttctcgtccgcgccccgcgttctcacccttctatccttctccttgcccccgtccgtcttcatctcccccccctcctccccacgccgccgtgccacctcccccttccgtttctgcctgcctnnnnnnnnnnnnnnnnnnnnnnnnnnnnnnnnnnnnnnnnnnnnnnnnnntaaaccacccccacccagccaccacccaagcccaccgcgaccacccccacccaaaccccaagcgtccaacccccacccgcccacaccccacccaacacccacaacaccacaaccgccacccaacccaccccacacacaaccccccaccccccaccaagccaccccccaaaccaaccaaaaaacccccaaaaaccccaaaacacaaacagaatcaccccacgcacccacgacacccaaccgccgaaaacaccaaccccacaccacccaccccgaaccaccacacgccacaacaaacactccccaatcccaaaccccccacccataccccaagccacccccgccaaccaacccaaacaaacccaccccccccaaaaaacccaaccacccccccccaccccgcccccccgcccccaccgctacaccaacgccataaccaccccagcgccccaccaaccccccccgcangnccaaannangnncccccccccccacatccgtgcctcactactgccgcgctttcccccactgcgggttcccctcgcgcgcgttcgcgcttcaccaccgccgtgccttccccgctgcctcctcaactcctcgccgccaccggttccctactccgtctgcaaccgccaccatcggagcccccgccacctcctcccataattttcctccgtcccccctccccttttctttggtcctcttccccttctaaaccaccaatcctatcgtctccccccccgccgtcgccttcacctgcgtcatcgccccctcagccctcctccaccgccgccgctccctccagcgcccgcccgaccgccagccagcgccaacgccgttgggcccgctgccaagaggttcccctctcctcttccctccccctccacctcctccactcctcctcccctcccctctcctcccgatccaccgcctccgccattgtcgttgtggtcaccattgtccttgtcgtcaccatctccgggtcaggccactccagtcgccggatccaccgccgcccacatcccccaccaccagatccgccaccaccacgcatggggagggcggtgccgctccaggttgcctcctcctcctcctcgtcggcgacggtggtggcgcggatcc

SEQ ID NO: 57133 - DNA, 1270 bp, Oryza sativa
  Clone ID: PAT_MRT4530_58976C.1
ctacgcatctacgccatcaagcttcgggttgccgttgcgtcgtccccttgggccgcagtgccgctgcccgtggtccacacctccactggttattgcagtgctgagagacgccctcctcagcatggctacatcatcggtggacttctcgtcgttgcatcgacatggagctgcaactgtgttgtcctctcgggaccgcagcttcgccgcttttgtcgtcttcatcgtcattcgcgcattgacaacctcgtcgtccgtactggtcatcgtcagccgctcagggtcttcttcctctactttgagcatcgccgccgcatctccaagctgccactgtcgccactctaggccgatggtgcagctacctctacatggctaccgacgtcgccatccaggccgttggtcccactacttcgccttcgtcttcgtccaacatgattcatcgccagcgtcgtcgtatcttcctcgactacacttcgcctttctccgacaaccgcgtgctgctccggcaattctccctctacgccattctcgtgccgcgaccgtcttggaggtcttctctgctagtctcctccgacattggcgtatgattcatggtggtcccctgtctcgcccgcgcgcagaaattgctggcttagtaggagatgacacattccaggaaacagttactagcgagctgttccgcacaacattaggcatgatatacaatgctatcgaaacagttgctggctccagttctccaacctcaaacctatcccttatagagctagtgaagctgaaaataaagaaatgtaccaatgcatctagaaggaaggatgataatgatgatgaagacactgacgaagaagaaattgatgatagtgatgatgaagatcgcatttcggaggttcaagcagcagtcgttcagctctttcaggactatagtaatcagggcaatgcaagggagcataccaatcataacaatgagaatgtaatggatatcgatcccttccatcaaattcataacagtactttccaaactgttggtcaaccgagtatggagcatgatcacaggagttcacaggaaagcataacagaactcgacgcttacctgcgagaaaagaccatcccaatcaagcaagagaatttcgacattgtcaagtggtggaaggagaactgtcacagatatccgatagtagcaaggatggtgagggatttcctggccattccgacgtctaccaggccaacacctcagatgatgaccaagatcagaaaccatcttcgccgctatgcgtga

SEQ ID NO: 57134 - DNA, 362 bp, Oryza sativa
  unsure (1)..(362): unsure at all n locations
  Clone ID: PAT_MRT4530_58977C.1
cccgttgtcatgtccagataagagctccccctctgactcacacacacatcaccgagaagcagagcaagtgcatctccctctcccaccatttgattcgantcccctaancccccgngtcgtcgacgccacaaaccccggcgaccaccatggcctcctccctnctntcctcccnaaaaccctgctccttctcctccgcaaaccccacctccactccacgnccacgngnccaaantctctcccccttncgcgccgncgtccnangcttatcncatggcctcgccaccgnngtcgtngtggcaaacnctagcgnctnccgtngctgttacntaccgngnatntcnncngntnnntnnnggntnnat

SEQ ID NO: 57135 - DNA, 399 bp, Oryza sativa
  Clone ID: PAT_MRT4530_58978C.1
atgagcggagtcgtcagcgcctgcctctccccatccggagccacgacagacacgttgcccacggcgttggggatgaagctcctccaagtttacgcggcggcgttggcggcagctgtggtgggcggcggcaccgtcggcggcggcgtcgtcggcggtggcgatggcaggcgccacggcggcggggcgcggcaagcacgcgggaggaagatgggcggcacgaggccggcggcgggtggcgcgtgcggcgacgacgcgcaaccgacgggggacggcgcgcgcggccaccgggatgtgcactaccgaggcgacgaagctcggcgggcggagggcggcgcgcggccggcggagggcagggggaggtcggcggccggcggagtgcggggggagatctggagctaa

SEQ ID NO: 57136 - DNA, 1321 bp, Oryza sativa
  Clone ID: PAT_MRT4530_58979C.1
gtcctcaaggtaaaattaattaatgcagtatagttttaactttgtccatcgatctcaacctgtaactgtgacgacacactggctagacagaacagcaaacgtttttttttaagagtaaacatgtaatgcgttaacatcatcacgatttcaagctgattcaaggctacgtcaacaactatggagagaaggtaaggtacatggccaaacgcatggtaaatacaacagtacacaaactagataaatctaaccaatggggactatagttagttttgttgtgtatcctttggaggcagagaggccattcggtagcctaaaccagagttgtcacctgcagctgatgagctcctggtgatgcatctacatacaaacaacagtagccttggatgaacatgcgggtctaggtggtcattttgccgtgacacaattccacagcaaaatggtacacgttatgggagaactcctgttcctctgaatatattagattggaggatgctgctgctgctgccagaagttcctttggtacatccaatgagccttaactatcagagtttggaaggtaaatacggtggaaattgttcgccctcagactctttctgcaagtagggcatttcttctgaatctggatggcttgcttgatgcatgtcgtgcagaagatatggccgcaaattgttgtggagggctcctccaacttgttccaacacaccggacagttaaaaaccggttcctttgccttaggaggctcattgctagtcttcaagctggacccttctcccctttctggagagaggcagtgtataacaggtgcaaccctttgacgtttgttcccttcccggctagcatctacttccagatcaactactgccacaggctgcctcctagttctccggttccttctcggaggaggcacttgcgaagcggacaatgtctgcacttcatcatccagagcttccacatcaatgggggaggcgcgcgcaccagtggaggtcggcaccgcgcgacggcttccaaccactggggaggagatcgcgtccaggttcacaacgactttatcaccaggaccatcttgtgattgcctccttggggcacgccgagtgccgctgacagtactcatgctaactttggagctgaatcagtggcactcaactctgaaatcaacctgctcgaatcctcgatccagccgcgcggctcgatgaggaggagaccgcgatttttttcttctttttttttcttttttttttatcttgaccgcgatttatttcaatttcaacacgagtgaagagagaagaagaggagaggtcccggcccgttctcggacgcgtgg

SEQ ID NO: 57137 - DNA, 402 bp, Oryza sativa
  Clone ID: PAT_MRT4530_5897C.1
atggtggcagagtatctgatagtgaagggtcagatcaagtctcctcggatgatgaagatgagtctccccgacatctcggcgaggaagagatggaatcaaaagcatgcccccgttgtggagaaattggacatgttgctagcatgtgtctcacactctgccctcattgtgaggaagaccatccaccaggtgaatgtcccacccgcaaggtcacatgttttctatgcgaaggccgagcaaagggcaatcaacctcaggagggcgataccaagcagaagaccgttattcgcttcaaccagcaatcagaaggaagcttctcctgtgaatgatagcaatatgcagtcctatcatatcatcacagaaccaatcaaggatgcagtcactagaacaatgccagctatgtag

SEQ ID NO: 57138 - DNA, 517 bp, Oryza sativa
  Clone ID: PAT_MRT4530_58980C.1
gaagaaattaaaaaaagaaagggagagaaagaatagtactccgtcgcgaatcacgacagagttcagctcaacaaaagcgcaaaagttccttattaaagaagaagaagaagaagaagaagaagaagaaagagcggtctcgttcctcggttcctcttggcaattggcacagccactcgttccacgaccctaatggcccgtcgacgacggcgcagccgcagccacggcacggaccaaggcggcgccggcgggctcgagttgcacgggcgcgccacgttaagcgccggctcccgctgcgctctgtcgcctccggtggtggtcgcctcactggctcccatgtcggctccaccgtcgttggtaccgtcagcggcggtggcgaaaaaggatcttgagcagaagctttcgttcactgggtgggccaaagtgccgccggcaccaactcctggctcgcacgaggctgcagtggcggctgcggagttggcttcgactttggaggatggcttcgtcgaacctttgatgt

SEQ ID NO: 57139 - DNA, 187 bp, Oryza sativa
  Clone ID: PAT_MRT4530_58981C.1
gtgaaaagatgactcacaaagatggccaaaaaggcaaacacaaagcagcacatttggggaagcccatatcatactgtcttcaccaacacgctcacgccttagaaaaagtgaaaagcttttgcatacgaactgaactttggtacggaatttcccaccatatttcagctagctagacgaccccccattt

SEQ ID NO: 57140 - DNA, 391 bp, Oryza sativa
  unsure (1)..(391): unsure at all n locations
  Clone ID: PAT_MRT4530_58982C.1
ggccgccaaccacaacacacacccccacacccccccccccccggcctcaactaaaggtaccgctctaatggagttcacggtgtccagccaaattggcaaaatcctctctagggtagctacataaaagtaacaggtaatccagttagcaaagcttcaatcacctactccaattcagttacacaaaaataacagtgacgactcaaacatgcaaaaaaattttttggtcctatccaaaagcttgtaagccgggggagcacattttgcatatgaaatctatcacgaagtggcatcactgtaatatttcagctcgatagcgggattgggaaaattttttgattacaaaaataattgtagtcatactccctccggtttcataagtncttggtgttta

SEQ ID NO: 57141 - DNA, 379 bp, Oryza sativa
  Clone ID: PAT_MRT4530_58983C.1
aaatatggggggtttttatatttaaggagtttatttaattaaaggtcaaaatagaattttaaacacttacaaggcaaaattattataggaaagacttagtgaggagactgaacaaggaaaaacatacgaaaagttaaggtaatataagataggaaaattgacaaaacaaaaggagagaaaccttgcatgagtaaagatttcatttgtatacaaaactaataggcgaaggagggtacagaagggcctgaagctatgtggcaatggacccactcgagatgagaaataaaacgactcatacagcataagggaacccagtcacgactcatgagtcactcctgctaggcttgtttgaaactggaataacatttttactgtcata

SEQ ID NO: 57142 - DNA, 297 bp, Oryza sativa
  Clone ID: PAT_MRT4530_58984C.1
aaaaacaaaggacatacccaaaacagggggttcaaaaaaattgggcctaggcccccccccataaaataaaagaaacccttgtccaaaaaggagagaactcccacccttttttataaaacccaacattggcggcggtataccttatgggaaaaaaaaaaagggtaaagggctggagggtggacaaaaaaacgggaaaaaagggggggggttcccctcggccaaaggagaaaccccggggccctttgagtatgcgaggcccgggaggttgttggggggctcaaaggggaaggggcgggg

SEQ ID NO: 57143 - DNA, 1765 bp, Oryza sativa
  Clone ID: PAT_MRT4530_58985C.1
caccacctcgttcgttcttatctccaaagccgaagacccaccgagccgatcccgacgcttcccccatggctcctccgctcctcccccgcggcgcggccctcctcctcctcctccgctccgccgcccgacggccggcggcggcgtcctcccgcggcttcctgtcgagcgctgcggcgggaggccgcgagggggcgctggccgccgccgcggtggcggtggtggggtccggcctgggtctgtggctggtgcccccctcgctcgcggactccggcgaggcggtggccgacgccccggcggtacagatctcggtaggctccggctccggcgcggtaggcgccgtggaggagcgaggccggaagaggaggttcctcctcggagactcgttccgcagaagggtgttcttcaattacgagaaacggatacggctgctcagccctcctgaaaagatctttgaatatttcgcgtctgtgcggaacccggaaggggaagtattcatgttgcctgctgacttgatgagagcagtagttcctgttttccctccatcggagtcgaacatagttcgggagggaagattaaggggggaacgcaatcctggagagttgcactgtgctccatcggagttcttcatgctgtttgacacaaacggtgataggctcatctcctttgccgagtacatcttttttgtgacattgctcagcatccctgagtcaagtttcagtgcggccttcaaaatgtttgacgttgaccacagcggggagatagacaaagaagagttcaagaaagtaatggcactgatgcgatcctataacagacaaggagccaaccatagagatggcttacgtactggactaaaagttggtcagcctgtggaaaatggtggagtggttgaatacttctttggtaatgatgggaacgaacctctacactatgacaagtttacaaattttttgaaaggattgcatgacgagatcattcgtctggaattcagtcactatgacgtcaagtcatctaatactatcccagcaaaggatttcgcattatccatggttgcttctgctgacatgaatcacatcaacaagctacttgatagagttgataatttaggcaatgatcctgatctcaaaggagtgcgcatcaccttcgaggagtttaaatcctttgctgatttgcgacgaagattggagccactggcgatggctatctttacttatgggaaagtaaatgggctgttgacaaagcaggatctcaagcgtgcagcgcaccatgtttgtggtgttgacttaactgacagagtagttgacatcattttccatgtgtttgatacaaatcatgatgggaacttgagctcggaggaatttgtgagagcattacaaagacgagaaactgatgttcgtcagccagcgacaccaggctctatggggctgttgtcttactggctaaacttcaacaagtgttcttcgcttacacagatgctgctcaagtagattgttttgatccttgctagattcttcttggttggatttccgtcacggagatgccgaagcgattttgctgtaaaatatcgtgtgggttgtcaaagggtgccctgtcacatgcagcttaaatattttatagcgcctttcttgcagggggtgagattaatcattcttgtaaattaaggcctatgcaaaatgtaactgatactctgataagacttttgaaaggttaaaaccaactttatccaacaaaaaaaaaaaaaataaaaactaaaaaaaaccctcgtgca

SEQ ID NO: 57144 - DNA, 429 bp, Oryza sativa
  Clone ID: PAT_MRT4530_58986C.1
gccaaacaggttgctgcacaagaagctgaacgtactaatttcattgttaaaaaagctgggcacggcatgatgagtgtgatgatcagggcacatgatgaagctaataatactcagctaattattaaaatcattgtaaacaaccctgctatccttgccttcaagcaaatataagcattcacagagatctatcataccaactaatgttcagataacaatgggttactggacttcattaatctcttgctcaatctacactcacttaatgtatcgaactaattgaagaaatgaacacattcatacatccatacctacgttattactacatatcatgctaataaactatgttatgaacactaacttctttctagcacatcactattaatacttatttatacacaactcgacgagcgactcaacttttggctacct

SEQ ID NO: 57145 - DNA, 988 bp, Oryza sativa
  Clone ID: PAT_MRT4530_58987C.1
agcagtcgatgaatgccaacatatacacatcggcatccgtggattcctttgtacagtgcttaatttttgccagatctcaacgcatgcctaatctgacagagtgacagcttggagccatccagtgtagcgaaccacatctcgcgtagaatccaatttactacgtgcagctcccgacagctacaatctcctctttgagcgtcttcctcttgccatcgtgcttgctcccggccttcgcaggcttcttcagcgtcttcttgagaagcaggtcggtctgacgctccatctctcggatctgatccaacgtcatgccgtaccactcgtcgatccacgcgaagcacagccggtggcacgccaagaacagcgccctctcccccgcgatgatgcagtcttccaggcgttcacccaagccccagatcggagcgtccatgatcaccagcttgtacgtggtcatgacgggacggcatgaatccatccaacccttcaagagagggcctcggctcgtcctctgcgacctgaaggctgtcaggtcgacgtttggggcgctgatcaccttgctccagtagtccctcgactgcaacgcgatgtcgacgacctctacctctcttgcagctaattgttcactggttaaattgtgggcctggttatgtacattgtgctctcttagtatttgccgtttggtgttctcagagcagccattgtcaggtctgatcacagtgtcgatggtcagtgaacacttgctaaaaagcgggcactgataacaaataatcaagaaacctgtcctgctgtttggatatgcgcaccatgattcctcatgcacggtaagtgcacttgctggcgcaaaacctttcatccaagatggaattttgctctgcaaatgataattcttcgaggtgtattggcccttgccaagcttctcatcctcaaatgggacctgttgcagcacctcgacgccctccttgctgttcgtgttttgctgctccatcttcat

SEQ ID NO: 57146 - DNA, 422 bp, Oryza sativa
  Clone ID: PAT_MRT4530_58988C.1
atcgcgagggccgccctttttttttttttgtccttatctgttacttgtcattttcagggagatagacaaagaagagttcaagaaagtaatggcactgatgcgatcctataacagacaaggagccaaccatagagatggcttacgtactggactaaaagttggtcagcctgtggaaaatggtggagtggttgaatacttctttggtaatgatgggaacgaacctctacactatgacaagtttacaaattttttgaaaggattgcatgacgagatcattcgtctggaattcagtcactatgacgtcaagtcatctaatactatcccagcaaaggatttcgcattatccatggttgcttctgctgacatgaatcacatcaacaagctacttgatagagttgataatttaggcaatgatcctgatc

SEQ ID NO: 57147 - DNA, 470 bp, Oryza sativa
  Clone ID: PAT_MRT4530_58989C.1
gtttttctttaggagtttaaatcctttgctgatttgggacgaatataggagccactggcgatggctatctttacttatgggaaagtaaatgggctgttgacaaagcaggatctcaagcgtgcagcgcaccatgtaagtttggctactaagttcatcgtacttaaattcgatatctccaagcaaaagaattgattttgaggcttttcttgatcaaataaatggtctccatggtttttttgttatcttaatgctcacttactaaactgataactcctgctgctcaatacttgattactatcaccattgtgcatccactaagcgattccattccctttttggtttgtgatgtaggtttgtggtgttgacttaactgacagagtagttgacatcattttccatgtgtttgatacaaataatgatgggaaactgagcctggaggaatttgtgagagcattacaaagacgagaaac

SEQ ID NO: 57148 - DNA, 375 bp, Oryza sativa
  Clone ID: PAT_MRT4530_5898C.1
atgcccacccttgcctggatgcgtctgctagaggaaagctacactacaagcccagccgttgcccacgctggtttgtgggctgacgtcagcacgggggggaggcgcggcgccgacaggcgggccccactgggcagcgactcaagggggggcggttcaccgtggaccgggaccacgcgggtggtccaccgccggtccacgggaccgacggcccagatcggccccgagccgatcgggggcggcgatagaggcggccgccgggctcggctcggcatcaaagccggctggccggccagggctagcggcgacggcacgcggccgacggcggcggcggccgaaggcgtcagcgcgcgacttaaagcggtggcgcggcactag

SEQ ID NO: 57149 - DNA, 237 bp, Oryza sativa
  Clone ID: PAT_MRT4530_58990C.1
atgccgggcagtacggccgtggagaggggggtggggttggtggtggaggtgacgttagcggtggcgggactcgtcgtcgtcgtcgccggcggccgcgtgaaaagtggaaaaccctcggccaatgagatcaagatccggattttcactctgtttgtaatgatgtttgtaatgaaagctcctgtaggcgagaaggcgagagctcgaatggatgaagaaagaagcataatcgtcttgtga

SEQ ID NO: 57150 - DNA, 220 bp, Oryza sativa
  Clone ID: PAT_MRT4530_58991C.1
ggtgataggagaagacgacaccgagtctccgaccgcctttggctgtctggattggacgagggataagaacgctacgctgagctccgagaacggcgatatcaaacaaacccaaaagggcacgaggaaactttatgtgtctgctgggtgccggaaccaggccgctgacatctttttgcggtggagaacgtccacaggtctctgcaggatggtttcgaaaggt

SEQ ID NO: 57151 - DNA, 207 bp, Oryza sativa
  Clone ID: PAT_MRT4530_58992C.1
atggccttcgccattcgcctttcgcccatgtggccctctagagccgagcctttggtcttcgcccacacgcttcgtcacatggccttcgccatgagagacgaaagcattatctctgatctcgctgggtacatattcgaggaggaagactaccctattgtcgactacgagtcagaccttcagaccgccatgtcgacaatagttagatag

SEQ ID NO: 57152 - DNA, 222 bp, Oryza sativa
  Clone ID: PAT_MRT4530_58993C.1
agacaccttgacgccgacggcgccgtgggttctgttgcggcccgggggcctcggatgcctcgcgcgcgagcgctcggctgtcagggatgacacgttcgcggtctgctgtgctcagggtaacaacaatgatccttgcggatgaacacctaccgaaaccttgatactgacttctgctctgtctaaatgatagggagcaatggacttctagcgacgtctggggct

SEQ ID NO: 57153 - DNA, 172 bp, Oryza sativa
  Clone ID: PAT_MRT4530_58994C.1
cccgctcgacccagcgtccgggccttttcttcgtgcgcagatgggggggagggagcaggacattaaaaccctctctggggggcacaccctgggaaggtgccacaaggaaagatctggtttcgagggaccttcgacaagaaaccctctgcctttttacttctctcacttcact

SEQ ID NO: 57154 - DNA, 511 bp, Oryza sativa
  unsure (1)..(511): unsure at all n locations
  Clone ID: PAT_MRT4530_58995C.1
cgagccccatcgatcgtattcgcgtcaagcttcttctcttcctctccaaatttccaacctctccatccatccatcccgcatccgattcttccaaccaatctcatcttcttcctcctcctcggcggctcgccgattccccgacggcgatgaagatcacggcgctgctggtgctcaaatcccccggcgacggcgactcgtcgtcgggtggcggtggcggcgagcaggagcaggagcagcaggcggcggtggtggtggcgaacgcgaccgacgtgagccacttcggctacttccagcgcaaccccgcccgcgagttcatcctcttcgtcgcccgcaccgtcgccgcccgcacccccgccggccgccgccagnctgtccagcacgaagagtacaaggtgcattgctacaaccagaatgggctctgcgccatcgncttcaccgacgaccaataccccggcaggagcgccttctacctnctnaacacggggctggaagaagacccacagacttttgg

SEQ ID NO: 57155 - DNA, 3867 bp, Oryza sativa
  Clone ID: PAT_MRT4530_58996C.1
atggagctccggtgggatccatggcagggaaactcttccgtcaccgcctacctcacctcctcctaccgcatgccatgcttcctctacaccctcctctccgtatcccctttctctgttgatcttctcgtggtgggtgactgtgtcaacgagcacgtggtcgaggccgccggtgtatggacggatcccgaggaggaggaggagcggacggcccgcatgagcctcgctggctccgccctggaggcggccctgcaggcggtggggcgcggcctcgacgccgccggtgaccaccggctgctctactgcaagggcactgggaggctcctgatgctggacgagtcccgcgcgcgggacctgaccatcaacggcggcgtcctccgcggggtgccccccgacgtcgtggtggaggagggccacggcatcctcgagcgcatccgccaggtcccgggacccccaaccgatgagcccgtcgtctgcagcttcccgaagatggctgagtgcttcaacaggaaggcgggcttgctggaaacaacagtaccgctgggttccttcaactctctcttcagctttactggttcttggaagaatgatgaagcggcgacgaaatccctcgcgattgatggctactccgtgcctctgtttaaagttaagataacgagtggtgaattgtttctgcatgagagcgttaagcgcgcaattccacatagttgggatccttcagcattggctagctttatcgagaactatggtacccatattattacttctgttacggttggtggtaaggatgaagtatacataaagcagcattcctcatcccaattatcagaattggagttcagaaattacgtcaaagaaattggaagcgagagattctcagatggggatagcaagttaaatgcaactcccataaattacagtgagaaggatatgacagtaatcttcagaaggaggggtggttgtgatcttgttcagaattttaatgattggataaaaactgttcagtcagcaccagatgtcataggcatgacatttctccctatcgtctcacttgtcggtgatatgcctggaaagaagcacctcgctcgtgcaattgaactttatttgaaatacaagccccaaattgaagagttgcagtatttcttggatttccaagttcaactagtttgggctccagtaccaccaggtattgctggtcaacatagaaaggagcctgtatgtccatcacttcagtttagtttgatgggcccaaagctctttgttagcactgaacagatatctgttgggcgtagaccagtcactggtctgaagctatgcctggaaggagccaaacagaatcgtctggctattcatttgcagcaccttggctcattgccaaaaatatttgtacctcattgggattcccatatcacaattggaccgccaaagtggcaaggccctgaagagcaggatagccgctggtttgaaccaatcaagtggaggaattttgctcatgtcagcactgcgcccatagagtacactgaaacaagtattacagacctatctggtgtttatattgtaacaggagcacaactgggcgtgtgggattttggtgcgaagagtgtactccatcttaaactcttattctccagagttcctggatgcacaattaggagatcagtgtgggaccatagtccatcaagttctttggtccataggacagatgaagcttcatcatcctctagtgataatgctaaacttgtgaagattgttgacatgaccgagacattgaagggcccacaagatgcacctggccattggctggtaacaggagcaaagttgggggtcgagaagggcaagattgttgttcgtgcaaaatactcgttattaaactattgaccaaatgttgaaagcattcattcattcactctgctatgaagcatcctgtttaaagatagcaaatgtttttttgttcatcatgtttggtttttaatgtaacatcatatggattcgtgcttctcgatgaatctataagggattagcaccttggaaaacgaggagatgagcaaagtaactcaagctaatggaatagactccagggaacacaaagggcagagcatagcagttgaagccaacagcaaaggagagactcgtgaagtcgttgaagggaaggttgactggaggggaagacctgcaataagagggagtcatggtggtgttgccaattctttcttcattcttgtgaactttgggctcgagaaccttgcctcgttgtctctagccgtgaaccttatcatctacttcatgacggtcatgcacattggtctgactgatggctccaacctgctgaccaactacatgggcacgagctacatggtcgcagtgctcatctccgtcttcgcggacactttcattggccggtacaagactgtcatcatatcgtcagtgatcgagctcgtgggcctgctgattcttacactgcaagctcactccaataagctgaagccaccgtattgcgtcttcccgttcgaccccaagtgcgagacggtgagcggcgacggcaggacgcacctctacgtggggctgtacctcgtggcgatcggctcggcgggcatcaaggcggcgctgccggcgcactgcgccgaccagttcgacgagaagcaccccacggagaagctgcagatgtccagcttcttcaactggctgctgctcagcctctgcaccggcggcgccatcagcgtcacggtgttcgtgtggatccagagctacaagggctgggacaaagggttcggcgccgccaccggcgtgatgggcctcgccctcctcgtcttcatcgccggcctccccgggtaccgcatctccgtcgtgcagggcagcaccgcgcttcttgaaatcttgcaggtgtatgttgctgccatcaggaacaggaatatgaagctccctgagaacccagacgagctgtacgagatcagcaagagcaaagctccccctgacacggacttcatggctcacagggataaaccgttcaggttccttgacaaggcggcgatagtacaggcgccaacggatgaggcgccgagcccatggcggcagtgccgagtgacccaggtggagcacgccaagacggtgctcgccatggtgcccatcttctgcagcgccatcatcatgagcacctgcctcgcgcagctccagacattctccatccagcagggcgtcaccatggacaggaccatcggcacgttcaagatgccgccggcgtcgctgcccatcatcccgctcatcgtcctcgtgttcgcggtgcccatctacgagcggggcttcgtgcccttcgcccgccgcatcaccggccaccccaacggcatcccgcacctgcagcgggtcggcgtcggcctcgtgctctccatcgtctccatggccatcgccgccgtcgtggaggtgcgccgcaagagggtggcagcaaggcacgggatgctggacgcgaatcccattctcgggaagcagctgcccatctcctgcttctggctggcgccgcagttcaccgtgttcggcgtcgctgacatgttcaccttcatcgggctcctcgagttcttctactcgcaggcgccgccggcgctcaagtccatgtcatcctcgttcctgtggtgccccatgtcgctcgggtacttcctcagcaccatcatcgtcaaggctgtgaacgccgccaccaggggcgccacggcgagcggcggctggttggccggcaacaacatcaaccggaaccacctcgacctcttcttctggctgctcgccgtgctcagcttcctcaacttcctcaactacctcttctgggccagctggtacaagtacaagcctcagcagtcagcccacgtaccagcagagcacaaagtatga

SEQ ID NO: 57156 - DNA, 1696 bp, Oryza sativa
  Clone ID: PAT_MRT4530_58997C.1
ctagaactagtggatccccgggctgcaggcccccggcggcggccactgacttcccacacttctccgagctctccattcccgcgacccattgacccatcgggagcgcgccaatggcggaggccgccgtgctcctggccgccatcctactgtcgctgcaccctctccccatgtccctctccgccgccgccggcagcgacggcggcggaggtgacagtggcacggccgaggcggccgcggaccgaatcacggccctgccggggcagccacgggtcaacttctccatgtactccgggtacgtcaccgtcgacgcggccgccgggcgcgcgctcttctactggctcatcgaggccgccgacccggcgtccgcgccgctcgtgctctggctcaacggcgggcccgggtgctcctccgtcgggtacggcgcctccgaggagctcggcgcgttccggatcaaccccgacgggaggtcgctctacttgaacccctacccctggaacagagtggccaacatgctgttcttggactcccccgccggcgtcggctactcctactccaacaccacctccgatctgttcactgctggtgataacaagacagctcatgattcatatgctttcttggtgaattggttggaacggtttccgcagtacaagtaccgtgatttctacatcgcaggcgagagctatggagggcactatgtccctcagttgtctcagctagtgtaccggaataacaaagacgttgaaaagcctatcctaaactttaaaggctttatggttggaaatgcggtaatcgatgattaccatgactacgttggcacatttgagtactggtggacacacgggctgatatctgatgatacatatcagaagctgcaggtggcctgtgattttgaatcatctgctcacgcatcagaagcatgtaacaagatttatgaagtggctgaggctgaacaagggaacattgatgcatacagcatctatacgcctacctgtaaaaaaacttcatttctcaaacgcaggttaataaggggtaactcgccatggttgcctagaggatatgatccctgcactgaaaagtactctacgaagtactacaacctaccagaagtgcaaaaagcatttcatgccaatgtcactggaataccgtatgcctggaccacctgcagtgatgacttgttttattattggaaagattcaccaaggtccatgcttcctatttaccgtgagctgattgcggctggtctaagaatatgggttttcagcggcgacgctgattctgtagtccccctcactgcgacaagatactccattgatgcactctatctacctactgtcactaactggtatccttggtatgatgatgaggaggttgctggttggtgtcaagtgtatcaaggtttgacactggtgacgatccgaggagcagggcatgaagttcctctccatcgtccacggcaagccttaaaactctttgagcatttcctacaagataagcccatgcctcaacctgtacatagcattcaatccttttagaattttcttccatttaaagtggaagatcatgccacgaggccatgatgttgtataatttgaagtctgtctcccacattttctgatgaacagatgaaatctgttcaaatgacagctggccatcattcttaatttattcaactatatgttcctagtgacttcag

SEQ ID NO: 57157 - DNA, 1959 bp, Oryza sativa
  Clone ID: PAT_MRT4530_58998C.1
atggacactccggcggccgccgactggtcggagcttccggccgacgtgctcggcctcgtcctcctcgagctcgagttccccgacctgttccgctccgccgccgtctgcaagctctggcgcgccaccgcccgcgacatacgccgcctcggcctctactcccgcgcgcagacgccctgcctcctctacaccaccgccgccgccggcccgcgcgccgccgtgctctacagcctcgccgacaagacgacgtcctacacggtccccctcccggacccgcccatcgcggagcgccacatcgtcgggtcatcccacggctggctcgtcaccgccgaccaccgctccgagctccacctcctcaacccggccacaggcgagcagctcgacctcccacccgtcgccaccatcgaacacgtaaggccactctacgacgacgccgggaacctcaacaactacaagttggtctactacgacggcggcggcaacagtcaccggagcaacgacgatgacatgcacacggtgacgcacccgccggagacgttcagggagttcttgtatctcaaagccgtcatctcctccgacccatcgcgcggcgacgactacacggtgatgctcatccatcacccatatcttcagctctccttcgcgagatccggcgacaagaagtggacatggatcaagatggggaacaatgagtgtgagtggttcgaagattgcatctaccacgacggcgtgttctacgcccagaccgttcacggcgccatccacgccattgatgtcgtcagtgcttcttcctccttcacccatagactgattctcaagccgaccatgggtgaattgggcaccctctacattgtacgtaccacggaaggtgacatcctgcaggtcttgcgagtcacggaagaagatgaaggtagcgagcataaggacgtacgaacaactgaaatcggggtgtacaaggttgactacaagaagcaagatcttgatgacgtcgatgacataggtaacaatgcattgtttattggcactagttactcgatgtgcttgccagtgaaggattatccacacttgatgccaaatcacatatatttcgacgatgactacgggcgacggcggctccggcagcggcaaaggggatgggtggcggcggtgaccgggctcggcggcggccagtctcggcgacgacgacacgtgggcgatggatccggcggcgggctctccttgtcctcctccctcctccaccgctgccagttgccgtcgccaccaccgctgcgggctgccatcgcctctaccgcctctccgccgcgagctcagggccggccggatccggctgccgcgacgtcgggggtggccggatccgctgccgcgtcgacgggggaggccggagccaccaccaccacgacgggggaggtcggatccgccgccgggtcaacaggggaggccggagccgccgccaccacgacgggggaggaatgtgaaatggactacatgaatggaaatgatgccggaggtaccagtagcaaattgaatgatagggcagaggtgtctaggaaggacaaagctagtgtttcagagctggaggatggaaatgtttgttcccatcatggcattgaagagcctaatgaagaatcaatgcaaggcattgtaatggaacaagaagaattaagtgattcagaggaagatagccagcatgtcgaatttgaacgtgaggaaatggatgattctgatgaggaccaagttcaaggtgtcgaccccttgctggctcaaaataaggaggtttcaacatcagttggttgtggggagtatgaaggcagtaataatcagagccagaaccaacaaaggttagtacaggtgggtggtaaacagggtgcagcaacgcagaaaccacagaggctttctaatgccagaccagcaagagaaaagctgaagggggataatgcgaaacgtccaggatctagaacaacc

SEQ ID NO: 57158 - DNA, 843 bp, Oryza sativa
  Clone ID: PAT_MRT4530_58999C.1
atggacaaagatccagatcgacccaggaatgataaggcaactatccttagtgatgcaattcaaatgctgaaagatttgacgtcccaggtgaacaagcttaaagctgaatatacttcactctcagaagaagcacgtgagttgactcaggaaaagaatgagctcagagatgagaaagtttcactgaagtttgaggttgataatctgaatacccagtatcagcaacgaatgcgtgtgctgtacccttggactggaatggagccttctgttgtcattgggccacccctgccatatcctttttcagtcccagtcccagtcccagtccctataccttcaggtgctgttcctatgcacccacagctccaggcatacccttacttccgaaatcaaacttctggaaccgtctccaatccatgcacaccttacatggcatacactcaacccatccatcctcctactgatcaactatctaaccaattcagtgctccagttcagcattcaagtagtaatcgatctcactctatggcccaagactctagaagcaagtcctctgcactgcagcaagtaagttgtagagggaaacatgatgactttgatgacgttgcaactgatctggaactaaaaactcctggttcctcagcccctctacaatcagagattgccaacaaggattcctcttctgacttgaaaaaaaagcagcagttcatacaggaaactaaaggtagttctcttacagaaggcagtagtagttcaagcagatgctcgtccagtggtcctccagatgtctctaacagtattgaaggtggatcagttgctgatgatcaacgatcgacagtacagacatag

SEQ ID NO: 57159 - DNA, 601 bp, Oryza sativa
  Clone ID: PAT_MRT4530_5899C.1
cgatggacaatgaaccatgtacatattatattttggcagccttcctgctgcgctttattgaacaagactgttgtctacaattgcacaaaccctagcagaaaccgggctaatgcctgggatttattcactggtcacagtatccggagtatctgaaaacaacattacaatctatcctgcggtacacgtagatgtaacgcactatccagtaggtaggtaactgctctagcacatagcaatgcttgcagcttgactacaactcgacaatcttctgttaatggaggacggttctcccagcacgtacctgtagtctctcagggatgattcttcagatactcaggaagccggtgtgtagggaagtaacgaccctcgtcactcggatccatcggcggatctggagcggctgctggagactttgcagcaggaggattgacgaccggagcagctggaaggttgccgcctggaacggccaccggtgcagctggaggatcgccggctgaagcggacgccgggaaagcggaggcggcggagctgtcggcgaatgccattcgatgtagctagctcggcaaggcacaaagattgttatttcagctacccaatgtct

SEQ ID NO: 57160 - DNA, 416 bp, Oryza sativa
  Clone ID: PAT_MRT4530_589C.1
gccgctcaagcacatacgctaccgctctaagcttgcatccgatgtgccggcggcggcggggtggctatataatgtgaggccagtcatcacttccaggatctgaacaacagcgaaccaaggatggaaagcgatcttcaccagcgagagtcatgtctgccgtacgtcccaacgcatcagccgctaattaatcctattgcatatactttgatctataggtgtatagtgaaatagttattcgcgccatccatcagctctatgctagcgagtaaggaggcttatgtagtgaaagaactgcagattttactgaagtgatcgtgcacctcgatgtatacagcagtgagacagaagattaaccatcattccctaatgcctactaatgttaactatgaaaaaaaaaaatacagggcgtccgctct

SEQ ID NO: 57161 - DNA, 510 bp, Oryza sativa
  Clone ID: PAT_MRT4530_58C.1
tcagacgctcacgagcgtcgtgttatattactcagagccccgtgccccgggtttcaagttggtccaccaccagagggaaaagccaggtgttcaccggcgagcttccccgcggacagcttggcttattataccccaaccacctatgccagtggtaaagaagccacaaagagaaggatgtgctaccatgccattcaagccaatcctaactcctagggtaacccacatggcaggaaagagttccatctccgggctctcccaatgatggttctaccaaaggcatatcgcttctcaagagaagaggctcagaggctcaagcataacggaggagatgattcggccattcacccaatccaatacaagagctcaccaagacgtttataatccgccaagaatcttcttagttcgctccggataaagaataactaataaataatccacacctggtttgctggctaggtccgccgtctttcgactaaggaggataaccctctcttttaaaaaaaaaaaaaa

SEQ ID NO: 57162 - DNA, 366 bp, Oryza sativa
  unsure (1)..(366): unsure at all n locations
  Clone ID: PAT_MRT4530_59000C.1
tactcttctttaatatctttattttgtcttaatggcgaaactgagaagtgctatcggtacccgacatatnaaaagattgtaccctggtaaatattgtaacaatgcaataatttagagtaatgcgggacgcgtggccgcctgtgcatcaacttcatggggattgtttatagtgtttgaggattaattactgcttggatgatcgctgggaccggaaacgagaccataccagatcctatgttccaaggactggacttagcattagtgaaattcngtggaaagctaattatccaaatgaaatatttcatgtcattgatgcttatctcacagaagaatgcagcgagtttgctcaagcaaaaaaaaaaaaaa

SEQ ID NO: 57163 - DNA, 2853 bp, Oryza sativa
  Clone ID: PAT_MRT4530_59001C.1
gttcgatcaagctgtgttaacaagctgtgttaattagcagccatggcctatggtcttctcttgccctctcgtcagggttaggtttttattttctctctctcctgatttctctcttcgcttccacttcccaaaattctcgagtcaaacctcgtggcgttcggccatggcgacggcggcggtgctcggatcccacgacgccctcgacaaccggatgcatctgggggccttcgccgtgtccccggcgtcgaagccgaggcggaggcggcacagcaaggcggcgtcgccgccccccaaggtggcggcggtgagctcgccgccggtggttaagtcggcggcgagggtggcgtcgcctcctcccaaggctgcggcggcggcggcggtgcctcaggggcgtcgctcgccggtggcgaggaagcaagggtcgccgacgaaggagttgccgaagcagaggctcgtgatgggggagatccggatcctcaagcgcggcgaggagccgccggtttcctcgccgtcgcctgctccggttgcggcgcaggccgcggcggttgaccagcgggcgccccgtgttccggctgtggcgcaagccgcgccgactgaccagaaggcgcctcgccccgccagatcgaagcagcagcagcacacggccgctgtgccgacgaagatcaagtccgtcgccgacgcgccagtctacgccggcccggccttctcctcggcttcgcctgagccgagctccctccccttcccggccttcatccgtcgcgccgaggccgaggcgacccgcggcctccgctgcctcctccgcatcggcgagctcccttgacggcctctctcaccgccgtcttccccggagccgtgagccgtgcacgctcctctcctcgtttctcctcctcttctctgatggatggattgcttggtggtttcgatccgatcgaaagcttgtccggatcagatcccggctgcgttccgatcaaactctcccggtattttttcagaggacgagtttgggggaacgcatctgccggtggttggatttggtagtggttaggttttcaaaagtttcgtggtggaattatgttgggggtttgcttctacgaagaacaacactaggttgattagttctttgtcttttgagtttggtttttaggtggtgtcttggttgggaaaaattggggttagtttggtggaaatttaggctggcttggtgttgctgatctgttagtacagcagtagtggtaataatagtagaggtttggttagatgaataattcgtcggtagtgattgtgatttgtggtttggtgagcgtgagttcaatgtcaggtgaagaatagtagcactaaattcgtgttaggtattatgtccagtgtcaaaggcaagacatatatagttcttattatcagtaattaagttatgttaggtgttatctttctgttcgtctgtaagatatatatagatcttatcgggtaatcaaatcaactatgtatcagatcctcgcagtggtgaatttcattcaacacatcagtggatgtttggttatcttcttttaaaaaaaaaatactgaaaaaaagtggatttgtgttcttactttgtgcaagtaataagtagactacccttggattctcaacgaggttgcttcacaatcatcatatgcataccaagatttaattaagaactgccacttgttatacccgcagtttccgcttaaaaaaaaaaagctttttgttcttattcggaagataaactttgcttgttgaaaaaaaaaaagcttgggaggaggaacgtggcaggggtcgctgctgctgctgaacctcctcatgtacgtcttcttgctggggttcgccgggtgggcgctcaacagctacatcaagaacgccggcgccgacgtcggcgtcggctggggggagcagccgtggtcgccgtactaccgccagagcgcgtggttcgcctcgaggttccacctcgcaacgttcgcggcgctggcgggggcgctgggcgtcacggcgaaagcgtccgcggcgtaccacggcggccgctcgggcgcgtcgtggcggccgcaggggctcgccgccgcggcgtcgctcggcaccgccgcgtgggcggccaccgcgctggcgttcggggtggcgtgcagggagatccacgacgccgccgcggcggggcccgccggcgccgcgcgcgggtggcggatgcgcgcgctggaggggctcaccgtgacgctggcgttcacgcagctcctctacgtgctgctgctgcacgccgccgtcgccggcgagcgctgcggcctcgcctgcgccgccgacgcatgatcatctcgatcgagctctctggatcaatttcattaatttccaaataataataaccgggcgtgtttgtgttatgtcaccgggaaatgtgttttgctgatgtgtacgcgttggggttctcgcgacgtcgattgtagtattgcaaatttgctgctttttaataatggaataaatatccccaccgctgcactttaaggatgcacaaataaaaaaaaaaaaaaaaaaagcgccgctcgtcgctagaactcgtccgcccacgcttatgtgtaacataaacgctaatgaatcacatttcaagtaggattattgagaagttatctgctgcgaaccatactgcatgaatgcatttaccaactataaatgcctcaaggcccgtaacaaatctagacatcgaccttcttcctgtgataactgtggaaccaatacttttttagaagaactgtaaactaaaatcaaagcctgcactatagttcctgtgttactgaaagagtgcaatgccacctaaaggactgcaaaatgtcattaacaaagaaaatcaatctggacaagcat

SEQ ID NO: 57164 - DNA, 335 bp, Oryza sativa
  Clone ID: PAT_MRT4530_59002C.1
atcagtccctaagctacgaatgggagcctgtgaaacgggcacttctttctgggaagggtggagctgcacaaatcagcgggtaccggcacggtgaggtcgcgactataaatggcgacccctgccgctttaatgtgtgagactgggaatgtggacctcatgactcatggtccatctgcacttggttcagacgcaacgccttagcctgagctagacagagaggacgtcgaagctgtcttgttgtaccacggctgctggtaccaccagctactttggcagcccgttcgagatgttttaaattcgaccatgcctgagttagtaatagcccaagaacctct

SEQ ID NO: 57165 - DNA, 186 bp, Oryza sativa
  Clone ID: PAT_MRT4530_59003C.1
ggctgcagcgacttgtagcggccgcgccgcggggtgaagtcagcggtggagggggacgggggtgcaacgacgtgcgaaggatggcatgcgacggcggcggggtgacaaattgcgtgcgtgattttctgccggtgaacccgcgagcggctctggcgggcgcgcgcccggagtcggcagcggcgcccg

SEQ ID NO: 57166 - DNA, 375 bp, Oryza sativa
  Clone ID: PAT_MRT4530_59004C.1
gataaaattgggggaaagatgcgatgcgatgcggatggggctgcccgcatggttgttatttggggagaaccaattggatgtttaagattggcctgcatgggcctggcttggtgcacccatggatggggatgggattgctgtggctgcctggtgtgctgactgagaatggtggtttgctgtgcctgtgcccaccctgtgcgcccccctgtgctgctgggtgtgtgttgactgaggggtgggtgacgggtgcgaattgagttgcttgcccattggctttggcatttgggtggctgatggtgccgtgctggggctggatggttttgctgctgggatgatggactgctgcgtgtgtgttgtgctgccagatgagtgttt

SEQ ID NO: 57167 - DNA, 111 bp, Oryza sativa
  Clone ID: PAT_MRT4530_59005C.1
atgttgccgtctgatatgatccggtatgagtctgtggacgagttctggagaggcgccaaggagggaatggacgaccatttgccatggcaggcgtgcattgggctctcgtag

SEQ ID NO: 57168 - DNA, 221 bp, Oryza sativa
  Clone ID: PAT_MRT4530_59006C.1
atggcggggcgacctgcgagcggtggcggcaaccgggctgagctccatcgtgacgaagacggaggagaccaaagcggcggcggcgggaggcacacgaggcggggtacggcgagctcggcccggcaatgggaggacgaggggagccggcggcggtgcgagcggcgactgagggacgggggccgacgggccagagccggcggcggtggcgggagggcgggcgg

SEQ ID NO: 57169 - DNA, 200 bp, Oryza sativa
  Clone ID: PAT_MRT4530_59007C.1
gttttaatagacctatcgaatcagctgggtttgtacactagtgcatgttataactcgcgaattgtacagttagtcatacataaagtatgttataactttctatacttacatgtataggattgatgactactacactgtaatctcaactaatgtagagttcgagtgtcagggggatccggaggaagcaatgaggtcgggca

SEQ ID NO: 57170 - DNA, 326 bp, Oryza sativa
  Clone ID: PAT_MRT4530_59008C.1
atgaggaggctggcccaacggggtctcactgacatcgttgatatcttcctaccaaccagcaagatcaggcggctacgtattgggacgatggcagcgggagatcggatagaggaagagtcaatcaaacaaaaagaggaatggcagccagggggaacagaagaagaggagtttggcattagtgtgcttaacgtggtgggtaccttcagttgcgagaaccttggaatcctcggcccaccccccagaatttctgagtggtcctcgtgccggccacggcgtcggcatcgccacaaaaagggggcaaaaaccggaggcgagtgcgcgtacaa

SEQ ID NO: 57171 - DNA, 382 bp, Oryza sativa
  unsure (1)..(382): unsure at all n locations
  Clone ID: PAT_MRT4530_59009C.1
caccctccggggcgggggggggcggggnagaaacaaccagngctgcggctgcagctgctgttcaagatgatgatgatgaagaggtagaccaggagggagtagagccaaacgacatccatcttgtgatgacccaagcaagagtgtctattccaagggcagntaacgcgctgggggcgggtaatgtanatatantctctgccatcatggagcttaccacctaaatccgaaacttttcctactttgatgtgcttttcctgtttttgttttcccattttcctttcaagtgattgtgcctgttcggtcattatatactatacgtttggactcatttcatattttataaatttgagtggattttcatgagttacnggggcgaaccaaa

SEQ ID NO: 57172 - DNA, 5665 bp, Oryza sativa
  Clone ID: PAT_MRT4530_5900C.1
tcagatgcgtttctcgtggtagcggcgaagggcctgttggtagctggctgctcgaacggcaactcgttcgcgatgttcctcgagtagattcacatcgtcatttcgctgctcctcctgattctcatcggagtacttctgtgctcgtgtactttgatatcgtagttcggtgggaagcatggcctctgagccgtacacgaggaagaagggtgtctccttgttagacgttgtcggtgtggtacgcacagcccatagtactgatggaagttcttcgacccacttcttgtcatgtgacatgagcctgtcgtagacgcgggtcttgattccttgtagtactatgtcatttgccctctcgacttgtccattgctctgagggtgagaaaccgaggcgaagcagatcttgactcccagcctgatgcagtaatcctgaaaatcggcactaatgaactgggagcctttgtccgttatgatacggtggggcaatccgaatctgcagaatatccctttgatgaatttgatagcgttgtcggccttgatttcccccgtgggtgtcgcttcaatccatttagtgaatttgtcgatcgctacgaataggaacctgtagccgccctgtcctcgtgggaatggcacgagtatatctagcccccagcacgagaacggccaagtgagagggatagtctggagtgcttgcgctggtagccttgtgtgtttactgtgaaattgacaggcttcacaccgctgaaccatgtcgcaggcgtctttgagggcggttggccagaagaacccttgtcgaaaagcttttccgactaatgtccgaccggcgacatgtgacccacagatcccttcatgtatgtcgaggaggagatgtctgccgtcgtcggacgagacgcattttaggagtaccccatttggtgccttcttgtatagatcgttgccgatcatacagtagaattttgctttacgggatattttctcggcttctgcgtcgtcctcgggcaactcttcgctgcctatgaatttgatgagtggggtgcgccagtcgtctgtggtctcgatatcggcaacggcgcgctctgcctctgtagcccccgagcttttgttgagggagaccgggctatcttcgccgcttgcgtcttttactgatggccttgtcaggacgtccagaaaggtgccaggttcgagtggctctcgtctggacgcacgccgtgctagatcatccggtttgatgttgtccttgcggtatacatgttggacctcgatcccatcaaaccttttttccagcttcctgacttctgcgagatacttagataactcggggctagagcatttgtaatctttgtgcacctggttcgcgactagttcggaatcccctttcacgatcagtcgcctaactccgagtgcagctgctgctcttatcccggtgagtagtccttcgtactcggctgtgttgttagtcgccctgaagttgaggtaaattgcatgcttgaactgatctcccgaaggtgatgtcaagatgaatccttcccctgctccttggctgttgagtgcgctgtcgagcgccattgtccacgtttcgttgtcgatttggttgtctgacctgttatcaggcatagtccaatcggctacgaagtcggcaagtacctgggacttgatggctgttcgcggcacaaagcggacatcaaattggcttagctcgactacccatttcgcaatgcggccgacaacgtctttgtttctcactacttcaccgagagggaaggaggatacaactgtgaccctgtgggcttggaaggagtggcgtagctttcttgatgtcatgattaccgcgtagagcagtttttggatctgtggatattttgtctttgcgtcgtggagagcttcgctgacgtagtagactggtcgttgcactttctctctctcgacaacaatgacagtgctaacagagtatggcgtggcggcaatataaagaaataattcttcattaggttggggggcaacaagtacaagtggatttgataggtagcgcttgagtgcaatgaatgcctcttcggcttcctgcttagtgccgccatgcatccggttagcttttgtacttccttgagtcttgtaggcaacttcatgttttcgattgccttgattttctcgggatttgcttctattcctctgccagagacaaggaaaccgagcagcttgcccgatggtactccgaacgtacacttctctggtattgagcatgaggtgatatcgtcggaggttgtcgaacgtttcctgcatatcgtcaatcaatgagtcgcttatcttggtcttaacaacaatgtcgtcgacgtaggcctcgacattgtttccgagttggtcgctaagtgtgccctggaccgtgcactggaaagtgtttcctgcggttattagtccgaacagcatcttaacgtagcagaatacactgaacggcgtgatgaatgctgtcttcttctcgtcctctttcaccatgctgatttggtggtagccggagtaagcgtcgagaaagctcaacaactcacaaccggcagttgagtccaccagttggtctattcgaggaagagggaagtgatccttgggacacgccttgttgaggtcggtgaaatcgatacacattctccatttcccgttggccttccgcaccatgaatgggttggctagccactctggatggagtacctctctgatgaaaccagctttgagaagcttgtcgagctcttctcgtatggcttgtttttgatctggtgcaaatctccgcagtttttgctttactggcttggcgtcgggtcgcaccatgagtttgtgctcaatcacctccttgggtggctcagctgtggcgggtaggctgggcgtgtgctcgaccatgtcgaggctccgcttgtcgcattgcactgccagcttagcattcccttgaatagtgattgttcccttcggtcccggcatcttgagcacttgatatgcgtagtgagatgcggccatgaacttcgcgagtgcagttctcccaatgatggcattgtatgcgccgtcgatcagaactcgtgcgaccttgatattccgaatagtgggatcgaccacgatcggatatcgccctgggatgacagcagtcttggggtggtcctcttctgagaattctatcttctgctcggaccacttcatcttgggcgcagctccctgccacgtcgaacagacctcacgttccaccttcttgtattctcgctttaaggagtatgccatggaacctccgaagatgtgcgagacatggagattggagtctgggtatgctgagtccgattcctgagtagccgcctcagcgtccttctcgaatacacgtactcgcttgcttgtgtaagggcaccttgttttcttcgtctcgctgccttgtgggtctaggcgcttgggagggtccgcgtattctgttgcaagaacttccgcttgagctttccttttcccactcttgcgatttttcttcttgcttgactcaggtgcgtccttggctggtttcttctctcctccagttttcagtttgtcgttcttgcgtctcagtgcgtcgtctgcatgagcgcatcgatcgacaatttcaaataatctccgagtagtcgtgacgcgcctcgttgccaactcctgagtagtatagcgatctctgacaccggacttgaaagcgcggactacagaagcgtcggtgatttcggggattgtatttttgcactcgttaaagcgctgaacataatccctcaaggattcacccgggttctgtgttaacgcatgtaggtcgtcttcgatcgcgtggcgcttgtatgttccttggaacttggcgacgaaagagcctttcaatgcagttggcaagtaattcgccaatgcgttgtcgtccgctccggcagcgtagagtaccgtggagtaaacctggaggaattcttctgggtcggtactcccatcgtacttctctattgctcctgatcggaatctctcaggccatcggacaacacgcagcgaacgaccgaaaactctacacccagcactgggggcggtgggttgtctatcagtatcacccagcacccgccattcgcgatcgtcatgatcgtggcggttgtggcggttatcacggtctcggtcttcgctcgaacggcctcctcgttcttcattatcgtgacgtcgtgaagagacgcgatgtcgggaacggttctcgttgtctcgtgtgcgtcgcgcctctcggcggccattcaggtgatcgcggagattgctggtgccgcgaggtggaggggtggctcgatgaggcgattcccgttgttcagggttttcgccattagcaccgccagttggtggctgttccgggtgcgttgcagcagcggtctcttcgaacgcattgctgaggttggtcactgattctcgtaaccgttctgtccatcgtgcgagatcgtcgttcagaacgggatcgtagggggtttccctcagtattgcgttgacggccctgatgtgctgggccggtgtagtcacttgattctccgcttccgcattagcgcgcgctgatgtgccggtctcgtcgatagccaatacctcacgcggcgtatttgttgacgatgagccatagtcttcgagcaggtgcaagactgatggttcgtggggatcgatgtcgattaccccaacgaatcgatctgaaatcagcgtcgttccttgttccttgtcctcatccctaagggggatgtgtgactgctggaccttaggaggtgacgtcttcatggcgctgagaaagaccttgcagcttgagaggtcgtgattctttgtcttgtgaataggacaatagacatcacgagttggagaagtacgctgaattccacgctctttgcaggcatgaatttcagcgtgtacgttgagaaaaacccagcaggcttgcaaggtgtgttttttggttttgtggataggacaccaggaccttgtcacctcgaaagtcatcctcgtcggctcgtgattcttgtcggaaagacaaggtttggccgcactaggatccttctcgggctcggatgtcgtcgatgttccgttctccgcttcggcgagaggatccttcgacatggagtcgtcctgggttgtagccactgcgttctcgcttccggtcgttgatggaccagccgagattggcaccgtggtgtaaaccgggaagacgatttcgccgacttgagtccacaccagcattgttgaagtaggaactccttggttgaggttggtgttgacgctgttgtcgacgaagctggatgtcatagtagtagaaccttgagcaccaagtccccctacctggcgcgccactgtcgacgggggatacccgtagaccggatatagagggtattggggtacgctggtacgaggatcgacaagatcgtagtcgagttgatccgactagacctcccgacgacttggctccaataagcttcggcttcgtaggctgtggtggatgtgttggctctgagattcgatgccttaggtcctcccggggggtcccttttatatcgcaggtcaactgtctccaagtaggattcggagacgccggaccggacacgacacaatgacgacccagttctgaccgagtaggactccttccatctgtgaactccatgatgaatttccttaacatatgccgaaaacgtccgtatacgcgtgagcataccat

SEQ ID NO: 57173 - DNA, 300 bp, Oryza sativa
  Clone ID: PAT_MRT4530_59010C.1
atggcgcgcggcgcggcagcggcgacgcgacgggcaggcggcgcggcgtggggcgcgggcgcggggcggcgtggcagcggcggcgcgcggcgcgaggcagtgacgtcgacggcagcgcggggcagggacggcgatggcgacgtcggcgcggtggcaggcgacagagagagggggaaagaggaggggctggtggagatatcaacggcgaagcctagaagattgcccgacaagcctgggagctggctccgctgctacttcatggcaatatttctgaccttctcttgcatccaagagctatga

SEQ ID NO: 57174 - DNA, 309 bp, Oryza sativa
  Clone ID: PAT_MRT4530_59011C.1
atgcttgacctccgcgctatcagcgaaaggaaagagaggaaagagacctcgtcagcatccccgcactccacgccgctgagctcgctactccgctcgggagaggccgctcgacgccgaaccggactaccccattctacgctgcagcagctgccagaggaggagggggaaagcgcggcggaggagatgagaaggggacagggaggcgtcagagaagtggaggcgctcaaggtcgaggccgacgtcgattcagagtcggcgccgtcgccgctagggctggctagcacctgtgtcgcgtgccgtcaccgctag

SEQ ID NO: 57175 - DNA, 293 bp, Oryza sativa
  Clone ID: PAT_MRT4530_59012C.1
atgcacttttacgtatttttggccccatgtgagcccccgccctttttttttgtgtttggtaaactaacacgcgccactatttgacattactgaattttgacggtcaatttttgcagaggacaagaaaaggtcaaaattttgattttccgatgtctccaacgaattgcagataatgatatatcatcgtttccaccagcaagggctacaaacaagcatggcagtactgcacacgttacaagtctccatctgtgggtcagaactgctctgctctgttctgaacaggctcaggatca

SEQ ID NO: 57176 - DNA, 1622 bp, Oryza sativa
  unsure (1)..(1622): unsure at all n locations
  Clone ID: PAT_MRT4530_59013C.1
atgcgaggtgggggcccacgccgcatagagaggagcgaggacaaaaggcgcctacgtcccctcctctccgcctcgccgatcccccactctattacccgcccttttctgctccgcgccatctcctcctctgctcgcctctgctcctcctcgtacagagcaagctgcgcaacagcagcagcaagcaaccaaacgcagcccacacaaagctttgttcttcttgctcttcttatactcgagcagccgcgcattctgtggagctcagagcgcagcgcggcgccatggggaggcacaagttcaggctgtccgacatgatcccgaacgcgtggttcttcaagctccgcgacatgcgcgccgcccggggaggtgcgggcgctggcggcggcggggccagccacggtggggtggtcacgcagtcttcggtggccgtgtcgcgggcggggagggcgtgccggccgctgccgaacacgcccaggcacggcgcgttgtcgctcccgcacagggcgtcctactactacacgccgcgggccggcgacctgctcgtggggtcgccgctccatcccaagtgctccgacacgcaattccctcctcttcagctgtcgccgccgaggaagtccaggcgcaggcacaggcggcggtccgtcaagctggcgccgtccgtcagcggcagcagcgtcctgtcctcgccggtgtccaccggctgccggtgcgggcgcaaaccggagctcgtcgtggtcgaggcgcccgacaccccaccgtgccgccgcgacaagttcgtcgggtacaatgacgacgacgatgacgaggaaggacctcatcgccatgctacctctccgtcaactccggcgagtaccatgaccctcatcgtcggaggtgttacgaccagctctggacccgtcactcgccacctgcgctgctggcagtcatccgatgagaaaaccccaagagttcatcgctcaccaacgcctccatgctcattgatttctgcttggtgaatcactgaatccttcccatgaattattatagtagagtaatttagtactttgcatttctagtagatgatgcttaattagcagattttatttctttgatttctagtagatgatgcttaattaccgccaagaaattacccataaacaaatagaaataaaccagcatcgaaaagtttggttctctcgccggcaccgaagacgaagccgcccctggcggagagcttcgcggtggtgaagtcgtcgcgggacccgaggagggacttccgggagtccatggaggagatgatcgccgagaacggcatccgcaccgccgccgacctggaggacctcctggcgtgctacctgtcgctcaacgccgccgagtaccacgacctcatcgtcgacgtgttcgagcatatctgggccaacctcgcggacatcaagatgtagcggaagagctcagtctcaagctcactagtgctagtgcaatgcaatgcaactcttgtcttgcatggtgaatcccatgagtcccatcgtgcccagagctgtcgtcttgagaatcttggttagctctagcctgttaatgatcctaaaattgggtatgataaatagtgttatccngacctgggatactaaaaaaaaaaaaaaaaaaaa

SEQ ID NO: 57177 - DNA, 276 bp, Oryza sativa
  Clone ID: PAT_MRT4530_59014C.1
atgcctgttttgggaccgaacccgccatctacctcgccggagccatgccgggagcacgcgagccgccgccggaccacccacgtcgatgggttttggtgccgcgccgggtggccgccgctcgccgtcgctgatggaacgccaccgaccctcgcgtcggcgccgttgcgggaaaccgcctacgacgaggcagaccaacaccccatgtcgccgccgccgcaggacctaatgccgaggacgggcagccgccgccgtcaacctcttgccgacgcgccctga

SEQ ID NO: 57178 - DNA, 471 bp, Oryza sativa
  Clone ID: PAT_MRT4530_59015C.1
caacgtggagcttgctttggtttacggcttaaccgaatcgtctggcgcggtggctgccacagtcgggccagaggaatcgaaggcatacggatcggtcgggaagctggggtcgcatttgcaggctaagattgcagatccctgcaccggtgaggccctcggaccagggcagcgcggcgagctttgggttagaggcccaatcgtgatgaaaggctacgtgggcgatgatgaggcgaccgcagcaacggttgactcagaaggctggttgaaaacaggtgacctctgctacttcaatgaagatggtcttctatacattgatgagcgactgaaggagttgagttggtacacgagttacgaggttcctgcaggagaactggagcattttctgtagttccaatgtgaatttgctgatgcgggagtttttccatatccagatgaagaagctggggaactaccaatggctttcattgcaag

SEQ ID NO: 57179 - DNA, 279 bp, Oryza sativa
  Clone ID: PAT_MRT4530_59016C.1
atggggcagttgttcttcatggagttctcgatgcagcagtgcttgtcgcgcaggctgaccgaatggtgtggtaaaaacatacctgcagatgccgcaatcttggcagtggaagtgttccctgtcaacctgcagaacacgaacgtgcatctcatcaacaaccaaatcgaaaatcaccagatccagcagaagcaaagcaagcagcatcggcatctcacgtcgtcgtcgaagaatttgcacgcgctgcagaagtactcgcccatgcaaacgccgcagttgtag

SEQ ID NO: 57180 - DNA, 1311 bp, Oryza sativa
  Clone ID: PAT_MRT4530_59017C.1
atggagggagccgtcgtcgccgccgccaacgctgcccccaccgtcggatccgccgcggccgccgccaatccgacgccgccgagagcgaaaaaggcgtacctgaaacgattctttggtcaccccctgcccctgcccgtccagaattttgtgtctttccagtctgcgtgaacagctcatccctccaagcgtgccgggctctgtacttgtgatagggggactttatcgtcggctgtgggggaagacgtacgaggccttgcacctccctccaaaaattgctgaacatggtaaagggtagcactagcaacagtcacagcagccgccgccacaacagcactcgcaagcgcaactcttaatgaagagtggtgccaccgtttcctttggcattttaactaattcgttcagaacaaacttattcttttgccaaccagggaagccatgtttttgttcaattaatccgagagcactatcgtgcatgaagggcagtacgttttcattgatccatagaattctagaaatgatacaaacctacactcattttcttagctcccacctcagatctcgatcctgcttgccatcgtttaactgccaccaacacaggaattctacgtgtggataatcgataaaaagcttaagggcacgctgatatcagtagcaggagccatggtgctgacattttacaagggcgtggctgtcacccacacaaccaagatccaccatgcaacagcagcagcagcagtagcagcagaagcagccatgagcagcaggaactggacgctgggcacggtggccatcctgggcaactgcgtgtgcctctcctgctggttcctcctccacagcaggctcgccaagaagtacccccatgtctactcctgcaatgccttcatgtgcatgttcagcttcctccaggtggccgtcgtcggcctctccacacaacgcaacgtctccgtctggatcgtcaggaccaagttccacatactcaccatcctctacgccggtgtggtggggtgtggcctttcgtttgtgctactgacatggtgcatcgagaagcgcggtccagtgttcgtcgcagccttcattccggtggtgcagatcattgtttcagtgattgacttcactgtcctccatgaacagctcttccttggaagcgtgctgggatctgtacttgtgataggtggcctttatcttctgctgtggggcaagaggcaggaggccttgcacctccctccaaaagttgctgaacatgataaagagcagcaacagcaacagcaacagcaacagcagcaacaacagcagcagcaagtgcaactctga

SEQ ID NO: 57181 - DNA, 552 bp, Oryza sativa
  Clone ID: PAT_MRT4530_59018C.1
atggggagggaaggagaaggggaggccgggggtttaaggaggcggcaatgtcggtttggggaaccgacttgcgcggtcaagagcgcgagctggcgctcggctagcggccaaattggcgacagggaggatgacgccggcggagaggcgtgcgcagaggctgacggcggcggcgaccgggcggtcggccacgcgcgcgcggctcgcaacgggaaggcgcggtggatgagcgtgtttgtaaggaacatcccaatggcgtacaagatgaaagggatcttcaagggactcaaggtcatctctcagatctttgtagtgaaggagcatgagatgcagattggtagtccgacagacgtgaagcatgtcgcgcacatcggttgggatggcctgacagggaatgcttctccaagctggggacctcttgggcttctcaaggtatggcaagaattacttgttcttcagagtggaagattttctgtgttggtgcgattgcttcatatgattgtggcttctttgggaaaggctttggtctgtcttatgagtggcatgtatggataa

SEQ ID NO: 57182 - DNA, 765 bp, Oryza sativa
  Clone ID: PAT_MRT4530_59019C.1
atggcaacaaaagagttcgacgaactcgccctcgatgggactaactatcccatctgggcttctgatatcaaaatcaattttgcctctcgggagattctaaatacaattgaggagcctaatgatggggatccggcaattgagcccaggaagctcaatacagccctttttcttttgagactctacattcacaaggatctcaaacatgaatacatgttagagacgagccctctcaacctttggaaagctctaaaagagcgttatgatcagcaaaaggaactcatttggcctaaggctaattatgagtggaataatgctgagaataagaaaggattcaagggaaattcttcgaataatcctaagaatctgactggaaagcgcaaacgcaccaacaacaggcgcaaattcaagggtcgaaagaaaggaaaagggaagggtaaggcaccacaacctcgtagcaataccaacaagcattgcaacaggtgtggatctgacactcatgtcgctaaagactgccgcatcccgaaacatcttgtcctcttgtaccaaaaatccctcaaggacaaaaaatcttctgagaacccaagatttgaagcacacttcaatctcacacatgaagagcaccctgaggttgcaagttctcaccaggctcctgctgaaccagagagcaacctcaatgttctcccagaagatgtcgctccactctctacgatggacgatatgttcatcgaatactgctcaacggacccacttggagatttgcaatga

SEQ ID NO: 57183 - DNA, 4347 bp, Oryza sativa
  Clone ID: PAT_MRT4530_5901C.1
atggattgtgttgtgcaaggggtattgtcacaactcctttccgagatgccgcgctacaagcctgagtacttgtttggtgttgagggttttgtccaggagttgcgtacgatgtcctttgtcataggatttgggactgcccctttttatgcccagattcctcatgatcgtcatgaagagaagtgccgagtcaaagtcaccttgaacagtaatagtgaagatatcccctcagtgatgttcgaagctggaggaagaaactacatccattcatgtcaggaggtggcaaggatcgccataggagagctccgtgatcgctacagtgatcagttggccgacactgagtatcgctaccatcctcgtcaaccacagggaagtgaccgtggcagctaccttgagaccgaaggagttgagaatgatgttaccacaagacatttggttgagatgctgtgggctatggatgaaacccgtgcagagactgtgttagcagctcaagatcgtgaagaccggaatcgtggtaagatttgcaagctagaagacaaggtggatcgtttggagaaggaactagccgcgttgaagggagaagcaccaccgcagaaggccaggattcgtcttaccgcaagaaagagagctctatttgtccctcgctatcaattggcgccaaaggtccgtgtggtggagaaagaagttaccccagcccttgcggatcctccggtcatcatcataagtgatgatgaagaagaagaatccaagcgcaaccattccaagattgagtgggtagctactcaagatgatgaagacgagccgaacgagccttcaatcgacctccgatgctcggaagaactagaatgccattttcccccggtttctcttcttgtgccctgtccatgccagatggtgaacactcgcagcaacgggaatggccccaacaacaacaataataacaataacaacaacaatgaaggaaacccaactcttgcccaagttcttgctcaacagactcagttaatgaacatgatgatgcagcaactccagaaccagcagaaccaaggaaataaccatgcacctccccagaacaagttagcagaatttcttcatgtgaggccacctattttctctagtaccactaatcctgttgaagctggtgattggttgcacgccatagaaaagaagttggatttgcttcagtgcactgatcaggagaagacgcatataccatcgggagttgtgtctctcaagaagaaggaattcaggtcgctcactcagggatctcactctgttacggagtatctgtacgagttcaatcgtctggctcgttatgctccggaagatgtgcgcaatgacgaagagcgccaggagaagttcttggaaggacttaatgatgagctttcttgcccactcatgactggggattatcctgatttccagaagttagtggataaggctattcgccaggaggacaagtacaatcgcatggagcagaagaaacgccggattgctcaattcaagacgcaacaggggaataatcagaagccgcgtcttactttaggaccccagtccatgccacagggaggttcttcgtctgttgttcgtccgcagcgtcagttcttcaacaacaatgctggcaacaacatccgcaatcaagctccatgccctgttgcagcttcgacacagcaacagcctgccaagagggagcaaggcagcaagcccgtggtgtgtttcagctgtggagacccaggacattacgctgacaagtgttcgaagccccgacgcgtgaaggttgtccctgcccagagcaacactaccgcaccagcgccaaaggctcgtgtcaatcatgtcgctgctgcagaagctcaagatgctccagatgtgattttgagtacgtttcttgttaactcagttcctgcaacagtgctttttgattctggtgctacacattcattcttatctatgagttttgcgggaaatcatgggatggaagtagaagatcttagacgtcctttgatggttagtaccccaagtaatcaagcactctctttgcaacgtagcccctctgtcagaatagaaattcaaggagtaccatttctggccaatctcatcctgttagaatccaaagaccttaatgtcatcctagggatggactggttagccagacataaaggtgtgatagactgtgctaacagaaaagtaactctcaccagcaatgatggtcgagttgtaactgttcatgcattgtcttctgagtttttaaggtcaagactgaaccaaataactttggaagagattcctatagttcgggagtatcccgatgtgttcccagatgatttacctggtatgccgcccaaaagggatatagagttcagaatagatttggtaccaggaacaactccgatccataagagaccttatagaatggcagccaatgagttggcagaagtcaagaggcaagtagacgatttgcttcagaaaggatacatcagaccgagttcatcaccatggggagctccgctaaaaggtgccaccgttttctccaagatagatcttcgatcagggtatcaccagttgaggatcaaagaggaagatatacttaagacagcttttaccactaggtatggattgttcgaatgtactgttatgtcttttggacttaccaatgcccccgctttcttcatgaacttgatgaataaggtgtttatggaatacctagacaagttcgtggtagtctttattgatgacattcttatctactctcgaaccaaagaagagcatgtagaacatcttcgtcttgcattagagaagctacgagaacatcaactgtatgctaagtttagcaagtgtgaattttggttgtctgaagtgaagttccttggtcacgtcatctcagcaggaggagttgccatcgatcctagtaatgtggaatccgtaaccaattggaaacaaccaaagacagtttcagagattcgcagtttcctaggcctcgcaggatattatcggaggtttatagagaatttctccaagatcgctaagcccatgacacggctgcttcagaaagatgtaaagtacaagtggtcagaagaatgtgagcagagttttcaagagttgaagaatcgcttgatatcagctcctattttgattttacctgatccaaagaagggtttccaagtgtattgcgatgcatccaaacttgggttaggttgtgttctgatgcaagatgggaaggtggttgcctatgcatctcgtcagttacgtccgcatgagaagaactaccctactcatgatcttgagttagctgcagtagttcatgcgttgaagatttggcgtcattatcttttcggtactcgtacagaggtgtacaccgatcacaagagtttaaagtatatctttactcagccggatctgaacatgagacaacggagatggttggaattaattaaggattatgacatgggaattcattatcacccgggaaaggctaatgttgtagcagacgctcttagcagaaaaggctattgcaatgctacggaaggacgaccattgccatttgaattatgcaaggagtttgaaagattaaatttgggaattgtcagaagaggtttcctcgcagccttagaagcgaagcccactctaattgatcaagttagagaagcccaaattaatgatcctgatattcaagaaattaagaagaatatgagaagaggaaaagctatcggtttcttggaagatgagcaaggaactgtatggttgggtgagagaatcttcgtccccgacaataaagatttaaaagatgcaattctgaaagaagctcatgatactttatactccattcaccctggtagtacaaaaatgtaccagtatctcaaggaaagattttggtgggcaagtatgaagcgtgaaatcgcagagtacgtagcagtatgtgatgtttgtcagcgagtcaaggcagaacatcggaaacccgccggtttgttgcagcctttgaagattcctgaatggaaatgggaagaaatcggtatggattttatcactggtctacctagaacatcatcaggccacgactctatttgggtgatagtcgacagacttaccaaagtggctcatttcatcccagtaaagacaacctattctggaagtcggttggcggaattgtatatggccaggattgtgtgtttgcatggcgttcgtaagaaaatagtgtctgatcgaggcagccagtttacttcaaatttttggaagaagcttcaggaagagatgggttctaagttgaactttagtactgcttatcatccgcagacagacggacaaactgaaagggtaaatcagattttggaagacatgttgagagtatgtgtttag

SEQ ID NO: 57184 - DNA, 336 bp, Oryza sativa
  Clone ID: PAT_MRT4530_59020C.1
atggctccttcatgcggaactgaagcggcggcggcagcttcgtcgaggctcgcggtggccgaatcagatgaggctccctcgcacgggcatggggtcaacagcagcggcttcctcaggcccacgccggccggggcctgctgccgctccctcgcgtgggcttgggagcaacagcggcggccttggactggtccaccaaacctgaccggggacaacaagattggcggcggcaactggagcggcaacctacccgtttggaaaggtgttgattttcacaaacacgggttctggctgcctacaaaaatgggttctggctgcttgcgaaagtccattttttaa

SEQ ID NO: 57185 - DNA, 1053 bp, Oryza sativa
  unsure (1)..(1053): unsure at all n locations
  Clone ID: PAT_MRT4530_59021C.1
atggcaacaaaagagttcgacgaactcgccctcgatgggactaactatcccatctgggcttctgatatcaaaatcaattttgcctctcgggggattttaaatacaattgaggaacccaatgatggggacccagcaattgagcccaggaagctcaatacagccctttttcttttaagactctacattcacaaggatctcaaacatgaatacatgttagagacgagccctctcaacctttggaaagctctaaaagagcgttatgatcagcaaaaggaactcatttggcctgaggctaattatgagtgggttcatttacgcctacaggactttaaaactatggcagaatacaaccatgctgttcataacatttgttccaggttgaagttttgtgaacaagagccaacggagaataatgctgagaataagaaaggattcaaaggaaattcttcgaataatcctaagaatctgactggaaagcacaaacgcaacaacaacaggcgcaaattcaagggtcggaagaaaggaaaagggaagggtaaggcaccacaacctcgtagcaatggcaacaagcattgcaacaggacaaaaaaatcttctgagaacccaagatttgaagcccacttcaatcttacacatgaagagtgccctgaggttgcaagttctcaccaggctcctgctgacccagagagcaacctcaatgttctcccagaagatgtcgctccactctctgcgatggatgatatgttcatcgaatactgctcaacggacccacttgttgatgcattccacacttggcatgatcgacttgggcaccccggtatcgagatgatgagaaaaattattggcaactctattggtcatcatttgatcactgataaattttccaaaccctctgatttcgtatgcactgcatgtgctacttggaaacttgatttgagaccatctttatctcaaattagagcagaaccacttaaatcncttgacgcatttcaggagatatctgtggccctattgtgcaaantcttgacccgtcaagtacttnatggntnttga

SEQ ID NO: 57186 - DNA, 633 bp, Oryza sativa
  Clone ID: PAT_MRT4530_59022C.1
atggcaacaaaagagttcgacgaactcaccctcgatgggactaactatcccatctgggcttctgatatcaaaatcaattttgcctctcgtgggattttaaatacaattgaggaacccaatgatggggacccggaaattgagcccaggaagctcaatacagccctttttcttttgagactctacattcacaaggatctcaaacatgaatacatgttagagacgagccctctcaacctttggaaagctctaaaagagcgttatgatcagcaaaaggaactcatttggcctgaggctaattatgagtgggttcatttatgcctacaggactttaaaactatggcagaatacaaccatgctgttcataacattgttccagactgccgcatcccgaaacatcttgttctcttgtaccaaaaatccctcaaggacaaaaagtcttctgagaacccaagatttgaagcccacttcaatcttacacatgaagagcgccctgaggttgcaagttctcaccaggctcctgttgaaccagagagcaacctcaatgttctcccagaagatgtcgctccactctctgtgatagacgatatgttcatcaaatactgctcaacggacccacttggagatttgcaatga

SEQ ID NO: 57187 - DNA, 279 bp, Oryza sativa
  Clone ID: PAT_MRT4530_59023C.1
ctagtggatccccgggctgaggaatcggcacgaggaaagctttttcatttccttctattcactgccatggttattaagggtcgctatagcatcgtgacgttcccagaagggcaaggcatccttccgccataggctacctccgccttacaggcataaactgaaggaaagagggtgagagcagaggggaaaagtctgttgtcttgctgctggtcctccctagcatcgccctctcccttcttgtgctgatggggagtacagggagatcaagagaggcaccac

SEQ ID NO: 57188 - DNA, 1638 bp, Oryza sativa
  Clone ID: PAT_MRT4530_59024C.1
atggcggtgcgcacgtgggagccgcctctctttacaccgtctccaacacatcgccacgctggagccgccgctgcacgccgtcccggcctccgtcatacgttcatcgctgttccccacggctcccggagccgcacgataccaaacggcgtgggggggaacggtattcggatccggccggtctccgactccgataaggagtcgggatcgtcggcatgccgccggccaatgagggggacgcggcggtggcggatggtggatggcagcggtggaggtggtggtggatgggagatggcggtggaggcgagtggcagcggcggagaaggtggaggtggcggctgcatcggcggtgcccccacggcggcgcccccatggcggcgtcggcggcttcgccacggcggtgtccgcggcggcgaactggcggcggtcggcggcgaaccggcggcgaactggcggcggacgacggcggcagacgaggtggaggaggcggcgccgactcggcggcatcatggcggcggcggcggcacaaactgcaggggcggtagtggagttctaaacattggctacggtatattcaccataatatatttgcctggagaccgtattttaggcagcaaggacatggaaacaaaagagttcgacgaactcgccctcgatgggactaactatcccatatgggtttctgatatcaaaatcaattttgcctctcgggggattctaaagacaattgaggaacccaatgatggggatccggcaattgagcccaggaagctcaatacagccctttttcttttgagactctacattcacaaggatctcaaacatgaatacatgttagagacgagccctctcaacatttggaaagctctaaaagagcgttatgataagcaaaaggaactcatttggcctgaggctaattatgagtgggttcatttacgcctacatgactttaaaactgtggcagaatacaaccatgctgttcataacatttgttccaggttgaagttttgcgaacaagagccaacggaggcagaaaagatagaaaaaactctatccaactatgcttccggaggacaggatactgactcaacagcagaaagacaccatgagctttctttaaagaatgcccaacagcgcccaccgggctctgctccactacctgaggtgcacttcaatgtacagaataatgctgagaataagaaaggattcaagggaaattcttcgaataatcataagaatctgactggaaagcgcaaacgcaacaacaacaggcgcaaattcaagggtcgaaagaaaggaaaagggaagggtaaggcaccacaacctcgtagcaatggcaacaagcattgcaacaggtgtggatctgacactcatgtcgctaaagactgccgcatcccgaaacatcttatcctcttgtaccaaaaatccctcaaggacaaaaaatcttctgagaacccaagatttgaagcacacttcaatattacacatgaagagcaccctgaggttgcaagttctcaccaggctcctgctgaaccagagagcaacctcaatgttctcccagaagatgtcgctccactctctacgatggatgatatgttcatcgaatactgctcaacggacccacttggagatttgcaatga

SEQ ID NO: 57189 - DNA, 637 bp, Oryza sativa
  unsure (1)..(637): unsure at all n locations
  Clone ID: PAT_MRT4530_59025C.1
atttcttcacaaatacattgccaagaattgcttcctctttatcctatcacgtcatcggttgacttgtcatcaacctgtattctgacatcagtgtcattctataaggatgaagattctcagaatagtgggtcttcatatagcttgactgactatatatgcttcaagatacccgatggatccttgagaggggaagaattgcattggtgtgataaaggacttctctaactcttctgccagcggaccatcttcttcaggatttctattgcatatacctgatgaatatgagtgcgttgatgtatctctttacaaggacagccagattgttgtactactcagtgaaaggtcatattctgatggtcctggaagttcttatattgtaatgctgcagatggagaacttctcttttgtgcctctctcaaggatgttcccttcanatatttacagtgtacaagagctgnncggccaggagctccagttggacaccgactatgggaaaaaagttcgtagcatacctcacgccgngtccactccactggcagtcagggcctcaagaggagtggcttgggtcttttcttctnggcggcntgctttnggttcatttccttgctgaacatgaggctgcggctgagggtgaatc

SEQ ID NO: 57190 - DNA, 1883 bp, Oryza sativa
  Clone ID: PAT_MRT4530_59026C.1
aattttgcctctcgggggattttaaatacaattgaggaacccaatgatggggatccgcaaattgagcccaggaagctcaatacaaccctttttcttttaagactctacattcacaaggatctcaaacatgaatatatgttagagacgagccctctcaacccttggaaagctctaaaagagcgttatgatcagcaaaaggaactcatttggcctgaggctaattatgagagggttcatttacgccttcaggactttaaaactgtggcagaatacaaccatgctgttcataacatttgttccaggttgaagttttgcgaacaagagccaacggaggcagagaagatagagaaaactctatcaactatgcttccggaggacaggatactgctcaacagtatcgtgctaaaaatttccagaaacattctctgcttatacatacattgactcaggcagaaagacactatgagctttctttaaagaatgcccaacagcgcccatcgggctctgctccactgcctaaggtgcacttcaatgtacagaataatgctgagaataagaaagcattcaagggaaattcttcgaataatcctaagaatctgactggaaagcgcaaacgcaacaataacaggcacaaattcaagggtcaaaagaaaggaaaagggaagggtaaggcaccacaacctcgtagcaatggcaacaagcattgcaacaggtgtggatctgacactcatgtcgctaaagactgccgcatcccgaaacatcttgttctcttgtaccaaaaatcccttaaggacaaaaagtcttctgagaacccaagatttggagcccaattcaatcttacagatgaagagcgccctgaggttgcaatcaaaaagagagaaggaaaagttttgactattgctgggcgcgatactgtgatagttggctcaggacaagcaattattacactcccaatgggtacacaaattacaattgagggtgctttattgtatcctgattcaacccgtaccctactaagttatagatatatccgtcaaaatgggtttcacattgaaacccatatggataatcgagaagaatttcttctcttaaccaaacaaaatggatatggcaaacacatttgcgagaaaattccatctctcacatcttgattgtactatacatacattaagcccattgcacatattgcgtataaagtaatttttcaaaatgttgatgcattccacacttggcatgatcgacttgggcaccccagtatcgggatgatgagaaaaattattggcaactctattggtcatcatttgatcaccgacaaatttctcaaatcctctgatttcgtgtgcactgcatgtgctactgggaaactgattttgagaccatcttatctcaaaattagagctgaaccacttaaattccttgaacacattcaaggagatatctgtggcccaattgtgccaagatctggaccgttcaggtaccctgaacatagggttcaatcaatccatatggacaatgctgccaaatttacatcccatgctttcgatgattattgtatggcattgggaattcaggttcagcactctgttccatatgtccacacacaaaatggtttggctgaatcattgatcaaaagaattaagcttattgctcgaccattattgatgaattgcaaattaccttcgtcgttttggggtcatgcagttctgcacgctgctaaccttgtccaactatgaccaactgcatatcatgaaacttccccaatgcagttagtacgtggaaatcctccaagtatttcccatttgcgtaagttcggttgtgctgtgtactccccgctacctccccccccgcggggcagcccgcggcctcgccaccttccgggatgc

SEQ ID NO: 57191 - DNA, 450 bp, Oryza sativa
  Clone ID: PAT_MRT4530_59027C.1
atgggccgaatccctctctctccccgcttttccgtgagccgcgcagagccctccctcccgctctcgctgccattcccgccgatgccgcccaaatcgccgcgccgcccgcgcgtgcgcgcgcgccgtggtggccgaccggccagtcgccgccgccgtcaacgcctgccgcgcctgccccgcgtctgtcgcccgtgttgccgctccactccaaaccggtccgccgtcatcgccgtcgtcatcgacccggccccgccaccgccgcgcgctggcttccaagggacggaggctgagccccgcccccctctgctgcatcgctccctctccctcctccttttccccaaagtggcaaggaggcaagcccaatttctctccccctttttcccttttccctcccgccggcgtcatcctcccctccctgtcgccgctttggccgcgaccgtcgagcgctag

SEQ ID NO: 57192 - DNA, 1703 bp, Oryza sativa
  Clone ID: PAT_MRT4530_59028C.1
caacctcaccgaaagagggtagatctagcttcttacattcatttagactgtacaatatacatgcatcaacagacaaacctcaaaaactaaaagccaaaaaaacatccgtcaaactagcaagagcagcctcataaacttgctcctcgaatcaaaggaacagatacacataacagatcatgtcacaccaccttgataaacaagcagaagaccttgtttcgtgcaaatgggcaaaaaaaagccaggctgcttcgatgctcctttggagggtgttggcttggatgcagcatgatcatgcacgagctaatcctacaatcctacaatttgcagttgatttggtcttgtcactgctgaaagacgatattgaggagattaccgagcattcaggacggtctctattctttagacaaagtaatcttgtcgcaccacggtgatgaagtcagcagagagtgaatcatcctctttttgtttcaccgtctcaccgttcccttggatatgccagtatattgggggaagaggagtataaaggtctggagaaatagtttgatcatattctcttgtagaatgcaatacaacggtaccagaaagcacagtaagaaatccacagatctcagaagcaatactgcttatactctgtccagaccaatccttgaacattatggcacttgctaaaatagtgagggatgtaaacatcgcataatagatgggggacacaactgcggtattgaaagtgtccagtgccttgttcaggtaaattaactggataattatgcatatagctgaaacagttgcaaataaccaagtttggaaatagccagcctggtttatgccctcaattgtaagcttgattgcaataccaactgcctttatgctcattaccgtcagagatccaatcacagagcatattcctatatacactgctatgttggtctgcccatagcggggagcacaatgcgccatcaagatcagtgagaccaccagtgcaaaggccacatagcaaagaaaggcaggttgtgtcgccaggtgccaaatctgctccactgagctcggtgtctcctcttcaggagcatgaaggatgatcactgttgatccgactatacagagcacgcagcccagcactcccatccgttgcagcttctcattcaggatgaaatgggctagaacagcactaacaattatgctgagagcgccgaggggagtaaccagaacagccggtgcgaacatgtaagccacgaaatttgcaatctcaccaatgagcattgtaatcattccaacccaccagagaggctccaagaggtatccatagcctccaacacctgcgcgggggccggcggcgccggcgcggcggagccccttcttcttgacaatgaagctgaccccgatgaacgcggaggaggcgacggcgaggagggagcccttgaggttggcggcgaagaggtcgccggcggcgtccggaggggcgcgactcatcggcgccgtgctgcttctgcggcggcgcgcgtcgtccgccggcgcatttggggcgtgtgcccgcctgcgcgcttcgaattctttggttcgaggggatcggattttggattttggatttcctctgcgttcgatccctgcgctgtccgatatttgaggatttgtggcctgttcgtacgtgtgcggggtgtccggggttggagggaaatggggcctcgtgccgaattcctgcagcccgg

SEQ ID NO: 57193 - DNA, 1960 bp, Oryza sativa
  Clone ID: PAT_MRT4530_59029C.1
tttttttttttttttaaggaaatccattcattttattatggaaaccccccgattaatattacaagatgacctccttagagaaacccacaacatccatcacacacttgatcaatgaacttattacaatactgaaatactgcatggaactaataaatgaagaaataaacatttcctttctgagaactaaacccaaaagctatggaatctcagcaatgatcatctagcactgtggcaagtccgatggtggtggcggtaacgatgtctcctgcgttggaccgttctgaacctcaaacaccatgccaagcccgaactctagatgagcatcgaagtggcagtgcatgaaccaaacccctgggttgtctgcaacgaagcggatgacggcccagccgccggtggggacggcgacggtgttgcgctcctgcggatcgacgaggttgaacttggccgggtccgtcgtctcgttgtagttgccgaagccctgtgcgaggacgaagaagttgaagccatggaggtgcatcgggtggctctccttggacaccagcctcgtgttctgcagcaccatctgcaccgtcgagttgtacttgagcgtcttcaccttggtcgacttgaacgtgtgcttcagcgtcgcgttatcgtccgatgcgtcagcggtgtagtcgaagacgatcggcggcgtgtcggggaagtcgcgggtgtagacgccgtcgatggagcccttgtacatggcctcgagcatggaggttgtgttcgggaggatgaaggaggcgttgttcatgctcgacgcgaagatggtccctttgtcgtctggcatgcacatcgtctgctccggtccgcagaaggtgtctcccatggagacggtgacgaacatgtgggtgtcgacggcgagcggcacacggttcggcaccagcgccgtcatattggagagaaaccggtgcgcggtggccgtgtcgttgtactccggcatgtccggcaccatgggtggcgaggtcgccgggccgccgccgtactcgacgatggccgtgctgttggtcaggctgtacagaaaacttgggtcggcagcattaacggcgctgttgtacgggatgaccgccatgtagtagcgccctccgacggccgcggcgacgccggcgtccggtaccaggagcgcgtccaccgtctgccccggcgagatgaccaccacgtcggtcttgtacggcttggtgtagcacgcgtcggcggccaccacgttgaagctgtggttggccaccttgaagaagagcggcgtgttgagcgcagcgttgatgatccggagcatgtacgtcttgttctgcttcagctcgaacttgtgcgtttggttgggggcagagcagttgtagaaatcgccgggcttgccgttgatggtgtacgcgtcggcgtggggcgccggattgccagtaacgagggagcgctgctgcaggtcgtacacgttcgtcttccaccactcaccgaggatgaccaccacctcctcatcgggcacggggaacgggtaggccttggcgccgccgcgaggtttgatgatgagcgcgccatagacggtggcgcggaggaaggaaaaatgggagtgccaccacagcgtgccctcctgcccggtgacgttgaaccggtaagtgtagttgcctccgggacggaccggacactgcgtgaccatagccggtccatccgcccatggcgtaccgcgctggaagataccatgccagtggatggtcatgttgtagggtgactcgttgaccatatgaacaaccaccgtgtcgccctcagtggcaacgatcgtcgggccggggagctgaccattcactgcagttatgatcatttcctgctggcatagctgactaatggagaggttacctacattgaaagtgtactccacaacagcagcttgagcaacggaagcaaccaaagcaagcgcaaatggaagaagaagaagcgaccatgatctcgccat

SEQ ID NO: 57194 - DNA, 437 bp, Oryza sativa
  Clone ID: PAT_MRT4530_5902C.1
gggcgacgagaggcgaaggcgaaggtggcggcgggtagaggagacaccgggggtccttttaaaggggctaggaggcggcggcgaaggcccacggcgaccggcgacgagaaggaaagtttgggaaaaacgaatccgaaacaaactcgaatccacgaatttccaaacgattttagccgatgtttccaaaggagaaaaggtagaggagatcgagaagatcatttcccctctattgattcggccggaaacggaaaggaacggctggatttggaaggaaacggcggcggcggcgcgaggtagacgatgggtccgacaggtgggacccacctgtcagcgacagcgagggcgcgcgcgcggcggctgcggactgggccggctgggccgaggagagaggaaggagttttgggccgactttcggcccaaagccaaaagaagacttt

SEQ ID NO: 57195 - DNA, 2751 bp, Oryza sativa
  Clone ID: PAT_MRT4530_59030C.1
atggctctcccctcgcgtcggtgggcaggggcggtggaatccggcgtggatccggtggcggaggcttgggcgaagctgctgcggtcgctttcccaggccatggcgcggctgagggtgcagatggagtcgttcgacgatgcccagatgaggtgggcgctggccgccggtgtccgagccaaggcgcagctgctggctagccgcctggctcagatcctcgccctcttctgggacgaggggcagcgcgcggcgctcccggcctgcgtgcgggatgccctgtacggcatggaagacatggtcgacgatttggagtaccacatgctcaagttccagcctcatcaacaagaggtcagatgcaatctgctcatctctcttgtcaatctccgctaccggctcatcatcagccacgcgtctcgctcccgcttcctcaaggatttggatttcgttgcgagcgaggcaggcagcctcctctccgcgatgcataagctcgagcccaccgctccgtcgctccctgccctgctgcttgctgacgacgatcatcaggttgtgtttgggcgccacaaggaggtcactgacattgttcgaatactcattgatccgccggcaagccaccaccaccaccctacttacgacatcctcccaatcgttggcatggggggcgtggggaagaccacactcgccaagttagtctatgatgatgccaaggttaagcagcatttcgagctcaggctctgggcgagtgtctctactagtggagggtttcacaaaattgacatcaccgaacaaatcttgcgttcagccaacccaacataccctgcttctattcacagtgaacctacgcttgacatgcttcagttccatctcagccaactggtagcgtccaagagattcttgcttgttctcgatgacatcagggaggagtccttcaccagcatggcctgccaagagatcctcagtcctctatcatcggcagaaaaggggagcagaattctggtgactactacaacagcctcagtgcctgccatgctgggggcatcttgtacataccacctgaatgtattggacatcgaggatttgtggtccttgctcaagaaatatgctttccatggaggcccaactcatgattccacccaggagcttgaagaaattgggaggaacatcgcatccaagctcaaaggattgccattggctgccaagatgcttggggggctgcttggagctacaaagagcacaaagacctggatgaatgtcttggacaaagaactttatggcgatagtattcttcccgtactagaattgagttacagttacctgcctcgacgactcaagcagtgcttttcgttctgcagtttgtttccgaggaactataaatttaacaaaagagtgttgatccaactttggatggcccaaggttttgttcagtcacagaacagtgctgacaaaaatatggaggacctggcagaagattattttgaggaacttctttcgcgatccttctttgatgtacgcagggaagcgtgtgaaacacactacgtgatgcatgaccttgtccatgacctcgcgcagtctgtttcggcagatcaatgccttcgtgttgagcatggcatgatttctgagaagccatcaactgctcgctatgtatctgtcacccaagatggactacaaggccttgggagcttctgcaaacctgaaaatttgcgtaccttgatagttctaagatcatttatattctcctcaagttgcttccaagatgaattcttcaggaagataaggaacttgcgtgtcttagaccttagttgctctaactttgtacagttgcctaactcgattggtgaactagtgcacctgcgttacctatctctccctcgcaccctcaatatgcttcctgagtcagtcagcaagctactgcacctcgaatcattgtgctttcacaagtgttcccttgaaaagcttcccgcaggcataactatgctggtcaacttgcggcaccttaacattgccacaaggttcattgcacaggtgtccggcattgggcggcttgtaaaccttcagggatcagttgaattccatgttaaaaagggggtaggatgtaccttggaagagctgaagggcttaaaagatctccgtgggaaactaaaaataaagggccttgataatgttttaagcaaagaagcagccagcaaagccgagttgtacaagaaacgacatcttagggagctcagtctggaatggaactctgcaagtagaaatctagtccttgatgcagatgctataatattagaaaacctacagccaccctctagcttagaagtactcaatatcaataggtaccaaggtgccatatgccctagttggctgcagttatcatcacttaagcagcttcaatccttggaccttattaactgcaggaatttggagatcctacctccattgggactattaccgtcactcaaatatctatgtatgaaggaactgtgcactgttaatcaaattggacatgagttctacggcgatgatgatgtaccatttccatccctgataatgcttgttttcgatgattttccaagtttatttgattggtctggtgaagtgaaaggcaatccgtttccccatctccaaaagctaacacttatagactgtccaaatttggttcaggttcctccattgcccccttctgtcagtgatgttacaatggagcgtacagcattgatatcctatttgaggcttgccagattgtcttcgccaagaacataa

SEQ ID NO: 57196 - DNA, 554 bp, Oryza sativa
  Clone ID: PAT_MRT4530_59031C.1
gggacaaaaattgggggaaaaaacaaattacttcgggggcaatttcaaaaaaaccagggggtaccttgcaactaaaaatcaaagactccgacggggcagggcaggggtctaataattaacaaaaacggggaaaacatgacaaggccctaccaaccaagcaagaaccaaagggggggggatcgcctaaaccccccccccggggatccggcccccgagctggatgtccttgggcatgaaggggacccccttggcggggatggcacacagggggggggccccaaacagcccgacgagggacccctcgggggccccctgcagcgcggggacgggggaactctggaagcggagggcggtcttgaagccctgggcgatcccccggaccaggccctggaaggggagcttgcggataaacaactccgggctcttttgggacttggggatcccacggagcgcgacggggccggccctgaaacgggggggcttcttcaccccgccgggggccggggccaacttgcccccccccttggtcgccaactggttcctcggggccttcc

SEQ ID NO: 57197 - DNA, 1851 bp, Oryza sativa
  Clone ID: PAT_MRT4530_59032C.1
atgtctcgtcgtcgtcctcctcacgccctcgccacgctcctctcccgcctccgcgcctgcagctccgcctcccacgcgctccagtgccacgccctcctcctcacctccggccacctcgccgcctccccggcccgcctctccaacctcctcctcctcgccctcgcctccgcctccgcctccccctccgccgccgaccacgccgactccgtcttcgcccacctcgcggaggaagcctcccgccacgcgttcccctggaacaccctcgtccgcctccacgccgccgcgagcccgcggagatccctcctctacttctcgcgcatgcggcgagccgccgtggcgcccgacgcctacacgttcccggccgtgctcaaggcgtgcggctgcgcgcccgggtgtagggtggggttggtggtgcacggcgaggcggtgaggacggggttggacgccgacctgttcacgaggaacgcgctgattagcttctactgcaggatcggggactgccgttccgggaggaaggtgttcgatcacggcgtgcgggacctcgtctcctggaactctatggtggcggggtacgttgggtgtggggaggtggatctggcgcaggatttgttcgacgaaatgcggcagagggatgcgttctcctgggccaccatgatcgatgggtacggagagatggcaggtggtgtagatcgtgcacgtgagttgtttgatcaaatgcctgacagggatttggtgtgctggaactccatgattgatggttatgccaggcatgggagaatggatgaagcgagggttctgttcgaggagatgcctgagaggaatgtgatctcatggagtattgtcatcgatggctatgtcagattcggggagccaaatgaagctttggagtttttccagaggatgctaagatgtggtatcaagcctgatagagtagctgcagttggggctgttgcagcttgtgcacagctgggagctctggagcaaggcaggtggctgcactcatacttggagaagaagaaggtgttgttcgatgttgtggtgcaaacagctttgatagatatgtacgtgaaatgcggtcgtttggatcttgccaaattgatctttgaaagcatgcccaagaagagtgtggtcacttggaatgtgatgattgttggacttggaactcatggttatggacttgatgccatcaagctttttaaccaaatggaaactgaaagggcaccaatggatgatcttagcatacttgctgtgttgacttcttgcacgcatgctgggttagtctcagagggtttggggatattttacagaatggagaaggatttaggactagaacctaaggtggaacattatggtgcattgattgatctccttggccgtgctggacgagtggatcaggctagaaacacaatagagacaatgccgatggaaccgactcctgaattatggggatctcttcttgcttcctgccgaagccataggtgtgtggagctggctgagctatcagttgagcgtctggccagtctcggagcagatgactctggagtctatgttcttctgtccaatatctatgctgatgaaggaatgtgggatgatgttttcaggattaggaagttgatgagtgctgagggtatgaaaaagaacattggacggagtgtgattgaggtggatggacaaattcatgagtttgtgaatggagttagttctcctgattattacccggcttccttggttcaggaacatgaagtgttgttttggaggtttggaactttggcttttttcgccaaggaacttggagattgcgacaaggttgaaaatcgtaccaggctgaaccacaatttcaatcctgactaa

SEQ ID NO: 57198 - DNA, 406 bp, Oryza sativa
  Clone ID: PAT_MRT4530_59033C.1
acacccattgatgaaagttttttaacattaccaggaggccaaaactaagacagggaatacaaacatccaaacgcagagcaatccaaggatgacaaccggatcttaactcttgaaaaacaaagtgcattagacaaggccgaggtaggaaggactttatttactgcgccatcctatgcctggtcgtcctagacaggggaatgaatcataagagccttagttggcttggccaagagggcggcgtacttctggaatggaaactagacgaacttggtgttcgtccagaagataggtgtaaggaatgcataagtcttaatcaggcagtgaacggaggtcttgccgcagatgtcactggttttgggagatccactggacgaggtgaagactttctatatgacggctaactgga

SEQ ID NO: 57199 - DNA, 429 bp, Oryza sativa
  Clone ID: PAT_MRT4530_59034C.1
atggccgtagacggccaggatgatccgcatcgccggctgggcgcgccttctgtcacgttgggtagcggaaaagaagcaacaccatcgaaggctgacaagtgggcccgtggtttttcgtcgagaggttgttcgatctcgtcgtcttcgtcggcggtgatggacaaggtgctggcattctcgatcctgagcgcgtcgccggcggacattgccgccggtggctactgggctcggctgtcgtggcggaggaaggcggatgaccaggcggtggatggccggaggcagccgtcggagcagcagcagcgcggggaggggagctcgccgtcgcagagggaagagcggcggcggccacgcgaagcgccgcccctgccaccgcggttcgccccggagttcgacgggatcgactgcttcgagaccatcgtgatgcattag

SEQ ID NO: 57200 - DNA, 261 bp, Oryza sativa
  Clone ID: PAT_MRT4530_59035C.1
atggctagctgcggccgaaggcggtggcggtgggcaacgtgggcatggcgcgtgcgtgcggagtgggggcgtggggtggagaggaggaagcggcggcagcagttagagctggggctccactggctggagattgaggaaggggccgacaagtgggccccacctgtcggtgaccttgagcgggaaggaggcgggcgccgactgggccacggcctcggcctgggccagctaggtgggagggcgcttgtgggcgaggcggactag

SEQ ID NO: 57201 - DNA, 750 bp, Oryza sativa
  Clone ID: PAT_MRT4530_59036C.1
atggccgtagacggccaggatgatccgcatcgccggctgggcgcgccttctgtcacgttgggtagcggaaaagaagcaacaccatcgaaggctgacaacaatctctccgcttcaaatcttgccccggtcgagcttgaggcagggttcgaattaccgccggtaaccgtgtggttaccgggcttaccatgggggtacggtttttcgtcgagaggttgttcgatctcgtcgtcttcgtcggcggtgatggacaaggtgctggcattctcgatcctgagcgcgtcgccggcggacattgccgccggtggctactgggctcggctgtcgtggcggaggaaggcggatgaccaggcggtggatggccggaggcagccgtcggagcagcagcagcgcggggaggggagctcgccgtcgcagagggaagagcggcggcggccacgcgaagcgccgcccctgccaccgcggttcgccccggagttcgacgggatcgactgcttcgagaccatcgtgatgcattagccattgcgaaatcatcattattactacacgagaggatttgatctgacacggggtactaatttggtgtttttttaaaaaaatttcacacgaacatgtatacgatgattactagtcccctaactatccagcttctatctgttgttttaattgagatgacgggttgtacagagctggaaactaatcgaatatgagcccctcttctttttttctgaaatcaaattgaattgtgtactg

SEQ ID NO: 57202 - DNA, 783 bp, Oryza sativa
  Clone ID: PAT_MRT4530_59037C.1
atgccattcctctcgacgccgtcgttcgacctctctgccggcgccgagcccaccctcgcccacgctctcctcctcctgctgacgcccctcaccagcttaccccgcagcagcagtaggcagtgccagcgtcagaggcggtggcgcggagctgctgtggcctgtgggaggcggaggagcgattgcgggagactatccgagagctccaacacggcggcagccaacgacttggtggcgggtggattcgcctccgccggcatcgcgacgggcggcgtggtcgacaggggatggaaggcggaggccggcggggctctctcccgtcctcccccgtgtggatccagcggcgggcggcacggtggccaccgccgacaacgacaaggaggaagtggctgggagcggcatccttggccccatgacagctggatccacgccgcccccaccgccgctgacgatgagaaggaggtggccaggagcaatgcacacgcacgccggccagatccgcgctgcccctctgatgaggaggatgaggaggaggcggccgagagcggcgccactggtcttgcgcacacgcgggctggccggatccacgccggccccaccaacgacaacgacgaggaggcggtggctaggagcggtgccgccagcccctcgtgcacgcgcgctggctggatccacgccgccctcgccgatgacgatgaggaggaggcggcggctggccagaacggcatagccagccccttgcgaatgcgcgtcggccggactcgtgctgccactgccggattttag

SEQ ID NO: 57203 - DNA, 397 bp, Oryza sativa
  Clone ID: PAT_MRT4530_59038C.1
gcatcaccatctgaggcaagactcacagaaggtctagcattcccttgtcatggccttcctcgtcgtctgttggtctcaaatccgttccatggcgaccgtgcgtcagagaagccatggctgacagaaggtccgcagcctgaaggaacgttgcatctgaaaagcctccggcgcagagggcaaccgagcatctttggcagtctcctatgtctccttgaatcgattataggtagtacggcatctccggaattcatctattcatcggaagttctatgctgtagagtagtgatcagttgatcacctgttcaatctcttactatgatcctatttcttccaattgtatgtcaagtatatataaaagcctattcaaatgaataaaaaaaaaaaaaaaaaaaaaaaa

SEQ ID NO: 57204 - DNA, 271 bp, Oryza sativa
  Clone ID: PAT_MRT4530_59039C.1
tccggaattcccggcccgacccacgcgtccgggaagaattttttgtgccctttctaaagtgagacggctgggagcacgcgccttttcaaagacctccacatcctaatgttgcctctgtctgtcacgtgtactgcgtgcttcacccgtctccgcagtgagcactctaagcgggcctcttctcgggcgagggcagcggcacaaccgcgaccgcgatctagacatccgagcggaaaaagaatttgcctcccttccctgaggagatcgccaccaa

SEQ ID NO: 57205 - DNA, 322 bp, Oryza sativa
  Clone ID: PAT_MRT4530_5903C.1
ggggaagatctgcaagctagaagacaaggtggatcatttggagaaggagctagccgcgttgaagggagaagcaccaccgcagaaggccagagtccgtcttaccgcaaggaagagagctctattcgtccctcgctatcagttggcaccaaaggttcgtgtggtggaaaaagaagctaccccagcggatcctccggttgtcaatgtaagtgatgatgaagaggaatccaaacgtacccattccaagatcgagtgggggccaactcaagatgatggggacgtgccgaacgagccttcaatcaactccgatgcccagaagacctag

SEQ ID NO: 57206 - DNA, 417 bp, Oryza sativa
  Clone ID: PAT_MRT4530_59040C.1
atggtcgccgtcctcccctgccctgatccagcggtgatgatgggaggaggaggaggaggaggacagtggcggctaagggaggacagctgcagcggctgtgaggatgaggatgacagtggcggcgactggaggatgacgacgggaggaggacaacatcaatggtggtggctggaggatgaggacaacgacgacgatggcggcgatatgaggaggacaatgttgacggcggcggcaggagaacgacgacggcagcggcaggaggacaaggatggaggcggtggcaatgatgacagggaacaaagccagcgcaccgacggtgtggacaaggacaagagaaagttgatacttgttgggcaacatattagcttcggctgtgggctcaactacaaaagtgtgaggaaaatagagttttcctga

SEQ ID NO: 57207 - DNA, 280 bp, Oryza sativa
  Clone ID: PAT_MRT4530_59041C.1
gaggccgccctcgcaggcggagcgcttaattctccgcattggcctcgccttcgcttttagggtttgtttgacagcgttcgccgctagctttgttggggccctgttggtgatgtgtgatgatgtgcagtttgaagatgacattccggaagaagaagaagagggcaccggaaccgtggctaataattctgccaaagatggagatgacattcttagaaggtctgatagctatgacgttatggatcttgaagaactattgaaacagaggacattcacgaggcaa

SEQ ID NO: 57208 - DNA, 1334 bp, Oryza sativa
  unsure (1)..(1334): unsure at all n locations
  Clone ID: PAT_MRT4530_59042C.1
aatcacatgaaattctcgggaactccacatacgtatttcatatatgtatttcatacatatgaatagagacaatttcaacgaaagttcgaatttgccaggggtccaaatggaatgataaattggngtatataaaagaccaacgaaacgacgagtgagaaggataagggggagtagtaggaggagctttcattgaagtagagggagcataaaaatatgtatttgctatgggactccggtttgataaaagtatagagcaggaaatagaggattttttcgcaagtaaaaatctggatacagtagcgcagagcccatacatagggcttattcgcgctgtagagcttttagagaaagagggagatggacctgccccagccaatgggaatgacgcagggagcccaggcccagcggggagtgaaaggctctcctcgtcgggctcatcggtaaaccaacctgagccgttgacacaggatttattggctgatgctgtgacctatgagagcccaaattatttatcagatgcggaaagcacaaattctttaggaccagtaactgatttggcgagccccttggatccattctccattcacccaataatggatcttcttatgggcaactattatttagcattcacaaatgaatcattgtctatggcgacaaaaagctacgcgcaaattctcattggatctcggttgttcttaacagcgatggctattcatttaagtcttcaggtagcaccaccagatcttcaacaaggtggaaattctcgtatttcgtatgtacatgttcctgcggctcggatgagtatagttatttatatcgcgacagctataaacagttccttgttcccattaacaaaacatcccctttttcttcgctcttccggaaccggtacagaaattggtgctttttctactttgtttacgttagtgactgggggatttcggggaaggcctatgtggggtacctttcgggtgtgggatgctcgtttaacttctgtattcatcttgtttcttatttacctgggtgcactgcgttttcaaaagcttcctgtcgaaccggctcctatttcaatccgtgctggaccgatcgatataccaataataaagtctccagtcaactggtggaatacatcgcatcaacctgggagtattagccgatctggtacatcaatacatgttcctatgcccattccaatcttgtctaactttgctaacttccccttctctacccgtatcttgttcgttctggaaacacgtcttcctattccatcttttcccgaatctcccttaacggaagaaatagaagctcgagaaggaataccactaaaaacctag

SEQ ID NO: 57209 - DNA, 267 bp, Oryza sativa
  unsure (1)..(267): unsure at all n locations
  Clone ID: PAT_MRT4530_59043C.1
ragaagaagaagaagaagaagaagaagaagaagaagaagaaggtggtgaaraagctggggaaargagaagtggaaaagctgctttcgtacacggtggtcgtgccgacccgtgannnnnnnnnnnnnnnnnnnnnnnnnnnnnnnnnnnnnnnnnnnnnnnncgtatcaccctcgggcccgaccccccccgagggggttaggccacgtggtagcccccggcgttatgccagggcgatcgccctcctcgagggaagcggtcgggtgtga

SEQ ID NO: 57210 - DNA, 1524 bp, Oryza sativa
  Clone ID: PAT_MRT4530_59044C.1
gacttaaatgctcctttcctaatcattggctgcatcaatgactacaaggaagattcaaatgtacgaaccgtctgcaactcatagcaggcatttcgattgaaggggaataaaatctatactaatgatagatgtacaaatagacatcaagttcaagcctctgaaacaatgtcattaaactcaaacaaaagccctcctgccgaactttctgatagaaaaccatttacctccagaataatttaggtgaagacttcataaaacttctcaaccacgagcaatcctgagtcaattgattcaagtgggtccttccgaagccgatgcctcaagcagttggggataacagtggcaatgtcctctacagtgacagtgtccctgcctttgagtgctgccaacgccttggcagccctgttagtcacaatgtcccctcttaatccatcaacattcaactctgcacacactttagaaatcttaacacgaagatcatggtcaatctgcacagcaccaaggttactccgagcagatgaaatctgctgctggagcttgtcttgttcctccaagtaggactcacggaacgcctttggatccctgtcgaaccgagctctctcttcaacaattttcaccctgagttcagcatccctgacagtaccaacctgcgcgtgcatgccaaaccggtcaagcagctgtggccggagctccccttcctcggggttaccagacccaatgaggatgaaccgagcagggtgggagatggagataccctctctctccacggtgttccatcctgacgcagcagaatccagaagcacatctactagatggtcatccaacaaattgacctcatccacataaagaatccccctgttggccttggcaagcaaaccaggctcgaacgccttgacaccatcggtgagcgccttctcaatatcaatggtgccacagactctatcctcagtggcaccaaggggaagatctaccatggtgatcttggccgtgacaacaggaagcttctcaccctccagcacgcgttcccggacctcagggcccatgacctcgggatcgtcagggtcggaattgaaagggtcgccaacaacgacgcggatatccgggagcaggtcgacgagcgagcggacggtggtggatttgccggtgccacggtctcccatgatcatgacaccgccgatcttagggtcgatgacgttgagcagcaggcacagcttcatctcgtcctgccccacgatcgccgcgaacggatacaccggccgttggctctccttcgcgcccgccgccttagcctcctgctgggtggcggagggggcggctacattgcagacggtgaagcggccgcggcggaaccctctccgtgacgggatacgggctgagacggcagcggcggcggcggtgagggagagaggccgggaggtggaggcggagaagagggccggcgacgcggcgggcgcggcggtggcgggggagaaggcggaagccatggggggcctcctgcccggggatccactagtttagagcgcc

SEQ ID NO: 57211 - DNA, 189 bp, Oryza sativa
  Clone ID: PAT_MRT4530_59045C.1
atggaggtccgagccgtcatggttgaggaagataccaggagtgtgtttgttacaaatgccctcaagatgcaagagattgtagctgacagggaactccatgagaggtacattgacgggtttatacagcagcttattttccacgtcgctgatggcaactctgatactgctgccccagatccttccagctga

SEQ ID NO: 57212 - DNA, 879 bp, Oryza sativa
  Clone ID: PAT_MRT4530_59046C.1
atggcgacgcgacggcggtgcacggggcgggacgacggcgacgcgcgggcggcgacgcgatggcggcgtggggctcggagcggcaatgcgacaggtggcgcggggctcgacgcggcgacgcgacgcgcgagcgcggggcgcgaggcggcgatggcgacaggacgatggcgcggcgacgggacgggagcgcggcggcaggcgggcgcgcggcgcggcgacagcgtggcagcggcggcgcggggcgcgaggcggcggcacggggctcgaggcggcggcacggggcgcgaggcggcggcacggggctcgaggcggcggcacggggcgcgaggccgacggcgacgcgacggcgacgatgatgacggcggcgcggcgggcgagcggcgcgcgggcggcaagggaggaagcctcgccatggccgaggctgccgccgcgctcgcgaccgcctctccagtcatcgagaccggcaaccgccttgagggccagagatgcagcaaaaatgcaagagacataagagaaccgagaagggaagaggagaggagcactcacctcctcgctttctccgcgtccgccttgaagcccctgctcggcgacagcgacggcgcaacggggaggccgaggcggcagcgcgagggggaggaagaggcatatacacctactcttagtacggcacggagggacggtggcggaacgcgggcggcggagacggtgctcagcgacgttgacggcgacggcggtggaggaggcggagacggctgcaccctgcgcgaggggaaggcggaggcggaggcagccggggacggggacgacacagtggcggcggaggaggtggaggcggcggggagaggcggaggacgaggcggcccccggcagcagtggtga

SEQ ID NO: 57213 - DNA, 222 bp, Oryza sativa
  Clone ID: PAT_MRT4530_59047C.1
atggcgagcgacaacacctccatctctctctatcaccgagaggcagcgtcggagggagagtcaagaatggcgacgggcaaagctcgcaggatggcggaatgggcggcctctgccgacgtgcgcctcctccacggccgcctcgtgagcttgttgctgtcatcatcgtcatcgccgctgagacctgccgcacccaaggttgtctacaatggtgtgcacgtgtga

SEQ ID NO: 57214 - DNA, 363 bp, Oryza sativa
  unsure (1)..(363): unsure at all n locations
  Clone ID: PAT_MRT4530_59048C.1
catcgaattcccatggatagaaacaagcagttcaaacaccataaccaaagagaactcaattcatggcaacatcacgggcgaaaaacacccaacactggatggatggataaagggcttttccactcgagagagccactggacacgataacaactctactcgatgataaaaagatcctgacacggatagataaggataactggccacgaggggccccaccaatcaggtcctccaattcccgccggagtggccgccgtattcgtcgccacggctgccaccgtggccgacgactgcgtcggtccgggcggcgccgtagccgcctccgnaaacggggccgccctcacggtgccctgagcccttgccaa

SEQ ID NO: 57215 - DNA, 327 bp, Oryza sativa
  Clone ID: PAT_MRT4530_59049C.1
atggtgtcggccaagaagaaggatggacggacaacagagtcggccggcggaaagcgtgtggcatcgttcaagtggaaggcgaatggcgttgtttgggagagtggaagaaggcatgggcatcttggtccaaaaatttttagaaaatacactgaaggagggggtacactttacccacacgaagctactaacctgggtcacccagcccgtgaagaacaaccacgtctggtgactttcaggctttcactacaaggcatttcaaaaggagataatctattctatgccattgacaaagcatggattctacaatataccattgacaaagcttag

SEQ ID NO: 57216 - DNA, 472 bp, Oryza sativa
  Clone ID: PAT_MRT4530_5904C.1
tcttttaaaggggcggccttttttttttttttttttttttttttttttttttttttttttttttttttttttttttttttggcttggaagaggcccccccatttaatttttttttaatttccccttctaaggaaaaaaaaaggccccaaccccggtattaaaatggggggccgtttcttaggaagtatttaacttcccctgcctagcgggggcccatctgaaaaaccaccgggaattaaaagggaaaaaaagcttgccaaaagttggctaataatttttttccaaaaacggtccatggtagggactcgttcgttcctccttttgggaaaaaaatgggctaaatgcctaaatggggcagaacaaagtgcttggtctccggggatcgccgtcattggccggtccttgggggtttgggggggggtttggcctttttcggaggggcttaaggttttggctaaggcttaggcttagg

SEQ ID NO: 57217 - DNA, 1128 bp, Oryza sativa
  Clone ID: PAT_MRT4530_59050C.1
atgtccgaacatggtcccagggaagtaagcctcctgattcgtttgctcgatgattcctgcagcatcacggagattgtatatgacctcgaccactcggaggactatgccagattcagcacgggaacgatctacagctccaagtactccaatgattataccctactcagggaagtctttctgggtgcgcgacatgtgacaacatcatccaaactacaacaaaacagcattgctgttgtaatgctacttgacaccctaatcgatgccttagacaacgccatgactctgatgctcatcaaggaaagggagctagaggcactcagcgaccaagccaaccgccagaggagtctattaccaacacacccaagactccatcgggcaaccgaccaagcaaatggccatctcttcacctttcaagggaccgccggaatagcaacttttacccgagacctacgtcgagtggactggccggccgacttcaatccagctggtatcgagaagtacggcggtaaaaccgaccctgagtcgtggctcaccatctacaccttggccattcgcgcagcaggaggagatagcaaagccatggcaaactacttgcctgtggcactcactgattcaacaagaagctggcctttggggcttcgagatcggtttgttgcaaattttcaaggcacctacgagaggcccgggatacagttcgacgtttaccacgtcatacaactgaaaaataaattattaaaggacttcatccggcgtttcttcgagacatgcaacaagattccagaagacacaaacaatgtcatcatcgttaattttcagaaaggaattcgtgacgaaaatctcatcggcaagttcacccgcaagccgccacttaccgtcatgaagctcttcaaaacagccaattcagccgaagccatcaatattgtgcgggaggacaagcagtctagtgctccacatctggtgaaggataataatgaatatcacaagaaggatcgcaatcgacgacctggaaacttggtggccacaacgtcttattgtcagtcacattgtccgagtgctagaaattacaaccgaatcttgaacgggcccagtccaaatcacccaaattccaaacaccctgctaaggactga

SEQ ID NO: 57218 - DNA, 763 bp, Oryza sativa
  Clone ID: PAT_MRT4530_59051C.1
accatcaaaaagaccttagcgatttaaggtccgcggctccagcaaacaaccaactaacgggacagcataatcgacaactgatcaccgtcacaatgggcgacgcagtcattgagggttcaaactggcgcctcgttgaggttggccgagtcgttgttatcaacggcgaccaccccttcgctggccacctggccacgatcgtcgagatcatcgaccacaagcgaattctcgtcgacggcccttccgcgaacgctagcctcgccactccccgacaagctgttcccctcaacaaggttctcctctcctctctcgttgttgagggcctgaaccgcggttcccgaactggtgttgtccgaaagctctgggagaagtccgagatcgactccaagtgggagcagaccaactgggccaagaagcgggaccagatggagcgaaggaaggctcttaccgacttcgagcgtttccaggttctccgactcaagaagcagcgacgattcgaggagcgcaaggctctggccaaggtcaaggcctccgcataaatgggttatttagctggagtcacggaggtgcttgaaagtcgggtttagatcaagtggcacggaacagggtacgaaacacaatcacggctgtatagaggctgctggattcacttttcgctacgttctggaaggctgtatgccacatttcatcgtccagatgaacggcgtcaatacggaaattctgagatcaactgaattcaaagcatgaggagcaccaaaaagacatg

SEQ ID NO: 57219 - DNA, 2298 bp, Oryza sativa
  Clone ID: PAT_MRT4530_59052C.1
caccaggcggcccccccgggctgcaggttagggacaagttcaactgaaagggagaggcaaagaagacgatgatgcctttgttcgtcgtcgtcgtcggcgatggctgtggaccgcaggcgaggtgataacccaaccagtggccattgatcctcttatcctcccgcggcgacgacgagcggatgccatctcctcctccccgcattatccgcagttgcagcgcacggggcgcaacaggacaataggataaattccacaattccagtagcctacaaattctcacctgctcccctgtttcttggttccccttcctctctcatcagcacacactgtcaccacaacagccaccaactcctctcaacttcttgatccggcggcggcggcaagatgttcggcggcggcggcggcggcgggaggaagccgctggactacgaggagctgaacgagaacgtgaagaaggtgcagtacgcggtgcggggggagctgtacctgcgcgcctccgagctccagaaggagggcaagaagatcatcttcaccaacgtcggcaacccacacgcgctcggccagaagccgctcaccttcccccgccaggttgtggcgctgtgccaggcccccttcctgctcgatgatcccaacgtcggccttatcttccccgccgacgccatcgcgcgggccaagcactacctcgccatggcacccggtggactaggtgcttacagtgattcccgaggtatccctggtattaggaaggaagtcgccgagttcatcgagaggcgtgatggttatccaagtgatccagaacttatttacctcacagatggtgccagcaaaggtgtgatgcaaatgctgaataccattatcagaaatgagagagatgggattctggttcctgttccacaatacccgctttattctgctgccatttccctctttggtggttctctcgtgccatactacttagaagaagaggctaactggggacttgacttcgtcaatctccgacagactgtggcgtcagcgcggtcaaagggaatcactgttcgagcaatggtgattatcaacccaggaaaccctactggccaatgccttagtgaaggaaacataaaggaacttctcaaattctgcttccatgagaacttagttctgcttgcagatgaagtctatcaacagaacatttatcaagatgagcgcccatttataagtgctagaaaggttctgtttgacatgggtcctcctatgagcagggaagttcagctggtttctttccatactgtgtcaaaaggatattggggggagtgtggacaacgtggagggtattttgaaatgacaaatcttcctcccaagacagtagacgagatctacaaggttgcatcaatcgcactcagtccaaatgttcctgggcagatctttatgggtttaatggttaaccctcctaagcctggagatatctcttatctgaagttttctgctgaaagcaagtctatcctcgagtctttgaggaggagagcacgcctgatgacagatggtttcaatagttgccgaaatgttgtctgcaatttcacagaaggagctatgtactctttcccccaaatacgcttaccaccaaaagctatagatgcagccaaaagggctggcaaagcggccgatgttttctactgcctcaagcttcttgaagcaactggaatatccactgttccagggtcaggtttcggacaaaaagaaggggtgttccacctgaggacgaccatcctgccagctgaggaggacatgcctgccatcatgaccagcttcaagaagttcaacgacactttcatggatcagtacgatggctactccaggatgtgaaatgaaaacaagatgagcactaccccaggagaagagagaaagaatctgcctcagcgtggctgatcgagcagttataattaaaaggcactgttaattaattaattaatcaatcaatcgaaaggctaattatttgctgcaacaatctgtaactcgatctactgaaggaaaaaaaaaacttcttgtccttgatatgcatgatgtatagataaaattatttctgctctttgggaattgaataatacgggcgcacccaccggttacagtctactatacatggtcctgtctgtaaggctgcagtagcgaactatttctatgttttgatactgtgaacaagttgcttggcaagtcacttgtgctggctgaaatataatgcagatcaatatatgatcagatcaatgcagaattatacattggtctctaaaaaaaaaaaaaaaaaaaaggaggggggcctcgtgc

SEQ ID NO: 57220 - DNA, 3414 bp, Oryza sativa
  Clone ID: PAT_MRT4530_59053C.1
atggagtcgatcatagcgcgggcgctggagtacacgctcaagtactggctcaagtccttctcccgcgaccagttcaagctgcagggccgcaccgcgcagctctccaatctcggttgggatccgcttctccggttgaggatgccaatttggtcgcctccgggtgctaactttttttttgggcgtgatttgggtgatgcagatatcaatggcgacgcgttgcacgcgagcctggtgctgcctccgtcgctcgccgtcgagaccgcgcgagtcgggaagctccagatcacgcttccatcagtgtcaaatgtgcaagtagaaccaattgtggtgaacattgataagcttgacctcgttcttgttgagaaggacaattctgaagatctttcaagcactagcaggcaaattcattcttctggctctgtgctttatcgccatcaccagctaaaaacagcggatatggatatgctgataaggtcaccaccgctagcggctatcacatttcgtgatcttgtactgtacactacaaatgaaaaatggcagaaattggaatggcaatcactgtcagttgatctgttacctcatcctgacatgttcacggatgctcggtttaactcttctagcagtgaagatggaaaacgagatgatgatggtgcaaaacgaatgttttttggtggtgaaagatttttggaaggaatatctggggaggccaacatcacagtcaaacgaacagagcaaaacaatcctgttgggcttgaagttcagctgcatattactgaagctctctgtcctgccttaagtgaacctggtttgcgggcttttcttcggttcatgaccggggtatctgtgtgcctaaacaggggtgatgtggatccaaaagctcaacagcttgcagaagctgcaggatcttccttggtatccattattgtagatcatatattcctctgcattaaggatgctgagtttcagcttgaatttctgatgcagtctttattcttctcacgggcaagtgttcccgatggggggatttcaagaaacttgtcttgcataaagattgccgggctctttctgagggacacattttctcgtccaccatgcacattgatacagccctctatgcaatctgttccacaagaacctccacctgtgcctgactttggtcaaaatttttgtcctcaaatccatccatttgagaatcagcaattggaattcacgtcaggaattcctttattttccctctattgtcttcagctcactccttccccattacctccaaagtttgcttcaaaaactgtcatcacatgtgaacctcttatggtaaccctccaggagcaatcctgcttaagaattgcctcattcttggctgatggagttgtggccaaccgcagtgccatattgcctgattcttcaatcaacagtatgtcattttatattaaagaatttgatctctctattccattagatgctgaggaaatcacgaggtacagtggaactaagaatgtttgcccgcaatcatcatttatgggggcaagacttcatgtggaaaatctatacttctgcgagtcaccatcagaaaagtgtctgttgctaaaccttgacaaagatccagcttgcttccttctctgggggtaccaacctgttgatgcaagtcagaggaagtgggctactcgagcttctcatctaagcctctcacttgaaacctctagcacttcgaatgaacagagaacagttaggggctcctctccaagtttgtggaaatgtgttgagctggatgacatccggtttgaggcagctatggttacagctgatggtagccctttgttgattgtgccacccccagagggtgttgttggagaacggatttcaaaggttagcaaaggtaactgctctgcgacaaagacatcagctgacaaacgtgagagaaaactgcctagtgacacagcatttggtggtgaggatctgtacctgaaagtttctcatcgcactcttggtggtgcctttgcagttacaactaacttgacatggaaaactgtctcagttaattgtttggaaggagaaagtgctatatttggtgagaatggcactgcagttactggtgaacctaatattttgttgcatgaaaatgggcatcccaatatgagagctgtgttttgggttgaccaccggaataagaaccagtctaaagaagctcgatttattgacatagacatcactcacgtaatgccttatgacatgcgggacatggagtgccatagcttgagtgtatcagctaaggtatctggtgttcgtcttggtggtggaatgagttatactgaatctttgctgcatcgatttggtatccttgggcctgatggtggtccaggggaaggtctcttgaggactctgaaagatttatcctctggtccacttgcgaaactattctcgccatctcacctcaccgacaaggaagatggaatgcccaattccaaagacaatgactacaattcgaagtttgacctggaggtgccagatgatcttgatgtgtcaattgagctacgaaactggctcttcgcccttgaaggcacagaagaagtaggagattggttatcgcctcatggcagtgatcatatcagtagagaagagaaatgttggcataccacattcacgaatctacatgtgtcaggcagaagtagtgatcggcctggatctgcggagaaggtgattcacaaaagggcccttccaatagaacgttttacggctggaattgaaggtttacaggcaataaaaccttgcctgagagatcaactaattggaaatgcaacatcaaataatcttcaaacaggcagtgtttttgataacacaagtagcattggtgaccaaggtgtcgatgttgaagcgaccatggtcatttgcgaagatgagattgaaggtcccaagtggacaatggataatgtcaagttttctgtaaaagaaccgattgaggcagttgcaacaaaagaagaattagagcatctcaccatgctttgtagatctgaagctgatgcaatggggaggatcactgctggaattctccgtctccttaagcttgataagtctcttggccaggggactatagaacaactcaggaacctaggaagcggaggaatcgacaatactttttcacctaggaagttgagcaggcagaacagttttggcagcataggtactcctaggactcctaatctgcactcaactacagatgcaggaacgaaagagttactggaatcaacagttgcttcattacaaatcgaaatcttagaatccaaggccaaatgtacagccctcgtttcccaggcgagcggtgtggaggatcagaaatgcgccgaagacatcaggcaattgaatgacaagctagagagcatgcaatccttggtgacaaaattgagaactttgatctaa

SEQ ID NO: 57221 - DNA, 430 bp, Oryza sativa
  Clone ID: PAT_MRT4530_59054C.1
aaaaattaaaattaataaaaaaaaaaaaaaaaaaacaaagcaacaatgaatagtactacaatactaaaactatacaccgcaggtaagcaaatcacctggcggctaactaatcatgcaaaaaggaaacctgggtacacataatgaaatatgggccagcgagccccacatgggcaactagggacaaccaatcgggccgggtaattctgtctatgtggtcggcgactaaatttttgggttggaccactaccataatttccctggatcctgaagttcacctttaaaccagccaagcatcacaacaacccccaatggacacagaaccaggtaccgcagcggaagatggccacgcccgcccatgaggaccagcccctgaccggcaagggaaaggccaacaggttatgccaccggcagcggactcgtgggccgaccc

SEQ ID NO: 57222 - DNA, 225 bp, Oryza sativa
  Clone ID: PAT_MRT4530_59055C.1
atggtgtactggttcggcgacggcgcgactgctacggtcgtcatcgacggtgtactcccgggcttctacatggtccaccttgcgtcgatttccttccggatttttgatctacagaggttgatgaagcttgtggcgaagtggctcagcttgtcacgaaccgtggaagccgggcgacgagcaaaggcgaagcagcggcgtccagagcgcaatggtgttctgagttga

SEQ ID NO: 57223 - DNA, 3842 bp, Oryza sativa
  Clone ID: PAT_MRT4530_59056C.1
atggagtcgatcatagcgcgggcgctggagtacacgctcaagtactggctcaagtccttctcccgcgaccagttcaagctgcagggccgcaccgcgcagctctccaatctcggttgggatccgcttctccggttgaggatgccaatttggtcgcctccgggtgctaactttttttttgggcgtgatttgggtgatgcagatatcaatggcgacgcgttgcacgcgagcctggtgctgcctccgtcgctcgccgtcgagaccgcgcgagtcgggaagctccagatcacgagaaataaagctgcccttggtattccttgcgcatctggttattgcaagttttggttgggtggtgatctcagtgctttatcgccatcaccagctaaaaacagcggatatggatatgctgataaggtttatttctttgaccttgatgttcaacgaacattcattccatctttccttttcaggtcaccaccgctagcggctatcacatttcgtgatcttgtactgtacactacaaatgaaaaatggcagaaattggaatggcaatcactgtcagttgatctgttacctcatcctgacatgttcacggatgctcggtttaactcttctagcagtgaagatggaaaacgagatgatgatggtgcaaaacgaatgttttttggtggtgaaagatttttggaaggaatatctggggaggccaacatcacagtcaaacgaacagagcaaaacaatcctgttgggcttgaagttcagctgcatattactgaagctctctgtcctgccttaagtgaacctggtttgcgggcttttcttcggttcatgaccggggtatctgtgtgcctaaacaggggtgatgtggatccaaaagctcaacagcttgcagaagctgcaggatcttccttggtatccattattgtagatcatatattcctctgcattaaggatgctgagtttcagcttgaatttctgatgcagtctttattcttctcacgggcaagtgttcccgatggggggatttcaagaaacttgtcttgcataaagattgccgggctctttctgagggacacattttctcgtccaccatgcacattgatacagccctctatgcaatctgttccacaagaacctccacctgtgcctgactttggtcaaaatttttgtcctcaaatccatccatttgagaatcagcaattggaattcacgtcaggaattcctttattttccctctattgtcttcagctcactccttccccattacctccaaagtttgcttcaaaaactgtcatcacatgtgaacctcttatggtaaccctccaggagcaatcctgcttaagaattgcctcattcttggctgatggagttgtggccaaccgcagtgccatattgcctgattcttcaatcaacagtatgtcattttatattaaagaatttgatctctctattccattagatgctgaggaaatcacgaggtacagtggaactaagaatgtttgcccgcaatcatcatttatgggggcaagacttcatgtggaaaatctatacttctgcgagtcaccatcagaaaagtgtctgttgctaaaccttgacaaagatccagcttgcttccttctctgggggtaccaacctgttgatgcaagtcagaggaagtgggctactcgagcttctcatctaagcctctcacttgaaacctctagcacttcgaatgaacagagaacagttaggggctcctctccaagtttgtggaaatgtgttgagctggatgacatccggtttgaggcagctatggttacagctgatggtagccctttgttgattgtgccacccccagagggtgttgtgaggattggtgttgcttttcaacagtttacaaccaatacttcagtagagcagttgttttttgtgttaggtctctacacttattttggccaggttggagaacggatttcaaaggttagcaaaggtaactgctctgcgacaaagacatcagctgacaaacgtgagagaaaactgcctagtgacacagcagtgagcttaactatgaatagtctccaactcaatttcttggaatctttatcatcaaatgacttacaattgcccctggttcagtttggtggtgaggatctgtacctgaaagtttctcatcgcactcttggtggtgcctttgcagttacaactaacttgacatggaaaactgtctcagttaattgtttggaaggagaaagtgctatatttggtgagaatggcactgcagttactggtgaacctaatattttgttgcatgaaaatgggcatcccaatatgagagctgtgttttgggttgaccaccggaataagaaccagtctaaagaagctcgatttattgacatagacatcactcacgtaatgccttatgacatgcgggacatggagtgccatagcttgagtgtatcagctaaggtatctggtgttcgtcttggtggtggaatgagttatactgaatctttgctgcatcgatttggtatccttgggcctgatggtggtccaggggaaggtctcttgaggactctgaaagatttatcctctggtccacttgcgaaactattctcgccatctcacctcaccgacaaggaagatggaatgcccaattccaaagacaatgactacaattcgaagtttgacctggaggtgccagatgatcttgatgtgtcaattgagctacgaaactggctcttcgcccttgaaggcacagaagaagtaggagattggttatcgcctcatggcagtgatcatatcagtagagaagagaaatgttggcataccacattcacgaatctacatgtgtcaggcagaagtagtgatcggcctggatctgcggagaaggtgattcacaaaagggcccttccaatagaacgttttacggctggaattgaaggtttacaggcaataaaaccttgcctgagagatcaactaattggaaatgcaacatcaaataatcttcaaacaggcagtgtttttgataacacaagtagcattggtgaccaaggtgtcgatgttgaagcgaccatggtcatttgcgaagatgagattgaaggtcccaagtggacaatggataatgtcaagttttctgtaaaagaaccgattgaggcagttgcaacaaaagaagaattagagcatctcaccatgctttgtagatctgaagctgatgcaatggggaggatcactgctggaattctccgtctccttaagcttgataagtctcttggccaggggactatagaacaactcaggaacctaggaagcggaggaatcgacaatactttttcacctaggaagttgagcaggcagaacagttttggcagcataggtactcctaggactcctaatctgcactcaactacagatgcaggaacgaaagagttactggaatcaacagttgcttcattacaaatcgaaatcttagaatccaaggccaaatgtacagccctcgtttcccaggcgagcggtgtggaggatcagaaatgcgccgaagacatcaggcaattgaatgacaagctagagagcatgcaatccttggtgacaaaattgagaactttgatctaagttgcacatagttttttgtgtataggttcgtgcagtccaaaacttggaagtggctaatgctgtacttcctcttcattattctttttgtgtacatctttatgttccttggggtgtatacaggtggattctggaataatgagctgacacgcagcaaatataaaattttgtagctggaatgtcacatgtagcactgtgttcaaaacttcaagtgcagtcattaggaataacatttttgtcatctgtaaaaaaaaaaaaaaaaa

SEQ ID NO: 57224 - DNA, 1677 bp, Oryza sativa
  Clone ID: PAT_MRT4530_59057C.1
atggatctggaccccgagggcctcttccgcgacgacagcgacgaggatgacgacaacgtccaggtcgcgttccaccctgagagggaggccaacaaggagatgatcgtctaccttatcgacggctcgcccaagatattcatccctacagctgaggaagaataaaaggatgcgatccattttcatacgatagataactgggtcacacatgcgctgaaaacgcagattgtcggctgaaaggacgatgaaatcccttgatgctgcggccccaatgaaggatccacaaaagcgctgcccagtgtacaatgacaatagaggttaaatgctcaagacgtgaattgtctggagtgaatagcttatcaagtcaatcatctaagccttttgaaattcaaagccatggatcaccttaatgattatcccaatttaagaccgacaaagattaattcacccgcgtgatgagcttaaactaggacggactcgtgtttacgtttctatacacatctcaacgtgccgttgaagaatcctcacactcgcttccaggtgtaaaatgaagaagccaaactcctgacctcttccaccactctctccgcatcctgcatgtagcagagtatcatgaatgatgtacaagataaaaaagatagtgtcaacactgtactgctgccagtcggcctcagcagccttgcctcgccgcttactaccgcccgcctgaccgaagaaaatccctcctacatctgccgttgtcgcgtccttggtcctataaccggccaccgcctctgctggcgcaagggcaacgacggcgctagtgttgagggggcgccgggagggagggagggagcgcggtggggatgtagagagcggatctgggagatggagagagggtggcggagagccggagaggggttgtgctgggttctggcggcggagcgaatcgtcggcggggagggctgtgcgacggcgattttgcggagggaggcgcgggatgggggtgcgacgtgcgagggcgaggccgtgagggcggcggctggcgatttggcggagggcgaagggcggtttgcacttgcattttacgggaatccaactcgcccacaacttgtagcccttattgcacaagaagaggttacttctgctggtggtcaaattgaaccacctggaatacacatgatctatcttccatactcggatgatgttagatatcctgaggaggttcatctgacttctgatgatgcacctcgtgccacagatgaacaaattaagaaagcttcaaatctattgagacgtattgatttgaagaacttctcagtatgccaattttctaacccaggtgaagatgagatgccagatgtcaaggatgaaacccttcctgatgaagagggcttggctaggccagtagtagttaaagctgtcgaggaatttaaggcttcagtctatggtgaaaattatgatcaagaggaagccgaggcagcagcagcgaaggctggggcttcaaagaagaggaaagcacttactgatgcagctgcagagaaaagtgcagcacataattgggcagaacttgcggatactggaaagctgaaggacatgacggtggtggacttgaaatcttacctgagtgcacatggcctcccagtttctggaaagaaagaggcactcgtcagcagaatcttgactcatctaggcaagtga

SEQ ID NO: 57225 - DNA, 861 bp, Oryza sativa
  Clone ID: PAT_MRT4530_59058C.1
tttttaaggggaacaactttttttttttgacatttcatcgaacatatcaacacccagcagttgcagcctagcatgattgaagtttgtacagctgaacaagaacaacatttacaagaactaggtgcacttggaacatagcacccgcaaaataatttagtcagaacaaaatgctactctgccacaccacctctaatcacaaatccattctggaacaatttcaaaaaagcaaaaggaccaaaaattgatcaactataccacacactcgagacccgaagaaaagcaaagacttaagaggagcactcgccaaaataaatcatgttgcagatatcctcagaagatctctactgcagtcttgtgcaaaggcgacaccattttcagaaatccaagttgaggatatcagcagcagattgtgactatggaaataccctttagatgaaatggagcaagatggagggggatactaagttatggaccttttacgagacaggcgaataaattatctacaacaacaatacagggtatggaacgaccattcttgatcttccatatcgtacttccgcactaacatgagctgcagtactaacttgatgtatcaatctccttgccatgatcttcattgatggttcttcgtaaccttctcaaccatatctcatagtccatcggatatggggttccacaaatgctgtcaacatagtctgcaaaagctttcagcactgctgagacatcacccaacttctgctgtataactctccttgaccaggatgtctccctccattgaagtgcaccttcaactgagtcaagctctgggcaaactccccacaaaaaagtataacagataattaagtttctggatcagatggt

SEQ ID NO: 57226 - DNA, 231 bp, Oryza sativa
  Clone ID: PAT_MRT4530_59059C.1
atggccttctccggcgggcagcggatgatgatggggactagcgttagctggcaacgcctcgccatctatggatttaggcggctcagcggtgtccacggcaactccagcgagatgaggatagcagctttgatgagggcgagcggaagtcaacgatgttgcggagaagaggccgcgaccggcaaggcgacgacgtccgatccagcgtctcgacgacatcacatcgccaggtaa

SEQ ID NO: 57227 - DNA, 491 bp, Oryza sativa
  Clone ID: PAT_MRT4530_5905C.1
atgattaaacttgaacgaggttctatgggttaatctgggatgtatgaagcatatgttcggggtgaccaggacgtattgtttccgaaccgatcggtgaagcggagacctgatgcccttcagggactagcctcctttcccaagcaagttttcagccattttggagtaacacccgaggatcgtggttattaaaaaccggtgaaatagtcgactcccaacgctttttataattgtctttccttgagtaaagtcccaagaaggcagtttccaccctcaatcaccaaagcaggaatccaccttctggctttccgcaagtttgggagaattcgtggccattttccctgatagaaaaggttattctgattaactcttgcttggcttcatttttaagaagagccggcatttgttccaatccagatttccctggttgcttttttcaaataatttcaaatctcagccatagcttggtttctaactttttcgcaggtaaacag

SEQ ID NO: 57228 - DNA, 2758 bp, Oryza sativa
  Clone ID: PAT_MRT4530_59060C.1
atgtcgcagcaaggcgaaccgatgtcgacaaccactattgggactacatcgagccggaatcctaggacccagaataagattcctaaggaagtctacaccataacagaggtggacgatgttggatatccgacggctccgacgaaagttgtcaaaaagttccctacgatatgcggagtcctagggaggcggaacttcactattctgaaggaccacatcgatctggtccctcaagaagaaaaagaagaggcctggaggcaattcaaagaaagcttccgataccctacagaggccgaggcaggactgaagcggcaggctatccgcaacatggggaattgttggaaaaatttcaagacaacgctggtcacggagtatgtcctcaacctcgcccagccagaaccatttgggaaatacgcattcatcacccaacccgtgtgggatgagttccatgccgccaaatcaacgaaagagtctcgggaaaaaaaccagacctaccatgatctgcaggcaaggaaccttcacccgcaccggcttggcaccggaggctacacggggaaacaggcagaatgggacaaggaggatgaagctgcagcggaatctaacaccccgcaagtgcttgctgatatcccggtccagcgggcaaggaactgggcaaggacaagggtgaagaagaatagtgacggaactctttcgttcccaaatcctgaagatcaagcggtgtaccagaaaatcgtcgaactgaatgctgagagacaggcctcccaagaggtctgcccacaaaaacgcgaggatgacattctcacgaaagcgttgggaaacgaagaacaccgtggacgaacaaggggcattggctccaatgttccatggaagtttgggtttccccaatacgcgtggcagtacaagaagcacaagctttccaaggcgcagaaagctgcacgcattaaggcccaacttcgggaggagcttaaagaagagcttagagaagagctcactgccgagctgttaggtatagaggctcagatagaggcacgcatcagggataggtcgaccgatgccactcccggtcccatagtacaagtgagccccacgcagaggcatagcagctgcgcatcaactgaggctccggcagaacagcctgaaggccccgccacggtggaccacataacggaacccacatcgtgtaccctagtcgttagggtgacaccaggatttgcaattcctgccgcagagggtcaagcattcaagcctacccaggagacccgagtgcatggggcgcagctgcaagccggcaatgccaaagttcaggtggacttagtgaagcccgattgggttggctacactatcccacacccacctaatgacgagattctgacccttggggctgcacgtgggacctttattcaatggcccaagcacagcattgagatcaatataactccaaggctagcgccaagttctcgtccgccgccgacgcgtccccatcaaactgttgtatctctcccttctgccgttgaacaaagagatgaagatctccaattacagtatgatactgattttggggacgacggtatggaggttgacagcaggccgcacctcccccctcctgccaaacggagcaagagggcgaaatcttctccacccaagcttgacacacgcagaaaagctgctggaacggggagaggaaaaataaaggtgccattagccccaaagaagcttgatcttggcaaggcgccagtagctcctccaaagcctctagccaaattcatattgggcatgccattggtcggagacgatgccttattcaagatgggccctgcttgcaaggagttgcataggtacatggagaagtccaacgcaaggaggaagaatagagagacctccatgttgggccagcacgatggtcagccgttcctcgggcctactgccttcatcgccgtagacttcaaagatctatgggacctctacagggtgcgagcgatcgacaccaacctccttaagtgctactccttgttaacctggaagcatgtccatcgtaaagcaccccatgttgccttactcgatccagctgtcgtcaacgagacaacgctgaaaaacgatcgagcaaacatagtggcctatatcaaggactgcttatttgcccgtcaagacaaggacttcattatgtgcgcctacaatcaccagtaagcatgtaccccctacttatactcaaatgcgcgacgcgtacagctgtagtatgtaactagcaatttattaatttcgtaggcgtcattggattcttctggtaataacgccgaagtggagtttggtacactaccttaactccaatatcaatccaaaaatatacgattggtcggccatcgaatctgccttgaacgaggcatgggaccaatacgtggcaagaggcgggaggcataaggatgggcatcccaaactcggtcacaagaaagacttcctaatacgttaacaagttggcaaccagtgcaggttccatgtctgccataacatgaggagcttcgcagacaaggaaaaaatttcaacgattccggaaatcaacttcgatatcattagagaggagataacacaattcatactagatgatctcttgtcaccgaaagggatgtttaaagtgaagtcctaggtagctcgtctcggaatggcagaacatttgcaatgcatatgcgacaaacatttgatttttgtaaatattctttgtaatacaattaaattctttagagtaaagtcctaggtagctcgtctctat

SEQ ID NO: 57229 - DNA, 1062 bp, Oryza sativa
  Clone ID: PAT_MRT4530_59061C.1
atgggcctcggacccacgggtggtcttgatgcaaaggcgcttagggatggcaatggggcgcgcggcggctgcaaacgacgtgatggcctccggggaatgatgaccttgggatggcttgacgttggcggcgacccgcagaggctacaacgagcgtgggggacggagggcgtcaccggccgattagtagagtctcagtgggacatccctgcccaccaagggcgcatcatgacaggtgctggcaacagggcggatgatgacggggacaagctagcgttagctggcaacgcctcgccgtctatggatttgggcggctcagcggtgtccacggcaactccagcgagatggttcgggacgcagccagagctgatgacgccttgcgggcaccgagtagtggcgctccggccggcgttctcttcaagcagcaagacaatgtgtgtagaggatagcagctttgatgagggcgagcggaagtcgacgatgttgcggagaagaggccgcgaccggcaaggcgacgacgtccgatccagcatctcgacgacatcacatcgccaggtaaagacgtcgtgggatagaggttgcggccggcgaggcaaggacgtcgcggcagcaggtagatgtgtcaccggcgaccggcgtctccgacgagagggagcgacgcgatctccggctggcggtgcctccgacaagcggagaggacgctatatccagcgggccaggcagcaccggaaactctccatacgccgaggcactgcggccaacgtcaccggccgccgagcgcacaagttcccgccggacgccgagatacggcagccgatgtcgccggccgcagagcacgcacgttcccgccggacgccgagatactccggcgaaaacgacaattcacatatctctcatctgaccttccctcccgccaccgcctacctctgctaccggccagatgtggcggagggcgccaccgcctctcataccgagcggatctggcggaggggaggcgccgccgccgactgcaccgccaggccaccgccgatgcgtacgagagatgaggaggagaagaggagataa

SEQ ID NO: 57230 - DNA, 2259 bp, Oryza sativa
  Clone ID: PAT_MRT4530_59062C.1
atgtcgcagcaaggcgaaccgatgtcgacgaccactaataggactacatcaagccggaatcctaggacccagaataagattcctaaggaagtctacaccataacagaggtggacgatgttggatatccgatggctccgacgaaagctgtcaaaaagttccctacgatatgcggagtcctagggaggcggaacttcactattctgaaggaccacgttgatctggtccctcaagaagaaaaagaagaggcctggaagcagttcaaggaaagcttccgataccctacagaggccgaggctggactcaagcggcaggctatccgcaagatggggaattgttggaaaaatttcaagacaacgctggtcacagagtacgtcctcaaccccgcccagccagaaccatttgggaaatacccattcatcacccaacccgtgtgggatgagttccatgccgccaaatcaacgaaagagcctcgggcaaaaagccaagcctaccgtgatctgcaggcaaggaaccttcacccgcaccggcttggcaccggaggctacgcggggaaacaggcagaatgggacaaggaggatgaagctgtagcggaatctaacacccagcaagtgcttgctgatatcccagtccagtgggcaaggaactgggcaagggcaagggtgaagaagaatagtgacgaaactctttcgttcccaaatcccgcagatcaagtggtgtaccagaaaatcgatgacatcctcatgaaagcgttgggaaacgaagaacaccatggacgaacaaggggcattggctccaatgttccatggaagtttgggtttccccaatacgcgtggcagtacaagaagcacaagctttccaaggcgcagaaagctgcatgcattaaggcccaacttcgggaggagcttaaagaagagcttagagaagagctcactgctgagctgttaggtatggaggcttggatggaggcacgcatcagggataggtcgaccgatgccactcccggtcccatagtacaagaacccacatcgtgtaccctagtcgttagggtgacaccaggatttgcaattcctgccgctgagggtcaagcattcaagcctaccccggagacccgagtgcatggggcacagctgcaagccggcaatgccaaagttcaggtggacttagtgaagcccgattgggttggctacactatcccacacccacctaatgacgagattccgacccttggggctgcacatgggacctttattcaatggcccaagcacagcattgagatcaatataactccaaggccagcgccaagttctcgtccgctgccgacgtgtccccatcaaactgttatatctctccctcctgccgttgaacaaagagatgaagatatccaattacaatatgatactgattttggggacgacggtatggaggttgacagcaggccgcacctcccccctcttgccaaaaggagcaagagagagaaatcttctccacccaagattgacacacgtagaaaagctgctggaacggggagaggaaaaataaaggtgccattagccccaaagaagcttgatcttggcaaggcgccagtagctcctccaaagcctccaaccgagtttacattgggcatgccattggtcagagacgatgccttatttaagatgggccctgcatgcaaggagttgcatgggtactacatggaaaagtccaatgcaaggagaaagaatagagagacctccatgttgggccagcacgatggtcagccattcctcgggcctactgccttcatcgccgtagacttcaaagatctatgggacctctacagggtgcgagcgatcgacaccaacctccttaagtgctactccttgcgacattggattcttctggtaataacgctgaagtggagccgggtacactaccttaactccaatatcaagccagaaatatacgattggtcggccatcgaatctgccttgaacgaggcatgggaccaatatgtggcaagaggcgggaggcataaggatgggcatcccaaacttggtcacaagaaagacttcccaatacgtcaacaagttggcgaccagtgcgggttccatgtctgccataacatgatgagcttcgtagaaaaggtgacattgctcgaccctgaggaatttatttcaagtattccggaaatcaacttcgaaatcattagagaggagatagcacaattcatactagatgatatcttgtcaccgaaagggatgtttagagtgaagtcctag

SEQ ID NO: 57231 - DNA, 425 bp, Oryza sativa
  unsure (1)..(425): unsure at all n locations
  Clone ID: PAT_MRT4530_59063C.1
ccattagcagtttgcagattcatagccaccccatccatcgccggcgatcagaggcgatcgagagattgtgagagagagagatggcggcggccaggagcgtggggatggaggcggaggtggcggcgctgcgggggaggttcgcggcgggggggacgcggggcgcggagtggcgggcggcgcagctccgcgggatcctgcggatggcggcggaggcggaggcggaggtgtgccgcgccctccacgccgacctcgccaagccctacaccgagtcctacgtccacgagattgcgctggtgaagtcgtcctgcaagtttgccctcaagaatctgaagaaatggatgaagccccaaaaggtcactgatncgcttatgacgttaccctcgacggtgagggtggcggcggagccacatcggcgtcctgctcgt

SEQ ID NO: 57232 - DNA, 2574 bp, Oryza sativa
  Clone ID: PAT_MRT4530_59064C.1
atggctcaagacgctggtgacacagtgctcccggcatcacgcattacggcggatagacaccttatcctcccccgtaagatcatgccggaaggcgccgtcgtgagggcgggggagtggcggccgcggccacggtatctggagcgatccgtgcacctcctgtccttctctatggcggggttgattccgccgttctccggattctttcatgaggttttggatttctatgaaatccatgccttgcatctcgcacccaacgccgtgatgacgctggccatcttcgcacatctgtgcgatatgttcatcggggtgcgcccgacgatgcggctgttccagtctttcttcattccgcagctgctgcaaggtgcggtggagtacgacgcgatgtgggatcaccttaggggcctgcgaagcctgggcctcacaggggcgatggtctttggtgactatttccgccgccgcatcgcacctctccaggatcgatcccgtggtgtgtgggagtacactggtcccaacaaccccatgcgtacgcatgtgggtgcgcgctgggactggggggaggaggacgcgaagatggtgattcaacgggtgctgggcctagactccgccgagcaaatgctaattccagatgagatccttcccctccgctgcgaccgcgaccgggagagcatcttggccgtgatgtcggtcgtcggcgttggcaggggctggtccagccggggcggcaccggtggtagcgctgccggcatgggtggcggtggcgcgaccgcaggcgggagtcggacatgcggacccggcgggggtgggagctccaggtctcccggcacaaaccgcggacccggggacgactcagctagcgacccgaaagagaaacggaagatttccgaatctcgaccgccctctcctccgcgtggagggggcgccgagcgcgtggcggaccgaccgccagcgggccacaagcgccccgccggtgctgaggccggacggaagaagaagcggctccggaagataggtcaaacggagccgtgtcgggggagcttcattgagcccccgaagtggacttttaaccgccctccctgcagtgacattgatagcaagttcgagtgggatactgatgtcgacgtcgagttcccggctgctctggccctattgagcatggatgctatggttccatcaacgaggcgaacacaggtggacgatgttggatatccgatggctccgacgaaagctgtcaaaaagttccctacgatatgcggaatcctagggaggcggaacttcactattctgaaggaccacatcgatctggtccctcaagaagaaaaagaagaggcctggaggcagttcaaggaaagcttccgataccctacagagcccgaggcaggactcaagcggcaggctatccgcaagatagggaattgttggaaaaatttcaagacaacgctggtcacggagtacgtcctcaaccccgcccagccagaaccatttgagaaatacccattcatcacccgacccgcaaggaaccttcacccgcaccggcttggcaccggaggctacgcggggaaacaggcagaacgggacaaggaggatgaagctgcagcggaatctaacaccccgcaagtgcttgctgatatcccgttccagcgggcaaggaactgggcaagggcaagggtaaagaagaatagtgacagaactctttcgttcccaaatcccgaagatcaagcggtgtaccagaaaatcgtcgaactgaatgctgagagacaggcctcccaagaggtctgctcgcaaaaacgcgaggatgacatcctcacaaaagcgttgggaaacggagaacaccggggacgaacaaggggcattggttccaatgttccatggaagtttgggtttccccaatatgcgtggcattacaagaagcacaagctttccaaggcgcagaaagctgcacgcattaaggcccaaattcgggaggagcttaaagaagagcttagagaagagttcaccgccgagctgttaggtatggaggctcggatggaggcacgcatcagggataggtcgatcgatgccactcccggtcccatagtacaagtgagacccacgcagaggcgtagcagctgcgcatcaactgaggctccggcagaacagcctaaaggccccgccgcggtggaccacataccggaaccgacatcgtgtaccctagtcgattgggtgacaccaggatttgcaattcctgccatagagggtcaagcattcaagcctacaccggagacccgagtgtatggggcgcagctgcaagccggcaatgccaaagttcaggtggacttagtgaagcccgattgggttggctacactatcccacactcacctaatgacgagattctgatccttggggctgcacgtgggacctttattcaatggcccaagcacagcattgagatcaatataactccaaggctagcgccaagttctcgtccgccgccgacgcatccccatcaaactgttgtatctctccctcctgccgttgaacaaagagatgaagatctccaatgtcacgcccaaaaatttaagaaccagaatttctaa

SEQ ID NO: 57233 - DNA, 2586 bp, Oryza sativa
  Clone ID: PAT_MRT4530_59065C.1
atgggggcagttgcaaatgatggagaatacgaagtgtcccggttgccaaatctggtttggtcgggttacagcctgcacagtaccagccaagaaaaattggtaaacagaacatttcgttcaaatacaacatttctagaaatctgttatcgttaccaatatcctagattgctttcaagtgacattgatagcaagttcgagtgggatactgatgtcgaggtcgagttcccggctgcttcggccttattgagcatggatgctatggttccgtcgacgaggcgaacgcaggtggacgatgttggatatccgacggctccgacaaaagctgtcaaaaagttccctacgatatgcggagtcctagggaggtggaacttcactattctgaaggaccacatcgatctggtccaagaaaaagaagaggcctggaggcagttcaaggaaagcttccaataccctacagaggtcgaggcaggactcaagcagcaggctatccgcaagatggagaattgttggaaaaatttcaagacaacgctggtcacggagtacgtcctcaaccccgcccagccagaaccatttgggaaatacccattcatcacccaacccgtgtgggatgagttccatgctgccaaatcaacgaaagagtctcaggaaaaaagccagacctaccgtgatctgcaggcaaggaaccttcacccgcaccggcttggcaccggaggctacgcggggaaacaggtagaatgggacaaggaggatgaagctgcagtggaatctaacaccccgcaagtgcttgctgatatcccggtccaacgggcaaggaactgggcaagggcaagggtgaagaagaatagtgacggaactctttcgttcccaaatcccgaagatcaagcgatgtaccagaaaatctacaagaagcacaagctttccaaggcgcagaaagctacatgcattaagacccaacttcgggaggagcttaaagaagagcttagagaagagctcactgccgagctgttaggtatggaggctcggatggaggcacgcatcagggataggtcgaccgatgccactcccggtcccgtagtacaagtgagccccacgcagaggaggcgtaacagctgcgcatcaactgaggctccggcagaacagcctgaaggccccgccgcggtgaaccacataacggaacccacatcgtgtaccctagtcgttagggtgacaccaggatttgcaattcctgccgcagagggtcaagcattcaagcctacccaggagacccgagtgcatggggcgcagctgcaagccggcaatgccaaagttcaggtggacttagtgaagcccgattgggttggctacactatcccacacccacctaatgacgagattctgacccttggggctgcacgtgggacctttattcaatggcccaagcatagcattgagatcaatataactccaaggccagcgccaagttctcgtccgccactgacgcgtccccatcaaactgttgtatctctccctcctgccgttgaacaaagagatgaagatctccaattacagtatgatactgattttggggacgatggtatggaggttgacagcaggcctcacctcccccctcctgccaaaaggagcaagagggcgaaatcttctccacccaagcttgacacacgcagaaaagctgctggaacggggagaggaaaaataaaggtgccattagccccaaagaagcttgatcttggcaaggcgccagtagctcctccaaagcctccagcaaaattcacattgggcatgccattggtcggagacgatgccttattcaagatgggccctgcatgcaaggagttgcacgggtactacatggagaagtccaacgcaaggaggaagaatagagagacctccatgttgggccagcacgagggtcagctgttcctcgggcctactgccttcatcgccgtagacttcaaagatctatgggacctctacagggtgcgagcgatcgacaccaacctccttaagtgctacttcttgttaacctggaagcatgtccattgtaaagcaccccatgttgccttactcgatccagctgtcgtcaacgagacaacgctgaaaaacgatcgagcaaacatggtggcatatatcaaggactgcttatttgcccgtcaagacaaggacttcattatgtgcgcctacaatcaacagcgacattggattcttctggtaataacgccgaagtggagtttggtacactaccttaactccaatatcaagccagaaatatacgattggtcggccatcgaatctgccttgaacgaggcttgggaccaatacgtggcaagagatgggaagcataaggataggcatcccaaactcggtcacaagaaagacttcccaatacgtcaacaagttggcgaccagtgtgggttccatgtctaccataacatgaggagcttcgcagaaaaggtgactttgctcgaccctgaggaatttatttcaaggattccggaaatcaacttcgaaatcattagagaggagatagcacaattcatactagatgatatcttgtcaccgaaagggatgtttagagtgaagtcctag

SEQ ID NO: 57234 - DNA, 225 bp, Oryza sativa
  Clone ID: PAT_MRT4530_59066C.1
atgcagccgtggctgcagcatctgcattactgcttgaacgtcgagctgcgtgttatcgtcccgtccaagcagcacatgcgcacagtgattcagtgtgcgatactgggtgtgagctgggtggcgcctgtccggcggctccggcgccaggcagcacggcggtcgagtagcaacagcgtcaggcggccgggcgacctgagcggtgacggcgtcgggcagcccgagtga

SEQ ID NO: 57235 - DNA, 930 bp, Oryza sativa
  Clone ID: PAT_MRT4530_59067C.1
atggagagatacacatgttgggtgatgcatggagagcaagatctgggtactgatggtgcagctgcagacggaagtggtacagacattcatgaagaaggagatgaagaagagcatgacatgtttgtcccatctccattgggcggtgaaatggttgatgtggaccctgatatgctgcaagatatgttacgtgacgttgatgacccagctatgaacgagagagattccatgaagttcagcagttgggtgaatatccgcagaggtgtcaaggtcgacaaggaaggcttcacattagtggacctggccaagcaaggcgaaccgatgtcgacggccactactgggactacatcgagccggaatcctaggacccagaataagattcctaaggaagtctacaccataacagagatggacgatgttggatatccgacggctccgacgaaagctgtcaaaaagttccctacgatatgcggagtcctagggaggcggaacttcactattctgaaggaccacatcgatctggtccctcaagaagaaaaagaagaggcatggaggaagttcaaggaaagcttccgataccctacagaggccaaggtaggactgaagcggcaggctatccgcaagatggggaattgttggaaaaatttcaagacaacgctagtcacggagtacgtcctcaaccctgcccagccagaaccatttgtgaaatacccattcatcaccaaacccgtgtgggatgagttccatgccgccaaatcaacgaaagagtctcaggaaaaaagccagacctaccgtgatctgcaggcaaggaaccttcacctgcaccggcttggcaccggaggctacgcggggaaacaggcagaatgggacaaggaggatgaagctacagcggaatctaacacccaaccagtgcttgctgatatcccggtctag

SEQ ID NO: 57236 - DNA, 299 bp, Oryza sativa
  unsure (1)..(299): unsure at all n locations
  Clone ID: PAT_MRT4530_59068C.1
gatcttaagcggcccctttttttttttttttttgcatcttttatattggtaatatgaagtcgtaacggtcatttaaaaagggcaggcaaaaaacgagntaacatgttactattaagtttacagttttcatgagaactgatatggcgtttttttattgtattgaaatctttagctttattcttaagtgaggcaggagcttgtaaacgttttcctggactctgagttcagtgtaagatatcattgcagccaaaatattatagggaaaagacatttgacatacagaaacattttacctcgag

SEQ ID NO: 57237 - DNA, 1672 bp, Oryza sativa
  Clone ID: PAT_MRT4530_59069C.1
ccggccgggaagcactgcacaaacctttcccctgaagaggccaagaagttatgggagaggaggcagccatggccaccatggagagcgcctaccatgatgagcttgctccggcggcggcgccggcgccggcgaagggaggagggagcaagaagaagaggaagcagcagaagagggaggagaagaggaaggagtgcaggctggtgagctaccacgagctgccggactacatgaaggagaacgagttcatcctcgactactaccgctccgagtggcccatcctcaatgccctcctcagcctcttctcctggcacaacgagaccatcaacatctggacgcatcttcttgggttcgtgctgttcttcggcctcaccgtcctgcatcttggccagtacttcccccaggttgctgatctcatcggacacctctcctggccaatctcaaaggttgctgaaaatgtctccagtaacattggagatgtcctctctggcgcggcgtcgttcatgcaggcgagcccggcgtcgagcgccggcgccatggcggcggcgtggccggtgacggcggcggcggcggcgacgacgcggtggccgttcttcgtgttcctcgcgggcgccatgttctgcctgctgagcagcgcggcgtgccacctcctgtcgtgccactcgcaccgcctcaacctgttcctcatccgcctcgactacaccggcatcgccgtcatgatcgtcgtctccttcttcccgcccatctactacatcttccagtgcgagccgcggtggcaggtggtgtacctgtcggcgatcaccgccgccggggtggccaccgtgtacgcgctcatgtcgcccaggctgagcgcggcgaggtaccgcgcccaccgcgcgctgctgttcgtcgccatgggcctctccggcgtcgtccccgccgcccacgccgtcgccgtcaactggcacgagccccgccggaacgtgacgctggcgtacgagggcgccatggcggcgtcctacctcgccggcaccgcgttctacctcacccgcgtcccggagcggtggcgccccggcatgttcgacctgtgcggccacagccaccagatcttccacgcgctcgtcatcgccggcgcgctcgcgcactacgccgccgccatcgtcttcatccaggcacgcgacgagatgggctgcccggcgccatagctaagctagcgatcgaacacacaagaaaacatttctctccatggatcgatgaaccaaatgataattcgatacagcagagtacacaagaagcatatatatacagcggtagacgatcgaattaattgatttgagtggttttgtttttgtgaggtttttttttaaaatttttaagtttgtttagcttgcaggagtcggtcatcaagtgtgagatattaccgtgtcgtccggttaatgacaaggatttattgattgttatgaagtcgaaacaaatacatacaagaagcaactgttgcttattcgttcgttgtaagatgcaacaaattaagaagagagagagagataaggcaacaaaagtatacatgtgttgattgccattcctccaaaaaaaaaaaaaaaaaaaaaaaaaaaaaaaaacaaaaacaaaaaaaaacaaaaaaaaaaaaaaaaaaaaaaaaaaaaaaaaaaaaaaaaaaaacctcaagggggggccc

SEQ ID NO: 57238 - DNA, 438 bp, Oryza sativa
  Clone ID: PAT_MRT4530_5906C.1
tgcaggaattcggcacgaggcctcgtgccgaattcggcacgaggtgatataagtgcacttgatgacttttcagatgaccaagaccaatacatatttggggggttactacggctaaggtcaatccctgtcttgtcaagctcaacatagtacaagccaagacctggatcaatcaggttcttctttgatgtgaaccgacgagtaaagccagtgaccttattccagccaaacttggctccaggaagcaaaacatctgacggatagtcaaagctctgccacaacacattgggtgagcttcctatcacaaggtttccatcgtttgagagaacgacactggtactgctgttcatggtggtggctgatgtcctattgacagtactggaccagattatggatgcattgcttgagatgacaaggttgccatcttttgatagtttcagc

SEQ ID NO: 57239 - DNA, 246 bp, Oryza sativa
  Clone ID: PAT_MRT4530_59070C.1
atggctcgagaagaactcgctggcgccgacgacggtgcttcagcacagcggcggcctccatcggcgaggactgcgacgcggcaagtagcgatgcgtgacacagcagcgaaggacggcgctactgaagttcgtgaagctaggggaccaggggtgactgaggtgacgctaggagaggaggtcgccaggttggggctaggtatcgaacagatcgggaacaaggccagggagcagatcgagcatatgtag

SEQ ID NO: 57240 - DNA, 170 bp, Oryza sativa
  Clone ID: PAT_MRT4530_59071C.1
atggtggggaggccgagtaacaagtcttcagggtcacatgccaaacccggaacaattttcatgggtcacatggtggggaagccgagtaacaagtcttcggggtcacatgccaaacccggaacaattttcatgggtcacatggtggggaagccgagtaacaagtcttcggg

SEQ ID NO: 57241 - DNA, 147 bp, Oryza sativa
  Clone ID: PAT_MRT4530_59072C.1
atggatggatccctacacgaccgcgaagaaggatcgaagagaagaaagagcagggagggatgggcgtcgttacctcgtcgcgtccccgcgagcgagcgatcgatcgatcggagcagttcgccggaggctgaaactccgaccaagtag

SEQ ID NO: 57242 - DNA, 432 bp, Oryza sativa
  Clone ID: PAT_MRT4530_59073C.1
tttgtggtttttttttcttttttttttttgttgtttttttttttttttttttttttctttttttcttttttttgtctttttttttttttttccgaaaaaaaagccgccctgaacgacgggctgagccgggcttctcccgcggggggcacgccctcaattttttccacccgggggcccacgggcacaccgggggttttttttgccctgttttacacccctcttaacccaagggggaacaagggggggccgttgcttcaccctggtggccgtatggccccgcccggggcaatggttttttttttttttcccaaggaacggggggggccgttccactgcttgaggcagccgagcatggggtcggtgagcctgccctggcttccgccgaggaactttttgtcgcactccccggcgggggacccgagccactcgccg

SEQ ID NO: 57243 - DNA, 813 bp, Oryza sativa
  Clone ID: PAT_MRT4530_59074C.1
atgcgtaacgccgccgccgctcgtccgaagccggagcaaggttttcacctggaaatttatgggggcaaatgggagagcgccatgacaacgcattcaagaagggaaacggcgcggcgtcgtcgtcatcgaaccggccaaaggcacggcaaggctttcgccagcgtctacacattacccacacaagcacctccacatcgacgaccacacaatagtccacgacgtctcacaagcagtcaaccctcgatgcaatctaccatcacccacactcctctgctgcatcgaccagaaccggccaaggcggccaagggaccggtcgtcgaaactcggctagccaccgtcgccacaagcgcccgcagccctgctgcaccgccgccaaggccggtgggcgcagctggaggctgccaccgctccgccccctggatcatttgggacttccatattgaaaggaatataatttttcccccagatttcgtcgtatacaaatatatgaaaacaagtccaatttgcaattttggatttcccgatattcctatcaatactctggctttcaagaccgactctttgaactactcagacttccatgcatccatgtgctttgctatagcgaaagttaccattagagcaggtgtaactggctggtgcatacagcgcagcgatatcggcggcggtgacgcggcatctccggcgaaggaggtctactgctcgggatatgctggcggcctgcagcaagagatcctctgctgggagagccgcagaacagagacggcgcgacaagatcaacgacaagttgaggacgccgcagctagcgactag

SEQ ID NO: 57244 - DNA, 768 bp, Oryza sativa
  Clone ID: PAT_MRT4530_59075C.1
tcaggttgctaatggagcatcatcttcccatcgcgcgtagccaccggcccaccgccagtccgtcgcgggcagatcaccaggggcgacagctactggcaccgcacggcgtcggctcggaggcaagacggcaaaaccacccccatcggatcgtgcaggacggaacgaatgcacgatcccgatcgagatccccccctccccgccccagccgccagtcgccaggcgccccgcccaggccgacgcgcacgcgccgtcgccgtcgccgtcgccgtcgccgcgccagcccagccgcccgcgctcctcgcgcctcgccgtcgcccagctgttgagctgcgtgccgccgcccgccgacgccgcctcggcgcctcctgccctcctcccgacctcccgtcctccggcctgcagcgcagcagcggtgaggaaataggagttgtcgaactgggccgcccctggaggcaaggtagccggatccgtcatgtgcggctgtgctctgatgaatatgctgccgaagagaaggaagagacttttcttggtcaggccacggctgctatggcaacgacacctccatgccggcgtcgccggtggcgccttcgcagcgacgctcctcttcctcgtcctcgttctcctctccacctcagctccctcctcgtcgccaccgtcgttgcgggacagcagcgtcgtgtcatcaggacgaagatcctcgtcttcctcgccaccaccatctgtcaactgcgacgacatgacggcgagcctgggggagttcggcgacat

SEQ ID NO: 57245 - DNA, 726 bp, Oryza sativa
  Clone ID: PAT_MRT4530_59076C.1
atggcctcctccgcgcgcgacctctccggcgacccaccggagtccacccggctgcggatcggcgacgacatcgcctggtcggacgtgggcggcgtctacgaccgcgacgactcgctcaaggagaacaccaaccccaagtgcatcctcaagaaccacctccccggcgcccacaacggcgggtcgcagaggttctccggcaacctcaagcccacggcggcgcccatcatcgggatatcggggaagctcgggcagggcggcaagamccgccaccacccgccggcgatgttccccaagaaggtggccgtcacgggaggcggcggccgcaaccccaaggcggccgtccccgagcacgagccgacgtcgcccaaggtctcctgcatcggcaaggtcctctccgaccgtgagcgcgcgcgccggggtcgccggccggcggggcggatggtccccgccggtggctgctgccccgggctcggcggtctgttccgccggagtcactcgcggaagaagaacgccgtggagtgcgtcgaccagtccccgcctccgctgcctccatgggcgtcgaggcggggagagccgaaggaggtcaaggaggcgacgccggcggcggcggcggcgatggcgccggggttgggagggatgatgcggttcgcgtcggggaggcgggcggcggattgggcgaccgagatggagccggatggacgcgtggcgagatctgggccgttgtag

SEQ ID NO: 57246 - DNA, 1190 bp, Oryza sativa
  Clone ID: PAT_MRT4530_59077C.1
ctcctcctcctcatcctcctccggctcgtccgccgccgccgccaatccgttgttccgagaggcgaattctttatattgaaaactgctaaacactctccgataagtgctgcctgagaagcataaagttggaggatatttgctttcaggagcaattcaaaggaagatagccagcattgaatagaattgtctcggtttctcaaagtcctcaatgtccaaagtattggaaagaagaaattcatttggtggtagcactcctacgagttcagcttcaggttcaagaaaggatgagaaaacgacaccccattacctaagagcttctacaggttcttgccataatttatgcaaatatggacacaaaaatccttttgaggaagagaagaagctttcaacttcaggaggcagaagaaagaaacttcctagtcatttaaataatttgacgttgcacagatcagctatcttggatagatcaaaggatgtcaggcagagaaatctttctctagccaagtcgagtatatctctgggtgaatctgaccgcattgctcccaagaaaacacaagcaaatttgaaaggatcctctgatcatttgattacacgcacttcttcatcagctgatcataaaaacgtgaaccttgatggaagaaagaagcatctaacagttgcacagaagacttcagctgattcaggatcttccaatggagttcctaaatttgacaaaaaatcagcaatgccagttaagggaaccatagtgcctgccaagttgaagctggcagagatgccacaactggaggaatctagaactatggaaaaggtcacaacggtcaagcatcatcaattaagagaccgacttcattgcctactaagcttaacttgattaagcaagtgcccgtgccatctcaggtttctagtcatctactttcttcaaaagctaaacgtactgtaaagggagagcttacatcttcaccagcaactgttactggtgtgcgtcgaagtaacagtgataaaactggaagaagttcgatgaattcaagcaagccaagtatcaatgggaaggaaggcttgcatatggccagatcatcattctctgtagaatcgaagatggatgtttctgttgtaaatacaagaacatgatgtgcaagattcattcataagaggtcttcatgtggagtcgacactggcaggagtgtcttcag

SEQ ID NO: 57247 - DNA, 237 bp, Oryza sativa
  Clone ID: PAT_MRT4530_59078C.1
atggttttctatggtcttcccatcgttcaccccaacagcattctcgtcgtcaccatcaacggtattggcctcgtcatcgaggccgtctacctcaccatcttcttcctcttctccgacaagaagaacaagaagaagatgggagtggtgctcgctacggaggctctcttcatggcggcggtggcgctcggcgtgcttttagacgcgcacacccatcagagacgatcaagcgctccttga

SEQ ID NO: 57248 - DNA, 428 bp, Oryza sativa
  Clone ID: PAT_MRT4530_59079C.1
cctccactcttgtatatccagatcaaggagaaactggggccgctgtgtgttcctatgtcagcgcatcttgttttttcccccctttgtttctcttaatacaggggcccccccccacggagaaggggggcatccctaattataccccaaccgaagaagaccccccaatgcacctctcgacgtccctttttggcgttgcgccaaaaacctataccccacggccggggcaagcccccactccgagcaattttcttgcaggttgggccccctggcctaatccccggacccaaaaaaacaaccctgcctggtgggggtgccaaccactacaattactttttctcaccaccccccccccaactattaaaagcaccactcccccccccgtttgaaatagagtcaccaggcccccccattttaagggcccccccaca

SEQ ID NO: 57249 - DNA, 173 bp, Oryza sativa
  Clone ID: PAT_MRT4530_5907C.1
agactgttgtctaacatgacgcacggtattgccggcgggcatggatatcctgctcaccagggataccatcctcagggctacccgacggcgacgagagcgtacccgactccttcggtggcttatcctactactactgaggcttacccttcaccacctgaggcataccctccaca

SEQ ID NO: 57250 - DNA, 408 bp, Oryza sativa
  Clone ID: PAT_MRT4530_59080C.1
atgcgcccttcagattggccacggacgtgcaaatggcactgcgccgtgcaccgcctccgtccgtcagtacagctaaaggataatgacgacgccgaggcactcactatcacgccaaggaggaaccagtcaccagtgcgacgtgaccacaacgccccgcttgtcgggaggagcggtgcgcggctcatctccatcctcgcgctgccctcagcgactggcacactcctcatctccatccttgcctcctccgcaaccgcgcgtagaggcggacccgacgccgccaaggtgtccctcgtcatccccgccgaccggggaggccaccaccgacatctccctgcccacgaccacctcatcgtcgtcgggcaggcggccttggcgcccttcttgccgccggcctgctccaccgactag

SEQ ID NO: 57251 - DNA, 781 bp, Oryza sativa
  Clone ID: PAT_MRT4530_59081C.1
ctcgtacgtacgtacacatctcgaagaaccaccagctgtgagatcgttcgacgactttggatcggatggctgctggcgtgggcaaggtgggggagtggatacggaggcggatgatgccgcggaggagcaagagcaaggcggccgggagccggagccggagcgagggcgacggcggcgaggccttgccggcgccgccgcagaggaagctccgtgcgcgggcgttgccggcggcgctgcggtggcgaccgcgggggcgcttgctggcggtgctgtacgagaaggtggtgtaccacctgctgtggctggtggaatccatcgtcgtcgtcgccaggctctgcttcttcgtcatgcgcttcggcctcaagcagctctgagctctctcctcattggtctggattctaggggctagataaatttcgagaaaaacagttcgagatgtttggatttcgcgaaattcgttcgaattttgtcgaagattgtctgctctgggatcgagaagggagaaccgggggggagaaccaacaaatttgggagattttttgaagtgtcccgttgattctttcttcttctttctttcgcgctaatttgttttgccacttttgtgtggctttattttcagagaaactgtaagtatcctgctgtctgtgtatacgaggaattgtctttgttttttaatccccttgtgtaaatgtaaatgtttcatctgatctctgcccgtaaaatgttgtgacttgaatgaaaatacctgtgaatatttctggaaaaaaaaaaaaaaaaaaaa

SEQ ID NO: 57252 - DNA, 1275 bp, Oryza sativa
  Clone ID: PAT_MRT4530_59082C.1
atgggggtccggtactctgctctcggcgtgacgttgaacgacgccgccatggtgaagaagctgttcgacactgtcctagagaagtacgtcagcctcgtcgcagggatcgaacaattttacgacgtcgacaccatgccgttcgaagaagctgtaggtcgcctcaaggcgtatgaagagcggatgcggaagaagaatcgtgtcaccggctgtcagtgccacttcgttgatgctgttttggttccacggaggagctggatgttgatcagctcgctggggaagaagcttgcatcggaggaggagtggatggagtacgaataccactactcaaggggcattcgtgtttcaccagatatcaggaaggtgttgttcgactgtatttgggagtatatgaagttagcatacccagttgtacaacctaaaatggagacagatgaaaagaggaaaaagccatgctccgctcatgttgaaagtgttcgggaattagatgaagctttggcatttctcccagagtttcaagagtctgttcttatcttgcacattgccacgaacgtcttctacggcctgtgcatcgaacctgatcaaaatgcggcatcattcaaacaactggaggcgatcaagacgttgtcagactacatggtgttcctcgtcgcagttcgccccggcatgctaccagggctcaagcttcgcagcctgtacgaagctacccagaaagctctagagaaattatggagcgagcaaagacgttcctgcaactgcaagagaacgaaagagaggtgtcttgccgaaatcctgcgttgcctggagaagaagccaggtgaaagagtactgaagaatcatctctactgcaactggaggccaggctacagaacccggaacagggagccaggctttataagcaagctttacgactcgagtattattttgtcggatggagttaaactagccgaagtaatcctgagatggctaagtagtggttacagggacaacattctgtacatcaaatcagaggataaatttcagccgatttttccggaattgatgaaaatcatgaaatgcaagatgtacgacgaccctacgtatgacaaaagattgagcaaactgctggaacacatcttcaaggaatgggtgcgtctcctgattaactcgtccgtcaaatgtatgagagattcgcatgccaagcagctgagccgtggtggtgagctcacgaccgtcgtttggatcctggttgaacatgctgccgtatttcacgtcgaccgtgccagatttcctgcctaa

SEQ ID NO: 57253 - DNA, 1146 bp, Oryza sativa
  Clone ID: PAT_MRT4530_59083C.1
atggtgggcatgaagaagaagagtgtgggcttaggtcgtcttagcctgatgatatccatggttcaggtgttgggggccgtcggcggcggcggcgtccatccgagcaagatgcggctggtgccggcggtgtacgtgttgggcgactcgacgctggacgtcggcaacaacaaccacctgccggggaaagacgtccctagggccaacaagccctactacggcatcgacttccctggctccaagcccaccggacgcttcagcaacggcttcaacgccgccgactacgttgcaaagaatctgggtttcgacaagagccctccggcctatctggtactcaaagcacgcaactatctcgtcccggccgctctagtgatgggtgtcaactatgcttctgccggagctgggattctcgactccactaacaccggacgcagcattccactgtcgaagcaggtggtgtacttgaactcgacgagggcggagatggtggcgaaggcggggtccggcgcggtgagcgacctgctggccaagtccttcttcctcttcggcgtcggcagcaacgacatgttcgccttcgccgccgcgcagcagaagctcaaccgctccgcgacacccagcgaggtggaggccttctacacaagcctcatctccaactactcggcggctatcacggagctgtacgggatgggcgcgaggaagtttgggatcatcaacgttgggccggtggggtgcgtgccgagcgtgcgcgtggcgaacgcgacgggcggctgcaacgacggcatgaaccagctcgccgccggcttcgacgcggcgctccgcggccacatgtccggcctcgccgcgcggctgccggggctcgcctactccatcgccgactcgtacgcgctcacgcagctgaccttcgccgacccgggcgccgccggctacgcgaacgccgacagcgcgtgctgcggcggcgggaggctgggcgcggaggggccctgccagcgcggcgcggcgctgtgcggcgaccgcgaccggttcgtgttctgggacagcgtgcacccgtcgcagcaggccaacaagctcggcgccaaggcctacttccacggccctccccagttcacctcccccatcaacttcaaccagctcgccaattacaacagctga

SEQ ID NO: 57254 - DNA, 1219 bp, Oryza sativa
  Clone ID: PAT_MRT4530_59084C.1
atggcgaggtggtgcgtggggtggccggcggcggcgaggggtggtcgggatgagctgacgtggcaggcggagctgacggcgcacgcggcgggggagttctccatggcggcggcgcaggccaacgcggtgatggaggaccaggcgcaggtcatggcgtcgcccggcgccacgctcgtcggcgtctatgatggccatggcggccccgacgcctcccgcttcctccgctcccgcctattccctctcatccatgagttcgcggcggagcgcggcggcgcggtggacgccgacgtgatccggaaggcgttcctggcggccgacgaggagtacctccagctgctgcggtggtcgctgccgaacatgtcccgcgcggccgcctcgggctcctgctgcctcctgggcgccatctccggcgacacgctctacgtcgccaacgccggcgactcccgcgctgtcctcggccgccgcgcggcggccggccagaccgtcgccgagcggctctccaccgagcacaacgtggcctcggaggaggtccggagggagctcgccgcgctccaccccgacgacggcgaggtcgtggtccacgcccgcggcgcgtggagggtgaaggggatcatccaggtggcgcgcgccatcggcgacgtgtacctcaagacgccggagttcaagcgcgacccggcggtgcagcggctatgcagcgccgccgccgccgtcgagctggcgcggccggtggtcaccgccgagccgtccatccacgcccggaagctcaaggcgggcgtcgacctgttcgtcgtgttcgcctccgacggcctatgggagcacctctccgacgaggcggcggtgcagctggtgtccaagagctcgacgaggagaggcgtggcggcgaggctggtgcaggcagcgctcggggaggcggcgaggaagcgggaggtgaggcgcggcgacctgcggcggatcgagcgaggggtgaggcgccacttccacgacgacatcaccgccgtcgtcgtcttcctcgacctcgacgacgacggcggccgccgcgcgcgccgccgtggcagggtcgtcgactccagcagcagcagctgcagcaacacgccgctcgacgtctacagcttgtacaactccaccgcttgaacaacaatatatttaatatttgggatttcccatgtcatgttgcttacaactacattttttttaaacatttttacaaataggatgtcga

SEQ ID NO: 57255 - DNA, 294 bp, Oryza sativa
  Clone ID: PAT_MRT4530_59085C.1
atggggcgaacatgtcatatcccccccatcctctactgccctcttcttccaagctcgactggcaaaggcggaagcggcgatgaggctgctgctgtggggaagaaaacgagagagataggggagaggagctggccatggctctcttcttctatggtggtaggtcttgacggtggtgatgatgacgatgagtggcaggccaaggagaagccgtgcagccgtggagaaggcgtgccatcagaggccgaggagaagccgcgcggccgtggagaaggaacgccggtagaggccgagtag

SEQ ID NO: 57256 - DNA, 687 bp, Oryza sativa
  Clone ID: PAT_MRT4530_59086C.1
atggagacggcgcggcgacggcgacatgacgtggcggcgcggcagggtgacggcggtgacaagacggcgcgcggcggcgcggggtgcaaggcagcggcgcagcacacgcaggggcgacgcaggcctccaggcggagcgcggcagaggaggggtggtgggcacccggcgggtggggaggaggccggtgggggaggagggagtccggcggccggcgatgggcgacgaggtggcggtggcaactacagattgttggtggatgccaaatctgtagccatggaccgccgctcgccggtgctgcacggcctcctgcgcccaccctcccacgccgccaccgccaagggaggagctggtcacaggcgcgcagccgtcgggagcggggcggagcggtgcgcggctgggggagcacggcgacaggggagggcgggcgggaggccgtgcggtcctcccaccgcggaatccgtcctccacaccgcctcccgtgacgcctccgccgcggcgcccctcctcccagcgctcccgctcgaaggcctcgatgacgtcctctccttgctctcccccacctcgccgccgaaccacctcgtcctcggtcctcctcacagcggttctcgccctctctccctcccccattaccgcgacctccgctcaccaccgcgctctactgcgtcctcgccatcatcactctactag

SEQ ID NO: 57257 - DNA, 327 bp, Oryza sativa
  Clone ID: PAT_MRT4530_59087C.1
ttgtgaagggaatgtttgaaagaaagaaaagaaaaaaaaaaggaaaatcgtgtctcgtctcgtctcgtcttcgtctcccccgattcccgagcagattctggaaaccctcgcggcctcgattccggcgatggcggagcccaacccgcaagtggagagggaggtggaggtggaggaaggtgaagaagccccaactgatgtacttgctattggttccgggggcgcaagccctggccaaaatctgtctcggggggctttccccccttgccaaggaccacgccggcccgattcgaccaggtggcttacacccttgggtccgccgttgagggc

SEQ ID NO: 57258 - DNA, 579 bp, Oryza sativa
  Clone ID: PAT_MRT4530_59088C.1
agattccccaatcccccggaggaggaggaggaggaagccgacgaggaggaggcagctggctggcacgatgctgagtggttgctggggagtgaggctctcgtcgtccctctcatggcgccccgccgccacggcgtgctgtgctggcctgccgggggccgatggggtggccctgctcgcctgggaagaacgacgacgacgacaacaactggcaactggcctgggtccagcctgcggttctccatcgagtccccgttcttcgccgccgccagagggttttcttcatctgaaacacttgttccaaggaaccaagatactggcttggctgaactacctgcaaccgttgctgcactgaagaatcccaacccaaaggtggtgtacgatgagtacaaccatgagaggcatgcacctggggatcccagcaagcgtgcatttgcttactttgttctaagtggtgggagattcatctatgcatcgttgctgcggctcctcgtattgaaattcgtgctgagcatgtctgcaagtaaggacgtgcttgcgcttgcttccctggaggtggatctctcaagcattgagcctggt

SEQ ID NO: 57259 - DNA, 166 bp, Oryza sativa
  unsure (1)..(166): unsure at all n locations
  Clone ID: PAT_MRT4530_59089C.1
agtaggatagtagttatgtttagagcgaaatcgtgttccaacagtcatgtcttcgcaangctcancgtattgagtactatattagtaacattggtgtatncgagattatctttgtcattaccataacaaatgctnaattgctanggtaccatttgactgagttgct

SEQ ID NO: 57260 - DNA, 359 bp, Oryza sativa
  Clone ID: PAT_MRT4530_5908C.1
accccagtctcactcctacaagtagtgatgtccttgagccaacttaggggcctgcgaggcaccatgatactgggatctgacgtgcaatcctttgctcatacccattcattgtctgttgccttggtccactggtcttcatcttctctgagcctggcatggttgccagtatctccaagacctactgttgccatggaaataggggcagcggtgagctggttagaccgttagagcaacagtttggtagaggaaggtggcagctgctggtacttgggactgttacttggctggaaaggtggcagtggcatgatggtggaaagcactgttgcctatgacacttggtgtttacgcagcaggcaagc

SEQ ID NO: 57261 - DNA, 449 bp, Oryza sativa
  Clone ID: PAT_MRT4530_59090C.1
gccgatggcgacgaagtgcaggggcatcccacggagaagatgaaatggaatgccagccctaattgcaaattgtgtgaagtggaagatgtagaccatctgatgtttaactgtgcaatatccaaaatcatgtggtgctgcgttagagatgcttttggatggagtggcattcctagatcaaggggggagttgatggataaactgaaaatgcaaagttgtgattcaaacattacttccctttcattgtttgctgctggctcttgggccattggcttttgcaaaatgactgggttttcaacaacaaaatgatcgatgatgcttctcatttaccttacaaggttgtttctttacatttacagtggagaaaactagcgccaacgaagaagagtactctggacgcttcaagggacttactgcttgccagtatccgaaagatagcaggcttaagtatc

SEQ ID NO: 57262 - DNA, 312 bp, Oryza sativa
  Clone ID: PAT_MRT4530_59091C.1
atggtgagggagctgaacaggcaatacgccgacctgcgtgcgatggcggaggcgcacaaggcatgttgggagaggacagagaagaagatagagaaggagcgtgagagcaagtacttcgtctggcggtggacacggcccaagccggagccggcgccgacgacgacgaagaagacgacggcgtctacctacttccgccgtggcgaaggtggcggtttagcgtcacatgccgccgcaatcggtgaccccgacctgagccgcctcgtccaacgcgtcgacaccaaaacgaagctaaaaaaaaaacttgaatattag

SEQ ID NO: 57263 - DNA, 181 bp, Oryza sativa
  unsure (1)..(181): unsure at all n locations
  Clone ID: PAT_MRT4530_59092C.1
tttttancactggaaggaaaaccataactcaactttgatgtgaaacgagagccaaagggacaagatgggtcaacgacctttaggggaacagcctaaaggggtctaagatgaatccttcttgtggaacgcaaggacatccagattggaacgtaacctgattgcatatacaggcaaatcaaca

SEQ ID NO: 57264 - DNA, 711 bp, Oryza sativa
  Clone ID: PAT_MRT4530_59093C.1
atgctgcgcgacacgtcccgatcgcccgcgggtgggtgctttgcgttcgggagctgtctcgcgatctcgacggtgttcctggcagcgcagcgggctgcggaagcgaactgctttactcctccatgtattacgaattggattaatcaacgaggaactagcgatgacgatggtcgccacggcgacggccggctattaaaagatacgagcagatcaagctgcagtcggattattattgcacacttcaatactttacgccagaagcacgaacaattatttaaggatttcacatattgccgacgcatgtacaggacacgcaaccgtatgatccgtatttctctggtttgctgggcttgggccaacaatatactgcggccctggtttccaactttcgatctcgatttggcccagcaaacacggccaggaacaggcatggcgaagcaaagaaggggaggcaaattaaagggagacggcgacggcaaccgacagatcgacgcgacgacgtccatccgcgctcgcctcgccatcaatccaggccaaccagctcgtgcgcgtatttcttggtgcgacattgccatccgcccactgggttttctcccccatcatgtggtcgccgctatatatcatatcaacggccgatcggtcgacacagaggcgagatccacgcgaatctcaatgatctacgtattaagcagcaggtgtttgcgtcgccag

SEQ ID NO: 57265 - DNA, 1656 bp, Oryza sativa
  Clone ID: PAT_MRT4530_59094C.1
atgtcgtggaaggccttcaccaagtccctcctcttccactccaacaagatcgtcaggcggctcaaatccttcgtcctccatgcgcatcctcctccgccgccgccgcacgtcgtcaggcggccgccgtcgtcggacgagctgccggcggcggcggacgtgacggtgtgcaaggtggagggcggcctgctgatgtcgccgtcgaccttcccgtacttcatgctcgtcgcgctggaggccggggggctcttccgcggcctcctcctgctgctgctctaccccgtgctgctcctgctcggccatgaccgggccaccaagctcatggtcatggtcagcttcgccggagtcaggaaggagaaggacgggtcgccgtccttccgggtgggcagggcggtgatgcccaagctgttcctggaggacgtcagcgccgaggtgttcgatgcggcggcgcggcggcggcggctggtgtgcgtgagctccatgccgagggagatggtggagccgttcttgaaggagtacctcgccgtcgacgccgtcgtggcgccggagctgagggcgttcagggggtattaccttggcctcgcggagtccgacggcgaggtcatgcagaggctggacatggaggaggtgatcgggatgaaggagcgcggcggcgccggcgacggtgacggtgatggacaggtcaccgtcgtcggcatcgccggactcgggaactcgttccatcagctcttccaaaactattgcaaggtgggggtggtggcgtcggagtgggcgcggcggcgatggcgtcccctccatccccggcgatacgcgaagcccctcatcttccacgacggccgcgtcgcgttccggccgacgacgtcggcgacgctggccatgttcgtgtggctgccgctggccgtgcccctcgccctcctccgcgtcgccctcatcgtcgtcgtcctccccttctccctcgccgccccgatcgccgccgccctcggcatccactgccgctgcatcgccgcctccacgctgcgggccgccgcggtcttggacctcttcgtctgcaaccaccgctccctcctcgacccgctctatgtctccgccgtcgccggccgcgccgacctcgccgccgccacctacagcatcagccgcctctccgagatcctcgccccgatccgcaccttccgcctcacccgcgaccgcgccgccgaccgcgccgccatgcaggcccacctctcccgctcccggcgcggcggcggcggcggcggcctggtggtgtgcccggaggggaccacctgccgcgagccgttcctgctgcgcttcagcccgctcttcacggagctcggcgccgacgtgcagcccgtggcgctgcactcggaggtggccatgttccatggcaccacggccggggggtggaagatgctcgaccccttcttcctcctcatgaacccctcgccggcctacgtcgtgcacttcctcgaccccgtcgccggcggcggcggcggcccggaggtggccaacgaggtgcagcgccggatcgcggagacgctggggtacacctgcacggcgctcacgcggagggacaagtacctcgtgctcgccggcaacgatggcggcgtcgccaacagcggcttggccgctgatttccaccatgcacaagatttactccattat

SEQ ID NO: 57266 - DNA, 760 bp, Oryza sativa
  Clone ID: PAT_MRT4530_59095C.1
gcacgagggggactttccattttcagaatttacctttccatgcatacagacagaagattgggtgggagaaacgtgaaataccccatagcatatttggttgattgaatagtagacaaatggttggatctttcggcccgcgggaaatgcacatcagaactccattgcggtgattgttgagttgagtgctttagttctgtagccagccacttgctattgtgtgggttggcaaggttcatttcatgggttcttcaattttggcttatttgaatggccagaggcaaaatctgagtactccattcatttatttaattgaatcttactgcccatttcacttatttctgtcagtagccagttactacctactactatcgtaacagtagctctcaagattttgcccttttatttttgtatattttgattaggaaaaaaattgtgcacatatgccattcatttatttgagctcatttcaggaacttgctatttgaagcatgtttttgttggttcttcaagtttctgtttgtgtacctctgcatgtttattttttgcttttctctagagcagacatttctggtgtgctgaattgcttttcttctcacatatatttgcaaatttgttcattatcctgttcttatgcctaataaatgacaccatggcggtgaccaggtactcaattttgttcacaaggtagatgctaccttagcttatatttagttatgttatggaacactaaagtgtgtgtgatgctatggtccaaagcagt

SEQ ID NO: 57267 - DNA, 579 bp, Oryza sativa
  Clone ID: PAT_MRT4530_59096C.1
atggatgtgaccttcgtgtgcgcgggggaggagagcttcaagatggaggtgggcttcttcgacaccgtccatgacatcaagcagaagctccagagccgcagggggtggcccgccgccgcggtgtcgctgttccacaacggcgacgcgctggcggacgctggcggcggcgaggccgccggcggcggtgcagagcggtacggcatcgtggagggctccgtcatccacgtcgagctcggcgtcggcgtcgccggcaggcagcagcagctgcagcagaacgaacacaagggcaggagcaagaggcgggacgacggcggcggcgcggcggcggtgcgcgtgaacgtggtgtcgcggtgcgggcgggggcgggcggaggtcgcggtgggcgcgcggcgcgcggtggcggcgctgcggcgggagctggaggagcgggcgttcccgctgccgcgcgacggcgcctacttcttcatccaccggcagagcgtgatggacgagtcccggtcgttcgagtggcacggcgtggccgccggcgacgaggtcgtcgtcttcgaaggctcggtgaccagacccccgacctactag

SEQ ID NO: 57268 - DNA, 489 bp, Oryza sativa
  unsure (1)..(489): unsure at all n locations
  Clone ID: PAT_MRT4530_59097C.1
gagagagagagagagagagagagagagagagagagagagagagagagagagagagagagagagagagagagagagagagagagagagagagaggttcattagtcctacaacaacatggcatccataaatcgccccataagattattcttcacagttatgcttgattcctcttgtgcgatggctccctaagcccagcaagctattaggccaagagcactagatcaatggcaagagttctcgatcgtggaagtccgaaaggatgtagatttgataggttgcaagcaatttgagccaattcggagtgtgaggtctcaagctggcacaactgagttcttcgaatgtctctaatgagattgtttcaatgtaccggaagatatctgttgtccgccgaagattaattgaacctaganagcctaactacataaccccattacacctaatggtgcatcctctagtatatatcatcccaagggaaagagtataaccggg

SEQ ID NO: 57269 - DNA, 589 bp, Oryza sativa
  Clone ID: PAT_MRT4530_59098C.1
gcacgaggctcgcctctgttcgacaggatgccaccgtcgccgccgctgcagctcgtcgccctgctcctcctctctctgctcctccgatccgccaccgcggccgagtacaccgtcggcgatggcccctgggacaccggcaccaactacgccacctggtccgacaagcacgccttcctcgccggcgacatcctagtgttccagtacgtgaggagccagcacaacgtgctccaggtgacggaggccacctaccggtcgtgcgacaccggcggcggcggcgtcgccggcgtgatcaagagctacgacaccggctacgacagggtgcagctcacggagcccaacgccacctactggttcatctgcgacttccccggccactgcctcggagggatgaggctcgccgtcaaagtcgccgccgccgccgccggtggcggcggcggcggcggagggagcccgccgcccagcggcgtccccttgcatccgccggccgccggcggcgcggggcggagccaatggccggcgtgggggttgactctcgccgtcctcctcgtcgtcttccattattgtattattattttttgagcttgatggt

SEQ ID NO: 57270 - DNA, 303 bp, Oryza sativa
  Clone ID: PAT_MRT4530_59099C.1
atggctccggagttcccaagtgccatcgatgaaagatccatctctcctgagttgcgccgctcacgtatcaattgttcactaccgcagtctcctcttaactgccaccgcttccaccgcaccaaggcccgccacccagtggcgaatccaggatggattagaggtggggctggcgccccaaccagccccaacagtggatccgccactgccgtcacctctggatctgcagcccccctcctccagccccacttcattgtcgccgctagatttgaggtgaggtgcagagaaagggtggttgcgaggtga

SEQ ID NO: 57271 - DNA, 2751 bp, Oryza sativa
  Clone ID: PAT_MRT4530_5909C.1
atggaagaagatgaagtggaagacgacaatattccggactttgctcagtatgttggatttgaaggaaatcaaacgggcgaggaggaaatagctgctgatggtaacgacgttgcggatgatcttggtcagatgttgcaggacgccagggaagactgcgaaagtgaaaaggaggcccataaattggacaagatgttggaggaccacagaacttcgttgtacccaggttgcgagcaggggcacaaaaagttggataccactctggagttgttgcaatggaaggcaaaaaatgggggcaaatccccgcgccgacgccgccgtatctcgccgtcgtctcgagctcgtcgtcctcgccgccgcctccgcctcctccgctgccgccgcatctctgggatggctgaccgcgatgaggaacagatattgtacgatacaatcgcggagggaagcagccagtactggaatgaagaagaggggaacgaggatccaaaccagtacttgaacgaggaagggaacgtggagagggatgcggaggggaaccagcaggggcacgtggaaagggatgtggaggggaaccaggaggacggttgggttgtgcgggataacgtgcctgtcagtacggtgtactggcgaagaacaagggcacgcggagatcatgagagctttgtcccagattcggagaaagagatgctgtggaccacaatgctcgagacattcatccttcctgcaggtacagaggacaaagtgaaaaggtggactctgaagaaaatggcagaacagtttcagagcttcaagggagatctgtaccagaagtatatactgaaggggcagacaccgaacttcgacacattcccaaagctaagggatcactgggacgagttcgttgcatataagacaggtgaacaagggcaggcgatgatggaaagaaacaaagaaaatgccgccaagaagaagtaccatcaccacttggggtcaggaggctatagcgtcgcgatgccgaagtgggagcagatggaggctagcttgattgagaagggtatcgaaccggcaacagccaattggccggaacgatcgaagttctggtactatgctcacggtggaacgctcaacccagctgatggctcactggtcttcggcgatcagatacgagaggctgcgcgacgactaacagatgcagtggaagcctcctctcagggcacgttccgaccagacagagatagggacgagctgacactcgccctgcagactccagagcatccaggacgaacacgagggaaaggggtgattccttggaagattggtttcaaggaggacatccacacgtacaggagtcggatgaggagcaagagagataccgaggcgaagattgcagacctagagttccgggtatcgagctacgaactcaacatgcaagaggaggtggcaaggaaggttgatgaacgcatggccgcacatcggtcccatgatccccagctgaccattcctcctgcaatggtgagcccgtcaggaaaccgtagcagctgcgcctcaacggggcaggtggcgtcgggcatggccatcccaacagacccttcaggtacttaccactgcaggccgattccagcaggatactcaaaggtcaaagttgagttggtcgaaggcgcgtacgaggacctcgagctggattaccctggaggagacggatcctgcaccgtctcctcctcatgctccgccagcaccgtctccacctcaggctccagcatcgactcctcctcaggatcctgcaccgactcctcctcggcccccccagctccaccgcctgcccacacaagggcaacgaagaaggcgaaagttgacgccgccaagaacaaggacccggggtacgattgcacgcaagaggagcttgacgcttacgttgcatcagaagtcaagagacaattcaagcctcgaagtccagaaaagaagattcctatagaccccactgtcaggaacttcttcaggggtatgtctgcatctgtcaaggaggccatcaagctatcggactatgagcgaacgctgaagaaagcatcttctggaaagtccaaaccagtccctcagcttggagagcaaccaaaccaggagatcgagccgttggtgaccggtaaagaaatgacgatagaacaatttattactgacaccggtctaactacggatcaattgctaggagtcgcaccaatcgaaaaggcggaagtgaaatacatgtacgaactcggtaaaccgcttgtcaagcctgagctgctgcagtccctacccacacaaatgtacaagttccatcagctgtacatggagatgagcgccaccggtagagagatgatcggagcgaggatcagggacacggacttcttgcaaggagatgacattctctggatcaatttcaggggaatctacgaactataccagctggacaccctcgacgtctctattatgagttgctggattttaatggagattcaaagggcccgacggcggagggttttcgatactggattcatcgaccctcggaaagtaaacgtcgcaatgctcgaccaatatccacaagaaacagaggacaatctcgtccatctcctgaaggcgcagcattacaagacgttcatactgttgccatacaacacagaattccactgggtgcttttactcatcgacctggaggcctgcaccgtcaacggtccagcccgtctgcagccggtcgctgggaaaatcgccattttcgcgtgcgggcgggctgaccgcacgggataa

SEQ ID NO: 57272 - DNA, 1778 bp, Oryza sativa
  Clone ID: PAT_MRT4530_590C.1
atgggcggcggcggcggaggaggtcgaggaggaggtgatcatcactcgccgacgtcggggaagacgccgcggggggactactccgcgctggcgacgtcgacgccgacgaagcagtcgccgcgctggccgtcgccgtcggcggcggcgtcgtccgtcctgccgagcggcgcggcggcgctgctggagagccggtgggcgctgccggcggcgttcggcgtgttcctcttcctcgccgtcacgctggcggtcgccacctcgtcgctctccgtcgcggcgtcgctccccgccttcttccccgccgccaagcagccgctgccgctgccgccgccgtcgccgccgccaggcgccggcgtggcgaggctggcctacctggtgtccggctccaagggcgacctcgaccggctatggcggacgctccacgcgctctaccacccgcgaaacctctacgtcgtccacctcgaccgggaggccgccgtgtcggagcggctcgagctggcggcgcgcgtggcgaacagctccatgttccggcgagtcggcaacgtggaggtgatccgccgctccaacatggtgacctaccgcggccccaccatggtcgccaacaccctccacgcctgcgccgtcctcctccgacgcagccgcgactgggactggttcatcaacctctccgcctccgactaccctctcatgacccaagacgatatcctccacgtgttgtcctcgatcccgaggaacaccaacttcatcgagcacaccggctatctaggatggaaggacttcgttctgacgaacgaggctggatggcaatgtagggggcagagggcgaggccggtgatcgtggacccggggctgtacatggcgcggaagcaggacatcttctacgtggagcagcggcgggagctgccgacggcgttcaagctgttcacggggtcggcgtgggtggcgctgagcagggatttcgccgaatacgtggtgtgggggtgggacaacctgccgcggacgctgctcatgtactacgccaacttcgtctcctcgccggagggctacttccagaccgtgctctgcaacgcgccgcggttcgtgcccacggcggcgaaccacgacctccaccacatccagtgggacacgccgccgcgccagcacccgcacccgctcgccctcgccgaccgccccgccatggagcgcagcggcgcccccttcgcccgcaagttcccccgcgacgaccccgtgctcgacgccatcgacgccgacctgctcggcggccgcggccgcgccaatggcaatggcacggcgggcgccgaaggcgacatgttcgtccggggcgggtggtgcgtcggcgccggcggcgggtgcgacgaggtcggcgacgactgggtgctccggccgggccccggcgccgcgcggctggacaagctcatggacaggatcgtcaggtcggaggccttcgtcaacagccagtgcaagtagctaagctagcttagcttagctgcgagagtgatcgagtgagataaatcactcactggttaatcttaatctgcatcgtgtaattcgcttcttttttcttctttttttttaccctactgatttacttgcaggtttgtacaaattcatcaagttaaaacttaaaagcatatatatgtatagagatagagagagaaagagagagataagtatatagtacttgctagtactaattaactgtaatccattttcattatcccatctcgaaaggacaaggtgttttctgtggttaaaaaaaaaaaaaaaaaaaaaaaaaaaaa

SEQ ID NO: 57273 - DNA, 823 bp, Oryza sativa
  unsure (1)..(823): unsure at all n locations
  Clone ID: PAT_MRT4530_59100C.1
cttttggatnctactatgagaccgaanatntatnggctaccncactnagtagtccttgccnatnacacatatnaaagggatactgcntcatggagagccancnanaaggttctcgagantggtgaaagtattggtttaaaanattttangccantnaaaccntnaggatctggngacnctggaantgtacncntggtaaanttgttgaatacaggagaatactttgcnntgaaaactatggataaaagcatcnngcttaancgnnataaggtncccngagcnacngcaganngcccaatccttgatctattanatcncccnttccttcccncattatatncatcntttcngacaaaaacnctatatcctcantactgactattgcccnggtggtgaactcnttgtgcctctaaanaatcnaccnctganngttctacatnaaaatgccctccngttctatgcngncgaantggttgttgtnctaggaatacctacattaccnangtataatatnccgacacttaanaccncaaaatatcttacttcnnnnagatgggcacatctccccctacagactnccatttgtcttgtctaaacatcttgccanaaccgcnnggtctttcttcccccaaaaatgctgaatgaaaaaaaaaaggganaaaaaaaaccggganntttccccnttnttttttggctgaaancttatnccaaaccatcccaattccattttntttggcnccggaaagaaatttcntttgcgccccnaaaaattatttaccgggaactngggccntacnaacccctgtttaaattggtgggggcc

SEQ ID NO: 57274 - DNA, 829 bp, Oryza sativa
  Clone ID: PAT_MRT4530_59101C.1
gatgggtgaaagggtgaagctcatcggtgctttcgccagtgcatacggccaccgcgcagaggtggcgcttcgcctgaaaggcgtgcgatacgagctcatcctggaagacctccgcaacaagagcgacctgctgctcaaccacaaccccgtccacaagctcgtccccgtcctcctccatggcgaccgctccttgagcgagtccctcgtcatcctcgagtacatcgacgagagcttccatggtccacccatcctcccaaccgatccgtacgatcgagccgtggcgcgtttctgggcgcagttcatcgatcagaagtttggtaggttcaatttctggatcccgttcgtgcaaatggagggcaacatgcaggattgtttcgtgagggaagcaaaggagaatctggcgcttcttgaagggcagctcaaggggaggagattcttcggaggcgacgccatcgggttcttggacatagcagcgtgcttgatagctcactggcttggtgcgttcgaggaggtatgtggggtgaccttggccacggatgaggagttccctgctttgtgcgagtggaggagacgctacgtcaacgatgaggccgtgaagccgtgcctgccgaatagggacgaactcgttgcgtattaccgtgaacgcaaggagatgatcaaagccgccggaaggcagcacaaatgattccaacgtagttgtatgcatgagaaataaatatatgtccatgggaatggaataagttactatttgattcaacatattatttttcttaatttcaacttccatgttggagataaaaagtttatggaacaaattaaaaaaaacaaa

SEQ ID NO: 57275 - DNA, 1092 bp, Oryza sativa
  Clone ID: PAT_MRT4530_59102C.1
atgtggcagccaaggcggcaaggcaaggcgaggtggcgccgacatggcggagccacgggcagccacggcgaacgccacgtagacggcccggatcaccccaaaggggatctggcggccacgcgaggggaggccggctcgccggccgggccgagcgaacggcgacacggcggcggcggcgcacgggcaccggccactgacggcgagtggcggcgcaacaagcgatggaagggagcggggaggagaggagggatgctcaccaagcagtcgacggcggggagaggcggtcgacggagggaggcgaggaggcggcggtgtccctcgggcgaggacaacgacgacgatttggcggcgtgcggcacaggaggaggggaggccgagggtcggcgagacctgaggaagagattggatgggttagggaggaaaacaggcgaccgaagcggcgggaaaacaatgccggcgatggaactcggggcggaagcggaactcaccagaatgcgaggtggttgggattccggcgggtcttcggcgaagaggagtggacgccgaggagcggtggagcgcggtggtgctgagggtggcggcagcacgaccgggcgaggcctgtctcgccggcggggagtggccggaggcggtggaaagggcaacggctcggcttgcatgtggcgcggtttggcagcgacgggagcggcggcaagaggcggaaaaagcggcggcggctgcgggctgcgtgtggacacggcgtcacggtggtggttcggggaaataaagtggatgccggggtgctatgtggtgcggcgaactaacggcggtggcggattggcgcggtggagactagcggcggtggcgaccggctggagctcgatggcaagcggcggcgcacggctcgaccgcgagggagcgacggggaggccggggagtggcgaatttggggcggcagcagccggcgacgtggagctcaacgtggcaaaagggcggcatggcggtggtttcggctcagggagccagaggtcaatgatgcagttcatgtcgagcgcccgcacgctcccgcgctgcgttgcagcacgggtcgtacacatcgttgtgcggcggtag

SEQ ID NO: 57276 - DNA, 1749 bp, Oryza sativa
  Clone ID: PAT_MRT4530_59103C.1
gacccgcacagtagtctgttgtcgtcctcgatcggatcagctaccggctttccgttgatatctccgcgcttgatggccgccgccgccgcggtcgcctccctcctcggcttcgtcctcgctctccctttctgcttggcggcgccgtccatcacaacgcatggcagcgacggcggcggcggcagctacgtgtcggcggtcggggaccccggcatgcggcgcgacggcctccacgtcgcctgggaggcatggaacttctgtaacgaggtcggccaggaggcccccggcatgggcagcccccgcggcgccgactgcttcgacctcgtcagagctgggaaattcgcagagaatggcgtggacgagaacggccagccgacgtacaaggtggtgcaccgggtgaccgacgccgacaacaacctccgcgccggcgaccctctcccgggctcgccggcgaacatcacggacgtcgacctgtacgcggcggcgaaggagctctacctgggcgaccggtgccaggtgcccgacagcccgtcgccgtggcagttctggatggtcatgctcaagaacggcaacctggacaccaccgccgccatctgcccggagaacggccgcccggcgcgcccgttctcgcagacctcgaggttcccctgccccggcggcgccggctgcatgaaccagccgctcgtgttccacaaccgcaccgcgctggacgccacggcccggcgcctccgcggcgggctgttcggcacgtacgacctcgacgcggcggacctcggcagcagagaagtgtcgtactactcggtgacgtgggagaaggacatcgggagcggcggcgacggtgggtgggtgttccaccacaagctgcgcactgcgcccaagtacccgtggctgatgctttacctccgctccgacgccaccaagggattctccggtggataccactacgacaccagaggcatgaccaagatggtgccggaatcaccaaacttcaaggtgagggtgacgctggaggtgaagcaaggcggaggccccaacagccagttctacctcatggacatgggcagctgctggaagaacgacggccggccgtgcgacggcgacaccgcgacggacgtgacgcggtacagcgagatgatcatcaacccggagacgccgtcgtggtgcacgcggaggcgcatcgaggagtgcccgccgtggcacacgttccggaacggcacccgcgtgcaccgcaccgacgcggcccgcttcccctacgcggcgtaccacgtctactgctctcccgggaacgcgcgcgccgccgaggagccgaccacctactgcgacgcgtacagcaacccgcagccgcaggagatcctgcagctcgtgccgcacccggtgtggggtgagttcggctaccccacggcgaaaggccaggggtggatcggtgaccccaggacatgggagctcgacgtcggagcattgtcgcaggcgctctacttctaccaggatccgggcacgccaccggcgaagaggaggtggtcgtcgctggacgtcggaacggagatatacgtcagcaagtatgcggaggcagagtggacgctgagtggattcgacattgttgtgccggaggaatgcattgggtcgtcccaaggaggacccgtcagtcgatgtttgtaaagttggtgatcaacgagttaattaagaaacacttatagattcattattggaataatatcgtgttcccttcaaaaaaaaaaaaaaaaataaaaggcc

SEQ ID NO: 57277 - DNA, 282 bp, Oryza sativa
  Clone ID: PAT_MRT4530_59104C.1
atggccgtgataaagattcttcaaacacctgtcactcccaccgcccgtgacgtgcaccgctgcacgtggtctgcagttgttgctctagacccacttggcaattttgctggggacaccccggaatggggtcaatttaggaagggtctgcatcctttggaggcagccaagattattgagcaaacaaacaagtccatattctctttaagccctgatttattattgcctcacggcctcgacttgcctcatctagaacaagaaattaaaaagaggctattactttaa

SEQ ID NO: 57278 - DNA, 579 bp, Oryza sativa
  Clone ID: PAT_MRT4530_59105C.1
atggcggccaggaagcttctagagcagccgggcaccgccgcgccgccggtgctgggcggctccatcgccgacgacagggacatcgtcatcatcctcgcgtcgctcctctgcgcgctcatctgcgtgctcggcatcggcctcgtcgcgcgctgcgcgtgctcccgccgcggcggcggcggccccgacgcggccgccgccaacaagggcgtcaagaagtccgtgctccgcgcgatccccaccgtcgagtacgtctcccccggaggcggcggcaaggggaaggaggaggaggaggcggcggcggaggagggggagcagtccgagtgcgccatctgcctctccgacttcgagcacggcgacgccatgcgcgtgctcccccagtgcggccacgcgttccacgccgcctgcatcgacaagtggctgcgcgggcactcctcctgcccctcctgccgccggatcctcgtcctccagcttccccaaggcgagcggtgccagcgctgcggcgcgcggccagagccagccgccgcctccgcggtctggaagccgacacactacagcgaggtcccgcccttcttgccgtag

SEQ ID NO: 57279 - DNA, 1731 bp, Oryza sativa
  Clone ID: PAT_MRT4530_59106C.1
atgaagaagggaaaatggtccaaggaagaggacgatttgatcaaaaaccacatggagaagtatggcattggccgtagctggcaggcactgtctgatgctttagggctgcagaggtgtggccggagctgccgttcccggtggctgaactaccttcggccggggctgaagcacggcgacttctcgccggcggaggagaggatcatctgcaagatgtacagcaagaagggaagcagctggtcggccatcgccgcgcagctgccggggaggacggacctcgccgtcaagaactactggaacagcacgctcaagaagaggttcccggcggcggcggcggcgaggagcaccgccgccgcgcgccgcaggcaccgccccgccgccagcgccaccacatcgtccgacgacgacgacgacgtcgacgtcgacgacgcgaccccgcccggcctcgcgctggtcgtctacagcgaggggagcaccgccgccgcggcggcggccggcgagctcgctccgtactccatctcatccccggccgccactgccgacgcggcggaagaagaagagccgatcgcggccgttccgatcagcacctgcatcctggcactgccgccgccaccaccaccgccaccgccgccgccgagcgatgccaccggcggcgaggtgagcatcccctgcttccccttctcgccgctgccattcatcgagccggacttgccggagctgacctggacgaccgacctcgacgacattaccgccaccttcgatgccgccgcctgccgctacccgaagcggccgcatccaatcacaccggattcgcctcgccttccgaagcttcccgccattgccggcttcgacgacgtgcagagcttcttgtcttgcatatgcctacggtataatacgtcgccgtttctgcttgctcgtgccaccgcagcgcctcccgccgccgccgccgaccgatgcctcgccggtcgccgctgcctctactctactcctcctcctcctcccctttcaccgcttcattggcggtgctcgcggcgtgaccccgagctcggagctgacgtctcagcgctgctgctccgcggacggctcggcgcgcgccaactgttcgacgaattgccccaccgagtccggtggcgccgcggctaccttcgcgccgccttcgctgcctccgtctccaacctcaacgcgcgagacggccacaggggagcctcctccatcatcagccatgatcatgtggagcagctcaagagcttcttggcttctgttctcatcacacagccccctgagaagaatattgtaggagaagacattgaggcccttgagaagaggattaatggtgatggcttccactctaaatcccttcttgacgacattgcccaaggccgcgaaaccgaggtccaagcggcccgcacggcagcagcagccgatgaggatgccataggtgtgcacggtgggaggagttaccttgccggcgccggctcgggccatgcggttgaagcgggacacagcggccgcggggatgtagcgcgcgacgtcggcgagagcgagcgccgttcaagctgtacatcgaggcgccgctgccttgccggagcaattcgtcgaacacgtggcgtgcgtcctcggcgccaccgccacagactgcaccctccgagcgaggggtcgcgcccacggagcgagggccgccggcggagcgcgctcggctcgagtgggtacgcggcgtgccatggcgcagcctga

SEQ ID NO: 57280 - DNA, 567 bp, Oryza sativa
  Clone ID: PAT_MRT4530_59107C.1
atggaggcctcggaggttggagcccacgaccaatcccagggcggcgacggctacgatggtggtgggctggagctagcgtgccctcgccgagctctagccatcggcggcaaggcgagggtgcctagcgcagatctggcgaggaggggcgatcgcgatgaccctggtggcgggctagacctaacgccggagaatgaggttagttgccacagattcaggcctccatgctatcgccgcctaggactgtgtgtagagaagcctggtagggcgacgacggcgactcccgtggagccaaagggaaggatgcagatggatctggcgcctctctgccagatccggccgaagagcggccacgcgggtcggtggggcagcgcgaagatggtgtggtggcttggtggggcgcggctttcgagtcctacaatgacgactcggtgtccaacgacatcgaaaatgagtgtggccaacgacattgatgacaaggagggacaccctcacacggggtgcctagtggctagttgccttgcaacaaggctgttaatggcatggatcataggtggtggtgtcgtgtag

SEQ ID NO: 57281 - DNA, 304 bp, Oryza sativa
  Clone ID: PAT_MRT4530_59108C.1
ttgatgtgcactagggttcccgatcttccgaaaggttctgataaacaacgatttgggcggagtcgcgacacaaatcgatccgacttcttgaatgcgtacgctcttgagccctgcaatcgcagcaccacgtctcctctggttatcacccgtgctgaaacgggccaaaggcccaaatacagtgacgcagcactaaaaaaaatgtgtgacttgaatgttctgcgggtttggcccgtacttgattctgaccatggagcattgttcagtcctcagctgaaactcaaacttctctttcttcctgttaata

SEQ ID NO: 57282 - DNA, 469 bp, Oryza sativa
  Clone ID: PAT_MRT4530_59109C.1
gcccagcgtccggcttcagtacagctggtgctctcggccatcgtgctcgccgtcctgggcggcgtggtggcagcggcgtcgggctacggcgacgtcggcgagtactgccgcgtggggaaggcggtgtcccgtgacccggtcccttcttgccggcaactacatcgcgcgctggtgcggggggggggggggccgcttggtctcccgcctgctgccgccgcgggggttcctggcgccgtgctgtccggtgctcgccgccgtgcctttgctgtgccggtgcgtcgcgctgtgcgtgctggtgcgcggcgtggtcgcggtggtgggcgtccgtgtctccggtcttgtctccccgctcgcggttccggtgtgcggcgctccttcgttcgccggtctggcctccgcgctgtcggtcttctgccggggcgtcctgctgctctcggttggtttgtttgcctgtctttttgtcggggtt

SEQ ID NO: 57283 - DNA, 7921 bp, Oryza sativa
  Clone ID: PAT_MRT4530_5910C.1
ctacccctctctcatctctccctctttatccccatcagtggccacagcgagaaggacgagagcagcgaggtccagcgccgatggcctcttcgcccccgcatcctctctaccccctctcatttctccctctttatccccatcagtggccacagcgagaaggacaagagcaacgaggcaattgccaatggcgcctcttcgcccctgcctaccctctcccctccacgcctgtctcaacccatcaccggtagccgtcttgttcaccgccatttccgtcttccaccgtggcgcaatccagaacggcctcaccaccgccgggagcaggaggtaggccaccgccagtcgcagccctccccatgctttcacatggagatggggtgaagataggcacaacggtccatggaagccatccgagcgtagaggcggcgggcggaacagaggaggcagaccatcaccagattccatgaatccaaccttgagaagattgtagacgttgacggtgcaggcatccaggtcgaagagtaaaagcacccagtggaattctgtgttgtatggcaacagtatgaacgtcttgtaatgctgcgccttcaggagatggacgagattgtcctctgtttcttgtggatattggtcgagcattgcgacgtttactttctgagggtcgatgaatccagtatcgaaaaccctccgccgtcgggccctttgaatctccattaaaatccagcaactcataatagagacgtcgagggcgtccagctggtatagttcgtagattcccctgaaattgatccagagaatgtcatctccttgcaagaagtccgtgtccctgatcctcgctccgatcatctctctaccggtggcgctcatctccatgtacagctgatggaacttgtacatttgtgtgggtagggactgcagcagctcaggcttgacaagcggtttaccgagttcgtacatgtatttcacttccgccttttcgattggtgcgactcctagcaattgatccgtagttagaccggtgtcagtaataaattgttctatcgtcatttctttaccggtcaccaacggctcgatctcctggtttggttgctctccaagctgagggactggtttggactttcgagaagatgctttcttcagcgttcgctcatagtccgatagcttgatggcctccttgacagatgcagacatacccctgaagaagttcctgacactagggtctataggaatcttcttttctggacttcgaggcttgaattgtctcttgacttctgatgcaacgtaagcgtcaagctcctcttgcgtgcaatcgtaccccgggtccttgttcttggcggcgtcaactttcgccttcttcgttgcccttgtgtgggcaggcggtggagctggggggggcccttgactttgaaggtgccggaagaggagcttgcgggggagtaggtgtaggagcacgaggaggagtcggtgcaggatcctgaggaggagtcgatgctggagcctgaggtggagacggtgctggcggagcatgaggaggagacggtgcaggatcctgaggaggagatggcggagccggaggagatggtgcacgagacgccgcttgtcgcccagggaggatgatgtaccgccgtctcctctagggtaatccagctcgaggtcctcgtacgcgccttcgaccaactcaacttcgaccttcgagtatcctgctggaatcggcctgcagtggtaagtacctgaagggtccgttgggatggccatgcccgacgccacctgccccgttgaggcgcagctgctacggtttcctgacgggctcaccattgcaggaggaatggtcggctggggatcatgggaccgatgtgcggccatgcgttcatcaaccttccttgccacctcctcttgcatgttgagttcgtacctcgatacccggaactctaggtctgcaatcttcgcctcggtatctctcttgctcctcatccgactcctgtacgtgtggatgtcctccttgaaaccaatcttccaaggaatcacccctttccctcgtgttcgtcctggatgctctggagtctgcagggcgagtgtcaactcgtccctatctctgtctggtcggaacgtgccctgagaggaggcttccactgcatcttttagtcgtcgcgcagcctctcgtatctgatcgccgaagaccagtgagccatcagctgggttgagcgttccaccgtgagcatagtaccagaacttcgatcgttccggccaattggctgttgccggttcgatacccctctcaatcaagctagcctccatctgctcccacttcggcatcgcgacactatagcctcctgaccccaagtggtgatggtacttcttcttggcggcattttctttgtttctttccatcatcgcctgcccttgttcacccgcaggaagggtgaatgtctcgagcattgtggtccacagcatctctttctccgaatctgggacaaagctctcatgatctccgcgtgcccttgttcttcgccagtacaccgtactgacaggcacgttatcccgcacaacccaaccgctgtgacgtacatagttcttggcggcttcggccggggaactaggacgtccatcttcttccacttccgttatgatgtgccgaccctcaagcttcttcgctgcacctcgttgcccacgtgccctcttctgtccaacggagggttgactaccactagcctcctcctcttggttcccctccacatccctttccacgtgcccctgctggttcccctccgcatccctctccacgttcccttcctcgttcaagtactggtttgaatcctcgttcccctcttcttcattccagtactggctgcttccctccgcgattgtatcgtacaatatctgttcctcattgcggtcagccatgttccctagctcgttcacgttccctagctcgttcacgttccctagctcgttcacgttctcgtggcaacgtacgttgacgtgttcgttctcgctctcgttcgttcgatcgttctcgttctcgttcacgttctcgtggcaacgtacgttgacgtgttcattctcgctctcgttcgttcgatcgttctcgttctcgttcgttaacggcggtgtggcggcatcggggcggcggttggcgcggcggcgtggcggcggcggcggcggcgtggcgacagcagcggcggcgtggcgttgcggggccgtggcggcggcggcgtggcgtggcggcggcggcattgcgcacgcggcggcgaaggcggcggcggcgtggcgacggcggcggcggcgtggcgttggcatgcagcggcggcgttgcgcggcggcgaaggcggcggcgtggcgtgccggcggcggcattgcgcgcgcgccggcgaaggcggcggcgtggcgtgccggcggcggcatagcgcgcgcggcggcgaagacggcggcggggcgtgccggcggcggcttggcgcggcgtcggcgtggcgcgtcgtcgtcgtggcgcggcgtctcgtggcgggcggcgcgacgaagagagatcgagatgaagggagatctggcggcggcggctctcaccccagagatgcggcggtagcggaggaggcggaggcggcggcgaggacgacgagctcgagacgacggcgagatacggcggcgtcggcgcggggatttgccatcggcggtgacggttgaccgcacgtacattctcctcactattgttccctccttgtgatcgctgcgtgagtaaggggtgtcttcatttgataggaggatgctagggtcaatcgtcaccgtgaaagggggttgcccatccaactgatcgtaatcctcgtcagtcttgtcctcaactccgacgatttttcttttgcctgggagaaccacttgacgcttaggctcatcaggccctctgcccttctttcctttgctagacatgtccttcacgaaaaagacttgcgttacatcattggcaaggacaaaaggttcgtccgagtatccaaccttgttaaggtcaacagttgtcatcccactgtcatcaatcattacgcctccaccagtcaacctaacccattggcaccagaacagaggaaccttgagaggaccatagtcaagttcccatatgtcctcgatggcaccgtaatacgtggcagttgttccatcgtgtcccatggcattgacacgaacagcgttgttttggttcgtgctcttcatgtcttgggctctcgtgtagaatgtgtacccattgatctcatatccctggaatgtcgcgatcgacccagacggtcccctcgccaggaaggcaagttgttggttgatcgactcgttacccatgagatgttgtcgtagccacgcggggaaagtatcaatgtgatgccgtgtaatccatgcatcggacttaccgatgttcctggcgcgaactagagccaagtgctcctcgatgtaaggagctaccaatgaagagtgttgcagaacagtgaaatgggctttacggaataaatcgttgtctaccgtcattattgctttccttccgagagttccctttccccggagtctcccttcatggcgtgattcaggtaccccgattgggcgaaggtcctcgataaattctacgcaaaattcgatgacctcctctgttccataacccttggcgatgcttgcctctggacgagcacggttacgaacatacttcttcagaacgcccatgtaccttctgcgaaattgcgttcatgaatgcacatagctttgttattgttgcccggacattgtctggaaagataccccttattacaactggtagcagttgtgtcatcaacacgtgacagtcatgagactttaggtttgtgaacttcttctccttcgtgcttattattcgcttgatattcgtggagtatccagacggtacctttatgctctccaagcattcaaacatactttccttctctgccttgctaagagtgtagctggctggactcaagtaatggcttcctttctcctttggttccgggtgaaggtcgccgcgttgttccatatgcttcagatcattacgtgcttccagtgtatctttcgactttccgtatacacctaggaagccaagaaggtttacgcaaaggttcttagtgaggtgcatcacgtcgattgcgtggcgtacgtccaagaattcccaatatggtaactcccaaaatatagagttctttttccacatcgccgcgtgaccatcttcgctctctatatgctggcttccaggcccctttccgaacactactttaagatctttaaccatagcaaacactgttttcccgctgcgatgtttaggcttcgtacggtggtcggccttatgttcgaagtgcttgcctttcttccataccgggtggtttgctgcaaggaatcgacgatgacccatgtatacaaccttcctacagtgcttaaggtacgtactttctgtttcatccatacagtgagtgcaagccttgtaccccttgttggactgtccggataggttgctaagtgcagaccaatcgttgatggttacgtacagcagcgctcgtaggttaaactcctcctgtttgtcctcgtcccacacggggacaccttccttcttccacaactgtttaagatcttcgaccagtggtcttaggtacacgtcgatgtcgttaccaggttgcttggggccttgaataataatcggcatcattatgtacttccctattttttgccttccattgcaacaactccagagtggtatccaactttttgtcgcctgctcgcaacctgggtacaacgaagttctgtggtcctccaacatcttgtccaatttatgggcctccttttcactttcgcagtcctccctggcgtcctgcaacatctgaccaagatcatccgcaacgtcgttaccatcagcagctatttcctcctcgcccgtttgatttccttcaaatccaacatactgagcaaagtccggaatattgtcgtctgccacttcatcttcttccatttcaacaccttgctctccgtgggatgtccaacaattatagcttggcatgaaccctgactcaaacaagtggaaatgaatagtcctggatgcagaatactccttctgattcttacacttattgcatggacaacaaataaaacccctttgcctgttagcttcggccactctcaaaaaatagtgcacgccgtcaataaactctttggaccgccgtgcgcgaacgttgtcgtgtgcatgttccccccatcacgatctccctcctcgtcggcgacccctcccctccctctgcccccgtccacccaagcgagccgtcgccgccgcatcccacgccccgctggctctgtgtcccacgtcgccgccgcctcctcattccgcgcgcccgccggctctgtgtcccaggtcgggctccgccaccgcgcgccgccgactgcccgtgcccgcccccttgtctcgcgccgccgcctcgtctctcgccgctgcccactaccctgccccgcacgccgccgtccgcccatccgcccgtccgcccgtccgccgctccctcgtctcgcgccgccgccatccaccgacgcctccgccgctgcatgcagccgtccgccgtctagcgcccgcccactcgtctcgcaccgccgcctgcccaccgcccgggcccgcgtgccgccatccgcccgtccgccgctccctcgtctcgcgccgttgccatctaccgggaggccccccgaggtcgacgcggccgcggcacgcagccccccgggggttgccgcctcacctcacttcgctgcctctgccgtcgccgtttgaactctgaaggagaagagagagagacagtgagggatagaagagatagaagagagagaaactgacaggtggggcccacctattttttaataaataagttgctgactgaattgccacgcgtacgccacgtagaccaaaaccaccgcggattgggtcgaggggggtaattcgtccggtttgcatagttgggggtgaagaatgtccggttttgtggttcaggggggtaattcggacgaccacgatagttcgggggggtaattcgtactttttcctttatgttattatgcggtctgtgtgccagaactgtagttagaaaggaccactcttgcaaggatatttctccactcttgcaagaaccactctcgaacaccaacggattaaattaaattttcatttactcgattttaatcgtacagtgatgcacgagtttgctttggattggctagattggaagaatgctctcgctaactgtattatctgcgtcttccagttatggccaaaacaacttacatgaaaagtcacatattgattattcttccacaatctgtgatcctttcaggcgcgcgaatgagttcgcacctactattgaattctcttactactcacccatccgaggtactctttctggttgtcccaaatcaagtttagattgcctgcagagataatatggcaccagatattatccattctagggttaatgctgaattctgcatcctggttttgttttgtgccactctgttgcatgtgaacatgttcgtctgaaaatggggtttggaaggatgaaccatcaacatatccgctacatttattcttcggtgaatagctaatatttcttctatcagtgttagccacggaaaatcagatagggcagcgaattcaaaatgtagaaccctgtcctgctaaataaagtagtgctttatttttactacaggtgcattacttctgtatttattctctttttattttcatcttagcaaataagatactgatgatatgacttgattatgtggatctaatcattcattttcaaataatggataaacttgcatgtatagtgtatctatagatatgtatgtatggctaaaacaaaaatctaaattggactgtagaatgaacagaagaaaagccaacaaagaagaactcgcttgtaagatgtac

SEQ ID NO: 57284 - DNA, 1275 bp, Oryza sativa
  Clone ID: PAT_MRT4530_59110C.1
atgcaggcctgcacgtatatacgctctgctgtcacggccagccgggctccagccgaacagaaacagagtccagcaaccgatcgatcgattgctgcccaatgccaataccaatatgcttctagaacctgtacagctcgtgcgattagattaatcttggagatttatcttaacacgaactctaataaagtactccgtgcttttcatttgtttacacggatttatggcggtttgcagttgcagatcaaaccggcaacgaccctgacagctgacggtgagttgtaagtagtaagcataaactcgcggttggctggcgcgagccttcggcgccaagcaggctcgaatccaaatcacatctcctcgagccgagacgagacgagacgggttcgtctcctttatattgctccgtgtccaaccaatccccggtcatctcgcctcgtctcgtcccgtccctgcgctgcacgtctccgcctccaagagtcttcttcctctcccatggcggcggccatgggcgccgaggccgagattgcggcggcggtggcgccggcggcgactgatgagtgtggtggaaaggcggcggcgatggggggagtgaagcagcggcggggaggaggaggaggaggagggtgggtgaagaggatgatgacgacgacgacggcggtgccgaggaggcgggggcactacacgccagtgggcgtcgaggtcgagctgcacggctcggcggcggcgggggccgatgaggagaagccgccgcggcggcggggagggtggctgcggcggatgatggtgccgcgggagtgcgtgcacgggcggcagcagcggtggtggaagctgcaggcgggcggcggcggcggcgggtcgtcgtcgaggctggcggcggggctgacgcggtcgctgtcgcggtggaagacggccgggagcggcggctgggcgacggcggtggccgacgccgtggcgttccgcgtgatatttaaaccaattctgctcgccgcagctggccgcgttcgtaaccatcatgcatctgagataattgggttggtgttcgtcgatcgtgcgtacatccatacgtgttctcggtggacgcgactgctcaacagattgatgcctctagattgctctagaccttgccggctgtggcgtgcaccgtggtccctcgacggtagtggtttggctcatcgcgcgatcggcagcgccagtaccagtaaacaacaaaagcgcatgacatttctcaacgacgatatttttgacttgttgggttctacgtaccgcaactcaact

SEQ ID NO: 57285 - DNA, 467 bp, Oryza sativa
  Clone ID: PAT_MRT4530_59111C.1
tcggccccgccatcgacgagtcctacacgctctccgtgttcctggactccggatcggccgatatctccaccaccacgccatggggcatggggcgccatccgttctacccaccgtcggctcgttcgctcgcctgctgtcgtgctcgtccgcttgcccgccgtcgtgctcatccgctctacccgctgctgccctcgcccgccgcccgcccatcgccgctttgcccgccagccgcgcttgcctgccgccgcccgccgctgctcggctgccgcgctgaccagccgtcgcgctcctctgctcgcccgccgtcgtgctcgcccgctcgcccgcaggccacgctcgcctgccgatgcccgccgccactcggcagccgcgctcgcccgccgcccgcccatcgtgctcacttagtgaagaagaagagaaagagaagagaaggagaagaaaagaaaagaaaaaacgatgttaactga

SEQ ID NO: 57286 - DNA, 1687 bp, Oryza sativa
  Clone ID: PAT_MRT4530_59112C.1
ttttttttttttttttttttggcttgcttctagttctatcaaaatttcttggtaaaccagtgccatcatacatgcttttacccatacaagctgaatgtcgctaataaaaaataagtcttaaaattaaggaaaggattccaaatttctaatttgagtctcatttgcgaatcatttcggatttccatgaaacaagcatggcaatcatatgaaggagatccgctaccataataagcaaaatgagcaaccaacagcatgacgggaatcaaatcattacctatagcaaccagaaaagacacatgctaaaccagccacacaaggagtacctgctaagaaagaaatgtataacccgaacactgtctcaagtgggagtggcctatagcagcacaaggccaagctctgatggcttgattccattgcggatgcgatagttataaaggtaatagtggagctgcccatctccaggaccaaatttgagctccttgaggaatgattcattctccatgacatcaagtgcgttgaacacatcatagttcttctgcttggccacgatcagtgcatcgttcatcagctgctgcagcggagtcttggtggaaacattgtagtacgagtatgcagccttgagtgtcgcatagttggcattgttcaacactgatgagggtagcgtgtaaaagctgcagaaatccgtgacctcgtgagtttcagggctctccacgaggtagctgtccaccacatcctcccgaggaagcagccagtgctccacatccatctcatcaaagtccggagccaccacgaacttcgcaaggtatgccctcagcagccgtgtgaccgcagcgacatctcttagctccatctggcggaacccaggagtaagcggagcttcaggcagcttgtagagccgaaccgtgcgactcatggtcatgcgaggtccgagacgggagaacccaacatcaataagcttcttggggttgagggatcggtgccagtaccggcaggtggtgatgggggttgggaggacaacccccgcagtgtacgcagcctgccagatgttctcctggtggacgcggcgggtgacctcgcggatgagcacgggggcgaggcgcttggatcggagcttcttgtggacgcaaaggaagttgatctctgccatgcggacgacgtcgtcgcgtgcgcggatgcgcgcggggacaccggagatgaaggcgacgagcttcttggactccctggcgcggacgccgatgtgccaggcgcggaagaaggaaggggggcggagcgcccagcggaggaaggcgggggagtagttgaagcggaacatgttctcgtcgtcctcgacgtagttgtgggcgaggagggcgtagagatcggtgaggagggcgtcgtcgtcgaggtcgcaggtgtaccactcgaaggcggcggggagcgggtaagggtcggcacggacctcggagagcggggtgggcggctcgatggcgccgtcggggagggaggaatcggcggcgtcgcggaactggcccaccggctgcgtctcccagaacttgtggcggcgggcggtggggttggaggccagggtcatgtgctcctgcacgcgccgcgccagcgcctcgatcgaggtatcctccggcgcgggctcgctggtggtggcgctggcgctggcgccggcggcggcgtcgttgttgttgggggcggccat

SEQ ID NO: 57287 - DNA, 2625 bp, Oryza sativa
  Clone ID: PAT_MRT4530_59113C.1
atggccccgatcatgagtggggcggcggcggcggcggggggcacgggcggcgcggtcccgctcatcaagaacgccacctccgcgtcccagatgtcgcgtggcaaggccggcaccggcgccggcgcggtcgtctgctactccccgatgatggtcaccgcctacggcatctggcagggcgcctcccctcttgacttctccctccccctcttcctcctccaggtcgccatcatcgtcgccaccacccgcctcctcgtcatcctcctcaagcccttccgccagcctcgcgtcatcgcggagatcctcgctggcgtgatactggggccgtcggtgatggggcaggtttcgacgtgggcggtgaaagtgttcccggagcggagcttgctgacgctggagacggtggcgcacctggggctcctctacttcctcttcctggtcggcctcgagatggacgtgaacaccatcaggaggtcggggaagaaggcgctcatcatcgccgtcgccggcatggcgctgccgttctgcatcggcacggcgacgtcgttcatcttccggcaccaggtgtccaagaacgtgcaccaggcctccttcctgctcttcctcggcgtcgcgctctccgtcaccgcgttcccggtgctggcgcgcatcctcgccgaggtcaagctgctcaactccgacctcggccggatcgccatgtccgccgccatcgtcaacgacatgtgcgcctggatcctcctcgcgctcgccatcgccatctcagaggtcaacagttcggccttctcctccctctgggtgctcatcgccggggtggccttcgtgctcgcctgcttctacgtcgtccgcccgctcatgtggtggatcgtccgccgcgtccccgagggggaggccatcggcgacgtgcacatcacgctcatcctcaccggcgtcatggtcgccggcgtctgcaccgacgccatcggcatccactccgtgttcggcgcgttcgtgtacggcctcgtcatgccgagcggcccgctcggcgtcgtgctaatcgagaagctcgaggacttcgtcaccggcctcctcctgccgctcttcttcgccatcagtggcctccgcacgaacgtgaccaaggtccgggaccccatcaccgtgggcctcctcgtgctcgtgttcgtcatggccagcttcgccaagatcatgggcaccatcctcatcgccgtctcctacaccatgacgttccgcgacggcgtcgccctggggttcctcatgaacaccaggggcctcgtcgagatgatcgtcctcaacatcgggagggacaaggaggtgctcgacgacgagtcgttcgccgtgatggtgctggtgtcggtggccatgacggcgctggtcacgccggtggtgacgacggtgtaccggccggcgcggcggctggtcgggtacaagcggcggaacctgcagcggtcgaagcacgacgcggagctccggatgctggcgtgcgtgcacaccacccgcaacgtgccgtcgatcatctcgctgctcgagctctccaacccgacgaagcgctcgccgatcttcatctacgcgctccacctcgtcgagctcaccggccgcgcctccaacatgctcgccgcgcaccactcggcgtcgaacccgggcggcgccagcgaccacatcttcaacgcgttcgagagctacgaggagatggtcggcggcgtgtcggtgcaggcgctcacggcggtgtcgccgtaccagacgatgcacgaggacgtgtgcgtgctggcggaggacaagcacgtctcgctcatcgtgctcccgttccacaagcagcagacggtggacggcggcatggagcccatcaacgcgtcgctccggggcttcaacgagagcatcctcgcgtcggcgccgtgctccgtcggcatcctcgtcgaccgcggcctcagcgccgccgcggcgaggatggcggccgtgcaccacgtcgcgctcctcttcttcggcgggcccgacgaccgggaggggctcgcgtacgcgtggcggatggtcgaaaacccgggcgtgtgcctcaccatcgtccgcttaatcccgccggggtacacggcgccggcgatctcgccgccgcagccgccgatgcccgccgcccactcccgcgccatcaacgtcgtccccgaggtcgccaagagcgagcggcagatggacgaggagtacctcaacgagttccggtcgcgcaacctcggcaacgacgccatcctctacgtcgagcaggtggtggccaacagcgaggagacggtcgccgccatccgcagccagctggacaacgcgcacgagctgtacatcgtcggccgccaccccggcgaggcgagctcgccgctgacgtcggcgctcgccgagtggatggagtcgccggagctcggccccatcggcgacctcctcgtctcctccgagttctccaagatggcgtccgtgctggtcatgcagcagtacgtcatcacggcgccgctgccgccgccggtggcgctcgccgggccgccgacggatgaccccgtccggcagtatttgaccaacgccaaccagcggccgtcggtggcgatcggcggcaaccagatgggcgccgccggccgaggcggatggagcggcggcgccggcgggtactga

SEQ ID NO: 57288 - DNA, 1593 bp, Oryza sativa
  Clone ID: PAT_MRT4530_59114C.1
atgccccgtgataaaaattggttctcctccctcgaacaggcatccaagactagtgccgttttggctacaggtttggtcaaggtaaatgacaagtttgaattgaaaaacgtagctttggttgaggtcttaaattataatttgctttcagtttcacaaattgttgatgaaaattttgaggttcactttaagaaaactagaagtaaagtatttgattcttgtggtgattctgtgctaaatatttctcgctatggaagagtgtttaaagctgattttgaaaattctgtttcacctatgataacatgtttggttgctaagtttgataaggatgtcatgttttggcatcgtagacctggacatgttggttttgatcatctcatgagggctgactttgaagtgatgaaatcagttgtgcacaaggttaagaattttattatctacttggatcagggtgacacaattgcagatgacagtgacagtgatggtagcttagaagatgacccagattttatggatagtgactatgatatatcagatgcaaatgatgacttgtatgttgacaatgttgatgtgggtgttgaagacttatctgactgcaaggcaaagttttggaagaaagctaagggcagtcagttgaaggggaaagaaatagtagttagaaattctgatggggaggaagtttccactgatgatgaagatttgcagctcccagattcagatgatgatggtgaagtgagattaaagtttaaggctttcatggcagaggatgttaagaacccagtttttaaggttggcatggtgtttccttcagtagaagtacttagaaaggccataacagagtacagtttgaaggctagagtggacatcaagatgcctaggaatgagcaaaaaagacttagggcccattgtgttgagggttgcccatggaacttatatgcatcatttgatagcaggtccaagtcaatgatggtgaagacatatcttggggagcataaatgtcagaaggaatgggtgctgaaaaggtgtactgctaaatggctatctgagaagtacattgaaacttttagagcaaatgataagatgacacttggagggtttgcaaagttagtccaattagcaaatgatattgaaagtactgaaaaatgcagatatggcaaacacatgttatgtattgccagccgggaaagggatttttcagaagtgaagcctccaatatatgagaaaaaggttggcagaccacctaagtctaggaggaaagcaccacatgaggtacagggaaaaaatgggtctaaaatgtccaagcatggtgtggagatgcactgctcttactgcaaagagcctggacataacaagaaagggtgcccactgagaaaggctggactcagacccaaagtgaagacaagtaggatcccaggtgcaagttctacagaagagtggcatgaatctgagcaagaaccagcagaggtgctgacccaatctcagtctgcatatgaccaattactatcacaagttcctaatcctatggtggcacagatgtttgaggaatcatcacaaaaatttggtattgtgatgaatatgggaaattactgcctgtaa

SEQ ID NO: 57289 - DNA, 1632 bp, Oryza sativa
  Clone ID: PAT_MRT4530_59115C.1
atgtcaactgctgattggaaggtgccaaacaaacaagatgacagtgacagtgatggtagcttagaagatgacccagattttatggatagtgactatgatatatcagatgcagatgatgacttgtatgttgacaatgttgatgtgggtgttgaagacttatctgactgcaaggcaaagttttggaagaaagctaagggcagtcagttgaaggggaaagaaataataattagaaattctgatggggaggaagtttccactgatgatgaagatttgcagctcccagattcagatgatgatggtgaagtgagattaaagtttaaggctttcatggcagaggatgttaagaacccagtttttaaggttggcatggtgtttccttcagtagaagtacttaaaaaggccataacagagtacagtttgaaggctagagtggacatcaagatgcctaggaatgagcaaaaaagacttagggcccactgtgttgagggttgcccatggaacttatatgcatcatttgatagcaggtccaagtcaatgatggtgaagacatatcttagggagcataaatctgtggttgagacagagtcattgaggtcttggagatggtttctacaaaccctaaaggaagacctgggcattgacaatacctacccatggacaataatgactgataagcaaaagggtcttataccagctgtccaacagattttccctaattcagaacacagattctgtgttagacatctgtactccaattttcaggatgcatatgagtggcttcaaaagatgcctcctaaaacttgggtcagagcttatttcagtgaattccctaagtgtgatatcttattgaacaataattgtgaagtattcaacaagtacatcttagaagctagggaattgccaatcctgagtatgtttgaaaagatcaaaagccaactaatgtgtaggcattacagagtgagagaattagtgctgagtcagttcttccaccctgcatatgcatttaacatttggccctgcaatgatatgactaagtgggctcaggtgaatgggccagaagtgaagcctccaatatatgagaaaaaggttggcagaccacctaagtctaggaggaaagcaccacatgaggtacagggaaaaaatgggcctaaaatgtccaagcatggtgtggagatgcactgttcttactgcaaagagcctggacataacaagaaagggtgcccactgagaaaggctggactcagacccaaactgaagacaagtaggatcgcagctgcaagttctacagaagagtggcatgaatctgagcaagaaccagcagaggtgctgacccaatctcagtctgcatatgaccaattactatcacaagttcctaatcctatggttgcacagatgtttgaggaatcatcacaagtgagtcaaatggaaactacacatggtcctctcccagataaccagtacatcctttcaaaccagccagctgtagtatctacccctatgaccacagcaacaaaagagggaaaatctagggccaacaaaaggaagtgtacaactgaaggagtttcaggagttgctgctactacttcaaagaacagagctcccaggaagaaagctactgctacaaacaagtga

SEQ ID NO: 57290 - DNA, 252 bp, Oryza sativa
  Clone ID: PAT_MRT4530_59116C.1
atgccggccaacggtgatctgccagcccactgccttccatgcctccgcctgcttgagttggtgccagcaatgctcaagtccaaggcccaggacctaaagttgtggctccggttgggcctgtggtggagcaggcccaatgttgacctgggtggcccacagttggtgggccgggccgcgcactctaacaagtggtatcagagcccaaggtttgaaacccggaacaatttccatgggtctcatgggttgatgtga

SEQ ID NO: 57291 - DNA, 2526 bp, Oryza sativa
  Clone ID: PAT_MRT4530_59117C.1
atgattttccgcctggaaggggaagggcctccgttgtacagtcctgatgatggtaaattcaccgctgaggtacaccatggtggtttttttgttggtcagggtagcaacagggcatatgtagatcaaacgataaattggattgaccactgtgaagcaagaacatgggatattgtttgtttggatgaatttttagctatgcttgggtatgatatgactccagattttaaggcttattggttgctccctggaaagactcttgaagatggccttagggttatatctactagggctgactttgaagtgatgaaatcagttgtgcacaagggtgacacaattgcaggtgtagattgggatgatgtagtagctaatcctattagtgaattgcctaaggtgcttagtcctaggaagatgtcaactgctgattggaaggaagtttccactgatgatgaagatttgcagctcccagattcagatgatgatggtgaagtgagattaaagtttaaggctttcatggcagaggatgttaagaacccagtttttaaggttggcatggtgtttccttcagtagaagtacttaaaaaggccataacagagtacagtttgaaggctagagtggacatcaagatgcctaggaatgagcaaaaaagacttagggcccactgtgttgagggttgcccatggaacttatatgcatcatttgatagcaggtccaagtcaatgatggtgaagacatatcttagggagcataaatgtaagaagtaatgggtgctaaaaaggtgtactgctaaatggctatctgagaagtacattgaaacttttagagcaaatgataagatgacacttggagggtttgcaaaaagcaagctagccagggcaaggagattggccttcaaggacatatatggtgatgagattcagcaatataatcagttgtggaactatggggctgagctaagaaggtctaatccaggcagttgcttctttttgaacttggtagacagttgtttcagcacatgttacatgtcctttgatgcatgtaagagagggtctttgagtggatgtaggcctttgatatgtttggatggttgccacatcaagactaaatttggtggacagatcctaacagcagtaggtattgaccctaatgattgcatatatccaattgcaatagttgtggttgagacagagtcattgaggtcttggagatggtttctacagaccctaaaggaagacctgggcattgacaatacctacccatggacaataatgactgataagcaaaaggtacatttcaaaggtgagaatctgaaaaaccagttatgggcatgtgctagatcaagttcagaggttgagtggaatgccaacatggaagaaatgaaatctcttaatcaggatgcatatgagtggcttcaaaagatgcctcctaaaacttgggtcaaagcttatttcagtgaattccctaagtgtgatatcttattgaacaataattgtgaagtattcaacaagtacatcttagaagctagggaattgccaatcctaagtatgtttgaaaagatcaaaagccaactaataagtaggcattatagtaagcagaaagaagtggcagagcaatggcatgggcctatatgccccaagatcaggaagaaagtactgaaaaatgcagatatggcaaacacatgttatgttttgccagccgggaaagggatttttcaggtggaagataggaatttcaagtacattgttgaccttagtgctaaacattgtgactgcaggagatgggatctgacaggcatcccttgtaaccatgctatctcatgcttaaggagtgagagaattagtgctgagtcaattcttccaccctgctatagtttagaagcattctccagagcatatgcatttaacatttggccctacaatgatatgactaagtgggttcaggtgaatgggccagaagtgaagcctccaatatatgagaaaaaggttggcagaccacctaagtctaggaggaaagcaccacatgaggtacagggaaaaaatgggcctaaaatgtccaagcatggtgtggagatgcactgctctttctgcaaagagcctagacataacaagaaagggtgcccactgagaaaggctagactcagacccaaactgaagacaagtaggatcccagctgcaagttctacaaaagagtggcatgaatctaagcaagaaccagcagaggtgctgacccaatctcagtctgcatatgaccaattactatcacaagttcctaatcctgtggttacacagatgtttgaggaatcatcacaagttagtcaaatggaaactacacatggtcctctcccagataaccagtacatcctttcaaaccagccagctgtagtatctacccctatgaccacagcaacaaaagagggaaaatctagggccaacaaaaggaagtgtacaactgaaggagtatcaggagttgctgctactacttcaaagaacagagctcccaggaagaaagctactgctacaaacaagtga

SEQ ID NO: 57292 - DNA, 631 bp, Oryza sativa
  Clone ID: PAT_MRT4530_59118C.1
ccggccgggagcacgaggagaacatccaagcgaagaaggtggggaagagaagaaacaatggcggcgcagcagctgctgctcctcctcccactcccgctaccttccagaaccttctcgaagcccctcccctcccttcccattcccctccccgccctccgcctctcctcctccgcctacgccgcccgccgccgcgacctgctccgctcgctccgctgcgggatgaggcgctcagacttggtggcggacctggagcttgccaaggacaagcagtggcaggggaggcgtcccaatggcattttctggatcttgctgctcaatgttggaatctatgtcgctgaccacttgttccagattgaacatataaaggcaatgtacttgtaccatgctttccctagttggtttcagtttgtgacatcaacattttgccatgcgaactggaatcatctttcaagcaatctattctttgtatacatttttggaaagctagttgaggaggaagaaggtagttttgcattgtggatgtcttacattttgactggtgctggatcaaacttaatttcatggttggttcttccaacatcttccgtgtcacttggagcatctggtgctggttttggccttttcacaatca

SEQ ID NO: 57293 - DNA, 1699 bp, Oryza sativa
  Clone ID: PAT_MRT4530_59119C.1
atggccacgtcactgccggccagattacttgtcccatgcagctggacaaagtaccgtttgaccccggtcccttttgtgatggcgacatcgtatcgagagggacagccagatctccggtatggaaaattggaaactggaaagcaacggacgtgttcactacgatctgtggacccgatacactggccaaaaatggagacaagccatgagcctcagacaccgtggaggcgaagaaatcaagaaaccaaccaccaactagctactgtagttgactgacagtgatagtggcagtcatgcaggtcgtgggaaccgtgcgtgtcagtggctgcggcgcggtggtggcgccctcgcgccggcagtgccgcgtgtccgcggcggtgctgacggccgcggagacggcgacggcgacgcggcgccgcgtgacgcactcgatgccgccggagaaggcggaggtgttccggtcgctggaagggtgggcgaggtcgtcgctgctgccgctgctcaagcccgtggaggagtgctggcagccgacggacttcctgccggactcgtcgtcggagatgttcgagcaccaggtccacgagctccgcgcgcgcgccgcggggctccccgacgagtacttcgtcgtgctggtcggggacatgattaccgaggaggcgctgccgacgtaccagaccatgatcaacacgctcgacggcgtccgcgacgagaccggcgccagcgcctgcccctgggccgtctggacgcgcacctggaccgccgaggagaaccgccacggcgacatcctcggcaagtacatgtacctctccggccgcgtcgacatgcgcatggtcgagaagaccgtccagtacctcatcggctccggcatggatccggggacggagaacaacccgtacctggggttcgtgtacaccagcttccaggagcgcgcgacggccgtgtcgcacgggaacacggcgcgcctcgccagggcgcacggggacgacgtcctggcgcgcacctgcggcaccatcgccgccgacgagaagcggcacgagacggcgtacgggcgcatcgtggagcagctgctgcggctcgacccggacggcgccatgctcgccatcgccgacatgatgcacaagcggatcaccatgcccgcgcacctcatgcacgacggccgcgacatgaacctgttcgaccacttcgccgccgtggcgcagcgcctcaacgtctacaccgcgcgcgactacgccgacatcgtcgagttcctcgtcaagcggtggaagctggagaccctggagactgggctctccggcgagggccggagggcccgggacttcgtgtgcgggctcgcgaagaggatgcggcgggccgcggagcgggctgaggacagggctaagaaggatgagcagaggaaggtcaagttcagctggatctatgatagggaagtgattgtctagtttaacttgtcttggttgaattctgaattcccagtcctagatgatcatgccatttcgttatcatctctgttcttgtgttctctttgcaatgcagtaaattggtaatagttaatggtgctttgatcttggaaatttggcgttgatgtattttctggtatcattagtgaagatagtttggtttcttttcacatttgatgatttgaaccctcaaatattaatgttgaaatacagaatttcacatttcaaaaaaaaaaaaaaaaaaa

SEQ ID NO: 57294 - DNA, 3729 bp, Oryza sativa
  Clone ID: PAT_MRT4530_5911C.1
atggatcggcaatggatgtacgctgaccggcggtccaaagagtttattgacggcgtgcactattttttgagagtggccgaagctaacaagcaaaggggttttatttgttgtccatgcaataagtgtaagaatcagaaggagtattctgcatccaggactattcatttccacttgtttgagtcggggttcatgccaagctataattgttggacatcccacggagagcaaggtgttgaaatggaagaagatgaagtggaagacgacaatattccggactttgctcagtatgttggatttgaaggaaatcaaacgggcgaggaggaaatagctgctgatggtaacgacgttgcggatgatcttggtcagatgttgcaggacgccagggaggactgcgaaagtgaaaaggaggcccataaattggacaagatgttggaggaccacagaacttcgttgtacccaggttgcgagcaggggcacaaaaagttggataccactctgaagttgttgcaatggaaggcaaaaaatggggttagtgacaaggcatttggcgatttattgaaactcgtcaagaacattcttccggggggaaacaaattgcccgagacaacgtacgaggctaagaagatagtctgcccgttaggactggaagttcataagattcacgcatgtccgaacgattgtatcctatatcgcggtgaggagtatgagaacctagaagcatgccctgtttgcaaagcactacgatacaagattagacgggacgatccaggagaagttgacgggcagctaacaaagaagagaattcctgctaagatggctgaccgcgatgaggaacagatattgtacgatacaatcgcggagggaagcagccagtactggaatgaagaagaggggaacgaggatccaaaccagtacttgaacgaggaagggaacgtggagagggatgcggaggggaaccagcaggggcacgtggaaagggatgtggaggggaaccaggaggaggaggctagtggtagtcaaccctccgttggacagaagagggcacgcgggcaacgaggtgcagcgaagaagcttgagggtcggcacatcataacggaagtggaagaagatggacgtcctagtgccccggccgaagccgccaagaactatgtacgtcacagcggttgggttgtgcgggataacgtgcctgtcagtacggtgtactggcgaagaacaagggcacgcggagatcatgagagctttgtcccagattcggagaaagagatgctgtggaccacaatgctcgagacattcacccttcctgcgggtacagaggacaaagtgaaaaggtggactctgaagaaaatggcagaacagtttcagagcttcaagggagatctgtaccagaagtatatactgaaggggcagacaccgaacttcgacacattcccaaagctaagggatcactgggacgagttcgttgcatataagacaggtgaacaagggcaggcgatgatggaaagaaacaaagaaaatgccgccaagaagaagtaccatcaccacttggggtcaggaggctatagcgtcgcgatgccgaagtgggagcagatggaggctagcttgattgagaggggtatcgaaccggcaacagccaattggccggaacgatcgaagttctggtactatgctcacggtggaacgctcaacccagctgatggctcactggtcttctgcgatcagatacgagaggctgcgcgacgactaacagatgcagtggaagcctcctctcagggcacgttccaaccagacagagattgggacgagctgacactcgccctgcagactccagagcatccaggacgaacacgagggaaaggggtgattccttggaagattggtttcaaggaggacatccacacgtacaggagtcagatgaggagcaagagagataccgaggcgaagattgcagacctagagttccgggtatcgagctacgaactcaacatgcaagaggaggtggcaaggaaggttgatgaacgcatggccgcacatcggtcccatgatccccagccgaccattcctcctgcaatggtgagcccgtcaggaaaccgtagcagctgcacctcaacggggcaggtaggatcacagagcatggacgccatgcaaacacaggacgaatcgacctgtcccattgatgacatcactcagcggacaccatgtgagctgcatattcctttcaagaacttatcaataaaggtgtcgtcgggcatggccatcccaacggacccatcaggtacttaccactgcaggccgattccagcaggatactcgaaggtcgaagttgagttggtcgaaggcacgtacgaggacctcgagctggattaccctggaggagacggtgagacgcatctacgagacacatgccatgccattattctatggcgcaggcggtacatcatcctccctggacgacaagtggcgtctcgtgcaccatctcctccggctccgccatctcctcctcaggatcctgcaccgtctcctcctcatgctccgccagcaccgtctccacctcaggctccagcatcgactcctcctcaggatcctgcaccgactcctcctcgtgctcctacacctactcccccgcaagctcctcttccggcaccttcaaagtcaagggcccccccagctccaccgcctgcccacacaagggcaacgaagaaggcgaaagttgacgccgccaagaacaaggacccggggtacgattgcacgcaagaggagcttgacgcttacgttgcaacagaagtcaagagacaattcaagcctcgaagtccagaaaagaagattcctatagaccccagtgtcaggaacttcttcaggggtatgtctgcatctatcaaggaggccatcaagctatcggactatgagcgaacgctgaagaaagcatcttctggaaagtccaaaccagtccctcagcttggagagcaaccaaaccaggagatcgagccgttggtgaccggtaaagaaatgacgatagaacaatttattactgacaccggtctaactacggatcaattgctaggagtcgcaccaatcgaaaaggcggaagtgaaatacatgtacgaactcggtaaaccgcttgtcaagcctgagctgctgcagtccctacccacacaaatgtacaagttccatcagctgtacatggagatgagcgccaccgaatggagattcaaagggcccgacggcggagggttttcgatactggattcatcgaccctcggaaaattccactgggtgcttttactcttcgacctggaggcctgcaccgtcaacgtatatgactcaatggataaaaaagagtctacgtttgacaaggttttcgaacttatagacagggcttggtatcggttccgtcatttggtccgcggcaaatggagagaaagacttaggcggaagttcaaattttcttgcgcaaagcaaaagcagggaactaacttgtgcggctattacgtgtgcgagtattgccactgccttgcagaccaaatcatcaccacaagagagctcgattttattcgcatgagggataacctgaccacacacaaggaatttatcgtggcggttcaagaacaactcatgggattcatcaacgaagaaatccttgatcccaagggtgaattctactacgacggaaacacaattcaccggtccttagcttctgagctagcagcgagtactactacgtcgaaatcgtag

SEQ ID NO: 57295 - DNA, 205 bp, Oryza sativa
  Clone ID: PAT_MRT4530_59120C.1
gacaggacggaccactacgagctcggcagggcgctggcgccggtccgcaacaacggcgtcctcttcctcagctcctgcagcgcgacgacacaacctccgtaggatggggcccgagaggcacgccggtgccgcaatgagcggcggaattcgaccggtggctgctggatgcgctactgcggcgtgaggcaccactacataaaaaggt

SEQ ID NO: 57296 - DNA, 123 bp, Oryza sativa
  Clone ID: PAT_MRT4530_59121C.1
atgtccaaagtagtgagcctgcttgaggggcatacaccactgcaaccatttttgtcagacctcagccttggcaaaacccaaattggagcatcagaggagatctccagtgtatctccatgctga

SEQ ID NO: 57297 - DNA, 222 bp, Oryza sativa
  Clone ID: PAT_MRT4530_59122C.1
atgcagatctcacgttttcaggattctttgaaacaatggtggctggccgtggattctaaacacaccgtcaccggcggtaggctgatcagtccggcgtcgtcggagcaagcccttcaggggacgcagaatcagcccacggtcgccgggaaccgccgccgccgcctgcggagcgataaaaacagaaaggatatggaagatggggaatcaatccgattgactggt

SEQ ID NO: 57298 - DNA, 786 bp, Oryza sativa
  Clone ID: PAT_MRT4530_59123C.1
atggcgccgtcgtccaagctcgccgccgccctcttcttcgccttcgccgtcgtggcggcgacgctggcgccggccgcggaagcgagggtccaagggttcgagccggccattgccgtggagaaaacgtcggtgagcggaggagcgcagcgaccgccgacgacattgccgggattactacccggcttgccgttcccgctgttcccgttcctgatgttcccgatccctggctcgccggccggcgccggcggcgctccgccgtcggctgggtccggcggcttcccgttcccgttgccgttcccgctcccgctccctgcgcctggctcgccggccgctggcgctccgccgtcgtctgggtcgtcgggtttcccgttcccaatgccgtccccgctcccgctcccggcgcatggctcgccggccgctggcgctcctccgtcgtccgggtcgggtctcccgttccctctgccgttcccgctcccgcaacctagctcgccggcgcagccgcagccaaaggagtgcatgacgccgctgatgtccgtgatgccgtgcgcggactacctgacgaacaccgccgtgccgacgccgccggccacctgctgcgacggcttcaggtcgctcgtgagcaccgcgcccatctgcctctgccacggcatgaacggcgatctcaacagcttcctccccacgcccgtcgacccgatgaagatgatgctcctcccgatcacctgcggcgccatgccaccactgcagacgctgttcatgtgctcctgtgtgtcgccttggtatatctga

SEQ ID NO: 57299 - DNA, 231 bp, Oryza sativa
  Clone ID: PAT_MRT4530_59124C.1
agtcagatggtggatcgctaatgcttacccgcatatcgagggacgcacagcccgaacgccttgatagaatatataggggagaagagctcaggtgcgcacttcaactgcctgagatgatccacccccagacctaccccggctgtctccaatgagtgcggagatatgagcgcctccgagtgatggtactaatgaaatgagtgataggtgtgatgccaaaaaaaaaaaaaaaaa

SEQ ID NO: 57300 - DNA, 1272 bp, Oryza sativa
  Clone ID: PAT_MRT4530_59125C.1
atgtcaggtcgacccgaagatcacaagggggtgacaaggaccattaagcaactcactcgtgggggcaacatgatgctttgcactgaactaaaatcgaatctagtctttgagcatatcattagccactcacgcaacgtatcagccgcactcgtcgtgcgcacgccgtctcgccggacggacggcagcgaccagggacactcgctgaccgtcggcatcgtgcagccgcgcaagctcatcgtggacaccggcagcgacctcatctggacgcagtgcaagctgtcctcctccaccgccgcggcggcgaggcacggctcgccgccggtctacgaccccggcgagtcctccactttcgccttcctcccctgcagcgacaggctgtgccaggaggggcagttcagcttcaagaactgcaccagcaagaacaggtgcgtctacgaggacgtgtacggcagcgcggcggccgtcggcgtcctcgcgtcggagaccttcaccttcggcgcgcgccgcgccgtctccctccgcctcggcttcggctgcggcgcgctctccgccggaagcctcatcggcgccaccggcatcctggggcttagcccggagagcttgtccctcatcacgcagctgaaaatacagagattctcctactgcctcacccctttcgccgacaagaagacgagcccgttgctgttcggcgcaatggccgacctgtccaggcacaagacgacgaggccgatccaaaccaccgcgatagtgagcaatccggtggagaccgtctactactacgtgccgctggttggcatctcgctcgggcacaagcggctcgccgtgccggcggcgagcctcgcaatgaggcccgacggcggcggcggcacgatcgtcgactctggcagcacggtggcgtacctcgtggaggcggcgttcgaggccgtcaaggaggccgtgatggacgtggtgaggctgccggtggcgaaccggaccgtcgaggactacgagctctgcttcgtgctgccgcgccgcacggctgcggcggcgatggaggcggtgcaggttccgccgctggtgctgcacttcgacggcggcgcggcgatggtgctgccgcgggacaactacttccaggagccgagagccgggctgatgtgcctggccgtgggcaagacgacggacggctccggcgtgtccatcatcggcaacgtccagcagcagaacatgcacgtactcttcgatgtgcaacaccacaagttctcctttgcgcccacgcagtgtgatcaaatctga

SEQ ID NO: 57301 - DNA, 721 bp, Oryza sativa
  Clone ID: PAT_MRT4530_59126C.1
gccgagcctaccaccaaacaccagcagcaggcagcagcaactggggactgatcaagctaaggtgtgggacccacgtgtcagcctctacaacccttctttttcttcctcatacttctccattttctctccattttcctcacgatcctctttatcctctctggtggacaacgcggggcgatggcgacgacggatcctcgccggcctcatcctcctcgacagttgctggaggaggagacggcgagcttccagtcgtcggagtagcgggatccggaggaggcgcgcagcggcagcgggcggcagtggccacgcgcggcgaggcaccgccccgttcgctccgctcgctgcgctgaccagtcgaggtggccgctgccggtctccgctctgctcgccaagggagcagccgaggaggaagggcgggaggggccggaatgcactaacggcggtgctggacaacgacgccaacatctccgccgggaaggccgacggcgacggtgagctcaggcagaagatgcaagatagcgacggcgcgcctccttccccatggtggcggcatgcacaagcagagggaggaagggcggccgcggcgtcggcgatatgcaaagggagggaggggcggcagggcagggatggtgcggctagtggggagagaggagaaaaagttggtggggcccacggatggccagtggctaatggtggccaaaggctggctaagtttggctag

SEQ ID NO: 57302 - DNA, 225 bp, Oryza sativa
  Clone ID: PAT_MRT4530_59127C.1
atggcgccgactcatcacgatgcttctctcgcgcctccaccgtccaccctgctgtcgccgcaccgttccccatgccaccgtcgccatagatttgcctccaggaggtcttgcagccgaatttgcggcttgtttggtggagtcatggaagatggatatactggtgttgatgttcacaatcctaaaggcggcgagcctagcataggctcgtcgggcggctcggcgtga

SEQ ID NO: 57303 - DNA, 547 bp, Oryza sativa
  Clone ID: PAT_MRT4530_59128C.1
tgcagcgtggctgcagcctggttatgattactgttaatgttgctactactgctgacaatgctgctgctgcttctcctcactgtctccacttccttgaacaatgcgccgtcatgcttcttttgcctcccgctgctccagaaagctaggccgcagatcagaaccaccacagtcaatatcaccaccttcctcttatagattcggaatctcatgataggggctcagcctctgtgcgagtggagagaagtttgcaggcgagctgaggagcaattgcaggtgatatgatgtgctcggctcaagaagcgggcccggagaggaagaagtcgtgccggggctaattattggcaaaacgagctcttgttgtaaacattgatccaactggaatgtcactaatggcgaatcaatattccataaggcatgatggttgctcagaggcaggagaagagcaacgaatacgatcctataaaagataaaacataaataaacagtcttgattatattctgggtattaaagccacaatcagaacaaatatatgctttgtatcttttc

SEQ ID NO: 57304 - DNA, 202 bp, Oryza sativa
  Clone ID: PAT_MRT4530_59129C.1
atggagaggttcgaaatctgggctttgaccaaggaagatgatgaagattttaatattgtggcccatttccttacattcattgggaaagaagcatacagccttataaagattttggcacttccagacaaaccgatttcactcccctatgcaactttcaagcaactactgttggatcatgtaaagtatacaaattccgaatgcg

SEQ ID NO: 57305 - DNA, 285 bp, Oryza sativa
  Clone ID: PAT_MRT4530_5912C.1
atggaagtagacgagttcgatgataccgacgagatcgtagtcaatgtattcgacgagatctcctggcgacttggctccgcgtacttcggcttcgcagacgatggtgggtgtgttggtgatgagattcgatgccttgcacccctccccggggtcccttttataccgtggatcatcttgatctccaaggggagcgaccgtgaaaaaggcaacgacgtctcggcctcgtccaagcatgatgatgaggatgagcagccgggcatgaagcacggtgacgacggcaactag

SEQ ID NO: 57306 - DNA, 1377 bp, Oryza sativa
  Clone ID: PAT_MRT4530_59130C.1
atggggctcctgccttccctagcgctggtagccctgccggcctacccgcctacccgccttgccctctgcacgcgctcgccagtgtggggagaggagagagcgccggtggagagaacacagaggttgggacttgggaggataagaaaattcaattttgcaattccacagaactccatcccaactctgggcttggcgagcgcgttggacaccctgtgcggccaggcgttcggcgcgcggcagtaccatctcctgggcgtctacaagcagcgcgccatgctgctgctcaccgccgtcagcgtcccgctcgccgtggcctggtactacaccggcgacatcctcctcctgttcgggcaggacgccgacatcgcggcggaggccggcgcgtacgcccggtggatgatcccggcgctgttcgcctacggcccgctgcagtgccacgtccggttcctgcagacgcagaacatggtggtcccggtcatggcggccgccggcgcggcggcgctgtgccacctgggcgtgtgctgggcgctggtccacgccgccgggatgggcagccgtggcgccgccctcggcaacgccgtgtcgtactggatcaacgtgggcgtactggcggtgtacgtgagggtgtcgaggtcgtgcaagaagacgtggacggggttctccatggaggccttccgtgacccgctaagcttcttcaggctcgccatcccttccgctctcatggtctgcttggaatggtggtcatttgagctcctcgtgctcctgtccggccttcttccgaaccccaagctggaaacatccgtcctatccatcaccctcaacactgcaaactgcctgttcatgatccccttcggcctcggcgctgccataagcacgcgtgtgtcgaacgagctcggcgcgggccgtccacgggccgcccgactcgcggtgcgcgtggtgacgttgttggcgacgctggaagggttgggcatggcgctggtgctggcgtgcgtgcgctacgtgtggggccacgcctacagcaacgaggaggaggtggtcgcgtacgttgccaagatgatgctggttcttgccgtctccaacttcctggacgggattcagtgtgttctctcaggtgtggcgagaggctgcgggtggcagaagatcggcgcatgcatcaacctcggcgcgttctacgtcgtcggcgtcccggcagcctacctcgcggccttcgtcctgcgcgccggcgggttgggcctctggatgggaatcatctgcggcgtcgcggtgcaaaccctgctgttcctggccatcacatcacgcacagactggcaaaaggaggcgaaaatggccaaggatagggttttcagctcatctcttccgaccgatctcgcgacgtga

SEQ ID NO: 57307 - DNA, 1179 bp, Oryza sativa
  Clone ID: PAT_MRT4530_59131C.1
ctaaaattgttactatcgacttttgaaaaattatctggccttaaaattaattttcataaaagtgaattattttgttttgctcaggcaaaggaatgtcaagagctttattctactatttttggttataagcttgggaattttcctatgagatatcttggtattcctatacattttagaaaatttagtaacaaggattggaaaacaggtgaggaaagaattgaaaagaaactcagtagctggaaaggtaaacatatgtcagttggggggaggttggtgttaattaattctgtgctttctagtttagccatgtttatgatttctttttttgagatttcaaaaggagttctttgaaaaattgattattatagatcacgtttcttttggcaaggagataagcacaagaagaagtataggcttactagatgggatattatttgtcaacccaaagatcagggtggtcttggagttcataatcttgaaattcaaaatcaatgtcttttgggtaaatggttgtttaggctcataaatgagcagggcgtgtagcatgatctattgaaaatgaaatatctttatagtcaaaccttaagttgggttgagaagaaataaggggattcccattttcgtctggtcttatgaaagttaagagtaagtttttatatatggattcctagattgtgaataatggtgtacaagtgagattttgggaggataaatgggtagggaattattcttttaaagataggtatccgtcattatatgctatagttcgtagaaggaatgcttcaattgcaaatgttatgtcttctgttccactgaatgtttcttttaggagagctttagtatgatagaatttaaacaattggcataatttatgtgcttcaattgttcatattcatttgtcagaggagaatgatatttttagatgaaattttcatcaaaatggtgtattctcggtttggtttatgtacgtagctttaattaataatggcaacattgagaggaataagattatatggagacttaagatgcctctcaagattaagatttttacgtggcacctacttaaaggggttgttctaacaaagaacaacttagttaggagaaattggcatggtagtttaaaatgttgtttttgcatgagaaatgagactattcaacatttgtttgtggagtgtcact

SEQ ID NO: 57308 - DNA, 383 bp, Oryza sativa
  Clone ID: PAT_MRT4530_59132C.1
ggccccaagggacagggctttggcctttttaaaacccgcaggaaaatttaaatttgcttgggaaagcccccttgcccaaattacttagggttgaacccaacagagggttcccctttaaatcgccccatttggccaatatttttttgaaaataactttaacataactgggccataactggaagcaaaccaacatttttttatgatgggcattaaaacgggaaccaatgcaaccttgttgttttaggcttgcccttccatcttaacaaaaactcccatttggtccctcttagcaagaacccccttttcggccattttaccaacaacagattgggccaaattccatgggaaacaacaagggtttttgcaaactgggtcggggcccc

SEQ ID NO: 57309 - DNA, 1514 bp, Oryza sativa
  Clone ID: PAT_MRT4530_59133C.1
atggctgccatcaaagaggaatccgactacgacagtagccggtcttcgctgacggcgccggactcccgccggagctggatcagtgacattggtagctccagctcggtctcggcgcgctccttcggcggcgacacaccggcgtcgtcatgccggtacaagccccacaaggcgaaccaggccgagtgggaggccatccggcgcctccgtgccggcgccggccgcgtcgggctggagcacttccggctcgtccgccgcctcggcagcggcgacctcggcaacgtctacctgtgccggctgcgcgagccgtggtcatcgtcgtcgatgacgacgacggcgggcggttgcctctacgccatgaaggtggtggacaaggacgcgctggcgttcaggaagaagctccggcgcgcggaggtggagcgcgacatcctccgcaccctcgaccaccccttcctgcctacattgtacgccgacttcgaggcgtcgcactacgcctgcctcgtcatggagttctgccccggcggcgacctccacgtcgcccgccagcgccagcccggccgccgcttcaccgtctcctccaccaggttctatgtggcggagactgtgctggcgctggagtacctgcacatgatgggtgtggtgtacagggacctcaagccggagaacgtcctggtccgcggcgacggccacatcatgctctccgacttcgacctctccctcaagtgcgacgtcgtcccgaagctgctccgccccgccaggagcgccgccgccggtggcaagccgccgctgccgccgccgtcgtcgtgcgtgccgccgacgatccagccggtgctgtcgtgcatcttccgcggcgtgcacaagtgccatcacgccaaggagtgcgccggtggcggcgcggcggcgggtaacaatggcgacggcgacggcaacgacgaggaggcggagaccgagacggcggagcccgaggtggtggtggtggagccggtggcggcgcggtccaagtcgttcgtgggcacgcacgagtacctggcgccggaggtgatctccggccagggccacggcagcgcggtggactggtggacgctcggcgtgttcatgtacgagatgctgtacggccggacgccgttcaagggcgagagcaacgagaagaccctcatcaacatcatcaagcagccggtcaccttccctcgcctcgccggcgccgccgccgccggcgaatgggaggagatgaagacggcgcaggacctgatgttgcagctcctggcaaagaaccccaagaagcggctggggagcaccatgggctccgccgaggtgaagcggcaccccttcttcaagggcgtcaactgggcgctcgtcaggtccgtccggccgccggaggttcctgcgccgccggcgccggcgccgaagaaggtgatgacgatgagcaagaaggagcggcaagagccgtacaactaccgaccggaaaaccacttcgattacttctgaacaagtagctggcatgcatgagcatgatgcat

SEQ ID NO: 57310 - DNA, 289 bp, Oryza sativa
  Clone ID: PAT_MRT4530_59134C.1
gtgtcctcacgtcgctcctgtacccggcggagtgggggtgggtatgacccgtcacatccgagcgtcactcgaggaagggttgtgtcaggcggggggcggcgccggtttccactcgagaaccgtttgttgcttagcttccgggagaaggcacggtttgaagcccaaaaaaagtggagtgggatccccctcctatggaggatttcagatgactggaatcatgtacggagatgactacattgtatatcttgtggatgatactccaagaaccattaaagaggcatattcatct

SEQ ID NO: 57311 - DNA, 775 bp, Oryza sativa
  Clone ID: PAT_MRT4530_59135C.1
gtcgagctgccttactagatcgttctagccgctgcagagaatagtatattcttagcctcttaggccatgaagtgtttaccggttgctttcaatcttgctctcgtgttcgttctggccattccattactcctcgaagctcgaccacttgctagtggtgatcaagattatgaaaatctccctgtacttaccacagtcacagtagaggaaaccacgcaggttatggtggactacttggacctaaacggaagcagtagtgacggtgaggacgacgaagctgcccaaggatcgccgccggacgcggcgttgcgccggccggcgcgcacgccgccgtcgccgcaggggcgttacccgcctcagcatcagcagaagccggcgccctgtagtggtggcccagctggggttgtaggcgggcgcaggccgtctgctccaccggcgccccgtggacggagcccgccgcattgggtccggtcaagtgatcagcaaggcccatggctgctcgacgtattccaccgcctgctctgtgcattaactgggctgacaggtcagacaggtagtatgggatatgttgaggtttggaaaaccttccggcatgtacacctgaacgaggagtagatattaacgtgtgtgcactgtgtacgtgttgagatgcatgcacacatacgtgcacgcgcacggtgatcaaccgaacgccctttcgcgtttcattttgtacgcacacagtgtcactgctttcctttttatagaaactttatactcataaaaaaaaaaaaaaaaa

SEQ ID NO: 57312 - DNA, 1044 bp, Oryza sativa
  Clone ID: PAT_MRT4530_59136C.1
gccacgctcggctgccgcgcggacccgccaccgcgcttggccgccgcccattcctcctccgcttccttccttcgtgctcacccgccggccgcgctcgcctgccgcctcccaccgccacacggacccgccgcccgtgcaacgccactctgcctgccgctgcgccacctgcctccgttctgcccacaagccgcgctcggctgccgcgcgaacccgccgccgcgctcggccgccgcccattcctcctccccgtgccattcctcctcctactcctccgcttccttcctccgtgctcgcctgccaccgctcggctgccacgcgaacctgccacccacgcatcgccgctccaccggcctcactcactctgaagaagaagagaaagagaagagagaaaagagagaggagaagaaaagaaaagaaaaggaagatctccggtggcacgttgggctcgtcctcgaacacttccaaccccgcgccggcgacccttccctccgccagcgcacgcaccagctccgcctcgtcgatgttggcgccgcgcaccacgttcacgaccacgcccacagcgtgtccagcacgccccagtccatgatgagaagggagaaggaatcacaaccaaagctgatgcataagcgggcgacgacgcggtgctcccccagcgcgtcaagcacgcccccagtccagatgtgccgtgtctccgccgtcagcacgcacgccacgacgagcacgtcgaacagggccgacagcggtggagtagaccccgccggcgttgacgacctgtacgccgcgacacacgcactcgcggaggtcgatgtggttgatccccgcgctgatggtgatgatgcagcggagcgacgggacggcgtcgaggagctcggcgccgacgcggatgggcccgccgccgaagacgaggacgacgcgaggtgggtcggcgtcggcggccaccgtgttgagtaatgcgtggatgggaagcgtcggcgccgaggagaggggagagagaggatagagagggagtgaggatgacatatggggccacgtgggtcccaccat

SEQ ID NO: 57313 - DNA, 333 bp, Oryza sativa
  unsure (1)..(333): unsure at all n locations
  Clone ID: PAT_MRT4530_59137C.1
acaaaaaaccaacccaaccgccgccgcatcgccctcgttagaacgatggccgcgtcgcgctgcaccagaccaccagcttcctcggcaccgccctcgccgggatgagctcgtccgccgcgtcgggactccggtggccgcatcaccatgcgccgcaccgtcaagagcgcgcccagagcatctggtatggacctgaccgtccaagtcctgggccgttctcgagaagcgcatcgtacctnaccggagagttcccggagctacgngtggncacggcggggtatcggcgnccgagcgtcggaggacaggagtgagtntcatcggtggcgtgtgggcgtg

SEQ ID NO: 57314 - DNA, 1132 bp, Oryza sativa
  Clone ID: PAT_MRT4530_59138C.1
tcacccgcccctgcctcgctccaccaacctgctccgctccgcctcaaagcggtggccgtcgacgtcgacccacctcgcgtcgtcctcgtcttcggcggcgggcccatccgcgtcggcgccgagctcctcgacgccgtcccgtcgctccgctgcatcatcaccatcagcgcggggatcaaccacatcgacctccgcgagtgcgcgtgtcgcggcgtacaggtcgtcaacgccggcggggtctactccaccgatgtcgccgactacgctgtcggccctgttcgacgtgctcgtcgtggcatgcgcgctgacagcagagacacggcacatctggactgggggcgtgcttgacgcgctgggggagcaccgcgtcgtcgcccgcttctgctatagggagcagctggatctccatcgggttgcagctgcaaatgcaaaggaaaagagtgttcatcaaatgatgatgccttttcttttctggggatgtctttcttttgttgatttctttttcgaccaccaccgacctcgccgcgagctccaacgtgctcgtcgtggcgtgcgcgctgacggcggagacacatcacatcatggactggggcgtgctggacacgctgtgggcgtggtcgtgaacgtggtgcgcggcgccaacatcgacgaggcggagctggtgcgtgcgctggcggagggaagggtcgccggcgcggggttggaagtgttcgaggacgagcccaacgtgccaccggagctgagggccatggacaacgtggtgctccgccggctagccgctccgccccgcccgtcgcctgctctgccggctgccactcgccccgctccatcggccggagagaggaaagggatagagagaagagggaagagagaggatagacagagggagggaggagtgaggatgacaggcccggcgcaagaccgctacaatccatcctccaccgtcgtagataggaggcggaggttgaggacgtgcgaaggtgatggcacgttgacaaaccacgccgactggtggcatagcagccgacggtggcgcctcgacccgctgtggggagcgagctacgcgacgagagcaggcggcggcagggcatgcggcatagcagccgtcgacgcaatggcgggcctacagtag

SEQ ID NO: 57315 - DNA, 876 bp, Oryza sativa
  Clone ID: PAT_MRT4530_59139C.1
atgctggaagagaggaagctgttcgtggcgggcctcccgcagcagacgcgggagggcgacctgcggggccacttcgcccggtacggcgaggtggtgcacacccgggtggtgctcgacatggccagcggcaacagccgcggcttcggcttcgtggagttcgccgacgaggcggcgacgctgagggcgctcgccgacgacgagatgcccaaccacgtcttccgtggccgcaaggttgatgttaagagagccgagcgtagacatgatcataagcaaaccagtccatctattaagaaccaaaacgacagcgtgcagaaaaatcaatttatttttcaaaagaaggtctttgttggtggtttgcacgaaactgttacagtgaaggacctcataagttattttgagaaatttggcaccataacggatgctgtggtcatgcgtaatagaactacaaatagagcaaggggatttggtttcatatcttttgattcacatgaagctgtgtgcaagatactactaaataggttccataatttaaatggaagggatgtcgaagttaaaattgccgtcccaaagagtccaacctactcagaggcaaaatattatcacatgagaatggatatgagtttaagtcctatcacttattatgatggaatggtccatgtccatccatacacaccatacacatttggctgtgttacacctcttgctcacttaactcattcaggttatggttatggaggacctattgattattcatgttatgcttatggaggaccaattggacatcagcatgatcttgtgggttcttactattatgctaaagattatagcaaaactactcctatcgacctcgataccacagataccacaaagaaatga

SEQ ID NO: 57316 - DNA, 2580 bp, Oryza sativa
  Clone ID: PAT_MRT4530_5913C.1
atggctgactggaacctaatacgcgaccagaagcgatgtctccatccatttaaggtttttttcgtgcggacaacaagcagggcatcgttctgttcacggtggctggctggctcacttctcgtggcaaacacgaaggggcgccagaagggaggcggcgccggtgcggccccgcggctaggagacgagctgccgcaagagatggatcggcaatggatgtacgctaaccggcggtcccaagagtttattgacagcgtgcactattttttgagagtggccgaagctaacaggcaaaggggttttatttgttgtccatgcaataagtgtaagaatcagaaggagtattctacaaccaggactattcatttccacttgtttgagtcggggttcatgccaagctataattgttggacatcccatggagagcaaggtgttgaaatggaagaagatgaagtggaagacgacaatatttcggactttgctcagtacgttggatttaaaggaaatcaaacaggcgaggaggaaatggatgctgatggtaacgacgttacggatgatcttggtcagatgttgcaggacgccaaggagaactgcgaaagtgaaaagggagcctataaattggacaagatgttagaggaccacagaacttcgttgtacccaagttgcgagcaggggcacaaaaagttggataccactctggagttcttgcaatggaaggcaaaaaatggggttagtgacaaggcatttggcgatttattgaaactcgtcaagaacattcttccggagggaaacaaattgcccgagacaatgtacgaggctaagaagattgtctgcccgctaggactggaagttcagaagattcacgcatgtccgaatgattgtatcctatatcgcggtgaggagtatgagaacctagaagcatgccctgtttgcaaagtggcgtcgggcatggccatcccaacggacccttcaggtacttaccactgcaggccgattccagcaggatattccaaggtcgaagttgagttggtcgaaggcgcgtacgaggatctcgagctggattaccctggaggagaaggtgagacgcatctacgagacacaagccatgccattattctatggcggcggtacatcatcctccctgggcgacaagcggcgtctcgtgcaccatctcctccggctctgccatctcctcctcaggatcctgcaccgtctcctcctcatgctccagcaccgtctccacctcaggctcctgcaccgactccttctcatgctccagcaccgtctccacctcaggctcttgcaccgactcctcctcaggctcctgcatcgactcctccttggtctcctacaccgactcctccgcaagctcctcttctggcaccttcaaagtcaaggaccccccaagctccactgcctgcccacacaagggcaacgaagaaggcgaaagttgacaccgccaagaacaaggacccggggtacgattgcacgcaagaggagcttgacgcttacgtggcatcagaagtcaagagacaattcaagcctcgaagtccagaaaagaagattcatatagacccgagtgtcatgaacttcttcaggggtatgtctgcacctgccaaggaggccattaagctatcggactatgagcgaacgctgaagaaagcatcttctggaaagtccaaatcagtccctcagcttggagagcaaccaaaccaggagatcgagccgttggtgaccggtaaagaaatgacgatagaagaatttattactgatcccggtctaactacggatcaattgctaggagtcgcaccaatcgaaaaggcggaagtgaaatacatgtacgaactcggtaaaccgcttgtcaagcctgagctgctgcagtccctacccacacaaatgtacaagttccatcagctgtacatggagatgagcgccaccggtagagagatgatcggagcgaggatcagggacacggacttcttgcaaggagatgacattctctggatcaatttcaagggaatctacgaactataccagctggacgccctcgacgtctctattatgagttgctggattttaatggagattcaaagggcccgatggcggggggttttcgatattggattcatcgaccctcataaagtaaacgtcacaatgctcgaccaatatccgcaagccacagaggacaatctcgtccatctcctgaaggcacagcattacaagacgttcatactgttgccgtacaacacagaattccactgggtgcttttactcttcgacctgtcggcctggaccgtcaactgcgcaaagcaaaagaagggaactaacttgtgcggctattacgtgtgcgagtattgccactgccttgcagaccaaatcatcaccataagagagctcaattttattcgcatgagggataacctgaccacgcacaaggaatttatcgcggcggttcaagaacaactcatgggattcatcaacgaacaaatccttgatcccaagggtgaattctactacgacggaaatacaattcataggtccttagcttctgagctagcgactactactacgtcgaaatcgtag

SEQ ID NO: 57317 - DNA, 1932 bp, Oryza sativa
  Clone ID: PAT_MRT4530_59140C.1
ggtgtgtgttcttgtctcgaattttaatgttatgtttactcattttttgaaaggaggtgtgtttactcattcatataaaaaaaaagttacactggtgtacaaaacccatactacagtgacaatgctgctggagtacaagcatccataaatagaagttattagaccagacatttgaccatgtaaggcccctcaagttcataacccagtttacggtagtagtggcgagtcccaactcctgatataacagcgattttctttgaacgatgctccttgcgagcaattctttctgcttcttccatcaaaagagtaccataaccctggtgttgtagtttgtctgcatcacgaccatgtacagggactgcagttccatatacatgaagttcacggacaattgaacacctccctactagctcagggcatgtaacattgcggccacattttcgcaatcgcagcagaccaataaggatatcctgctgtgtatcctcgtatgagagaaaggtctcccagccctcatttgcagcatagtcacgcctaacaagctctacttcgtcaggtctaattttgtgatggatatcctgaattcccgcctcacgagttctaacatctcggcacttcaagcctaaatcttccattcgagccaaagcaagctcacgaagattacctttttcaacaccagaagtaacaagaggcatagggatatctctttgtacacggtaaactcgtgtccaaggtggtaccatggatagaattcttgcaacaatatccaccagaagttcaggtggatagtttcggtatctgccagttttccagagctcataaaggccagttccacgaatcacaagagttggataaatctttagaccatcagctcggaatgctggattttcaaaaaattctcggaaactttccagatctctttcaactccaacattaggtaaatctggcatcatgtgggcgaccaccttaaaaccagcatctttagccaaacaaaagcaatcagcaacagcagctacagtgtgacctctgtttgtgtcacgtgcaacatcctcgtatgtgctctgaacaccaatttctaagcgggtacaaccataagatagcatctggcgcaaatgaggccccaagcaataatcaggtctcgtctcaattgtcatgccaatacatttgactgcaccatgttctgaataacaaacagcctcttcaacattagcagaagtgtgtcccgataaggcatcatgaagatttctaatgaaataatcccgataatcagctggtaatgacatgaaagttccacccatcaatatgaattcgaccttgtctacactatggcctagccttttgagctgatctatcctgcttctggcctgcacatatggattgtaccttgctcgaatggcgcgcatgctggtgggctcgtagccggtgtaggactgggtgctgtactcgaagtcggagtcggggcctccggggcagtacacgcagatgttccccgtggtggcgatgtgggggcaccggtgcggcttcgacatcacggcgaccacggcaatgcccgacgccgtgcgcacgggcttggcgcgcagccttgggagcagcgcggcgcggtcggcctccggcaccgccgcgatcatctccaccagcttcggcgcccgcgccagcccgtacctccggcacgcggccgacttgagcgcgttcaggtccacgtcctcccctcgccgcgagagctcccccatcgccgacacgatctccgcgatggcccgcacccgcgcctcctcctccgacagccccgcggggagcaccactccccctctccccggcgccggcttcctcctgcgcggctgctcgccgccgccgccaccgccggcggcggctacggcggtggccatcggtggaaagggttttgggtctctcggtgagagctcgggatgtagcgtggcg

SEQ ID NO: 57318 - DNA, 216 bp, Oryza sativa
  Clone ID: PAT_MRT4530_59141C.1
atggacaaagtctggaagtccaaagagaaggcccaaatgaccaatctccaagaaggccaactacacgcagcccaactggaagatgggcctctgtttggcccaatgtttgtaggcggccccgacgtcgatgtcgatgagctaccggacgcttcgctgggagcgctcgtcctcgaaggagtccatgttcgtggtgtcgacgtccacgaagtagactag

SEQ ID NO: 57319 - DNA, 789 bp, Oryza sativa
  unsure (1)..(789): unsure at all n locations
  Clone ID: PAT_MRT4530_59142C.1
cgggctgcaggaattcggcacgaggaaaaatataagtgttttggaagactgcaaggaccatggatgccattcgttgttggggcttatcccatagtaaaaatgtaaacaagagctttggcaaggttagttgtcactaatttctcttccatgattttgctgcacttgcatgtaatttcgaggattgggttcaatccatatcgtttagtgtgtgcagcaaaattcaagtcagcttgtagcatgaaacatatgtaaaggtgccttgaaacaaaggacaaggataggtgcctaatcacccatattagcacctacgcaatatgaatgattgagagtaattttctctaggtagaaaatgtgcagtacatgggtttgttgtattgtttagttatatgcttttggaagctttttcaaagttgttcccttggcgatacatttaagtgtacctgctgtttatattaattattttctctcaacacacttaatgacactaatgatttgtaaattgcgaatatcattattttctctgctgatatttgcatccttcatgtcagtggcagatgctcatggcatgtgtgatatggagttaggcatgaaaaaattataagattactgtgatgtttagtattgcttggagtgactaaatcggattaagtgattgacaaattggcaaataattgatattaatagagtagctcactccatttttatctgacttttttttcttaggngtaatcgaatgcctatgntcaattttgagttcatgtatatttatacctatttgtgacttctatt

SEQ ID NO: 57320 - DNA, 329 bp, Oryza sativa
  Clone ID: PAT_MRT4530_59143C.1
atggctggagagccacggtgcaccaaggaggcagagacgcccgctgctcagatccaggccctcctcggccggatccggcgaggagcggggatgcaaattggcctccaactcaaagagggagtgtcgcggccagatctgacacccctgcggacggatccgcagccgccgcggttttcgcgccagtttgcggacgactacatgacaccgagggtgacggtgttgcgggtcagcagcatggggcggtggcgggttgtggccgtggaggagggagaggcagccgtggagggagagacggagtcaactatggatgacggggctttcgtcgcact

SEQ ID NO: 57321 - DNA, 804 bp, Oryza sativa
  Clone ID: PAT_MRT4530_59144C.1
tttccgtcgtccgtaggaaagaaaaaaaagcgagaaaacagaaaacaaagcgagaaaaactgtaaaaaaacaaaaaaaaaatccgactcccgtgaaaaatacatccgactccctttgagttcacgtaaaaagaagagaaaaaggtccgtgtgcgattaatatcaggcgagaaaaaactagggaaaaaacaaatccgatcccgtgtaaaaaaaggccaaaaaaaacgactctgtccgataaaaaaaagaatcgggtaaaaaataaagaatccgattcggtgactgcagtaaaagaagacgaaaaaaaccgagggaaaaaacgaatccgatccaatgtaaaaaaaggcgaaaaaaataaaaaaaaccgactgtccgataaaaaaaaagaatcgggcgaaaagaccaggcgaaaaaaaatcagggagaaaaaaccgggaaaaaacaaatccaatcccatgtaaaaaaaggcgaaaaaaaaccaaatctgtatgataaaaaaaatcgggcgaaaaatagggtaaaaaaataaagaatccgattccgtggacgtgataaaaaagggcaaaaaaaccaggtgaaaaaaaatcgggcgagaaaaaaccggggaaaaaaggaatccgatcccgtgtaaaaaaaggcgaaaaaaaaggactgtccgataaaaaaaaaagaatcgggtgaaaagaccaggcgaaaagaaatcgggtgaaaaaaaggcaaaaaaaagaatcgattctttggacgtggtaaaaaaaagcggacaaaaacgaattcggtacaattccaaaaaaaaggaattatatgt

SEQ ID NO: 57322 - DNA, 437 bp, Oryza sativa
  Clone ID: PAT_MRT4530_59145C.1
agagaaatggcggaaaaagcaacagcttttgccattccatgtgcgaggaactggtcgcacatgcatgcttccacgtttacacacacttgttgaccactaatattctttctgggacaggacatgcatttcgacagttcaggaaagcataattattctagatgcaactgccgttgaaaacagttataccacggcattattggatctgactggatgatacattttaacttgagggcttagcactgcctggtgacatttcggactagagctgctcgactgactcaataagctgcactgtcgctgtgcgtgcatcaatcaaatccacgttcatgacgctcttcacgactatgttgagacctcttcagccaaaagaattactccaatgtttacaatgacatgcatgccatgataggagcatgcgatcaccaatgctgcactgt

SEQ ID NO: 57323 - DNA, 317 bp, Oryza sativa
  Clone ID: PAT_MRT4530_59146C.1
ttgcaaccacaacgagcatctggagctccgcctctgcgtgggagggaaacaccaattaatctacgacgacctgaacctgcagtacaccgactgagaggtgacggcgcacctttccgcttcccaggcttcccttgacgatgcaagtaatacgggtgctgctggtggtggacctcggcgaggggtgtcgcgcgaacctggcgccaccagtctccccgccggccgtggacccgaggctcatacgaactggaggggctgtcgcactggcgcggaggctgttgcgcgtgttgatgatgatgactcatcggggacttcagcga

SEQ ID NO: 57324 - DNA, 223 bp, Oryza sativa
  Clone ID: PAT_MRT4530_59147C.1
tgtgtaccaattcgttgacatgtacggctcaaacgtttactgctacatcccaatctactcgccggaggaatggtctcccatctgtgacacctacgttggtggaaccaccggtcttctgatctgtgtcgtgaccctctacgggctcctcggcggtggttcccttcttttctacaacaccttttcttttttcttttaaattttcctcaatttctgtttatttatt

SEQ ID NO: 57325 - DNA, 1187 bp, Oryza sativa
  Clone ID: PAT_MRT4530_59148C.1
cgctttatcccaccttgtctccacacaaatgtcgccggcgcggcgcctcgccgtgctccgctcccacctccagcccgccgcccctgccggcgaaggcgaccgggacgtcgtcgtgtgcgcggagcaagccgcgggggtctcgacctccccttgctccgccgccgccgccgggggcgggcgggaagccgaggggaagagctgcgtgttctgccggatcatccgcggcgaggcgccggccttcaaggtctatgaagatgatgtatgcctgtgcatattggattctcatccattggcgcctgggcattccttgattattccaaaatgccattttccatcactggaagcaacaccaccacatattcatttaacatggtggttaataatggagcagctgcaggacaagttattttccatacccatttccacataattcctcgaagatctggcgacaagttgtggcctacagagagtttgagaaggcgctccatcgagcctaacgaaactccaggccttgttagctgcatcaaagagcagctctattcttcaccagaaggctgtaaagccgaaccaccatcttcactgcccaaggaacggtgacaccaaagctgtgatccagtccggtacataatgctcctcagttgcatattgaaatcaaattgccccatttgggagtgtgggattcagtttcagagttggagggtgtatggtaatttatccttgggcgttgttgtacttgtaatagtttctcataggtctgcaactgtatctggtgtataaatcagacaacaaggactcagtacagcattgttatgccctgctgtcgggtgtctgcctgtctggtttcctcactttctggagtggggctgaaatccaacagccatgttgtactgtgtttggcactttggctggtagtggatgatagccatggcgaagctgaagatttgtggacagagcatggggttgtgttgggtttgatgcgtggaagtgtgtttggactctcacacagcagcggccacgcggattttgttgtgggctcgatctgcttctccagttgtgatgcgtagcatcatttcacttatgtttataggtacgattcatcgtatgagtatatctattcttcataaaaaaaaaaaaaaaaaaaaaaaaaaaagggggggcctcgtgccgaattcggcacgaggaccacc

SEQ ID NO: 57326 - DNA, 2724 bp, Oryza sativa
  Clone ID: PAT_MRT4530_59149C.1
atggacttgatggctgtcctcaggagctccgcctcgttcatgtactacttcgagattgcccccatcccgctcagcccaaactgcaatccaatgaacgtcctaccaagatttgcaaatcctatcaagaaatgggatatttgtcatgatggcgacgaaggtggagaagacgttgacgagggcggtagattatggtcgccgccggcttcttctgctcctactgctgcggtgttgaaggcgggaggagcgacgcgggtgggggaggcaacggcgttgtcgctggacgcggtcctgcacgacacatgcatcatctcctcaaaccatgccttcctcctctccacgtcccctgacgcagccttaccttcttcctcctccatgacggtgacgacggacgcgggctgcggcgcagcctcagaggagggggatgtgagggttgggagcttgtcgccggccctcgaccaggcgacgatgatctgcatagacaactcggagtggatgcggaacggcgactactcgccgtcgcgattccaggctcaggccgacgccgtcaacctcatctgtggcgccaagacccagtccaacccggagaacacggtgggcgtcatgacgatggccggaaagggcgtgcgcgtgctcgtcactcccaccagcgacctcggcaagatcctcgcttgtatgcacggacttgaagttggtgctgaagcaaatttggctgcagcaattcaggttgctcagctggctctgaagcatcgccagaataagaggcagcaacagcggattatagcttttattggaagccctgtgaaatacgacaagaaagttttggaaacaatcgggaaaaagctgaagaagaataatgtggctcttgacatcgttgactttggtgaaaccgatgatgataagcctgagaaactggaagcgctaatctctgctgtgaacagtagtgatagcagccacatcgttcatgtccctcccggtgaaaatgccctttccgatgtgcttataagtactcctatcttcactggtgaagaaggtggaagcggttttgctgcttctgcagcagcagcagcagctactggtgcagctggatttgaatttgatgtggacccaaatgtagatccagaattggcactcgccctgcggttgtccatggaagaagagcgagcaaggcaagaggctattgcgaagaaggccgcagaagaatcttctggtgctgaaaataaggaccatgcctcaagctcaaacgctgattctgttatggcagaagcggaacctgcctcaaatgctgctgatgataaaaaagatcagccgaaggaagatgatgatgctcagctactacaacaggctcttgcaatgtcaatggaggagggttcttcaggggctgcagcggctgatgctgctatggcagaggctgctgtagatgaccaggacttggcactagctcttcaaatgtctgtccaggacgcaggcgggtctagtcagtctgatatgagcaagctccctggtgttgaccccaatgacccctctgtgaaagatttgctggcatcattgcatgggcagggcgaggcgcccgaagcattggagatatctggtctcgctttatttggtcatggattctacttatcctcgttcgggatcttctgccaacctgacattagtttcttgaacttctcccccttcctccccaccgggggaattgcgcctgatgctaatgctcatgtgacgtcgcagacctgcctggacaccggagtcgatggaggctactacacgccggcgagtcatctcctggaggtggaggggctccgtattctccttgactgccccatcgacctctccgctctcacggcgttctccgcggtgcccctcggcgcatcgtcctcctccggtgatgcggaggacctaatccgcggtgtgccctactaccggtcgcctaccgcggttgcggccgccaaagcaggccacatagacgccgtgcttgtgtcatccgctacggggctgcttggcctcccgttcctcacgcgattccccggatttgcgaacaccaagcaaggagttgatgctgagttgactctaaaacctttcatgcctctggcgatccaggtccttgggtgttctttcctttctggaataaaggtggggaaaattgatccattactgggattgctgaaaccaaagctcatactgtttcctgaaggtcagaagtcgttgtgtccagccacagataagcaaccatggtcattcctgtattactcaaaggggaaaacaatcgaggtcccaaatatgcgggaagaattcgaggtgcgcatgacaactgaggttgcctttgggttgcaacctaggcagctggacaagaccacagctgttgcgaggttgaaagcaaagctccttctaagcaatggacaatatgtgctagctgctgcaaagaacgctgattactctgcaccttcagatcgtgaacgtgtaatttcgatcactagtccaggagaagccctggtgaagaacccattgctagtccatacaagtcccttgcccaccaggccagcacgagtgcgcaagcgcaacgatgcacatgccatcaatcaccgccccgtgcatccgcatccaaatgctatcatccaacacgggacacggctctcggacgccgccaaccatacggagctcggagccagccaacggatgctccagctccagatcaccatcgacccgaccaggggcctagatcgctag

SEQ ID NO: 57327 - DNA, 594 bp, Oryza sativa
  Clone ID: PAT_MRT4530_5914C.1
atgctagttgccgtcgtcaccgtgcttcatgcccggctgctcatcctcatcatcatgcttggacgaggccgagacgtcgttgcctttttcacggtcgctccccctgccggcttaattatattgtcaccatcatcagcgatgaagtcgcacaaatacattatatattattggtattacaaatttaaacaagtatatgctataggtgtcatggttatggataagacatacctcctatcctacgacttatggaatatacgagtatggtataccctcacgtacacgggttatttccgtatgcgtagtaggaatccgttacaaattataaaaaatatctctacgggtcaagtgatttccaaagtcctactttcattcttacttggagatcaagatgatccacggtataaaagggaccccggggaggggtgcaaggcatcgaatctcatcaccaacacacccaccatcgtctgcgaagccgaagtacgcggagccaagtcgccaggagatctcgtcgaatacattgactacgatctcatcctcgttccaacgtaccccaataccctaatcatccggtttacgagtatcactcgtcgacaa

SEQ ID NO: 57328 - DNA, 2064 bp, Oryza sativa
  unsure (1)..(2064): unsure at all n locations
  Clone ID: PAT_MRT4530_59150C.1
cgccatccggctgccggggcacacactcaagccagctccagccacacgagcctagttcaggtagatacaatggcgtccaccgcctctttcatgctcgccgtcttgctggcggtggccgtcgcggcggcgccggcgagggcggtgcgatgcccgccgagcgacaagcaggcgctgatgagagtgaagcagtcgctgggaaacccggcgacgctgtcgacgtggtccctggcgtcggcggactgctgcgagtgggaccacgtccggtgcgacgaggccgggcgcgtgaacaacgtcttcatcgacggcgccaacgacgtccgcggccagatcccgtccgccgtggcggggctgacggcgctcatgtcgctgtcgctgttccgcctcccgggcctctccggccccatcccggcgtgcctcaccgcgctctccaacctccagttcctcaccatctcccacaccaacgtctccggcgtcatcccggactcgctcgcgcggatccgcagcctcgagtccgtcgacctctcccacaacagcctgaccggccccatcccgaactccttctccgacctcccgaacctccggtccttgaagaacaagctgacgacgatgatctgcatagacaactcggagtggatgcggaacggcgactactcgccgtcgcgattccaggctcaggccgacgccgtcaacctcatctgtggcgccaagacccagtccaacccggagaacacggtgggcgtcatgacgatggccggaaagggcgtgcgcgtgctcgtcactcccaccagcgacctcggcaagatcctcgcttgtatgcacggacttgaagttggtgctgaagcaaatttggctgcagcaattcaggttgctcagctggctctgaagcatcgccagaataagaggcagcaacagcggattatagcttttattggaagccctgtgaaatacgacaagaaagttttggaaacaatcgggaaaaagctgaagaagaataatgtggctcttgacatcgttgactttggtgaaaccgatgatgataagcctgagaaactggaagcgctaatctctgctgtgaacagtagtgatagcagccacatcgttcatgtccctcccggtgaaaatgccctttccgatgtgcttataagtactcctatcttcactggtgaagaaggtggaagcggttttgctgcttctgcagcagcagcagcagctactggtgcagctggatttgaatttgatgtggacccaaatgtagatccagaattggcactcgccctgcggttgtccatggaagaagagcgagcaaggcaagaggctattgcgaagaaggccgcagaagaatcttctggtgctgaaaataaggaccatgcctcaagctcaaacgctgattctgttatggcagaagcggaacctgcctcaaatgctgctgatgataaaaaagatcagccgaaggaagatgatgatgctcagctactacaacaggctcttgcaatgtcaatggaggagggttcttcaggggctgcagcggctgatgctgctatggcagaggctgctgtagatgaccaggacttggcactagctcttcaaatgtctgtccaggacgcaggcgggtctagtcagtctgatatgagcaaggtgtttgaagacagatcatttgttacatccatccttaactctctccctggtgttgaccccaatgacccctctgtgaaagatttgctggcatcattgcatgggcagggcgagcaagagaagaaggaagacaaatcagacaagccagaagatgagaagaaataaatcaactcctttgtgtcttccttgcaaccacctcttgatcaatctcgcaggcgcccgaagcattggagatatctggtctcgctttatttggtcatggattctacttatcctcgtgtaactgtacttcaattaaaaaacttaaagggataatggtttatcacttcttctgtcgtcattttacgatttgcaattgtttactgtcgtggaatttacttattcgcttctatataaaaagtcttctttcccaaaaaaaaaaaatnagttcat

SEQ ID NO: 57329 - DNA, 720 bp, Oryza sativa
  Clone ID: PAT_MRT4530_59151C.1
cgggtctagtcagtctgatatgagcaaggtgtttgaagacagatcatttgttacatccatccttaactctctccctggtgttgaccccaatgacccctctgtgaaagatttgctggcatcattgcatgggcagggcgagcaagagaagaaggaagacaaatcagacaagccagaagatgagaagaaataaatcaactcctttgtgtcttccttgtaagatttcagtatgctgtcttacctccatatccgatatgcatgttttgcatatagtctattcagcccttgatgactatcgttctggttgtacgatatcttctactataaactagaagctggcgagttggctgcataaatttgaattttggagcagcaagttatgtcctcaagatacttgcatgtaaaactggtctatgtgtgcagaggttctgtcgctctgctctttttaggactgtcgtttcattgttcacaattatgattagcatattactgtttctatgcaaaactaacgtgttaacgtgtgcaatttgcatcaaagtttaccatttaccccacgcaacttatcaaaacgttgcgcgacctcgcaggcaaccacctcttgatcaatctcgcaggcgcccgaagcattggagatatctggtctcgctttatttggtcatggattctacttatcctcgtgtaactgtacttcaattaaaaaacttaaagggataatggtttatc

SEQ ID NO: 57330 - DNA, 512 bp, Oryza sativa
  Clone ID: PAT_MRT4530_59152C.1
ctcacgtttatgcatgagcatatcgatgaccatcgtaacaatcacgttactagtcgtgccactggcattctcgccgatatcctaccggatgttccatgcggttgctcctcctggtgcgggccggcgtctcggtcggcctctcggtgcgcctcttcgtgcgcgtcctggtcagcgagccggacatggagggagagctaggcttatgtttaggcgaaggctcaggcaacggctctggcagcgacagcgagaagcacagcgataatgcgggcgacgaggagggcgaagaggaggaggaaaagaaggaggagaagatgtggaaggggcacaacatgacccacaactacaccgttgtctacgcagctgtcggagcaaccggggaagtgaagagggacatgaagagaggcatacacacatgatgtatagcaggagtgatactgtacttggtccagaattaactccacactaaacttgtattgagatcagctattgcatcatgtataggtgcaggcata

SEQ ID NO: 57331 - DNA, 1682 bp, Oryza sativa
  Clone ID: PAT_MRT4530_59153C.1
gcgatggggggctcgtacgagctcgtcaggacggacgacgcggcggggcacgtcttggatctggaggccggacgctgcgccgccgtatacccaaagggatggtcgcctggccagacaacagaaaccaacggcaagggattcaggtgtccgtggttgatgttgccgaggggcaatggctaacgtgcgtgcatctttttatgcccgaaatgccgcttatgatcctcgtggacgatgctggcgcgtttcttccagcaattaatcactcgccatgggacggtgtaaccctggctgatttcgtcatgccctttttccttttcattgttggagtcgctctagctctagcgtacaagagagtgccaaacaaattggaggcaaccagaaaagcaattctccgtgcactgaagctgttttgtgttggtcttgttcttcaaggtggattttttcatggtgttcgtagtctaactttcggaattgatatggaaaaaatacggttgatgggtatactacagagaattgcaatagcttacattgtgaccgcgctatgtgaaatttggctcaagggagatgatgacgtagattctggatttgatctgctaaagagaaaccgttatcaactgttcattggcctgatcgtcatgatcacatacatgggcttcttgtatggtacctacgttcctgactgggagtatcggatatccgttcctggttccacagagaaatctttctttgtgaaatgcagcgtaagaggcgacactggaccaggctgcaatgctgttggcatgatagaccgcaaaatcttgggcattcaacatctgtactgtcgaccggtttacgcccgatcaaagcaatgcagtataaattcaccacaaaatggaccacttcgtcctgatgctccttcatggtgccaggccccttttgatcctgaagggcttctcaggctacaacagtacaacatttcctttgcaaactttgctaaattctcactgttctttcttgattctcgtatcagctctgtgatggctatcgtcacctgcttgattggtctacaatacgggcatgtaatcgtacatttccagaaacacaaggagagaatcatgaaatggctaatcccctccttcagcatgctaatccttgcgttctcattggacttctttggaatgcatatgaacaagccactgtacaccgtgagctacgccctcgccaccgccggcgccgcgggcctcctgttcgccggaatctacgcgctggtcgacatgtacggccaccggcggccgaccgccgtcatggagtggatggggacgcacgcgctcatgatctacgtcctgatcgcgtgcaacatcctgcccatcttcatccacggcttctactggagggagcccaagaacaaccttttgaggttaatcggagttggggcatgatccatggatgcagcagctagaagcctagaaggcacgtatagaggcgtatttaggacactatttggacagagacaaacgagacatgtgcaggcctagttttgctacaggcttagttattgttgcacagattcgttctctctgagagctctttgtatatggtaaacaacgagcctgtgtatatcatgacaatacgatctaaaagaaatatatagtacagaaaaaattttcagctgcccaaaaaaaaaaaaaaaaaaaaaaaaaaaa

SEQ ID NO: 57332 - DNA, 342 bp, Oryza sativa
  Clone ID: PAT_MRT4530_59154C.1
aattatccacaaaactcacataataattattcttcccaaccgaggttggtgcaggaccccaaacatctgaatgaataagctttaaaggagcactagaacgacttaaagacttaaaataaggaagttgatgacttttccctttctgacaagcatcaccaaccgaatgcttgtttgactcactaacacagggtaaattattatgactcaagacttgttgaacaatgactgaggacgggtggcctaggcaacaatgccactgcgaaggaaaaagcttgatagctgaaaaaacttgtttatttgggaatgatttcagaggataaaggccttgctaacatttgcctt

SEQ ID NO: 57333 - DNA, 1125 bp, Oryza sativa
  Clone ID: PAT_MRT4530_59155C.1
atgtcgaagcggcacagatccgatgacgacggcggcgagctcgagtccaggcggccacactcgcgccaccgccgccgccggcgacggcggcatctctacgtcgtgctggacgactggtccaaggggtacagcgtctacaaggtggacgtcgacgggttcgacggcgaccccgacgccgacctggacgacgaggccgtgcgcctccccgagccgccggtgttccggctggagaccgccgactacggccgtttcgggatcttcgtggcggtgggaagcagaatctttgccactcactacagcgaggacacgaacgcgcgcgctcccgtgctcatgttcgacacggtgaccggtggcctcgccgtctgccccggcgtcccggccgagctgtgtaaccagcccatgatcttccccgccggcgacaaggtgtacgccatgggcaggagcaagatcaagatggacgctaggggagagtcgcggaagtacttggaggagctcgcggccgacggcgagggcagctgggcctggagcagcagcgtcgacgaccgcgcgccgccgccgccgttcgacgtcgagcgggcccgatgccacgcggcgcacccggacggccgcaccgtcttcttctccgcccacggcgatggcacctactcgttcgacgccgggacgcgcgggtggacgcgccacggcgagtggatgctgccgttcgacgggcaggcctactacgacggcgagctggacgcgtgggtggggctctggagcggccactcgggccgccgcgggcgcgtctgctcctgcgacgtggtggatccccgcggcggcggcggcggcgagcagccaccgccggcgtggaagctcgccgtgaggagccacccggcgtggcgcgccaggtcgaggttcttgagcgtggcgctggcgcgcatgggcggcggcgagttctgcgtggtggagtggaggtcgcggaggggcgtgagcgaggaggagctccacgagcggtgcctgctgtacgcgaccacgttccggctccggtacgacagggacgggtcgctggaggccacggatcgccgcgcgcgcgccttcaccgcgcgcaagaaatcggacgagttcgaatggtgcgcgtttgggatctga

SEQ ID NO: 57334 - DNA, 610 bp, Oryza sativa
  Clone ID: PAT_MRT4530_59156C.1
atgcaggccttgaccaggtcaaccagcctgtgcacccatcttgtcgctcccatgttgtctctctcctcacttgctaaccacggcaagatcacagcaaaggagacagtcaaaagaacaataggcaaggtagcaagagatcgacttgacgtagacgagcggatgggaacggtgttggcatcgtggaggaagacggccggccgcgggcgtcctggaggaagtcggccggcggcggaagcggagatccaaggcgccgacccacgcggtcgcggcggtcgtgccggcctggtgggcacaggcggcggtccaggcggaagaggagacgatggggacggccggacgggtccccccgtaccctgctgcgtccaacgacggcgacgccagccatgcatgcggggatccgtcggccacgccggcggcgcgccgtggcggagcgcggaggacgaggtgctggccgcgacccaagaccggcggctgctgtagtgctgtgctgcttgacgacgacaatgacgaacgaccttggccgaagagattgatctctcttacgacaagcacgatgtcgagatcatctcccgggggcgacggcagcggaagcggtgagcggcggctctag

SEQ ID NO: 57335 - DNA, 438 bp, Oryza sativa
  Clone ID: PAT_MRT4530_59157C.1
atggctgcttcaccgacgaggcttttgtcgtcttcccatcagccatgcaaggagagtttgcactgcaccgcaaccggtagaacatgggcaggagagaaaagaacaccacctgatgtgctcaagctccgtggcctgccctactttactaccgctgaagacatcatcaagttctttgtagagtatgagttgacggaggaaaatgtgcacaccgcgtaccgtctagatgggaaggccctctatggagttctcaacaacaggggttgcgaagacagccatatgcaaggacaagatgaccattgggacaaggtacatggagctgttcccatcaaccccagaggaggccagcaggacaaaatcacgattcacgagccaggcaatgaactatttgatccaggcatctactttgccctggccttgagcagctgtgttccagtttag

SEQ ID NO: 57336 - DNA, 456 bp, Oryza sativa
  Clone ID: PAT_MRT4530_59158C.1
atggcgctcaccgacgtcgtgctcagctgcgtcaaggccgcggcggcgcgccggccagaccttcgggtcttcgtttgcctggaccactacagcactctctgcaagggcgtcaagtgcgacttcctgcttcagcttctccacgccaggagcatggccgggcccgacgcgacgctcctcgccgacctcgacgcgcgcgcggcgtggcggctagaccaggcgtcgctcggcgccgtcatgatcccagcgttccgctacagctgcgacccgcccgacgcgaggctggacgtccccttcatgctccgccttgtgcgcggattcctccgcgagggcggcaaggctagcgtaggaggcacgacggccacctgcagggtggcgaggctggtagatgcgtacccgccgagctcattcgccaccgctcgaccggagttggaaaacggcatggagttaggaaattaa

SEQ ID NO: 57337 - DNA, 426 bp, Oryza sativa
  Clone ID: PAT_MRT4530_59159C.1
atggcccaggtggatcgagcggcaccggcagcccttgtggatccagtgggcaacgacgacaataacgacgtcgatggcgatgggctgggtggattgagcagcaactacggctcttgtggaaccagcaggcaacgacacgatgacctcagcgatgacaaccccggcggcgatgatgacaacctcgacggcaatggtccgagtggatctagtgggctagggttttgggtgatgacacccgatgagccccaacagggccagccagaacattctaattacattgagcatttactgcgagaacaattaagacgaggaagagcagagattatggtatccagtgatctccgtgactccgtgtgctttgttaaaattaatggagaccatcagcggatgatgagcgtatactactacgtgccgatgtcattttag

SEQ ID NO: 57338 - DNA, 219 bp, Oryza sativa
  Clone ID: PAT_MRT4530_5915C.1
cacttacgtatgattcaatcttgagttgttgttgaagcaaacaaagataggtaaaaaaaacaagaccgaagcggacaaagctaaaataatgaaaacaaagccaacaagcaaaaaagccaagtacaacaaggggcggcggtttttacgacaccagccttagcacctgccgcatgcgcacccatcactgttgtataggggcaccaaaagtaaatatatggc

SEQ ID NO: 57339 - DNA, 1102 bp, Oryza sativa
  Clone ID: PAT_MRT4530_59160C.1
ggttaccgatacaactgaaacggctcgtcgaaaccgacaacggcgcccgcaaacctcgaaaatctccgtatcgttttctccccagccacatgctattttttgttttttatgtgtcccaaatgaaatcgatcctcttttttttttcaagaaaaattaaatcgaccttattccataccaacagctctgctgcgaaatgctaagtttacaagtctcgatccacgcatgcaacaaaaacacaacaacaacaacagcagcagcaacaacgtacacgatggcgacgcactgacaaggcgaggcgacagatcggaggagcaatggctgatcggccgggtcacttgccgccggcgacgagcgagaggagcgcgtctctgtagtagccgtgcgccttcccggcgacggcgtcctccagcctcccgccgaactgctcgtggtaggccgcgcggatggcgtccatgtccacgtccgcccgcgtcaccgccacccgcgtcagcgcctccttcgcgtggtggtcggcgccgtcgctcaccgccgccgccaccacctcgctgaagtacctcgccggcgtcgccaggcacagcgccgcctccctcagtgtctcctcgtgcccaagatcctcttcgatgtggcggccatggatttccttgtagtgcttgaaggtctcgacgaggtgcggcttgctccgggtggtgaggatcctgacgacgtcgtcgttctccaccagcttcgccgccgcgtggccggcgctcttcaccgcggcgacgagcgccttcgcctccgcgcgcgccgtctcctcgctcaccctcgggccctcgtaccggtacgcgctcaccagcccgaccagcaggccgcagtagggcttgtccctggcgcggtaggcgacgtcctcctcgagggagtggtggaacagcgcctggtacgccttgcgagcgccgaggagctcctccgccgtccgggtgcaagcgatctccacgacgatggccgccgggtgcgcctggtggagcacgtggtgcgccagccgcggtcgcgctcccaaaggtgcatcgcccacatcaccatcaggttctgagaaggccctggtcagatgctggatttcatcagccat

SEQ ID NO: 57340 - DNA, 213 bp, Oryza sativa
  Clone ID: PAT_MRT4530_59161C.1
atggagatggaccgaagttggatgtacgatattcgccgttcgtccctagagtatagggagggggtcactgcattcattagttttgtggataatgacatgaaaaataattgtaataatgagaagatgttcgagaatagtttatgggttcaatctcatatgatccgtataagattcatggacgactatagatgttggagcaagcatgatgtttga

SEQ ID NO: 57341 - DNA, 924 bp, Oryza sativa
  Clone ID: PAT_MRT4530_59162C.1
ggaaaacgatagctgatagggatcgtctgttttattgattttgaaaaggcttatgatagagttcaatgggatttcctgtatgaggtgttgcagaagaaaaactttgaccagcgggttataagttggattaaaaagatcagtgaggggggggatgctctgtcagctattttagaagaagctgccagaaatggggtcttaagagggtttagttccaggtttggtagaggggggtttaactcaccttcaatatgctgatgacaccattctttttactaaggctaccagagaaaatatttagctctcaagtttcttctgttttgttttgagatatctggaatgaaaatcaattatcaaaaaagtggcgtttatgttttgggggtgacaaaagaagtggaggaagagatagctaatatgctaaattgcaaggttggaaggatgcgggggggatatgagttgtactcacaaggcactgtgaatgagttgtgggatgggggggattgggatttacatttcagaaggaacttgaacagtcaagatagactagagttggataaactgcagagggagctggagggggttactctaaatggagagagagacatggtgatttggcctcatgacaaaaagaaaattttctccacaagatctatgtatagggtgctaaaatttggaggggtggtagatcaagaaatccaaggggtgtggaggtgcaagatacctctaaaaatcatgcatttcctctatatgacagggagaaacaggattccatgtacagagcaagctttgtctaggggaagaaagcactacacatgtgtgctgctaaaagaaaaggagtgtactagcttggatgtctttcaagcaaagataatgctgacgttggaagtgctgaagccgactgataatcttcctgatgatataggatag

SEQ ID NO: 57342 - DNA, 318 bp, Oryza sativa
  Clone ID: PAT_MRT4530_59163C.1
atgacaacagtgcccgacaacgacggtggcggcgggtcacgtgtcttgcaatgccaaatctccaacatcgggcttggggctcctcatcctcccgctggcagccacaaagacgatgatgtgacgaggacgggcggagcttgtggcgacagggagggcatcaacctagatttggcaagaaccataatgtcaggagtaggccagtgggtaaatgggaaccagcgcttcatcattgcgctggttgttgcctttccattcgcctctctcgtcgacctatgcttttggctcaacgaggtggagagagataaggaaaaagaagag

SEQ ID NO: 57343 - DNA, 243 bp, Oryza sativa
  Clone ID: PAT_MRT4530_59164C.1
atggaggagggcgcgggattcgccccacgagatcccccgccacggtgcgcgacgcgacggatcaaaaagaaggcggcggaaaccagctccttcgacgatgacgggcagcagcaccctaggccgcagggcgaggtgggggcggcggatcccggcgattcagtgaaggaggagtcttcggagcgaagcggaccaagcggttgtgggggagcgaccgagagagggggctgcggcggcgtcgattga

SEQ ID NO: 57344 - DNA, 218 bp, Oryza sativa
  Clone ID: PAT_MRT4530_59165C.1
aaaacaaaaaaagggcattcccaggggggggggacccttgttaacccaaggggaaacttaagggtacagagaccccaatagttaaaattaggccaacttaaacgcaaaggggtatctgggggattctcttccccctggaaaaaaaagcattgggaagctttcaccaacagggaaaataaacctggaataaggttaaatttaatggattggaaaggctt

SEQ ID NO: 57345 - DNA, 246 bp, Oryza sativa
  Clone ID: PAT_MRT4530_59166C.1
ctgatgcctgaactgagctgaccacttgctgtccgaggagcacttgtcccacccgcttgggtggggtgtgtgtctgggtgacctggaaatgtggtgaatgagtgataatgggttgccaatgttgtaaatatatatagtgcactgcactgcactgcactggcgtggaccacgttggataatcttggatggtgcatatgagaatgtctgaaataaaatcccctattttaaaaaaaaaaaaaaaaaaaa

SEQ ID NO: 57346 - DNA, 497 bp, Oryza sativa
  Clone ID: PAT_MRT4530_59167C.1
ttggggtattatgaatatcggagattctatattaactctcctgtgtatatcaatgacatcagagttgagtcagtaatccatcctatgcaacaaatatcccatgtaactacaaagtaatgggcactttattatcaatgcaaagcatcccctactaaaacctcagtttgttagacttttaattcaaacatgaacacaatgctttcattatataaaaaatataagtaattccgcgtacaaattgctttggtgcatacaccaagagaatgcattggtgtcataaataattgatgacaaattgaaaggtcataatctttgcaaatagggcaattgaagaacaaagggctcgactttccaatattagattcagcatcgcatcacatcccttgaagtgatgccattctatcttctcacagctgcagttttgtagtcatatacaggtagtgtaagtagagcccaaagtgtagcatatctattgtgtcatttgtggattttctata

SEQ ID NO: 57347 - DNA, 1426 bp, Oryza sativa
  Clone ID: PAT_MRT4530_59168C.1
tcgttctcctctcatctcctccacactttgaggaaacgtctaagcacaagtgctaaacgcgattagaaggcagcgaaatcgtacactaaattgcacggattagagatagatctcaagcaatgggggaggagaaagtggcgccgaagtctgacgctgccccggcggtggagttgctggggttcgtgatgagcgcggaggaggccgagcgcgccgcggcggcggccggggtggagacggtggaggacctgctgccgctgctcgtcccttccgcgatgcggcgcgcgcgtgccccgatctcgcggttccccgtgggcgccgtgggcctcggcgcgagcggccgcgtctacgccggcgtcaacctcgagttccggggcctcccgctgtcccattccgtccacgccgagcagttccttgtcgtcaacgcggccgccgcgggggagtcggagctgcgcgccgtcgccgtctcccacatgccctgcggccactgccgccagttcctccaggagatccgcggcgccggtgggatccgaatcattgtcacctccgacgccgaggacggctgcgcccccgagtggcgcacggtggcgtccctcctcccgcgccccttcgggccccatgatctcctccccaagcacgtccccctcgtcctcgaaccgcacgacaaccctctcggcgaacccgccgccgtcgccaatggcttcgcccacggtgacctagaggcgcgcctgagggaggcagcggaggcggccgcgcgggcggcgcatgcgccgtatagcgagtgcccgtcgggattcgccgtggcggacggcgaagggaaggtgtacgccggaggatgcctggagtccgcggcgtataatccgacactaggccccgtgcaggcggccatcatagggatggtggccgccgggggcggcgccgccggagacgtggtggcggcggcgctcgtggagaaggaagcggggttggtgtcgcaggaagcgacggccaggatcttcctggccgcggtggccccacaggccaccttccacgtgtacaattatacaccgtccgatgcatgatgcgcatcactgatccccgtggtgggtggggagggagtgtaggaggtgaggtttggaacgagataatgttcataaaaaaagaagttaagaataaaacgataagaaaataaccttgtgtagttgggtcactgggtgattagctggtggacactgacaatcaggatccacttgttcagagtgattaatactcctctgttatgtgtatttaaggagaaaaataaaaaatataaattgccagtgtacaagtagaactgtactagagtgacgcatgtatttatcttggaagttaggagtatcttggaagcaatttgtttgtctttaaaaaaaaaaaaaaaaaaaaaaaaaaaaaaaaaaaaaaaaaaaaaaaa

SEQ ID NO: 57348 - DNA, 1150 bp, Oryza sativa
  Clone ID: PAT_MRT4530_59169C.1
ggatccccgggctgcaggaattcggcacgaggagcccccggatcccctgacctcaaagatggcggcggcgctgtccaagctcctccgccgtcggctgcgcggcggcgggcaccgcctgctcccgtcccgtccctccacctccgccgcctcccagccacctccgccgcctccttccgccgccacaccgccaccaccaggggcagggaaggaggcgggcgcgtggtccaagctcttcctcttcgcccccggcgccatcaccttcggcctcggctcatggcagctcttccggaggcaggagaagattgagatgctggactacaggacgcggaggctggagatggagcccattgcgtggaaccagatggccccgtctgatctcagtgccggggtcgatccggccacaccggagttccggaggatcgtgtgcgagggtgatttcgacgaggagaggtcggtgttcgtcgggcctcgctccaggagcatctctggtgtgacggagaatgggtattatgtggtcactccattgataccccggcctagtgagcatggcagttcgtggccacctatacttgtgaatagagggtgggttcctcgtgattggcgtgataagaacgtacaggatcaccagggcgtcagagaagttccagaatataaagaggctgataaaaagacagatggaaaaggttcatggtggaagttttggtctaactctaaggagcctgaacaatcttgtgagattgaaaaacctgtaaaacctcctgtaagagttttgggagttatccgaggaagtgagaagcccagcatatttgttccagctaatgaacccagtgttggccagtggttttatgtggatgttcccatgattgctcgtgcatgtggcctccctgaaaatactatttatatagaagatataaatgaggatgtctctccaacaaatccttatcctgttccaaaagatgtcagtactttgattcatcactcagtgatgccacatgaccatctaaaatacaccgttacatggtacactctttctgctgctgtgactttcatggctgcaaagcggataaaggcaaagaagctcaagttcccgctgcttcagaaagagatgttcgataacctgagtactgcatcttcatctctcaggcaatga

SEQ ID NO: 57349 - DNA, 1323 bp, Oryza sativa
  Clone ID: PAT_MRT4530_5916C.1
atgccgcgcgcgctgccatgccgccgccatgccgccgccgcgccgccccgccgctgctctgctaccgccacaccgccgctccgctgccgccacgtgatcgaacgaattaacgtgaatgtgaatgtgaacgtgaacgagcgaacgaacgtgaacgagaatgtgaacgagcgaacgaacgtgaatgaacgtgaacgaacgaacatggctgatcgcgatgaggaacaaatattgtacgatacaatcgcggagggaagcagccagtactggaatgaagaagaggggaacgaggatccaaaccaaataagggcacgcggagatcatgagagctttgtcccaaattcagtgaaagagatgctgtggaccacaatgctagagacattcacccttcccgcgggtacagaggacaaagtgaaaaggtggactctgaagaaaatggcagaacaatttcaaagcttcaagggagatctgtaccagaaatatatccggaaggggcagacaccgaactttgacacatttccaaagctaagggatcactgggacgagttcgttgcatataagacaggtgaacaagggcaggcgatgatggaaagaaacaaagaaaatgccgccaagaagaagtaccatcaccacttagggtcagacggctatagcgtcgcgatgccgaagtgggaggagatggaggctagcttggttgagacgggtatcgaaccagccaccactaattggccggaacgatcgaagttctggtactatgctcacggtggaacgctcaacccagctgatggctccctggtcttcggcgatcagatacatgaggctgcgcgtcgactaacagacgcagtggaagcctcttctcagggcacgttccgactggacagagagagggacgagctgtcacttgccctgcagactccagagcatccaggacgaacacgagggaaatgggtgattccttggaagattgggttcaaggaggacatccacacatacaggagtcggatgaggagcaagagagataccgaggtgaagattgcagatcttgagttcagggtatcgagctacgagctcagcatgcaagaggaggtggcaaggaaggttgatgaacgcatggccgcacatcggtcccatgatccccagccgaccattcctcctgcaatgctgagcccatcaggaaatcgtaggagctgcgcctcaacggggcaggtaggatcacagagcatggacaccatgcaaaccctggacgaaaccacctgccccgttgatgacatcactcagcggacaccatgtgagctgcatattctcccttcaagaacttatcaataa

SEQ ID NO: 57350 - DNA, 971 bp, Oryza sativa
  Clone ID: PAT_MRT4530_59170C.1
gctcgtgggccacgcgcacggcgtcgcgagtccagcaaacagcacgaggagaccgcgtcccgcaatcgaactccggcgaggagaagagaacgcgtcccgcttccgactccggcgagagcgagaccgagagcgcgcggcggcggcggcggccggaggaggagaagacgatgggttgctgctgccggtgcctggagatcctctgcgccatcctcctcccaccgctcggcgtctgcctccgccatggctgctgcaccatggagttctggattagcgtgctgctcaccatcctcgggtacctccccggcgtcctctacgccgtctacgtcatcgtctccgtcgaccccgaccgcgaacgccgccgccgcgtcgaccccgacgaatacatctacgtcgcctgaccatctgtggagtacttagtaggtgattaatttagctcctggaaagcatatccttgttcctagtcctattacctatatctgctcctgttccacccttcaatttgtaaactggtactagcacatctgcagcctttggacaagtcgaatcgggtcggaatttgttaccgtagttcaactgtgttactgtgaccgtttgattgctggatcaatttctctcaatattcaataaaccaacgaccactatccgaattcgatttacagatagtgcagctcgcaatcgtagtgcttatctgtgtataaatgatgacgagtggttgcgtgcggctcgtgaaagggctgcgctctataactaatggtaccattatccgattttttgcgggcttgagtgtagttgcgttatgtatattgcgaacgctgttttcatgccctattcgttcctctctaactccttccgtctatatagtgtattgtgcgttgattggttcactcatttgtctgagatctgttcgcgctgttgctggtttgtgcgatgcttcattggttagtttgtagttgtgtttgactcttcgacgg

SEQ ID NO: 57351 - DNA, 509 bp, Oryza sativa
  Clone ID: PAT_MRT4530_59171C.1
ggtgcggcggccgcggcggcggcggcggggaggacgccgacgtggaaggagagggagaacaacaagaggcgggagcggcggcggcgtgccatcgccgccaagatcttcacggggctccgggcgctcgggaactacaacctccccaagcactgcgacaacaacgaggtgctcaaggcgctctgccgcgaggccggctgggttgtcgaggacgacggcaccacctaccgcaagggatgtaagccgccgccatcgtcggctgggggagcgtcggtggggatgagcccctgctcgtcaacgcagctgctgagcgcgccgtcgtcgtcgttcccgagcccggtgccgtcgtaccacgcgagcccggcgtcgtcgagcttcccgagccccagccggatcgacaacccgagcgcctcctgcctcctcccgttcctccgggggctccccaacctcccgccgctccgcgtctccagcagcgcgcccgtcacgccgccgctctcgtcgccgacggcgtc

SEQ ID NO: 57352 - DNA, 363 bp, Oryza sativa
  unsure (1)..(363): unsure at all n locations
  Clone ID: PAT_MRT4530_59172C.1
ttaaagttaacatgctggatagccatcatcaggngtgttggggccnaaancaatggctttgacagggaggttagcatttgacagtgtggctatagcccatagctatttgataaattgttatccatctcgccggagatttcggcccaaaccacttcagcatgacaccatcagaccactgaacacaacagtagacaccactcagtatgatccaatgatgtgttgatgacaatgtacctatggtgcatgctgatcgatgagctaccaggaaagnttgaacccattgagacagccacgccagatttgtaacatgagctctactttaatgccatgagtttcgnnataaaaataaaaaaaaaaaaaaaa

SEQ ID NO: 57353 - DNA, 474 bp, Oryza sativa
  Clone ID: PAT_MRT4530_59173C.1
atggccgcggctgctcggcttctagatgccgccagtggtgatgaactctctggtgaaggcagcgctccatcgcgtcgtgggtgcgctccggcgcggcggcattcggcggagacaacgctcggcggcatctgcgagtggcagcactggcatgaggagacagaggcggactcatggcgtggcaccgagctccgaaacgctaaagatacatggatgagaaccacaaaagaggtgaagcacatcagagtcgacaaccctgttacagcacttatttctaattgctatctgcaccttattaaagttgccactaagaaggggacaaagaaaaaggatcaggaaggaatagcaagacatcagtggtacgctaatatattagtgaattattatgcaaagttgctgaaaaatcacatggttattatggccaaaaatcgcatgcacgcgcggcacaaaaagcggatcaagaaaagctctagttag

SEQ ID NO: 57354 - DNA, 557 bp, Oryza sativa
  Clone ID: PAT_MRT4530_59174C.1
ctattcattcatatgagcatatgatttcctcctgagtgattgattaatcactctgttgatgactagttgactgccaatttgcccatttcttcatgcaagaactgattgtgtttgttgattgatttgttttctttcttgataaatcttcttgtgtttctgcatgcatgcaactcaagtgagcaagcttgataaatcttcttgagcattaatttgggatccaatattaagctcaagctagcttagcttagcttctcaaagtgctactactagctaacttgatcatatgtttgcttatcactatttttattagttatttttaaaattactagctatatggctttcaagatcatgtcacatgctctccattagcttaaagctgtatatttgtcttaaattactaattagataattctgatagccacagcataggtacaaatcagttaaccagtcaagtactatgctagaatttgccaataaataaaacaaaatatacccagttcaacacaaacttcttagccataactaattaaccgaggagcatcatacaaattaacaca

SEQ ID NO: 57355 - DNA, 467 bp, Oryza sativa
  Clone ID: PAT_MRT4530_59175C.1
acggcgtcaaatattttggaatggatggctgcttttagtcccaaagattattttgaggcattcagatttgatagtttaatcgagttggctaagtcctatccggatgattttacttcattgcaactgaaggatagcttcatatttacattgataatatgcgagcagatgaaagatttggcaatgtaaacactatttctgaacttgctaagctgatggttgagacaaaaaaaacatcttgcttttcctttggtctatcacctcctcaagttagtacttgtcctcctgcatcagtagagaggtgctttccagctatgaaaactgtgaagacaacaccacgtaatcgcatcggcgaccaatttatgaatgattatattgtgtgcttcgttgagaaagactttctagctacaattcttgttgatgaagtgattgctcctttccagaaaatggaagatcgtaaagggaaagta

SEQ ID NO: 57356 - DNA, 305 bp, Oryza sativa
  Clone ID: PAT_MRT4530_59176C.1
ggcaggggcagcgccctcccctctatcggatccagcgggaggggaggaagcggcagcccgatgtccctgcgacgatggcaccctccccttccggcgtcggtgtttttgtgcttgtgatcgcatggctcgacgtttatctcaccatgttgcacgagctgtttggtgatgctttgttttcacgtcatattctagcacaacctgacccggcccatggttatgacgctggcattctggcaatcacatcgtcctcctacgtgacgccatcacacaacttcttgggctccatgacgtcagcgagcggctag

SEQ ID NO: 57357 - DNA, 231 bp, Oryza sativa
  Clone ID: PAT_MRT4530_59177C.1
ggcacgagcacaaatcacagcatcggaggaaggagatatcattttagaaggtggcacacatccttgtctggaggcccaagatggtgttaactttataccaaatgattgcactttggtgaagaaaaaagttggtttcagatcatcactgggccaaacatgggtggaaagtccacttttatacgaccggttggtgtgaatgtcctgatggcacaagttggatcgttcgttcca

SEQ ID NO: 57358 - DNA, 398 bp, Oryza sativa
  Clone ID: PAT_MRT4530_59178C.1
ctagccgctcgctgacgtcatggagcccaagaagttgtgtgatggcgtcacgtaggaggacgatgtgattgccagaatgccagcgtcataaccatgggccgggtcaggttgtgctagaatatgacgtgaaaacaaagcatcaccaaacagctcgtgcaacatggtgagataaacgtcgagccatgcgcgacgccggaaggggagggtgccatcgtcgcagggacatcgggctgccgcttcctcccctcccgctggatccgatagaggggagggcgctgcccctgcccgccaccttgggagggggaggggagcagcgtcgtggcggtgggggaaggggagggggaatggcgccgccgccatggcggagggggagaggcaccgttggcgccgtcatttag

SEQ ID NO: 57359 - DNA, 411 bp, Oryza sativa
  Clone ID: PAT_MRT4530_59179C.1
atggcaatgttatcggccaacggtggaatgtacggtggctgggacaggtcgccgagcaagtcccatgcgactccggcgaagaacgggtggacacagacgttgtcggtgcctccggcgaaacctagccactttgtaggctccctatcgagaaaccttgtggtgaggttggtgagcttcggccagcgctattgtgagtccgcggagaactccagccctggagcagcacattgtggaacctctccttctggctctgtccccggcgtcttcccgcacggcagctcgtctccgactgaggcgatgcggatcggcaagcgagctctcaggctcgacgtggtcacgaactcacgaagacagcagcggctctcgatctggcaacatgcagcaacggcgctctaccgcccgttggcttga

SEQ ID NO: 57360 - DNA, 2622 bp, Oryza sativa
  Clone ID: PAT_MRT4530_5917C.1
atggctgaccgcaatgaggaacagatattgtatgatacaatcgcagagggaagcagccagtactggaatgaagaagaggggaacgaggatccaaaccagtacttgaacgaggaagggaacgtggagagggatgcggaggggaaccagcaggggcacgtggaaagggatgtggaggggaaccaggaggaggaggctagtggaagtcaaccctctgttggacagaagagggcacgcgggcaacgaggtgcagcgaagaagcttgagggtcggcacatcataacggaagtggaagaagatggacgccctagtgccccggccgaagccgccaagaactatgtacgtcacaacggttgggttgtgcgggataacgtgcctgtcagtacggtgtactggcgaagaacaagggcacgcgaagatcatgagagctttgtcccagattcggagaaagagatgctgtggaccacaatgctcgagacattcaccattcctgtgggtacagaggacaaagtgaaaaggtggactctgaagaaaatggcagaacagtttcagagcttcaagggagatctgtaccagaagtatatcctgaaggggcagacaccgaacttcgacacattcccaaagctaagggatcactgggacgagttcgttgcatataagacaggtgaacaagggcaggcgatgatggaaagaaacaaagaaaatgccgccaagaagaagtaccatcaccacttggggtcaggaggctatagcgtcgcgatgccgaagtgggaggagatggaggctagcttgcttgagaggggtatcgaaccggcaaccgccaattggccggaacgatcgaagttctggtactatgctcacggtggaacgctcaacccagctgatggctcactggttttcggcgatcagatacgagaggctgcgcgacgactaatagatgtagtggaagcatcctctcagggcacgttccgaccggacagaaatagggacaagctgacactcgccctgcagaatccagagcatccaggacgaacacgagggaaaggggtgattccttggaagattggtttcaaggaggacatccacacgtacaggagtcggatgaggagcaagagagataccgaggcgaagattgtagatctagagttccgggtatcgagctacgaacttagcatgcaagaggaggtggcaaggaaggttgatgaacgcatggccgcacatcggtcccatgatccccagccgaccattcctcctgcaatggtgagcccgtcaggaaaccatagcagctgcgcctcaacggggcaggtaggatcacagagcatggacgccatgcaaacacaggacgaatcaacctgtcccgttgatgacatcactcagcggacaccatgtgagctgcatattcctttcaagaacttatcaataaaggtggcgtcgggcatggccatcccaacggacccttcaggtacttaccactgcaggccgattccagcaggatactcgaaagtcgaagttgagttggtcgaaggcgcgtacgaggacctcgagctggattaccctggaggagacggtgagacgcatatacgagacacaagccatgccattattctatggcgcaagggtacatcatcctccctgggtgacaagcggcgtctcgtgcaccatctcctccggctccgccatctccttctccggatcctgcaccgtctcctcatgctccgccagcaccgtctccacctcaggctccagcaccgactcctcctcaggatcctgcaacgactcctcctcgggctcctacacctactcctccacaagctcctcttccgacaccttcaaagtcaagggcccccccagctccaccacctgcccacacaagggaggccatcaagctgtcaaggagatgacattctctggatcaatttcaagggaatctacgaactataccagctggacgccctcgacgtctctattatgagttgctggattttaatggagattcaaagggcccgacggcagagggttttcgatactggattcatcgaccctcggagagtaaacgtcgcaatgctcgaccaatatccgcaagaaacagaggacaatctcgtccatctcctgaaggcgcagcattacaagacgttcatactgttgccgtacaacacagaattccactgggtgcttttactcttcgacctgtcggcctgcaccgtcaacgtatatgactcaatggataaaaaagagtctacgtttgacaaggttttcgaacttatagacagggcttggtatcggttccgtcatttggtccgcggcaactggagagaaagacttaggcggaggttcaaatttccttgcgcaaagcaaaagcagggaactaacttgtgcggctactacatgtgcaagtattgccactgccttgcagaccaaatcatcaccacaagaaagctcgattttattcgcatgaggaataacctgaccacacacaaggaatttatcgcggcggttcaagaacaactcatgggattcatcaacgaagaaatccttgatcccaagggtgaattctactacgacggaaacacaattcaccggtccttagcttctgagctagcgactactactacgtcgaaatcgtag

SEQ ID NO: 57361 - DNA, 198 bp, Oryza sativa
  Clone ID: PAT_MRT4530_59180C.1
atgcgaggcccctgcggctgcgaggagaagcttaagacgacggtggtggtggtgttgtcggacgacgacgacgacgacgactacgaggaggagttcaggagattctcagaagttgtgaactgtttagggcaacttctagcagaagcagtttttgagaaaagctgcagctgggacaagctcccccaaacagggccatag

SEQ ID NO: 57362 - DNA, 498 bp, Oryza sativa
  Clone ID: PAT_MRT4530_59181C.1
gtcctttttttttttttttattcttattgaggcttggtatttaaatatgaaagacaactttttttctattatatcacccaaagtttcacatgttacataaaaggggggtgtgcttatttttaaattccgaaccactttttagtggaacccaatacgagacaccggcttggttgttaaaggtccggccgctccattatacccaagggagaccccacacccccaagggggggaaaacccccccgaaccttggccttgtcccgaattccccccaaagtggggggcaccaaacgggccaaaaaaagctggctgggcaatggcctgaacaaaaaaaagacccccccccccggatggaggggcaactggggcaaaatgtgccaaaacttaataattgcccggttaaaaaaatgttgttttaacaaggggatttgggggaaacccatatggtggccaaacaaggtatttaaagggcctaggcccccctgggggtcaccccaaaaa

SEQ ID NO: 57363 - DNA, 136 bp, Oryza sativa
  Clone ID: PAT_MRT4530_59182C.1
tcttttattctggttgaaggaccaaaataataacgggattttgttccttcgactggagatgtctcaaacaataccccatctatgaatgccatctaaatacgtttattcatggtcgtccaggagacaaatggtgcca

SEQ ID NO: 57364 - DNA, 473 bp, Oryza sativa
  Clone ID: PAT_MRT4530_59183C.1
gcagaattcaggctctatttctgctccttaacatcagaattgaagttatgtggcagattgtgttagaacaaaaaccttcagagaagctcaacatttactaatagaagtacgtttttggacttgtgatgcttctggtgaggtttttggactagaccaaccaatagcatttaggttgttgggctcggtgagatcattacaagcacttgaaggtaactctgttcttcatttggcctttaggatttgagaggcaaaaatcattgactaaaattacaaactgtaggtgtggctaagtaattggatgattcactgtggtgctgatgcaagtcagcattggtagtctttgaagatgcagaatgaactctactaatttagggctaagccatgctgatttaaactgatatatatttagtgctcctatagcaattggtgaagaaattgtgtggaagtttctgttacaatgatgaaattaagaa

SEQ ID NO: 57365 - DNA, 651 bp, Oryza sativa
  Clone ID: PAT_MRT4530_59184C.1
atgcagatcttcgtgaagacgctgacggggaagtcgatcacgctggaggtggagagcagcgacaccatcgacaacgtcaaggccaagatccaggacaaggaaggtatccctccggaccagcagcgcctcatcttcgcggggaagcagctggaggatggccgcaccctggccgactacaacatccagaaggagtcgacgctgcacctggtgctccgcctccgcggcggcagcaggggcggctacaccatccaggagcccagcctcctgctcctggcgctcaagtacaacgagaagaagatggtctgccgcaagtacgcacgccttcccgccaggtctaccaactgccgcaagaagaagtgtggccacaccaaccagataaggccaaagaagaggtttatatccaagactgccaactgaataaaagagttgtcatgcatcagttgagtcgaagagtcttcctattcagttattagctcatatgttagcatcagttgagtcaaagagtcttcataaatgttagcctggctgcttatgctatttctgtttgtgagatttggttagaagtttttactgttcaaatctctatatacgcccctacttttctgtttttgagaaaaaaaaagaagtttttacttaaaaaaaaaaaaaaaa

SEQ ID NO: 57366 - DNA, 642 bp, Oryza sativa
  Clone ID: PAT_MRT4530_59185C.1
atggccttgtgcaccaccggccttcacctcatgctcccatcacgcatcgccgatctcctcgcacgccccctgccacctcctcatagcaccaacaaccgccttgctctgctatcttcccggccatggccacacgtgtcgtgggtctgcgtgctgccagcctcctcctcacgagtcgctggccacctcctcacgctttgtcagcctcctcgttgtgtgcttgccgcactggccacctgcaggcgctaccacctaggcctcgcccttgtaagtcgtgcctccacccttgcgcaatctagtttctcctctcctccttgctggttcgtcgtgcatcctccccatcaccgactgctggggcggcagatcagaagaggactagagccgagacccaacgatgccggtttggccgctgataccgccactgacagccttcccttcgatcttggcagtgcctcggactatcgcaaccgtgagaagaataagagagcttgctgccgttgtccttgtgccccctcccccggctttgcccacgatagctcaggcggcggtggcgaggcggaggggacgacggctagggatggcgatagtgctggttgccgcttgtgctatcctagctggggccgagcgatcacgtacgagctctga

SEQ ID NO: 57367 - DNA, 861 bp, Oryza sativa
  Clone ID: PAT_MRT4530_59186C.1
cccaccactccaccgatcggcgaccactccaccaccaccaccaccactccaccgatcggcgagagcgcggggagatcgttcgacggcggcaagatgcagatcttcgtgaagacgctgacggggaagacgatcacgctggaggtggagagcagcgacaccatcgacaacgtcaaggccaagatccaggacaaggaaggtatcccgccggaccagcagcgcctcatcttcgccgggaagcagctggatgacggccgcaccctggccgactacaacatccagaaggagtcgacgctgcacctggtgctccgcctccgcggcggcagcaggggcggctacaccatccaggagcccaccctccgggctcttgcgctcaagtacagagagaagaagaaggtctgccgcaagtgctatgcacgccttcccatcaggtctcaccactgccgcaagaagaagtgtggccacagcaaggagctgaggttgaagaagaagttcatcaactcgctttcgatagcgtgaggcactggaaagtgttcaccagctgaatcaatctcttggatctccgtgtgcgcagctaccatgttatgtccagtttagaagtactccgtagttgttaatctcttggaattcgtatgcccagctaccatgttatgtccgtagtctagaagtagttgtggtacttagtacgcttgagagctctgggttgttgcttaaagaagttgtaaccctgcgaagctgcgactgggatgttgaaccctctatcatcactctgaatgaagaagttatcgttactagtagtaaaaaaaaaaaaaaaaaaaaaaaaaaaaaaaaaaaaaaaaaaaaaaaaaaaaaaaaaaaaaaaaa

SEQ ID NO: 57368 - DNA, 526 bp, Oryza sativa
  unsure (1)..(526): unsure at all n locations
  Clone ID: PAT_MRT4530_59187C.1
gcgtcgcccctgcagcagcatcacagcggcgcggggcgtggggcgcgggtgggcaatggtcnggcggcgagcaccaccgcggcgcnggcanggctgtgggacttcgtgggangggacctggtgaaaccngacatggggcggtggctggactacatggnaaaaacacaagtcgctggccatctacccnccgcacnaaggcggctaccaaggccgctncctcaacccgcctcanctaccagggctactacttcctcnaactctcccgccccgcgggctccggcgaaccccaaaaccacctcaccaagattccaccccctctgcccncccaancctcccggaagcaacccggtggccaaagtngttcttccccncccgaaagtngactaaaaggctcnacttgcttgccccccggaaccccnaagggccnccttcctcttgggttcnttgnaaacccaaggttctctcccaagggccnaaactnccatttccccccccnttccncccctaaaattccnccccccaaatt

SEQ ID NO: 57369 - DNA, 838 bp, Oryza sativa
  unsure (1)..(838): unsure at all n locations
  Clone ID: PAT_MRT4530_59188C.1
gttgttttgcatgcagttgtttctggtgttaaggggcgattttttgatggctgcagggttttaccatctgttattcaagtgacatttatggaagtattgcgagccacagtgactccgtgatcaaaaaggtggggttgagtaccatggtttgcaattacggacctgttagaaactaagaaaattgtaattataagtagacacaaatgacgtgcttcaacttttgatattggttacaaatgtgacctgctcaaatttggggaaccattccatcctcccaatcatcagggttttatgctgaaagaactgaagagctggtagtccgcccacgcgtccggaacagttttgctagtagtgctttaagaaactggggatgatactgtagtatggccgtgcattttctggaagttcatcaatattttgaagaggtgatatattggagcactgcagtccgagaaatgatttttacggcctcggtcttttctcaggctttcagcctcccaggcaattgaatttattgaaccattagtcataaactaatactaacacacatagcacattcttaagaaatagatagaccttggtgttcgcatagactattgtattgcacagttttgtttccttaattattgattcattttccctaataagtgaaaaccgtattctttttcaccaatacaatgatgctaattcttttttttcccctgtgtaacatggattgctgatcctccccaatacaatgatgctaattcttatttcttttttggttccctctntgtaacctggattgctgatcctactaaaactaacagngacaaatagaggactggtttcactggtt

SEQ ID NO: 57370 - DNA, 1797 bp, Oryza sativa
  Clone ID: PAT_MRT4530_59189C.1
atggccttcccgccggccgtcgtggcggccggcggcggcgccagctgcaagccgggcgcggagccgcggagcatcgtgatcaagatccgccgccggctgccggacttcgcccgctccgtcaacctcaagtacgtcaagctcggcctcctctccgccggcttcccgatgccgccgtcgccgtcgtgggtggtgatgctcgcgctcgcggcggccgcggcgtacggcctgttcgacgttgccgcgctctacgccgtcgacctcgtcggctgcgccgcgtggctgtgcgcggcggcgctgctcgtcgccgtctggtacgccaggcggccgcggccagtgtacctcgtcgagttcgcctgctacaagccggacggcgacgagcacgagatcagcaaggacgggttcctcgagatgacggagagcacggggttcttcaatggcgaggcggtcgcgttccagaccaagatcacccgccgctccggcctcggcgaccggacgtacctgccgccgggcatccaggcgcggccgccgcggctgtccatggcggaggcgcgcgccgaggcggaggccgtcatgttcgggtgcctcgacaagctgttcgccgccacgggcgtcgacccgagccgcgacgtgggcatcctcatcgtcaactgcagcctcttcaacccgacgccgtcgctggcgtccatggtggtgaaccgctaccggatgcgcgaggacgtcaagtcgttcaacctcggcggcatggggtgcagcgccgggctcatcgccgtcgacctcgcccgcgacctcctccaggccaacgccggcgccctcgccgtcgtggtgagcaccgagaacatcacgctcaactggtacttcggcaacgaccgctcgatgctgctgtccaactgcatcttccgcatgggcggcgcggcggcgctgctgtcgagccgcggcggcgacgcgcggcgagccaagtaccggctgctccacacggtgcgcacccacaagggcgccgccgacgggtgcttcggcagcgtgtaccagcgcgaggacgaacgcgggagggtgggcgtgtcgctggcgagggagctcatggcggtcgccggcgacgcgctgaagacgaacatcaccaccctcggcccgctcgtcctcccgctcgccgagcagctcaagttcctccggtcgctggtgctccggcgggtgctccgccgcggcgcgcggcgcccctacatcccggacttccggcgcgcgttcgagcacttctgcgtgcacgccggcgggcgcgccgtgctggaggaggtgcagcggagcctcggcctcggcgacggcgacatggaggcgagcaagtgcgcgctgcacaggttcgggaacaccagcagcagctcgctctggtacgagctcgcctacgccgaggccaaaggccgcgtccgccgcggccaccgcgtctggcagatcggcttcggctccggcttcaagtgcaacagcgccgtctggcgcgcgctccgcgacgtgccgcccgtctcctccggcgccggcgacggcgaggaggagcgccgccgcgtaattgttattgtcgctattatacgacttttcgaaaaggaccaattgactcttcggaaccaatttggcttccatcaaaatcacgtgtacaccgtttctgaaaatttgcaaactggggagaaagcacagtttgaaagctgtagaggacattttttcgatgggattgttgtcaacttgtttggcaagaagacaatcacgattgggacatctaaacgccttgcggtgattgtagagtcgctaaccacctcaatctag

SEQ ID NO: 57371 - DNA, 282 bp, Oryza sativa
  Clone ID: PAT_MRT4530_5918C.1
atggccgacggcgccagcagcagcggggccgcctcggcctccggccccggtggcgggggcggcggggagtcggtggtgatcgactacggccggcgccgcacggcctgcggctactgccgatccaccggccagacgagcatctcgcacgatatggccttagagcgtttcagatgcctccgttttgcgcttcaccttgtttacatcaatggacatccaattctgtctctgaaatgggatgaaaatcatgctgccgacgtgcttattgtctactctcagtcatag

SEQ ID NO: 57372 - DNA, 258 bp, Oryza sativa
  Clone ID: PAT_MRT4530_59190C.1
atggtggcacaatcacgtgcactcccggctgatcctgatgttcatgtgtcatctgatgcaaagcgtacggcgagcgccgcacgggtcgcggcggtcgaggcggcggacgacgagcacgaggtggacagcgagcgccgcgagggttgtgagggcaacgaagaggaccaccgccactgtccgcctcggcgccgtctcggcctggccgcgccgcgctctgggaggacgccgaggaagccatcccggtcccggtggtcgtga

SEQ ID NO: 57373 - DNA, 1502 bp, Oryza sativa
  Clone ID: PAT_MRT4530_59191C.1
agtggatccccgggctgcaggcacaacctctcgacccgtctaccccaaaaacccacgggcgccgccgctcctccgaggcggagccaaacgctcgctcgctcgccttgctgcgcactagctgaccaatcccgtctccttctccgatccggcgcgccgccgccgccgccgccgctttgaggtgacaacgatgaggcgcgccccgcgtctccacgcgctcccctcccgcgcgctcgcgttcggcggcctcccccctccaccgctgccccgcgcgcagcttcaggggatcactgagccgggtgccgcatctcggctcggggccgcgttcctagcccgcgcgctcgccaccaccggccttcctgctccgcggcgtcctcgcgcgctgcaggttcagcggatcactgagccgggggctgcatctcggttcggggctgcgttcctggcgcgcgggggcttctccaccgatgcctcggccgcggcgcaggacagcgcgaagcctgccgcggcgaccggcggggaagggggtgatgggaagtcagggaaatctgagcaaggggacgctggaaaatcagtgcgaggagggccggtgtcgtggttgagctttctcctgcttctcgtgactggaggagggataattgtgtactacgacaaggaaaaaaagcgtcacattgaagaattgaagaatagaacaagtgctgtcaagcaagaaccatcagtaggcactgcagccatcggtggtccattcaatcttttgaaccatgatgggaaacctgtcacgcaaaaggatttctttggcaagtggactctgctatattttggcttcacacactgccctgacatttgtccagatgaacttcaaaagatggctttggcaattgataaaataaaggaaaaggcaaaaatggaagttgtgccagttttcatcacagttgatcctgagagagatactgtagagcaagttcgtgactatgttaatgagtttcatccaaatctaataggactaactggcacaactgatgagataagaaaggttgctcgtgcttatcgagtttactatatgaagacagaggaggagggttctgattatctcgttgatcactcaattgtcatgtacttgatgaatccaaagatggagtttgttaaattttacggcaagaactacgatgcagattctcttgctgatggcatcatcaaagaacttaaagggcaccaataaagatagctgacccacaattaatctggcaaactattttccgaatctctccaaaagatttcatctatgtacacaattgcaaacaatgggtggcgctcaaggtcaacccgtagttcgtagctgttttttctgctcatatcattcataaaaattaggatattcaaattttgaggccttcgacctcatcagattttggtgaaccatgttaaactttgaggcaaaaactctacacatttcataaataatactccatatatcagaactccattatgcagcatttggttattatgcc

SEQ ID NO: 57374 - DNA, 322 bp, Oryza sativa
  unsure (1)..(322): unsure at all n locations
  Clone ID: PAT_MRT4530_59192C.1
tgtcgtggggacaccgcacggtgcagtgctgtgcatgctgtgctgtgcctgcgggcaccaagctggggccctggtggttgaccgggatgttgtgtctggccctatgcgaggatggatgagggtgtgtgctatgaaaacggctgctgctgcccccaccctggctggctggcctgcctgggtttgggttgcgccaacctgcatgcccccatgcgggtgttttttgcctcctctggnttctaatttctaggagctgtnccttttggaatcatggaatgtcaagnatttccataaccatccgtttgatttctcccaaaaaaaaaaa

SEQ ID NO: 57375 - DNA, 462 bp, Oryza sativa
  Clone ID: PAT_MRT4530_59193C.1
atggtggcggcggcggcggcggtgttgccatggggtggcggcggctcgccggcgtggatcgaggtgccggagaagagcaagagcgcgttctgggagctgaagaggaggaaggtgcaccgctacgtgattttcaagatcgacgacaggcgggaggagatcgtcgtcgagaagaccggcgcgccgggggagagctacgacgacttcacggcgtcgctgcccgccgacgactgccggtacgccgtctacgatctggatttcgtcagcgacgacaactgcaggaagagcaagatattcttcatctcatggtccccttctgtttcccgcatccgagccaagaccatatacgccgtgtcgaggaaccaatttcggcacgagcttgacggtgtgcactttgagattcaggccacggaccctgatgacatggatttggaagttctcaggggccgtgctaatagaacctga

SEQ ID NO: 57376 - DNA, 550 bp, Oryza sativa
  Clone ID: PAT_MRT4530_59194C.1
tcagttctcacgcgcatgcgggcagatggcggccgacggcagagcggcggggaagaagcgggagatggggagaggaggtggacggcgcgaccgcccgcgacggcgggagcagtggccggcgcccgcctctccccatccggagccgcggcgggtgagcgggcgagcggcgacctcgctgtcgccagccacgccgcctccacggcgccgcgcacctcctcggcgcgacaccggcggaggatgcggaggagagcggccggggtggacgcgtgcgccgatgggagcgccgggagagggctcgacggcgagcaggaggatgggtagggaagggtcgagcgggatggacgacgacgacgtggggcggttcccctccacgcgcaggcggtggcgcgcggggagcgccggggcgcccatgccctccacctcggcgcgggcctcgcgccggccgcctctctccccttctctggtgccggccgcctcctctccccctctcccgcttcttccccgtgcaccgcagagcccgcagcgccggcggccgcgcccgcacacccgc

SEQ ID NO: 57377 - DNA, 213 bp, Oryza sativa
  Clone ID: PAT_MRT4530_59195C.1
agcacaaattctcactgtttgataccacacgctcacacatgaaatttttgtagcttttttttttttttttgcacaaccttctcctcgtttgacgaggaggaaacaaccaagcaaggtaggggataaaagtgaagtgcaaaaaaaaaaacaagtggtgggtgaagaatgaaattacaagaggactttttcttcgcttccaccattcgccccttc

SEQ ID NO: 57378 - DNA, 1377 bp, Oryza sativa
  Clone ID: PAT_MRT4530_59196C.1
atggtggctctagctggtgtgagcgtcgagaaatgggtgagctcttcagtgttcatgccgtgtggacttattctaaggcggggaagacaaagaggtgtatcgcgcgcgccgtcggccttcttgtccgtaatggactgccagtccaaacgaacacttatgggcctcgcagagtacgtcgcaggcgagttgggcctcggccttgtccgcgcacatgacacatcgcctcgtcagtgtcgcagcagcagggtcaagccgaagcgctacccatgggtcgcctcacctcccccgccgccgccggaactcaagccggcgaggcggaagcggagcggccgggatcccgccgaagctgcggaacggcaagtgggcggggcatctggttcaacggcggatctcgccacggggaagccgaacctcgccgctgggttgggagaatacaaaaccatccttttttcgcagataaacatccttttccggcgatgcggaagcggtgcgaccagatcctggcgacgctgcgggaaggacaagcggagcatctggttcaacgcccccgtggaggtcgaccgcctcgggctccacgactaccacaccgtcatcaagtgggagattaccctggaggagaagaacttgctgagggttgggttggagagcttgccagagaagaagatgcataatgtgctgcagattgtgcggaagaggaacggcaatcctgagctggttgggggtgagatcgagctggatattgatgagatggatgtcgagacacagtgggagcttgatcgattcgtcaacaacttcaagaaggcgctcaacaagagtcgacgggctgccattgttaatggtgaaaatgccgatgtcattgatgcttccgtggctaatgatagttatgtgctggtgaatggcagtaccgctacgatggtggacaacggtgacgtggcaatggcaatagagagcaaggatcctgacaagatcactacacaggccgagcagttggatgagtatgtagatatcggggatgaaatgccaacagcaactctttctcttaatatacatcggccgaaggggaaaaaggggccagcagaggctccatcacacacgccatatttggaggtcctccaaacggagaccttcacaagccaaatatggcggttctctctcctcacgtcatcctccaactacccatgttccaatccaacttatgccaccatcaagactactggaagtgacggaagaaaggagcttctcccacgccctctccggttgtccgctccgctgccgcccctcgcccgcccgaccatcaccgcccctcacccgcctggccctgccgtcgccgtccctctcccgcccgacccgcccctcgccaccgctccctcgatgtag

SEQ ID NO: 57379 - DNA, 194 bp, Oryza sativa
  unsure (1)..(194): unsure at all n locations
  Clone ID: PAT_MRT4530_59197C.1
cccacgcgtccgcaccggacgaacaccatgctttcgttttcgtcgctgccgtccaccggggccgggtcaccgnttccgctgcgtttctcccgccgtcagcgagcgcgcatccagcaagcgccttcgccccgcccaacgccgccgtgtgcctcaggcactcgccgcggggggggttgtttgggagcccgtggtac

SEQ ID NO: 57380 - DNA, 1026 bp, Oryza sativa
  Clone ID: PAT_MRT4530_59198C.1
atgcggaagcggtgcgaccagatcctggcgaagctgcggaaggacaagcggagcatctggttcaacgcccccgtggaggtcgaccgcctcggactccaagactaccacgccgtcatcaagtgccccatggatctcggcacggtgagggcgaacctcgccgccggaaggtacccctcgcacgacgacttcgccgccgacatccggctcacgttcagcaacgcgctgcggtacaaccctgctggacacgaggtccacaccttcgccggcgacctcctcgcgtcctttgagaagatgtacaaagcgtcggtgtcttgtgccgccccggaattgccaccggcgaaagctccggcgcaggtgaaaccaagggcagggaatgtgaaaatgcggaaaacgaaggcaagggagccgaacaagagggagatgaccctggaggagaagaacttgttgagggttgggttggagagcttgccagaggagaagatgcataatgtgttgcagattgtgcggaagaggaatggcaatcctgagctggttgggggtgagatcgagctggatattgatgagatggatgtcgagacacagtgggagcttgatcgattcgtcaacaaattcaagaaggcgctcaacaagagtcgacgggctgccattgttaatggtgaaaatgccgatgtcattgatgcttccgtggctaatgatagtgatatgctggtgaatggcagtaccgctacgatggtggacaacggtgatgtgacgatggcaatagagagcaaggatcctgacaagatcactacacaggccgagcagttggatgagtatgtagatgcagtggcggacccagaatttttgtcctggccctgggtccgcccctgtgtagatgtcggggatgaaatgccaacagcaacttaccaatcagtggagattgagaaggatactgaggccgcgagcagtgggtcctcatcatccagtgattcagggagctcaaaggacagtgtctcagaatctggcaatgcccattctctggtgtaa

SEQ ID NO: 57381 - DNA, 1904 bp, Oryza sativa
  Clone ID: PAT_MRT4530_59199C.1
gcgcgcgcccactctcgccagcgcagcagcagcagcacgcgaaaccctcgccggcgacggcgacggtgatggcctccgccctgctcgccggccggggcggggttaaccaccaccaccaccaccaccagtggggggagacccgtgccccgctcgcgcccgtggcccccaattccgatcccaaccaccctctccagcagcgcgccaacggctcggccacgaggccgccgccgtcaagctacgtggcgctgcggccgggggcaatggctcaccgcgaggcccgcgcgctgcgggaccgcctcgccggcgagcttggccaggtccgcgccctcatcgcccggatcgacacgtggcagcagggtcaggtgaagcgccatggctcgcctcgccgggacctccccacgccgccggcgaagctcagggcggcgatgcggaagcgttgcgagcagatcctggcgaagctgcggaaggacaagcggagcatctggttcaacgcccccgtcgaggtcgaccgcctcgggctccacgactaccacgcagtcatcaagtgccccatggatctcggcacggtgagggcgaacctcgccgccggaaggtacccctcacacgacgacttcgccgccgacgtccggctcacgttcagcaacgcgctgagatacaaccctgcggggcacgaggtccacaccttcgccggcgacctcctggcgtcctttgagaagatgtacaaggcatctatgtcttggttcgagcaggaactcaagctccttgagccgccgatgccagtgccgccaccggaattgccaccggcgacagctccggtgcaggtgaaaccaagggcagcgaatgtgaaaatgcggaagccgaaggcaagggagccgaacaagagggatatgacgctggaggagaagaacttgttgagggttgggttggagagcttgccagaggagaagatgcataatgtgctgcagattgtgcggaagaggaatggcaatcctgagctggttgggggtgagatcgagctggatattgatgagatggatgtcgagacacagtgggagcttgatcgattcgtcaacaacttcaagaaggcgctcaacaagagtcgacgggctgccattgttaatggtgaaaatgccgatgtcattgatgcttccgtggctaatgatagtgatatgctggtgaatggcagtaccgctacgatggtggacaacggtgatgtgacaatggcaatagagagcaaggatcctgacaagatcactacacaggccgagcagttggatgagtatgtagatatcggggatgaaatgccaacagcaacttaccaatcagtggagattgagaaggatactgaggccgcgagcagtgggtcctcatcatccagtgattcagggagctcaaaggacagtgtctcagaatctggcaatgcccattctctggtgtaaggcctccattctaacagtaggatacgagtaggtggatgattaatttccttttgtgtgattggtggtgtagagacaccaaaagtgtaggtgttttgtaagttgattaagaggagttggtatctgtttggatttagtcaagattaatttgtagcgagtgaactggctttgtggctattctgatagcgcaggtgtcctatgtacatataagtgaaaaatggagactacggtagcaattggtagactggtagttcaccaggctttctgatctgaagaagtgaatatggttcatgtggctgtctgttcttctagttctcaatgcagttgttttgttacaactgtcatatactcttaatactcttacgtaatttgatgtgtcattatgggtgattgtaactgtggcaattgaagtagcaacatataatcttttctgggagcaagacatctcccagaaaagattcctcgtgc

SEQ ID NO: 57382 - DNA, 3054 bp, Oryza sativa
  Clone ID: PAT_MRT4530_5919C.1
atgccgccgccgccacgccacgctgccgccaccacgccacgccacgccaccgttcgccacgccacgccgccaccgccacggccccacaacgccaggccgccgccgccgtcgccacgccgccgcgccaaccgccgccccgatgccgccacaccgccgttaacgaacgagaacgagaacgatcgaacgaacgagagcgagaacgaacacgtcaacgtacgttgccgcgacaacgtgaacgagaacgagaacgatcgaacgaacgagagcgagaacgagaacgatcgaacgaagacaagcgagaacgagggaacgaacgtgaatgagaacgagcgaacgaacgtgaacgagctagggaacgtgaacgagcgaacgaacgaggacgaacgtacagaggacaaagtgaaaaggtggactctgaagaaaatggcagaacagtttcagagcttcaagggagatctgtaccagaagtatatactgaaggggcagacaccgaacttcgacacattcccaaagctaagggatcactgggacgagttcgttgcatataagacaggtgaacaaggacaggcgatgatggaaagaaacaaagaaaatgccgccaagaagaagtaccatcaccacttggggtcaggaggctatagcgtcgcgatgccgaagtgggagcagatggaggctagcttgattgagaggggtatcgaaccggcaacagccaattggccggaacgatcgaagttctggtactatgctcacggtggaacgctcaacccagctgatggctcactggtcttcggctatcagatacaagaggctgcgcgacgactaacagatgcagtggaagcctcctctcagggcacgttccgaccagacagagatagggacgagctgacactcgccctgcagactccagagcatccaggacgaactcgagggaaaggggtgattccttggaagattggtttcaaggaggacatccacacgtacaggagtcggatgaggagcaagagagataccgaggcgaagattgcagacctagagttccgggtatcgagctacgaactcaacatgcaagaggaggtggcaaggaaggttgatgaacgcatggccgcacatcggtctcatgatccccagccgaccattcctcctgcaatggtgagcccgtcaggaaaccgtagcagctgcgcctcaacggggcaggtaggatcacagagcatggacgccatgcaaacacaggacgaatcgacctgtcccgttgatgacatcactcagcggacaccatgtgagctgcatattcctttcaagaacttatcaataaaggtggcgtcgggcatggccatcccaacggacccttcaggtacttaccactgtaggccgattccagcaggatactccaaggtcaaagttgagttggtcgaaggcgcgtacgaggacctcgagctggattaccctggaggagacggtgagacgcatctacgagacacatgccatgccattattctatggcgcaggcggtacatcatcctccctgggcgacaagcggcgtctcgtgcaccatctcctccggctccgccatctcctcctcaggatcctgcaccgtctcctcctcatgctccgccagcaccgtctccacctcaggctccagcatcgactcctcaggatcctgcaccgactcctcctcgtgctcctacacctactcccccgcaagctcctcttccggcaccttcaaagtcaagggcccccccagctccaccgcttgcccacacaagggcaacaaagaaggcgaaagttgacgccgccaagaacaaggacccggggtacgattgcacgcaagaggagcttgacgcttacgttgcatcagaagtcaagagacaattcaagcctcgaagtccagaaaagaagattcctatagaccccagtgtcaggaacttcttcaggggtatgtctgcatctgtcaaggaagccatcaagctatcggactatgagcgaacgcagaagaaagcatcttctggaaagtccaaaccagtccctcagcttggagagcaaccaaaccaggagatcgagccgttggtgaccggtaaagaaatgacgatagaacaatttattactgacaccggtctaactacggatcaattgctaggagtcgcaccaatcgaaaaggcggaagtgaaatacatgtacgaacttggtaaaccgcttgtcaagcctgagctgctgcagtccctacccacacaaatgtacaagttccatcagctgtacatggagatgagcgccaccggtagagagatgatcggagcgaggatcagggacacggacttcttgcaaggagatgacattctctggatcaatttcaggggaatctacgaactataccagctggacgccctcgacgtctctattatgagttgctggattttaatggagattcaaagggcccgacggcggagggttttcgatactggattcatcgaccctcggaaagtaaacgtcgcaatgctcgaccaatatccacaagaaacagaggacaatctcgtccatctcctgaaggcgcagcattacaagacgttcatactgttgccatacaacacagaattccactgggtgcttttactcatcgacctggaggcctgcaccgtcaacgtatatgactcaatggataaaaaagagtctacgtttgacaaggttttcgaacttatagacagggcttggtatcggttccgtcatttggtccgcggcaaatggagagaaagacttaggcggaagttcaaatttccttgcgcaaagcaaaagcagggaactaacttgtgcggctattacgtgtgcgagtattgccactgccttgcagaccaaatcatcaccacaagagagctcgattttattcgcatgagggataacctgaccacacacaaggaatttatcgcggcggttcaagaacaactcatgggattcatcaacgaagaaatccttgatcccaagggtgaattctactacgacggaaacacaattcaccggtccttagcttctgagctagcagcgagtactactacgtcgaaatcgtag

SEQ ID NO: 57383 - DNA, 876 bp, Oryza sativa
  Clone ID: PAT_MRT4530_591C.1
atggaaagtccaaaacaacttggttttgagatcagagggagtaaacccacttgcttgctaccagtttgcgtgatctccctgtgtcatactgctgacaaactagcagacaggacaggggaccaatatggatcattgtcattaaccatgcctcccctgtttattcaagagctgggacctggatcctacaagtcgcgtgtatatggccgtgcactcagcggcggagacgttgatttcagaaccagggttttgttagcgttcattaattgcgcccgcggccggaccgcgggagccgcgcatcatgagaagttcagcaacccacgttgccgggcacccatgggacttcaggcaggcgtaccgccttgcagcgactgtcagtcatccgctgctgttgcttgctacagtgctactgctcgacgcagatccacgcctacatatgccgcagcagaagagaagaaaagggtcgtaaactgcgtcagcatccaaaggcccccaatcgaggacattattcacgccagcgcgtacattggccccgttcagttgtgtttccacgtgcatggtacacctgccggaatcgcagagatatctctgcgtgacactactctagctccgattgatgatcaagacgtcaaggggcactttggctcaggtgaagaagagatttttagaagacaagttgtgaattccaacgtggtatacatggagcagaagtacggaagagggcctctgggcgtttatacaatcaaagctcaaattaagaaggtgcgttttacgactgctcgcaatcatgtcagccagatcgctcttatctttgttcacatgccaatgtcagaagctaaacacaacgtgatggcaagttggaatttaggagatgcatga

SEQ ID NO: 57384 - DNA, 603 bp, Oryza sativa
  Clone ID: PAT_MRT4530_59200C.1
ggaatcggcacgaggccttcctccaccccactctctcctcctccgccgccgcatcctcaccaacccccaaccgccctccctccctcctcgccaaaggtaaaaaaaaaacttagccggatctctcatctggagacttgctcatccttatctatcttttggggatttcttcatctcattctcatacatggtgtaggccaaagtttattgtgatggatctgatgtttgcttgcgtcctttcctagtcaatttcctactctgcctaggagtatattagagcgagggagtctttttacaaaccgactctgaatctgaacaaaaaaaaaacaatacagagacctgtctgtgccgataatatgaaaatctttgctttctacacaattactgcctttggttttggggtaccactataaatccagtatacaaggagctctgagatatttatgattttagtgtactaacatcatcagtagctgaaacaggtgatgatgagtttctacgctctaatactaaggcccttcactctgaatatgatagcttattttttattttagggagatcaaatactctccctaaacagtaaacacccgaaagtactagtctagc

SEQ ID NO: 57385 - DNA, 525 bp, Oryza sativa
  Clone ID: PAT_MRT4530_59201C.1
ttttttgtgttgttctttttgttttgttctttttttcgttgagcatgcaactgaattatagcatttctccacatcaagtccaggatattggtaagtacaaccattagaattactgtacaagttcagatctatctgtcatggaactctttaaatttgtaagcatacatggagtcttcaggcatgttaagatattctactaggatcatgttgaatcatcctataagataatacacaatatcaacgatcaactaatcaacatcatatgctccagttgtcattaccaccaaactttataacctccttaggctggccaggtcctaataattgaacaacttatcttcacgaaattcattcattgtcgtcctcattttcgtcaatcccaacccagcgagtgaatgcaaacagaaattctttgaaggtcaccattccattcttgtcccagtccatttcctcaaatcttttcatggctatacgcccagaagagcgttcccctgttgcagtctcattcattgattgaaccatctc

SEQ ID NO: 57386 - DNA, 231 bp, Oryza sativa
  Clone ID: PAT_MRT4530_59202C.1
agcccgagatggaaagccggtatggatatattgggttggcactaattgagcttcacggagtccatcacggaccgctgtgtttcttgtgtcccctgtttggttgtcgagagaagagacttctggatgtgatgttcactgtcccgctgaggtttcccgtatagctctctaatagtagaggttgatgatgcgtctggtgttgctccccttggttggtttgtaccccccgatgta

SEQ ID NO: 57387 - DNA, 951 bp, Oryza sativa
  unsure (1)..(951): unsure at all n locations
  Clone ID: PAT_MRT4530_59203C.1
cggacgcgtgggcggacgcgtgggcaaccgcggcccacctcgtcgtcctcctcctctcctcagatcggcggcgagcggcggcggcggcgcacgggcgatggcgaagtcgagcgcggacgacgccgagctgcggcgcgcgtgcgcgcaggccgtggcggcttcgggggcgcgcggcgaggaggtgtccttctccatccgcgtcgccaaggggaggggcatcttcgagaagctcggccgcctcgccaagccccgcgtcctcgcgctcaccgttaaacaatcgacaaaaggtgaggcagccaaagcttttctccgagtattgaagtattcatccggcgcagtacttgagccagccaagctttacaagttgaaacatctcacaaaggttgaggttatttcgaatgatcctagtggttgcacgtttgtattggggtttgataaccttagaagtcagagtgttgcccctccacaatggacaatgcgcaacattgatgacagaaaccgcctacttttttctatcctgaccatgtgcaaagagatacttagctatcttccaaaagtcgttggaattgattttgtggagctagccctctgggccaaggaaaatacagtgactctggacaaccaatcgagcacccaagatggacaagaaaaatctgtcacaactcaaactgagaggaaagtaactgtaactgttgaaaatgatcnttgtgtcccaagcaaaggatgaagaggaagacatggaggcacttcttgacacatatgtcatgggcataggtgaagcagatgctttctctgagagattgaaacaggaacttgttgctttggaagcagccaatgtctatcaactactgcagagtgaacctttaatagatgangttntgcaaggtctggatgctgctagtgcaaccgtagatgatatgatgagtggttacgcattnttatatgaagctc

SEQ ID NO: 57388 - DNA, 941 bp, Oryza sativa
  unsure (1)..(941): unsure at all n locations
  Clone ID: PAT_MRT4530_59204C.1
acggaattctatcagctccagaccaagccggttcgtgagaacctcccgtcgcaatcttcgtcgttcgcgtcttcgaacggcagcagtgttactttctcagaaggattcgagtcgttgctgagcccggctggtgtcttgcctgatgttagcctgaatgattttgttgtgcagaaccaacaggctttgcagttccgccgcgggtttcaagaggcaagcaagtttcttcctgatgagagcaagcttgtgattgatgtggataagctctacagtggagatgaggggagtaggttccttggtgaggttagacaagagaagaagcttgtgaaggtgaagacagaaacctctgatgttgaatcagcaggtcaccgaggaaagaagcatttctatggtgatgacctggatgcggaggaagggaggtgcagcaagcattccgcgcaagggattgacactgaccaccttgtgagggatttgatggacaaggtcttgctatgcaatggtgagacatgctcaaaaggtgttaaggagttgcgtgaggctctgcagcatgatgtggcgaaacattcaggcggaggccatggcaaagggtccagccatggcaagggtcgtggaaagaaacaacccaagaaggaggtggttgacctggagacccttctcatccattgtgctcagtctgtggccactgatgacaggcgcagtgcaactgagctcctgaagcagatcaggcagcatgctcatgccaatggtgatggtgatcagcgtttggcacactgcttcgccaacggcctcgaggcgaggctggcaggtactggtagtcaaatttaccaagaactacacgataactcggcttccatgcactgatgtgctgnaagcgtaccagctttatttggcagcttgcccatttaagaagatctctccattacttttgccnatcaaacaatttt

SEQ ID NO: 57389 - DNA, 369 bp, Oryza sativa
  Clone ID: PAT_MRT4530_59205C.1
atagagagaaagcacagatacattccattaatgaaatagcgcgatcaaaatggccccacatggcttactcacatacgtccacgactcactacatgcatgacaacgagccacagaaccggatccgggttccttacctttgcatcctgcagaggggagggaatataacctccctcgcctccactggcatacaagcaaaataccattcctcctaaggatcaatctcggttctgcaaagggacattcaatgtacgacctttaactattccaggagaaagcttgtcgatctcattctctacgactgaacatttcgatcttccaatgcttaaacatagcaaaacacgccccagtatacacaccgtttatctttga

SEQ ID NO: 57390 - DNA, 264 bp, Oryza sativa
  Clone ID: PAT_MRT4530_59206C.1
gatataagacagtgacatgcactcatcaccgtaacgctaggatccactacgtatcggtcgcccttcctttttttttttttttttttaaagttaatattattgtttttttttaattaaaatttcttttgtttttcatttttaggtcatttattaaactaaaaataaataacctttctaaacgtgggatcccaaaatgaatgatacaattacaacagaacgagaaaatctcatacgtgccccctaaagtcaaaacattataaaaga

SEQ ID NO: 57391 - DNA, 519 bp, Oryza sativa
  Clone ID: PAT_MRT4530_59207C.1
atggcgacatggttacggcttatgtataggaaggttggcaggaaagtcaaccgccagcggcaagagacacgtgtgcagccgctttcggccatgccaggccaacgccccgacccgactgctagtgctagggagaatacgcacggcatgcacggctccaaaaactcaaaacttggagcttatttcaccgcttccttgctaacagatcgctttcttgtgaaattacttaacagctggcgggcatcagtaacttccgcagttgaagtgtgtagactgtcttcttacaagaacaagaacatggacctatcaaaagtaaaaactggccagatacgatgcaactttactgatggcgtgcatttcgcctatatggccactcaggcaggcgttgccagttaccgaaatgctacgccaccacttaccctccaactatgtatccaagctttgaaaggaggcaccacgttcgctgtggggctagaaattcccatattaatcggagaaaaagaaaaaggagagttcaagtag

SEQ ID NO: 57392 - DNA, 154 bp, Oryza sativa
  unsure (1)..(154): unsure at all n locations
  Clone ID: PAT_MRT4530_59208C.1
ttttcctaagaaatgttttcaacatcttcttaatgcaacacagtatttgatataactcaagtcatttttcttctggtatcaacaaagtcttcagttattcaatcttgngtttttgaactcaatgtgcttcactgtacataaaagttttcacctt

SEQ ID NO: 57393 - DNA, 2139 bp, Oryza sativa
  Clone ID: PAT_MRT4530_59209C.1
atggcaccatcgttgatgtccccgttgtcgtcggcgttcccatcgacggcgtcgtccccgtcagccgcggcgtccccgtcgtcgacggcgtcgtccaagttatcgtcgtcgtcgccgtcgtcgacggcgtcccagtcggcgacatcatacctcggcagcggtggcgacgggcgaggaccatgtcatcccaagcgcgaagtccgcggcgacgccatggcccggatagctaaagaagtcgatcgttcccctccgttgctctggcacacaccagtctgccaggatgagcatggacggtgggcgatggcgcgccgccgtggtggagtggtccagctggaggcgcacgaagcgcgggtcggcgaccacggcgcgccacgacttgcacacggacctgaaccgcaggatggacttgacagggaggcggaggaggatttcctccacaatgtcttccgggatgccagccgcggcggcgccggcgggttcgacgcaccgccgccgcttggcaacgggcacatcaccaccatgtcccggctgattcatcatatcacgttcagaaagggaaactatcaaaaacattttggtttccggggaattcgcttgctatcgatggcttgtgcgagcgcgggaaaacgtgatatgatgaatcagccgggacatggtggtgatctgcccgtggccaagcggcggcggtgcgtcgaacccaccggcgccgcggcggctggcatcccggaagacgtcatcgagcaaatcctcctccgtctccccgtcaagtccatcctgcggttcaggtccgtgtgcaagtcgtggcgctccatggtcgccgagccgcacttcgttcgcctccagctgcaccactccaccacggcggcgcgccatcacccaccgtccatgctcgtcctggcagactggtgtgtgccagagcaatggaggggaacgatcgacttctttagctatccgggccatggcgtcgccgcggacttcgcgcataggataacatggtcctcgaactcgaagtcgaccgtcgccgccgccgcagacgggtacgctgccgccgactgggacgccgtcgacgacggggccgatgccgcggatgacggggccgccgccgacaacttggacgacgccgtcgacgacggggacgccgccgcggactgggacgacgacgacgactgggacgacgacgttggcgccatcggctggggcatgcatctgcactgcaacgggctcgtgttgctgcgctcgacgatgaagtactccactcagatgttagtttgcaacccggcgaccaaggagcttgccgagctaccggactgtgcgctggactacttcggggtgcaagcggtaagcttctacgccgaccaatctacgggcaagacgaaggtggtccactgcttcatccgccactgcgacaagacctacacggactacagcgtcggatgcgaggttttgtccctcggctcgccggcgtggaggccggtcgccgacccaccctacctcatcaagaccaaaacgtcgccgtgcatcctcggcggcatctactggatcgccgccctaccgtcgccgtccaccggcagctgcaccaccccagggattgtacgcttcgacgtgtgcagcgaggagttcgccagtttcccgtgcccaccgttcatggagcggcagaagatgtctgacgtcgcttgtggggacctgacggagctgggtggcaagctgtgctatgtgcatgctcccgccgacgatagagttgagctctggacagcttccgccgccgacggagggggcagcaggccacggtggtcgctgcaatgcaccgtcgtgctaccgcactcctttgacaccttcttccagtttacctacgattaccaaggaggcatatttttctacgtggattacgccatgatttaccggtacgacgtcgaacgcagagttgtggaacgagtggtggacatgctcgaggagatgacctacttcgacaggtcaaggcgcaagctggaccgctgtgatggggattggatgcactatgccattcagtacagtgagagcttggcccaggcacggcccgattgctactgggccgtgccgtgccgggccgacacgaaggcacgatcagcccattgggcctgggctagcccaggcacggcttag

SEQ ID NO: 57394 - DNA, 1209 bp, Oryza sativa
  Clone ID: PAT_MRT4530_5920C.1
ctcgtttttttttttttttttttttttttagaaatgaaatatcgtctttcccatagcaactggattagagttgaacatggtatcatgtaatttatatgaatagcacgcatccataaacatcttgctgtcaagatactcgtaactcggacccaaaacgttccaactcgtcctactcatggactacatttcgtgttctcgataaaagcgagatccgaacagacctgatccaaaagccaacctgcgactctaagcagaaaccatacacaaacaaataaataataacaagtgaacgcccaataggtaaagatgaccctgacatcttccgactctgcccaaatgttctcaacatagctcatggctaacgacttttaacttccatagacgggaagcactgacaaacttacccttcccaccgagcactagtgttctggaggtaacacactgctgattactctgaggtggcagctgatttggtgtcagtctccttgactgcttcggtcgattcctcctttgtcgccacttcctcagacttcttttcagttacgctgagtttctccagaaggccagcggcagacgaatcttcctcggtttctttgccttctgtctttgcaagtgattccgaaatctcttcaaccaaatccttaaatttcttgcaattttcgacagagccaaaccggattgcgaacatctcctccttaagctcgccgtcggcgaagtccgccgcgtgccagacgcacgacttgtcactgcccgcatgctcctgcatcttcgtggtcgaagcaactaggtggttcgcgcagatcttgagcgtcttggcctggcgcatgacgaggcggaccttgccgttctccttgtgcttgaggagcttgacggtgcccgtcccccgctccttccactggttcccctccttgtcaaaccggtaaagcttcgccttcatgtcgaggagcacgtcctcgtcctcctcgccggtggtgacggcgacctcctcgagccgcacgatgggggcgacctgggcgcccgtgtcctcctcctcgccgcccgcggcggcggcggcggcggaggcctcctcctcgtcctcggggcggtccacgacgggctccttgtccgccatcggaggagaagagctaacgtctgctgctctcggttccagaagtttcggggaggagggcgatcgtggggggagaggttggtggtaagaagcccggccgg

SEQ ID NO: 57395 - DNA, 320 bp, Oryza sativa
  unsure (1)..(320): unsure at all n locations
  Clone ID: PAT_MRT4530_59210C.1
cccacgcgtccgcccacgcgtccgcccacgcgtccgcccacgcgtccgcccacgcgtccgcccacgcgtccggggggaactttgaactcctcccaaaaagaagaaagaaaacaaactagaattgcgcctggcaagcaggagcgggatgctggtagtgctttgagctgtaaatgattgaaagcgtcaacaaggccttgttacttggatggatagtcagctgctccattaatgatgaatgaattttggtgcttgtgtngtaaaaaaaaaaaaaaaaaaaaaaaaaaataaaaaaaaaaaaaggacagccaataaaaaataag

SEQ ID NO: 57396 - DNA, 207 bp, Oryza sativa
  Clone ID: PAT_MRT4530_59211C.1
atgcggtgggaccgcggctgttgtgggtggcggggacgtcatactccccatgtggatggcacggcgtccatggtggaagtagcaacgtttgacatggtagatgggttggtcaaggaggaccttacggtgaacacaacagtggttgctgtgggcgtcctcctccccgtgcggatgtcgcagcggttggatcggaggcgcttgcgttag

SEQ ID NO: 57397 - DNA, 135 bp, Oryza sativa
  Clone ID: PAT_MRT4530_59212C.1
atggctggacggcagcacattgaggaggtgtcacggtcgagtgctcgagtcgtccaaatgatggcgccgcgcggcgtgcaaaatcccagtccagtcaaaggattcatcaaggatgcctttgccgggcagaaataa

SEQ ID NO: 57398 - DNA, 393 bp, Oryza sativa
  Clone ID: PAT_MRT4530_59213C.1
atgccatcgccggagaaagccgcgatagtggtggctttgggaggagagacgacaaagctcagcagcggcggtacctacatcgcgcggagattcagccatcaccggttagggccccgagctcgccggaagcagcggcacggccgcgaggaggtggcacgtaggacggagtttgagacgccatcgcctgagagggccctgagctcactggcgaaggtgaagagggcgagatgccggcgtgatcaatccgtcagatccgcacatgaatctggtagtggttgcagagacaccgacggcacggagatgattgataagaggcagcggcgtgacgcctcgtggaggagtctggagctcctggaggacagtgcagaggagggggcgcggagaaggctgtag

SEQ ID NO: 57399 - DNA, 1259 bp, Oryza sativa
  Clone ID: PAT_MRT4530_59214C.1
atggtgggcccatgtggacctctacttctaggggaaggacccctgggcggcgagtccaccgacgccggctaccgcggctcgttccacggcacgtgggagttcgccagcgccggcaagctcggcctcgaccgcccccgcgtcctggtcaccacggcggatcactactggttcgtggagagggcacgctcgtacgcggaggggatcaagaagtgcgagtgggacggcgagctggagttccacgagaccgagggcgagggccattcccagacagagtcccacaggcgcactcctcacctcctcatcggccggcgccgccgccggcgtgccctgtcggcgccgccgcggggccaagccgtcgtcgcctcctcgctgcggggccaagccgccgccgccgtcgggaccaatcgcctcctcgcccagtcgccacatcgccgccgtcggagcaaccaacgccggctctgccgcgccccatcgcctcctcgcgccgtcacgcgccacatcaccgccgccgggccaagccaacgccgccgccgcggcgccccatcgcctcctcgcctgccgagccctctggcttgccacatcgccgccgcaggggcaaggcgacgccgccgccgggccaagccaacgtcgccgccttcttcgttgtctgacttaccaaaaaaatgtgaaaggtcgacggccgctcctctaccacccggcaaggtcgacggccgcgacgatgtccgctcacccccgcttcgccgcccctctggcctgctcgagcggtcgccggcgagcgcgatagatgtgcgcggggcggtgggtgtgcgaggtccgcgtgctggggcgccgcggctgcaggctctggctcggcagttcgacggcgccgacaccgtcacgcgcgcgcacgacgccgccatgcccgctctccgcggccgtgcagcgtgcctcaacttctccaactccgcgtggctgctcgcctacgccgcgctgtacgcggcgctcctgtcggggggcggcgccgaccatgcccgccgccgctgccggagctcgcctgctgcgccgcccacccgcgccgtccgctgtccaggaaggagagaggggaaaggaaaggagagaggagtgaggctgacatggggcccgtatatatttgtcacgtaatgattgtgtattcatgtgtgattatatcataaataggcttgtgccttgcggtagtttgttctgcaggctgcagctgtggctttaccatgctctatgaattttacatgtgttgtcagttg

SEQ ID NO: 57400 - DNA, 377 bp, Oryza sativa
  Clone ID: PAT_MRT4530_59215C.1
ccgtgtatatgggccgagaaaatcggtccaatggacggacggcccatgcttgcgccgtcgcggtttcattgagcgagaccacggtctcacaagatcgaggcgcgagaacgagagcggtatcgctcgttcggtctgcgaggacggagcgcacacgatggcctaggcggtcatataatatcgctttgctaattagggagagcgcacggtgtcgcactcctaaaagtgcgagagcaagtcggtgggtcccggaactgctgcgatgcgcgatctcgcacgagaggaaagcgagagcgctggtctcacgcaagagagatgcgagagccctggggccggcgactgcaacccaagcagtctcacgcggcccggtcgcggccgcg

SEQ ID NO: 57401 - DNA, 114 bp, Oryza sativa
  Clone ID: PAT_MRT4530_59216C.1
atgggctggaatgagttcttgaacgaagttacagcagtaggactttctcttcctaacgacgagcagcccgatgagcgtatcaatggaatgagccgtgccgaggcaacggagtag

SEQ ID NO: 57402 - DNA, 1718 bp, Oryza sativa
  Clone ID: PAT_MRT4530_59217C.1
atggagcgacggtgtggcacgtcggcgccggcgatcgaagacatgtcgccgcacagccggagcacggccggaaaatacatagctggctacatagtgaaaaaaaaaatgcatcctaatggcgcgccgctggccgtgccaccgggtttccggttccatccgacggacgaggaattgctctactactacctgaggaagaaggttgcttatgaggccatagatctcgacgtcatcagggagattgacctcaacaagcttgagccttgggatctcaaagatcgatgcaggattgggacgggggcgcaggaggagtggtacttcttcagccacaaggacaagaagtacccgacggggacgaggaccaaccgcgccacggtggccggcttctggaaggccaccggccgtgacaaggccatcttcctcggcagcggcggcggcacgaggattggcctgaggaagacgctggtgttctacaccggaagggccccgcacggcaagaagaccgactggatcatgcacgagtaccgcctcgacgacgacaatgtcgacgtcccggaggaaggatgggtggtgtgtagggtattcaagaagaagagcatccatcagaggggcttcgaccagccggacatggcggcggcggccgacgaggacgagctccggtaccagctgctccacggcgcgggcatgtcgtcgtcgccggtcgaccagaagcacgtgctcctccaagagcagctcgtcgcgcacggcgcccatggcggcggcttcgtcgtcccggcgttcgaagcctccatgcacctcccgcagctcgccagcgccgacgcggcgccgtgcggcggcggcggcggcggccatgtcgcgttcgcctccatgaacccgctcgacgccgccggctgcggctcgcagaacatgatgacgatgaagatggcagcgacatccggtggcgagatgctgctgatgagcggcggcggcgtcgacggcggccgcttcggcgccgccgccgactggtcgatccttgacaagctcctggcgtcgcaccagaacctcgaccagctcttccatggcaaggtcgccggagcgcatcagcagcagcagcagatggccatggacgccgcctcgtcgttgcagaggttgccgttccaccattacctcgggttggaagctgcagatcttctcaaatccagtccactcccagtctcccaccgtccagtcccagacagagtcccacaggcgcacgattcctcacctcctcatcggccggcgccgccgtggggccaagccgtcgtcgcctcctcgctgcggggccaagccgccgccgccgccgggaccaatcgcctcctcgcccagtcgccacatcgccgccatcggagcaacccacgccggctctgccgcgccccattgcctcctcgcgccgtcacgcgccacatcgccgccgccgggccaagccaaccaacgccgccgccgcggcgccccatcgcctcctcgcctgccgcaccgtcaagccccaagatttggtatgacttgtagtggcttgccacatcgccgccgcaggggcaaggcgacgccgccgccgggccaagccaacgtcgccgccgtttgtgttaatgattgtgtattcatgtgtgattatatcataaataggcttgtgccttgcggtagtttgttctgcaggctgcagctgtggctttaccatgctctatgaattttacatgtgttttcagttg

SEQ ID NO: 57403 - DNA, 288 bp, Oryza sativa
  Clone ID: PAT_MRT4530_59218C.1
atggcgtcagagtcagagatgaaggccttccacgcagcactgctcctcctcctggccatggtcctcgtcgcatcatcttcatcaggcgtgatggcggccaagatagcggggcccaagtacttccaggacacctgctcggcggtgttgaacccgggcgccccgtcgtgcgacagcggcgagtgcgcgaccaattgcccgcggcagtacaaaggcggcgtgggccagtgcatcggcacgcagtgcaagtgcgtctacacctgcgcttccccggcgccggcgagcaactaa

SEQ ID NO: 57404 - DNA, 1106 bp, Oryza sativa
  Clone ID: PAT_MRT4530_59219C.1
atggcaacacccgctccagaattgtcgcgttggttgctgcgtgtggctctgctcgccgctccgcttgctgctctgctcttgcagctcccgatcccaatcagcctcaagccccgcagcacggacaccgccgccgccgccgccatggacgccgccgcttccgagatcgagttcgatatgcccggcgtcctgcgcatgtacaaggacggccgcgtcgagcgcttcgacggcacgcagaccgtcccgccgtccccatccggcgaccccgccaacggcgtcgtctccaaggacgtcgtcctcgacccggccgccggcatctccgctcgtctctacctcccgcctggtgtggagccggggaagaagctccccgtcgtgctcttcttccacggcggcgcgttcttggtccacaccgccgcgtccccgctctaccacaggtacgccgcctccctcgccgcggcggtccctgccgtcgtcgtctcggcggactaccgcctcgccccggagcagcccgtcccggccgcctacgacgacgcgttcgccgccctcagggcggtcgtcgctgcgtgccgccccgacggcgccgagccatggctcgccgcgcacggcgacgcgtcccgcgtcgtgctcgcgggcgacagcgccggcgccaacatggcgcacaacgcggcgatccggctgcggaaggaagggatcgagggctacggcgacaaggtcagcggcgtggtgctcctccacccctacttctgggggaaggaccccgtgggcggcgagtccaccgacgccggctaccgcggctcgttccacggcacgtgggagttcgccagcgccggcaagctcggcctcgaccgcccgtgcgtcaactcgttggcgtgccggaggagtggaggcagctcagggccagccgcgtcctggtcaccacggcggatcactactggttcgtggagagggcacgctcgtacgcggaggggatcaagaagtgcgagtgggacggcgagctggagttccacgagaccgagggcgagggccatgtcttcttcttgcccaagcccgactgcgacaatgccgtcaaggagctcgccgtcgtgaccgatttcgtccggcgctgttga

SEQ ID NO: 57405 - DNA, 2967 bp, Oryza sativa
  Clone ID: PAT_MRT4530_5921C.1
atgggcagctcgccgacgaacaccggccgcacgccgcacgggctcgggctccgcggccgcctcgccggcctcttctcctcgccgtcaccctgccaccatcagcactccgacgaggtggtggcgaagctgaaggaggaggtggagaagcagcgagatctcaaggagacttacatggctcggctggagagcacccaggcgtatctcaggttctgcctcgaggtcgcccaggtgcacgacttcttgcacctcgtgtccaactccaatggcggcgacgacgagccgcaccgcgacgccggagatcaagagccggcaacagccgccgccgccgacgacgacgacgaagatgctgctgaagcaccgccctgtgacccctacttcgccgccaccagagacctcgccgtgcagcacggctgggcgacgtggagggggctcgacgtggcggtgaagtggatgcgcgccgagttcttcgccgccgccgaccagcgcagccgcggcgaggccttcttcgcgcaggagctcgacgcgctgtcgcggcagcggcacccgcacgtgctgcggctgatggccgcgtgcctgcgcccgccggcgagctgcttcctcgtgacggagctgctgaccggcgcgacgctggcgcagtggctccacggtggggacggtggcggcagaagcagggagaggcggcggcagccgtcctcgccgccgccgccgccgccgctggtggacagggtgagccgggcgctggagatcgcgctggcgatgcgctacctccacgagcagacgccggcggtcgtgcaccgcgacctgaagccgagcaacgttctcctcgacggcgactcgcgcgtgcgcgtcgccgacttcggccatgccaggttcttgccggacggcacggcggcgctcaccggcgagacggggacttatgtttatatggctcctgaaatcattcgctgtgaaccatacactgagaaatgcgacgtgtacagcttcggcatcatactaaatgaactagtaaccggggagcatccatacatagatacaggttacgggcctagtaagcgtccgtacaagtctttgtactacgggtccagccctcaaagacccccttccccgacgccgactccgccgccgccgtcgccgcgccgcctcgccgccatgcccgccgtcaagtggctgatgcactggcacccgaaccagggggcgacgctgaacagccagatcctggcggaggcgtgcgcctgcgcggagtccctggggggatccaaggacgggaggtggaagacctccatcatcttctaccgcgcgatggcgcgggacggcgcgtccgccgccgccgcggggggcgggggccccccgcagcagcaccccgacgtgccccgggagctcctcggcgtcgcgctgcacgagcgcccggggctctacttctccatcctccgcgcgcaccggctcgtcctccaggccgactccgcgtttccccaggtcatggagaagctccagtcctacaaggcccgcgtcaccctcaacttcgagggatttcagtatcaactgggtgacttttgcctgaggattggaaaatgtgttcctaataattcggaaacactgaggggaatcatgatggaggtagagtattatcccctatcttccattgaaaaatccagggcagtaatggaagacttctttgacatatggcaggaaacagttgctaagaagtcattacctgatcttgtatgtctctacacccttcctaaggaggaaggcccgtgccccccccaatcgattctcgtccgcgcgtcgtcttgcggcagcggtcggttcaaggtgctcaaaatcggggggaagtggaagagctccacgcctgtcgagctgtctgcgtcgtcctcgaggggagtaaaagctggccggcgtgctcgctgtgaagcagcaagcatcggcgcccatcaggccgcccatctttggcagtctggctgcctgtgtgctcgtcctgtcggcctctcgggggagatctctgtccgcggcgccgatctggagtccggcgaggactcctccgactctgtcacctccgacgctggcagcgccaaggctgctcccgacgacgtgcttcatatcgcgcatgccctctgcaaggtttgcgccaagtctcctagagccgtcatcgactttgttcgaagagtgagccctgccaccgtcggccgttcgattgattgggacgtcgtccgcgaggaagagtcatctaagatgggcgatggccgtagccggtggaccgatatggaggttcgtgtgtttcttgagagctgcttggaggagatggcagcgttcaccatcacctccaactcccccaagccgcaggcatggcagaacctaatacacaagatgtacaccaagtgcaagaagaaggtgaacaaggctcaattggagtacatttgggggcagtgtaagaagcggaatgatcctctgaagcacattgaccttcaccacgcggtattcagtgggcgcacagttgtcggaaaccactccgccgtcgcaggggcagccccacaggcaccgcaaggagcagttcagtggcagaccatcgacatggcgcagctcgctgctgcttatagaccaccacctccaactccacccccaacggcagcagaccggggcaagggaaagaggctagcagcaaacactactgcctcagggagttcttccaagaagtcccgaagcgactccgctggactggctttggagaggattgcggacatccgacagcagagctaccagagtcgtgttgctcagatggaagcagagaagtctatgggccttgatgcgtgcatggagttggtggaaaatgatggccatgaaattggaggaagtgtgtgccacgcgggacggtgcaaggaggaagacgaccctgccgtggatccgacggcgggcggcggcgacgttcaccggagcggcgcacggcgctacgagggaagcgcacctgaatga

SEQ ID NO: 57406 - DNA, 792 bp, Oryza sativa
  Clone ID: PAT_MRT4530_59220C.1
actattaaaactggtgtaacatatgactccctcgatggtttttagtgtggttttcgctaatatggcccattgacctagtccaaccgctaagtcatcattatgggggccacatgtcatcctctctctttcctttcttcctcctcccccctttatcttctcccccttatcttcctctccccttctggttcccttctccacaacgacgacggtagcgatgggaggacgagggtagtggcagcagttgggggcaagctcgccacgcaaccgtcgtcgcgctccatcgcctcctccttccccttctccctcgccgagaaatttcgtgatccaccggccggcgagatcctctccaagctgccgcggtcgtcgccgccggtggcgatgggcggcgaccactaccagacgctggggctgcggcaggacgccaccaaggccgaggtgaaggccgccttccgccgccgcgcgctccgcgaccacccggaccgccacgcccactcccccgacgcggccgcgcgcgccgacgccgcgcgccgcttccgcctcgcctccgacgcgcggaggtggtacctggcgccggccgcctccgggcggagggggcgccgcctcggccggattcgattgggacttgctgctgaagtcggtcacgcggcgagggttcctcatcaatctgggtttcgccaggtgaagctgctcatatgcgctgatgcttttcttgctttggctgatttgatatgccgccattgcgtgattgttgtgctgatccgttacattgctggcttttctcgagggaatcat

SEQ ID NO: 57407 - DNA, 777 bp, Oryza sativa
  Clone ID: PAT_MRT4530_59221C.1
atggcggcgtcgagccagaggcggagcgccgtcgcgccaaggcggaggtgggccactggaggcggcaccgaggtggaggcgggctggctggaccgcccgggcgatccagtccactcccagtctcccaccgtccagtcccagacagagtcccacaggcgcacgattcctcacctcctcatcggccggcgccgccgcggggccaagccgtcgtcgcctcctcgctgcggggccaagccgccaccgccgccgggaccaatcgcctcctcgcccagtcgccacatcgccgccgtcggagcaacccacgccggctctgccgcgccccatcgcctcctcgcgccgtcacgcgccacatcgccgccgccgggccaagccaacgccgccgccgcggcgccccatcgcctcctcgcctgcctcaccgtcaagccccaagatttgtgtatatgtgttatgtggcagatttgtgatgaattcctctcatgcaagtagcagcagcagcttcagcttatgcagtgcgagtgtagcagcattgcaaacaccaactcagcattgcagacttcagagtttagactaaaaagattggttgacattatctggcatgcctagtagtgctttgccttttcacttcacatgatgatggatggtatttcataatatcagtgtgtgcaagtttgtggttgtttattattaattgctaaattttgaaaatgttgatatgtcctattagaaaaaataatgagttatatttcttcgtcgaaaaaaaaaaaaaaaattgcgggc

SEQ ID NO: 57408 - DNA, 417 bp, Oryza sativa
  Clone ID: PAT_MRT4530_59222C.1
atgccgcggatgacgaacgcggccgccggatccggcgccccaggtggcgaggaggccgcgcgcggcggccgcccaggaggggtctttccccattaccgtcgagctgaaggtgccgacgcttctggaccgttggattccacgttaggcccatccatgttgggccggaacgaggataccggcgcggcggcgcggcgggccggcggcggcgggggaaggatctcggccggcaaaccgcgcggccgttctactcctccgggaatatggagccgaagcgcccaggtcagcttcgtcacctcctccccacccccgctgccgcggcggtggcccccgctcgcggatgccgcgttgcggcgtcatcacggcatcacgccggactccggcctctcctgccgaaaaagactcaggcagtcagactga

SEQ ID NO: 57409 - DNA, 2638 bp, Oryza sativa
  Clone ID: PAT_MRT4530_59223C.1
ttcagatggaggattgccaagatgtcgctggggctcaacctctgcgtctacgtgcccaggacgctggacgacggcgactcgccgtccaccgggtcgtccacggcggcgctggtgtcgccggtggcgtcctcgtcgtcggcggcgaccagcgccaacaccacgcccacggcggagcagagggtcaagggcgccggcgcgctcatgccgaccaccccgacgccgacctccgccggacttcgcctctccaaatccggcagcaaatccttcaagaaaacatgtgcgatatgtttgaccacaatgaagcctggtcagggccatgctctattcacagcagagtgctcacatacctttcacttccattgtatagctgcaaatgttaagcatggaagcaacaattgcccagtttgccgcaccaagtggaaggaactcccatttcgaggtcccttgcctggtgaatttcctcaaggaagtgcaaggattaatccagttaatgggcaccaaaatggcgggcagatgaccatactgcgaccacttccccgtgctcgttcttctggtcggctgcatcatatgacatcgttgttgcctgacactgaccgtagtatttttaacgatgatgaacccttggactcactgtctgaagcaaatgaaggctcgcagcaggggtgtttaagaacagtggaaataaagacatatcctgagttcactgaagttccagaaagtacttcagaaagaaattttacagtcctagttcatctaaaggcaccccttgctcagactttgcaaacaagcagcaaacttgaagatggcaatagcttgggcacaactcgagcccctgttgatctcatcacagtgcttgatgtcagtgggagcatggctggtaccaaacttgcattgctgaaaagagccatgggatttgtcattcagaaccttggctcctcagatcggctttctgtaattgccttctcatcatctgcacgtagactcttccccctccgtcggatgactgagactggtcgtcagcaaagcttgcaagctgtttattcactgacatcaaatggtgggaccaatattgctgagggcctgaggaaaggctccaaagtgattgaagatcgacaggccaagaatccagtgtgcagcatcatcctactatcagatgggcaagatacatatacagtctcaccaaccgctggtgtacacaaagcagcaccagagtactgctcactcctgccatatactagtaatggttgtcaacaggtaccagttcatgtctttggatttggtgctgaccatgattcagtctcgctgcattcaatctcacaaacctccgggggcaccttttcattcatagagacagaggctgccatccaagatgcatttgcccagtgtattggtggactcttgagtgttgttgcacaggatttgcatgtaaaggtggagagcctccaccctgatgtacactttggctcgatcagatcaggaagctattctagcagacttgcagatgacaagaggaatggctccatagatgttggtgacatgtatgccgaagaggagagggatttccttatgtcagtaaatgttcccccaggttacggtgaaacagcacttctcaaagttggctgtgtctacaaagatccactgatgaaggagactatcaatatggctgatgtgcaagtcaagatctctagaccagcattcgtctcagtacaaagcgtgtcaatcgaggtggaccgacaaaagaaccgtcttcatgcagctgaagtcatggctgaagcaaggttgtctgccgagcgtggtgacctgacacatgctgtttccttactcgaagactgccggaggatgatcatggggtcaacatcaggacaatccggtgatcggttgtgccaagcattggatgctgagctgaaggagatgcaagaaaggatggccaatcgccaaaggtacgaagcatcaggccgcgcctatgtcctctccggcttgagctcacactcatggcagagagcaactgcgcgaggtgactccacagacagcgagagcctaatccaggcctaccagacttcatccatggtcgacatgctgctgcgctcgcagacaatgagccgctcctcaacccctccacagatgaggcatgtgaagtcgtttccagcgcgcccgcagcctaggtaactgcaatttctagtgtttggcaacgccaataaggatgggttttgctaaagcctagatgtgaatttggtgaaagtagtagtgtcagttgaattcttggttttgtggcgggaggacgggacgggggtatagtttgtgtggtataagggggattttaacggtgtaaattaatttgggtgtggtgggggtaaaagggaaaaagaatctgtatttgggagaaggatggtataagagttggggaaatggggtaagatagggtggctattattttttttttccttcttgttggttacctggtatactcccagtattgtactagtagctctcctctctcctttgtgtggtgatgtacataaagagaagggtatacatttgtgaactggaatgtggttgaggatggggatggatacctaatccttttgcaaggcttggcttgcctcttcctggaaattgaaaattctgatcatggccactt

SEQ ID NO: 57410 - DNA, 360 bp, Oryza sativa
  Clone ID: PAT_MRT4530_59224C.1
aaaagcctatttccaagcgtggataagactccttgtttacgaatcctggaactcaatttatagacgtatggtactattctatagatacgggcctatgtaaaccgcagcacgtgcattttttttctccagaaacatgaaatatttaataaaacggaatccttacacaaatggaagggacggagcccgccaatgcaatccatatagtatgtataaacgggccaaagcccattgggccgggggttactagaccttgaaggagatggctctgttgggcgggttgaagaactgcaccgagcggtcgttgagctgttgaggagggctctcaccgcctgggggaagaagctcatggaggagggcaac

SEQ ID NO: 57411 - DNA, 636 bp, Oryza sativa
  Clone ID: PAT_MRT4530_59225C.1
atgggcggcgaccactaccagacgctggggctgcggcaggacgccaccaaggccgaggtgaaggccgccttccgccgccgcgcgctccgcgaccacccggaccgccacgcccactcccccgacgcggccgcgcgcgccgacgccgcgcgccgcttccgcctcgcctccgacgcctacagggtcctctccgacgaccgactccgcgccgagtacgacctccgcatccgctcgtcctccttctacagccgcgcctcctcctccgcctccgcctccgcctcggcctcggcctcctcctcgtcggcctcgtatgactacggctacggctacggccacagacgcggaggtggtacctggcgccggccgcctccgggcggagggggcgccgcctcggccggattcgattgggacttgctgctgaagtcggtcacgcggcgagggttcctcatcaatctgggtttcgccagtgtactgctgactggagcagcttttcttgatggaagtattttagaaatctggaagatgaataattctgggctcattcaattgaccctctacacttttgaacttagtgatgtattgatcaaacacccactggctattgaattgagtggctactttgcacattgttgtccataa

SEQ ID NO: 57412 - DNA, 229 bp, Oryza sativa
  unsure (1)..(229): unsure at all n locations
  Clone ID: PAT_MRT4530_59226C.1
gccgcagcagccgcctccactcccccacccccagagaaccctaatccacaccctntcaagccagccatggcaggagcgcggcggcgagcgtggcaggcgagcgcaggcgggttcggccgcggcttcgggcgcaggcggtcgcggngaccgaggagggcgccgaggagggcgccgnggaccgagccaggaggaggaaaagaggatgcccgncacnaagctcgggcggact

SEQ ID NO: 57413 - DNA, 1956 bp, Oryza sativa
  Clone ID: PAT_MRT4530_59227C.1
agtggatccccgggctgcagggaggagtcaccaagacgtcgtaggcaacacctcccttcccccctacccttgaaccgaggccgagtcgtggtcgccgcgagtggaaggcaacaactcctccaaggcaggcacaggcagcagcagcagcaggagaggaggcaggcgcgggcggcgtgagcagcagcggcagcgccgcattacagccttgggagtaggaggaggaggaggcagcggatgatgatccctagggaaggggcggtgccggagcccgcggcggcgtcctgatccccgaccgacgatcgcggctgctgctgttgctattttttcagaggatggagaatcctcagattgagatgggggccttcaaggcgaacggtccgcaattgcagaatggtgggctacgttccagcatggttcagtcctggaacctgcagagattcgttgagagcgcgctgcggagcatcaggattgtcatattcacttctaagctcaatctgctcttgccgtttgggcctgcgtcgatcattctacactatactaccagcagacatggattggtcttcctattcagcatgctaggaataacacctttagctgagcgcttgggttatgcaactgagcagctcgcaatatacactggtccaacagttggggggcttctaaatgctacgttcggaaatgcaactgaaatgatcatagcaatatatgctttgaaaaatggaatgatccgagtagttcaacaatcattgcttggttccatattatcaaatatgttgttggttatgggctgtgctttctttgctggcggtattgttcatcggaacaaggaccaagtcttcagcaaggcaactgcagttgttaactcaggtttactgttgatggctgtcatgggactaatgtttcctgctgtccttcacttcacgcattcagaagtgaggcaaggagcatcagaggtttctctttcaaggttcagcagttgtattatgcttgtggcatatgcaagctatctctatttccaactaagtggacggaataatgcttatagtccaattggcagtgaagaaatgcccaatgaggatgcagcagaggaagatgaagaatcagagattggcatgtgggagtccatagcatggctcgcgatgttgacattatgggtgtctattctttctgaatacctggttaatgccattgagggggcatctgattcactgaacctacccgtggcttttatcagtgttattttgcttcctattgtgggaaacgctgctgaacatgctagtgcaataatgtttgccatgaaagataaacttgacataacactgggtgttgcaattgggtcatcaacgcagatatcaatgtttgtgattccattttgtgttgtcattggttggatgatggggcaaaagatggacttgaatttccaactattcgaaacagcaacgctcttcataacagtactagtcgtggcatttatgctacaggatggtgttgcgaactacttgaaaggacttatgctgatcttgtgttatctaatagttgccgccagtttcttcgttcacgttgatccacaatccagcgatgattgatgccacggacacggtaattattgtaccaaatacccttgaagcctttactaatcttaattctggtgagttgctcctccgtagcagagctcagcctgctggcaggagctggcagaatgttgacacggccgggaaaatcacgtggtgtcggttagtttgtccatgatctgcagcagcaattattgcacgttgcaatagtcaaaagatctgaagggcatctaggaggaggggtggttgtaatgtatacagattacagaaacaaggaaatgcaatgcaatgtcgcccatgtaaaaagtctccttgcatagttgcattcaattaattcagttaatgtggccctggcccgttctctcctaaaaaaaaaaaaaaaaaa

SEQ ID NO: 57414 - DNA, 505 bp, Oryza sativa
  unsure (1)..(505): unsure at all n locations
  Clone ID: PAT_MRT4530_59228C.1
gattcngcnttaggtttcggcaacatgggcggcatcggcgccgacnacgaatcnggcgangaacgtgataacacncgtnaangggttccnacgggangctgccgttccacctggaaacagggtntgtngaagtggacaacaccgataccgttnaactcttctactacttcatccagtcggancgcanccccnccnataancccctcntcctctggatnaccggcggncccggctgctccgccctctccggcctcctcttcnanattgggcctctcnantttgacgtnacttggttcnccgaanggttcccncnattgttctacttccnanattcctnnaccnaggtgagcaacgtgatatttctggaccccccgttgggaccgggttctcctncccccctcaagaacaaaggttcaacctccccctcccccnnacgganancnncttgtggtgttctcncccnatggctgggcgattaccccnaattccgcctcnaaccctctct

SEQ ID NO: 57415 - DNA, 500 bp, Oryza sativa
  Clone ID: PAT_MRT4530_59229C.1
ggagcatcagaggtttctctttcaaggttcagcagttgtattatgcttgtggcatatgcaagctatctctatttccaactaagtggacggaataatgcttatagtccaattggcagtgaagaaatgcccaatgaggatgcagcagaggaagatgaagaatcagagattggcatgtgggagtccatagcatggctcgcgatgttgacattatgggtgtctattctttctgaatacctggttaatgccattgaggtcacctgagtacctctgcatgggtatactattgatcactgctttgctctttgctatttgctatcagggggcatctgattcactgaacctacccgtggcttttatcagtgttattttgcttcctattgtgggaaacgctgctgaacatgctagtgcaataatgtttgccatgaaagataaacttgacataacactgggtgttgcaattgggtcatcaacgcagatatcaatgtttgtgattccatttt

SEQ ID NO: 57416 - DNA, 2139 bp, Oryza sativa
  Clone ID: PAT_MRT4530_5922C.1
atggaagaagatgaagtggaagacgacaatattccggactttgctcagtacgctggatttgaaggaaatcaaacgggcgaggacgaaagggatgctgatggtaacgacgttgtggatgatcttggtcagatgttgcaggacgctaaggaggactgcgaaagtgaaaagggggcccataaattggacaagatgttagaggaccacagaacgtcgttgtacccaggttgcgagcaggggcacaaaaagttggatgccactctggagttcttgcaatggaaggcaaaaaatggtgttagtgacaaggcatttggtgatttattgagactcgtcaagaacattcttccgaagagaaacaaattgcccgagacaacgtacgaggctgagaagatagtctgccctctaggactaaacaaggggaatgctagaatgatgcgatggcacgctgaagagcatcaacaggacgggatgctgagacaccccgccgatggttcgcagtggcgaaacatcgacagaaaatttaaagactttggaaaggatgcacgaaacatatggtttggtttaagtacggatggcatgaatccttttggagagatgagcagcggccatagcacttggcccgttacgatgtgtatctacaacctccccccttggctatgcatgaagaggaagtacataatgatgccgattattattcaaggccccaagcaacctggtaacgacatcgatgtgtacctaagaccactggctcctgcaccgactcctcctcaggctcctacaccgactcctccgcaagctcctcgtccggcaccttccaagtcaagggccccccaagctccaccgcctgcccccacaagggcaacgaagaaggcgaaagttgacgccgcaaaaaacaaggacccggggtacgattgcacgcaagaggagcttgacgcttatgtggcatcagaagtcaggagacaattgaagcctcgaagtccagaaaagaatattcctatagacccgagtgtcaggaacttcttcaggggtatgtctgcacctgccaaggaggccataaagctatcggactatgagcgaacacttaagaaagcatcttctggaaagtccaaaccagtccctcagcttggagagcaaccaaaccaggagatcgagccgttggtgaccggtgaagattttggaatacaagaatttattaatgacaccgggctaactacaaatcaattgctacgaggcgcaccaatcgaaaaggcggaagtgaaatacatgtacgaacttggtaaaccgcttgtcaagcctgagcagctgcagtccctacccacacaaatgtacaaattccatcaactgtacatggagatgagcgccaccggtagagagatgatcggagcgaggatcagggacacggacttcttgcaaggagatgatattctctggatcaatttcaagggtatctacgaactataccagctggacgccctcgatgtctctattatgagttgctggattttaatggatattcaaagggcccgacggcggggggttttcgatactggattcatcgaccctcggaaagtaaatgtcgcaatgctcaaccagtatccgcaagccacagaggacaatctcatccatctcctgaaggcgcatcattacaagacgttcgtactattgccgtacaacacagaattccactgggtccttttactcttcgacttggaggcctgcaccgtcaacgtatatgactcaatggataaaaaagagtctacgtttgacaatattttcgaacttatagacagggcttggtatcggttccgtcatttggtccgcggtaaatggagagaaagacttaggtggaagtttaattttccttgcgcaaagcaaaagcagggaactaacttgtgcggctactacgtgtgcgagtattgccactgccttgcagaccaaatcatcaccacaagagagctcgattttattcgcatgagggataacctcacacacaaggaatttatcgctgcagttcaagaacaactcatgggattcatcaacgaacaaatccttgatcccaagggtgaattctactacgacggaaatacaattcataggtccttagcttctgagataacgactactactacgtcgaaatcgtag

SEQ ID NO: 57417 - DNA, 287 bp, Oryza sativa
  Clone ID: PAT_MRT4530_59230C.1
aaaggaacaaaacatttctattaccccaactttttaagggtgggatcgagtagccatacttttaccccaaaatacaggttaacgacaatattttaaaaaaacccctttgttttcccccctgggtgggaaacttaaccaaaccacttaccccaaaaaaaccggatcccttttaaaccaaccgggaccaaacaaaaaaaatcagggggtttttttttttaaaaatacccaaaccggttggtttttttttattttaaaacccccctccccccccaaaaggggggtttggc

SEQ ID NO: 57418 - DNA, 594 bp, Oryza sativa
  Clone ID: PAT_MRT4530_59231C.1
cgccccttttttttttttttgaagaagtgcatgatcccaagtatcctctgcagcaccacaaactttacatatacaagttgtactcatatttcgtcccttggctgcaggctcttttgggatggaattcagtgataatctccaagcaaaaaatttcaccttagatggccagctatacagctaataaaaactaggaataagttcactttgactcccttaaaagtgaccagaatctaatccatgactctaaaccataataccggatatcttgacccctcaactattaaaaccggtataatttgactccctcggcggttttggatgatggtttcgctgacatagcgtctacgtggcagtattgactagctcttcgtcctatgtggcgttgacatggcgcttaagtggcattagaattaaaaatatatatgcggggcccatttgtcattcaaaaaagaaattgtgggcccactgatatgtggggcccacataaatcccttcttcctccatctcttccttctttctttctctccctttctcatcggttcttccccttcggccagcggcgggcggtgagggccgaagctgcgctgggtgacg

SEQ ID NO: 57419 - DNA, 552 bp, Oryza sativa
  Clone ID: PAT_MRT4530_59232C.1
ggtgaagggctaaatatatcacagctgaacagacgcggggaggagtcgaagatagaaaaagacaacgccctggactacagacgtcaaatacaggctatttactcaacgtaattattgttaagttattgctaagacagacaattagatggtaaggctccacccgttatttctgtttgctcacttattaatgtttcgggtgcaggtatagctatatagatgaattacattagaacgactagatggactgcaaaatagaatgtagtggctactgagaaccatttgtgcatcttttaatatggtaaatacataattcactcaatattctgagtgtaaactgttttagttctatgtcagccaaccagatgtcccatttatatttttaggagcggatacggaggataaattccaacagtgagttctgttttaaacacttccaattgcccgaactttgccgattattctagcgttagaacccttgccgtttgcctcacactacttgaaatccatgactcataaacgccaggacatggaatcgcggcagttaagaacagg

SEQ ID NO: 57420 - DNA, 351 bp, Oryza sativa
  Clone ID: PAT_MRT4530_59233C.1
atgggcacggtgggggtgggatggattggcgtggcgcggggtaggggaggcggccgcgtcgtcatccggcacggatgccgtggcattgtcgagctcaccgccattaagggtgccgtcgtcggtgtctgctgccgtgttcctggccgtccccgagacaccctcgtctcccgccacctttgcggccatgtgtcgttacacccgacactctactccctacggggtgccttcgacgcggtgggtggagtggttgcaaccgatggcaccatcgggcggatggtagaggccgcaacgcggtattgtcccttctccgatgtgtgcctgcagcacgggctggctgagcggagcgcctaa

SEQ ID NO: 57421 - DNA, 583 bp, Oryza sativa
  Clone ID: PAT_MRT4530_59234C.1
atggccgccgccgccgccgactccgccgatcccgtcatcaccaccgccacctgcgcgcactgccatcgagaaattccatctccaaacatcgcgctgcattctgcacactgcgctcgcaaccttcaaaagtgtgaacattgtgggtatatggttccaaagaagctaatggatgaacactatgatgaaaaccatgctccaatgatttgctcactttgccaaaaaactgtacaacgtgagctatgggatcttcataaaggcttacaatgcccacaaaggatgcttgcatgccaatattgtgactttgaactacctgcagctgatatttatgagcatcagaatattgtcagccttgcaggaagtatgtcagactgcgggaacagattggacacgacatccagttccattcccaacccattgttgcttcagaatcttcaagtgacagaagcacgctggaagaagaagagagttatccagcagaagaacaaccagtacgacccaagcacactcatggcttacaacgcaagcaatttcttgtcacaattgtgatagctggaatttcaattctggttggatcagttctgct

SEQ ID NO: 57422 - DNA, 1353 bp, Oryza sativa
  Clone ID: PAT_MRT4530_59235C.1
atggacgagttagggatcatcgagcaaggcgtcgactggaggactcgccttggccaagacattcgcgattgcatgataaatgatatattgttcagcctgcaaacgaaattgcaaagtactactacagcattgattgatctccagaaggttgctgtcagaatagaggagaggatccatacgatagctagtgactatggtgattatctacggaggatttgtctgacaagaggtgatttggactcatatgatgtatttttgaatgattgtcaacgtcagcaagcttcaatccgttcatccatcttgctccatcaggagaataagcaaggtgtgctatctaatcaagtagccctaaatgaccacaaggagcactcacacccctacgagaaggatatgatcagcaaactccctaacgatttggtccaacatattatgtcattcttgtcaatgcgagaggctgtgcgcaccagtgttttgtcccattggtgggtcaaccagtggaccttcttgaagtccattcagcttaatatatattggtttcatatggacagagaaaaattcagtagtttccttgacaaactattgctaagccgtgtccaagctgatgctcccatggacacattcgagctaaaatcttttgcaattgaccgcgccaattattggattaatcatgcaatcaagcacaatgctaaagtgcttaaatttgctgaatatggaaaatgggaacctttctacttggatccaaatcttgtggagttaagttctcggtatctagaaactttggagctgactaatgttgctctagatgcgacgatattcaatcagttggccaatgcatgcccagcattgcaaaatatgctgctgacagactgcttactggaggtagaagaaatttcatcaagctcattgaagaatctggatataattgactgctatattctcaaggacctgagcatttgtactcctagtttggtttcattgtgcatcaagaatgaaagaacagacaattcttcgttcagaaactcttacctaatattcgcaacggccattatcattgatgcttcaaatgtcagtagcatggagttgttagctatggatagacagttcacattcgtggagaaagacgggggcgagccaatgttcaagaatctcagaaacttgagcctaggtctatggtgcattaacaacatgttttcgcctctacgtcgattcgtccggcattcgcctatgctgaggatggtgactctgaggatcagtccgctggattggaagtcccatctcacgaaggaacatcaggagatgctgatcagcattcgtgatcgtcgtggcctgattctttatatcgattggtattga

SEQ ID NO: 57423 - DNA, 463 bp, Oryza sativa
  Clone ID: PAT_MRT4530_59236C.1
gtggcacaagaactaagaattgactcagcactagtccaagctatccgtatggccaagggtgtaaacagtgcaagttcagctggtgaaaaatcagtttatcgttataaacaaaacaaagataagtctgataaaactttctctactgaatgggataagagggctggaatggcaatgcttctagtggacaaatatttgtgactattgcacctgatcattttggtccaattctcgaagaccatgacccaaaaaggaacctctgtgtttgagtggggaaccattggaagaatataatacaatgcagaaagtggggtgcccattttcctcatgttgccaggactgtggacagatctacgcatgattctcaatcagtttccctatcaagaggttatttggatgattaatatcatgtagagtggttcctatatactggaagtggtggaaggcttgaagcatcactcgatta

SEQ ID NO: 57424 - DNA, 458 bp, Oryza sativa
  Clone ID: PAT_MRT4530_59237C.1
ttggagatgatgaagtcccgtctgtgcttgtgcttcttcttgcgcttggaacgttgagcgcgggcgtctcagcatcgtctccatcatttcttcaaatttccgctcgtctgcggctcacctcgcgatcgaaacaattcatcaacgcgtatcccaatccggaggcagatctgacagcctacggatcatttgcgaaagaatgcctcggcaccaaaactgaaacgtactcggtgcagtcatcgcaaattctgggcgaacagccgtttcctcaccaccgctcgagcggcttgggaagcccttcctctcttcccgctcattgtctcaaaaagcccggcacgcaaacttctccctcacagtcgcaaccgcagaattcctcgccccctcccactcaacagggcagcctgtttcgtatgtgaagcgtggcttgcatttcggttcttgcaaaacactctattcaacgt

SEQ ID NO: 57425 - DNA, 527 bp, Oryza sativa
  Clone ID: PAT_MRT4530_59238C.1
acatcattgatgatctccgaaaacgggggttgtcggtgtacgaagtcgctgccgacttcgtagataggcggattcaaccgctgcaggcccgcgcccatccggcctttgattactctaggccagaggacacgacccgggtctctcctcggggtctggacagtgacaccgtggaacgccgtgtcggacaggtgatgatgagcgccccctcagcggcggacgacatccccgtctctctttgcgagaagaacccggccgaacgcatcgctgcaattaatgctctccctctgacggacgtcatcgggccactcgtggaccaccaggcggcagcgtcgttgaaggaaagcgtcgccaaggaggcgtctgacattgttgttgctgccaccacgagtggcagcaatgttccaaagaggggaaggaaattctccttcgtactcaggacccatcggaaagcgacgaactctgcggactcggacgcgtcccctctgcctcagcgaaggcagaggttcgtgacgatcggcgagaagtaa

SEQ ID NO: 57426 - DNA, 605 bp, Oryza sativa
  unsure (1)..(605): unsure at all n locations
  Clone ID: PAT_MRT4530_59239C.1
tatagcatagnaaattcccacatacaaacgatgttccatccttggattggattgtcataagattcactaaacattgtgtgtgtatttagcggtcaatgtataatttgaagattctgttaatctttgtaaagatgtccataatctgcttcgcatagagagttcaccaaatttcataggagagagactccttaaagaaagcatatcccttatataattataatgaaacctcacaattggttgattgaattcgatattattgtggaataagcacatattattccaattaggactataatatctataacggatttcatagtgcgtttgcacatatttatttatatattcttttaatatacgtggatcttgcaaacagttattgacaatttccctcttcctcctcaaagcagttatataattaccactaccatattctatagaatacgatttgattttctcgctgatggattctttccaatcttcagagggcgtatgcgtgtgaacgcttggttcaagctcttcacatagacatgatcttggaagactcgtttttagaccgaagcgattctttgaaccgagttctttctctttcttgcgaatgctgatgg

SEQ ID NO: 57427 - DNA, 1856 bp, Oryza sativa
  Clone ID: PAT_MRT4530_5923C.1
atgaggggcgcgacgtggagcggagaaggcggggcggcagcggcggttgccggcgtgggcgcacggctggaggttggggacgacccgacagaagagggcacgcggcaacgaggtgccgcgaagaagcttgagggtcagcacatcataacggaagtggaagaagatgggcgacctagtgccccggcagaagccgccaagaactatgtacgtcacagcggttgggttgtgcggaataacgtgcctgtcagtacggtgtactggcgaagaacaagggcacgcggagatcatgagagctttgtcacagattcagagaaagagatgctgtggaccacaatgctcgagacattcacccttcccgctggtacagaggacaaaagcttcaagggagatctgtaccagaaatatatcctgaagggccagacaccgaacttcgacacattccgaaagctaagggatcactgggacgagttcgttgcatataagacaggtgaacaagggcaggcgatgatggaaagaaacaaagaaaatgccgccaagaagaagtaccatcaccacttggggtcaggcggctatagcgtcgcgatgccgaagtgggaggagatggaggctagcttgcttgagaggggtatcgaaccggccaccgctaattggctggaacgatcgaagttttggtactatgctcacggtggaacgcttaacccagctgatggctcactggtcttcggcgatcagatacgagaggttgcgtgtcgactaacagacgcagtggaagcctcttctcagggcacgttccgaccggacagagagagggacgagctgtcactcgccctgcagactccagagcatccaggacgaacacgagggaaatgggtgattccttggaagattgggttcaaggaggacatccacacgtacaggagtcggatgaggcgcaagagagataccgaggcgaagattgcagatctagagttcagggtatcgagctacgagcgcagcatgcaagaggaggtggcaaggaaggttgatgaacgcatggccgcacatcggtcccatgatccccagccgaccattcctcctgcaatggtgagcccgtcaggaaactgtagcagctgcgcctcaacggggcaggtaggatcacagagcatggacgccatgcaaacccaggacgaatccaccactgcaggccgattccagcaggatactccaaggtcgaagttgagttggtcgaaggtgcgtacgaggacctcgagctggattaccctggaggagacggtgagacgcatcatctcctccggctccgccatctcctcctcaggatcctgcaccgtctcctcctcatgctccagcaccgtctccacctcaggctcctgcaccgactcctccgcaagctcctcttccggcaccttcaaagtcaagggccccccaagctccaccgcatgtacgaactcggtaaaccgcttgtcaagcctgagctggtgcagtcccctcggaaagtaaacgtcgcaatgctcgaccaatatccgcaagccacagaggacaatctcgtccatctcattgtagattccactgggtgcttttactcttcgacctgtcggcccgtactgagctgtcaccatcagcggcccacctctcatccacagcatataaccccaaataatgatatcccgtagtctagacaccacgcgatctttacgcttctcctcagtggtccattcatccttcttcctcttccccaagctttccagcgccttatcaagatccgaagattgcgtcaaaacagcccgcatcttaacttgccacagcgagaatctcgtcttgtagtctagcagcggtagatcatactttatcgatgccat

SEQ ID NO: 57428 - DNA, 2058 bp, Oryza sativa
  Clone ID: PAT_MRT4530_59240C.1
tcaacaattgtcgtttgtgtaccctggctggtcacttccaagcttgagctgaattataagagtcctccctgtccggctacgtagtagagcgacatctgggaacaacgggttaccaatgcagtagagcccttccttgatctcttctgcttttactatgagttgcgttggatggaacccaacagggtatctagatgcgttggattccgacttcgggattgtctgaagtcgcgttacatccccttccaatgcccctcttctcgcagcaagtggcgagcgagatggttctatctttagatagagaactcggatcccgtccttgttgtccctaaagaacagccaaacaaaatcccagagtggaccaccaaacccgccctgactccctccctctaatctttcatcgacatcattgatgatctccgaaaacgggggttgtcggtgtacgaagtcgctgccgacttcgtagataggcggattcaaccgctgcaggcccgcgcccatccggcctttgattactctaggccagaggacacgacccgggtctctcctcggggtatttttttctcgtatttctaattttgttccgagtgcatccgtttctcctgacttatcgagttctcgttctcgatttacaggtctggacagtgacaccgtggaacgccgtgtcggacaggtgatgatgagcgccccctcagcggcggacgacatccccgtctctctttgcgagaagaacccggccgaacgcatcgctgcaattaatgtgagtgtactcgatgattcctttacatctttcttctcgagatcgcgttgtgacttcaagttgtgcaggctctccctctgacggacgtcatcgggccactcgtggaccaccaggcggcagcgtcgttgaaggaaagcgtcgccaaggaggcgtctgacattgttgttgctgccaccacgagtggcagcaatgttccaaagaggggaaggaaattctccttcgtactcaggacccatcggaaagcgacgaactctgcgcctcatgaagagaaggcaaatattcgcaggatggcgcgggcgaaggtggcgcaaggcaggactgatgctgcttccagcgcgtcccctacggcaacctcgacaggattcgtggttaccgctaaggaccaggaggtgacgccgagtagccctgtcgtcagcctcgtgcctacccggagcctgtccaccgacgccctcacctggggagaactccaagcggagatggagcgcctcctccaggccggtgcttgcggcgtaggttgcgagatcgaggaggccagggcggcggcgttgtcggcaaaccagcgtgccgaccagctggcgcgcgacctggcggaggctcacgaggacctccaaaagatgagggagctggtggccggcaatgagatgcagtggcgtggacttgagcaccggatgtcggagctcgagggccacatgatcgacatccgcggttctctgcggacagatgttgatatcgaggatatccagcagcacgggcagcccgatatgccggtgattgttccggcgcttacgctcgagccgttcgtgccgcgggaggagatcagtcaaagcccgtccgcggaggcgaatatggcaatgatgtcccaagccgtgttctcggaagagaagagtagcttgactcagtcctttccgtggcgggcagacttcgagaacatgttggctgaccgagatcgtcgaatccaatattggaagacgaagctcgaggtggccgaactcgagaaaaccatggtggaggtgaagaaggaccaggccgtggaggctctccgaggtcgcgagctcgaagggattggcaagcgcatcgacgaggccctgaagcagaagtgtcgtcaagcaagccgctacgccggaggacatgtgctggcctgcatccgagatcaccgcccgcagctgtacctcgagttcctgcgtgaagggttcttgcgttctcggaggacacccgcggagatcgacggccttgcacagtcgatggcgccgctcgccgagaaggtttttcgctccatggattggcgttggccgtcctggtag

SEQ ID NO: 57429 - DNA, 348 bp, Oryza sativa
  Clone ID: PAT_MRT4530_59241C.1
atggctgccttccatcctctcgcgatcatcgtgttcgtgtccctcctggccgccggtgcaaccgcaaactatggctacaccacaccatcgccatcgccgcccccgccgccgccacagcagcagtacaccccgccggcccacagcgacaagctgctggtgagggtggagggcatggtgtactgccagagctgcgcgtaccggaacacgcatagcctcgacggcgcggtgccgctgcccaaggcggagggaaatgtaatagagagaaaaggaggtcggggttgtattggcttaggcctccttgccagcagatctggcaacctcaccgtgacaaactggcaatggcgatag

SEQ ID NO: 57430 - DNA, 150 bp, Oryza sativa
  Clone ID: PAT_MRT4530_59242C.1
atggcgacaaccgcctcttctattcactggcctggagtggtggccactggatccaaccagaacgacggggatgttgttgttggatggatcgatggtggtatgtggctgaatcatgaaggtgttcttgagtatgggatggtctgggggtga

SEQ ID NO: 57431 - DNA, 234 bp, Oryza sativa
  Clone ID: PAT_MRT4530_59243C.1
cctcgcctccttcaaagcgcgtgtggggtggcgtccgtcgccgccggatctgggcgggggagggccacagtgcccctcacctccttcaacgcgtggaggagggtcgggcactaccgctcgccgcaaaccgctcctgagggagtggagggagggagagagaggagagaagtgcgcatccgccgcggcgagggcgagagcgagagcgacagcaaggccgacacgcgcggtacggtg

SEQ ID NO: 57432 - DNA, 365 bp, Oryza sativa
  Clone ID: PAT_MRT4530_59244C.1
cccacgcgtccgcccacgcgtccgggtaaatggactcctgtttaacaattgaatctgcaagtacccttatgtatgaaaaggcatccgtcacattataattttgtgcttatcaattatcataagacgtctaatttgtcatggctataaagtgtctctaatatagcagtttaatggctgaaggaagagttactaatgcatgcagccttactttgttgtaccgggcattcaggtttgatgggttctccactcaactattctctaaagatacatagaactatggcaaactagatttgttgaagtacgacatattaatcatttcttcaaaaaaaaaatggttttgaagttccagtgctccacaaagtttt

SEQ ID NO: 57433 - DNA, 339 bp, Oryza sativa
  Clone ID: PAT_MRT4530_59245C.1
atgccgtatcccatcacggtcaatgtgctgcctctacctcgagcaacccttggggcccgagcttgtgggaaggtggcagccgcatatcaagctcagggcccaacctactctcgtaggaatgatgccgagctcaagatacctggccatatggatgacccagagttcaccggccccctgctaggtcgcgggcatatgatattgttctgtttctcctcagtccctggcctcgaccccgggcaccggcacggagcaaatgggaccaaggtcaagatcctccttgttgatatgttaataacttcattgttaactgggtcgttccctcgctcacttgcaacctag

SEQ ID NO: 57434 - DNA, 1537 bp, Oryza sativa
  Clone ID: PAT_MRT4530_59246C.1
ccttcgtccgaaccacggacaccgacgaccccgtgctggccttcgtagagagctgcggtgctgccgtgacgactaacagagccacgatgtcttaaaaccgcgacgactgctaccttgggcctcagttgaagtgcacaccacttgacaaaccgttaatccccttcggttgcctccacggaaacggcacaagatcgaggttcgttgctgagccgtagatttttggtgtgagcatcaccgcactcagcgaaacatccccacgggattcgtcattgaatctgaggaactctaacaaccctgacaatcgaaattgcgcagggggtccgagctcaacccgaatgacaaaccatgcgcggcttctgcttctaggaaacaaaagagagggccaaaacgtagaccagccaaccatcaacaatgaggcttttgagaggctgccaattgacttctgtcttgctttgagggcggggatggctaaggaaagggcgacctgcaacatggaaccacaagactttgggcagaacaaacacccaatcacaaggatcctaaaggcgtcggcttgaaggaggatgtagatgacgacgagccaaccgctgccgccaacagaggaagaagcgccgatcatagcacacatgccgacgcctgccggcgccacagctagcataggtgcgacagagggaaacaacgccaccgctagctcgggcacggcgaagggggacgacagacgtcgtaacgccgaggacagcgcagagaccgtcgccacctcaacgacgaccaccgaagtgccaggcgcgacgcagactccgtctccaccaccaacacaaacccgcacacgagcagggtgtcggcaaccactgccagaagctcctcctccaccaccaccaaggccatccagatccggaaactctatcttactttggggctcttgctcggggatgatttgaccgccatgtcttcgattcgccgtccacgaggcgcagaggtaccaactcccaccaccgccgctaacgagaacaccggtcgccaccattagaggccagactaacttgggtggccggccgcggccgcgcttgacgggagcggagccgtcgccggcggcgggaggaggggcgggagccgtcttggccttcttgggcgggcggccgcgggacttggggatggcgtcggagatggggtccttggacttgggcgggcggccgcgggggcgcggcgaggagggcttgggcggcggcggcggcgcgttggggtcccgcggcttgggggggcggccccggccgcgcttgggcggcgcgtcgggcgcgtcggcgcggaagtagttgttcttgaggaagatgagctcaccggactccttcatcctggccaggtgcgccgtgagcagcgacgcgtgcgccggcggcaggtccccgtacttcccctcgatgaacttggagatcgccgacttgttcgacccgctcttctcgttcagcccctcgatcgccgccagtatcatctccgggtagggcgggagaggcggcggcttggaggcttcgtcggcggcggccat

SEQ ID NO: 57435 - DNA, 226 bp, Oryza sativa
  Clone ID: PAT_MRT4530_59247C.1
atggcgggctcagtctccgacctcccggattccgtcgcctctcctccctctctccctcttcttcttcgatgtcggtggccggaggtcgtggggcagcagatccgtcagccgtcagcggatccattggtggctggtgacggcgacgacgggagcagctgcgccaacgagaatggtgcgatgaggatggagaaggggctcgaaagcagggctaacaaggacgaggcag

SEQ ID NO: 57436 - DNA, 4357 bp, Oryza sativa
  Clone ID: PAT_MRT4530_59248C.1
atgactatgatgacgcctcccccgctcgagccggaggaggacgagatgctcgtgcctcaccaggagctcgtcgctgctgacgccgcccagcccatggaagtggttgcgcaaacggaggcagctagcacggcggagagccagccagctgaggacccgcagacgtcgcggttcacgtggacgatcgagaacttcacccggatcaatgcgaagaagcactactcggatgcgtttgtcgttggcgggtacaaatggcgtgtgctcattttccctaaggggaacaacgtggaccatttctccatgtacttggatgttgccgactctgctaacctcccatatggttggagccgatatgctcagtttagcttggccgttgtcaaccagatccaacagaagtatacgatacgcaaagatactcagcatcaatttaatgcacgtgagagtgattggggtttcacatcttttatgcctttgagtgagctctatgatccaagtagaggataccttgtcgatgatactgttgttgtggaggctgaggttgctgtccgcaaaatggttgattattggacatatgattcaaaaaaagaaacaggttacgttggcctgaagaaccaaggagctacctgttacatgaactctctactacagacactataccatataccatacttcaggaaggctgtgtatcatatgccaaccaccgaaaatgatatgccatctgggagtattccgttggcattgcagagccttttctacaagctccagtatagtgacaatagtgtagccaccaaagagctgaccaaatcttttggatgggacacatatgattccttcatgcaacatgatgtacaagagctcaacagagttctctgtgagaaacttgaagataagatgaaggtgacaaatctgagaactgtcgtagagggaacgattgaaaagttattcgaaggtcaccacatcaattatatagagtgtataaatgttgactataaatccaacaggaaggagtccttttatgaccttcaacttgatgttaaaggttgtcgtgatgtgtatgcatcgtttgataaatatgttgaagttgagcgcctcgaaggtgataataagtatcatgcagagaatcatggtttacaggatgcgaaaaagggtgttctgttccttgatttccccccagttttgcaacttcaactgaagcgttttgagtacgactatatgagagataccatggttaagattaatgaccgctatgaattccctttgcaacttgatttggatagagatgatggaaaatatcttgctccagatgcagatagaagtataagaaacctttatgctcttcacaggtataaatttgatgatgagcgtgtaactaaagaagatactaagaaggcccttgaagagcaatacgggggtgaggaagagttgcctcaaataaatcctggtttcaacaacgctccatttaaattcacaaagtattcaaatgcctacatgcttgtctacatccgtgagagtgataaggacaaaataatgtgtaatgttgatgagaaggacattgctgagcatttaagggtaaggttgaagaaagaacaagaagagaaagaacacaaaaagaaagagaaggctgaagctcatctttataccatcataaaggtggctcgagatgagaatttgaaggagcaaattggcaaggatatatattttgacctggtggaccatgaaaaagttcgtagcttccgaattcagaagcagttactgtttaccactttcaaggaggaagttgcaaaggagtatggcatccctgtacaatttcagcgcttctggttgtgggctaagaggcagaaccacacatacaggcctaatcgtccattgagtcctcatgaagaaacacaatctgtgggacaactgagggaggtatcgaataaggcacacaatgctgagctgaagttgtttttggaagtagaacttggcccggatttgcggcctctccctccacctgagaagagcaaggaagatattcttctgttcttcaaactctataatcccgaaaaggaagaactctgttttgtggggaggctcttcgtaaaggccttgggtaaaccctcagaaatcttgaccaaactaaatgaaatggctggatttgtgccaaatgaagaaattgagctctacgaggcaagagctaaattcatgatgctatatttatgggataatctagtatatgtcactccattgaggtgtgctctaggaggaaattaaatttgagccaaatgtgatgtgtgaacatattgacaaaaaagccactttccgtgctagtcagcttgaagatggggacatcatctgtttccaaaaatcacctatacctgatagtgacactcaaatgcgttatccagatgtcccttcgtatctggagtatgttcataataggcaggttgtgcactttcggttattggagaaaccaaaggatgatgacttttctttggaattgtcaaaacttcatacctatgatgatgttgttgagagagttgcccgtcagcttggtgtggatgatccagcgaaaattcgtctaacatcccataactgctattcgcagcagcctaaaccgcaacctatcagatatcggggagtggagcatcttttggacatgctcattcattataatcagacatcagacatattgtattatgaggtgttggatattccactgccagaattgcagggcctgaaaaccctgaaagttgcattccaccatgctacaaaggatgaggttgtgattcacagtatcaggcttccaaagaatagcaccattgcagacgtgattaatgatttgaaaacaaaggttgaactatccagtcccagtgctgaattgcgcttgttagaggtcttttaccacaagatatataagatttttccactccatgagaagatagagaatattaatgatcagtactggacactacgtgctgaggagattccagaggaggagaaaaatctcggtccaaatgatcggttaattcatgtttatcacttcatgaaagaccctcttcagaatcagcagattcagaactttggagatcctttttatcttgctatccgtgaaggtgagactttagcagaagtaaaggagcgcatacagaaaaaactccaagtccctgatgaggaattctgcaagtggaaattcgctttcatatccatgaaccggccagattacctccaagattcagatgttgtatctgcccgtttccagaggagagatgtctatggagcctgggagcagtatcttggtttggagcatgctgatactgcaccaaaaagggcctacacagccaatcagaaaaaattaaccagaattactgccgcagttagtgcggcgctgggttccgtgatagtaatagctgatgaaatttttgcatcaacttatatattgacaatattgtccaaaaaattatatctcatgtcgcgtataaaatttggagtcacgcgttcgatattcttctctcgtcactacgatctcaacaaagctccagtccacttaacactgcaactcccaacctcaccaatggacaacccgacgccgtcgtcgagctccggcggtggcggcgccgccgccgccgccaatgccagctccgacgagcaccgcaagacgtcgccggcgacggccgctgatttcttcgacgaggagcacaccttcgacgatatcctgctcccggtggacttgttcgacttcacgcacggactcgacgccggcgacggctgttacgtagacgatcaggctgcgattgggcagaagccgctgtcgccggcgccggagccggcggcagagcagcagccgtcgccggcgccggagcacggcgacgatgagcggctggtgatgtactaccaaggacaggagtacatcttcgaccccgtgcagccgcagaagattgaaaatatcttccaccatctgaatggacaggagatgattccacagagcatcaggccacaacccactaacctggtaagacccatcactgttcccgaggacttcgacaggtttgctgcgctgacgcggtatagggagaaaaagaggaacatcaagttcatcaagaaggcggattacagtgcccgaaaggaagtcgctttgcggatgaaacgcagcaaagggaaatttgcacctagggttcagacctctgaaaattccttggcacacagaaaggggataactttctgcaccaactgtggtgaaagcagcgacgccacacccatgatgcgccatgctcccaatggaaccaaatcattttgcaatgcttgtgggttgatgtgggcgaactcgagaaaaataagaaagatcagaaacccaacttccggggagcaagaagatcaataa

SEQ ID NO: 57437 - DNA, 667 bp, Oryza sativa
  Clone ID: PAT_MRT4530_59249C.1
tttcacgcaagctggctactgagagcagtcggtcacatggctgacacacggcaggccgtcttcatctccgtgcaaagcacaacgtcacgtctcggtgctgtctcagtggcgagggtcttaatcagtggctatggctgagcttgatcacacacagtctcctaggaccaagcccaaccctaacctatatgcgcactgcacagcacgggcagggccacaagggttcgtgatacttgtgaattgtgtgacgcccgggacatacctatctctgggcacaatattgcagattgcgatgtgcactatgcactatgcaatggcaaccaccgagctggcctgatgatgatgctgcgggtggtggatgcggagcttttggatgtttgctcgtgaatttgctgtgcaccttgtggtggtgtgtgcccgctgcgtggcacttggctgctaagatggcaatgggcatgggcccgaacaccgctggttgcatgatgactgctgccgtgatggtgaaactgtgctggtgtggctgctgggatgcgaccgtgtgcgtgaatgcatgatggtatgtaccgtttggtttggttttagttcaaatgtttgatgctgtgtgtttggttctgtttgaattcaagtatcaaatgtgtgcacggatgaattgagaaaaaaaaaaaaaaaa

SEQ ID NO: 57438 - DNA, 323 bp, Oryza sativa
  Clone ID: PAT_MRT4530_5924C.1
cattattgattatttggtctgatcactatatcgttgcatgcaacacaacaacggtgagatcctactagatatgaggcaagccagctaattcctatgacatcggcgcaggggaagatgctgaactgctggggctcaaccacgagcatttacggtagctgcaccgggtactgactcgtcctgaccagcctgacgcggtgcatgacccgtgtgctgctgctgctcgccggattagcccttcttcaacgacccctggccgtaggaccccgtgctccgacaacgacccgcatgtcgccgtagaactccgacgacgacgacgaccagtc

SEQ ID NO: 57439 - DNA, 500 bp, Oryza sativa
  Clone ID: PAT_MRT4530_59250C.1
ttttggtgtgttctttctctgggtgttctttcttcaaccttacccttaaatgctcagcaatgaccttctcatgaacattacacattattgtgtccttatcactctcacggatgtagacaagcatgtaggcatttgaatactttgtgaatttaaatggagcgttgttgaaaccaggatttatttgaggcaactgttcagcccaaaagagattaaaattacggaaacaggaaaacaaacatatgtagatcaatatctcatatcattcaatatcaattatcaggtagaacacacctcttcctcacccccgtattgctcttcaagggccttcttagtatcttctttagttacacgctcatcatcaaatttatacctggtagacaggataacattttcaaaaatctataatgaattgggaactgtttgctaggatgtaaaattcaacaagatagttcgccacaaggcataatcatcgtagaattaattataatgcgaggatattg

SEQ ID NO: 57440 - DNA, 1536 bp, Oryza sativa
  Clone ID: PAT_MRT4530_59251C.1
atgaccggcgaggcaagcaaaggtcggagtggaggcggccgagagggacgcgcatcgtcctcccggcagcgcaccgatgttgctagtgaactagaactacaagaagcatcaagctccgcggtttcgccgccgcacccgaaccccggcgacgcggaggcggcaccggccgccgtcgcgatcccgccggcgcccgcaccccttcatgacctggcccaaggtgcggaggccgcttctgcagcggggaggagtaacgagaaggaggaacaagtagaactccgcaaggtccagaaggatatcgagttaggggcacttgttgccggcttctccttctccgtggcgatgaccggcttcttcctcagcccgcaagcgacggggcggcaagccatatacatcgacatctcgatgttcctcgccttctcatctttcgtctgtggctgtacgttcatgttgctgagaatgcagcggctcagcgccagggaggagcacatctctggcttccaccacgccatctccaagtgcctcttctatctttgctgcgttctaccggtgctgacaatactttgtctgctgctggttatgccgcgcaagccttacatctacgtaggactcggcgtcctcgcggcggccgtggtgccggtggccctcatgcactggtacgtgagccgcaagacccagctggaaaccaacgacacggcacctgaggatgttgagcagaatgcaatgagccgcaagacccaggaaaccaacggcacggcgcctgaggacgacgatgagcagaaggcgatggagtccagctataagatcacctcggccatcgtccccatgtcgttggcgggcctcgtcggcgtgctcttcggcgtctacaaggggggcagcagcagtggaggcgccggcggcgacatctccggctctgtccacgtcgtcatcatgtgcatgttcatcacctcgatgttaagcatgctcctgatgatgctgtggatgaaggtcctggagagcaagaaaccgaagctccgggagttcttcgtcagagctactatcccgcgtgccaatgcggcccttctagccttgctcgcgatcgccgccttcgccgcgtcgtttgggatcctcaggtggtacatggtagccgcgttcctgactctcgccttggctgccaccgtccaattcgtcatccagcactgcaccagagagcagaatgccgtgcgagctagccacaacgagacgcagctcaagtggatggcggacatggcgagcaagacgacaccgtggtctctggggatagtcatggcgatctttggaggctttcttggagacgatgataaaagcaaggacaagatggtggcccttaaggtctgcatgttcttatcgacctcggcgttcacgtcgggccttgggctcatgtacctgaccatgcgaccgggagagtcagccagaggaggtacctccaaagcggccatgaccatactggcttggtctgtcatggtgttgctttctgcagccgcgcttgctatctatggcgtcgaagttatgaagtcatag

SEQ ID NO: 57441 - DNA, 533 bp, Oryza sativa
  Clone ID: PAT_MRT4530_59252C.1
tttgacattgctgagcatttaagggtatgtgttgttttgcattctcactcctccttgggccaatttcctcgataccacgattggaaaataccatcgcatgtgtcaacacacgtgggcccaggccccatgggtcattctcatatgtggtgatattttacaatctgcatatctttacgatggtatttcctggttttctcccttttaatgtcatggacttctgatacagtttggatgataaactgtggattttcaggtaaggttgaagaaagaacaagaagagaaagaacacaaaaagaaagagaaggctgaagctcatctttataccatcataaaggtggctcgagatgagaatttgaaggagcaaattggcaaggatatatattttgacctggtggaccatgaaaaagttcgtagcttccgaattcagaagcagttactgtttaccactttcaaggaggaagttgcaaaggagtatggcatccctgtacaatttcagcgcttctggttgtgggctaagaggcagaaccacacat

SEQ ID NO: 57442 - DNA, 1316 bp, Oryza sativa
  Clone ID: PAT_MRT4530_59253C.1
ccggcccgggattcacagtatcaggcttccaaagaatagcaccattgcagacgtgattaatgatttgaaaacaaaggttgaactatccagtcccagtgctgaattgcgcttgttagaggtcttttaccacaagatatataagatttttccactccatgagaagatagagaatattaatgatcagtactggacactacgtgctgaggagattccagaggaggagaaaaatctcggtccaaatgatcggttaattcatgtttatcacttcatgaaagaccctcttcagaatcagcagattcagaactttggagatcctttttatcttgctatccgtgaaggtgagactttagcagaagtaaaggagcgcatacagaaaaaactccaagtccctgatgaggaattctgcaagtggaaattcgctttcatatccatgaaccggccagattacctccaagattcagatgttgtatctgcccgtttccagaggagagatgtctatggagcctgggagcagtatcttggtttggagcatgctgatactgcaccaaaaagggcctacacagccaatcagaaccgtcacacctatgagaagccagtgagaatttacaattgaaatcacttctgactgtgctggccccttggtggtgtcaaatctgaaagcagcaacagagagatgtagtatgcaacaagttttactcgattgggtaccggcacctatatgcttttctaccggtgctgtttttatgcaaaagtgcacttgatttcattgttcatgatgacaaatttttcatgattttccaccatgctttggggcaatggtgcgtgctattgaatttccttaagttgggtgtgaatgcccccttagggtagatgttgcttcatttttagagcaaagtttcggtacataagattttggtaggggggcatatgtatacagggtatagttctgactcatatcgacttcttgtctttgtgtggatgtaacaatggaaaacatcataccaatcttgctgtatggctcaattttatcttcctttcgcagaaaaaattaaccagaattactgccgcagttagtgcggcgctgggttccgtgatagtaatagctgatgtaagcgtggatatgatgtaattccccagaaatatgaaatatcccgatttccttcgagaaacaaatatgaaatatcattgaaatgtggtacttcttttttccaccgcgcggtccacaagggtataaaataaagatttgaaacaaaaaaaaaaaaaaaaaacaaaaaaaaaaaaaaaaaaaaaagaaaggccgcccagactagaatagc

SEQ ID NO: 57443 - DNA, 276 bp, Oryza sativa
  Clone ID: PAT_MRT4530_59254C.1
cacgctcatgaccgcattctatcacatgaagcccgagctcttctagccggtcaaggtcggccaggcacccaagtacatggagtctcgtgcgccgactttcgcgtgtggccgttggtgaccatgggcctggagcccggcgaggcctttaccgtccgcaacatcgtcaacatggtcccagcttactgcatgatcaagcacgctggcgtcgggtcggccatcgagtacgccgtctgcgccctcaaggttgaacttatcgtggtgattggccacaaccgc

SEQ ID NO: 57444 - DNA, 236 bp, Oryza sativa
  Clone ID: PAT_MRT4530_59255C.1
ggtgaaagcaaagttgtttcaaatagaagatttggtatggaagacaattttgcctttgggttctcgatctaaggagtttgataggtagtcacctagttgggaaggtccttaccgagtgtgcaggattgttcgaggaaatgcatatttttttggagacactttaaggaaagcgttttcagataacaatcaataggaaatacttgaagaaatactttccatgcgtttggcaagatgct

SEQ ID NO: 57445 - DNA, 1434 bp, Oryza sativa
  Clone ID: PAT_MRT4530_59256C.1
aaaagagcagcgtcgcctctcctcctccctaacccctacgcttccagaaccttctcgaagctcccgctcccccccccccttccgctccaatggcgaaggagagcagcgtcgcctctcctcctcctccctaacccctacgcttccagaaccttctcgaagctcccgctcccccccccttccgctccaatggcgaaggaaccgatgcgcgtgctcgtcaccggcgccgcaggacaaattggatatgctcttgtccccatgattgctaggggtgtgatgttgggtgctgaccagcctgttattctacacatgcttgacattccaccagctactgaatctcttaatggccttaagatggagctggttgatgctgcatttcctcttttgaagggaattgtcgcaacaactgatgttgtggaggcctgcactgggtgtgaatgttgcgctgtatggctgtggtgggttccccaggaaacaccaacgctctcatcttaaaagaattcgctccatccatccctgagaagaacattacttgcctcacccgtcttgaccacaacagggcacttggccagatctctgaaaaacttaatgtccaagttactgatgtgaagaatgcgatcatctggggcaaccactcatccacccagtaccctgatgttaaccacgccactgtgaagactcccagtggagagaagcctgtcagggaactcgttgctgatgatgagtggttaaatacggaattcatctctaccgtccagcagcgtggtgccgccatcatcaaggcgaggaagcaatccagtgccctatctgctgccagctctgcatgcgatcacattcgtgactgggttcttggcactcctgagggaacatttgtctccatgggtgtgtactctgatggttcgtatggtgtgcctgctggtctgatctactcgttcccagtaacatgcagtggtggcgaatggacgattgttcagggtctcccgatcgacgagttctcaaggaagaagatggacgcgactgcccaggagctgtcggaggagaagacgctcgcttactcatgcctcaactaaaactaagcaatacccagagggacagatagtgagcgattgcccgctcccgtgtttttgaataaaagagacttttaagttccatcacatagaaactgtttatctcagaccgctgcacatcgcgagatgtggagcgcagatgccgttgctggttttactccagtgtgtattgaggctttgtactagctcccttttttttgcctggtgattcgcaggacatttgctgaaaacattgaacccatttgacatctgatggaatcatggaccagtagcaagtacattttgcgaaaaaaaaaaaaaaaaaaggcttgggctggtggttgaactttctgccacatggcccatggaaacgtgagtcgcgctgttactg

SEQ ID NO: 57446 - DNA, 456 bp, Oryza sativa
  Clone ID: PAT_MRT4530_59257C.1
gtgttctgcagtccacacaaccacacgcagaagccaagcatgaaccacagcgtgctggaagagagaggaggaggtgagctcatgggcgcacaaccgcccgttacgggggcggaggcggaggaggtggaggacagctgagttgtcgacgccgaggactggtgctcgccctcagcctgggctccaggagaggagcagatcggccgcctgacccgtgaggaatcctgacggctgggggcctgcggcctgggggggggctggcaccgggctgctccgtgtctgggccatcccccgcgggggctgcggatgtgggggcggaggggctgacctggcgctgaaggcgcttggccgggcgcgcgcgattgccggcatgatcacgatggtggcggggggggctgcgcacccggcgctgttcctggcgtcgccggactgttgcgtgttcgtggtcgcctgcgctgt

SEQ ID NO: 57447 - DNA, 671 bp, Oryza sativa
  Clone ID: PAT_MRT4530_59258C.1
ttccaacacctgcagtatctggaacttgagcatactagaatgaagagcaccgaagctttccaacactgtcaaggatcggacatgagacaacttcatcttctctatcatttcagtttcttgttgaccatttttatggacagacaaccgccgtaccttgtagcttggaaatgccgtctgccagtggccaccaataacggtgatgaaattctcatcgctagacttggagacaatgtactgtaggaccatgtcatgaatttgacagctcttcaccttgccgttgctgttgttgttgataggctttaccaaattcctgccaatgagttcattgaggctgtcttctgcaacttcatcggcagtcttcccatgctcttcagtaatgaatccttcagcaatccatcttcttatcaaatgcttcctgctaatattgcggccctttggaaatgtgctcaagtacagcaagcatgtcttaagatcagatggcagatttttgtaacagtggttaattatttgcgccactccttcagtgtttactagcaatcagccctgctactactacaatggccaagggcagacccccacataccctcatgataatgctaccattaatgggtctaatgggacacagatcatttgcagatattatctgaagaaacaaattgtaggagctctct

SEQ ID NO: 57448 - DNA, 141 bp, Oryza sativa
  Clone ID: PAT_MRT4530_59259C.1
atgaaagaactgaagtggaatggccaaagggaggttccgggcaaaaatgccaggaacttccaggcagcacttaggaaattttttgcaatgaaacggcgcccggaagttccggccagaacctccggtgattttcgcacttag

SEQ ID NO: 57449 - DNA, 306 bp, Oryza sativa
  Clone ID: PAT_MRT4530_5925C.1
aagtctcagtaaattcataaaaatgtatagaatccattaaaaatgctgccttcaaacggccgccaaaattgcatacgagctccgttttgggtccgtgagtacttgatggaaagctctcggagtcctctttcaaacagatctagcaccatctctgaattccatctcgtttggccgcaatcacagaaaaaaagtaatgcgtcacctatactgggcctatgggcttgtaacttcgtctaagaccccgacccaagtggggcccatgtggggtgcgccccaaccaagtggaggacaacctagggtctccca

SEQ ID NO: 57450 - DNA, 276 bp, Oryza sativa
  unsure (1)..(276): unsure at all n locations
  Clone ID: PAT_MRT4530_59260C.1
aaagacagcggtttttntatnnatatnacccaaagtttnacatgtnacatatgatgatatntgagcttatttttattttnngaaccactatactgttaaaacttattacaagacaccggcatgtttggaatggtactgggtgcaccataatacctagggtagataccatatctagatggcacgttaaaagccaacagagcttgagcttgagccagattccgatcaaagtagagatcaccaaactgctggagtgggagctgctgctctaaggcctga

SEQ ID NO: 57451 - DNA, 811 bp, Oryza sativa
  Clone ID: PAT_MRT4530_59261C.1
gcacgagggtcacatcgcccttcttaaatcacaccacaaaaattcacaaatccacaaatactaggaggagtactaatcacgagagcaagagcaaagcatggcccccgcaggcgccgccgctgccgccctcgccctcgccgccgccgtctgcttcctcctcgtggccccggccccggcgcgccgccccgccgacctcccgccgcaggcggcggtgctgctgcccgagcccgttgactaccgcgaggccgccgcggacgcggagccgcttcttccgcccaagccggtggccgacgccgacgccgccgcgctcgccgttccggaggaggaggaggagaggggacccgcccgcccgcgcgcctcgctgctctgcctcgtcttccggtgcgacgacggcgacgaggcgaacgcggtggcggtccggaggagcggcggcggcgcgcaggacggcgggtggtggccgcgggcggcgtggaagggcgagggcgacgaatccaactccgactcggactcggactccgactgcgactcggactcggacgacgacgacgacgagggaggcgagggcggcatcgtggggtggttctggtcgctggcgcatcgcttctgatgatttctggatgatcctggccgtccatggccgcggatgcttcttgtgatcacgttatcttgtttaattaagcattattaggggggtagatatagtactgtaattcctcctccatgcagatcatcccaatagcatcattgtgtgtgtctgcagtctgtaaagctatattgatgaataaatgatgctcctacgttatcacacatc

SEQ ID NO: 57452 - DNA, 273 bp, Oryza sativa
  Clone ID: PAT_MRT4530_59262C.1
attaggaaaaacaacagaaaaaaaaacttgcagaagggggattggacaagggccaaaccaaaaaaggggttaaaacaccataaagggttttttttgggggacaaaaccttaaaaagggggtgcagggaggttccgggttcatattaagaaggaaaaaaaacccaaaaggtgccacaaaggattttgcctgggtgttttttccacttttaaaagaaaaggcctttatgaacttacttaataaaaaagggcaaaccaaaaaggggacaattttgg

SEQ ID NO: 57453 - DNA, 469 bp, Oryza sativa
  Clone ID: PAT_MRT4530_59263C.1
atttttcttcgcccatgtttaccggggcaactcccaggttattgacataggctactcccacgaaacggtttcaagtccggaggagtaattgcgttgtggatcctatttcgatagcgaaacgattgctctcgtctatggaccacgcgaggctatcaacttatggccccaatgtggcggctgctggcgatctacaagccggggctttggccttctcagctaggaattcgtcacactctgctcccttgacagtgaagttcatcacaagtgcctacaataatgtgttcagcgggctcttaaaccgtcacaagcacgtcttgtcgccctgatggacatgtctgcacaccattgtcaactggataaacagacttgggcaccgttcatataggttctgcgagctatcaggaagctcgggccatacgtgctgaaatgacccgggattaaagcctcaaaatgcatttgtgggatttcc

SEQ ID NO: 57454 - DNA, 666 bp, Oryza sativa
  unsure (1)..(666): unsure at all n locations
  Clone ID: PAT_MRT4530_59264C.1
cccgggctgcaggaatcggcacgaggcaagatttaacagttaacacagggttgccattgtttcgtcctttntggttcagtgcctttcttgtgttctaatttccttgaggggctttcttgttgagttgcctctgcatgccacagttgtgccttccttgatgagaggctcttgcttaccaccagtgctaagcattgtgtgcacttgacagctagctgtggcattcaggcagcctcatgcttttgcagttgcaggtgcctataaaaaaggagatatgtggccatgtagagagcagtactcacagatagatagtgagatctgaactgtgaaaaccaaggtgataggtatctaaatagtgatctgagctgagcttccttgcatcaaaggcactgattttctcatctcctttttgctttcaatccatcatcactttgtcgttgcctatttgggtccggaaacccgggtcgacccacgcgtccgcttgatcggtgacacttttcagattatctggcttttactatcactgccaaaaggaacagcagttgctttctatctcgtgctgaacatgcatatatactagttaatctgcctcacatttggtttccattcgtgtttgcagtcaagctagcggctcagatcgatctctttcggttcttcagaaacttggtg

SEQ ID NO: 57455 - DNA, 240 bp, Oryza sativa
  Clone ID: PAT_MRT4530_59265C.1
atggcgcaacgacggcgtgggcacggccgaagctgtttcgtcgaggcggtgcagcgacggcgggggtacagcggaaatgggctcgaggacgacaatggtggatccaggaggatgatggcagtggtggtgtcggttgctggtattaataccgataaattggtgccggattttcatcctacgatacaaatcggcacatatggcatcttctatagtcgtgttaggatgttaggtgacttctaa

SEQ ID NO: 57456 - DNA, 528 bp, Oryza sativa
  Clone ID: PAT_MRT4530_59266C.1
gcacgagggcctcactaaaccatctcctgatctctcaaccacacaagctgtggccatggacatggacagtgtagtggtgcaccagagaggcggcgccggcgccggcgacgaggaggaggagatcggcgtcttcaccgccgagcgctacttcagcggcgccgacgaagtcgacgcgctgtggtgcggcggctcgtcgtcgtcgctgtcgtccgcgttcaagaccggcggcggccagcaggagtactggtcggctgcacccacgacgctcacggcggccaccacctcgtcggaggccagctggaacagccgctccgctctttctgagggacgccgccgccgccgtcgccgtcgagacggaggagcctttccggcgcaggcggtgacctctgcacgcccggaactaaggcgtcctcgccgtcgcataatcttcttctacggtggctgctcggcgtggctgcgtgcgcctgcgccggcggcggcgcggaggaggctgtgatcgccgacgattgtcgccgcgacgaagcgcgc

SEQ ID NO: 57457 - DNA, 189 bp, Oryza sativa
  Clone ID: PAT_MRT4530_59267C.1
atgcgaccggctttgaggcacggcggtgaagtgcaaccagaggtgaggtggcacggtgctgttgcgccctccatcactcctaatggtggcggtgttggtgggaagcctctagcgctcatccctcaaaagctacggctggcgccgatgatcctcgaggtggagaccgtgacagtgaaagtgggtgcatag

SEQ ID NO: 57458 - DNA, 448 bp, Oryza sativa
  Clone ID: PAT_MRT4530_59268C.1
caatttgggggtagctgctagcttctaccttccagatcagatcagatctccatggcggcggcggcggcggcggcggcggaggacaagttcgtcctgcgctccggcgtccgcaccggcctcaagcgcgagttcgccttcgccatcgcctcccaggccgccctctcttccaccctcggccgcacgcgctcttcatcctccgcatctgccacccccaactccaagcgcccgcgccgccccccctgcacgccggaatcggatccccccgttctcgccctccgcgctcacacccccgaccccgatccccacacctcgcccaggcggatcactcgctccatgctcctcaacccctccgccccccttctccaccaccaccccaagcttcagcttcaaccccgccgcttcaccaggtcactcttgtcgtctcggactagcaactcctcctcctctt

SEQ ID NO: 57459 - DNA, 1103 bp, Oryza sativa
  Clone ID: PAT_MRT4530_59269C.1
atgtcgaacgccgacgtggaggccggtgggccggcggggagggaggcgacgacggggatcaagccgccgccggggaggtacaacccgagcggcaacgggccgaacgcggtggcgccggcgccgccgccgttctactactacgaccaagcggcggcgcaggagcggcaccaccggacgtgggtggtgccgctggtggtgatagccaacgtggccatgttcgtggtggtgatgtactacaacaactgcccggccaacggcggccgccgcgactgcgtcggccgcagcttcctccgacggctctccttccagccgctcagggagaaccccgtcctcggcccctcggccgccacgctgcggaagtacggggcgctggactggtacggggtggtgcacggcaaccaggcgtggcggctggagacgagcacctggctgcacgccggcctcatccacctcgccgccaacatgatcagcctcctcatcatcggcatccgcctcgagcagcagtttggattctgtaagcccgaatccgtcaagagcagaaaagggaaggtcgggctggtctacctcgtatccggcttcggcgggagcgtcctctccgtgctcttcatcagcagaaatggcatcaccgtcggcgcatccggcgccctcttcggcctcctcggcgccatgctctcggagctcatcaccaactggaccatctacagcaacagatgtgcagccatggtgaacctgatcatcatcgccgccatcaacctggcgctgggtatactcccccgcgtagacaacttcgcgcacattggggggttcgccaccgggttcctcctcggcttcgtgctgctgattcagccccagttcggatggtcggagcaggtttccagcgccaagtccaaatacaacgcgttccagatcattctcctgactctctccgtggccttgttgatagcagggtttgcagctgggttggtcagtgttttcaagggagtggacggcaacgctcattgcagctggtgccactacctcacctgcgtgccgacatccagctggaaatgcgacaaatgaacaggagatcaagtgacgcattagcatgccatgcctcccacttg

SEQ ID NO: 57460 - DNA, 394 bp, Oryza sativa
  Clone ID: PAT_MRT4530_5926C.1
tgctgttggggagtggtgaagaaaaagttctctctttcttgtggggttgcaaatcgcgtggcagatctgaggggtctcactgttccaacaaaatttgtagtgttttttttttctcattccattcttgcgtggttcgcgatttccggaatgttacgctggcttgcgagtttactaaattgcaactagtgttgctgctactgccgtttgactgaattgatactgtgaattctgggaatagaaaaggcttatcttggtcacatgaagaacgtttctgttgatgcaatctgaattcacccatgccgaatccgtttggctctttaatttatggacggaatgtgctgtgctaactaatcccatgttcgtgttgtccccctgatgcagcatccttccgggc

SEQ ID NO: 57461 - DNA, 621 bp, Oryza sativa
  Clone ID: PAT_MRT4530_59270C.1
atggcgtcgcgccccgcgacgaagccgtggcagaagcacgcgccgccgcgacggccgtcctatgtgcctttgtggcagagaagggtggaggaggaggaggagaagaagaagcagcgtcacgccgcggcgccaccgcgcgcagccgcgccggaagaacagcagcaggcagagaagacgccgcggcgcacatcgacaaagcgcggcgacagcgcgcggcgggcgatcagcgccaacctcaccgtcctcgccgccatctccaaccccaacaccaagatcggcatcgtgctgcgctacgtgcggttcgacctctacttcgaggacagcgtggtcgccgcgcaggcggtgtggccggcgccagtgcaggtggcgcccggcggcagcgtgccccggagagtgcacctggtggtcagcagtgtgtccgtgacgcggcaggacgcggccttgtggcggaacgcgacggccaagggcggcaggccggtggcgctgcggctcgccggccggttccgcacgcagctcaacttcgaccggtggttcttcaggtacagatactgggtcaagccgcagtgcacgctctggctcgacccgccgccgagcggcgcactgcgacgctcgcggtgctga

SEQ ID NO: 57462 - DNA, 237 bp, Oryza sativa
  Clone ID: PAT_MRT4530_59271C.1
atgatggttattgtggcggaacagcaagaacgtcttgaggtaatttcgttcccagttgatagagatgaagcgtcggccatgccgaccacggtggcagccatggtggcagacaggagcatgcgaggacctcagtacaagcatggagaggaggggaaaaaaaaggagatggcctcaccggctctggaagagtctggtggcgcgaggatacgacgaccggtggcctgcggcgacagatag

SEQ ID NO: 57463 - DNA, 1525 bp, Oryza sativa
  Clone ID: PAT_MRT4530_59272C.1
ctgctaaagcgaagcagaccacttgctgaacaccaactactctccgccgccgccgaggaggaggaggagggagcaagcttgaccccggcgccatggcgggcgggatagctcccggcctccgaagatggagacctcctccttcctccgcaccaccctccccaccgcgaagcccctcccggcgttccagaccctcgcaccccgcccccgcccccgcccgctccgccgctccaccatcagcgcggccatcacccgaggccgcaaggaggacacggtggccgccgtccgcgagcagctggagggctgctacctcctcgccgggatccgctacgagggcctcacggtgaagcagctgcagggcatccgcgacaccctcccggagacctgccggctgctggtggcgaagaacacgctggtggggaaggccatcgagggcacgccgtgggaggcgctcaagccgtgcatgaaggggatgaacgcgtggctgttcgtccacaccgaggaggtccccgccgcgctcaagccctaccgcgccttccagaaggaggagcgcctcgaggagaccaacgacttcgtcggcgcggtgttcgagggcaagttctacgcccccggggacttcaaggcgctcgagacaatgcccagccgcgccgaggtgtacgccaagctgctcggctcgctgcaggggcccgcgacctccgtcgtcaccacgctgcaggcgccggccagggacgtcgtctccgtgctctcggcgtacgtgcgcaagctcgagcaggagagactacagagatcaaagtttagtaggttgaggggcaatggcaatgcacaattagaatggtcaataactactagtgcttgtgtagttgtaccatcaatcagtgtatccaggagtgactaccaggcatgtcaatatgccaatatcattcgcccaatggataaggatcgggtctatatgtcagtgtctcaaaaacaaaggaaacgctctccctcccgccgcaacgaggaaaccaccgcctcaggatggccccgcggccacgtgaagcgccgggccggtgcgaatcagctagggctacagctcatcatctcgccgaagcgatcaaccaaattattacgcgcgattggagacgttgttcagccgggagcaggagcagcagatcatctgattgatgccttccatgctgaactttttgccagtgctgtggctatcaaaacggcaaaggagaagggtatggcgcgagttgaactggaaacagattccctgatgctgtgcaatgcactccagagcaactctttcaacttatcagtgatgggtggagtaatccttgagatcaagcatgtgattgctagctgttttcattctttctctgttagttactgcccacgaaactgtaataaggtagcgcatgaattagctgctttgggttgtaacctttcaggacgcttcctcctggacaggctgcccgcctgggatggaacgactggtgaccagcgatttagctggatcagttatataaagtttcggtttccctaa

SEQ ID NO: 57464 - DNA, 591 bp, Oryza sativa
  unsure (1)..(591): unsure at all n locations
  Clone ID: PAT_MRT4530_59273C.1
ctccggctgcaggaattcggcacgagtctacatttcaaattcaattttcaaatacaatgttcgctcaattattagtcgtcctcgccttattggttgccctcctcgcaacagtcacagaagcttggtggggtctcggatacggtggttggggtctcggcttcggtggatggggtctntggcttcggttatccatatggtcttggcttcggtctctggggtcgataaaaagtttactttctgtagtaaacaatttgtgtatatgtaatatttaatgatccatcaaaaacaacatcaaacaatcaaacaatcggctttgaataaatattctcgtatacacaaaacgacgaagtgattcacacattttttcattttctgtaaatgccgataaatttgtgttgataaatttcttaatttttctaataactcactgaatttaaataaaatactattgaatacataaacaaaaaaaaaaaaaaaaaaannnnnnnnnnnnnnnnnnnnnnnnnnnnnnnnnnnnnnnnnnnnnnnnnnnnnnnnnnnnnnnnnnnnnnnnnnnnnnnnnnnnnnnnnnnnnnnnnnnnnnnnnnnntn

SEQ ID NO: 57465 - DNA, 120 bp, Oryza sativa
  Clone ID: PAT_MRT4530_59274C.1
ctaacccggatcacccagcccgttcagaacggccacgtatggagaccttgaggtatgccaggaagcccgagggttctccccgataccaccccgttgaatccacatgtctcttggcatcat

SEQ ID NO: 57466 - DNA, 709 bp, Oryza sativa
  Clone ID: PAT_MRT4530_59275C.1
ccttcgtccgccgctgctgcacgtccgcgccgcgccgtcgtccgccaccgccgcacagccgcggcccaccgttgtccgcgctgctgccgcacggccatggcccaccgtcgtcaatgcggatctgggagggaggggcggccgggagccgccgccgccgcagcagcacggccgcggcccgccgtcgtccgcgccggcgccgcacgggcacggcccgccgtcatcaatgcggatctgggaaggaggggcgcccgggagccgtcgccgccgcagcagcacggccgcggcccgccgtcgttcgcgccgccgccgcatggccacggcccaccgtggtcactccagatctgggagagatgggcggccgggagtcgccgccgccgcctcaaccaccctcgccgctgtggccatgccaccgcctcgaccctcctcgcagccaccgcccgccgccgtgctccccccgcccccctccggccagatccgccggccaccgctctccccctgctccctcctgccagatctgggaggaggggccgggagcgtgccgccgccgccctccgccgctgccgccctccgccgccaccgcccgtcgccagccgccgccgccgggaggggaggggagaggagaggtgaggtggggataggaggagaggtgaatgagagaggtgaggggataagcttgccggctgtgagtggtgaaggtgtggagacttag

SEQ ID NO: 57467 - DNA, 1155 bp, Oryza sativa
  Clone ID: PAT_MRT4530_59276C.1
atgcctgagctccttcacgagccaccggagcagctaatcccgagccttcctgtgcggatccgtcgaggccatccggctggagctctctcacctgctcaagctctagcatccggagctccacctctagatcctagctctagtagtggcaccgtgttcgggtgtcgccctcacgccatcggcgtccgccaacatcctagtcgccaacattgttcgatcgtcctcgtcgtgttgccaacatccgccaacatccttctcgcgtcatatgtgccgtcctgcttgtcgtcctcgcaccgccggcatctgcacgttctcctcgtgccaccagcacctacctgttatcctcgtgtaaccaacgtccgcactccatccttgcaccgttattgtctagtcatcctcctcatgttatgtcctctgctcgtcctcttcgaggagcgggcgagcaatgaaggagcgcctgatggcagggatcctctgctcgcatcatatgatgatgacgatgacgacgacgaagacgaggacgaggacgacagttcatctggagacttgccaccgaggaagaagcagaaaaaatgcaagtacattgcggacaagccatccgcctgcacctcaatgcctgcgaaaatagttgattttcgcagccttcgtccgccgctgctgcacgtccgcgccgcgccgtcgtccgccaccgccgcacagccgcggcccaccgttgtccgcgctgctgccgcacggccatggcccaccgtcgtcaatgcggatctgggagggaggggcggccgggagccgtcgccgccgcagcagcacggccgcggcccgccgtcgtccgcgccgccgccgcatggccacggcccaccgtggtcactccagatctgggagagatgggcggccgggagtcgccgccgccgcctcaaccaccctcgccgctgtggccatgccaccgcctcgaccctcctcgcagccaccgcccgccgccgtgctccccccgcccccctccggccagatccgccggccaccgctctccccctgctccctcctgccagatctgggaggaggggccgggagcgtgccgccgccgccctccgccgctgccgccctccgccgccaccgcccgtcgccagccgccgccgccgggaggggaggggagaggagaggtga

SEQ ID NO: 57468 - DNA, 449 bp, Oryza sativa
  unsure (1)..(449): unsure at all n locations
  Clone ID: PAT_MRT4530_59277C.1
ggatgacaaatgacattgtagttcagtttggaaccaaattgcagttttgggagtatgtttttcttgtgcagcaatggcatcgtttgttgaaggcggantcagtgcagagttgcagacactgccggctgataccggcgttctctgacatgaagtgcagagcccccggccagctgaccacagaacaaagggtgaccatgatgaacttagagcttgcggagtgatggagctgtgtgtgcaggctgtggactggacaagacattcacgtccggccggagatgaggtgcttgctgctcaagagttgaaccatcttttggatcgatcagggaaagccttcctagtcatgtcttcttccatgtgtactcctatgtgacagacagccagcatgcaaagatttctgcatgcgtgtgctctatttttctggatttaagcagaggagcagcgtaattggg

SEQ ID NO: 57469 - DNA, 285 bp, Oryza sativa
  Clone ID: PAT_MRT4530_59278C.1
atggaatcgacatggccctggagcttagatctggagttagtgaccaatgtacccagccccctcatcaccgacgtttgccctcccttccgccagcctggacgtggcgacagcgaggctaacaaggatgtcatcctggggttcgtcagggcggagctgacggccatgcatgccgcgctacgggacctcaccgacctgaccccagcgcagctcgacgagcaggccaaggctggggccagccacgccacgtcgaggacgccgtcgacgctttcatggtttggagcctag

SEQ ID NO: 57470 - DNA, 411 bp, Oryza sativa
  Clone ID: PAT_MRT4530_59279C.1
atggtgaggaccgggactatgttcaaggaggagcagaggtctactgcgatcgggataccatgtgagaaggtgactagagtcaggatttttgggagtcatctttggtcaacggttgggatcggggcaagacttagggaggagttgatgtccagacgatcaaggataccgggtgacgaagttggatacgagatggcatatggtggatggacagcgtgtggtagagatctttgcaatgggcttcacgaagtgtgtgtacaagggtcagtgttcgcgaaggatattggaagaaattggattggagtagatagcgttacagtacggtgcaggcgtgcagctagttgtttgggctgcaggcttcggctgggtggcaagccgagtcgaggcccaggcagcagagagcggggcccctaa

SEQ ID NO: 57471 - DNA, 282 bp, Oryza sativa
  Clone ID: PAT_MRT4530_5927C.1
atgtgggaggagggcaacgccgacgggagggaggaggaggcgacgacgacgacgacggggagggctctccaacgctgcccgtgcgtgtgctcgcagctcgcctccgacgctgcctacgggcgctcaccgcctccggcaccgcccacacgtgctgaccgctcgcgcttagcactcatcggcgacgagaacggacgctgccgccttcaacgttcgccggtccacccgcaagatgatatggttgttcctcctagaatgttgatttgggagcttcttcctaagtga

SEQ ID NO: 57472 - DNA, 782 bp, Oryza sativa
  Clone ID: PAT_MRT4530_59280C.1
atgagcgcggcggcggcggcggacgtggtgcacagcggcggctgccactgcgggcgggtgcggtggcgggcggaggcgccggcgagcgtggtggtgtggatctgcaactgctccgactgcgccatgcgcgggaacgcccacttcgtcgtcccggcctccaagttcaccctcgccgccggcgccggcgagtccctcaccacctacaccttcggcacccacacggcgaagcacacgttctgcagggtctgcggcatcacctccttctacaccccgcggtccaaccccgacggcgtcgccgtcaccgccgcctgcgtcgacccgggcaccctggcgcacgtcgagtacaggcacgccgacgggaggaactgggagaagtggttctccaggagcgacatctccgacttctccaagcccaaggcgccgccgccgccgccgccgagtaagacctagctgctccggtggtgatggtcgctggatgcaacacgcgttggtgatctttctttcggtgtctgaagtggctgggcacatggaatgaacaattcctgtgggagcaagggcgcattataaaagtgccaggtcacgtccctagcttttgaaggatcttcaggaagccatggataccgagctccactttcggttgtggcagtgactcactggatcgagcaacttttaaacttggtgtttgtggttgtggaagccgttgtccaatgctaaattgccaagttggaagccatatgcttacaaatgattgcccatggttaaaactaaaaaaaaaaaaaaaa

SEQ ID NO: 57473 - DNA, 315 bp, Oryza sativa
  Clone ID: PAT_MRT4530_59281C.1
atggccagggagacaacgtgggcacatcaagatcagctggtcatggaggcgaggtcaccgctggcgctgaagatggaagggttcgcgagagggcgagagagggtaccgccgggaagcaacccatcgacggggaggccactcgccgtcggctcgaaaaagaggagcgggaagaaagaaaggaagaccacaatgacggcggaggcggcgacgacgacagatgcgcgtgcccgtgtacgggacgaaggaatcactccgcaagaaggcggcagcggcggcgacggccgggcctcactccgcaagatttggggattttag

SEQ ID NO: 57474 - DNA, 229 bp, Oryza sativa
  Clone ID: PAT_MRT4530_59282C.1
ggattattactacccaattccactagtgttggtgaaatatgtgtatgcgcgtattttaatgagaaaacacacccgtcatgcgaggaaacacacctccggccaatcagacgcgagcacacggattggagggcccacaagtcaggtgaaaccgcccgggaacgcgtcataactgccataaccgccatcagggcccaccagtcagtctcctggccaaagggaaggccaggag

SEQ ID NO: 57475 - DNA, 710 bp, Oryza sativa
  Clone ID: PAT_MRT4530_59283C.1
ggcgacgggagccgcctgcctctctccgctgcgcgccgcctctttccaattccacctcgccgcttctcctcgccacacaccagcgtcctgcgtcccattcccctctcctctcctctcaatctctcatccctcccttgtcgtaccgcatccgcatcagcaccaccatctcctctccgcggcggcgccgcatttccttccctcgccgaccgccaccaccagcgtatgtctcgtctctcctcctccctcgctcgctcgtcgcccatctacattgcttcttatgatgattcttggttggatctctcccgcactacttcgctacttagggttcattcttctcccctagatatgcatgtatcaatatatgcccgcacgccgcgtgattaatttcgaccacatcatttttcctacctttgctcttcgcctgataataaatagactgttctagtgttgttgcacatcatcccttcatttatctacttcacttcaagggggcttacattttacactatcgcatttttatgccatgcttctctgtgtcaaactgccgaccggatgtcacatgtgtctcggttttcttttcctatatgttgggtcttttcttttagatctacgcccagctgagggataatatctaaatcatttcatgcagggctccgcttgctcttcaatgactcttgacatcaagaaggattatctctggtttccttgct

SEQ ID NO: 57476 - DNA, 3366 bp, Oryza sativa
  Clone ID: PAT_MRT4530_59284C.1
atggagtacatgcgctggctggaggagcataacaagcagataaatgagctgaggtctgcagtccacactcatgccggtgacgatgatcttcagaacattgttagtagcgtcatggcgcaccatgaagaaatcttcaggatcaagggtttagcagcaaaggctgatgctctccatgtgttatcagcaacctggaggacccctcttgagaggtgttttctttggttaggtggattccgaccatcggatcttcttaagttgcttgcagatcagctagagccactgactgagcagcagcttgccagcatatacaaccagcagcaatcttcccaacaggcagaagaaactctttctcaagggatggaaattatacaagattctcttgcgaaaaccgttgcatcccaacttggccgtgcaggttcttcttctcctagcaatgctgcagatcacacggctgcggcattgggaaagatcggcgacatggaaagcttgctgcagcaggctgatgatctgcggatgcaaagtctccagaaaatgcagcgggtgctgaccacccggcaatctgcaagggcgctgctcttagtcagtgactacttctcccggcttcgcgctctgaattctctctggatcgcacgcaacaacgactttgaggtcaatgctggagactcaactaagtacccccaaagtcccaagcctcctcaccttccgttccaattagcatacccaaccgaagaacatggtgagctgaaattcccccaagacatagctgaggagctgcagaagttatccagcagtctgtcaacgattcaagcgcatgtcgaagatgctgaggctcggcaacttaaggatagggcggcacgaagctggcttgccaagcttaaggatgtcgcatatgagatggatgacttgctcgatgaatatgcagctgagaccctccaatctgaactagaaggctcgtcccgcagtcgccatctgagcaaggttagaagcagtttctgttgcctttggttgaacaactgtttttccaaccacaagattgtgcaacaaataaggaagatcgaggagaagatcgacaggcttgtgaaagaaagacagcttattgggcccgatatgagcagtaccatggacagagaagagatcaaagagaggccgaagaccagttcactaattgatggctcaagtgtgtttgggagagaagaagataaagagaacattgtgaagatgctgttgactccgaacaactccaaccatgccaacgtttctgttcttcccatagtgggtatggggggactagggaagacaactctaacacagcttgtctacaatgatccaagagtaaaggagtacttccagttacgggtgtggctgtgcgtttctgaaaattttgacgaaatgaagcttaccaaggaaaccattgaatcagttgccagtgggttctcatcggtcacgaccaacatgaacttgcttcaagaagatctctcaaaaaagctggaaggtaaaagatttcttctagtacttgatgatgtttggaatgaggaccctgaaaaatgggacagatatcgttgtgctcttgttagtggaagcaatggaagcagaattgtagtaactacacggaacaaaaatgttgggaaactaatgggtggaatgactccttactttctaaagcagttatctgaaaatgattgctggaacttgttcaggagctatgcatttgctgatggtgactccagtttgcacccacatttagaaattataggcaaggaaattgtgaagaagttgaaaggcctcccacttgctgcaaaagcaataggtagtttgttatgtaccaaggatactgaggatgattggaagaatgtattaaggagtgaaatatgggaactaccatcagataagaacaatatattaccagcactgaggctgagttacaatcatttgcctgccatattgaagcgatgttttgcgttttgctcagtcttccataaagattatgtgttcgaaaaagaaaccttggtgcaaatatggatggcccttgggttcattcagtctccaggaaggagaacaattgaggaacttgggagcagctattttgatgaactattaagcagatccttcttccaacatcacaaaggaggatatgtgatgcatgacgccatgcatgaccttgcacagtcggtctcaatggatgaatgcttaagattggatgaccctccaaacagcagcagcacttcaagaagttccaggcacctgtcattctcttgtcacaatagaagccggacttcatttgaagactttcttggatttaagagagcacgcacacttctactattaaatggatataaatcaaggacaagccctattcccagtgatctgttcctcatgttaaggtacctccatgtgcttgaattgaaccggcgagacattactgagttgccagactccatcgggaacctaaaaatgctccgttatttgaatctttcaggcactggtataactgtgttgccttcatcaattggtaggctcttcaacttgcaaacacttaagttgaaaaactgccatgtattagagtgcatcccagaaagcataaccaatcttgtaaatcttcgatggctagaagcacgaatagatttgatcactggcattgcaagaatagggaacttgacttgcctccaacagttggaggaatttgttgttcataacgacaaaggatacaagatcagtgaattgaaaacaatgatgagtatcggaggtcgtatatgtattaagaatcttgaggctgtagatagtgcagaagaggcagggtgcaaaccggcggtagagcgctccgaggcggccgcggcaacgcgcgacgtgtgcgccgccgggcagcgggcgccgcgcgtgccgccgtcggtggcggtggcttcggccatggcgacctttctcgtcagggactcacgggctgctgggctgggcctcttcggaagacgattggtgcaattgggcaggtgcaacaagggccaaggcccatcacgtatgagggaggagagcatgcggtcggaggcggtgctgctgcatccggcaaacgtggtggcgtgcacggcgctcggggttgtggcggcgctgctgggcgtgctgctcccctgcccgaggctggccacgcgcgacgccacggacaagaggctcgcctacttggaggtggcggcagagagggtcatgctgctggcccacgccttccagttgcacttctcgagcggcgatgcaggtgatgatgagagagcatcatattgtcgttgcagcagacggcggcggcagtgcgtggccgcgtgcatcatgtcgcaggccgaccgcgcagccaccgccggccggcgccgtctctcctccgccgcataa

SEQ ID NO: 57477 - DNA, 1226 bp, Oryza sativa
  Clone ID: PAT_MRT4530_59285C.1
gggggaggtcaatgctggagactcaactaagtacccccaaagtcccaagcctcctcaccttccgttccaattagcatacccaaccgaagaacatggtgatcggagaagctgttctgtctgccttcatgcaagcactttttgataaagtgattgctgctgctataggtgagctgaaattcccccaagacatagctgaggagctgcagaagttatccagcagtctgtcaacgattcaagcgcatgtcgaagatgctgaggctcggcaacttaaggatagggcggcacgaagctggcttgccaagcttaaggatgtcgcatatgagatggatgacttgctcgatgaatatgcagctgagaccctccaatctgaactagaaggctcgtcccgcagtcgccatctgagcaaggttagaagcagtttctgttgcctttggttgaacaactgtttttccaaccacaagattgtgcaacaaataaggaagatcgaggagaagatcgacaggcttgtgaaagaaagacagcttattgggcccgatatgagcagtaccatggacagagaagagatcaaagagaggccgaagaccagttcactaattgatggctcaagtgtgtttgggagagaagaagataaagagaacattgtgaagatgctgttgactccgaacaactccaaccatgccaacgtttctgttcttcccatagtgggtatggggggactagggaagacaactctaacacagcttgtctacaatgatccaagagtaaaggagtacttccagttacgggtgtggctgtgcgtttctgaaaattttgacgaaatgaagcttaccaaggaaaccattgaatcagttgccagtgggttctcatcggtcacgaccaacatgaacttgcttcaagaagatctctcaaaaaagctggaaggtaaaagatttcttctagtacttgatgatgtttggaatgaggaccctgaaaaatgggacagatatcgttgtgctcttgttagtggaagcaatggaagcagaattgtagtaactacacggaacaaaaatgttgggaaactaatgggtggaatgactccttactttctaaagcagttatctgaaaatgattgctggaacttgttcaggagctatgcatttgctgatggtgactccagtttgcacccacatttagaaattataggcaaggaaattgtgaagaagttgaaaggcctccccctcgcccta

SEQ ID NO: 57478 - DNA, 969 bp, Oryza sativa
  Clone ID: PAT_MRT4530_59286C.1
atggcagctcaagctctcgccgccgtcgtggccattgccgtgctcgcccaatcagccgccgccgccgcggcgccgccaccggccaaaggcccggtgacatacgtgttcggcgactcgatgtcggacgtggggaacaacaactacttcccgctctccctcgccaagtccaactacccctggtacggcatcgactaccccaacggcgtcgccaccgggaggttcaccaatggaagaaccatcggagactacatggctgacaagttcggcgtcccgtccccgccgccgttcctgtcgctgtcaatggtctacgacgacgtcctcggcggcgtcaacttcgcgtccggcggcgccggcattctgaacgagacgggcgtctactttgttcagtacttctcattcgaccagcagatatcgtgcttcgagatggtcaagaaggcgatgatcgccaagatcggcaaggaggccgccgagaggctgtacgggctcggcgcgaggaaggtggtgttcaactcgctgccgccgctgggctgcatcccgtcgcagcgcgtccactccggcaacggcaagtgcctggaccacgtgaacggctacgccgtggagttcaacgcggccgccaagaagctgctcgacggcatgaacgccaagctgcccggcgcgcggatggcgctcgccgactgctactccgtcgtcatggagctcatcgtccaccccgaaaaacacgggttcacgacggcgcacacgtcgtgctgcaacgtggacacgacggtggggggcctgtgcctgccgaactcgcggccctgcagcgaccgcaaggcgttcgtcttctgggacgcgtaccacacctccgacgccgccaaccgggtcatcgccgacctcctctgggacgccatgccgagcgccgggagcgggggcgccgccaccacccctctcgccgcgtcgccggcgccgtcgccgtctcgggcgccttag

SEQ ID NO: 57479 - DNA, 426 bp, Oryza sativa
  Clone ID: PAT_MRT4530_59287C.1
cgggctgcaggaatcggcacgaggtcataatgcagttactaaatcagttgagatcaagacatattcagaatttccagccatacaaaaatcagaaagacggaaggtctttgctatcttaatacatctgaaggctccaaagtccttggactcggtgagctcccgtgcacctcttgaccttgtgactgtgcttgatgtcagtggcagcatgtcggggataaaactttcacttcttaagcgtgccatgagttttgtcatccaaacacttggacccaatgaccgcctgtctgttgtagccttttcatctacagcacagaggctctttccacttcgccgaatgaccttaactggtcggcagcaagccttgcaagccattagttcccttgtcgcaagtggtggcacaaacatttgctgatgcgctaaagaaag

SEQ ID NO: 57480 - DNA, 507 bp, Oryza sativa
  Clone ID: PAT_MRT4530_59288C.1
atggcgatggtggcggggacggaaccggccgcgggcgcgaaggtggtggtggtggtcccgtgtgggcttgtggtaacgacggcggtgacggtgtcccccagatccgcgcctctcggccggatctggagggtggccggcggcagttggtggcggctgtgcaacgatgacggcggctgtgcggcgacgacggcggcggtgcggcgacggcagcggcggcggtgggcgacggcagcggcggcagttggcgacggcagcggcggtcgcggcagttggcggctgcggtgttggctggtgatggcggcagtggcgcacatggcatcgggcggcggccagccgcatgctggtgaagggcgatggcacagcggcaggttgcagatacgagggctggcgtcgatggtagcggcgacggcggccgtttgtgcaggcggtggcgacgtcggcggcggggaaggagtcggctgcgaggcgaggatggcgactggcgacggcgaggtggctgggcgttag

SEQ ID NO: 57481 - DNA, 153 bp, Oryza sativa
  Clone ID: PAT_MRT4530_59289C.1
atggcccgtggggctggggaggcttgggaccagtggagtggggtccacagggaaatgatcaaggcgtcgatgttggatgagatcatcgatcggctacgtcaagttcttgctagaggcggaaatttccctgttggggtcggagacccaccctaa

SEQ ID NO: 57482 - DNA, 717 bp, Oryza sativa
  Clone ID: PAT_MRT4530_5928C.1
atggagcccgagagcgccgcgccggtttccttcccctccggccgccctctcccccttccaaccctatataaaccctccccgcgcctccctcgcccgtttccgcccttgccgcaccgtctccccaccggaatcgagttcgtgccgtcgccctctctctcctccgtcgtcgacgacctccggctggccttctccgctcgccgggaccgtctcctgccccggcgtcgcctcctccggcttcgccgcaccgccgtcgaccccgtccaccccctcgccgagcccgcggaccgccggaatgccgtcgaccccgttgacccgagccgcgccgccgccttcctccgctccggccgcctttttcgtcgtcgctgtcgacctagggtgagccgaggaccgccgcctcttttcccccttcccttcccctctctcggccgccgctccgccgtgcctatggccgccgccggcgaccataggggcgcgggcgccgtctcccgccggccgcgccgagtggccgccgcgtggggcccggccgtcagccgcccacgtcctcgggtgcggctgacgcgtggggcccacgacgccggccggtgcgagcccgggtgcgcccggtccaccgtggaccgtgaggctgtctcgtgggccccactcccgtggacccagtccgcgcgccccctcccctcggctgacgcaataaagcttttttttaaattaaaatttaaatga

SEQ ID NO: 57483 - DNA, 273 bp, Oryza sativa
  Clone ID: PAT_MRT4530_59290C.1
atggaggggccttcatcatcgcctcctactgctgaggccgctcctcttgcgcgcttcgtgccgccctcctcatcgtcccccatgactgtctacgacacgatgatccacgactcgctagtgttcgacgatggtcaccgtgtagtgggtggcaaggtgcggtcatggagcaccattcaccaccctcgacaagcctgtggtggtgatgggaccaggggcagccggagccacgccgtggaggcgcagcaggcgtcgccgctatcgatgcccgtctaa

SEQ ID NO: 57484 - DNA, 141 bp, Oryza sativa
  unsure (1)..(141): unsure at all n locations
  Clone ID: PAT_MRT4530_59291C.1
tccgaccaggaagaggtcagcagcggctagtagctgaagaagaatgcaggcagcagcagcaagcagctaagctgcgtngttaaagagaggtttgagtgttagcctaggtaaggatatatatttataggccggccaaccggt

SEQ ID NO: 57485 - DNA, 395 bp, Oryza sativa
  unsure (1)..(395): unsure at all n locations
  Clone ID: PAT_MRT4530_59292C.1
tttaangatgccatttagcggaatggcgttgtggcgaacccactctcggcagtagcagaatttccaatttntcggcaaaanacgcagccatggccaacgcccacgcnagcaccagggctcccgcgccgccgcctcatccaccgatgcttcttcggccgccgccgcagcccagggcggcgccgttgcgccccgcngcctccntcgtccgccgataggcanccccgcagcccggagacggaggccgcaccgacggntcgagctccgncgctgcggcgcctgatcggangggaaagaagccgatgtcggcgtctnatgatcggaaacaggcgcgaaggaaggagaagaggaaatctggttacccgaaagagaagtttctcgaaatagaatgcgttcgt

SEQ ID NO: 57486 - DNA, 801 bp, Oryza sativa
  Clone ID: PAT_MRT4530_59293C.1
atggaggccacctataggctacagcgcacggtcagcggcggcagaggccggccgaggcagcgcgacaagcgttgtgggggcaaaacccaggccgctcgaccgccacagcgccacgccgctgtcccgggccgctcaacgtcgcgccaccacgtggaccgctcgaccgccgcggcggtgggcgccaaggtagaagcgggcgccaccgcggtggtgggtgcggaggcacggctgctgctctggaccgccgccagcatcggtctgttgttcggcgaactggtgctagacaaagaagggggagataagatcggcaagagagggggcaccgccacctcacctgtcgccttcgtctccacctccgctggcgggggcggaaggatccgcgcgctgcgggcgcccatcccctcaaccgccgccgctcccgagggcatggggacgatggtgacgacggtgttggcgtggcgacggctccacagccagccatcatccggtcacggcgggagaagatacgcgccgaccacgagaagcatctctcaactcatccaagtcgaagccgatcatgtcgatgtcgccgtggtcacggcgtgcgcgcaccgtggcgacctcttcgctgatacgagccgccgctccgcagccgcactcgcccgccgcgtcccccgcatcccaagcccctccattcctcccgagcccggagccgccactcgcttgccaccgctcttacctgccaccgccgatgctccgcagccgctgccactccccctctcggccaagaaaaaagcgattgaggagaagattgctgactag

SEQ ID NO: 57487 - DNA, 502 bp, Oryza sativa
  Clone ID: PAT_MRT4530_59294C.1
atggaggccacctataggctacagcgcacggtcagcggcggcagaggcctgccgaggcagcgcgacaagcgttgtgggggcgaaagtcggtggcagctgcacgccgtccttgctgccccacagcgcacgcttatcttctgtgtattcaactcttcatctccacaagacttcagtgatgaaaagacacacgatgcaccgccgcctactgctagcccgatgtccttggtgaccgcccaggccgctcgaccgccacggcgccacgccgctgtcccgggccgctcaacgttgcgccaccacgtggaccgctcgacctccgcggcggtgggcgcgaaggtagaagcgggcgccaccgcggtggtgggtgcggaggcacggctgctgctctggaccgccgccggcatcgagcatcaactactggggttgcctcttgcccacgccacgggcctgaggccgtcacgcagcctcggtgctggagcggttgatgggctttctgcccccaccg

SEQ ID NO: 57488 - DNA, 451 bp, Oryza sativa
  Clone ID: PAT_MRT4530_59295C.1
ggcgacgatgggaggaggcaactccgccgatttcttctcggcgacggcctcgctcgtcttctccagaggattcttctctcgtgcagcaacgccactccgtactccgctgactcgacaaggcatcccggcgatgaagcaatcttcaggtgatgggaggttgctgttgcggctgtggcttcagctcctaaaaattaggcaatgtgatgtttacggcccagatgttttcttagcaaatttcagcaactataagtgtttcttggttcttgtgtccaagccacaagccttggttcttgtgtccaagccacaagccgactgtccgacccaagaagtaggagagtcagaggcgcacacagcgcacgcaccacacgggaggctagtgggggacacccgcttggggaaggagatcgcaacatgtgtctccatccacggccagaaatttgagtgtatctaa

SEQ ID NO: 57489 - DNA, 1608 bp, Oryza sativa
  Clone ID: PAT_MRT4530_59296C.1
tcaccgtgacgagcgcatggccggaggcaggaggagcggcggtggacgggcgtggcggcaagcggcggctccgggcacagctgcagagcgttggcggcagcaggcggcgggcgagaacgaccgcagaggactagcgacagtgggcggcggtgcgcggccagagtcggcggagcggcggcgggcgagcgggggacgcggcgtcagcgcgtggccagagtaggcggagcggcgagtgggcaggggcgtgccgacggtgacgagcaggcagcggccactgtcgcacaaagatgatgaggaagtacaaccgtcgccgtgaagccgttccggctgcgcgccgcttgcctccgccgctgacgctctgcagtcgtgcccgcccgctaacgccgccgctccgcttgcctccgtccacgtgccgctactgctccccctggttcggctggcgcggcggatggctggtgcgtaaaaactgggcggcgccagcgggggaggagctgggcggcgccggcgataggtgacgcggggacgcgggagaaggggcgacacggcggcgcggcgacacgggagaaggggccacgcggcggcgatggactcggcgggtgccccgaccgcggagctgttcgccgcatgcgcaggagaaccgcggagcaggcgagcgaggcgggctgcgacctcgctttcgttcgctctcgaccgcgtgtgcgtcgggcggcgtcgtcgtcggcgaaggaggcggacgaggggctgagggccgggttgctacgggtggttcgcggtcgtgggcggcggcatgtcggaggcgtcgggcgccgcgcgcggggtgtgtgggggagtgcggcgtgcggccgtcgttgtcaccgcgggctggacgctagccagcggagagtcgccgccgccgccgccgccggtggcatctcctccctcatcggcagccgcccgcgtccgccgtgcccatatactctttgccgtccgtcttgtcacgccgttcctcccaccccgcatgcgcgcacgacgtgcccaccgtcgaaggagagggacgcgtttggtgggtggaagcggacagcgacagcgacgatgacaacacgggtccggcgagccgagctcgagaaaaggagagatggggagggctctcacgcggcggcggtgcacctcgacccggacggcatggagaggctacctatagggtacagcgcacggtcagcggcggcggaggccggccgaggcagcgtgacaagcgttgtgggggcgaaagtcggtggcagctgcacgccgtccttgctgccccacagcgcacgcttatcttctgtcaacgtgcctcgtcgtctccctctcccatcaatagattcatccccagatttgcgattggttgcatacggacgacgatggtggcagcccaggccgctcgaccgccaccggcgccacgccgctgtcccgggccgctcaacgtcgcaccaccacgtggaccgctcgaccgccacggcggtgggcgcgaaggtagaagcgggcgccaccgcggtggtgggtgcggaggcacgactgctgctctggaccgccgccggcatcggtccgttgttcggcgaagggatgcgttgtatccggttttgtgattag

SEQ ID NO: 57490 - DNA, 218 bp, Oryza sativa
  Clone ID: PAT_MRT4530_59297C.1
tcggtagtgtgcactatgaagaccacgacaggagtgactaccctgagcactgcatgaactatattcaatagtgctgtgtgtctaagagtatatgcccctggtgagctttaaattaaggtattgtatacctacacataacatttgaactaacctacttaaatgaatattcttattttgaaacagctactatcagggatcctatttaagattaagttctt

SEQ ID NO: 57491 - DNA, 1026 bp, Oryza sativa
  Clone ID: PAT_MRT4530_59298C.1
gggaaagcaaaccaagcaaacataagtctaaaaactcggagccgtctgatcgttccccctccttcccaaaaagaagccagcaatcgaaagcccaagcttccaaaaatccgcttccaattcgcgaaactacactagtcgtaagcgccaaatccaaccgaccatgtccgctgatccgccgcagcaacgtgttcgaccccttctccctcgacctctgggaccccttcgacggcttccccttcggctccggcggcagcagcagcggcagcatgcttgcccgtccttcccgcgcggcgcctcctccgagaccgcggcgttcgcgggcgcgcggactcgagtcggaaggagtcgccgaggaggacggtggtgtcgagtggaaggaggagggcggccagacgcaacggagttcagcgacgggagcgggccgggcctcggagaacgtacggaagtctaaggtggaggtggacagacggcgaaatcctgacagatcaagcggcgaccggcagccaaggagcaggaggagaagacggaccagtggcaccgcgtggagcgcagcagcggcaagttcctccgcaggttccgcctccccgacaacgccaagccggagcagatcaaggcgtccatggagaacggcgtgctcaccgtcacggttcccaaggaggaggccaagaagcccgacgtcaagtccatccagatctccggctaggcatcgccggcgtgccgcgtgcgcgacggagaggagcacggcggggttttcgctttggcctggtttgtctgtcgtgaaggagcaaataaaatcgggtccggttgagtccagtgtgtgtccgtgtctgtcttgaacagtcgtgtgtcgcgtcgtgtcactgggtcagtgtgttgttccagtgcgccgttcatcagccgatcagcgtctgtaccggtcttttgcaactagttaagtgatgaatactataatctgttaataaaaaaaaaaaaaaaaaaaaaaaaaaaaaaaaaaaaaaaaaaaaaaaaaaaaaaaaaaaaaaaaaa

SEQ ID NO: 57492 - DNA, 403 bp, Oryza sativa
  Clone ID: PAT_MRT4530_59299C.1
aacaacattgtttatggaacagtttctatttgcattgtaataaacaatcttacatcttgcacgacttgaaattctttagttgatggcctccaatctaaatagttcttaacatgttaccagttactgctttctacaaagttatatttctgaatggtgtttttcccagaattcagaatcttaaaatctgtgctactggaagagttattatttcagtttgtttaattaaaatcaacttcactgcaccacataggcacatgctatgaatctactagagtatgaccatgtagcatttgtccatggccttgaatttgttgatgattttttttttgtaagcattgaagttcttctgatggtctgatttgactactgccttaatttgctgagaggaaaaattctgaacgga

SEQ ID NO: 57493 - DNA, 331 bp, Oryza sativa
  Clone ID: PAT_MRT4530_5929C.1
atgggcgagggcggtcatggtgacagcggttttcccggcgctgcggcgcctgacgcaccgacaagcatgttgccggcattgctcttgaccccgccgaggagccagatgttgccgttgctcccgacgccgtgcctcatcatcctccacgcctccttccgcgtgtggccggcctctgatcccaagcctggtcgagctgacgccgttgagagcaacaagcggccgctgagccgcgcgtcgtcggcggagctaggacatgagcgtcggcagcgggaagagcaactccacaagccaaacgacgacgatggtgaagtcgccgccggcgctgcggctg

SEQ ID NO: 57494 - DNA, 1831 bp, Oryza sativa
  Clone ID: PAT_MRT4530_592C.1
atggccaccgcgtcctcgcaccaccgcgcgcgcctccggtcccgcgccgcgccgctcctcgccgtcgtcgtgctcgcggtccttgcgctgaccgccatcctccgcgccagccgccacgacttcgtcccgggcgcggcgcgcgccgccgccggagtcggcggcggcggcaacaaccacaccatcgcgcagcgcaagatcctgctcgacccggacttcaccccgcggctcccgcgccagagcgcgctctccctctccctctcccagcggaacgcgctcccgccccgcaacgccgaccgcttcccccgcctccccgacggccacctcaacatcgtcctctacgtccacaaccgcccccgctacctccgcctcgtcgtcgacagcctctcccgcgcccacggcatcggggaggcgctgctcatcgtcagccacgacggctacttcccggagatggacaagatcgtgcagaccatcaccttctgccaggtcaagcagatcttcgcgccctactcgccgcacctcttcccggaggccttccccggcgtctcctccggtgactgccagggcaaggacaaggcggccgagaagcactgccagggcgacccggaccagtacggcaaccatcgctccccgagaatcgtctcgctcaagcaccactggtggtggatgatgaacaccgtgtgggatgggctggatgagaccagggacttcgatggccacatcctcttcatcgaggaggatcattacatcttccccaatgcgtaccgcaatgcgcagctgcttgtcgacttgaagcctagcaagtgtccccagtgctatgctataaacttggcgccatcggatgtcaaggcgaaaggggaaggttgggagagcttggttgccgagaagatgggtaacattggctatgccttcaacaggacagtttggaggaagattcatgccaaagctaagcagttctgcacattcgacgagtacaattgggatataacgatgtgggcaaccgtgtatccgtcgttcggatctcctgtttacagcctgaggggacctaggaggagcgctgcacatttcggcaagtgtggcctgcaccaaggccaaggcttgagcaatgtctgtgtggataatggcgacgcgacagtacaattagatgccatcgataaggtccctaacatcaaagctaactggccagtacatatcatcaagaggcaggaggggtatcaggctggcttcaaaggatggggtggctggggtgataagcgtgatcaggagctctgtctcagttttgcatacatgcaccattttaaagacccatcatctccttgatgcagggtataggcacacggattttggcatagctgccgccttgttgtattattgttcggtatcattcattcttacacacggttcgatataaatagcagtcttccctttcccaattttgtagaatagctctttcttcccagttgaaagacattgctgttagagttggatcaatatcccaaactgtatgacttaagtagttaagctcacagatgtggataaagtttactcttttaagcacatgagttagcatttatttgctacttgagatcttgccatgtttccttctgtctacatcattaatgttcaagtgttcttactctcatattcattgtactactatgaatagaaattactatcatatctgtgtcatttattatgacaaaaactgccgtgttatatttgtgtgaagtgctaatttgtgtacatgtttatttttaggcgtgcttactggtcgttgaccagttcatcttaccatttgaagtgtactgatttatatttccattatacagtttga

SEQ ID NO: 57495 - DNA, 814 bp, Oryza sativa
  Clone ID: PAT_MRT4530_59300C.1
ttttaatcgcgatcccttgtgctcacatcccaagcccggccagcacacactgttttagtgttcacaaacacagccttccttctcgcccaaatccgtcaaccatgtcgctgatccgccgcggcaacgcgttcgaccccttctccctcgacctctgggatcccgtcgacggcttccccttcggctccggcggcagcagcagcagcagcggcagcctcttccctcgggccaactccgacgcggcggccttcgccggcgcgcgcatcgactggaaggagacgcccgaggtgcacgtgttcaaggcggacgtgccggggctgaagaaggaggaggtcaaggtggaggtggacgacggcaacatcctgcagatcagcggcgagcgcagcagggagcaggaggagaagtcggacaagtggcaccgcgtggagcgcagcagcggcaagttcctccgcaggttccgcctccccgagaacaccaagccggagcagatcaaggcgtccatggagaatggcgtgctcaccgtcaccgtgcccaaggaagagcccaagaagcccgacgtcaagtccatccagatctccggctagagccccgtttgtttattctgctgcttctcctcaatgctgcaattgatctcctcctttggtactttgcttgtgtcgtgagggacacagtccaaaatgtgtgtgatatgatcatgtgtttatgaatgtgtggtctcctccaagggtcccaaatgtgtttgtctcctatgcgtttatgtacgggaaataaactttaagcttgattaatgtaccaatgtttgagttaaaaaaaccac

SEQ ID NO: 57496 - DNA, 740 bp, Oryza sativa
  unsure (1)..(740): unsure at all n locations
  Clone ID: PAT_MRT4530_59301C.1
agcatancgtacgaaagatcaacaagctctcttgagaattgagatcaccctctttccatctagaacacaaaccagacaaccaaaaaacagcaagacacaatacacaatgtcgctgatccgccgcagcaacgtgttcgaccccttctccctcgacctctgggaccccttcgacggcttccccttcggctccggcagcagaagcagcggcagcatcttcccgtccttcccccgcggcacctcctccgagaccgcggccttcgccggcgcgcgcatcgactggaaggagacgccggaggcgcacgtgttcaaggcggacgtgccggggctgaagaaggaggaggtcaaggtggaggtggaggacggcaacgtcctccagatcagcggcgagcgcagcaaggagcaggaggagaagacggacaagtggcaccgcgtggagcgcagcagcggcaagttcctccgcaggttccggctgccggagaacaccaagccggagcagatcaaggcgtccatggagaacggcgtgctcaccgtcaccgtgcccaaggaggagcccaagaagcccgacgtcaagtccatccaggttaccggctagtaagaaacttcgggtgtgacatgcacggtggagaggcttcgattcgaggcttcggtttgttgatcaattgcagtaaataaaacggtcaaatctggtcctcagtgtttatgctgtgaaaaagttcaaagctatgttggaagtgagcaat

SEQ ID NO: 57497 - DNA, 324 bp, Oryza sativa
  Clone ID: PAT_MRT4530_59302C.1
atggaaaatggcggcaacgacggtgatgggtcggcggtgctagtggtgagctggaagcatgagctggtgtcacggctacagttaagtcctagcttccactttgtgccgacggacaaggagctcgtggacttccacctccgcggtaagatcaagagacgcaaaccgcctctctacctcatcaatgagaaatacaagggctatggggaaggtatgtggtactttttcatggtgagggggccatcgaagacgaagaagaaggatttgcctcagctgcacatgaagctcgactacctctgttgccccaagcattcacctgccttttga

SEQ ID NO: 57498 - DNA, 802 bp, Oryza sativa
  Clone ID: PAT_MRT4530_59303C.1
caaagcaaaccaagcaaacatcagagtccgaactcagagaagtccgatcgttccacctccaaattcgcagctattccgacgatgtcgatgatccgccgcagcaacgtgttcgaccccttctccctcgacctctgggaccccttcgacggcttccccttcggctccggcagcggcagcctcttccctcgcgccaactccgacgcggcggccttcgccggcgcgcggatcgactggaaggagacgcccgaggcgcacgtgttcaaggcggacgtgccggggctgaagaaggaggaggtcaaggtggaggttgaggacggcaacgctcctccagatcagcggcgagcgcatcaaggagcaggaggagaagacggacaagtggcaccgcgtggagcgcagcagcggcaagttcctccgcaggttccggctgccggagaacaccaagccggagcagatcaaggcgtccatggagaacggcgtgctcaccgtcaccgtgcccaaggaggagcccaagaagcccgacgtcaagtccatccagatcaccggctagagcattgggctaatctaaaacgatttatctgtggcttcaagtgtatcgatcacttatgtgaggtgtaattactggtgtttttggtgtgctctggttcctttcaagtgtgttgttgccgctcgaactactccgctatgtaaaacggtaaaacctgttgtctcattatgaaagtgaactatattatgttctactactactctaaaaaaaaaaaaaaaaaaaaaaaaaaaaaaaaaaaaaaaaaaaaaaaaaaaaaaa

SEQ ID NO: 57499 - DNA, 314 bp, Oryza sativa
  Clone ID: PAT_MRT4530_59304C.1
agaacccaaaaaaacgatccaaaattaaatcggacatcccttggaggggggccgggggttacaataaaactggagccaaagaagcaaagatggagacagacagaaaataattaaggtaggaagttgcttaggtcgagcacacacaaacacacaattaagggacaaacaaacagggactggtgaaactggaactggaggggagggggggggctactacaaggggacacatggggcgaggggggggaccattttgaggggggaggagggctaacttggcggggacaaagtgggggggcgttggccaggcgtgttgg

SEQ ID NO: 57500 - DNA, 198 bp, Oryza sativa
  unsure (1)..(198): unsure at all n locations
  Clone ID: PAT_MRT4530_59305C.1
ggaggagcatcgaggaatgaggaaagatatgcgaggcgnttcggctctgncnctgctgctgctgctgctgctgtgctgctcgctcgccgtcgtgcagccgacgcgcgcgctcttccacctncgcggcgcgggcgcgtacgncgaacagcttcgcggcggcggtggctacgncgaggagaaggtaccgatgacggtcgt

SEQ ID NO: 57501 - DNA, 620 bp, Oryza sativa
  Clone ID: PAT_MRT4530_59306C.1
gcatataagaacgccatcccctcctcgacagatatccaagcaaagcgagaaaagaagccagcaatcgaaagcccaagcttccaaaaatccgcttccaattcgcgaaactacactagtcgtaagcgccaaatccaaccgacgatgtcgctgatccgccgcagcaacgtgttcgaccccttctccctcgacctctgggaccccttcgacggcttccccttcggctccggcggcagcagcagcggcagcatcttcccgtccttcccgcgcggcgcctcctccgagaccgcggccttcgccggcgcgcggatcgactggaaggagacgcccgaggcgcacgtgttcaaggcggacgtgccggggctgaagaaggaggaggtcaaggtggaggtggacgacggcaacatcctgcagatcagcggcgagcgcaacaaggagcaggaggagaagacggaccagtggcaccgcgtggagcgcagcagcggcaagttcctccgcaggttccgcctccccgacaacgccaagccggagcagataaaggcgtccatggagaacggcgtgctcaccgtcacggttccaaggaggaggccaagaagcccgacgtcaaagtcatccagaactcc

SEQ ID NO: 57502 - DNA, 697 bp, Oryza sativa
  Clone ID: PAT_MRT4530_59307C.1
cccacgcgtccgaccaaaatggcagccaggagctccctccatccttcctccatggccagcatcccaagattaattggcaccaggaaggcagccctaaggttcagagctcctgcccatggcggcaccagctcatcacagctttccatcgctgcagcaactgctaacaagaaggtgtttgaggaccagttgagagggattgtgtgctacagagatgacaagggagagatggtctgtgaagggtatgatgaaggtccaaggctcggaatgcggctgccggagaaggcctgcttcccatggcctatggaggttcagatcactgatttcattgagctggcgacgttccgggtcttcgaagatgccgatgttcttcagatcaagaatgatcagaagaggcagatctgagaagaactgatcaatgatcatgtagtgcaaggcagtagttgtatagaaatgctcatgtgtaagaataattttcaaggtatggaattcaagtacactgaagaggcagttctgatgtagttctgtaccctctctctctctctctctctctctctctctctctatatatatatagtttggctaatttttcagatttagaattctgtgcttttaaaaacagtaaattggttcatggagaacttgtaaatttgtccttgtgaagcaatcaagattcagaacagaaaaaaaaaaaaaaaaa

SEQ ID NO: 57503 - DNA, 513 bp, Oryza sativa
  Clone ID: PAT_MRT4530_59308C.1
atggcgaccttcgaaatgctccagcggcggcagagaacggcaggtcgacggcgtcggctccttctggccttcgggctgtcaaagggaggagggaaacgattcaaagaccatctgaggatgctacatgtgcgaggaattgtgccgaagctcactcgggagcgaggaatcgaaggaatgagccggcggccggacttgaggaagaaagatcaggtagaggaagtagttcacgttcccatggataaaatgcgacgaagctcaccagaggtctctaagattggatcaaacaccttcgggcagagaaatgaggagggtgttcttggagataaggcgcaggggtatttacgtccgaccgtgtcaaaaaacagcctctcgtctgccacgtcagcacgtcaagtggagaggagacggcgcggtgttcatcaacaaatatccacgtttatgggatgtcttcccccaaaagttcactttcgcggtgtccctgagctaaatacacacaattgcgatgtcctgtag

SEQ ID NO: 57504 - DNA, 872 bp, Oryza sativa
  Clone ID: PAT_MRT4530_59309C.1
atcctcggctaaaattacatggcctggaagtggccttgaagatgttaggtgaagccttaaacattgattattcaagcactttcacacaaattgctgatgaatttcttgaagtcctttccatgtatgaagagaagtttggcagcacactccgtccaccaccatcaccgccctcttcactggtctttagattattcgctgctagactgaaggagttggagctgaaggagttggagcttcaaaaggattcctcgccctcttcatcagtacaccaacgaaaagccaaaaacgagttcaacaagaaatacatcgagactccatgctcgttgcgtcttaattctcgtggacctgatcccaatattatcatgtggtggaaggacaacaaactgtttcatgttgtgttagctcaactagcaagggatgtccttgcgtctcctgtgtcgacagtctcttctgcagatgcattcaacatcaacggaagagtagttgaagatcaaagatcatgtctagcaccggacattttagaggcaatcatgtgcctgaaagattttggaaatgctgctactcgagaacaggatagaatggtgaatgctgagtttgctagtgtgttaaatgaagacatcgttatgggctttagttacttgagaactgcatggggcagtccaagtatcattgaggttaatttagtccccacaaaatcggagcagtttatcacattgaaagccatagatttccatggaaatccatctggttccatcactggtgctagccttcaacatgtagatcatgggttccgagatcagatcaggaggcaagagagtcataaccaggaattaggcataattctccagaggaatcaacaattaactcagtag

SEQ ID NO: 57505 - DNA, 383 bp, Oryza sativa
  Clone ID: PAT_MRT4530_5930C.1
cttgttaacttattatattctaaactgaaaaataatgcgaatttgggcatgctgaatttgtttcctaaaaaaaggaacctacatttcaaacattttcatcaatctgcatcctaaatcttgctaaagttcaaacgtaaacgtcagatgcatcccttcccagcaatagaaggtttctttaaatacaataaaggttaaacaaccaccaggtatgtaattgtgcaggttctcgcagttcaattccagtgttagtcaacagcatcggttccaccaaaggtccagattcttgttagattcactaaaaacgaaagaaattacgagcatggaatacataatcggtactaactccatgtcgaaatgagcaaaacaataaaacggaggggatg

SEQ ID NO: 57506 - DNA, 478 bp, Oryza sativa
  Clone ID: PAT_MRT4530_59310C.1
caccaaaaaaaccctactaatatttattttaaaaaaaccataccctaacactcattttactttaaaccgaacaataaaatagcccatcaaaggcaaggttaaaccccaaactccggtttgggctacacatggaaaaaaaaggtttggacctcaaacttgggctatggctgggctggggggttagcccaaacccaaagggaaacagggggttgaaaggctggccgccaaaattcatgggcagggggcccaccgattggaaccaagtacggggcagctggccggggaacccgggatccccaaacagcacgtggggaaccccggggccctccgggccggggagccaggcgggaacaaacgcgtccatggcgccgatgtacggttccaccacaagcggacccccggaaaacaacccccaccacccactgtgacgaagcccgaacaacgtccttgaaccactcttcggcccccggggaacggg

SEQ ID NO: 57507 - DNA, 5441 bp, Oryza sativa
  Clone ID: PAT_MRT4530_59311C.1
atgctcgcgtcccgcatcccgctcaagcgctgcaccgccgccgccgtcgtccccctccccggggagttggagatggaggaggggcccaccccccccgccgggggtggtgaggggagcggcgcggcggtggtgcccgccaagcgccgccgcgagcgggtggtcccctcgcggtttagggactcggtggtgtcgctgccgctgccgcccgcgaagaaggggaggcccgcgaagaaggcggccgcgcgggagggcggggacggggaggtgtacgatgtggaggtgcgcgcggtggagcaacaaggcgcgacggcggcggccttcggcgccgtggagaccgcggtgtggcccggcgacgagcggccggcgcagacggaggaggagctgtaccgggcgtgcaggaatatccgcaggagcagcagctccagcgggttcagcggcagcgtggtgacgtcgctgagcaatgccggcgggagcgtggcgccggaggggaagcccgtggtggtggtggagtgcaagccgaagagggagggcggcgataaaaaggaggatttttactggccggaggatttcgtgctgggtgatgtcgtgtgggcgaggtccgggaagaagtgcccagcatggcctgcggtggtgattgacccactgctccacgcgccagcggtcgtgttgaactcctgcatcccgggtgcactctgcgtcatgttctttggattctcttctggcgggcatggcagggactatggatgggttaagcaagggttgatctttccatttgtggactacttagaccggtttaagggtcaggctttatataaactcaaggcaaacagattccgtcaagcaattgaggaggctttccttgctgagcgtgggttttgtgagctcgaaacggatgaggggtgctcactagagaagtctgtcaatgaccagtctatccctgacgggttactggaagggagtggttctaacaatgagcaggaatgtcaatcggaggctcaggttgttggcaaatcaactggatgttgtgatagttgtggtaatcgtgttccacccaagatcgcgaagaaaaagaagcaagcgggagagcagttactctgtagacactgtgataagctattgcagtcaaagcagtactgtggcatatgcaagaaaatctggcaccacacagatggtggaaattgggtttgttgtgatgagtgtcaaatttgggttcacgtagaatgtgacctaacatgcatcaacatggaggacttagaaaatgccgattacttctgtccagattgcaaatcaaaacgcaagacagtacctcctgttgaacaaatgaacactccgaacagttcagaatgtgctagcacttctaaggaaaaactgccggaaatgatacctgtgttctgctttgggatggacggaatgtatttacctaagaagcacatgatactatgccaatgtaattcttgcaaagaaaggctgatgagtctgagtgagtgggagagacatactggttcaaggaagaagaactggaagatgagcgttaaacttaagagcaatggggatccattggtaaccttgttggatgatattccctgcgcaaatgtgaagtcttctacaccaagtattaataaagaagagttgctgaaattgctaggtacattggctcttgagtttatgttggtttatgcagttgcaaattcttttagacctgtcaatgctagatggacaactgaacgttgtgctgtttgtcgatgggttgaggattgggactacaataaaattattatttgcaacagatgccaaatagctgtccaccaagagtgctatggagcacgtgatgtacaagattttacaaattgggtctgtcgagcatgtgaattgccgaaacaaaaaagagaatgttgtctttgtcctgtcaaaggcggtgctctcaagccaacagatattgaccaactatgggttcatgttacatgtgcctggtttcaacctaaagtctcttttcctgttgatgagacaatggagccagccatgggcatattgagcatcccttcagagtactttaagaaggcatgtgttatatgcaagcagatgcatggtgcctgcactcagtgctacaagtgctctacttattatcatgcaatgtgtgcatcaagagcaggatatcgcatggagttgcaatactctgaaaaaaatggaaggaacataacaagaatggtttcctactgtgcatttcacagtactcctgacccagataatgtcttgatagttaagacgcctgaaggagttttctcaaccaaatttttgccccaaaataatgagaaacagagtggtacaagacttgtcaggaaagagaatctacaggagaaagtccttcctgctaaaatttctgactgtccagctgcaaggtgcctaccttatgaaatgctgaaaaataagaaagaaccaggagaggcaattgcccacagaataatgggaccccgacatcattcccaagagtcaattgagggtttgaacgcttgcatgaaaatagaaaacaaaagggtctcttgtggtcgatctggaatacatggatggggactctttgctgctaagaaaatccaggaggggcaaatggttatcgaatatcgcggtgaccaagttagacgtagtgttgcagatttgagggaagcacgatatcacagggagaagaaagattgttatctgttcaagatcagcgaagacgttgtcgttgatgcaacagagaaagggaacatagcccgcctaattaatcactcgtgtatgcctaattgctacgcaaggatcatgagtgttggcgatgaaaagagccagataattcttatcgccaaaagagacgtctccgctggcgaagaactaacctatgactacttgtttgaccctgacgagtccgaggactgcaggtttttctctgcagttcagtttcagtttcagataggccgtgagtggcgctgctgcagccacccgagagttgaaacggacctcaaaacacttgctagaagattttggaaagttgctgccccttactggtggtcagaagataaagtgcaagcgaggctgaggcttgctgcagtatttgctcttacattagcaactactggaattagtgttggatttaactttctgggtcgtgacttctacaatgcccttgctgacaaggaccaggaacaatttaccaagcaactgctgtattacttgggaggttttgctgtaggaataccgattgtttatacaagaattatatcacatatcactagattttccttctttgtcttgagagactatgcaagggagaccctttctttaagatggcgatcttggatgacaagttattacatgaagcgctactttaaaaatagaactttctataagattcaatctcaatcactaattgataacccggatcaacggatcaatgatgatctcagtgcattcactggaaccgcgcttgcattttctctgacatttttaaatgctgccgtggacttgatatcattcagtaacatcctttatgggatctatccaccattattcattgttcttattgtctactcccttgggggcactggaattagtatcttccttggtaaaaatttggtcaacttgaacttcatgcaagaaaagaaagaagcagattttcgttatggacttgtccgagttagagaaaatgctgaatcaattgctttttatggcggtgaagaaaatgaattgcaacttttgttggatcgattcaggagggcttttgaaaaccttagcgaattgctaatagcatctcgtaatctggagtttttcaccaatggctaccgttatttaatccagatcctgccagctgcagttgttgctccgatgtacttctcaggaaaaattgaatttggagtaataaatcaatcagtgtctgctttcaatcatatccttagtgatttttctctcattgtgttccagtttcagtcaattagtgcattctcggcggttattgatcgtctaggtgaatttgatgatctgttggatggaaatggttcatctttatccaagcctgataacattgatgggatcaacataattttcaagagcactggtcctactgtactgagttccaatggatcaccgacacaatctaatccatccatggttcttgagatttgtaatttgacattattaacacccaggagtggaaacattcttattactgacctcactatggaactcaaagaaaaggaccacctactggtaatggggcccagtggaagtgggaaaacctctttgttacgtgctttggctggcctttggaccagtggtactggggacatcatataccatgtgagaggttccatggagcttcaaacatcaaattcaggtcctgatgagccatccaacatacagtcaaacggtgaagaactgctacaaagttcaaagcagagaagggataatggtatattctttgttccacagagaccatatatggttttgggaacccttcgtcagcaattgctctatcctacatggactgaagatgtttgtcattcatcaaataatgatcctcaaagtacagaccctcttacctttgaagtctccacatcagatggagttggttccaagtctgagatgcccacaactgatgaactgatcagagtacttgaggctgttaagttaggctatatattgcctcgtttcaatggtttggattctatgcatgattgggccagcgttctctctctgggggagcaacagcgtcttgcatttgctcggttgttacttgcaaaaccaactttagtcctccttgatgagtccacaagtgcactagatgatatgaatgagcgtcatctatacagtcagattgaagctgcagggattacttacataagcattggtcaccggaaaacactgcacaagttccacaacaaggtcttgtacatttcaaattccgattcaacggatagcaacccacgtaattggtacctaaagcccacagaacagatgtcgattgaagagtcatcctcatttgcttcataagaatttcatgatttgagcaacatttgcccctgagcagttttgtcgcaagatttcacccatacgtgaagtgtatggtgcccagccaagtacccaaaatatgtcatgctgattgttctaaagatgtgatgcttgagtagttgagttgtatgaccaaaattgctagtatgctacaaaccaactcgaggcgtggcacagattttagcacctaaaggttgaaagggaagctcatctgttcttggatcgttataccacgaagttcagaatgaacatcatatgtagatatgcagtcctctgatctttttgagtttcttttagaaatgacgacggaatatctgaaactgtctctttgttattacgtgtgtggtgtgtccttgtaactatactgggaattacagctcttatatacatgcagtgtgtgcagactc

SEQ ID NO: 57508 - DNA, 165 bp, Oryza sativa
  Clone ID: PAT_MRT4530_59312C.1
atgatggcctacgagatgacctgcaaggtgggtcctcccaagaaatggtctaaattcacggtgacttctcaactaacctttgattggcaccgttccaacttccaaacaccgggtatggaggttagctcttttgacgagaagttcgttgccttcgtaaaatttgat

SEQ ID NO: 57509 - DNA, 4627 bp, Oryza sativa
  Clone ID: PAT_MRT4530_59313C.1
taccggctgccgacgcagatccgaagtcaggctctgtacggttctacgattatttgatggagcatgatatgacagttgaagattttattagaactaatgggttaggggcaagtggattgatagagaccaataatcaaggtgtatccacttcttatgacgaagcggggcaacggaggggagaggaaggggcggaacgcgggacgggcgggacaaagggcagggcaagagaaacaagcgacacatggccgcacactggcacgacaccacaccgcctcctcgacgagccgtgatgtatttactcggtcctctccgttccgtcgcgctgttcacttcctacaaatcgcgattccccaatccatattcccttcccttcctttcctcctcctccatctccaccctcccgccgccgccgccgccgccgtcgccgcggcacactccccgggaccagcagaggccgccgccaacgccgcgggggcagcaactgatgattctgctgcgagcacggctgggatgagggacgaggatcgtagcctgtctggcgagtcgttgtccgagtggcggtcctgcgagcaggtggagagcgagagcccttcgacgtccccgcccttttgggacactgacggtgatgacgatgatcctggccccaaaccttcagatttatttgggcggtatacttggagaattgaaaatttttcaaaggagaagaagagagaaatgaaaagcgagccatttgaagctggtggttacaaatggtatattcttgtataccctcaaggatgtgatgtttccaaccacctatcactttttctctgtgttgctaatcatgacaaacttctcccagggtggagtcattttgcgcagttcactatagctgtaggcaatatagatcctaagaaagtaaaatactccgatactttgcataagttctggaagaaggagcatgattggggatggaaaaaatttatggagttgtcgaagattcaggatggctttcttgttgatgatgttcttgaaatcatagctcaagttcaagttatcagggagaaggtggacaaaccatttcgttgcctcgatcgcccttatcgaagagaattgctccgtgtttatacgacaaacatcgagtcaatataccgccgttttgttgaggaacgaagaaataaacttagcaagctgattgaggacaaaatgagatggtccagtttttgtgctttctggtcagcaattgacccaagtactaggcatcggatgtctagagagaagactgatgtcatattaaaagtattagtgaagcatttttttgtggagaaagaggttacttcaacattagtgatggattctctgtatacgggcctgaaggtgcttgaataccagagcaagggcaagaaagggagaacgatagctgatttggatgaactgcctgcacccatgatccatgttgacatggacatgtttgttttggccagtgatgttatagatttgcttgagagagcagccttagaaccactgccttgtcaacctgtgtctccaaaggatgacaaatgttcccagagtcgcatgaaggatggtgcttctggtgaggttaacaaaatttccatggagcgcgaggaaagacgcctaactgagcttggtcggaagatacttgaaacatttgtgctatctcatatattcagtggaattgaagttgcgtaccaagaagctgttgctttgaagagacaagaagagttaattcgagaggaggaggaagaggcatggcttcttggaaatgagatgaaggggaagcgtgggggtggtgctaatgaaaaagataagcgtgcaaagaagaaacaggccaaacaaaagaagaacaatcgtaagattaaagacaaggaaagagacgaaaaatttgaagcaaagattctggaaagacttcatgatgaaactgcgattgatgatagtgatggcttatcatcaaagcaggccgaagaagtgacaacaaaggttgaaaacttggaagaaggtgcttcagataggcaaggtgatctagatagttcagaaattgctcaccgaccagactcaggtgacaagtatcctagacaaatgaatggactgagtgatgttactggcaatgcacaaaaggtaaagaaggcctcctctatggaggctaactcaccagtctttctggctgattctgttgctgcaagcggcactcatagcagaggaaataatttgtcagacagtaagaaccgcatgacaccaaatagagggaaaaatcagcgtaacaagggcataagcattatcagcttttctgaggaaggtgagggtattccctcgagttctactggtggttcggctcgttgtagttctagttgcggcacatctgcaaagttggaccaagataccgttctactcaccttgaaggataaactccgtaagctggggcaacgtctacatgagaaaaatatggaggggcgaaaacttctccaagctcattttgaagccatggaagcaaagacgagtggttcatctccctcatccagtcctttggatgaaacacctgatgttgtgaagagccctgagcagtctgcagaaggtacaacagatgcaaaagctaatggaacaccaaataaggatgaacccgtgacaaattgcgtggcagaggaatctgtttcagtcatgccaggcacaaagagtactgaagctttatctggcatggcccttgccaagacaaaagttgagccagtttcaaataaagatcatgttccaaaaccaacattgcaagccaatagagcatctgctaattgctcgaaatcaactccagttgatatggagaaagatgttcctcttccttcaagatcgccacaaattaataaacctgctccagttcctccaaaatctccacaagttggtaatgctactccagttcctccaaaatctccaccaattgaaaaagcttgtccagttccccccaaatcaccaccaagtgctaaagatacatcccttccttcagtgagatcacttcaaattgataaacctgtcccagtccctccaagattaccccaagttgataaagctgcttcactttcttcagaattgccacaaacttctaccacttctaattctgaagctcaagaagagactgctgccataagggttgcatctccctcagtttctgaagttactgtcacagcatcaagaccttcgagtgcccctgtgttccctgccccaagatcaactgtaccagctacacaagtacaagtttccacattgctttcgcgctcaatgagtgaagcaactcgaagatcaggaaatgatccttccccttctgcaccagcttacattccacaaacctaccgtaacgctatcatcggtaagcatgggcggggtacaacctcaggaactactgcatatcagtcaacctctctgggccaaggtactgccctttcacagccattgtcgacatatgcaccaactatgtcagtgacgatgcctcctgctggaaggaatgatcagttttctggtaggcatggattggagtctgggttgggaaagccagaagcacgtgatagctggcaaccatggaatgctaacaggcatgttgacaaacatctctggagggatgactcgacataccaacaaacaaccaacggtcatgcatatccgcaaccttggaaggatgttaattttcttcaagcaaggggcacagaaacagaaatacccagcaggtttggaggaccgcaactacctaggcagttccaagctgagactcatgcggattatctcttgcaacaaccacaggggccagtggcagaagaatttccgcaccttgacatcataaacgatttgcttgaggaggaacagagcaatggcagtatgccagagtccattggtcatgattaccatacatttggtctgccgttgccgtttttgttaagaggcaatttggcagatcaggaaatggcttctgctagcagtcctgggcggtttaatttgactgagccatattacgacgagggatactcaagggcctatgacatgagtgctttccaggggacaagggaaagacaatttccctccttggatgcctattctaatggcctgtctgacatgagtccatcaaagccttggctgaatggctctcctaatccatcgatgaaccatgcagttggtacaaatggatacccccagcaaataccggactacaccaatttgggtagtgagtagtgaatggagtccctctgtataatgcctgcatgagccatcaaactggctgaatggctctcctaaccatcgatgaccatcgttggtacaaatggatacccgaaatcggactacaccaattggcagtggttgaaggagccctctataccatcgccgctacgccaacggtcgctggtaacgtgatgacgcctgtatacagtcttgcaatcaaaaaaaataatgcttgttacctgtaatagatgttcagtctgggtctgagccgtgtcatggcctgtaattccaaacttttaattccaaaagggcaaagggttgcattctgtaaagcgttcgccgtgtttaggctggttaatgctaagtcgagtgcttttctgatcaaaaaaaaaaaaaaaaaaaaactcgacaccagcctgcagcccggggatccactagt

SEQ ID NO: 57510 - DNA, 396 bp, Oryza sativa
  Clone ID: PAT_MRT4530_59314C.1
gctaatgccctctttccgatgtcctcttggtgtttcgagaagccacccctgattgcagagtttcttacgacaatccattatgaccattcaaccagggctaaatacagaggagtaccctccccaggaaattaacttaggactatatacacgcgcggaggaaaaccggtactgagctgtcaccatcagcggcccacctcgcttccacaacatataaccccaaataataatatccagtaatataaacaccacgcttaaattaccaaatactactctaatatcgtcgtcatgacatagagtcatcatatacacgatgattatacgcacaccattgcatctcctagataagctagcatcataacaaatatgacttggatatataataaagttggtattcat

SEQ ID NO: 57511 - DNA, 484 bp, Oryza sativa
  Clone ID: PAT_MRT4530_59315C.1
tcggtctacaaatcgcaattccccaatccatattcccttcccttcctttcctcctcctccatctccaccctcccgccgccgccgccgccgccgtcgccgcggcacactccccgggaccagcagaggccgccgccaacgccgcgggggcaggtaaaaaggcgcgcgagacgcccgcctctgcccgctgacctagatcgctgcggataaggttgcttgaagcagtggaagatttcctggatggcttgtgctgcagcaactgatgattctgctgcgagcacggctgggatgagggacgaggatcgtagcctgtctggcgagtcgttgtccgagtggcggtcctgcgagcaggtggagagcgagagcccttcgacgtccccgcccttttgggacactgacggtgatgacgatgatcctggccccaaaccttcagatatatttgggcggtatacttggagaattgaaaattcttcaaaggagaagaaga

SEQ ID NO: 57512 - DNA, 1599 bp, Oryza sativa
  Clone ID: PAT_MRT4530_59316C.1
ctctgctggtgcatgtagccgtacattgttgccgctgccgtggtgtctgcctccggctctggcccgcagtcgaggttgacgccgaacagcctgagccgcctccgcctgcgccgtggtcaggtaccccgccgccgacgcgtccgcgaacgccgccgccctgtccgcagcctcggccgcacctccaccgaccgcttcttcttcgaccccggcccgccgaccaactccatcctcgccgccgccgcccgcacggcctccgccgctgggacgccctcgaggagctcctcgtctggtacctccgcgtcaacggcaagcacaaccacgccctcatcgtcgccgccttcgtcgacctcctcgtcggcctcgccgccgccgcaacaaccaccggcaccactccaacgacgacgacgacgaccagcagcggccgcagcaccgccagcacgagcaccgcctgcgacatcaccaccaccaccaccatcaccacctcctccgccgccgccgccgtcgtcctcctccgccgtcttcttcttcctcctgctcggcgacttcgccgccgccttgcccttgggcggcgcaaggtacggcggctcttcctcctgtttcttcttcttggcgccgccgccgccgccgcccccgccgccaactctcgccggcaccgccaccgcagccgccgccgcctgcttgcacgcggacgacatcgacgacggccagatgaacgacgcgaggctgagcagcctcggccgccgcggccggcatccgcacccggagtcaaccaccgggacgtgccgccgccgccgccccaccgggaactgatgcctccctcccccaccgccgccgccgccgccttatcctccaccgccggagactgagcagccgccgccctccgcctacctctcaccgtcccattcgttccacggttactcctccgcgccgccgctgccgcaggccacagccgcagccgtacgcgcaccattccgccctgctccagccttaccccattgtggatgtgctcgccaacatgaacgtctccgaccgccacgactacccgccgccgccatcgccgtcgccggcggccgtgcccgcggcgtcgtccccctccgtgctgccgccgccggcctctccgcccccctgccacctccggtcctcccgcctccgccttgtccctctcctctacctgcgccgctgcgccgatctccatcgccgccgccgactgcgaccagcggcactgcacacactcccccctcctactcctccttgcgccgggcccaaacctcctcctccggccacctccgccgccgccgccgctccgccgcggcctgctgactccctccctccatctccgccgccgtcggcgccgccgccccctccgccgccgccgccgccgccgccgccgccgctgccaccccctcgcgctccgactccgactccgctcccgccgccggggatctctatctccggcggcgcccaccgcctccgcatccccagccccgcccgccagcaccaccctcgccgttcgcgacgaccggcccgcccagccggcaccgcttcctcgccggcgatggcgatggcgacgcggactccaccacggctgccaccgccgcc

SEQ ID NO: 57513 - DNA, 549 bp, Oryza sativa
  Clone ID: PAT_MRT4530_59317C.1
atggcgcggcgaggcggcggcggcggcggtgggggagggaggcatcagttcccggtggggcggcggcggcggcacgtcccggtggttgactccgggtgcggatgccggccgcggcggccgaggctgctcagcctcgcgtcgttcatctggccgtcgtcgatgtcgtccgcgtgcaagcaggcggcggcggctgcggtggcggtgccggcgagagttggcggcggggggtcgaaatcgaaatcgtcgccgtactacttccggtcgtcgtcctccgccgcgtcgttctcctcctcctcggccgccaccacctacagcaccgccagctactactcctcctcccgcggcggcggcggcggcgccaagaagaagaaacaggaggaagagccgccgtaccttgcgccgcccaagggcaaggcggcggcgaagtcgccgagcaggaggaagaagaagacggcggaggaggacgacggcggcggcggccgcgggcacctgcccggctgcccggtcgtgtgcatggggcgtgttgctggcacagttgcaccaggatga

SEQ ID NO: 57514 - DNA, 724 bp, Oryza sativa
  Clone ID: PAT_MRT4530_59318C.1
atggagaaggcgaccgcgacgaccaaagtggctggccggagacggaggggaatggatagctcaccggctcgcgagggagatggggttccggtggggttccggcgacgcgaggcggtggccgagatggctcacgcggcggcaatgctaatggcggcggcggcttggcgcggcggcggctctagcggctgcggcgcgcgaccggaggtggcggcatgcggcggcgctagtggcgagcggcgcgtgaccggtaggaggcacgggagagcacggcgaaaaggggaaaagggagagggagatgcggggaagctttataggggctcgagaggggcggacatggccgggaaaccccccgatttggccggcgacgtggggggggggagagagagagagagtgggggggattcaaatcgaatcccgcccatttgcgggcgcgcgtgcgggcgggaatggcggggagggcggcgacgtggggacgcggagtgggggcgcggcgtggagcggagaaggcggcggcgcggactgtttcggcggcggttgccgtcgtggggcaggcggctggaggaaggggacgacctgacaggtgggccccacctgtcagcgtcccggagagaggagaaaggggaacgggccggcccaaaggaaggaggccgagcgcgggagggagtgggccgacggcccaatagagaaaaaagaaggaaaagaaaaagaaaaagaagaaaggatt

SEQ ID NO: 57515 - DNA, 274 bp, Oryza sativa
  unsure (1)..(274): unsure at all n locations
  Clone ID: PAT_MRT4530_59319C.1
aaaaccaacccaaccgccgccgcatcgccctcgttagaacgatggccgcgtcgngctagcaccagaccaccagcttcctcggcaccgcatcgtacctnaccngagagttcccgggagactacgggtgggacacggcggggctatcggccgacccggagacnttcgcgaggaacagggagctggaggtnatccactcgcggtaggcgatnctgggggcactgggctgngtcttnccggagatcctgtccaagaacngggtgaagttcggggaggc

SEQ ID NO: 57516 - DNA, 657 bp, Oryza sativa
  Clone ID: PAT_MRT4530_5931C.1
atggcggccgacctcccgcgctggtttcctcccttccccggccagcctctctcgccccggctctatttaaaccctccccgcacctcctccgtccggttccgcctctcgccgcccttcctcctcgccggatttgagctcgcgacgtcgctctctctctccgccgtcgccgccgagctccggtccgccgccgtcgtcaccccggaccgcctctcgcctcggcgtcgcctccttcggcttcgccgcgtcctcgccgacctcgtccacccctccgtttcgcccgccgaccgcccgaacgccgccgtccccgtcgacccgagccgcgccgccgccttcctccgctccggtagccgttcccgtcgtcgccgtcgacccggggtgagccgtggaccgccgtttcgcttcccccttccctcccctctctcgggcgccgctccgccgcgccggtggtcgccggcggcgaccatcggggcgcgggcgcgccgcctcccgtcggctgtgccggcgaggccgccttcgggcgcgccccgcggctgccatgtggggcccggctgtcagccgcccgtgccctcggacgctgcagcttcggaagatccgctcttcgtggaggttgaagccgacgtttgggaaagcgagcaaggcaagtcacatcatccttga

SEQ ID NO: 57517 - DNA, 624 bp, Oryza sativa
  Clone ID: PAT_MRT4530_59320C.1
cccacgcgtccgcccacgcgtccgaaataatttgtctgcattgaatgcggcagttcgtttccttttgggttagcaacttagtgtcctacagtaaacttccagtatctgagctcagagctgcagaaagtttaggaagtggaatttttaaagcatgatagtcactagaatggaaatgtacaaataagaactttgttagtagaccatttattctacacatattttaggacacttcataagctaaagcataacttagttcttttttatttcaaactgatgttccttatggcaccttatgcatctagcacctgaatttattagattgatagttgcctagatatatgtggctttgtaaaaactagtgatagcactagtattccatggatgtcaaatggacagtgagatgtatggtaaatcatttttttgttagtaatatcaagatattctgaattttgttatggcactttgcatggtgcacaatgtaggacaggctgtagtgtatgaacacaatggagaacataataatagatttgacaagagcacaacattttttttcctttatcattaccttgttgcctgtgtaattgttgtagatgcgacaataaaagtaggaattgaagcacctaa

SEQ ID NO: 57518 - DNA, 253 bp, Oryza sativa
  unsure (1)..(253): unsure at all n locations
  Clone ID: PAT_MRT4530_59321C.1
tcggtaaaaaaaagagaggccacgaagagagctcagctgctgcctctagcttacttggtgataaggaggaggaggaggaggaggncaccgacatggcccgagccacggcgtacaccgtggcgctcctcggcgccaccggctcgcccattcccgccgctccacgctcccccccgcttctgccgcgccgcggaggcgtgctacaaccgctgtgcctccacgaccccgccccgactgtccttgctccccgtcaggg

SEQ ID NO: 57519 - DNA, 333 bp, Oryza sativa
  Clone ID: PAT_MRT4530_59322C.1
tttatgattgccttgcacaggaagatgcggaggctgttaacactgaggaggctcctgcaactgcagaggatgagaagaaacctgaagatgtgccacagtctgaggtccacaaggacaaggagagtccacaccttgcaatagaccagatagtgcctgaggataaggagatgactttggaggaatatgacaaagtgctggaagatacgtcgctcgcttcgcttgcactgaaggctgaggagaggaaagttcactgctactcggacactgctggccatgcaacagatgctctgtcataaaggctaaagaggtagtgattattctcctggttctctg

SEQ ID NO: 57520 - DNA, 408 bp, Oryza sativa
  Clone ID: PAT_MRT4530_59323C.1
atggccaccaccaagccattcctcctccctccccaacccacctctccgcccgcgcgcccaggccccaccgagcccaagctagctccgtcgcgtgctccgccgccgacgccgacgaccggtggctggaacccgctcgcggcgctcgtcgaggtgcccggggcgctgtggcgtgtgggaaggcggcgttgggctcttcatggtcaccggcgcggcgctgctcgcgctcgcggtggcgtggatccgtgggttccagctgcgctcccgcttcggcaagtaccaggccccgtcttcgagttcacccaggcctgcgggatctgcgtgggcacgcccgtgtggatacgtggggtcgccgtcgggagcatcgtccgcatcgactcttccctccatagcatcgatgcttacgctgag

SEQ ID NO: 57521 - DNA, 207 bp, Oryza sativa
  Clone ID: PAT_MRT4530_59324C.1
atggacgactatctacttgtcaatcctctgtgcaaaaactccaaaggacaaagagataagctaaggaaaatatatgtactcgacggcaatggcttgccacctgctgccatcacctctgagctccagaaaaatcgaagaaacgaacctgcactcagcgtcatgagtgacgacagtcgacagccatggctccagccctccgaaccatga

SEQ ID NO: 57522 - DNA, 261 bp, Oryza sativa
  Clone ID: PAT_MRT4530_59325C.1
atgtcaaattcacttgaggttcttattaaaccagtcgatcatgtctgccagggcttcctcggcgctcttgacagcagcggcatcgtcatccttgtatcttacggtccatccatgctcgaccccagggaagatcttgacaaatttttcgacaagggtgtcattgatggaattacccgtccaacgcgcaaagctaaagaggatttcgagtcctctgctctaaccagccagaacctatccggggccagggggccattcccttga

SEQ ID NO: 57523 - DNA, 2114 bp, Oryza sativa
  Clone ID: PAT_MRT4530_59326C.1
cggctggttcgtctcgcgccgcttatttattttttttgttgtgtcccgcacataaaattcgaaacgcgataggaggaagagacggcggcggcggcggggggcgcgacacggcggctagggtttcctcgcagcgacgcgacccgcgcgaggtggaggcgccgctcgcatcgcacgcgcgcgcgcgccggccgggggcaggtggctgggcgccgccgttgatgccaggaagtcgaaatctccggtgatctccctctgattccggcagccgcatcaccatgccgaccatcacgcactacgtgctggacccgttactggagaccgggtcagctacacagtcccagaaggctgcttccaagccgcctccagctcctccccttcctcaggagaaggccgccgagaagccgatacctgtgccggtggctcctgtcaggagagcgcagactgcgtcggcgacgctgtacgccacgcctgagagcacatcactgccggattcgccttcgtcgttcccaggaacctggtcaccgtacctcatcaaccataaaaggaggggaccctgcttggtgaagacactttcccagggggatgttggtagtgatggtagccagcagcccacgctctctgtgacgctgcctcctttgccgaaaagaagtcaatcctttgaagcgcaggaacctgagtttgagtttcagcaagcaagcaatggtgtacttgaaggtgacagtggtgtggtggagaccctcgactggcagaatggaatgctacagaagggcaagggcactgtttcaggcgaatatgggcatgatcaggctgagttcgagtttcagcatggaaatcctgatgcgacagtgaggcctgtcaatgttggaaggcctgccaatggtggaacaccaaggaaaatcaacaatgatgccttctttgagcttcaggattcactgagcatggcgagtaactctgaggcggaggatgctggtgggcatgagcggtggtggaagcctagttcccctcttgggacatctgttggcacacctggtgcagaattttatgatgcattcgaagaaatatccagtgatggtgcaactcgatcttcacaatgcatggatgatgaccttcgtgaaatgaggttgagtctgttgatggaaattgagagaaggaagcaagctgaggaagcacttgagaactggcaaaaggagtggaagaagctgagtgatcacctatcacttattgccttgacacttccacctccaagtttagctgaggacactgatgattcaagcatggatcctggagctgagttgtgccaacaaattaattgtttcactacttgtggctgctgctattgcacggggatttgctcgtgcagaagtttgagacagatatggaaactaagattgcagcaaagaacttcgagattgcaaggctatccgatagggtccagtactatgaagctgcaaacagggagatgtctcaaagaaaccaagaggctatcgagatgtcgaggcaacaacgaaatatccgaaagaagagacagaagtggttctggggctcggttgggcttgcagttacccttggcacagcagccattgcctggtcctacctacctgcagcgcagccccaagccagtcaagactctaataccaacagcgattagagctagatgaagatgtatcttctcgacccttcagaaatcctaacaagctctaactatacaatcctaggggaaagaaaagattgtataagttcttttggtgatcggccgtgatcactgcaatcttcattcgccgcttcctctgtaaatgtcgaatgggccatctccctacaggactggctccattccctcacagtaaatccctctttgcatagttggttgtgcaaaaataatacgaggaatgtggatggctagtaatccatggtccatgcaaactcactccactggagttggttttgaaaatcgcaattttgatctgatcattgtgttcgtgatcttgaatgctgatggttttaccattctgtttgtgtagcgttaatcttgtcggtcatttgcacatgtaaatgtataattgcatctcagctgtgcattggacggatgaactaccgtcgtcaaaaaaaaaaaaaaa

SEQ ID NO: 57524 - DNA, 2219 bp, Oryza sativa
  Clone ID: PAT_MRT4530_59327C.1
ttatccggcagtttcagaggtgagaattgtccctgtttctcgggcgagctaaactagcggtggcatcgaccgagcatatgctccgtgttggtgtatatatactcgtatcctcggagtatcgtcactccgccgcagcagcagctgatccagcttcgtcgtcgtcggcgatcgccaccggcagctaggcagtgacggtgacagtaggaggagatcaggatatggactgcttcgcggagacggaggggaagagggcgcatgacccgctgtaccagcggcgcgcggcggcggcggcgacgccggcgacgggggtgccggtggacgacgtggacaaggtggtggacgtgcccggggcggtgatcgtcggcgccgggccggcgggggtggccgtgggcgccctgctggggctgcgcggcgtcgcctacgtggtgctcgagcggtgcgggtgcatcgcgtcgctgtggcgccaccgcacgtacgaccgcctctgcctccacctccccaagcgcttctgcgagctcccgctcaggccgttcccggcgagcttcccggagtacccgacgagggaccagttcctcggctacctcgacgcctacgcgcgcgagttcggcgtcgagccggtgttccggcgggcggtgatcagcgccgagtacgacggggagtcgtggtgggtgtacaccagggaggtggtcgcggcggcggccggcggcgagcaggccgtcctcgggtgcaccatgaccgtgtaccggagcaggtggctcgtcgtggccaccggcgagaacgccgagcccgtcgtgccggagatggacggcgccgggaggttcaagggccagatgatgcactccagcgagtaccgcaacggcgacggctacgccgggaagaaggtcctcgtcgtcggctgcggcaactccggcatggaggtgtccctcgacctctgcaaccacaatgcgcgcgcatccatggtggtgcgcgacacggtgcatgtcctacctagagaaatcctggggttctccactttcggtctgtccatgtggctcctcaggtggttgtctgtccaaacggtggattggctggtactcctgttgtcgttcctcgtgttcggtgatacggcccgcctgggcatcccacggcccagccttggccccttcgagctcaagagtgtgtcgggtaagacgccggtgctcgacgtcggaaccctagccaagatcaagtccggggacatcaaggtgaccccagcaatacaatgtttccaagaacatggcgtggagtttgtggatggcagcactgaagaatttgatgttgtcatcctggccacaggatacaaaagtaatgtgccatattggttaaaggagaaagaattcttctcagagaaagatggcttcccaagaaagggaaatgcgtggaaagggcagaatggcctgtacgctgttggtttctcaaggcgtggtctctctggagtgtccatggacgccaacaacattgtgcaggatattgtgcagcgtttgcacgatatgggctatgaaagaacctggaagcccttgctccttagcttttctgaagccacgattccatctcatctccatcatttcccactttctaacaagcaagatgcaagagagattctgtccgtcgatggcaacaaggtggcggaccacttaagcggcgcctgtgaaaatcattttcgcaggcgccgcttaagtgatccacatgcaaaaatagactttaatataaatagatttgcgggccctaatttttttctaagtcctcacacctccgagtcgctccacacctctcctcccttcctcaccggcctctcccctcccctcccctcccctccccttacttctactctccccggcggcggcttccggcggcggcggcgggcggtgacggcggagggcagcagcggcaaggagatctggccggaagagggaggggggaggccggcgggggcgacggcgcggggcatcctcgtcgtcctcgccatcctcgtcggcatcatcgcgctcatcgtctacctcgtcctctgccccacccaccctcgcttctacctccaggacgccaccctccgccagcttgacctctccaactcctcctccaccgccggcgcggggcggccggcggcgtctcccctccctccctccctcgtagatttggccggaggagggaggggggaggccggcgggagcggcggcggcgacgaaagcgcggggcggcggtga

SEQ ID NO: 57525 - DNA, 1086 bp, Oryza sativa
  Clone ID: PAT_MRT4530_59328C.1
ttctactctccccggcggcggcttccggcggcggcggcgggcggtgacggcggagggcagcagcggcaaggaggtgcggccgaagtccgggcggcggcagcggttcccctcccccctccctcctagatggcgcggggcatcctcgtcgtcctcgccatcctcgtcggcatcatcgcgctcatcgtctacctcgtcctctgccccacccaccctcgcttctacctccaggacgccaccctccgccagcttgacctctccaactcctcctccaccgccggcgcggggcggccggcggcgtctcccctccctccctccctcgtagatttggccggaggagggaggggggaggccggcgggagcggcggcggcgacgaaagcgcggggcggcggtgaagacgacgcgcggggcgatgacggcatggagcatggcggcggcgacgatgacgatggcggcagctcccctcccctctcagatccggccgggggaggacggcggcggtgagccgcgtgcggcgattttttttgttcgtttttttgcattttcgcaggcgggccgttgcgattgtcgcagtcgttgtgatgcaggcggatctccctcctgccactcgacgcactgcgcagtggaagaagacgctgagaagtcgaaggaactctcgcgaagtagcgcgcgtcgatgtagaggaagtagtcgatcgcatcagctcgaccttctgctcctcgtgcgttctcctcgccgtactcccacgccgatcagcaccgcaaaccagcggcgcctctaccggtatccacacgtacagggacggaacgccacgcgtagatgtgctagcacccgcgcacggctagggttttgctcggggagggaagtgacggctagggtttctcatgtgatgcaatgcctccgccggtcacacccctcacgaatatataggatccattactcgggcctccaaggcccgtaggactcctattcggatcccccacgccgccgccgtttcttccggcaatatcaccgtgcgccgccgagaaccccggtgcaatcgcgctacgtgcttctcctatgcacgatataagacgcggccaccccat

SEQ ID NO: 57526 - DNA, 300 bp, Oryza sativa
  Clone ID: PAT_MRT4530_59329C.1
atggctcgcctcgtttggcgctgccttgagcagcagttcctcggtaactgcgagtaccatgttgtgaatcttcaagtggagttccacagcttccatcaaggtgagctctccgtcacggactattgccacaagctcaagatcatggcagaaaacttggcgatgtgggtgaacttgtcgctgatctccaacttgtcatcaccaccatcacagcaagaattacgagtaggttcaaaggtggtgaaatttgctaaaggacactcaaaatgtgtggtctttgctagtgagagtgcaagaacgtga

SEQ ID NO: 57527 - DNA, 261 bp, Oryza sativa
  Clone ID: PAT_MRT4530_5932C.1
atggtgatggagatggtggtggaaggggagatcgacgcatggcagtgggcgaggcgggcagatggtcggtgtggacgggcggtgtgcgggggcgctgggacagggcggtgcgcggcgacgggcggtggggcagcgggcgtcatcgaggttgtccttccaggtggtggccacggcgcagctggtgctcccttccctggagacgatggcggggaggacttggcgggtggcaccgaggagggcattggaagcgatgggctatag

SEQ ID NO: 57528 - DNA, 159 bp, Oryza sativa
  Clone ID: PAT_MRT4530_59330C.1
cactaagggaatttggccccgaggctagaatcgaacgcgagaatgtgatgatctcctaggggatcaacattgcacgtgtgacggattatagttatacaaagttagtgtcgtttcgagaaagagatagacacaaactatcttgcagaaaaaaaaaacaga

SEQ ID NO: 57529 - DNA, 2007 bp, Oryza sativa
  Clone ID: PAT_MRT4530_59331C.1
atggcggcggctgctccgccaccgccgacgccaccgccagcgtccagccccgcgccaccgcaggaccccgctaccggcggcgacgccctcgcctcctatctcggcctcagcttcgccttcttcctcgcctccctcccgggcggcacccccgccgcgcgccacctcgcctcgctccagtcccgcggccgcgtcctcgccacgcgcctcctcgccgccgaggaccagctccgccagctgcgcgcgcgccgccgcgacgacgcccgcgccaatgcccgcgccgccgagatcttcgccggccaccgcgcctcctggatggacaacgagcgccgcctcctcgcccgcgccaccgccgccaccgacgaggccgcctccctccgcgcgcgcctcgccgaggccgaggccgacgccgccgcgctgcgcgcccgcgtcgaccgcctcgagcgcgaggccgccgagcgcgacgatctcatcaacgcgctcctcgcggccacgcgcgccgccgatgccgacctacgctccaccgacgacgacccggagccgcgggacgcggagcagcaccaccaccaccagccggcggctgcggcgttggatttggatccggccgaaccgcgcggcgctgacgccgacgcggaagccctggctgcagccgcggctctctacgctcagcagcgccagcagcaggagggtttcggcagcgacgacttctacacggcggcggcggcggcggcggcctcgggaatgcagcagccatggatggagcgatcaaaagggtggcaggacctgaagtatgaaacggctgagccgatgtataacacaaaacatgctgtaccacggagagaatcaccttggaaggtggatgtggaatcgtcaggagttcctgcaaagcttcaactgcttgagcaggaattaattaacctggaaaagattggaaatggagacttatccaagataccattggtgatgagaaagcaagtgaaaagataccaaactcttgctgggaagattgatgatctttgcaaaagaatgcaaacaagtgacccctgtgattcaacactgagctcagagtttagaacacagaggcaaacagaatacttgctggaagcattccaccttcagcaccgagcaactgaaactaggcagaagctcagtgcactgcaagcagagactgcaaaaggaagttttggtgatgaactgacagcagaagccaaaatgagcacaagaagagcactgagttcaattcggaacaacttcaaggaaattcagcgtagcctagagatttggttggcaagaattctgggagaccttgagggcatgttagcaagggacggggcatcacgcataagggagtactttttgtctccctacgcatcagctgttcgatgataatcttagagcactctggtcggcacattaattcatcttcatcaggtaaagtatggatgaagttcagcatgtgaaatcgcagatacccttgggtcttaataggtattcttgcaaacattggaaggtatgaagagaagtgatcttagaccatactgatattttcactgatttcttttgaaccaaaggagaaacaaaagattggtttaggatgtctattttaacttcctatccagagtttttctcctctccttgccggttacatgttttgacacaaattggtcgtgtcctagatcacttttcttcacatttatccaaattgctgttgaggattccactggacaagggtgtgcgcgaacttgcatgaagtggagcattcacagtgtgtactacagatgccctacattagtttgcacatagacatcgatcagttggcggtgtcaatgtgcattaccgcagttcatttggttagtaattgtacaggtttatgcttatgcctctgataaatgctctagtctgtattaatcttgctagcttacatttaccgatttatgtacattgtaatttttttgatcgttgggccaacatgcggtgtaaatgctggatcactttggctgttgtatgaaa

SEQ ID NO: 57530 - DNA, 345 bp, Oryza sativa
  Clone ID: PAT_MRT4530_59332C.1
gttcgcgggggggggccggtcaatcctatcctggcccctgcgggcctccctccttcccctattttgggctggttcagagctggggggaatggggttcatagcggcatcccgggcaaaatcgggttgggttccaatttctccacagctcccgagccggaggcattgactgaaacaccggggggggctgtcgactgccccatctaactcgaatagcctggcctgccgtgcccctttctgaaacggaaaaccagcggcgccaggagctttgatgaatgcacccccccccgggggggggtggttatggaattgtgggcccgggtggtttttttttttccccttggcccg

SEQ ID NO: 57531 - DNA, 642 bp, Oryza sativa
  Clone ID: PAT_MRT4530_59333C.1
atgtctcccccatcccaccggccacaggtgcttcgtggcatccccttcctctccggctgcctcccacattatcttttctcttccttcggttgcaggttgctaagttcacatgtttttctctccctatggccaccagcaccagagcggtggcgagccaagcggcggggtgacggtgccgagccaagcggcggcggcgaggcgacggtgccgagcggcccaagcggcggcggggcagccgggcggagcagcggcgagccaagcggcgacggcgccgggcgtcgagcggcgttgcagcggggcggtggcagggcggagcggtggcgggacggccagatctggccggatttggccttgggcagcgacggcgacgggcggcgcgaggatgacaagctcgacggcacgcggacgacaagctcgatggtggcggggacaacggcgccatctctcctccaaccggcgggggacggcacggcaggagattctcgacgcgcgaaagggggcggctgtggccggcgtcgggctcaagatcccctcctcgccatcggcctcaagctttggatcaacttgcggaacgtcaatctccgtgggctgcaacctccactcctccagggctgcagcgtgaacctacaaactcgcacatga

SEQ ID NO: 57532 - DNA, 165 bp, Oryza sativa
  Clone ID: PAT_MRT4530_59334C.1
atggaggagtgttggagtgtcagtattcttggaacggagttccggagaaaaccaggattccttgtccgtccttcatattcctccaccatcgggtacatcataaagctcaaggccaaactaatcctggcagaccaggggagggacggtgcccgaagcattcaatag

SEQ ID NO: 57533 - DNA, 2277 bp, Oryza sativa
  Clone ID: PAT_MRT4530_59335C.1
tcactggaaattaagtctcccgtcggcgagatctttcacgaatccgttcaacgagcggcgcgacgagccaccgtccggtccgtcctgcacggcgccacggcaagcctcgcgcagcagcgcggccctcctcctcatctctcggctctcgccgtcgtccggatccatcagcctcgccgcggcggcacggatcgcgtccctgccgacgacgacgccgccgccgtcgtcctcctccctcctctgctccgacaggttgacgccgatcctccactcgtcggccacgacgcgggcgtccaccacctgatcccagacgacggggagcgcgagcagcggcacgccggcgaacacggcctcgagcagcgagttccacccgcagtggctgaggaagccgccgacggagcggtggcacagcacgcccagctggtcgcaccacggcaccaccaacccgttgccgccggcgatccgtcgcaggtcaccggcgctggcgctgtccctggccacccagaagaacctgaccgcgctgtcgcgcagcgccacggcgacctcctccagctgcgacggccacatggagacgacgctgccgaacgagacgtacagcacggagcgctccggctgcgcgtccagccaggcacggtgctcctcgtcgtcgatcttgccggcgccgccgtccagcggcatgtccgagattgaaggtccgactgggtacaccgggaacggaaccgcctgcgtgattctgtccatggcgcagggttcgagctcgtagaaggaagtgaagaggacacactgcgctttacgcacgttgacgaacgcctccgttgtcagcttcattgaccgttcccaagaccggaagatcttgacgtcagagagcctgactgatgagcagcctgggacatattgctccaaggacttgcggcttaggtcttgctcgccctcccggtcatccaccggcggccagaggtggatgttgtagagcgcccagaagaacgtggccgccatggtccacagcgagcacaccgggatcccgcgcgccgcgccggccggcacgccccacgccaggtaggtgtcggccacgatcgcgtcgggcctccgctccagccggtcgagcagctgctcgacggccacccccatcttggcgtccacggcctcgaagaagccggcggggtcggcgccgcggccgtgctcggaggggatgacgttggggatggtggcgaggcggacgcggcccgccggcggcagcgtggcgggcacaccggcggaggccagcagcccgtgccactcctccgtgacgacgacggtgacggtgagctcgccgtccgcggccgcgaggaggcggcacgcggccagcatcgggttgatgtggccgcggcccgggtacggcaccgcgaccacgtgccgggacacggctgtcgacgccatgctaatctctatcggactatctctgctggaatttgtgtcttcttgtcatactttaaatgaatccactatggtcttgagaactttctccgacgactgccactgcttgtcgctggcacttgcgacgaagagcaccaccgtgttccccttggcagtcgccttcgccagattgtgagaaccggtcagtgccaatggagtctctagcacatagctgtagtaagtttggccatcgatcttctccacggaggtatcgacgagctcgtcggagtcgaaggtgttcccggtgacaaaaggccccagagaggcgattagcctctcagggctaccgatgtcctcaatcgtggcgttcggcctgttcgtcaggcggatcaacggcgaggccaccacctgcaccttgccctgcttgtcgtcctcgaatttcacctccacccacggctcggcgcacttgggctggcagtagttgccggacagaatgttggccactcgcgtttgcttccaggtgggtggcagaatgaactcgtaaggttgcacattgccagctcgaagtgcaggagtgtccttggaagtagcccggaagaacacgaacccggggttggacgccgccggcggcaggaccgcgccgacctcgacctcacgcgcctcggccggcaaaggcgccttcaggaacgccgcgcccaatgccgcccccagcaacagctccctcctgtggctgacaaccgccgcgaggggcgccggccgcggggcagcgccaccagcggcaacgacagcggcggcgctgttgtcgtgggtggcagaagagcgccccgagcaggaggtggacggccggagtgcacggagtagcggggagaagacggaagaggaggccat

SEQ ID NO: 57534 - DNA, 1341 bp, Oryza sativa
  Clone ID: PAT_MRT4530_59336C.1
atggcgccgctcaaaacgttgctcctcttcctcgtcgtccttctccccgtcgccaacgcatgccagcctccaagaacactccacgtcccggtcttccaccgcgacgcgctcttcccgccaccgcccggcgccaagcgtggcagcctcctccgccaacgcctcgccgccgacgccgcgcgctacgcgtcccttgtcgacgcgaccggccgcctccactcacccgtcttctccgggatccccttcgagagcggcgagtacttcgcgctcgtcggcgtcggcacaccgtccaccaaggcgatgctcgtcatcgacaccggcagcgacctcgtctggctccagtgcagcccctgccgccgctgctacgcccagaggggccaggtgttcgacccgcgccgctcgagcacgtaccgccgggtcccctgctcgtcaccgcagtgccgcgcgctccggttccccggctgcgacagcggcggcgccgccggaggaggctgcaggtacatggtagcctacggcgacggctcctccagcaccggcgacctcgccaccgacaagctcgcgttcgccaacgacacgtacgttaacaacgtcacgctcgggtgcggccgcgacaacgaggggctgttcgactcggcggccgggctgctcggcgtcggccgcggcaagatatccatctcgacgcaggtggcgccggcgtacggcagcgtcttcgagtactgcctcggcgaccggacgtcgcgctcaacgcgcagctcgtacctcgtgttcggccgcacgccggagccgccgtccacggcgttcaccgccctgctgtcgaacccgcggcgcccgagcctgtactacgtggacatggccgggttcagcgtcggcggcgagagggtcaccgggttctcgaacgccagcctcgcgctggacacggcgacggggcggggcggcgtcgtcgtggactccggcacggccatatcccggttcgccagggacgcgtacgcggcgctgcgcgacgccttcgacgcgcgtgcgcgcgcggccgggatgcggaggctggcgggcgagcactcggtgttcgacgcgtgctacgacctccgcgggaggccggcggcgagcgcgccgctgatcgtgctgcacttcgccggcggcgcggacatggcgctgccaccggagaactacttcctccccgtggacggcgggaggcggcgggcggcgtcgtaccgccgctgcctggggttcgaggcggcggacgacgggctcagcgtgatcggtaacgtgcagcagcaaggattccgggtcgtgtttgacgtggagaaggaacggatcggtttcgcgccaaaaggttgcacgtcttga

SEQ ID NO: 57535 - DNA, 240 bp, Oryza sativa
  Clone ID: PAT_MRT4530_59337C.1
atggccaagtttcatttgcaaactctgatcaggaaaagggggcaccggccgggaacatgtgtccaagttagtgtcatacaatctgatcgtgatgtcaacaacaaagttggaacagaccagataacagcggctcacagatgcgctaccctccttgcaaaagatgcggtggcagtcctactccgaatcagaggcgatgtgctcaagttgcttgcagtacaggcgcagagaagaccgtactaa

SEQ ID NO: 57536 - DNA, 249 bp, Oryza sativa
  unsure (1)..(249): unsure at all n locations
  Clone ID: PAT_MRT4530_59338C.1
acaaatcctccatcccgaatcatcccnatgcccgaggctgngttcgggggttngcttgaagccttgaaggcacatttgggatagtttaggtatcgtctgtngtcatccatattttgttgtgatggtattatcccatgatttttgttgcatggatcggnatagcngttaagattagactcggatatgattatattcaattcttgcaaataaatagatgagcncatattttttttgaaaaaaaaaaaaaaa

SEQ ID NO: 57537 - DNA, 2086 bp, Oryza sativa
  Clone ID: PAT_MRT4530_59339C.1
gaccgcctccgcgagtacttctacaagtacggcgaggtggtggacgccgtcatcatgcgccagcgcgggagggggaggtggtggtggtggtgtgtggcctccttcccctccctcctctcgcgaggttgccatgcctcccccaagatcctagaacgcatccccacaacctcacctcgctcgcaagaatcttcttcccaccatcgccctccctcgggatcgatccaacccgatcatcaatcggggcggggaaggaggaggcggaggaggaggggatggaggcggacgccgggaagctgttcatcggcggcatctcgtgggacaccaacgaggaccgcctccgcgagtacttcgacaagtatggcgaggtggtggaggccgtcatcatgcgcgaccgcgccaccggccgcgcccggggattcggcttcatcgtcttcgccgaccccgccgtcgccgagcgggtcattatggagaagcacatgatcgatggccgcatggtggaggcgaagaaagctgttcccagggacgatcagcacgctcttagcaagagcggtgggagcgctcatggatcgccggggcccagccgcaccaagaagatattcgtcggggggctagcgtccaccgtgacggaggcggacttcaggaagtactttgagcagttcgggacgatcaccgacgtcgtggtgatgtacgatcacaacacgcagcgtcccaggttggtggtggttatggagtcggtatgaattttgatccagggatgaaccctgctattgggggaagctcaagcttcaacaacagtctccagtatggaaggcagcttaatccatactacagtggaaattctggtagatacaatagcaatgttagctatggtggagtcaatgacagtactgggtcagtgttcaactcgctggctcgtaatttatggggtaattcaggtcttagttactcttccaactctgcaagctctaattccttcatgtcatctgccaatgggggccttggtggaattgggaacaacaatgtgaattggggaaaccctcctgtgcctgcacaaggtgctaatgctggcccaggctatggcagtgggaacttcggttatggatccagtgaaaccaactttggtctcggtaccaatgcttatggaaggaatgctggatctggtgttgttaatacattcaatcaatcaaccaatgggtatggaaggaactttggagattcatcaggaggaggtggcggtggtggcggtggctccatctatggagacacaacttggagatccggatcttctgagcttgatggaaccagcccatttggctatgggcttgggaatgcagcttcagatgttacagcaaagaactcagcaggttacatggggcattaacaaatagagcaatgtcgccgcctaggaatctttttcacatacaacatttgtcaaaataggttgaggagagaaccacaggtgcatcaggtgcaaattttgaacctcacatgatttacagaaatgggttagttaatagagctaaccaccagggatttggtcaatgagatcagatatatatcctcagagaaccttttaaacgtatttccattttatgtaaggtttgagattgtggtttcggatttctacagcgagtttaggttttggcaaccttgtgttttttcttggttgagatgtgaagtaagattgcgggatatatatatctgaagagtgttcagttgtacggcggcgctgcccccatataggcccccctttttgggtttttgttcttatagtagaaactgctctagcgttttgcaaattgtgtgctagctgttgttatcaggatgataatttttttccccttcttggtttttatcttactgaagtgtatgtaccagagatcttgctggtctgtgtttttcctagtggaacttttgagggatgccccttctgggtctcaaagaataataatgctacattatattctaaaaaaaaaaaaaaaaaaaaaagcggccacattactggaatctagcccgctcgccctcctgtacattctgatgctctttgcatttgcctttgtgctgcttttgcaaaaaaaaaaaaaaa

SEQ ID NO: 57538 - DNA, 384 bp, Oryza sativa
  Clone ID: PAT_MRT4530_5933C.1
atggcggccggacctcccgcgccggtttccttcccctccggccgctctctcccccttccaaccctatttaaaccctccccgtgcctccctcgcccgtttccgccccttgccgcacccactccccgccggaatcgagctcgtgccgtcgccctctcgccgggacctccgtcgccgacgacctccggctggccttctccgctcgccgggaccgtctcccgccccggcgtcgcctcaaccggcttcgccgcaccgccgtcaaccccgtccaccccctcgccgagtccgccgaccgccggaacgccgtcgaccccgtcgacccgagccgcgccgccgccttcctccgctccggccaccttttttgtcgttgccgtcgacctagagtga

SEQ ID NO: 57539 - DNA, 1173 bp, Oryza sativa
  Clone ID: PAT_MRT4530_59340C.1
atggaggtggaagcggcgacgacgcagcgacagccatgcaagaacgcgatcaccaccaagcagcagcagcagcagcagcagcagctgagcaccggtagactgttcaggagcccgctcctcgtcgtcaacttcgtcctcatggtggtcggctcggcgtgcgggccgctcctcctccgcgcctacttcctccgcggcggcaaccgcaagtggctctccagccttctccagaccgccggctggccgctgctgctcgcgccgctctgcttctcgtactcctcacgccgccgccggcgcgaggttgaggacgacggcgctggcgctggcgcggcggccacgccgctgttcctcatgacgccacgcctcctggtggcgtccgccgtcgtcgggctcatgaccggcgtcgacgacctcctctacgcctacggcctggcctacctcccggtgtccacctcctccatcctcatctccacgcagctggccttcacggcggcgttcgcgctgctgctcgtgcgccagcggttcacggcgttctcggtgaacgccgtcgtgctgctcagcgtcggcgcggcgatgctggggatgaacgccggcggggaccggccggcgggggtgtcgcgcgcgcagtactgcgccgggttcgccatgacgctcgccgccgcggcgctgtacgggctcgtgctccccgtcatggagctcagccaggcgcaccacgccgccgcgcgcggcgccgtcacgtacacgctcgtcatggagatgcagctcgtcatcggcttcgtcgccacggccttcagcgccgtcggcatgctcgtcaacaacgatttccacgcaatcccaggagaagcccatgaattcggtctgggccaagcgggctactacctgctcctggccggatcggccgccatgtaccagtgcttcttcctcggcacgatcggcgccatcttctacggctcggcgctgctcgccggcgtcatcatgaccgtgctcatcccggtcaccgaggtgctcgccgtcatgttcttccacgagccattcaacggcacaaagggcgtcgcgctcgctctctcgctatggggcttcgtctcctacttctacggcgaggtccgggcggccaaggcggcgcatcgccgccgccactccgacgagcccccaaaaccggaccatttggacccttaa

SEQ ID NO: 57540 - DNA, 1011 bp, Oryza sativa
  Clone ID: PAT_MRT4530_59341C.1
atggagttcgccgtccctgtcccccagcaggtctccagcctggcgctgccggtggtggtggcggaggcggaggcggccgccgccgccgctgctgctccggggaggaggggggcagcgggcggcgtgagctcgataccgaagggcgctggggctgccgcgaggaggaagacgctgtgcgacatcaccaacctgaggccgcggccggcggcggccgtggagcaggacggggcgaccaagatcatagagttgagtgggacagagttgcagaagttgcggctcgctaactggcagctcgcgcaggcaaattcccagatgctggcagagctcaaccttgggagagataggctaaaaaagctgcaacatcaactcgcttgctcgagagctgttatcgcaacaaaaacatcagaattggaggaggccaagaaggcgatgaagcgcaataggaacctgccactgccagagaaggctcctcctgcaagcgaaacggcgcagcagcagcagggttctgatagagcggcacagatcaaggatggagatgtcgtcaatccagagcccgccgcggcttcagacgcatcgcatgcggcaagcaccaagaaactcagcaacgccagcaggaaacggatgcaaagatctcgatctctcggtccccccgcaacgacgaaactagcagcgacaccaaaggagaaggagaatgtgcagagaaggtggacgaaaatctctggagtgccaaatgattcagcaaagaagtccatgagaacaccggtaccacagccgagcgagcatagggaggacctgttcgagatcgaggacctccagctcgcgatcggcggcggtggcggcggcggcgacagcaaggccgggaccagtgaccctcctgagcaagcggcggtggcggtggcggcggctcagttcccgcggaggtcgtcgctggggaggccgatcaggagggccacggagagggtggcctcctacaaggagatgcctgtcaacattaagctcaggaggtcctag

SEQ ID NO: 57541 - DNA, 152 bp, Oryza sativa
  Clone ID: PAT_MRT4530_59342C.1
ggatctcatcgtaaagctggatgcagcacaaggaaaaataacagagagtgatgtagtttcccatgcaagatgaggagatcaacaacgctgaggcatgcaaatgaagaccttaccaagcaagtagaaggcctacaaatgaacagattcagtga

SEQ ID NO: 57542 - DNA, 306 bp, Oryza sativa
  Clone ID: PAT_MRT4530_59343C.1
atggggtcttctaaccctgatttcaaaaggaagggggtgattttgaggaaaggggatgaagctcaggctagaaccaagaaaggtgagtgcggaacggttgggaggctcaagctgacagaactagtaaaaacattaacaggtcagccatttgaagggcactccaaaattgtgggatttgctacaagacattccaaaattgtgttacttgctgatggactctgcgagcatcattatattatttccacccaagtgaagaaagataaggataagtgtccagtatcaaattactacgaaatacaaacttaa

SEQ ID NO: 57543 - DNA, 441 bp, Oryza sativa
  Clone ID: PAT_MRT4530_59344C.1
atgacaaaggtgcggtggaggagtacgaacggtatcatgtatctctccaccggacagccctcccccccaagtcgccattacccgatctgctcgactcgtaatcgacgccgccggctcgattgctccagcgtggcaccgttgtctgatccgttcagctcgacgccagtgaatagcgacggctgtcctcaacgtccaatccagagccaaccaagctctcatccctctctacacgaggacggtggtgatggagacaagcccttcaaagcagaggactggcatcaaggaggatccaatgcggcctggagaggaggcaagggtggcaccggtcggcgaggtggagtgtcgcggatgagtcggggtagagcggaaacccacaatttaggcgattgtgccctcgaagaagaggggcagcatggagatgatgcaatgctgcctaattaa

SEQ ID NO: 57544 - DNA, 487 bp, Oryza sativa
  unsure (1)..(487): unsure at all n locations
  Clone ID: PAT_MRT4530_59345C.1
ggccggccgggnaaaaaaaaaaagaaaggtttagttgttcaccggttgctggccgtggccttcccgccggaggaggaggaggagatgggccatccggcggcggggcgggaggagcgtcggcggagacccatggcgtcgcgggctgcccgccgcggagatcactgaacttcttcaaccttctcatcatttgcaagaaaccatgaatgagtgtcactgctctcccgcttctggcctccagtcctgcttgctcttacataggcaaaatagtgcccgccatccaacttttgacctccgtgcacaattaccgctacaaggcaatatttgtactcattgtccagatatctgaacatcagagaaatgaataatggttaaaaatatttttttttgaagaagttatcaccaaaaatattggcactatgagcttatcgagaatcatttaggatcagtattgaacaattatgaccctatgctatattcaattaagtag

SEQ ID NO: 57545 - DNA, 442 bp, Oryza sativa
  Clone ID: PAT_MRT4530_59346C.1
gatcaaaccaactggcacgcccttaaacccaaaagcaagatttaggtcctgcactagagttaagcaaatctctcaggccagtagtatgcacaaaaagccttccatggccgcaacatctacgatggctgttgtatctccagtacgaacagacctccacaaccaggatcaaggagttaaaagcatcgaggagttgagggtcgttctcaaggaattggcgaccttaattcaggagaaactggtgaagaaagaggaatggcatagcaagcaggaggccatagagcaggacatggcagtgggcatggtgatgccgtcaccgatctctacacctccaactcagccggcgggtttggaggcatgcagacagcgttgtctgtcctctccactgcaaccacatccacaagtcttgaagtggtgcaagcggatcaaggtcacccatgggtga

SEQ ID NO: 57546 - DNA, 377 bp, Oryza sativa
  Clone ID: PAT_MRT4530_59347C.1
gggcaggggacagtttgtatattcggtatgacaccggctttctgatgtaaacatgacccaaaaagtttactataattaacacaattttttcatacaaacattcatacgggtaattcttctactgcagtaagtactgatgcacatgggtatttcacagggacagtcaaaacgaatcctttactgtctaaacctgaataagaatagaacaaacagacagacagggggggggggggcacatgcttatagtatctatctatatgcacatgagctacaacaattctcatggatctaatggtttgtcaggaggatggtgtgcacgccgttttctttctgaaatagttcattagctgcaccgagctcatagagcaaccattgga

SEQ ID NO: 57547 - DNA, 5354 bp, Oryza sativa
  Clone ID: PAT_MRT4530_59348C.1
atggcgatggcgagcacctaccagtaccagcagtaccagcagctgcagcaggcgcagcagctcttccaacgcgacgcgcagaccatcacccccgaggcgctcgagagcgtcaaggccgccctcgccaccagcgacgtcctcgaccccgccaatgccagagccaccgcaacctcctcctccgaccctgccgccaagaagaaagccatcccccgccgcgccgccggccaatcctgggaggatcccaccctcaccgactggcccgacaatgactatcgcttattttgtggagatctgggcaatgaagtcaatgacgacgtcctctcaaaagctttttcacggttcccctccttcaacatggcaagggttgttcgagataagagaactggcaaaacaaaaggatatggatttgtgagcttttcaaaccctactgaccttgctggagcaattaaagaaatgaatgggaagtataagagaactggcaaaacaaaaggatatggatttgtgaggaaagagaggaccgatgttgatgctctagaaagacagaagtggaacgctcccttcgtagggaaccgccctattaaacatttgtctttcagaatcacatccagaagaaacctaaaatgcccaagaaaagtatccttcacaagtaaagctatattagccctactaagcgccatccatgtaaacagactggagcgcgactacgagctccgtagtcgcggtccgccgtcgttgggcgtcaaggcgcttgacaacctggtatcggtgtctcgtcgatccacttcttcatccaccgccgcccctccagcctccaccacagcagccgccggcccctcctctcccaccaccagcccctgcaccagccctccaccatcccctgtttcgtcgtccgtcgcctccactgccggcgacatgtctgagcacggcgacctcaaggctgccatcgacgccctcaccaagaatgtggcgctcatgcagtcgtccattcaggccaacgccaaggccatcgccgacatcacttcctcatcgtccggcgccggacctcggtcccactccggcgagcaccctcaggatcgtccaccgaagcactggcgcccggagttcccgcgctatgacggcaagaccgatccgctcatcttcatcaacaaatgcgaatccttcttcctgcagcagcgcatcatgccggaggaacgcgtttggatggcgtcatacaacctcaacgacgtcgcccaattgtggtacatgcaggtgcaggaggacgagggcactccgaattggccgcgcttcaaggacctcctcaacctgaggtttggtcccccgctccgctcggcgcccctcttcgagctctcgtcctgccgccgcaccgggacggtgacggagtaccaggaccagtggcaggcgctgctgccccgcgccggcaagctggatgaagcccagcgcatccagctgttcaccgggggtctccagccaccgctcagcctgcaggtccaaatgcagaacccgcagtccctcgcctccgccatgagcctggccaggcagttcgagctactggctgagtacacgggccctccagcccctgctgcaccagcccgggctcccgcgcgtgggctgctgggcgcgtcgctgccgctgctggccctgccggcgcctccacctccagccgcgcgcgcaccggcggccgcgaacccggctgcgaacgcgggggctgcaaacccgggggacggccgccaggccaagcggctctcccgggaggagcaggcggagcgccgccgattgggcctctgctacaactgcaacgaaccgtacagcagaggccacaatcgcgtctgccggcgcatcttccacatcgccggcgtggaactcgacgacgacgacaacgctggccacgaggagccggccaccgagtcgccggtcttctccctgcacgcagtcgctggcgtagccgccctcatcgccctcctcgacgttagcctggggcgcgccgccctcatcgccctcctcgacagtggttccacccacaatttcatctcggccggggcagccgagcgcaccgggctcgtggtggagccccgacctcggctcacagcggtcgtggctaatggcgagcgggtgtcctgccccggcgtcatccgtgcggcgccggtctccatcgacggcaccatctttcacatcgacctctttgttatgccgcttgcagctctgggggcgctccttccactggaccggggtgctggccgaccatgcgccgcgcctccactctacggcggccagcacatccctcctcgacgagctgctggccaccttcgacgacgtcttcgccgagcccacaggctccctccaccgcgcgcacgcgaccaccacatcatcctccagccggacgcggcgccggtggccgttcgcccataccgctacccggcggctcacaaggacgaactcgagcggcaatgcgccgccatgatccagcagggcatcgtccgccggagcgactcggcgttctcctcccccgtcctcctcgtcaagaaggccgatggctcatggcgtttctgcgtcgactaccgcgccctgaacgccctcaccgtcaaggacgcgttccccatccccgtcgtcgacgagctcttggatgagctcaatggggcgcacttcttcaccaagctcgacctgaggtcggggtaccaccaggtgcggatgcgagccgaggacgtccacaaaacggcgttccgcacccacgacggcctctacgagttcctggtgatgccgttcgggctgtgcaacgcccctgcgacattccaggcgctcatgaacgaagtcctgcgcccctacctccgccggtttgtgcttgtgttcttcgatgacattttgatctacagctccagttgggcggaccacctccgacacctccgcgccgtactcgcctcgctgcggcagcaccgcctctttgtgaagaggtccaagtgcgcgttcggtgttccctccgtcggctacctcggccacatcatctcggcggatggcgtcgctatggaccccgccaaggtccaggcgatccacgactggccgcagccccgctcaccacgcgcggtgcgtggcttcctcggcttggcgggctactacaggaagttcgtccacaactacggcgccatcgccgcccccctcacggcccttttgaagaaggaggggtttacgtggaacgacgacgccgcggctgccttcaccgccctcaaggccgcggtcacgtcggcaccggtgctggccttgccggacttcacaaagcccttcgtcgtggagtgcgacgcgtccacctacggctttggggctgttcttctccaggaggctcacccgctcgcgttcttcagccggccagtggctccccgacaccgctcccttgccgcgtacgaacgggagctcatcggcctcgtcctagctgtgcggcactggaggccgtacttgtgggggcgccgcttcaccgtccggacgaatcactacagcctcaagtacctcctcgaccagcgcctcgccacgatcccccaacaccactgggttgggaagctgctcggcttcgacttcgtcgtcgagtacaagtccggggcgaccaacacggtggccgacgccctctccagacgcgacaccgaggaggagccggtggtcgcgcttctcgcggtctcgggcaaccgtttcgacttcatcggccgcctccgtcaggcccaggcgactgatccggccttggtggctgtccacgaggagctccgtgcgggcacccgtgctgcgccctggagtgtggttgacggcatgatcctgtacgacagccgcctctacattccaccatcctcgccgctcctgccggaaattgttgctgccatccacgacgacgggcacgagggtgtccagcgcacgctgcaccgcctccgccgcgacttccacttccccaatatgcgccgctgcgtgcaggacttcgtgcgggaatgttccacctgccagcggtacaagagcgagcaccttcacccggccgggctgctgctgcccctgccgattcccacagcagtctgggccgacattggcctcgactttgtggaagcgctgcccaaggtgaacgggaagtcggtgatcctttccgtcgtcgaccgcttcagcaagtactgccacttcatcccgctggcgcacccgtacaccgccgagtccgtggctcaggcgttcttcaccgacatcgtccgcctccacggcatgccgcagtccatcgtctccgaccgcgacccggtgttcacttcactgttttggcgtgagctgatgcgcctcatgggcaccaagctgcacatgacgtccgccttccaccctcagtctgatggccagacggaggcggctaaccgcgtcattgtcatgtacctgcgttgttttacaggtgaccgaccccagcagtggctccgctggctgccttgggctgaattcgtgtataacacggcctaccagtcctcgctcaaggagacgcccttccgtgtggtgtacggccgtgacccgcccaccatccgctcgtatgagcctggtgagacgcgtgttgcagctgtcgcaagggacatggaggagcgagagaccttcctggctgaagtccgccaccgcctggagcaagctcaagccctccagaagctctactacgaccggcagcaccgcccggtgtcctatcaggttggcgactgggcgctgctgcgccttcgtcagcgcaccatggcgtccctgcctcaagcgcagcccggcaagctgaagccgcgcttcgtcggtccctaccgcgtcatcgagctcatcaacgacgtcgctgttcgcctggagctccctcctcaagcccgcatccacgacgtgttccacgtgggtgtcctcaagaagtttgttggcgctccaccagcagctcctccacctctgccacctatccagcatggcacggtgactccagagccgctccgtgtccagcgtgctcgcttggcgcgtggcgttcgccagctgctcgtccactggcgcggcgaacctccagagtctgcgacatgggaagatgccgaggcgttccacgagcagttccctacctttcagctcgaggacgagctgggtctcgagggggggagagatgtcatgtggggccagacatacacacgccgcaggagggcgcgtgacatccgccgagcggcggagcgcgcagcagcacgcgagggaaacgcgcgcgacgcagctgcgcccgcgcccgcgatcaccgcggctgtagatggaagtggctagctaggagagattttaggaataagttgtttcctagtttgttggccaattgggccatatatttccctgtacttggacaattgaggattaatcaagaattaccacct

SEQ ID NO: 57548 - DNA, 267 bp, Oryza sativa
  Clone ID: PAT_MRT4530_59349C.1
atgagcgggtgccgacaccgctctcactaccgtgccgccgtcgccatccacacgactcgacgacaaattgagggaccaaagacacggcacgccccgactgttgtcgagccctgccagcccgacccaacagttggaccgtgcctaggtctcttccttggcacggcgtgccaacctagcatggcacaacccaacgatcagcacaactgtgacccaacatcccccactccctcaggaagtagcccgtcgacagcaagcccgaagagctga

SEQ ID NO: 57549 - DNA, 1044 bp, Oryza sativa
  Clone ID: PAT_MRT4530_5934C.1
cgccctagccccgtgagacctcgcgccgctgtcgtcgccgccgctccagccgtgcgccgccgtcgctccagtcgtcgccgtcgctcggggaggtcgccatcgtggtcgccgtcgcgtcgccgtcctcgtccgcccctctgccgtcgctgtcgaccgccggaacaccgccgtcgtcgtcaagccaatcgtcgccgccgctctttctcgacgccgtctcctttcttggatcttccgccgttgttttggtcaccgatgccgcgctacaagcctgagtacctgtttggtgttgagggatttgtccaggagttgcgtacgatgtcctttgccataggatttgggactgcccctttgtatgcctagatttctcatgatcgtcacgaagaaaagtgccgagtcaaagtcaccttgaacagtaatagtgaagatatcccatcagtgatgttcgaagctggaggaggaaactacatccatgcatgtcaggaggtggcaaggattgccataggagagctccgcgatcgctacagtgatcagttggccgacactgagtatcgctaccatcctcgccaaccccagggaagtgaccgtggcagctaccttgagactgagaggattgagaatgatgctaccacaaggcatttggttgagatgctgtgggctatggatgagacccgcgcggagactgtgttagcagctcaagatcgtgaagaccggaatcgtggtaagatttgcaagctagaggacaaggtggatcgtttggagaaggaactagccgcgttgaagggagaagcaccaccgcagaaggccaggattcgtcttacggcaaggaagagagctctatttgtccctcgctaccaaatggcgccaaaggtccgtgtggcggagaaagaagttaccctagccctagcggatcctccggtcgtcaatgtaagtgatgatgaaggagaagaatcgaagcgcacccattcaaaggtcgagtggggagctactcaagatgatggagacgagccgaacgagccttcaatcaactccgatgcccggaagacc

SEQ ID NO: 57550 - DNA, 1824 bp, Oryza sativa
  unsure (1)..(1824): unsure at all n locations
  Clone ID: PAT_MRT4530_59350C.1
catcccacccacccctcaaccaaacacccctaaaagtgggttcgtcccatcccatcccatctcatcccagcaacccgacgccaccgccacacatccccttccgccgccgccaatagacaaccccgagcgcctccacaccaccaccatcccgccgctgatgccggtgcccacttcgccggcccctccccgcgcgccgncacccccttctcgctcgtcgccgcccggccgcctcccaactcctcctcgctgtgctgcgccgcggccccctccccgcgcgccgccgncatctnctcgcccgtcgcctcccggccgncttccacctcctncccgntgtgctgcgctgccgccccctccctcgcgtgctgtcgccgtncccccgcgcgccgncttccaccttctttncgttgtgctgcgccgccgcccccttcctgtgcgccgtcaccgctgcaggttccgtcgaaggagagctcggccgcgagggagccaccgccggcggccggtgccagcgggacgccctctccaaaccccgaggcgcgaagcactagcccgccctcccgcccgcgagcgccagggacctcgacggacaccgcgtaccctcccgcctccgcctccgccgccgccgtccccatcctccccggagacggccacgtccaccacgtccaccggcgccgtcgccgcgccctcggtcaccacgccgttgccgcgccctcgccaccgatgccctcgccacctttttcttcgcctctctctccgccaccgcgcgcttctccctctcaccgtcgcgccgctctctctccctctctccgccgtccttcgcgtctccctctcgccgccagaccgctctctctccctctcgccgccgcccctcgcgtctccctcttgccgcgctgctctctctctccctctcgccgccgcctctcttactcgccgtcgacgccggcggccggagggggcagatccggcgccgtcgtgggcggatctggcacccccgcagccagatcagccaggagaccgtggcggggccttcttgctgatcgttgtgctgactgcattgatgagtttgataagatgaatgaccaggacagagtagctatacatgcagttttggaacataaaaccgtgactattgcaggaatacatgcatcgctaaatgcaagatttttctgaacatgttgcatggatgcatcggtgttgcactgatgatggagtgttacgcagggacatacatcgcaagattaaacacaagtattaaaccaaactgaaattcatgccacgaatttaatatcaagtcttgagccgctggcgagactgaacagatccaaatgattttttatcaagaagctacaaaaagttataggctatgttgaatgtttcctaatggagctgacaaatgaaagagaatggatgaatcctggtaaatgtgattgtgttcattggagaaatgtaatggttcaaagtagcaacttttcctccaagctatataaatataatcccgaactacggtcggattattgcacgtagacatagccaagatggtatatggatgtgcttgaccatgttttatatacatgaagggatgtgaacatcctgttagcgacaaattgaaggccaatattcagtttgatagctcatgtcgatggtactttcttcctgtacccattcaatatttattaagcttacatgtacaaatattccgtttcatatatcgaatgcaatgtattggacacattaattatatcttgaacatgcttctgttcttctcctaaaaaaaaaaaaaaaaaaaaaaaactcgagactagttctctctctctctctccctcgtgc

SEQ ID NO: 57551 - DNA, 463 bp, Oryza sativa
  Clone ID: PAT_MRT4530_59351C.1
cgcgacgggcctggcgacgctgtacaacgcagcgaagcagcgcccaaacgagacgggtcccgtgggaaagttcgtgaaccgggtgaaggtgaagacggccctgggcgcgcgtggcaatatggagtggaaggagtgcagcgacgcggtaggcgcggcgatgcatggggacgtgatgaagagcgtgaagccgaagggacggcgtggtgtccacggaggcgtggtgcgggagctgaagtgggacggcctggccgtcttcctcgacgccgactgcgccgtgtggcgcatcggcgaggagctcgccgggtatgtgcagcgctccggcccgctctcccacgtcgtcgtctacggcgccgggcacctcttgccggcggacaacggccacgcggcgcaggagatggtcaaggattgggtgttgcaggcggggctattcggccgccacggcggcatgaagcgcgcaggctga

SEQ ID NO: 57552 - DNA, 346 bp, Oryza sativa
  Clone ID: PAT_MRT4530_59352C.1
ctggggaaagggccccctctttttttccgagggaaaaatccagggaaaaaaaacattgggttttaacatcaattaaggggggaaagaaagttgggccaacacacggaacggaaaaggggcgagggcactccatattcccttggtgaggttggtcacggagccatccaacagcttggatgccctattgaaaaacccccaaacataaagggcggcatataacaagcggaaatatcccgcgggcaaggcacatctatggtgtgccctccagaaaacgccaaaaaaagaaggggacagaatctcacaggggggggggcccggagccctaatagggggtctttcaaggggg

SEQ ID NO: 57553 - DNA, 756 bp, Oryza sativa
  Clone ID: PAT_MRT4530_59353C.1
tcagcctgcgcgcttcatgccgccgtggcggccgaatagccccgcctgcaacacccaatccttgaccatctcctgcgccgcgtggccgttgtccgccggcaagaggtgcccggcgccgtagacgacgacgtgggagagcgggccggagcgctgcacatacccggcgagctcctcgccgatgcgccacacggcgcagtcggcgtcgaggaagacggccaggccgtcccacttcagctcccgcatccacgcctccgtggacaccacgccgtccctgaggtcacggatgccctggtacagcagcacgcgcgttccccgcagcagcgcctccaccttcggcttcacgctcttcatcacgtccccatgcatcgccgcgcctaccgcgtcgctgcactcctcccactccatatcgccacgcgcgcccagggccgccttcacctccacccggttcacgaacttccccacgggacccgtctcgtaggggcgctgcttcgctgcgtcgaacagcgtcgccaggcccgtcgcgttctccagcaacgacagcacgagctccctcgtgtcggcccgtcgcgttctccagcaacgacaacacgagctccctcgcgtcggccagccgccgcgtcgcccatcgccggccgctgacgcccttctcctcccgcctgctgagtcagagaagggagagaaatacgaggaaaggagagaagagggaaaagagagagagaggaggttgaagtggtcacgctgacacgtgggtcccat

SEQ ID NO: 57554 - DNA, 1480 bp, Oryza sativa
  Clone ID: PAT_MRT4530_59354C.1
atgggtggcaaggccgctctcctgatggccctggtggccatcagcgtcgtcctggaggccagggcggacgccggtggctacggcggcgggtacacgccgacgccgacgccggtgaaaccggcgccgaagccggagaagccgcccaaggagcacaagccgccgcaccaccacgagcccaagccggagaagccacccaaggagcacaagccaccggcctacacgccgcccaagccgacgcccaccccacccacgtacaccccgacacccaagcctacgccaccgccatacacgcccaagccgacgccgccggctcacacccctactcccccgacgtacacgccgacccccactccacccaagccgacgcctcccacctacaagccacagcccaagccgacgcctgcgccttacactcccactccccgacgccgccaacatacaagccgcagcctaagccgaacccgccacccacgtacaagccgcagcctaagccgactcccactccctacactccacccacgtacaagccacaaccgaagccgactcccactcccactccctacactcccacgcccaagccgaacccgccgccaacctacaagccacagcccaagccgactcccacgccgacgccgtacaagccgcagcccaagccgactccttctccctacacccccaagccaactccgacgccgccgacctacacaccgacgccaacgccgccgtaccacaagccgccgccgtcctacacccccggcccgccgccgccctactagttgtgttccgccactctccgtcacgttccgaccaaaggaggtgaccgaccgaccagagttgtgcgagaggccaaagaggctcttccttccgtgaagattgctgtgcatgccgagctgcgctgcctttaattacctatagctaattaattagctagggccaatgttgcgaggagaataatgcatgcttgagtgccaatgttgctagctcgctccctctctagatgtgatgtgtatcatgtgttgtgtgttgctcgaatttgtactgtctagcgtacgtcgatcccgtggtgatttgtggagtatggtattgttgtgttacggtataaccaaaaataacagcggaaatggaagtaaaagctgttttcgatcgtcccagcatttcttcaaaaaaaaaaaaaaaaaaaaaaaaaaaaaaaaaaaaaaaaaaaaaaaaaaaaaaaaaaaaaaaaaaaaaaaaataaagagggcatgcacaataaaaagctatccaatagtgtctactaaatggggggcggccgttcaaaaggttacaagtttaataacgcggaaatgcaaggcaatactttttttatagggcaactaaaattaattccattgcccccgttttaaaaacgttgaaaatggaaaaaccttggctttcccaaattaaattgcttagcaaaaattccccttttcacaagttgggtaaataccaaaaaggcccg

SEQ ID NO: 57555 - DNA, 391 bp, Oryza sativa
  Clone ID: PAT_MRT4530_59355C.1
ttgtttttttttttttttttttttttttttttttttttttttttttttttttttttttttttttttttttttaaaaggaatggaaacatcagcccaacggaacaaatttcagcggccgggaaagggggaaattcgcttctgaaacattagcaacagggttttgacaggggcttacttgggccatacaaggctaccgcagaaaacaggggatagcttatgccacaacagggttttctaggggggggtgggcccaacttaggtgggcccacccccctggagacgggatgcgggcggggaaaaaccacatttttcattcagattccgggttaatttttggtttcaccccccccggttggcatattgaaaagggggggcctgaccaaggggcccc

SEQ ID NO: 57556 - DNA, 3872 bp, Oryza sativa
  Clone ID: PAT_MRT4530_59356C.1
ggactgcaggaattcggcacgaggtgcaagctcgctgggcagcttacacaggggagtgaagtagagtgagtgtgagagagagtgagtgagaatgggtggcaaggccgctctcctgatggccctggtggccatcagcgtcgtcctggaggccagggcggacgccggtggctacggcggcgggtacacgccgacgccgacgccggtgaaaccggcgccgaagccggagaagccgcccaaggagcacaagccgccgcaccaccacgagcccaagccggagaagccacccaaggagcacaagccaccggcctacacgccgcccaagccgacgcccaccccacccacgtacaccccgacacccaagcctacgccaccgccatacacgcccaagccgacgccgccggctcacacccctactcccccgacgtacacgccgacccccactccacccaagccgacgcctcccacctacaagccacagcccaagccgacgcctgcgccttacactcccactcccacaccgccaacatacaagccgcagcccaagccgaccccgccaccgacgtacaagccgcagccgaagccgactcccaccccctacactcccactccgacgccgccatcgtacaagccgcagccgaagccgactcccaccccctacactcccactccgacgccgccatcgtacaagccgcagccgaagccgactcccaccccgtacactcccactccgacgccgccatcctacaagccgcagcccaagccgaacccgccacccacgtacaagccgcagcccaagccaaacccgccacccacgtacaagccggcgccgccaacctacaagccgcagcctaagccgaacccgccacccacgtacaagccgcagcctaagccgactcccactccctacactccacccacgtacaagccacaaccgaagccgactcccactcccactccctacactcccacgcccaagccgaacccgccgccaacctacaagccacagcccaagccgactcccacgccgacgccgtacaagccgcagcccaagccgactccttctccctacacccccaagccaactccgacgccgccgacctacacaccgacgccaacgccgccgtaccacaagccgcccccgtcctccacccccggcccgccgccaccctaataccaagccgaaccccccacccaagcccaagccgcagcccaaacccacccccacccccaaccccacgcccacgcccaaccccgctcccaaccggcaagcccaacccaaagccgacccctaaacccaaccccacgccccagcaaaaggccacccctaaaccgacccccaacccccgccaccccccccacgtacaagccagacccgaagccgactcccactcccactccctacactcccacgcccaagccgaacccgccgccaacctacaagccacagcccaagccgactcccacgccgacgccgtacaagccgcagcccaagccgactccttctccctacacccccaagccaactccgacgccgccgacctacacaccgacgccaacgccgccgtaccacaagccgccgccgtcctacacccccggcccgccgccgccctactagttgtgttccgccactctccgtcacgttccgaccaaaggaggtgaccgaccgaccagagttgtgcgagaggccaaagaggctcttccttccgtgaagattgctgtgcatgccgagctgcgctgcctttaattacctatagctaattaattagctagggccaatgttgcgaggagaataatgcatgcttgagtgccaatgttgctagctcgctccctctctagatgtgatgtgtatcatgtgttgtgtgttgctcgaatttgtactgtctagcgtacgtcgatcccgtggtgatttgtggagtatggtattgttgtgttacggtataaccaaaaataacagcggaaatggaagtaaaagctgttttcgatcgtcccaaaaaaaaaaaaaaaaaaaaaggggggggggcggcctaggtcttacggtacggcggtgcgaagccacagccgaagccgacccctgctttttttttttttttttttttgcttctaagtccttgttattgaatatactgcattggtagtttggtacaaagtgatccttcggtattgccctctgatcttggactgaacaaaaaacaaacctgaataagctgccttctagaggagataatcccaatgaaatcaggatagtttatcacgatgaattcaaccacaccagaagaaaaaattatagactcaaatgcttgtattcctcgatgtactctgctcgattctaaaatcagattagagtttgacaccgcaagagatgaggccacaggttggcctccgccggcgcccggagtgcggagtcaggccgcgcgcttcatcccgccgtggcgcccgaatagccccgcctgcaacacccaatcctcgatcatctcctgcgccgcgcggccgttgtccgccggcatgaggtgcccggcgccgtagacgacgacgtgggagagcgggccggagcgctgcacgtacccggcgagctcctcgccgatgcgccacacggcgcggtcggcgtcgaggaaggcgggcaggccgtcccactccagctcccgcatccacgcctccgtcgataccacgccgtccctgaggtcgcggatgccctggtacagcagcacgcgcgttccccgcagcagcgcctccacctccggcttcacgctcttcatcacgtccccgtgcatcgccgcgcccaccgcgtcgctgcactcctcccactccacgtcgccgcgcgcgcccagcgccgccttcacctccgcccggttcacgaacttccccacggggcccgtctcgtaggggcgcttcttcgccgcgtcgaacagcgtcgccaggcccgtcgcgttctccagccacgacagcacgagccccctcgcgtcggccgcctcgctccacctcgccgcgttcgtcagctccaccgccctcgcctgcagcgcctccagctcccgcttctgcttggcgttgatcaggcccatgaagtaggcggtgtccgcgtgcgtcgccacctgcgcgacggggtgcgtcagcccgttgccgatggccacgccgtggaggttaacccgcagccgcgtcggcagcgtggggttcacggccaggatgtacgacccagccgccgggatatacttgccggcgtagctctcgccggtgaggaagaaggggcgggagcgggagcccggctggagcgcgaagaacgactgcagcgcggcgaagaggtgcgcggcgacgacggactggttggtggggatggcggcgggggacggcgcggcgctgaagcccgtgccgagcgggttgtcgatgaagaggagaccaaaccggcgattccacgagaaggggttgggcgagagggagagcgcgtcgcggttgacgaagtaggggccgagctcgaagaaattgccggcgaggccggagcagccggggccgccctggagccagaggaggagcggcgtggaggccggcggcgtgagcgggtgcgtggcctcgtagtaggcgaagaagagcgaggcgttggttgtcgtgatggggaggtagccggagttggtcggcagggcttccttcgggaacaccgccgccgcttcagctgagggtgtgatggctctggcgctgacgaagccgatgagcaggagcgagacgaggagaagcggcggagccattggtgagtgaccgcagttgagatgggaacaggatgagcttgtcagtctgtggtttgtggcgttgaaatggcagtgaatgcgccgagcaatcagcagcagctcatgccgataataacacagatattcctctctgtcctagta

SEQ ID NO: 57557 - DNA, 237 bp, Oryza sativa
  Clone ID: PAT_MRT4530_59357C.1
atggcctggaccccgcgcctttctttcccctccgcttttgagctcgcctcctgctccgatctgcccgccaacctgcaactgggcgagctgctgatcaatgaaaagcagcatacggtgttgatggttatggatcgaacgagttggctctggaggcgcaagccgtcagacaagagcccgggaggcgccgagaacaccgtgtctgtgtcgtcacattctgagcactactctgatgatcag

SEQ ID NO: 57558 - DNA, 528 bp, Oryza sativa
  Clone ID: PAT_MRT4530_59358C.1
atgggttctgaggcgcctgaccctgccgttgctgcatccgtgcctctcgtccgcctgaaccacgtctcctttcagtgcacgtcggtggaaaagtccgtcgacttctaccgccgagtgcttggcttcgagctcatcaagcggccggagtccctgaacttcaatggagcttggctatacaagtacgggatgggaatacatctgctgcagcggggcgacgacgccgacggttgcagcatcccgacaagaccgctgccggcgatcaacccgatgggaaaccacgtttccttccagtgctcagacatggcggtcatgaaggcgaggctacgagccatggaccgggagttcgtcgtgaggaaagtgtgggacggggagacggtggtggaccagctcttcttccacgaccccgacggcaatatgatcgaggtctgcaactgcgagaacctccccgtgatacccctcatcgttgcatcgacgcccgggcttcctgagctgctgccgccggcgatgcagaccaatgtccatggctag

SEQ ID NO: 57559 - DNA, 197 bp, Oryza sativa
  Clone ID: PAT_MRT4530_59359C.1
aggaagagttctacaatgatgctgatgtgagtggacgtggtcgctcgcagatcgctcgcgcttggcaagctggtgacaccatgctggtgtgtgtgcccttgaggcaacaccatgtcaaggcgcgtgccccacagcttggtctcacctctcctcgtggcgatgacagtgtgccagcaaggtatctcccattctcccag

SEQ ID NO: 57560 - DNA, 280 bp, Oryza sativa
  Clone ID: PAT_MRT4530_5935C.1
ctactgtcggtgatatgggaccgggaatatcatgactagaggcttgaggcagacacaatcgcccacggggcctggcaccttcggggacgtcgggcccgagggtgaggtgtccgccctcctcctgatttccccgagggggggtcgggttgctcctgccccgaccccgagggccgaggtgccccgaacccctgtggggtttgcacctaagcccccggccgaactggcaaaggggggcctgcgcggtctcccggtgaggagccccgagctccgtcatactcaa

SEQ ID NO: 57561 - DNA, 378 bp, Oryza sativa
  Clone ID: PAT_MRT4530_59360C.1
atggcggggagcacggcggcggcggcagccctatccttgcgcggaggcgccgccgacgacgaggccatcaatcatgcctttaatcgccttgaatcgtcgcctcttcatgcccagtccgccaagtgcttctcttccgctcctcccctgccgccggcgcaggcgccgcgcctttctcggtgctctgcgagtcgctctggtgacggagttggcgtgcggcggagtggccgtcgggctagtgctgcaccacgcggcgacggatgggaacggccggattcggttcatgcaggcgtggtccgcggcagtggccgacgcagtggaaaacccggaggcgatactgcacaactgagtctgatccgcatcgacgacacggaggagtga

SEQ ID NO: 57562 - DNA, 2189 bp, Oryza sativa
  Clone ID: PAT_MRT4530_59361C.1
catcgatcaccacttcaccaccaagagccgagcaaaaaaagatagccggagaagaaaaccaggaggcggcggcggcggcggccggcgacgagggagaagcagtcgcatgcggccactcggcggccatccggtcgctctcgccgtgacagcagcagcagcaattgcaactcgccgagctcatccaagacaaccctatccatgaggcaaccatgctcttgctcatcaacaagtacctgtccaggagcaagaacccggcagccggcgacgacaaggagatgccaccgccgccgccgccaccgccggcgaacggagcggagcgtgagttcatgtgcatccccggctgcgtgccggtgcgcgtcaagaggggaaccacgacgacgacgacgacgacgaccacggcgaggacgtcgcggcacaatttcgtcaagtcggcggcgtcagggctgttccccggcgcgcagttcaccaaccacgagtcgctcccggcgatggaggaggcgtacgccgagttcgtcgccgcgttcccgcagtacgccgggctcgcccaggccgacgccatcagggacggcgagtaccagcacctcgaccgccacgtgtgcctcgactacaccggcatcaacctcttctcccacgcgcagatgaactcgtcggtgccgtcgacgtcggccacgccgccggcgtcgtcgtcgggcgcggcgtggcagccgccgttctttgacatcgcgtacaagtccacgagcctgcggtcgcaggtgcaatgcggggacgacgtcgcggcggcgtccgcggcgggcgggatcggcggcgccgtgacgaggcgcgtcatggcgtcgctcaacatccccgacgacgagtacgccatggtgtgcacggcgaaccggaccaccgcgttccggctgctggcggagtcctactccttccagcagcacggcaagcggctgctcaccgtgtacgactacgagagcgaggcggcgggcgcgatggcggagagcgcgcgccgccgcggtgcggaggtgatgtcggcgacgttcgcgtggccgggcatgcgcgtccacgccgccgacctccgcaagaagctgctccgcggaaggcggcgcggcggcggcggcgggcaccggagggggctcttcgtgttcccgctggtgtcgcggatgacgggggccaggtacccatacctgtggatgagcgcggcgcacgaacaagggtggcacgtcgcgctcgacgcgtgcgcgctgggcaccaaggacctcgacacgctgggcctctccctcctccgcccggacttcatcgtctgcaacttcttcaaggtgttcggcgagaacccctccggcttcgcgggcctcttcgtcaagaagtccagcctcgccgcgctggagcgctccgtcatcgcccgcagcatcggcatcgtcagcatcgtccccgcacgccgctggtcgctccacgacggctactccaccgagctcgacccggtcgccgcggcggcggacgacctcgacaccaccagctccttctccggcccactcagtggcaccctcatcgcgctcacactcaagaacgtaccggagatggacgccgcaggcgaggagaacggccactcgccggagatccgcgaggccgatccgccgccaccaccaccgccaataatggaggtggagtgcagggggctggaccacgcggacgcgctggggctgatcgccataggcaaccggctgaggtgcatcagcaactggctggtggtggcgatgcagaagctgcggcacccgcagtcggagcaggggaaggcgctggtgcgggtgtacgggccgcgggtgaagttcgagcgggggccatcgctggcgttcaacgtgttcgactggaagggggagaaggtggcgccgccgctggtgcagaagctcgccgaccgccacaacatctccctcacctgcggcttcctccgccacatctgcttctccgacaagtacgacgccgacagggccgccgtcctcgagcacatcgacggcggcggcaagaggaaggacgccgccggcgagatggggatctacgtggtgaacgcgtcgctggggttcttgaccaacttcgacgacgcctacaggttgtgggcgttcgtggccaagttcttggacgccgatttcgtggagaaggagcggtggaggtacaccgcgctcaaccagaagacggtggaggtgtag

SEQ ID NO: 57563 - DNA, 2175 bp, Oryza sativa
  Clone ID: PAT_MRT4530_59362C.1
cccacgcgtccggatttaagttgttctctaaattatgtaactaatgtattgagctatgtattggtataggattaatagaagaaaaaggaaaagagccattacatatgctcccatgcttgatagagatgttgaaagattaagacgtctagaccgtttataccatggaaccgaagcacattgcataagtgagcttcgtatgaggaaagttgtcttccataagttgtgtgctgagcttagatcacgtgccctgctagaggagacttttcatgtcacaatagaggaacaagtcgctatgtttattcacgttgtgggtcacaattggtcaaatagaccaattgcatttgaattcatgagatcggatgccctctgtatccttgcccgtgaccttgtatgcatcaaatccattgacacacatcaaaagataacaagctctcatggcagatttcacccctactttcagggatgcataggagccctggatggtacacatattccagcatgtgtacctatgcatatgcaagaccggtttaggggtagaaagaaatttcaatcacaaaatgtgctagcagcagttgattttgacttaaggttcttatatgttcttgctggatgggaaggttctgcccatgattcttatgtgcttcaagatgctctatcacgtactaatggccttaaaataccagaaggtaaatatttcctagctgatgccggatatgcagctagacctggtgtattacccccataccgaggtacccgatatcacctaaaagaatataagggcgctagagaaccagagaacccaaaggagttattcaaccttcggcattcctctcttagaacaactattgagcgagcatttggtgccttgaagaaccgcttcagaatatttaaatgccaaccattttttcctttgaaaacacaagtgaaaattgtgatggcttgttgtgcacttcataactggattatagaggacggtcctgatgtctatgtgtatgacgatgctgcttggtatgcagcgctgccacggagtctgtctcttgtgaatgaaaacagaatggctaaaggaaaggcgaaggctgatgcttttccaacctctcatgagaggtccttgacttggcatgaggatcaaacaaaattcatgctagagtggtacatggaatacttgaaaaaacaacatgcaggttttaaggtaaaaaagagtcaccacatgttgtgtgctgatgctttaaacaagaagtttggtatgggggtgactgccgatcaagtggatcgtcactacaggtatcacaaagaaaattggaagtatattgcagcagcattgagcaagagtggcaacgcatttgaccatacaagattcttggtgactatttcagaatctgaaaaggcaacgctatgtgatagagcaagacgcctactctctaagcccatcagattctttaatgagatgcaggagctattcacgggatctagtgccgatggttctttggctatggatcaaaacacatgcatgaacgatagtgatggttcaaatagcgatgattcaagagatatgcttgacctcaactgctacacacaacctgaagagccaactggtgaggattctgacactttgccatctccaaccacgaatgcaactgttgacaactcttccagcggtagtcaagctcctccaccaatgccacagcttactgatccacatgcaattctgtggcagaaactagaggcaatcccaatgacacctgatcaaagggttcttgttggtgagtatttgtctgacaaggagaataaaggtaagcgtggttggttgtgcaatgcgagtgatgctacactaaatgcttgggtgttcaagttcttatgtgagaaagatgggcttaacctgtgaagcatagcttgttaaagtagttttttggcgaactgtctgtgtgatgtgcacatgaacttctgtatggctgtgcactcattttggctttgtgttataaggaatgatggctagaatatatgtattagttgttggttgtctaattttagcagtgtggtcatgacaaatggctagaaaatgtcattgaaatagttttagttggatggttgctgatattattgtaatagctcaactagtgttactggagtgttatctttagctggactaatatttcaatatatgtgcactttaattcc

SEQ ID NO: 57564 - DNA, 311 bp, Oryza sativa
  Clone ID: PAT_MRT4530_59363C.1
atgatcctagaacctctcgtcatcaaacggataggtgacgtgacatggaaagggaaggggagcatggcaaggtacccagatctagcggtcattgagctcgagacagcgccctcacgtcaccccaacacccgtaccagtggcaatatccgcttccccttccccatccccttccccttctctacctcctccctacccctcaccgcctccggcgaacaccgcgccacggtgccagtggcctgcacggagggtaagtgcgcagagctttacatggtgggcaagtcgctcgtcactgaggcagagaaaagctctag

SEQ ID NO: 57565 - DNA, 218 bp, Oryza sativa
  Clone ID: PAT_MRT4530_59364C.1
cacgaggctccgcgtctctcgccctctctcttcctcgtgcaccggccggccggagctgagacgccgccagcgaccggcaatgcctacgctggtcgccgccggcgggatgagagctaccgagcgcgcccgccacccgcgatcgagccacggtccccgtccgcacctggaccacatcatggctagggcgatgtgcgcccacgccatggaggagtcgacgg

SEQ ID NO: 57566 - DNA, 214 bp, Oryza sativa
  unsure (1)..(214): unsure at all n locations
  Clone ID: PAT_MRT4530_59365C.1
tngtgacatgactcgtatggtgactgcaacatgagggttggaagaggcatggcatgatgggtggaatggctnagcacccagggctatatgcatgatggcaccatgacaccatgcgtgaatgacaatgatgatgtggtgaccaaatcgtcaaaaacgatacttatatgtaatactatactcagaccaacccngataaaaaaaaaaaaaaaaaaaa

SEQ ID NO: 57567 - DNA, 3059 bp, Oryza sativa
  unsure (1)..(3059): unsure at all n locations
  Clone ID: PAT_MRT4530_59366C.1
ctatcttgatatataacttcgacacactgacaacttaatttgtcagaatgctcacggccacgcagactctggcgccggcagtgctctcccggagccatggcgccccttcttccttctccagccagccgcgccgcaccgccgccgccgcctcgagagtaagctgcacccgcgtcggcgccttgtcggaggtcgtcaatggcgaactcgtcgtcggcgaccaagaacagacgaccgacgacctccttacgcggcacaagaatgtcgtcgccgactacacgctgagcgccacggtgacggtgagcttgaagcaggacgattccactccccagaaggtggcggacatggttaatcgagactggcttttccttgatttcttcagctcgcatatagaggggatgcacacggagcctcagctcgccaggtactcgcacatggatggcaaaggctccttcatatacgaggccagcttcagcatcccgtcctcgttggacgccgtcggcgccgtgcaggtcgtgaaccgctacagcagcgaggtgtacatctcggacatcgacgtccacctctgcggcggccgccatcagtggaccgacatcactttccactgcaactcttggatcgactacaaccccaacgaccagcgcttcttcttccctctcaagtcgtacctcccgtctcagacgcccaggggcgtgaagaatctgcgcaaggaagagctcagggccatccgcggcgatggccgcggcgagcgcaaggagtgggagcgcatctacgactacgacgtctacaacgacctcggcgaccccgacaatgacccggccactcgtcggccggtgctcggcggccgcgggcgcccctacccgcgccgctgccgcacgggccgccgccgctgcaggacagacccgtcgtcggagtcgccgccggccaaggacggcgccgggatctacgtgccacgggacgaggcgttcacggagcggaaggccggcgcgttcgccaccaagaaggcgctgtcggcgctgtcggcgttcaccacggcgcagagggtgtccggcgaccggcggcggggcttcccgtcgctggcggccatcgacgcgctgtacgaggacgggtacaagaaccggccgtcgtcgtcgcagcaggaggcggacaacctcgaaggctacttcagggaggtgctccagaagcaggtgaagctgctgctcaagggcgagaaggaggagttcaaggaggagctacgcaaagtgttcaaattccaaacgcccgagattcacgacaaggacaagcttgcatggttcagagacgaggagttcgcgcggcaaacgctggcagggatgaaccctctcagcatccaacttgtcagggacacggacttccctatattcagcaagctggacgaggaaacctacggcccaggggactccctcatcaccaaagagctgattgaagagcagattaatggggtcatgacagcagaggaggccgtggagaagaagaagctgttcatgctggactaccacgacgtgctcctgccgttcgtgcacgcggtgcgcgagctggacgacaccacgctgtacgcctcgcggacgctcttcttcctgacggaggacggcacgctgaggccgatcgccatcgagctgacgaggcccaagtcccccaacacgccgcagtggcgccaggtcttcacgccgggctccagcgtcgcggcgtcctggctgtggcagctcgccaaaacgcacgtcctcgcccacgacaccggctaccaccagctcgtcagccactggctgaggacgcactgctgcgtggagccgtacgtgatcgcggcgaaccggcggctgagccagatgcaccccatctaccgactgctgcacccgcacttccgcttcaccatggagatcaacgcccaagcgcgcgggatgctcatcaacgccaatggaatcatcgagagcgccttcgcgccggggaagctctgcatggagctcagctcggcggtttacgacaagttttggaggttcgacatggaggctctgcccgccgatctcatccggaggggcatggcgatcgaatgcgaggatggcaagctggagctgacgatagaggactacccgtacgccaacgacggcctgctcatctgggactccatcaaggagtgggtgtcggattatgtgaaccattactaccagttggcttcagacatccacatggacaaggagctccagggttggtggaacgaggtgcgaaccaagggccacccggacaaggaggaagggtggccagagctgaactgccacgggagcctcgtcgaggttctgaccaccatcatctgggtcgcgtcggggcaccatgcggcggtgaactttggccagtacccctacgccggctacttccccaatcgccccaccatcgcccggcggaacatgccgacggaggggcaggcgtgcagtcacgacggcatgcagccaacgttcgttgaggatcccgtcagggtgctactagacacgttcccatcgcagtaccagaccaccctcgtcctgccggtgctcaacctgctatcgtcacactcgcccggcgaggagtacatgggcacgcatgcggagtcagcgtggatggcggacagggaggtcagggcggcgttcgggaggttcaacgagaggatgatgagcatcgcggagatgatcgactgccggaacaaggatccggagcgaaagaaccggcagggccccggcgtggtgccgtacgtgctgctcaagccgtcctacggtgaccctaaggacatgacgtccgtgatggagatgggtatccccaacagcatctcaatttgagttgtgccaatgagcttgcatctgtttggcgtgctcatcgtgacattatgtatgaaataaaatggattaaaaatccggcctcgtcaaggaatggctaacacagcgagcctgcatctgtttggagtgctcatcgtgcgattatgaaataaaatgacctggcatctgtttgccactgttttcttgtaaataaagaaaaaaaataagtacaggacaccgtatatacataacgccntgcattatttc

SEQ ID NO: 57568 - DNA, 176 bp, Oryza sativa
  Clone ID: PAT_MRT4530_59367C.1
ggacacaatgattagggatcactgattcattatagttgcttccatgctgttctaccacagcaaaacgttgtagacaccattaaaccagtcttatggttacacattacaggtttatagtacacaatgtagcgatacacgacttatgtctagactggacaaccatagcttcatatggt

SEQ ID NO: 57569 - DNA, 2302 bp, Oryza sativa
  Clone ID: PAT_MRT4530_59368C.1
atggggcggcggcggcgattcgcgcagctcgccaccaccagcgacgacgacgacgacgacgcccccgccgccgacgcgccgcccaaggcgaagcccccgccgccgccctcctcctcctcaggccccaagaagccgaagcagcgccgcctttcctccgcggcggccgacgacgacgacgacgtcgaggaggacgacctggagctcgaggaggaggaggaggacgagaaggatctggaggagatgcggaggaacgaggaggaggagcggcgggaggagacgcagacccgccgccgccgccgccgccggggccgcaagcccaagcgccccgccgaggagagcgaggaggacgaggaggaggaggaggaggaggccaaggcggaggaggcccgcgaggaggagaacaccgaggcggtccccatcggggagcccgtcaagatcaccggcagggggaagaagcagcgcaagcattacacctccttcgagtacgagggcaacaccttcgagctcgaggacccggtgctgctcacgcctgaggatagcaaggagaaaccttatgtcgccatcctcaaggatataacagaaactgagggaagcttatcagtaactggtcagtggttttatagaccagaagaggctgacaaaaagggtgggggaagctggaaagcaagtgacacgagggagttattttatagtttccatattgatgatgtgccagcagagtcagttatgcacaagtgtgtagtccatttcattcctcaacataagaaaattcccagccggaaggaacaccctggattcattgtccaaaaggtctatgacacagttgcgaagaaactttggaacctaacagacaaagattatgaggataacaagcaacatgagattgatcttctcgttaagaaaacaatagaccgtattggacagctttctgatattgaacctgcagatgctcctggtgacaacaatgatcagctctcaaacaagcgaggactgcggaagagacctgtgcttcctatagatgtttcaagagatgatgctttagcaggcaaatcagagcaatttggaaaagcagagacacctggaagtgataagctaaagaattatgccacccttgtcaagtataaagctgttactggtgatcaatatcgtgataggtggcttgataaattagtggatactattccactaacatcaaaggaaagtgctggggcttctcatgctgatcctggtggtgctaccaaaagttcaactaatggttcatctgcaaaggaagacaatgaaaaatcttattcacctgatgtgattgtttcaataatggcctccttagaaagatctacttatgaagctcttggttctgacttccagaagtataaccagaaattgagacagttactgttcaacatcaagaatagccctgtactacggaaccggctgatgaacaaggagcttgatcctccagtcctgttaacaatgtctcctgacgaactaaaggttggcttgacagcagcagagagaacatctgaacctgaagaatcaaggaagttgcagatgactgatgcacgatgtgtaagatgtgcagaaaaggaagtaggtgtatctgatattattcatgctggtcatggagatcgctatcagaaggtggtggcatctagaagagagaacgaggtcgttaacgtaggtggcgataggaccttgaggctagcgaggctagtggccagtggtgggagcgtgggcacggcaccatgggcaacagccaagttcgatgtcatggagaagcagctcacgagcccacgggatcatcagccggacaagccgttggccgatgctctccacaagagcgcggcacccgtacatgcccacgctggagaagcagaaatcgttcggcaagcacaagccagacgagccctcgtcggcgccagcagctggccacgagtagatcagacggtccacacgcactacacctctcgtcagaactagtagctagctagacacgattagaagagcacgcgcacccacggttcgcatcgtcattagggagtttcagagattacgtgtacagatgtaattgtgttttgtatgtcgtgtactaccatctgagggaggctgagcagatcagacaaactctaggttggcatcctcctgtcgcctctaatcgtgtgttttaacttgcatcactgtcaatgcatttcagtgctgtggacgcagccggtactcctgtacatcgtgagggtgtcaatggatcgtttttggctactgctcatgttttgtgtgtgtaaaaaaaaaaaaaaaaaaaaaaaaaaaa

SEQ ID NO: 57570 - DNA, 1599 bp, Oryza sativa
  Clone ID: PAT_MRT4530_59369C.1
atgacgccgcgggagggcggcggcggcggcggaggcggcgtggtggggttggtagcgtacgcggcgctggcggtggtggcgctgcgggtggtgctgtcgtacaagtcggtggcgcacgcggtgcggaggatgtggcggtgggcggacgagtgggcgcaggcgtaccagtactacgaggtgccgcggttcggcggcggcggcggcgagggggtggagaatccgctgttcaggaaggcggcggcgtacgtggcggcgctgccgtcgctggaggacgcggacgcggcgtgcgtgctgtcgtcggcgtgcaagaccaacgacttctcgctgcagctcgggccggggcacacggcgcacgacgcgttcctcggcgcccgcctcgcgtggaccaacgccgggccggcgggcgacggcggcggcggccgcgagcgcctggtgttgcgtgtgcgtcgacatgacaggacgcgcgtgctgcgcccgtacctgcagcatgtcgagtcggtcgccgacgagatggagctccgccggcgcgagctgaggctgtacgcgaacaccggcggcgatggcgccccctcgccgaagtggacgtcggcgccgttcacccacccggccacgctggagacggtggccatggacccggagctcaaggcccgcgtccgcgccgacctggagagcttcctcaagggcagggcgtactaccatcggctcggtcgcgcgtggcgccggagctacctgctctacggcccgtccggcaccgggaagtccacgttcgccgcggcgatggcgaggttcttggtgtacgacgtctacgacatcgacatgtcccgcggcggctgcgacgacctccgcgcgctgctcctggagaccaccccgcggtcgctcatcctcgtggaggacctggaccggtatctccgcggcggcggcgatggggagacgtccgccgcgaggacgtcgaggatgctcagcttcatggacgggctctcgtcgtgctgcggcgaggagcgcgtcatggtgttcaccatgagcggcgacaaggacggcgtggacccggccatcctgcggccggggaggctggacgtgcacatccacttcaccatgtgcgacttcgaggggttcaagactctggccagcaactacctcggcctcaaggaccacaagctgtacccgcaggtggaggagggcttccacgccgccggcgcgcgcctcagccccgccgagctcggcgagatcatgctcgccaaccgcgggtccccgagccgcgcgctccgcacggtcatcaacgcgctgcagcacgtggcgccggccccggcgccgccgcagcagcagccccgggcgagctccgcgtcgcggccgccgcccaggctgaccgcgagatggtccggtcacctcgacgaggcaagcgcggcggacgcaagcgcggccaaccaatcgccgggcggcggcggcgggggattcgggaaggacgcgccgatgagggagttcaagaagctctacgggctgatcaagatcaggagccgcaaggacggcggcgtcgttcccgtcgacgacacggcgtcggcgaacggccggggcagtgacgtcagcgccgataaggaccggtga

SEQ ID NO: 57571 - DNA, 5318 bp, Oryza sativa
  Clone ID: PAT_MRT4530_5936C.1
tcatacatagaatttacgtagttggtcaatgttccaagagtttgctagttcgcgaccgtcgccgtctgcgattttgaatgcgcttggccgcaagacttgtgtgatcgtgtaaggtccttcccattttggtgagagtttgtttcgccctgcttgggtttgaactcgtcggaggacatagtcgccgatcgaaagtatgcgtgcttggatgcgcgtctcatggtaacagcgaagggcttgttgatagctagctgcttgaacggcaactcgctcacgatgctcctcgagaaggtttacatcgatgtctcgctgttcctcctggttctcgtcggaatacttctgtactcgtgtactttgatgtcgtagctcgccggggagcatggccttagagccgtacaggaggaagaagggtgtttccttattggatgttgtcggtgtggtgcgtacggcccatagtactgatgggagttcttcaacccactttttgtcgtgtgacatgagtctgtcgtagacgcgggttttcatcccttgtagtactatgccgtttgccctttcgacttgtccgttgctttgagggtgagagaccgaggcgaaacatattttgactcccaaaccgatgcagtaatcttggaagtcagcgctgatgaattgagagccgttgtcggttatgatgcggtgcggtagtccgtatctgcagaatatccctctgatgaatttgatggcgttgttggccttgatttccccagtgggtactgcttcgatccatttggtgaatttgtcgatcgccacaagtaggaatctgtagccgccctgtcctcgtgggaatggcccaagtatatcggcggcgtgtgacccacatatgccttcatgtatgtcgaggaggagttgtctgccgtcgtcggtagagacgcatttgagaagtaccccgtttggcgcttttttgtataaatcgttaccgaccatacagtagatctttgctttacaggttattttctcggcctctgtatcgtcctcgggcaactcctcgctgctgatgaatttgataaatgggatgcgccagtcgtttgtggtttcgatgtcagcaatagcgcgttctgcctcggtgacctccgagctgatgtcgggggtgttcgggccaacttcgccgctaacttcttttaccgatggttttgtcaggatgtcgagaaaggtgccgggctcgagcggttctcgtctggacgcgcgtcgtgctaggtcgtctggctcgacgttgtccttgcgatagacgtgtcggacctcgatcccatcgaacctcttctctagcttcctgacttctgcgagatatttggataactcggggttagagcatttgtagtctttgtgcacctggtttgcgactagctcggagtcccctttgacgattagtcgcttggccccaagtgcggctgtagctcgtatcccggcgagtagtccttcgtattctgcagtgttattggttgccctgaagttgaggtggattgcgtgcttgaattgatcgccgaagggagatgtcaagataaatcctgcccctgctccttggctgttgagtgcgccatcgaacgccattgtccatgtctcattgtcgccttggttgtctgatttgttatctggcatagtccaatcggcaacgaagtcggcgagtacctgggatttgatggctgttcgcggcacaaagtggacatcaaattggcttagctcgactacccatttcgcaatgcggccgacaacgtctttgtttctcacgacttcaccaagggggaaggaggagacaactgtgactctgtgggcttgaaagtagtggcgtagtttccttgatgtcatgatgatttctctctcgacgacaatgacggtgctaacggaatatggcgtggcggcaatatagaggaataattcttcattaggttggggagcaacaagtacaggagggtttgataggtagcgcttgagtgcaataaatgcctcttcggcttcctgtgtccatacaaatttgtcttgtttcttcaacaaagcgaagaaaggttgtcctcgttctcccatcctagtgacgaatctgcttaatgctgccatgcatccggttagcttttgtacctccttgagtcttgtgggcgacttcatgttctcgattgctttgatcttctcgggatttgcctctattcctctgccagagacaaggaatccgagtagcttgcccgacggtacaccaaacgtgcacttctcaggattgagcatgaggcgatatcgtcggaggttgtcgaacgtttcccgcagatcgtcaatcaatgagtcgtttgtcttggttttgacaacgatgtcgtcaacgtaagcctcgacattgttgccaagctggttgctaagtgtgccctcgacattgttgaggtcggtgaagtcgacacacattctccattttccgttggccttccgcaccataactggattggctagccactctggatgaagtacttctctgatgaagccagctttgagaagtttgtcgagctcttctcgtatggcttgtttccggtctggtgcaaatctccgcggtctttgctttactggcttggcatcgggtcgcaccatgagtttgtgctcaatcacctccctagggacccccggcatgtcggacggtttcttgggtggctcagtcatggcgggtgggctgggcatttgctcgaccatgtcgaggctccgcttgtcgcactgcaccgccagctttgtattcccctgaatagtgattgttcccttcggtcccggcatcttgagcacttgatacgcgtagtgagatgcggccatgaacttcgcaagtgcagttctcccgatgatggcgttgtaagctgtatcgaattcagcaacatcgaaggtgatctgctctgttcggaagttgttggcttggccgaaagtcataggcaacgtaatcttgcccaaaggtctggacaatgattggggagtaattccatggacgggttgatcggttggtgtcaactcactttgcggaattcccattgcgtccagagtgctggcgaagagaagattgatcgagctgccaccgtcgatgagaactcgcgctaccttgatgttccgaatagtgggttcgaccacgatcggatatcgtcttgggataacggaggttttggggtggtcttcctctgagaactctattttctgctcagaccacttcatcttgggtgcagccccctgccacgttgaacagacttcacgttccactttcttgtattctcgcttggaggaatacgttgtggagccgccaaagatgtgtgagacgtggaggtcggagtctggatacgcagaatccgattcgtgaggaggcgtctcttcgttcttctcgacaacacgtactcgcttgcctttttcaaacgccatgtgcttctcgagtgactttttgaaaacaaggcaatcctccagagaatgtatgtccattttgtgtatggggcaccataatttctttgtgtcgctgccttgtgggtctgggcgcttgggagggttcgcgtattctactgcgaggacttccgcttgagctttccttttcccatttttgcgatttttcttcttgcttgactcagatgcatctgcggctggtttcttctctcccccggtcttcggcttgtcgttcttgcgtcttagcgcatcatccacatgggcgcatcgctcaacgatctcgaataacctccaagtagttgtgatgcgtcttgtcgccaactcctgggtagtgtagcgatctctgacaccggatttgaaggcgtgaattacagaagcgtcggtgatttcgggaattgtgtttctacactcgttgaagcgccgaacgtattccctcaatgattcccccgagttctgtgttaacgcgtgtaagtcatcttcgatcgcgtggcgcttgtatgttccttggaaattggtgacgaattgttgccacaggtctgcccccgaagagattgagtagggaggaagatgcatcagccatgaacgtgcagaaccctttaacgcggttggtaaatagttagctaacgcattgtcgtctgctccggcagcatagagcactgtcgagtagacttgaaggaattcttctgggtcggtgctcccatcatacttttcaatagctctgggtcggaatctctcaggccatcggacatcacgtagggaacgaccgaaagccctacacccagcgttggggacggtgggttgtcggcggtcgtgtgaccttcgtggatgtctgtttgttgtcgatgacccatagtcttcgaggagatgcaagaccgatggttcgtgaggatcgatatcgattaccccaacaaatcgatctgaggctggagccgctccttgttccttgccgttatccctgacaaggacgtatgacttaggagacgaagttttcatggcgccgaggaggactttgcaactcaagaggtcgtgattctttgtcttgtgaataggacaatagacatctcgagttagagaagtacgctgaattccacgttctttgcaggcgcgaatttcaacgtggacgttgagaaaaacccagcaatcttgaagggtgtgtttcttggttttgtggataggacaccaagacctggtggcttcggaagtcatctttgtcggcccgtgatttatgtcggaaggacaaggtttggccgtatcagaatccttcccgagcttggatgtagtcggtaatccgttctccgtttcgacgggtggatttttcgacatggagtcgccttggttcgtagccactgcgttctcgtttccagtcattggaggaccggttgagatcggcatcgtggtgtaaaccgggaagatgatttcgccgacttgagtccataccagcattgttgaagcagggagtgcttggctgaagctggtgttgacgttgttgtcgatgaagctggatgacatagtagtagaaccttgagtaccaagttcccctacctggcgcgccactgtcgacgggtgatacccatagaccggatatagagggtattggggtacgttgttaccgacaagatcgtagtcgagttggttcgactagatcctcgacgatttggctcctgcaggcttcgacttcgtaggctgtgggggttgtgttggctttgagatttgatgccttaggtcctccctggggggtcccttttatatcgcaggtcaggcggtttccaagtagaactcggagacatcaaaccctacacgatacattgacgacccagtcttgtccgagtaggactcttttcgtccgtaaactctgtgaaggatttccttagtgtatgtagagagtatccgtatgcgcgtgggcatgccat

SEQ ID NO: 57572 - DNA, 365 bp, Oryza sativa
  Clone ID: PAT_MRT4530_59370C.1
aaggggccaaacctaaccggtcatttccccccccaaaaactaagcattgggtccctaccccaggaaagaaattaggggggaggggggaaacatatcctggagaacacacaacacaagggggatttgcactacgggacaagccccccggtgggccctaaaacacttaggtaaaaaacccttggggaggtcttccggaaccccccggtggaccccgccaacggggggggggcccccatttgggacaggcccggaacaaaaacaaaaaaaaaggggcccgggctcccaagggaagacgggacccgggcatcaggggctccgccctggaagagctcctgaacaaagggcaggagcggaccccggggcca

SEQ ID NO: 57573 - DNA, 398 bp, Oryza sativa
  Clone ID: PAT_MRT4530_59371C.1
agcgcccgcccttcctttttttttttttttttaatcaacattcacgggggcacaacaaaactatgggggggttctcaaataaaaacaggggttatgtgatactacatccaaacccgtacactgaatgactacccatgccgacaggacacaatatggttggaaaaaacacatccgaacacacaaaaatacgtaacaccaaccccatggacctacaccgaaccccttttctggatgcaaccatggagaaggaaacaacaacaaaccgctttaaacctagaagggaggaccccagaacctttactgatggtcgacaacaaaaccgacccaggcgacaggctgtttatggaactgcaatgctccatgagaattgaaagaaaaccccccctacgccaaaggcg

SEQ ID NO: 57574 - DNA, 511 bp, Oryza sativa
  Clone ID: PAT_MRT4530_59372C.1
gttaatggaccctgacctccggagatcgggaatttttcctcgcgcgatccgccgccgcttctctctcgcgcggagtctcttctctcgcacgcgaccaatgttgggcgccgccgcgcctcctcctccggcgagacgcgccaccgccgggactcctccggcgagacaccaccagcgctgccaccatactaggcttctctagaacagccaccgtcaatcttgctcccacctgaagcaacacgacgcgctctctccagtggcagtgcgccagtgccccatcccccaggtcaacctcgatagccaccaagagcggttctccagtggccgtcactaagcatcgccagcaccgtgactcagttcgactggttcatatgctttaacacataagctacgaggtaaattaaacaacattgattaagaagggaacacgcgcgttcactgcttcgacagatcaactacaagaattgtcaaagaatcatttttgctggagttattaggaacattttatgtttag

SEQ ID NO: 57575 - DNA, 252 bp, Oryza sativa
  Clone ID: PAT_MRT4530_59373C.1
atgatttcgttccggggtgctcttccgatggttgtgcgacgtgatacgatgcactgggatgggtggttcgtgatgggtgacgacgacacggtgttcttcccggacaacatggtggctgtgttgaacaagttcgaccacgcgaagacgtactacatcggggcgccgtcagagagcgtggagcaggacgtgatgcactcgtacagcatggcgttcggcggcggcgggttcgccatcagctaccccgctgcgtga

SEQ ID NO: 57576 - DNA, 1076 bp, Oryza sativa
  unsure (1)..(1076): unsure at all n locations
  Clone ID: PAT_MRT4530_59374C.1
cggacgcgtgggatcacatccaatccagagaaaaattctccgatcgccgccgccgctggttcgattcgccgaggccgagccgagagagagagatcgagagggatggagtgcttggccgagatgccgcgcgcgccgctggccgaccgccgcccgcggaagaggcagcggctggggtgggacgtcggccccgagatccaccaggttcagatagggttatgtgggcaagaagttgcaaatgtcatcagtgctgtgacgctgggtctctcgtcccaggaaatccctcgttttgcttcccctcctctgagagaagatgacaaggatggacactttgtctttgctgttggagacaacctcacaccacgatacaggattaatgcaaaaatgggtgaaggtacctttggtcaggtattggaatgttgggatagggaaaggaaagaaatggtggccattaagatcatcagaggcattaagaagtacagggatgctgcaatgatagaaattggcatgctcgagcagcttggtaaatatgaaaaaagtagatccagttgtgttcaaattcggaactggtttgactatcgtaaccatatctgtattgtctgtgagaagcttggaccaagcttatatgattttctgcggaaaaacagttaccgctcattcccaattgccctagttcgggaggttgccaaacaactgttggaatgtatagcatttatgcatgaattgcgcctcattcacactgatttaaagcctgagaacattcttcttgtttctccagagtacattaaagtgcccgattacaaagtttcatcccgttctccaaaggaaggttcctatttcaagcagctgcccaagtccagtgctattaaggtgattgattttggcagcacaacatatgaccagcaggatcagacctatgtggtgtctactaggcattatcgagctccagaagttatcttgggacttggatggagttacccctgtgatatatggagtgttggttgtatactggttgagctatgcacgggagaagcattgttntagaccatganaacttggagcatcctgctatgatggag

SEQ ID NO: 57577 - DNA, 204 bp, Oryza sativa
  Clone ID: PAT_MRT4530_59375C.1
atggctcgatggcactttcttcttgcatttgccatccggctctgtgtccctgctccgtctgagcttgtggtcagtttgttaggatcaactgccgtcggccgcgccctcgccggtcacccggaccccttccgcgtcgtgcaccggtccgagcttgccgagaggaggtcatcggggagtgcgttgacgcggtcctcgccgtcgtag

SEQ ID NO: 57578 - DNA, 249 bp, Oryza sativa
  Clone ID: PAT_MRT4530_59376C.1
atggcagatggcatccccgcacacgccgtcacgtacgcgccggtcaaagcacgaaagctggcgtctggcctggcaccagggccgcggaagatgacatactacactcggtggccgcgccacactctcgtgctcgcccggacaagggacacccggactccaacaccaccacgtgtgtactcctacccccatggcattgccaccagatctcttcagaaatctggttgtgcccatgttccacacctgcagtga

SEQ ID NO: 57579 - DNA, 300 bp, Oryza sativa
  unsure (1)..(300): unsure at all n locations
  Clone ID: PAT_MRT4530_59377C.1
cttcctacgtgactcgcgtgttccgccagaacggggggctttttacacaccccggggggcactacaaggcacnacatggccatcaacgtcttccacctcacccacctggcccgccacccacccgatcccaaaacaaccgacgaggccgacacctaagacccccacccacagactcccgttggaccaggagcggttgccgggcctttgctacacagaaggcgactccgacggctcgccgatgcatcggaaggccctgccccctggggagccccgtcaacccgaacccctgcagccgtggcc

SEQ ID NO: 57580 - DNA, 231 bp, Oryza sativa
  Clone ID: PAT_MRT4530_59378C.1
atggcgtgcaaaaaatacacaacagaatcagggcaacgcgcggatgtgctcgccgacgaccgcgcaggactgtgtcggcggaaggtgacgcagacgaccaggacaggcttcctctatgcccctgattctgttgcaacaccggagaggagtcagatccagcggtgcaccatctatgtccacgagctgccgcctaggctcactccctcggagcaaaccacgtcgccggtgtag

SEQ ID NO: 57581 - DNA, 234 bp, Oryza sativa
  unsure (1)..(234): unsure at all n locations
  Clone ID: PAT_MRT4530_59379C.1
ttttnttcagaacaagtttagtgcaatgtgtcactagctagctaggtcatattgttggatagtggctagcttagctaggtcgtgtgtgttgtgaacttgtgctgtctcgctaatgttgttggcgtagtgagtgcagtgatcggaggtggtgttggtggaggcggcgaggatgagcaggaacaacggcaaganttccaagctggagtgcctgagntgatgagcctgtcgagggcn

SEQ ID NO: 57582 - DNA, 876 bp, Oryza sativa
  Clone ID: PAT_MRT4530_5937C.1
atgctatccggcttcttctacacaactttcaacaaggagtgctggccttccttggtgtaccgcttcaccaacgtctctgggaaagggtctggcccttgcgatagtgatgggaatgcaccgttccattacgccgtgtgcaatcctgtgaccaagaagtgggtgatgttaccaaaggccaactgggcttctgactcatcttatcttgaagaccaccccattgcctgcttgggttttgacccagccatctcctcgcatttccatgtgctcgagtatttggagggtccagatgggtgcatcacagcggtggggatctattcgtccaaaactgggttatggaatctccatgagagtggatggaatcatggtgttggagttagttatggtggcccgagaggtgtgttccttaatggttttatgcattttgttgctgtaagaaatgagattgtggcggttgacatggaggggaagagatggaagataattcctatgccggatagtggtggtcatggtgctcccatgattgatcgtactcagggtcacctatgtgctcttaatgttgacccgcttgatatcttcaatctgtcactttgggtccttgaagactataatacagataattggatcttaaagcgtactgttagcaccttggagctctttggagggaagaaatacgaatttgatcgtggttaccaggtaattgcagttcatccagagtgcaatttgatcttctttcattatggattggacaatactttactggcatatgaaatggatcccaaggaactgcgtgttgtacgcaatctcggacatcatacctgccagccagttctaccatatgttccattgttctctgtgccgttagctcatgggcactaa

SEQ ID NO: 57583 - DNA, 676 bp, Oryza sativa
  Clone ID: PAT_MRT4530_59380C.1
tcaagtaatgagtatatcttgtatttcgaagaggcggccaatttctaaaccatgatcaagatcaaacattttgcttgtaaggttgtaaagaaaatgaaagctactgtataatgaaagaggatcacaattaatatcacagagcatctttgatagctttgataataataactgcatgcaacacccactaaaagtacggtctaacattgttaatgttttgataggatactcatataccttttgcttgtctgatgcaccatacatatgtgatcctttcgtttgtgcttccaagcaggcctgttggttaccgcgtgcttgtaggcgctcgatgcggcacagatcttgcagaaccaagctcgcgtgggatggagaaggagacgaaatgacggcgacagtggacatcgaactcgcaagaaggtggcggcagctgccgctggctcgctgggaagacagcgacggtaaccactggctccacacgacgtcagcgacggctggttcagcgagcttgagaggaaggcagcggctccggcttctcaagctcgaggggaaggcggcggctgaccacaggctccatgagaccatgagcaggcggcggaggatttttgggaggggaaaacggcgagtagccaaggtggcggcggctcgtgggaagatgagagggattagggtgccagagtag

SEQ ID NO: 57584 - DNA, 501 bp, Oryza sativa
  Clone ID: PAT_MRT4530_59381C.1
atgtgggccagggctgcatggtgggaccttattgtcagcctcacaacgttctccacacgggcccacggccagaacactcacgccacgcgcgtgagcatggacgccggcaacccaatctctgggaacgcgaccgcgtcaacttgggacgccgccgcgctttggacaccgccgcatcaccattgttcgttgcccggcttaccacggtttttgctggcggaatttagagccgccacaaagcaaaggccagtgaagatcaagatcttcgctggcggttatcgaccagaaccgccgtcgccggcgtcgtcatccttgaagtcccatccaccatcaccgtcgccactaccgagccccgtcggcctcaaccgcctccgcctcgacgacgctgctgcagtgctgccgagccccggcgacctctaccgcctcgacgaccctgctgccgagcctcggcgacctccaccttctccgcctcgccaccgccgctgcaaagccacgcaacgctag

SEQ ID NO: 57585 - DNA, 1616 bp, Oryza sativa
  Clone ID: PAT_MRT4530_59382C.1
ggtccaaacatcactatgtatagatcgcctttatatatacgtacatgtcctttgcatctttgaacagacaaaaaaaagtattttctttgatggaacacaaatacagtacttaatacacgagttccgcttgagttcattccagctacaacaagcttgaaacaccgacactacactgtctaatcgaatcgtgcaccaccttcaattcccctcctgacatcacaggcttatgtcacactcctacgagagcccaccaaccccacccatggcagcagcaggggcatatggcacgccattttccgcggtgttccctcccacgacgaaaaattgcacgcgaggaacacgcacgaaaaggtcccgcacgccatccacatggccctgtgtacgtaacacagttctcacggtcatctcaacctggcggcccctccgctgctgctgtacctcgcccacgacgcggccaccacctccggcaccacctcgcgctcgcgccccgccgccagccgcgacatcgccctcgccctcgtcaccttcttcaccagcagccgccacgtcttgtccgccttctccgcccgcatcttgcccttgaaatgactgcacagcggcacgcggcatgggcggtcgccgtcgtcgtgcggcgccgcccggtcgcagacggaggcgtggaggcggaacagctgcaccatgcgcttgcagcgcgtgcacccgccgcccggcgcggccttgcgggcgccgcacgtcgcgtagtgccgcatcagcaggcgcaggccgcggcacggcggcgcgtcggtgtcggcgtcggcgtcggcgtcggcgcaggagcagccgtcgtcggagaagatgtgctcgagggagtccatggcctcgccgagctggcggtacgcctcccgggacgccctctcccgcgcccaccgctccctccgctggtcggcgtcctcgaggagctggaggatctcgagctccagcgcggcgtcgtggcggcgcgcgaagcgccagccctcggaccgctcgacggcggcgaagtccttggccgcgaggcgcgcgcaccgcaggtacagccgcggcgcgtcgcagagcctggcgagcttcagcatgtccaccgcgtgctccggcgtgagccgcgccgtcacggacgcctccgccgcgcgcttcagccacccgatcctgtacgcgtgcgacagcgccagcagctgcggcccgtgcgcggtcaccacctcctcgtcctccggcgtcaccctggaagcgtagagcaactggaggaaggcgaagacggcgtcggaggagacgccgaggacgcggatggtgcactcggcgttccacccccgccgtgcccgctcgatcatccgctccagcaccggcgacgccgtgccaagaacgaacgaatgggcggcgatgctcttcccgtccgacgtgacgacctgcacgtcggcggccaccgccggccggagcgcgtccagatccgcccactgcgtcatcgatcagaaaatacccaaattctcgtgattaacaattcaacaggccggctaaccaagaaacgatctactacggaaaccaaacagagcaacgcaacaacaagatggatcgatcgatcggtctcgcaacgatgatctgagctgagaaaa

SEQ ID NO: 57586 - DNA, 2219 bp, Oryza sativa
  Clone ID: PAT_MRT4530_59383C.1
actagtggatcccccgggctgcggcccccgctagtctcctgttttttttttttttttttttttttttttgtgcaaaagttgtttctgcttggcaatatatgagagaatgtctgcacatcagctgaatattatatacacatacttcacaaaccaaagcggtgaagttaaacgagcaagaagccaccctcggatgaatgtcatcgatcatttacaagcaatgatgctctactcttttaaaatacaagcggcaaccacgaaattaacaaatgtaaccaacgcgaaaccttaacagatatacaacagcaaatatagacacgtgtggaacaaccgtagtagctagcttggaactctagaactatttcttcccacccagcaaaggttggccactgccatttggactaggcatgctcgccgttctactcatcttgcctccaccataactcttcacatcaatcaaatcaccaaacaaattgtctggcatgtagtatggtttggccgcagccgctgtagtttctgatggccgtggattaccattcattctaacatcttgagccattgccggaccacttcttgtttgagaaacaaaggagttgtactgttgcatcggtttggttgcaggagatggcacttgttgccttggcggagcagcatacggcgatgaaggagctggataggtatttgtgggggcaacagaagcaacaggagggttctgcatctggtatgttgcaggctgaaaaggattggttgagttgacacttgctggcatcgcccatggtggtgctgggtagctagatccatattgttgcatgggctgagtttgatatgctcctccagcctgtgtgccctgtccagcttgggcccaaggtacaacataattgttgtatggggtgtaagcttgattcgttggatatgcctgctggttagaagagtaatgtgatccatttgatgcagcaggctgatagtttggtggtaattctggcccatttgacgtgacagactgctgcgtgccattttgggtctgtgaagaagaatctgtagatgcttcaggggggctgtacagggtgaggcttagaaggtcgatcatgtcctgctctcttgtccgagtaccactggcaggagacgagtcaacaggcaccactgcattgcttgcaacagaagatgaggcttcagaagttactgggtcaacgggtacaagggcctgatcaccagcactggatgatgcctcatcactacttatcacagatttgttttttcttcttgctatctgagcgaactcgtcatcttcatcctcttcaactggaggtgcggatggaggtgcaatcggaggtgcagatggctttatttttggatcttctctgggtatctcgtctttccttggtgtttcgaccggcaaaggagctccagaagcaatggcatcatgttttgcaagtacgctctgtaagtgatcattgatttctaggccttgcttcagtagctcctcatttcctgtggaactgacaaatcgcatgagcttttgttgatttgatcggcattgggtgacaagctctgaaataatttcatctttaacagccatgcgatcagaaggattcaaagcattcaccatatcacacagaagttctgttgtatctctaatattatttaagtcccctaaactcagagtttcaacatcggatgtcattctctcatttagacttccagcaggatatgtaggtgaaccataagactgagtatgatgtgttgcagggggagtaaatattggaggagcatctacagggcgcctgggaaacattattcctgacctcttaagttcaatgtatgaccagtaatactgtggatatttgcctccaggtccaccaaatgcttcttgccatgagtccagaagtatcaatactttatccctcacttgagtatcatgcttcttctggacaattctaaccatttcttgcaaaatatgttgttcaacaacttcaaaatggacatattcaccacagttcttcatcattgtctccaacaacgtcaaagtgaaaaactgaactcttggatctttatgttgcaaccgcttcttcacagcttttaccacatcctttgtttgccagcggtcggcgttgagggtgtcgcatatctcgaggttgatggcccagtcggggccctgcagcaggtggctagacgccatgtccacccgaagtcgaccccggcagcctcgccggcggcggcccaaa

SEQ ID NO: 57587 - DNA, 455 bp, Oryza sativa
  Clone ID: PAT_MRT4530_59384C.1
cggcccgtgcgcggtcaccacctcctcgtcctccggggtcaccctggaagcgtagagcaactggagaaaggcgaagacggcgtcggagaagacgccgaggacgcgaatggtgcactcggtgttccacccccgccgtgcccgctcgatcatccgctccagcaccggcgacgccgtgccctgaacagagaagaaccagaagtccatcttacaagaacgaacgaatgggcggcgatgctcttcccgtccgacgtgacgacctgcacgtcggcggccaccgccggccggagcgcgtccagatccgcccaccgcgtcatcgatcagaaaatacccaaattctcgtgattaacaattcaacaggccggctaaccaagaaacgatctactacggaaaccaaacagagcaacgcaacaacaagatggatcgatcgatcggtctcgcaacgatgatctgaacaa

SEQ ID NO: 57588 - DNA, 279 bp, Oryza sativa
  Clone ID: PAT_MRT4530_59385C.1
ggagcagacaaaaaaaagtattttctttgatggaacacaattacagtacttaatacacgagttccgcttgagttcattccagctacaacatgcttgaaacaccgacactacactgtctaatcgaatcgcgccccaccttcaattcccctcctgacatcacaggcttatgttacactcctacgagagcccaccaaccccacccatggcagcagcatgggcatatgggacgccattttccgcggggttccctcccacgacgaaaaattgcacgcgaggaac

SEQ ID NO: 57589 - DNA, 333 bp, Oryza sativa
  Clone ID: PAT_MRT4530_59386C.1
catccgatgtttcgacactaatttagagcagcacattgggactcaattcacatcacaccgggcatcgacgacatcagaaacctacaactttttcagcggccaacgaacatcccagcagctcaccatcgctcctttattcttctttgtttgttgggtatttggaatcatcgtcatgatgtaatcttcagaaaccaggagccctccttttaacgattacttcggcgctgcatagatgacgccactctctgggtcgaacgcctgaaaattcaagacagacaggttgcttccgcttggaagcatgtactctcttcccccctacttgtttcttcctga

SEQ ID NO: 57590 - DNA, 528 bp, Oryza sativa
  Clone ID: PAT_MRT4530_59387C.1
atggagggttccggtgctcaacctgtcggcggcgcggcggcggcggcggcggcgccgaagcggaacaacatggactacaccctcgcggcgctgaagctcttcggttgccagctggccggcgccaccgaggcccctccctcggagtcggacggcacctcgcaggcccagatgctctacggcatccgcttccagcgcgtctggctccagggcgtggtggtgctggcggactaccgcgacggcgccgggcacattcttgtggatgacggctcctgcgtcgccgagatcacgctcacaccgaaggaggccgaggggcagccatggcgagaaggcatgtatgtgatggttcttgggtcatatagtggaaaggaatctcttcctcgggccaatcggccagtgattaaggtgcataagctagtcgatctttccgcgcagcccgaccgtgaatcaatgtggtacatggaagtagttgaggccttcaacttcttttacttgcagttctcggctgctagcccactgatgaagcgctag

SEQ ID NO: 57591 - DNA, 381 bp, Oryza sativa
  Clone ID: PAT_MRT4530_59388C.1
gaggaaggcgaagtcgcgaagacggcgtcggaggagacgccgaggacgcggaatgatgcactcggtgttccacccccgccgtgcccgctcgatcatccgctccagcaccggcgacgccgtgcccttcacaccaaacccagaaacagaaaaccatcagcctcaatgcaaggtcgtcaagaacccctgatccatccagaattcaccaccagtaacagagaagaaccagaagtccatcttacaagaacgaaggaatgtgtggcgatgctcttcccatccgacgtgacgacctgcacgtcggcggccaccgccggccggagcacgtccagatccgcccaccgcgtcatcgatcagaaactcccaagaatacccaaattctcttga

SEQ ID NO: 57592 - DNA, 1676 bp, Oryza sativa
  Clone ID: PAT_MRT4530_59389C.1
cccgggctgcaggaattcggcacgagggcatattgagcttcgttcgcagccaagcaaacgctcgcgcgcgcagccggcaatggcgtcgttgtctgacccgaactcgccgccgccgcacgtcgtcgaggactgccgcggcgcgctgcagctgctcagcgacggcacggttgtccgcgccgccgcgccgccgccgccgttctacgtacgcttggacatcgacgacggccgcgtcgagtggaaggacgtcgtgtacgacgccgcccacggcctcggcgtccgcatgtacaggccggcggcgacggggggagcggaggagaagctgccggtggtggtgtacttccatggcggcggcttctgcatcggctcctgcacctggcccaacttccacgccggctgcctccgcctcgccgccgagctccccgccgtggtgctctccttcgactaccgcctcgcgccggagcaccgcctgcccgccgcgcacgaggacgcggcggcggcgctcatctggctccgcgaccagctcctctccgacccgtggctcgccgacgcggccgacgcgcgcaaggtgttcgtctcgggggaatccgccggcggcaacttcgcgcaccacctcgccgtgcggttcggcgcggcggggctggacccggtgagggtcgccgggtacgtcctcctcatgccggcgttcatctcggagaggccgacgccgtcggagctggcggcgccggccaccgggttcctgacgcgcgacatgtgcgaccgctactgccgcctcgcgctgcccgccggcgccgacaaggaccacccgctcgtcaacccgttcgggccggcgagccggagtctggaggcggtggacgtcagccgcgtgctggtggtcgccgccgacggcgacctcctcagggacaagaacgtcgagtacgcggagcggatgaaggcgatggggaaggacgtggagctggtggtgttcgccggcgaggagcacgcgttcttcggcgtgaagccaatgtcggcggccaccggcgagctcgtcgaggtcatcaggcggttcatcgccggcgccgccgcaaaagcagcagctcaaggtatcaccagcgcacggagcagtagtacgaagagctccaaggctatcacaagaagcaacagcacctggagtttgaagactaccacacagagcagcaacacttgggctgccaaggttgtcgctcggagcaacatcgccagaaatttcaagaccgttgccaccacacagagcaccggcacccagagatccagggccgccaccgccgctgtacgaagcagcgccatccagagatccaaggcaaccgccgtctgcacacggcgcagaccaatgagttcggcaccagcataagaagaagattctgtccttcaagtcgcagctccaactccggtaatcatcaccaccagcaatcagagctcttcgcttgaacgtaaccaaacgggacatagccacagaaacaggaaaaacctgacaaagaaactacaacctagctacactatactaataggggaggtggccggacccctcctccaaccatcatcggcggcgaaccaccggaatttggggggaagaggggctggagaagaagaaggagctactgtagcaaaggggaaagttgggaggagaggaggtggggaaagttgaccatccaacccctgct

SEQ ID NO: 57593 - DNA, 1115 bp, Oryza sativa
  Clone ID: PAT_MRT4530_5938C.1
atgaatagggtacccactagttggggttttgtttatcctagggtgaacaagccgaggggaggggcgcgcggaccgggtccacgggggtggggcccacgcggcagccccacggcccacggtggaccgggcgcacccgggctcacaccggccggcaccgtgggtcccacgcgtcagccgcacctaagggcgcgggcggctgatagccgggccccacgcggcagccgctcggtgcgcccgaaggcgaccacgccggcgcagcggcaggaggcggcgcgcccacgcccctatggtcgccggcggcggccataggcacggcggagcggctgccgagagagggggagggaagggggaaaagaagcggcggtccacggctcaccctaggtcgacggcgacgacggaaaggcagccggagcggaggaaggcggcggcgcggctcgggtcgacggggacggcggcgttccggcggtcggcgagtgaaacggaggggtggacgaggtcaccgaggacgcggcgaagccgaaggaggcggcgccgagggggaaggtggtccggggcgacgacggcggcggaccggagctcggcggcgacggcggagagagagagcgacggcgcgagctcgattccggcggggagagagagcggcgagaggcggaaacgaacggaggaggtgcggggagggtttatatagggttggaagggggagagagcggccggacgaggaggaaacgggcgcggaagatccggccgccattgatggcgccggcgaggttaggggagaggtttccaaacgaatccgagggagagagggagggaaaaatggggggaaagagggagggaatcacggggaatatttccccccactttattgcgcgtgtggacggcgggaggcggcgggattcgcggcggcggcggcgttagggcacgggcgaggcggcgggagcggcgggaggacagggatgacaggtgggccccacccgtcagcgagggtggcgggtgggcccgcccgtcagcggcgcgcgcgcggggagaggccgagtgggccgcggggagaggagggagaggggagggagatgggccgggctggcccaagagagagagggaaggaaaaagagagg

SEQ ID NO: 57594 - DNA, 423 bp, Oryza sativa
  Clone ID: PAT_MRT4530_59390C.1
gtttgttgagagttgagacccgagagagcaccggggagagagggcgccgcaatggagggttccggtgctcaacctgtcggcggcgcggcggcggcggcggcggcgcccaagcggaacaacatggactacaccctcgcggcgctgaagctcttcggttgccagctggccggcgccaccgaggcccctccctcggagtcggacggcacctcgcaggcccagatgctctacggcatccgcttccagcgcgtctggctccaggtcgcctccccaccattccctattccccccatctcctagctccatctctccctgacgacttgtggcggcaggcagggcgtggtggtgctggcggactaccgcgacggcgccgggcacattcttgtggatgacggctcctgcgtcgccgagatcacgctcacaccg

SEQ ID NO: 57595 - DNA, 150 bp, Oryza sativa
  Clone ID: PAT_MRT4530_59391C.1
atggcgggagttattaatgtcatggaagagcctgaaactggtggcaactggcaagtagaaggtaagaaccccaagaggcaagtaggcaaccgcaaccagccaaccacaggagttaggacaggagacatgctcccaaagaggcaaagatag

SEQ ID NO: 57596 - DNA, 422 bp, Oryza sativa
  Clone ID: PAT_MRT4530_59392C.1
accaccgaaaaaaaaacaagcccgtcacattccgaaaaaaacggcacaaaccccacacacaaaaaaaccccacgggggaggggaccccgcacctgtcgggggagaagaaaaaaataaaaaaaaggggggagcccacatcaaacgaaaaaaagccgctaaagcaattagggaaaaaaaacaagaccccacactgcagtttatcaaccgccccggccccccccccccaaaaaaaaacccgacaggggcggttgccaaatttttaaaaaaaagcggggaaaaaaaaaagaaccattcgaaaaggactccaaaaaccttggggcacaatcaaggggcagccttttgaaaaaaagggctctaaggggttcaaaaaaggggtgggaaaaaaaccccgcgtgtggggccccaacctttttcaaacaccc

SEQ ID NO: 57597 - DNA, 888 bp, Oryza sativa
  unsure (1)..(888): unsure at all n locations
  Clone ID: PAT_MRT4530_59393C.1
taccccaagttgggcccccccaaataggacaccctctcccaannaggcctcaccggagcacaaccaccaatgttcctcgcctngagccccctccccagacacgtcaacccaccaaacaaaccgcctccacaccccgagtccgcacgcccggggtctaacccgggtctgcaagggaaccccccccgtccaccaccccacaaaaactaattgtgtacactttccgccctcctaggcccaacctcccaaaacctacncgtctagggcccaacaagggggtccgtntccccgccccctaaccccccacggcgggagaaccacctgggccccaagaccacccccacccccnctggacaacaacctcccnttggagnccacacctccaacagcgcgagagacgcgacacccaacaagaaaaaactgtcggttccacgcctcccctccccgagaaggaccacccccgccccctcaagaccctgtcctccgccctccccnaagcgcnggaacataatnttcccaaaagttgcaccgtgtggccgcaccccgagaagccccaccccccgcagangcacaaccccggaanaggaccacncctttcccccacgagctcgggacgangcaaaaaaacacccccctttttgagctccagnagggcacacaagccccaacacacaacgtacccttcaaacgggccaaaaaaccccctcnngnagggctaccgtttcggaaganacnngttccccctcctccccccctcgcgtagaaaaccggggggctcctcgtncccgagaactcccaaaacaaaaaaggggttcctccccctcccccggaggccgggggggtgcaaaaaccggcgggtctanagtcacaaacnngccattgaacntaaaa

SEQ ID NO: 57598 - DNA, 327 bp, Oryza sativa
  Clone ID: PAT_MRT4530_59394C.1
atgtcgccgccgccgcctagccactcccctactctccgtcatcagccctcgaggtccgtcacgtacgctgtcaccgccgctcactgctacctgaccgcctcccgccgctcccgcctagctagcaccgtcacttctcctcgtgacgacgtgatcctcgcaccaccgccatctcactatcgcccacatgccaagagcatcagatgcggcctcctagaatgtttagccgttgttgacctcctggacttggtggagcatggcctccacattgctgccctcgcgcaggtgttgcctcctcaccgtgctggctttgttcatgatttgtcatga

SEQ ID NO: 57599 - DNA, 265 bp, Oryza sativa
  Clone ID: PAT_MRT4530_59395C.1
ggtgtcaaactttagtaaatacatcagaaatcctgctaaaattttagcaatattatcaacttgccaaaattttgacaatgttaaaatttgataaggtttattttgactacaaaataaaatccaatagccatgggccagccgcctttcccgttgctggtgtccaccgctgcccctctctctacctatctaccgccggggatctgggcccccccgatgcaccggcggtggcgggcaaggcgcgcgaggtggcgagcatgggcgcctt

SEQ ID NO: 57600 - DNA, 641 bp, Oryza sativa
  Clone ID: PAT_MRT4530_59396C.1
ttttgatactttctagattgatagcgtagaatgtggattatcatagacataaattggtaacaaaacaaacattcaaactctactattgaaacttaaaaaaaactaggactcactccgtttcacaatgtaagtcattctagcatttttcatatttatattggtgttaatgaatctagacatatatatatatatatatatatatatatagaaaatactaaaatgacttaaattctgaaacggagaaagtaggacaaaaattggttttcgagggaagaacaaaagttggtttcaatccaacccgtctccgcttgatcaggtgcgtcacccgtggcgccagcgtcaaggctgtggaccacaaaatgaaagagaaacccaaaccataattgccccttcaccacttgattaatttatcctctcctcgcgtcgctgtcgcgtctcccagttgttgggggagtgatagtctgaggagaagaatatcatgacacaactagccaaccaaccaaccaaccatccttttgcttttgcatctcacacttgtgtatacaaatgaaggaagacgaattacattgcatctcctccccttccatttcataatccacccccaaaatagcagacaaaaaatatcttatcaataattaaat

SEQ ID NO: 57601 - DNA, 330 bp, Oryza sativa
  Clone ID: PAT_MRT4530_59397C.1
gtccgcggcacgccgtggcggtcaggcgacgcgcgacgtgcggcgcgccataccgtcatccgggacagctacctcgcgtgtcccgtatggctctgcggagggcgtgcggcgcccgtggctgtttgctatgtcagttccgtgacggggcgagccgatgatcgtgtagggacgggcgcggttgtgctgacgaggtgtgatggtgtgagcggtcggtgagcccgcggacggaagggaagggggacgagcggaggggcaagacgtttctgggaagaatgaagagggcgcgctagcggggatcaatgaagccttaagcccatcttcccgccgagc

SEQ ID NO: 57602 - DNA, 750 bp, Oryza sativa
  Clone ID: PAT_MRT4530_59398C.1
atggtggcaacgacgggaaagggagaagagaagaaaaccctaaccctagctttggaagaggaggcgagaggtagaaaggcagcgtgctcaccggagataatatggcggccggaggagagcgccgtgccgtcgccatcgcctccgggtcgcgccgcccccgccgtcgcgtcttcgctgcaccgccgcctcctcgaggaaaacttccacgccgcctcaggagatgatttattcccgggcctagagaagagggaaaccccgtggtgggccgggctaaaatcagcggcagtgcttaaccgaacgcacaatttcgcatgggccgggatttttttcctcgccggggtgatccacggggattgggacccgatcccggccgggaacggcccaaccgaacaaggccttactggggggattggggatcagacgcccaagtctatcggtccaggacgggttcgcgcagtgcattggtggcctcctttccgtccccgtgcaggagctccacttcgacgccgagacatggagaggaccggacggaccacgagcgtggctggcaacgaggaggcggagtccggcgtcgccgagcgctccgtggaggtggaccgggagctggtccgggtggaagccatcgacgacatcgcgctggagcagggattagttatcgttttttctgtttcggtagtagaagagatcgagcagggatcggatcgtgggatggcatggttagtccttgatctggcaagatcgcgcatgtaa

SEQ ID NO: 57603 - DNA, 600 bp, Oryza sativa
  Clone ID: PAT_MRT4530_59399C.1
ctacagctgggtggcggccggtgttcggcgggagctaggcaacggcggcgacgtcaccgagctcgaccactggggaggtctagggacctccgttcccaccttaccaacgcgagcgtgcttccccagagatgcatccatgactttttctctggtgctttccacggcgacgtaacgcggcattgcggccacaccatggtaggtgcacccggaagaatcgattcgagcagcaacaggaagttgaccggcaggacagacgtcgacgacgtcgctgttgtcgggatggggactactgacggtgtggcgaacgaagacgcggggagtcgacgccaatgggacatggggatcaacggggcttgccgacctccccgtccaatggctgccgctccctgcccttttcctcgctggccgacagccaccgcccttctccttctccgtgcgtgctgcctttgggccgacgaacacgagcatcttcgtggagaagacggagaagaaggcgcatggaacctggtgctcatttgcgatgggcgggagccagtcgcgagcgaagtcgacgatgacccaattgggcttcttgcctccccccctgtgaagagcccccat

SEQ ID NO: 57604 - DNA, 924 bp, Oryza sativa
  Clone ID: PAT_MRT4530_5939C.1
atggccgggaatgacggagacgaaaggcgaggggacgacttcggcggcgatccctggacgaaggcgagacgtagccggcgcaatgcttggagaagcggaggcgaggacgaagacgacgacggggctgcagcggcacacttgacggacgcggacgacggacgagaacggcttgacagagggacgaacgccacgacgaccgggaacgacgagaggacgacgacaagaaccggcaaggaggtgatgaggcagccggcagcagctgcacggagacgaggacggcgtggaacactccgctacgatgacgacgagggaggagatggcgacgtcggccggcgcacaggcacggcggaaggggttgccgaaggaactccggcgaggcggagggcaagaccgatgcgggcgacggcgttccggcgaaaccgagggcaggccggggtggagggcgacgcggcgacgtcgagggaagatggcgatgacgacagtcgctgcaccggcaaggcggcacaggcggctggaggcggtacagtggcggcaacgccactgttttgccggcgaggacacgtctccggtggtttccccgcgaaacggagggctgaccgggggagaggaggcggctgcgacgtcgacggaggagatggcgacgtcggtcggcgtaccagcgatgaacagcagctggccgaagacggaacagtggcggtaacgccactgttgccggcggggatgcacttccggaggtctccacgggcaacagagggcaggccggcgcagaggaggcggctgcgacgctggaggaggcgccggcatggccgaccggcgctcgggcaaggcggtaggggcggctggagggtggccggcaccgaggaaagagaaggaggaggcggggagaggtggtgcagccacggggagggcgcaggagggggctaa

SEQ ID NO: 57605 - DNA, 1356 bp, Oryza sativa
  Clone ID: PAT_MRT4530_593C.1
atgagcttgacggggcatggcggcggcggcggcgaggggacggcgccggcgttggagctgctggatgagtactggttctttagcaacacgctggggaagaacgggaggcatggcggcggcggcggcggcgggggtaggccgccgatgctgcccaggtcgccgtcgacggtgagtggtggtggtgggcggccggggaaaggtgtggaggcggtggggacgtcgaggctgttcgcgtccgcggggcggaggctcctccggacgccgtcgctcccgtcgccgcgcgtcgggatggagatcgccaaggaggacgaggaggtcgtcgaggaggccccggcggcggcgggcggtggtggcgatcaggaagccgacgcggaggacgacgacctgaactggagctcgatatacgagggcgtgctccgcaccaggatcgccgaggaaggtgtcaggtcggcgctgcggcgggcgccgtcgatgcccgtcacgtcgtccgcgacggtggcgcgacgacgacgcccgccgcgaggatacggcggcggcggccaccgggtccacgacgccgggcatgtccaggctcaggcacgcccacagcacgctggagagacactgccgctcgcacgcgcccacccccaaggccgaccggacgccgagaacgtcgggcggcggcgacggcggccatcggaggcagccaccgcggcgagagctgcggtcgttcagcgcgaaccagcagccgctcgtccggcaccagagcctgttccacgacaagaagtggaagagctcgagcgacctggagtcgatcgaggtgcaggggttcagggacctgggcttcgtgttcgaccaggaggagctccgcgagagcctcgccgacgtcctccctggcctccgcggcaagcccacccccaccggctccggctccgccagcgacaacgacgacgcaaacacagccacaaccgccaccggcagcgacgccgtcgccgccgtgcggcggccgtacctgtcggaggcatggtaccacgtgcggcggccggcgccccgatcaccggcggcggcggcgatgaggctgcagcaggcggacgcgaggtcggcggcggagatgaaggaccagcttcggatgtgggcgcaggccgtggcgtgcaacgtccgacaagagtgttaaaatcggatcgatacatggcgtcgaccggaccagacacacgatcacacgagttttttttttttaccgcggaaaccagaagcaccaactcgatgatactactaccatttcagtagttgagttttgttactttcgcctgcaaattccattccaatccaagagggtgatactccatccctcgtgccgattcctgcagcccggggatc

SEQ ID NO: 57606 - DNA, 383 bp, Oryza sativa
  Clone ID: PAT_MRT4530_59400C.1
tattccgctccgtcctcacgtcgtcgtgcactcgtgctccatttccgcgtctctccgcgaccaggctctgcccccccagcgcgacgaactgcccggtgggcgatcgctccaccgccgccggcgacctcactgccccccaccaccaccgcgaagccgccggcggcaccccctccccccgccctcccgcccgccgcgatccatccggtacaaagagtttatttgctgttgtgagctatccgaggttccaaatccaaaatgagtaccactaatcactatcaacacatcaagtcaaacaagcctgttctaggcaaagcaagaaaattggaggatctaatgttaaaaagtgacaaccggatatgtgctgattgtggtgcacctgatcc

SEQ ID NO: 57607 - DNA, 129 bp, Oryza sativa
  Clone ID: PAT_MRT4530_59401C.1
atgatgagcactgacgccgccgtctgtcgacatctcaaggagaaccaagacaaaggttttcaccctacagcccacccaagagagagggcgcggctcgacaacgcccccaagaggaaaaacgattcctaa

SEQ ID NO: 57608 - DNA, 592 bp, Oryza sativa
  Clone ID: PAT_MRT4530_59402C.1
ctgcaggaattggcacgaggtttagtgtttggtaaaatgtcgaagctcaagaagcatgtatgtataatagctgctgaatgtttcatttcttgcacatgtggctattcagatcatggaggatgcaggccactttgaaggggttttttttttcattagtttctgttgtggagcgagaaggttagatagatctcacaaggacaaggagaaagaaatctggggatatatgacaataatgatattacaagggatccaataactcatctttcctgattaatccttacaactttagcaaagaatatgtgcaccgtttcccctttttttgtgaaggtagttaatagacgaagagcagggggcatggcaccaccacagggagtgcaacatatgcggcgagcatccgcatactgtaaatgcatgcctttaccctgaaatgactagataatatcataaagaaagtatgatgcctgggattgtcacctacgcgtttattccatcgatatcaccttttgaaaatggctaggggtacggtagaattccgctttctattgtgataatgtgatattcaattgaaaggaattggtatgtgaaataatct

SEQ ID NO: 57609 - DNA, 338 bp, Oryza sativa
  Clone ID: PAT_MRT4530_59403C.1
ggccgccctttttttttttttttttttttttttttttttttttttttttttttttttttttttttttttttttttaaaccaaaggtataatatccttttataaacaattaaacggggcttggaagggttaacaacgcttaaacacaaaatgttcctttgattaacccacgctaaattttgctttataccccccacttcaacgttacagtaattaccggcttttatgcacaccttgccgtttccggagccggagaagacgagacagtttgccctcgacgcggcagtaggggggggtttggaacttggggcccttggccccgggttagcctttgcccccg

SEQ ID NO: 57610 - DNA, 546 bp, Oryza sativa
  Clone ID: PAT_MRT4530_59404C.1
aaaaacaattataaaattttttttgggaaccccccccccataggggggaccttttttttttttataagtccttccaggtcccaaaaaaagccccccccccccccggggggccttttgggccttttttttaaaccccccaaggtttttttattttttgcccccttccccccttgaaaatgcgggaaattaaaaacccctgggtcaccccttccgggggaccggggggtccccccggaatttcgggcccggtgccctggggggtccccctttttcctttaaggggggcctataaaacttgggggaaaaaagggacatggtgtttccctgggaaaaattgtttcccctccaaatttccacaaaaaatagaaccgggaagaaaaaggggaaagcccggggggccctaagggggggcctccccccctttattggggggccccccacggcccctttacaaaggggaaaacctgtcgggccacctgttttaaaaaatccccccccccccggggaaaggggttttgttttttgccccccagggggttttttttt

SEQ ID NO: 57611 - DNA, 177 bp, Oryza sativa
  Clone ID: PAT_MRT4530_59405C.1
gtgttggtatttcttaacaacattactagaaatataattctcagcaatggcgcagaaatatgtttggaatattatggttacagagttcatccgcaagcgcacagatatatcattgtagcatttcacctgagagtattccaagggtatcgtatttattttatcccgtgggaagatcat

SEQ ID NO: 57612 - DNA, 892 bp, Oryza sativa
  Clone ID: PAT_MRT4530_59406C.1
ctatcgtcggatccgcccatgggagaagcagccaccgccggatccgccaacaggagccgctgcaccaccaccaccaccaccagcagcactgccctcaccactgccagcattgccaccgccgagaaggtgaccaacaccttcggcgcgtaccagctcgacatcccggcgatcgacggcttcgagtgcgccacctccgccgccgccgccgccgactccttctgccgcgccgcgtcatcgacaacccctcgccgctctgcaacgtgccggcggtcaccaccaccgtcggccacatctcctcctcctcctccggccacgaccacgaccagcccaacgcctgcctctacaacctcaactccctctactaccgccccggcggcgccaagaacggcggccagtgcggcggcaccggcggcggaggcgacgtgccccccgccgcgctgaacacgtcgctgttctactgcccgccgtggccgtggccgccgatcccgttctgcacgccgcgcccgtggttcccgcccatcccgttcctcacgccgccgccgccgccgttcctcccgttcccgctcccgccgatcccgttcctcacgccgccgtcgccgccgccgccggcgttcccgttcccgctcccgccatggccgtgggcgccgccgccggcgttcccgttcccgcacctcccgccaatcttctcgccgccgtcaccgcccccgccgccgccaccggcgttcccgttcccgttcccgcagctgccgcctctcccgcacttcccaccgctgccatcattctacccatcgccacctccgcctccgccgccgccgccgccaccgccgccatcgttcccgtggccgttcccgccattggcgccgcttttcccgccatatccatctcctccacc

SEQ ID NO: 57613 - DNA, 405 bp, Oryza sativa
  Clone ID: PAT_MRT4530_59407C.1
atgggatacattggcgctgcggctgacatggacgagagcaactgtacgagcaccgtagaccattgcgcctcttgtattctccaaagacaaagatgttgctgctttcgcttgctgaggctacttgagctacttcgtctcttaatttgctccccagatggagcaaatgatgctatctcattcagttacaataatgaaatactcctatatcagatacctgtttgtattccgacggtacaagctgatgttatcagcctggtttaccgtctttttaaaatgtcgacaaacctgtggtggtgtgatctgtatgcatggatgcagtttgaattacagaacctgcaggatctggtattccaagaaaaactgaattatcgattgctgccggaaggaatttctgattttgaatga

SEQ ID NO: 57614 - DNA, 1846 bp, Oryza sativa
  Clone ID: PAT_MRT4530_59408C.1
gagaagagagaactagtctcgagcttttttttttttttttttttaatagccaaattaagccctaataataaaggcctatcatcatcatcatcatacataagcagcctagcaatggctccatattcttgagatcatcatatcgatcgacagaacaagaagtctactacttataaattataatagctatatagcctcatatatccccttattagtttgggatctggtaggaggtctcatcgatgggcgccaccttgggcacgtcgacggggagcatgtccacctccttcatccacgggttgtcgccggcgtcgaggcccgcggcgtcgacggtgcgcagcgccctccacacggcgctgttgcacttgaacccggagccgaaggcgatctgccacacccggtcgccgcgcttgatcctccccttggcctcgcagtaggcgagctcgtaccacagcgagctgctggacgtgttgccgaagcggtagagcgtcatccgcgacggctccatgtcccacggcgagagcttgaggctcttctcgagctcgtcgaggacgccgcggccccccgcgtggatgcagaagtggtcgagggcgagcttgaagtccgggaggtaggccttgacgtcggcgcggaagacgcgcttgaggacgacggtggcgaggaagcggagctgctcggagatggggaggacgagggggccgagggttgtgatgttggtcttgagggcctcgccggcgaccaccatgagctccttggagagggagacgccgacctcgccggcgtcgtcctcctcctgggtcacgcacccgaagctctggtcgtgggcgccgcggtgggtgcgcaccgtgtggatcagctggtacttggcgcggccgcggcggtcggcggcgcggttggagaggaggatcgccgcgccgccgacgcggaacagggtgttggtcaccagcatcggccggttgttgcccatgtacgcgttcagggtgatgttctccgtgctcaccaccagcgcgtacgtgttctcgtgcacctggaggaggcgcttggcgagatcaatggcgatgatgccggcgctgcatcccatgccgctgaggttgtgggagacgacgccggggcgcatcccgtagcggttgacgatgagcgaggtgaaggagggcgtcggggagaggaggctggagttgaagatgagcacgccgacgtcggccgccgcgacgccggacttgcggagcacctcgtcgacgacgccgaagatgacggcgtgcgactcctccctcgccgtgcggaggcacatgtccacggggaggctgatcagcgacgtcgggaagtgggtcgcctccccgagccccgaccgctccagcatccgcttctggaacgccatgctctcgccgctgaaccgcccgcaccgcccgaagtgggcgatcgtcttggcgcgcgacgcctcgtgctcccgcggcgccttgtagccggcgaggtcgatgaggtagacggggcgcgggcgggacgcggcgtaggtgtacgccgccagcgccgccgcccagcacgccaccgccagcgccggcgcgctcgggcccagctcgccggcgaggtcggaccacagcgcgcgcgcccagcgcatggtgcttccgccggccgccgccgccgccagcagcgtcgacagccgcggcgccgccgccaccagcgccgtcaccgccacgatgtgggggaggtggcgcacggcgcggcggaacagcacgccggcgtggttcttggtcgccagcttcaccgtcctcaccagctccctgtccattgttatcaccagttcacctctcacctcctctctcttctctagtcttcaatggaagcaaaggaagaa

SEQ ID NO: 57615 - DNA, 154 bp, Oryza sativa
  Clone ID: PAT_MRT4530_59409C.1
agcgtccgcaatgcgtatcgaggtcacatctgactgtgacaatggcggataacaacagcaagctctcggagcccctcctggctgtggcgctagggcggctcatcatgctcaagaccggcgccaagcccaagccggctgcgtactgcgagaacca

SEQ ID NO: 57616 - DNA, 322 bp, Oryza sativa
  Clone ID: PAT_MRT4530_5940C.1
aaccgatcagatggctctgggcgcaaatgcgcgccattaccgagtccaggctgcgcggttggtccgggatatctcggtagtgggatacggacgataccgaagacagcttcaatgtttatatcccagccgttaaccacctatgcaaaacaggattttcagccttgctggggcaaaaccagcggggacccgcttgcctgcaaaccttcttcttcaagggcaaggccggttgaaagggccaaattccaacttgtttgccccttcttcaccttgggtggaaaggagaaaccaaaccccttggccgccccaaataaccgccaatccc

SEQ ID NO: 57617 - DNA, 186 bp, Oryza sativa
  Clone ID: PAT_MRT4530_59410C.1
aactataacgcgggctcttgctatcatataggtagagggcccgggacaaaaataaccccggccaaaaaaagggaacggccacacccaagcgccacaaaataccagggcacaacaacagggcagcacatcccaccgaaggccagaagggaagcacacgcgcccaaagaaccaaccccccggcagagg

SEQ ID NO: 57618 - DNA, 520 bp, Oryza sativa
  Clone ID: PAT_MRT4530_59411C.1
atgagtatatataacttgctcttggatatcccacaaaaatcctgcaaaaacggctccaagcgtggcctgcgcatgataaatgccacccaccctccagggggagcgcgccggatgctctggcgccgtggggggggggcatactggcgccgtcctcctatcgtgtcagcgcaggctggccacacagtgccacaatggcatggggacggcaccagacgtgatggaaccgccctattggatgacaacgccatcgacgtcgctgccacaggagcagttccggcggctgcgtggatggaggacgacaccgtcgggatcgacctccagcttcaggcggcgccgctggcgatggtgcttgcggcggcggcaggcggcggagtggacgatgaccatgagctacaccggcgcgtcctgcaggcgcgaggtggttacgtcgacccgtcgctggtggccgaccggcagaggccggtcagcgggtggggaggagtgtcgccggggctatgcgggagaagagatccggcggccg

SEQ ID NO: 57619 - DNA, 275 bp, Oryza sativa
  Clone ID: PAT_MRT4530_59412C.1
caagagtatcattggatttaggctgggattgatctcaattccccctagaatagctgatccaacaatctggctgcaagaagaagaaaatgattcagatgttaaacacacaagcataaaaacaataattattcaacagtgcttggtgtctgtttttaggctcggcacatcgtgctcaaagcaacaaccagagaacgaatagtgttatcagaagctgtatcagagatgaatatctcaggtcttggatgcttggccatgaagaacatagcactgtgagc

SEQ ID NO: 57620 - DNA, 326 bp, Oryza sativa
  unsure (1)..(326): unsure at all n locations
  Clone ID: PAT_MRT4530_59413C.1
tttgttttttttattaacggggggaacattccttgtttattaactccatgcccatacacacaagggtccaaacacggatcccattaattaaacgcccatccaaacgactatgtataaaccctaaaacctaacaacctccgatacgcgagcatttctaagacgctcactagctacctatctttaacacttatcccacatccaaacttaacgggtccacacctggaggcctttcacctaatcaagtgatgatacttattggaaccatttttccttggaggtcccctcgctccttttgccntggccccccctttttacaagaaaaagca

SEQ ID NO: 57621 - DNA, 276 bp, Oryza sativa
  Clone ID: PAT_MRT4530_59414C.1
atgcgcgaaaatgcgtcagccaaggccagcggagaggcacgggaggagcacgagcacggcgaccgccggcctctgtttgccgccgcaccaagccagtcaccggccgccggcctccgcgcggcgaggtattccccgccggcccgtcatcgcctcgcgtgcccaccgtccgccgtcgccgcattggaggagatagtgtggggaggatgtagtagtccagtaggaggaagggaggaggaagtagtagtagagaatgggttggaagaggaggaagaagag

SEQ ID NO: 57622 - DNA, 381 bp, Oryza sativa
  Clone ID: PAT_MRT4530_59415C.1
atggcatcggcggcggcgagatccggcctccgctcgctggcggcgcgcgccaaggcgaccgccgcccccgcggcgaggcgccgcatgtcctcctccgcccacgacgacgcccatgagacggccaagtgggagaagatcacctacgccgggatcgtcacctgcaccctgctggcggcgtacaacctctccaagggccacccccacttcgacgagccgccggcgtacccctatctgcacatccgtaacaaggagttcccatgggaaaatgctgtcatcatcacaacaagctttgttattataatcttcctacgccatttctgtgctcttgctctttatgggatgaaacctgttccgaaaattgatgcttatttatgcttatga

SEQ ID NO: 57623 - DNA, 2563 bp, Oryza sativa
  Clone ID: PAT_MRT4530_59416C.1
aaaatggcacaggtgttggatgtagggctcttaaagacaaacgatttggttatcacaaagagtatattaactttgtttctttacagtaacccgcctcacaccagtattagacttcatgccaagcttcagcatggctttcttgctttttttctcactacgactctgcttagatcttccacttgcatcacctccgtcagcatcatcgtcatctttgtcatcaagaaatggagtgcctccgatccttgggcggcttcgtccgcaccctgccgccgccgagcacgtccgatcgcaagaacgggttgagcgccccgacctttttgtttttttttttggcgtaggaagattataataacaaagcttgttgtgatgatgacagcattttctgaaacagaacacatgcatatgatcactgctgtgaatgaagaaaacaggtaacaactaacaacacagttaaatcctgattatcaacacaagagttttgtcattcttatttctttgttgcaagaaaaataggtttcactgaaaacaagaatcactggaacaaccagagaatttttcttaagcattcactgggcttctgatggtgcgctgttcagtacttaatggtgcttgttctcaaataggccatcgggtccccatgggaactccttgttacggatgtgcagataggggtacgccggcggctcgtcgaagtgggggtggcccttggagaggttgtacgccgccagcagggtgcaggtgacgatcccggcgtaggtgatcttctcccacttggccgtctcatgggcgtcgtcgtgggcggaggaggacatgcggcgcctcgccgcgggggcggcggtcgccttggcgcgcgccgccagcgagcggaggccggatctcgccgccgccgatgccatgggggaaggtgggtggtggcgccgctggttttgggggaaacgggtggagagatcgagattagatgccggccggtgtagtccaggtcgaggtagccggccaggatcctctgcacggcgtcgatgtcgtaggccgttgtggcggcggcggcgtcgggcgaggaggacgggatgaggaggtcgtcgagcacggcctggccgagctgcgccgccattcgcttctcgaggtcgagccggcacgccagcgtcgtgtcgaggtggatcgcggcgcggagcagcatcgacaggaagctcaccgacagagtgttcctctccctcggcagcaggctcacgatcgtctcgagcaccacccgcttctcgtgctcctgcctcgcgcccatcttcttcctgtccctcccgtgcatgtccagccgtcgaagagatttctgggcgtagagcatgatgagtgtccccatggcgatgcccttgaagcccctcgccttcatcgcgatcatgacgcgctggaacgtgtcgatccgcagcgccgtcagctcgtcggcgcaccagtcgtcgacctccctcgacgccgcggcgcccacgccattgtagccgccgccgccgccgccgccgggggtgcccagcgacatgctgaactggccgtcgccgccgcagacgatggacgcgacggcgtcgatgcacctggcgacgagccgcgccttctcctccgacgccgggaggagctcctcggccttgcggagcacggcgaccgcgccctcgaggctcgccagcgccacctcctccaggtaggcctccgtcctgccgaccaggttgcccggcctgcactcctcggtcatctcgaggtgctcgccggcgcaacgcagcatggcgacgttgtccacggtgatctcgaagttgacgccgtagcagaacttgacgacgagctcgaacgacttggagccgccgggcatgccggcgatctccaggtgcgtcgccttgttgccgccgactcctgacacctgcttcttgatgtagccgcacctggatgccaatggaagcttgtgcaggttgaaggcggcatcgtcgactttgatggtaatatcgcttgggagttcttgcgaaagtatcgggtgcagtgagtgacgcaggtgcggcaccctccggattgagccgcggttgccattggacccgcgtggtggctggacgccacacaatggcaattcgtacggcggcttgtggatggaatcggtcccgaatggcttgtgcttgctgctgccccacttgccctttttccgctgttcttttctcaccgccgccaccccgccatgacgagcgcctccgagctcttcaccgcccgccgcgcccgcgccgcccgcctctccgaccccgatccggacccggatccgcctgcggacgcgctccatgacccgcacggcctcgccgatcgccgcggccggcgccggggctgccgcccgcgccgccagctcgacgccgccggggacgtccgccagcacatagacaatagcaacattggggactctgcaactaggaggaaccgactggataggctgatgttcagaacaaatgagcggcttcctggtgttcgggaacagggatgctccatatgaagcaaataggtccagctcatcattggcccatccaagtagcgagtcagatgaagaaaggtcacccat

SEQ ID NO: 57624 - DNA, 240 bp, Oryza sativa
  Clone ID: PAT_MRT4530_59417C.1
atggagaaggatggcaggggcgtagccaggggtagtcctggtgggcgcgggactacccccgattttaacccagagaggcagagaccccctaccccattaaaaaatcagacccaaataacgaaatccaatggcccaaacaaatatcaacaacccaaggctaagagcagattggctatacatgaattgaagctaccagtgggctatactattgaacttgctctaagggaaccaaacaactag

SEQ ID NO: 57625 - DNA, 912 bp, Oryza sativa
  Clone ID: PAT_MRT4530_59418C.1
gagacgaccaaccaaatccttgtcccgtccgttcggtcgccgcgtcgaggaggcagggagctcgcggcctcgcaccaccgccgccacccccccatgacgagcgcctccgagctcttcaccgcccgccgcgcccgcgccgcccgcctctccgaccccgatccggacccggatccgcctgcggacgcgctccatgacccgcacggcctcgccgatcgccgcggccggcgccggggctgccgcccgcgccgccagctcgacgccgccggggacgtccgccagcacctgcacaccggggccccgccctcccgccgccgcgcttcgtacaccgatcgtgtcttatcatacatagacaatagcaacattggggactctgcaactaggaggaaccgactggataggctgatgttcagaacaaatgagcggcttcctggtgctgtactgcaagcacaagcacgtgttctagagagactgagaggcatttctattggttcatctgtgtcaaggccatctatcacattggatgaattttcagctactgatgtgtttagaatcattgacttcgggaacagggatgctccatatgaagcaaataggtccagctcatcattggcccatccaagtagcgagtcagatgaagaaaggtcacccattgacaccagttccttaaaaagatcacgtgggctgagcaaggcggccttccttcggctacagatagagatttttgaggcaagcaaagatgacaacagggaggcatcaccagaatgctcgatttgccttgatggattctatgacggagatgagctcataaagctacgttgtgggcacaggtttcactcgaattgcctggagccatgggtacggaaatgtgctgattgcccatattgtcgaacaaacatacagtcacgatcctga

SEQ ID NO: 57626 - DNA, 387 bp, Oryza sativa
  Clone ID: PAT_MRT4530_59419C.1
cgcccatgtctatggcgggggagaacgcggtggaaagatccaacgcttagcaggaaccaatccgaggtgctggcgatagtgccagacctagcgggggactacaaccggccgggggacttactgccaagaatgtacgtcgactcaagctgattacagcaagcactgcctcctcagctggcgtgtaagggggatagccagtccaagatccgccagtgggctgaggcctgccccagcggaggtcaagataaccccattgtttttataatagagaccaatggattcagaggctctggagggctaggctgcgagatgggcttactaaaggtccaggaaattctcaattactgtcatgagccttgctagactagcgatatgcataaatgtctc

SEQ ID NO: 57627 - DNA, 6074 bp, Oryza sativa
  unsure (1)..(6074): unsure at all n locations
  Clone ID: PAT_MRT4530_5941C.1
aacttagggatgtgcaatgcgtcaccggctgcatggccgccctaagtcgtttcatatcaaggctgggagagaaggcgctacccttgtttaagctcctcaagcgctcggggccgtttacttggacggaggaagctgaaaatgcccttgcccagttgaaggcatatctcaactctcccccggttatagtcgccccagagccaaatgagcccctgctactttacttagcagcgaccccccaagtagttagtgcagcattggttgtggagcgcgatgaagacaatcctcatttcgtgcacccccattctgtgctaacttggcccgggagcaagcagggaggagaggcccccgagtcaaacggtggcctaaggcccctgacgaccggagacggccctctgcccgcttgtcagacggtgctgggtgcccccgaccctcaggagggccccgaggccactgcgggaaggccgcatctaccaccctttgaccccgaggctaaccctgtgctgattcgacccgggagagagcagggagaagaggcccccgagccgaacggaggcctgaggcccctgacgaccggagctggccctttgcccgcgtatctaacgatgccaggagcccccgactcccaggacggccccgaggccactgtgggaaggccgcacctgtcatcttcggaccccaaggtcatcagcgcagaagacaagtgtgccccgagaggccacttggacgaagagcacctcggggatacggcccctagcgaagaagatcggccccgccgaaaggtgcagcggcctgtttactttgttagtgaggccctccgggacgccaagacccgataccctcaggcccagaagatgctttatgctattctgatggcctcgaggaaactgcgccattatttccaggcgcatcgggtcactgtggttacgtcttaccccctcgggcaaatcttgcataatcgagagggtacaggacgagtggtaaaatgggcaattgagctttctgagttcgatctgcactttgaaccacgccacgctatcaagagccaggccctcgccgattttgtggcagagtggaccccggctccagagaccgtctcaatccccgaggccagcacgaacccctcttaagctgnctcacaccaccccactggtgatgcagtttgatggntctctgtcccttcagggtgccngagcaggngtcacgttgaccctcccgactggagaacgtctcaaatacttggtccgtctcgactttcgagcgactaataatatggcagagtacgagggactccttgccggactcagagtggcagctggactggggatcccgcgcctcttggtgttaggcgactcccagctagtcgttaaccaggtctgtaaggagtaccggtgctctgacccacagatggacgcctatgtacgccaagtgcggcgtatggagcgccatttcgatggaatagagcttcggcatgtgcccagacgggataacatgatagccgacgaactctcacggctcgcgtcctcgcgagcccagaccccaccaggcgcctttgaagaaaggcttacccagccgtcagcgcgacccgaccccttaggggagacggatgcgccagaccggcacccgaggcccgtcggagtccaggcctcgggacccgaagggagtgctccaagctcccttagattgatcgcttggatctctgagatccaaacatacctcacagataagactctacctgaggaccgcgaagggagtgaacgcgtccagcgcgtttccaaacgctatgtgctggtagaagggaccctctatcggcgcgcggctaacggaatcctcctgaagtgcattcctcaggaacaaggcgttgagcttcttgctgacatccatgagggcgagtgcggagcccattccgcctcgcgcaccctggttggcaaggcctttcgtcaaggattttattggccgacagctctcaatgatgcagtcgatctggtccggcgatgcagagcgtgtcagttccacgccaagcaaatccatcagccggcccaggccctgcagatcataccactatcatggccatttgctgtctgggggcttgatatcctgggaccgttcaaacgggccccgggcgggtttgagtatctgtatgttgcgatcgacaagttcactaagtggcccgaggcttatccggttgtcaagatcgataagcactctgctcttaaattcattaagggcatcacggcccgttttggagtgcctaaccgtattattacggataatggcacccaattcactagtgaactcttcggcgactactgcgaagacatgggcatcaagctctgcttcgcctcacctgcccaccccagaagcaatggccaagtggagcgcgccaatgcagaaatcctcaaaggccttaaaaccaagaccttcaatattctcaagaagcacggcgattcatggatcgaggagttgccagcggtgctctgggcaaaccgaaccactccaagccgagcgaccggggaaacgcctttcttcctcgtctacggcgcagaagcggttctcccatccgagctcaccctgaggtctcctcgggccaccatgtactgcgaggctgaccaagatcagcttcgcagagatgacctcgactacttagaagagcgaaggcggcgcgcggccctctgagctgcgcgctaccagcagagcctgcggcgctaccatcagcgccacgtccgggcccgatcactctgcgtcgacgacctcgtcctacgccgcgtccaaacgcgtgctggattgagcaagctctcaccaatgtgggagggtccgtatcgagtgatcggtgtcccccggccgggctcggtacggctggccacgggcgacggcacggagctgccaaacccgtggaacatcgaacaccttcgtcgcttctacccctgaagggggggggggggagctaaaatcgccaaacggggcccagaaccgagccgtgccccggggcgtggtgaactccgggggggaaccggcaaaaacccacaatcgggtcacccatacccctcggtcaccacgttcccggcctggccagtctcgacatgcggatctccccaggcactagccccgacccgcgccttttgaggaccagaacctgggcacaaacccttattcaaggcgcgcgcgcggtcctcggtcccaggagggaactcatccagcgccatccatggagagaaattggggtccctggcctggtaactcgccaggacgagctccaccgctccttgggcgaggtccctcgaggatgacttaattgtcttctcgagctcctcggggagccgttggagagccccggccatcttcgagaggcgctgggcgaggcctccctggttggcggcgtactttacggtccgccctctccagaggcccacttgccgaccggcgcaatctaggcgggagatggcgtcccaaagcatgccaggccctacctcgcctgccaagcggagggcttcgacctccccggcggacgagtccagcgcgccctgcagatcggcgatggtgcgttcggtagctgtgaggcgggcggctaagtcgctttcgcccgtggccgccccgccgctgcgcgccctcgcgtccagctccttcgcccgtgcctcgagctcagcggcccgttggttcagtacggccctctcggcgcgggcaccttccagattgcggcgcgcctgctcctcctgcgctgcctcgcggagtgacaggttgaccgccagctgttgcgccgcggcctcggccccctcgagagctcgctcccgttcggtgagcgcgtcctcgcggaggcggagcgtgaactcttcttcggcgcaggcagcctcgtgcgccaccagcgttgcttcccggatggtgacggcggcctcgcggtccgccagatccctctccacgacgcaggcgcgctcttccagcgccatggcgcgcgcctcaagggcctcttcgcgccgccgggacgccgcttcggtctccgccgcccgctgttctcgggcagcggcagcgtcaagcaccccctgggcggcgtcgagcttcttccctagctccgcctcccagctcccgtattgaaggcggagggtgtcctgcgcctcgttcatcacggtggtggcaatgagggcagccccccgctcctcctccacttccttggcgatctccgccagcaccttcttacgagtttcaagctccgagacgtgccggcggtgagccttacggcccacctccaccatggcctccaccgagcgtcgcccctcttcgacacgcgcccacgcggcgtcgagctccgcccgctctgcctgcaggacctccacctgggcacttaacccatccaacaccgtggtgtttgcggcggccaaggcctgcagaaggggctctgcgttcagtagggcgatagaaggcgtggggaagagccgccttggagaggatgccacgcggctcgggccgccgatggaagtgccggactcggggatgtcccccggacccggttggtcctgagcgtcgcccgagggagtaggcccaagcgacgcgcccgcggcctcgtcgccagctgccccggaagttgtcgcctgagtgtcgcctgagggagtgggcccaagcgacgcgcccgcggcctcgtcgcgagctgcctcggaagtcgccatcgcctcgtcctggcgaaatccggcctcctcccgagcggtttcctcggcctggcgagcccgggcggcctcctgggcggcctcctcggcttcccgtaggcgatccgcggcctctcgccggtcagattcccgcctgagggcctctgcggccgccggatcctcggcctcagactggccggacttggaatggcgggagggacgcgacgggatctcgctgtgagggggtcggttaaacgaccactttggaggggaaatgaggtttccccgagatggttctgtctcccccatcttacggggccgcttcttcttgcgctccccctcgggctgcgatgttggcgcggccccctccgggcgcctgttactggcacgcgccgccccgccccctcggggaggagatgggggaggtgttcctccctgcttcctcttcacccgggcgtcggcagggcggctgctccccgggcccctgtcgcgggacccagaagcacgaccccctctcggggtagattgttcccccctgcggctcccgcctgcgccgtcgtggccctttggagctcgctcctctgaggccccgaccgccatcataatggtcaggatggaggcgcggtctggatcgctgcagagggggaggattccttggggaatgagggccgcctctacggagttgagattcagcacccgttggaccaatatcttgaagtcctcaggagcccagtcccatctcactccctggtgggtcctcgtgaagtcttcggacccggtgtactcccaggcgccccgagcgcgtcgctggagcggcgcaatccgacgacggaggtagtcgccgtacaccatggcccctgtgagcccctgggatcgcaggcccgccaggcggtcgaggacggcgtcatagccatcccccagatctaccggcgcccgccagctggaggcctgcgccgggggctgctcggaagtcggaggcgcgttcttgcggagggcgcaggggatgtagcggttcagcaccggcccccgtggctggaagtagcagccaccgactaccgatggcggcgacaccgactgcacggtgaagaaccaccggaacagccgaagagatgggcgcaccccaatgaacatctcgcacagatgcgcgaagatggccaatgtcatcaccgcgttgggggtgaggtgcgccatctggagatcgtagaactccagaacatccatgaagaaagaagaaaatggtggaaccagccctgccattgcaaaggggagaaagaagacggaccgccccgggtagtctggcgccgggcgtccctcgcccagcgtgactatctcccggccggtggcagattccggcatgaagcggcgcgacagcccagcctgcctctcgctcacgatccgggaaggcggcagcacgctaccatcgagcagagcggaaccccgtgccat

SEQ ID NO: 57628 - DNA, 697 bp, Oryza sativa
  unsure (1)..(697): unsure at all n locations
  Clone ID: PAT_MRT4530_59420C.1
aaaagcgggcccccnacggccgggattgggatggggatccggcggctggggtagctttggcggcggcgaagctaatggcggcggcagattggctcggcggcggctccagcggcagcgagcggcgaccggaggagtgcaaaagccggtggcggcgggagcgatagagggcacgggagggagcggtggaaagaggaaaaggtggaggggagtggagggatggtttatatgggctcgggaggggcggacgaggccgggaggcggccggatttctcgccgacgtggggaatggagagaaagagagagagagagagattcgaattcgaatccctccgttgcggggtgcacgcgcgagtgggaggagtggggatggtgggcggcgacgtgggcgcggggcgcggagtggggcgcggaaggcgggggaggtgggcggcgtgggcggctcggcggttgccggcttggggagcggcggcgggaggtggaagaaggggccgacaggtgggccccacctgtcgatgacccggaggggttagggaggagggaggagccggcttgggccggcccagccgagggaaggtcggcgcgggaggcgaatggactgggccgacggcccaagaagagaggaaaaaggaggaaaaagaaaaagaaaaagaagaaaggatttttccagggatttaatattgccctttgctcattttaa

SEQ ID NO: 57629 - DNA, 735 bp, Oryza sativa
  Clone ID: PAT_MRT4530_59421C.1
atggaggcgaagctggaccgcatcgcggagcagctgaaggcgctgcccttgctcagccaggtggtcgaggggcaccaacatcgcctcgaggagctgtccaagcagatcgccgttgcggcggcgctggtggaggacgtgaagaaggagcaggcggcggcggcggcgtcgcgcgccgccaggatcgacggctactcgggagggttctttcgtctggcgaagctgaagttccccactttcagcgggacgttcccgcgcctgtggatcaccaagtgcacgcgctacttcgagttctacggcatgccaatgaagatgtgggtttcctgggcttcgatgcacatggaggggatggctgagctgtggatgatgacctatgagaagcgccatgagcgtgattggggtcggttctgtgaggccgtggaggagagatttgggccctatgatcacaagcagaagctcacggcactcttggatctgaggcaggaggggatcatgacagtgagcgagtacagagaccagttcgaggagcgcttgtaccatgccaagctgttcgatccagtctccagcaactgcttcgacgtggcattattcataagaggcctgcgagaagagatcagagataggatgtggcagcaaactcctgctaccgtggatgctgctgcccaatcggctctggtgcaagaggcgttgtataacttggaaatgcagagagctcagagggacccgtataaagaatga

SEQ ID NO: 57630 - DNA, 531 bp, Oryza sativa
  Clone ID: PAT_MRT4530_59422C.1
atggagcaatacatgtcgtcgcccgcctaccatcgccgtcgcggcggtcgctgccgcctccaccctccggctagatctgggagagggagagggaggggaggggaggaggaggaggccctccggttgcctgtcgtcgtggtcgtcgtggtcatcgtcaccaattgccatggtcgtcatcgtcgtggtggtcgccgtccctcccgccgccacacatctgtcgtcgtgggaaggaggaggggagagaggtggggccgtgggggaggggaggaggaggaggccctccgcccctcccgccgccgtacatccgccgcccgcggccggcctgtcgtcgtggtcgccatggtcgtcgtcgtcgtcgtggctcggcggcgccgcctccccgcggatatggcctctcgtggcccggcggtgacgcctcctcgcggatccggcctcccgcagcccggcgacgccgcctccccgcggatccggcctcctcgcccgagcccgagcgtcgccgcccgccaggtctgcctgccgtcgctgcggtga

SEQ ID NO: 57631 - DNA, 322 bp, Oryza sativa
  Clone ID: PAT_MRT4530_59423C.1
gtctgttccaatagattattagtggatgaactacttatagtgattagcatctattagacccttttctagggagcccagtgctgaaataaaagccgcttggtatgtgcacatgtaacacgcggggctctcatgtttgctggtcaaatgagacccagacgatataaaaacgagtgatgtacatcacccagattggatcttctgcatgttgtgcgcgctcgcatggctggccaccagaataaagatgatctttgctcgtcctgaaaggagttcgcactgaggatattgcgattagacccgccatctatactcattattgtgtgcc

SEQ ID NO: 57632 - DNA, 879 bp, Oryza sativa
  Clone ID: PAT_MRT4530_59424C.1
atggctgggtcgtcgtcgtcgtccaagcaagatcgtgccctgcaggccaaaaacctcgccgagaggtgcttcctcgctggcgacgtagctggagcgaagcgatggtgtcagaacgcgctgaagctggacccggacctccccggcgtcgcgcaggccgcggccgcctacaacgtgcactccgccgcggcgctcaaggccatcggggtcgccggctgcgggcccgactggtacgccatgctcggcctgccccagccgcgctccgacctggtcacccaccacgacgccgtcaagaagcagtaccggaagctgtgcctcctggtgcaccccgacaagaacacctccgccgccgccgacggtgcgttcaagctcgtccagacagcctgggacgtgctgtcgaccaggcatcccccgccgggggccaccgccgccgccgcctcggtgtgtacgcttccgatgcgggcagaagacctgtttcgtaccaagcctacagccgccgcgccggcgacgccaccggcggccaagaggcctcctgaaccgccaccgaagacgacgcagaggcaacaaccaccaggtcctccgccaaagccgcaaccgagcgcaccgaagcgacctcaggtcgtccagatgcgtcggcctgctccggcaaaacaacagcggccgacgattctgccgccgccaccggtagtgaagcgaccatcaccgaccaggggaaaatgccagtattgcggcgcggcaatctccaaatctttccgctgcatgagctgccaccggagcccaatggacaacaagccgggctattccgacaatgacgaatacgacgactattacgccaaaaaaaatatggaatacgatgactactactaccacgacgacagatga

SEQ ID NO: 57633 - DNA, 612 bp, Oryza sativa
  Clone ID: PAT_MRT4530_59425C.1
cacgagggcgaaagcgacgggaggattaataaagccgtcaaagatttcttacttgttcccccttcttgctcgccgcgaggggaaaatagattcgagctttctcgtagcttcccctcgaaccaaccgtccattcccgtgggtacagctcgtgggttcttcccgatttcttccagtaggagattccctgaatccgctcctttccctaatttaatttttatgaagagagggagtaacttgttcttgcctaatttgattcgagctcaggtccataatttgatttgaattttcctggattttcttctgctgggtacatttgtgagcgattttaaaggttctttttttggctggtactttggtagaagttcagctactatcgctttaatctgctcgaattcttgggttgcgtcccgttcaaaattcgtccccatgtcgtgtatttgtgggtttcattcctgcgacttccgttatttcaggactgttcggttctctcaggactttatccaactggggcagtttgagattttgtgaaaaaatggttttttctttccttctctgcgataatcttgggcttttggcgacgggagagcaatgggagcagcaacatgttctacc

SEQ ID NO: 57634 - DNA, 936 bp, Oryza sativa
  Clone ID: PAT_MRT4530_59426C.1
atggggaatgtatgcgagcctcactgtccatcttctgaaggccagaaccctccagagtcattagaattaagcgaggaagagcaagacgacgtacgcttcaagcagtcatggttaacctacttctggagacgggccaaaagtcatgacatagaagaagatatagctgatgagcggctacagttttggatagaacaaggcaatcatccagtttctacgatcgatatcatagaagctttgcaaattgcaaattgcaaatttgcaatccactccccttgggtgtacgccatgtccaccgatcagccacccgcgccgccggcgagcgcacggcgacggcagtgcgtggcggcggccgcggccgccaccgcggcgtgcctcgcgccgctggccgtgctcctggcggtactcgtcctcgcgccgtcgctgctgccgcggctgctcctccggccgcaccacgtcgtccccgtcgtcgcctccgccgagctccgcctcctcgccttcgacgccgcggcgcccgccgtggcgtacaacctctcggcgacgctccggttcgacaacccgggcgggctctacacgtggcggtgcacggcgctccgggcggcgccgtcgtacgccgggcagcggctcggcgacgccgcggcgctccccgggatcacggcgcgcggcgccggcgccggcgacgcccgtgcggcggcgtgggcggggacgcagcgcgtgccgcccggccgccgcgcgcgcgccgtggcggcggcgctcgcgcgggacagggcggccgggtggtacgtcatcaaggtggacgtcgccaccgtgcagaacggcgccgagagcgacttcgcgtgcgtgctcagcttcccggccgccgcgctggcgcgcaacgggagcggcgccgcggtgttcgacggcggccggtgcgtcgacgccgtgcacggcgagatttag

SEQ ID NO: 57635 - DNA, 193 bp, Oryza sativa
  Clone ID: PAT_MRT4530_59427C.1
gagaaaaacaaccttgaaccttattgaacatcttggcctctgctcatgaacactagagagttacagtttacagggaaatggctccaaaattaaggaatacaacgccggtcaactacacgtgcggaacctagcgtactctaagtcgacatgacagtacaaaaactaacttgcactaccgaccaaaaaatgataa

SEQ ID NO: 57636 - DNA, 405 bp, Oryza sativa
  Clone ID: PAT_MRT4530_59428C.1
atggcggccacggggtggtttctagcggcagcagtagccgccatggccgtcgtcgcctgcttcgctgcgacgtcgtcatcgtcgtcgtcgcagctgcactgcggcacggtgacgtcgctgctgtcgggctgcgcggcgttcgtccgcgggcacggcggcggcgcccagctgccgtcgccgggcacgccgtgctgcgacggggtggccgggctgtacgccgtggccgccgactccgcggacaattggcgcgccgtgtgccgctgcatggcgaggctggtacggcggcacagctccaacgcgtccgccatcgcgctgctgcccggcgtctgcggcgtcgtctcgccctggacgttcgccgcggggaacaccaatagtaatcgtccctactgcagaagcctcccctga

SEQ ID NO: 57637 - DNA, 7032 bp, Oryza sativa
  Clone ID: PAT_MRT4530_59429C.1
ggaagagaaacacgaagatccattatgtacttacacataataaatagatgtttttaacagaatcccctcacatttatttaacaaaaaccagacattgctcttataatcacaggatttgcatctcttcacaagaagaaacagggaaaaaatatacgcgtccgcaaaatttcccttttatcatacttatataaacaaaagggccccctttttcttgtaaattatttacaggccctttattttacctttttatagctaaaaaatgcatggccctactatcttcgcatcatcaatgctgtatcaaaattgcagaaatgttctctcggcctatgcaactacgggttggaccagaccttcacttgagacagcaatgtcctctgtgccattggtttcaccttcatcatccttcgacaggtaattgtctacggctgctgcagcttggcgcccctctgtgatggcccaaacaaccagtgattgcccacgtctgcagtctccagcagcaaatacaccttccacattggtcgcaaagtttccaaattgagctttgaagtttgacctcatgtcttgttctagacccagcttgttagcaacagtcgcttcgggacccaggaatcccatagctaagaggacaagatcggcctcaataatttcttctgatccttcaacttccttgaattggaaccttccgttcacctttccccattcaacacgtattacctcaagggccttcacatttccattctcatctccgataaatcgcttcgtcaggactttgtaacttcttggatcttttccaaacttgctagttgcttcctggtgcccataatcaacacggaagatcctgggccactggggccaggggttgtcaggtgccctctttcttggtggctctggcaaaagttcaagatttacaaggttggtgcaaccatgcctaatggatgtcccaatgcaatctgtgcctgtgtctccaccaccaatgacaaccacctttctcccttgggctgatatgtagttaccatcctccaagttgctgtcaagtaaacttttggtattggcatgaagaaattccatagcgaaatggatgcctgccaactcccgtccaggaatagggagatctctgctcaaggataatgcttttggctttgtagctccacaggccaaaataatggcatcattctcagagcggagcttttcaacggagtataaagggtcacttccaacatgggcattcacaatgaattgaaccccctccttagccatcaactcgacacgtcgctgaacaatgccctctttgtcagccttcatatttggaaccccatacatcatcagtcctccaatacggtcagcacgttcaaagacagtcacgaaatggcccattttgttcagttggtctgcagcagctagaccagctgggccactgccaacaatagcaactctctttcctgttctccgaagtggaggccgtggtaccatccatccctcttcaaatcctttgtctatgatggcgcactctatgctttttatggatactggattgtctataatgccaagtacgcacgaaccctcacaaggagcaggacaaactcgtccagtaaactcagggaaattgtttgtctcaagtagccgatccaaggcttcatgccatctattctgatgaaccaattcattgaattcaggaatcttatttccaagaggacaaccagcaccagaaccctcctgatgacagaaaggagtgccacaatccatgcaccgagcagattgcgtctttagcagtggcccaggaaccaattcaattgcaacttcattccaatcttttacacgctcatttggatctctgtaagaagtaccctctcgctcatattttatgaaacctcggtactttacagcatttgaaactcgtgatggtcggcttgatggctcttcgttcattactttctctgtctttactgaaatgccatttggagcttgaattacttcaactggcttcttatccaccacttctcttgccttttgctctgcttctttagcagccttctcttcttttagtttatccaaaacccgcttgtaatcccttggatatacttttataaattttgggaggagagtatcaaaattcaagagtacatctctggccaaatcactttgtgtatgaagtctgtgctgttgtatcatcattctcaatgttgtgatgtcatcctcttcaactacagcatacaagtcaactagctcatagttgcaacggctactgaacttcccatccacatcataaacataagcaatacctccactcatgccagctgcaaagttcctaccagtttttccaagaataacagctgtacctcctgtcatgtactcacatccatgatcgccaatcccttcaactactgcttgagctcctgaattgcggacacaaaacctttctgccgccataccattgaaatatgcctctccctttgtagcaccatataaagccacattaccaatcacaatattgtcttgtggattaaatcgactatttcttggtggatacacaacaatctttccaccagatagtcccttaccaacataatcgttgctgtctccctcaagctcaagagtgatcccaggacagagaaaagcaccaaaactttggccagcacttccattcagcttaatatggatggtatctgatggcaatccatgaatgtgataccgttttgtgacttcatggctgagcatagtaccaacagctcggttaatgttccgtactggtgtctcaatgaaaacacgaacaccttttcgaagggcagctgttgaggaggctatgagtttgttatctaatgccatgtcgaggccatgatcttgcttctcaacacaatattgaacagccccagggctaatttcagcagctggtttcagcagccgtgagagatcaatgttttcaagtttctcgttgccctccagtactttgggatcgatctcaagcatgtccgatcgcccaaccatttcattaacagtgcggaagccaagctgtgccatgatttctcgtacctcttcagcaagcatgaagaagtagtttatgacatgttctggcttcccagcaaactttgcgcggagcactggatcttgtgtagcaataccagcagggcaagtgttggtatggcacttcctcatcataatgcagccaagtgtgattaatggcgctgtgctgaatccaaattcttctgctccaagtaaacaagcaacagcaacatctctaccagttttcatctgtccatctgtctgaagaacagctcggccacggagaccattggccacaagagtctggtgtgtttcagctaatccaagctcccaaggaagtccagcatttttaatccctgtccatctggaggctccagtgcctccatcatgtccagagatcagaacatggtctgcatgtcctttcaccacaccactagcgacaattcctacaccagcttcagagactagtttgacgctgattctggcacctgggtttgcattcttaaggtcatggataagttgtgcgagatcctcaatagaatatatatcgtggtgaggaggtgggctaatgagccctacaccagctgtagaatttctagtgactgcaatatcaccaatgaccttgtggcctggtagctcaccaccttcaccaggtttagcaccctgagccatttttatctgcacctcaactgcattagtcaaataatagatggaaactccaaatcttccgctggcaacttgcttgattgcacttattcttggattgtttttcttagggaatgcgcataagctttgtgcatcatttgtattaagattgaaaggaacaaagttctcacaacaccatctacccaaagcaaatggttcgactgtgccacggaagaaggtcagtgtttgagttgttaactggcctttgctcccattcttaatagttatataacctgtgttagattttcctccaagggtgttcatagcctcagccagggaagtatgagcttccaaggaaatggatccataactcattgctccagtacagaaccgcttcactatctcctttgcaggttctacctcgtccaaggaaatttggtttggaatttctctaaatttcagcatgccacgcagagtacatgccttattcagctcgtaaatgcgcctagaatattctttgtatgcttccctgctgttaatccgtgctgcttcttgtaattttgcaatggaaaaaggatcattaaggtgtacttctccatttttcctccaatggtaatccccagggttgggaagagcatttgcatctgcacttccaggaggtaaagttcttgatgggaatgcaatctcatggagacgaagagcatcttgtgcaagcatttcaaaggttgcaccttcaactctactaggagtaccttcaaaacacttgctgaccacttccgaagcaagaccaagggcctcaaaaatctgagcacctttgtaagatgccagagtggatattcccatcttcgcaagaactttcatcattccatagtttgaagcataaaaatatttctcgataagttgttcttgtgtataaggtttcccatcattaggaggaatcctcccatcaatttgcaaccgccatattgcttctatagctaaataagggcatatagcatcagcaccaaatccaataagggtggaaaaatggtgcacttcgcgaggttcagcagattcaactaacaatcctatgcgtgtcctctcaagatgtgagacaaggtgctgatggacagctccaactgccaatagggaactgacagctacacgctctctatcagagagaactagaatagtgtagccctcatgaatagcttcacgtgcttgagcacaaattttatctaaagtctgttttaagcccatcctgccattctttttaggataagttatgtcaagcaccttgctgcgccaaccccggtagttcatctttttaatagcctccatttcatttgtattcagtaaaggactcttaagcgtgaggcgatggcactgccgctctgttgtttcagacaagtcaccttcaggaccaatcatgcactccatagatgtgacaattttctcccggatcgggtcaatcggtgggtttgtaacttgtgcaaacatctgcttgaagtattcaaaagtcagcttctctctgtttgacatcacagctagaggagtatcatttcccattgatccaagagcttcttgtccatctttggccatcggtagcatcagcatttcaagggcttctcttgtatacccaaaagccttcagcggagtcagaattccgcagatacccatatctgctttgttctcctttgtaattggaagtgcacccgaaatgctcggtgcaattctctctgcttcatttacagattctatgatatctgtgagttgtatcctttgtcttttcagccactctccatatggacgaactttggagtactctttcttcaattcatcatcattcacaacacaatggttctcaaaatcaactaaaagcatcattccagggtttagcctaccctttcttgaaacatcttgaggaggaacatcgaccacaccaacttcactagccataattacacggccactgtaggtcacataaaaccggcctggcctcaaaccattacgatcaagggttgcaccaaggtagcggccatcagtaaatgagattagagctggtccatcccaaggctccataagtgctgaaaagaactcatacaaagcttttctctcagggtccatgttaacatcgttttgccacgcctcagggatcatcatcatgacagcctctggcgcacttcttccagattgtatgagaagctcaagaacattgtcgattgcacctgaatccgaagatgtagcatccactatcggcagaagtttcaacatttcatcccttgttagacctagtccctcgcacttcaagagaccctcacgtgccttcatccagttcttgttccctctaagggtattgatctcgccattatgccccaaaacacgcattggttgcgctcgatcccaactagggaaggtgttcgtggaaaatcttgagtggatcagtgccatgtaacttgtgaagctttcatcgcctaagtctgcaaagaagtaccccttgagttggcttggcttaagctgacccttataaacaatggtccttgaagatagagagcacatgtagaaatcttttgttccgccattcttgacgcctagaacttctcgtatggacataactgagaacctccgtaggacgtacatctgccgctcaaaatcagcctttgaacttgcacttttggtgacaaacacttgctcaatcactggttctgtatctaccgctgattgacccaagcccgagttgtctgtgggaacccggcgccagccgaggacggtatgccccagcaactctgctttctcacgaaacaaaagcttgctcttttcacggcgtttgtcatctgtgggcatgaaaaacatcccgacggcgtactcaccaggcggcggaagctcaaaacctgcgtccttcgtgacttcaagtaggtttgcctctctgaagaagttgtgcggcagagcgacgaggatgcctgcgccatctccggtgttcttctcgcagccgcaggcgccacggtgagccattctatcgagcatctctatggcgtcgtcgaccgttttgcggctgtactcgccggagagctcggcgatgaagccgacgccgcaggagtcgcgctccatggaggggtcgtacagcccaatgctgctctcggggatcttcgacatcgacctgggaggaggacgcgccgcccccgccccagcccccgcctctgcctggcgcgacgccgatgcccgcggcgccacccggtcctcggcggggagcgcgccgccgaggaacccgccctccagcgacatggcgccgtggcgaggccgcgccgccgccgccgcggtcgccgatgccgcgcggcgccgcttctccccgcggacgccacccgccgccggcgcggcgcgcagcttcagcgcaaggccctgcgccgccgacat

SEQ ID NO: 57638 - DNA, 1005 bp, Oryza sativa
  Clone ID: PAT_MRT4530_5942C.1
gcacgagggagaaggccgccccttttttttttttttttttacttggtgacgtactgacgtttattcaattcaaggtctcatgtttctcacatacagcagttgaacagcttagctggacggtgatacctcttcagtcttgcaaaaaaactcgacaaaaagaacagcggtaaaaacacaaccatcatcccgatcaaccagttggggacaatggataataatggcctcaagatgctatagcaaacggcgaaaatctctagcagccaaaactttgccgtcccgatgatatcagtagccccggcggtcaggccaggtgatgctggaacagcgaggccatctcgattgcagttagagcggcttcagctcccttgtttccagccttaccaccagcacgatttagagcctggtccatgtcatcacatgtcagaacaccaaatatgcatgggatctcagcagacaatccagcagacagtacacctgaagcagcagagtttgcaacagcatcgtagtgggttgtgtcacctctaatcacagcgccaatgcacaaaattgcatcaaactttccagacttcccaagcttttgtgccgcaacaggaatttcaaaactgccaggaacacttacaactgttatattttcttttttgacggaatatctctcaaatgtctcaagagctccctgcagtagcaagttggtgacaatctcattgaaccgtgccacaaccactccaaacctgagcccctgggtgttagtcaacgaccccataagccgctggtgcccgccgccggcggcgaccacgacggggctaacccgcgaggcccgagcgcctgcagccaacgcggccggccgtggggagtaagggaaggagacggtggcggcgcgcagaggagcgtcggattgccgcgagaaggaggaggaggaggagggcctccgccgctctagaggatccaagcttacgtagcgtgcatgcgacgtcatagctcttctatagtgtcacctaatcattcctg

SEQ ID NO: 57639 - DNA, 1278 bp, Oryza sativa
  Clone ID: PAT_MRT4530_59430C.1
atggacaccggcgccgaccaggcaccacctcctcctcctcctccccctgtggcggccgcctccgccgccgccgacgagccgcgggacctgcgcgtggtgcgggagatcctccactcgctggggctccgggagggggactacgaggaggcggccgtgcacaagctcctgctcttcgcccaccgctacgccggcgacgtgctcggcgaggcgaaggcgtacgccggccccgcccggagggagtcgctccaggccgacgacgtccgcctcgccatccaggccaggggcatgtcctccgccgcgccgccgagccgcgaggagacgcctgttgtagcacataaatgcaatgaaattccaatacccaagccttgtgttccttctggatcaatctctcttccacattatgaggatatgctattgaacaaaaaacacatatttgttcctcgagtcgagccaacaccccatcaaattgaggaaactgaagatgattataatgatgatggttccaatgctaatgttgcctctcccaattccaattatgaccaagatctttttggatcgatctctcttccacactatcaagacatgttattgaaccaaaaccacctatctgttcatcgagtggagccggcacatgatcaacttgagaaaatcaaagatgatggttccaatgacaatgctgactcttctcattccaattatgtccaagattcttctggatcagtgtctcttcaacatcatcaggatatgtcattgaaccaaaaccacctatttgttcatcaagtagagctgacgcttgatcaaattgaggaaattaaagatgatggttctaatgacaatgttgactctcctaatttcaattgtgtccaagatccttctcgatcggtgtcttttccacattatcaggttatgccattgaaccaaaaccatctatcttttcatcaagtagagccgatgcttgatcaagttgaggaaattaaagatgatagttctaatgataatgtcgcctctcttgattccaattgtatccaagatccacattatcaggacatgttattgaaccaagaccacctatctgtccgtggggtagaaccgacacttgatcaagttgaggaaattgaagatgattgttccagtgacaatgttgcctctcctgattctaattatgacaaagagaagaatgacagtaacaaacagaagccttctaagaaggtttctcaactcaatactttggttgctgcaggtaaagacaaagtagattgctcaactgaactttcttag

SEQ ID NO: 57640 - DNA, 279 bp, Oryza sativa
  Clone ID: PAT_MRT4530_59431C.1
atgaatttcttatctcactatggatggtatacccgtgtagccaagggagcaagggaggaggagctctggcagctcttcaataggccgtcagggaatcaggagagtcactcggcggggcgcgggattggatctgcagccgaggaacgccggcgacggcgccggcgaggggagaagcggagccggaggggagacgcacggggcttcacgcagacgcggcggcgacggcgagtgccaccaagcgatgactggatgactggccacggcccacggcccaagagt

SEQ ID NO: 57641 - DNA, 283 bp, Oryza sativa
  Clone ID: PAT_MRT4530_59432C.1
cgggctgcaggcttgcactgtcttgtacgcagcgaggaagtacgtgccacctactgcttcatctcaacaggaatgctctgatccagctacggtgagcgccaagagaggcggcgcggcgtcagacaagaactcgacgtcgcagcatgacggcggcggcggcggcggcctgaaggacagcgaggcgaccagctggaggcgcagcgcgcggcgtgggacgccgagagggagcagagggtggcgctcctcgccgccgtcgacaagctcgccggcgccgtctgccgga

SEQ ID NO: 57642 - DNA, 2124 bp, Oryza sativa
  Clone ID: PAT_MRT4530_59433C.1
atggagctgaacaccagaagcttgcagcaatctggtagcagcaagagcaagggcaagatcatggcgaagatcgtcgaggaggatgaagagggggaggaggaggaggaagaagaagaagatagccttagctcaggttgtcactgcttcttgtgcgccatcaaggagcctgatgctcgcctccgccgcgccagcctcgccgcgttcttccgggagttgccgtactgtgaggatgacgatgccggcgccggcgccggcgccggcgttgatggcggacggtcatgtggtgaggtggtcggcgcggtgtggagggcggccatggcggcgcccgacgacccggagctcccgtcgctcggcgcgatccggtgcatgtcgctgctcctcgctcgcgcgctcgccgacgtggagtggcgccgccgtggccggaacgtgtacgtgccgtactacgccgcacacgtcattggctcgtacaccatccgctcctccgcgcacgccgagctggccgtcgcggccggcgccgtgcggccgctgcttgccttcctcggcggcgccatgacgtgggtcgagcagcgcgcggcggcgcgtgccctgggccacctcgccagctacgacgccacgttcccggccgtggcacggcacgccgccgaggcggtgccgctcgccgtgcgcgccgcgtccacctgcgtcggcaacgtctacgcgagcttcgtcgcgctggcgccgagcaagcggccgaagtaccagcgcgatctcttgacgcgcgggctcgacggcggcggcggcggcgtggtcgccgacggcgaggaacggaaggcggaggagtgggcgagccagctccagtgctggtcactctacttcctgagctgcctcgcctccagggacgtgtcatctcatgccacgatatgccatgaccccgtcttcttgcgcgagctctgccagatgtggggtggcctcgccaacggcgactcgccggccggcgtcgggctgctccgccttctctgcaggagcacagccggacgcgccgccatcgccgcatgccgcgacgcgctctccggcctctgcgacctcgcgcggtcgtccgacgactggcagtacatggccatcgactgcttgctcctcctcctcgacgaccgtgagacatggcacgcagtcgccgacgccacggcggcgcgcctcgtcgacctggccgagctccggcacctcggcccaaggcgacggctcggcaatgcaataacagctgcactgcttcttgacgacggcgacgacgacggcgacattgtccatggccgtgagctcggcatggaagcaaaggaggcgatcgccagattgagagaagtgcaggtagagaggaaagggagagaagacgccatgtctagggatgagctgctcaagagaaggatcatggcgaaggagaagaagaggcaaggcaacgacatgttctggcacggcgaggtggagaaggcgatcgagctgtacaccgaggcgctggagctgtgcccgctgagcaggcggcgtgagcggctggtgctgcacagcaaccgcgcccagtgccggctcgcgcggcgcgacgccgacgcggcggtgggcgacgcgacgcgcgcgctgtcgctcgcgcggcccgcggcgaacgcgcacgccaggagcctgtggcgccgcgcgcaggcgtacgacatgaagggcatggccagggagagcctcctggactgcctggccttcgccggcgcgtggctcaaccggaaggacgggacggcggcggccgcggcggcggcgtcgcgcggcgggaacccgaagctgccgtactgcgtcgcgcggatgatcagtaagcagatgggcttgacaggtctcttctccgccgtggcgacgaacagtagcaccaccaaggtagatagagatgatcgcatgccgcattacagcgacggcgacggcgacggcggcgacagcgacgacgaggaagacgacgacgacgacgatcgtgatgaaagcgaggaggaggaatttgctgagaaaggaatgaagctttgtaggccaggtaagggtttaccaatcatcacggacgaggcttggaggagattagctcggaggaagaaggcaacgagccgagtgttgtctcatgatcatcgattctag

SEQ ID NO: 57643 - DNA, 286 bp, Oryza sativa
  Clone ID: PAT_MRT4530_59434C.1
caaaaaaacccttgaatcccccctccggttaaaataaaatttccacccaaaaaaccaaaaattattccaaacaaaaattaattaacttaaaaatttccttaatcgaccaaaaacacacacccatttaagggccaaaaatacatccacttttaaaactaaaactgaagggtcggtccgtgtttacaaaaaattaacaaatggaactttgtttgacacaatttaaaccgtgtcgtttccctaacttcccagaaacaaaattgttgccttatcccaaacctttttttcc

SEQ ID NO: 57644 - DNA, 258 bp, Oryza sativa
  Clone ID: PAT_MRT4530_59435C.1
ctacatccttgggagctgttgtttggtgtaggggcaaaggtccgggccgagatccagacccaaaacaccatgcatggcacgaacaatggataccgaagttggaggttgtcccctggagttctttggaaatcggcttccggaaaagaagttgcaacttgttccaggaacgtcccctcctggccacgtccgtgcgtccagtgccagcacatgtgccatgctgtgtgaccactcccggtccacaccagccatgcgcaccat

SEQ ID NO: 57645 - DNA, 422 bp, Oryza sativa
  Clone ID: PAT_MRT4530_59436C.1
ttgtttttttatttttctggtttttttttttttttttttttttttttttttttttttttttgggaaaacttggggattaaaccaagtttcccaagggggccacattacccaaaaaaactttgggcactttttttaaaatagctcctttaaaggtttaaatttggattactttgccccccggggatattattttcacaggaaactggtttaccagaggagactgtccttaggggacaaaaacttaccctgtttttggggttttcaaatgggggtcttggaaaacctgaaagggaccaacacccttgcaagagtttgaacaattcccaaaggcggattgggggccaccctttcccctgtttcaaacccgggtgggctgggaccccacctcatgggcctttttttggtggccggagggcactttt

SEQ ID NO: 57646 - DNA, 182 bp, Oryza sativa
  Clone ID: PAT_MRT4530_59437C.1
ccgttgccgttgttgaagaaaaccccccttcctcctttctaacaaccaactcgccacccaataaggccataaccttccaaaattctccaatccaatggcgctacccctttccgtttcttctcgaacggcccggtttcttcgccggccatttcacatgccgcccggccgctgcggcgcttccc

SEQ ID NO: 57647 - DNA, 758 bp, Oryza sativa
  Clone ID: PAT_MRT4530_59438C.1
tatatatgcatgcacaaattagctgatgatctctatcgttgtaggtgctagctacaagagctcataatcggtacgtacaaagcgcatcgcagctaggcaggcatcaaattaatcgatctgaatccatggcgcggtggtgcatgagcatgatgcacatcgttcttcttctacttgtagtggtgctcatgctacttaatgtatcatgtgaggccgctagaggcatgcccgcgccgcagggcgccacaaccatggcgaaggccatggaggccggcggcggcgggggtctcaatgaccacaagacctttctgccgccagtgccaggcatgggcggcggcggtgttggaggcttcgctggtatgggaggtcctctcggcggggtcatcggaggcatcggtggtgttctcggaggaagccctgctggtcttggaggaggcctcggcggtggatcctccggtggccttggcggcggtgccggtggcggctgcatccatccgtgatgttgtatcaggcaggcaattactatactcctatatatgtatgtgtgtttgtcattgtagcttaactagctgggaaataagtctcagcagagcctgccctgaaaggatggaccaactacgtaactatactagaatatagttactgcgaatgttataattgcttcgtttcagctccatcctagcttattagtctatctatttggttgttaccttgtactaccctatatatatctttgtaatcgtttcaaaaaaaaaaaaaaa

SEQ ID NO: 57648 - DNA, 258 bp, Oryza sativa
  Clone ID: PAT_MRT4530_59439C.1
atgaaggacttgagtcacaaccgttccattcatcagttacccaagatggtgacaaactatctaagtcgagaagaaatatacaagaaggaggaggagaatcaaactcgtatccgaacttatagagttttggacccaaaaacccaattaaacaccttcaaatgggacaaacatccataccaatataatgaggggcccgaaatgagtgtccaggcgaaaaccggagccaaagaagctggccagagttcagccgaaccatga

SEQ ID NO: 57649 - DNA, 1449 bp, Oryza sativa
  Clone ID: PAT_MRT4530_5943C.1
atggtcaccgccggcgaccaccggtgcggcggagcggcgcccgagagagcggagagaagggggaaagcgaacggcggtcttcggctcaccccgggacaacgacgacgacgagaacggcggccggagcggaagaaggcggcggcgcggttcgggatgacgatgacggcggcgctccgacggtcggcgagcgaaacggaggcgcggacgaggtcgacggcgatgcggcgatgccgagggaggtggcgccgagtcgggaggaggtccggagcggcggcggcggcggaacggagttcggcggcgacggcggagagagaggagcacggcgcgagcacgaatccgacggcgagagcgagcggcgtcagcgcaggagtgttggtggtgctagtggccttgttgttggcgtacgtgggcatggagaagaggaggatgctgagggcgaagcagaggttcttcgagcagaacggcggcctcctcctgcagcagcagctgggttccctggccgcctccggcgtggcgttcaagatcttctccgaggaggaggtcagcaaggcgacggacggcttcgccgaggcgcgggtcctcggccgcggaggccacggcgtcgtctaccggggctccctcgccgacggctccacggtggccgtgaagcggtcgagggtggtggaggagaagcagctcagggagttctccagggagatgctcatcctctcgcagatcaaccacaggaacgtcgtcaagctgctcggctgctgcctcgaggtccaggtccccatgctcgtgtacgagtacgtccccaacggcagcctccaccggtacatccacggcggcggcgccggagccggcgagggcctgtcgccggcggaccgtctccgcgtcgcggccgagtcggcggacgcgctggcgtacatgcactcgtcggcctcgcccccgatcctccacggcgacgtcaagtccgccaacatcctgctcgacgccgggctcacggccaaggtgtccgacttcggcgcgtcgaggctcgcgccggcggccgacgaggccgaggtggcgacgctggtgcaggggacttgcgggtacctcgacccggagtacctgctgacgtgccagctcaccagcaagagcgacgtgtacagcttcgcggtggtgctcctcgagctgctcacggggaggaaggccttctgcccgccgccggacagcgccgccggctcgcaggacgacgacgacgacgacgacgaccggagcctcgcgttcttcttcctcactgcggcgcacaagggacggcaccgggagatcatggacgggtgggtcagggaggaggtcggaggcgaggtgctcgacaacgccgcggagctggtgatgcagtgcctgagcatggccggagaggagaggccgaccatgaaggaggtcgccgacaggctcgccgggatgagaagccgcgcaagcgattcataa

SEQ ID NO: 57650 - DNA, 294 bp, Oryza sativa
  Clone ID: PAT_MRT4530_59440C.1
atgacgcgggaacgcccgcggtgccgcatgcctgttctgcgccaccgccaagcggtggcaggcatgcacccgagcagcggccggtgcggcggccgatgcggtgccgcaccgccccggcgcgggaccgccccagtcacgcatgttggctggaggaggcggtgccgcatcaccagcctgcgggagacagacaaccgtgcgcggtggaacgcgtccggcggcggcatctcgatctccgtacttcaatctcggaacaagctgggaggctgggacggaccagattggattttgtgggcc

SEQ ID NO: 57651 - DNA, 457 bp, Oryza sativa
  Clone ID: PAT_MRT4530_59441C.1
tttttgttttttgttgtttcctggttttgcttttttttttttttttttttttttttttttttttttttttttttttttccaaacccgaggacggactaaccgggttacgtttgggttaagggaaaaaacaacccggttgggggaaaaaaaaacccacggaaaaggggcaaggggaaaaaaaacaaaaagaacctttccaaaatttttggacaaaaaccgcttggggaggaaaaaacatttttaagggaaaaaagggggcacccgaaaaagtttatgcccagggatgggggttttaaggggggggggggtttgttcgtcccgggcgtttaaaattgaattcttggggccgaagaatgaccttggggagccaaacgggggggagggggggaaacattatgggcagggccggggtttgaaaacaaaacgttgctgtttggtggccgctaaaaaggttggg

SEQ ID NO: 57652 - DNA, 207 bp, Oryza sativa
  Clone ID: PAT_MRT4530_59442C.1
gaaaaagaaaagggcactgtcttgggcctgttttttaaaataaataaagaaataatttttggtcttaattttttaacgcagatcaataccaaacccacaaccgaacggttctgaacatatcagttctttatttttggatccaacaagctaaactggaagcccttatatttaaattttgaacaagtgccctactgaataatgccaact

SEQ ID NO: 57653 - DNA, 362 bp, Oryza sativa
  Clone ID: PAT_MRT4530_59443C.1
ggcggttcgccgctccccgacgtcgcgagaagtcccttgaacctgtagtcacgtgttagagagaaaggtgagagacgaccctgtggagtgtcgtcccgtcgtttgtgaatatgtagagtgttgtgccgtgtgtcagtagtagtccacgcccaaacgtgtgtggtcacgtgggtccgtcgttgccacggtaggtgtgtgtggggtggttgtgacgtggcgtcaatggcgtcgttgccgacggtaggtgttgtgggtggtttgagtgcgtcatgtggaacccacgagaggcccgtgggaacctgctaagtatgataagataatttggggtcatgaatgttggctaaaaaaaaaaaaaaaaaaaa

SEQ ID NO: 57654 - DNA, 463 bp, Oryza sativa
  Clone ID: PAT_MRT4530_59444C.1
ttcaacccctgtttgtaatgtgtaaaattctttcctgatcccaaacatatgtataataataataataataataataataataataataataataataataataataataataataataataataataataataataataataataataataataataataataataataatactaaaatagccttcacccgttgcaacgcacgggcattttttctagtaataataatatattaaataaatatatattttaatggaatagcttattcttttttagaaaaaaaagaagagtccatgtcaattacaattgttagttattaacgttataattaaataaatagtattgaaaattgagattctaatgggcggcggcggagatccggcgccggtaggggcagtggcggtggagaaaagagcgggcgcgagcgtcagaggagagagctggtgcaggcggcggcgagctcag

SEQ ID NO: 57655 - DNA, 180 bp, Oryza sativa
  Clone ID: PAT_MRT4530_59445C.1
gtctttcccgggcgaagcgaggagaatgcaacgggtcgggtacaaagctgggacgccctgaaggactggccgaattaagaagtgcttggctaatcggacccagaactcggagatccaggtcacccagcctggttgggtaccctataagaagaagcatagggcattggagaacgagttcta

SEQ ID NO: 57656 - DNA, 366 bp, Oryza sativa
  Clone ID: PAT_MRT4530_59446C.1
gcgattggtggtttatctttgaacatggatgtttcaaccactatgattgtgactcctggaccggtttttgatttcctccttacaaatcggaatgtcagagacattagagatatcgactggcccagggccaagaaaatgttgaaaaacctgagagttaaagctattcacaataacatggagttcaagatcattggtctgagtgatgagccatgctctagacaaacattccccatgaaagtacgaaatggaagcagtgaaggtgaaaccgttgaaattactgtccaggaatatttaagtccaagcaggtggtttaacaatgccttatttgccatgtcttgatgtgggaaaccaaaacgcccaaattat

SEQ ID NO: 57657 - DNA, 1732 bp, Oryza sativa
  Clone ID: PAT_MRT4530_59447C.1
ctctgagtcatccaagcgcgaagcgactcctcgtcgctgcccgcctcccctccccgcgcctgcggaaccccctctcggcgcctcccctctcctccccaaaccctaccgaccgaccaactcctgggtggggggatttttctccatggtgctgccgttcgtcgagtcgcacctagagccgtggccggagctcgccgacccgtacgccgacctcgccgacctctacccgcggaaggtctggcaccagcgaaccctgaaagcgaaacatctaccttctatgtctggcggcgaaaaccgttgccacgctagaacaaggccctacgaatccattaactgattttgtacggcaaaataaacttcgctgcgatgaacctggagaaggtcaatcggaaggcgtccaagaaccttttagacgaaggaaaatctactctagatagagtgacttttattgatcacacagcccgtcgaaactactacttgatctcctattgaaaccattaggtacgccaagattctaatgggtccgacaagtatgcccttgtgcatttggcttgcactactgtagactcacgatctggggcattcaaatcttattggccagtttgtcgttgcgctcaaagttcatgctagcctatactggatatcatttcagaaccgttaggctcgccaagattttgatagtttttatgagaatgcccttctgtatctgtgcttacactactgtagagtcactctctgagtctttcaaactggatttggcatttgatctctcccttgcagccttgcttggtgataacatctacaactttggggaattgttagctcacccgattatcaacagtcttattggaaccaaggtggagtgggtctatcatatgttacaagcattcaacaccggcaacctagctctctaccaagaactatgtagggtccacaatgctgctctcagtgctcagccagctttggtgcagaatgaacggaaactgctagagaagatcaacattctatgtctgatggagataatctttagccgggcgtcagaagacagaactatcccattaagtgttatagccgagcgcactaagctttctatcagtgatgtggaatatcttcttatgaagagcctctcggttcatcttatagaggggataattgatgaggtggacagcacagttcacgtgtcatgggtccagcctagagtacttggaattccacaggtgaaggcgttgcgcgagcggttggacgcctgggttggaaaagtgcataccaccctgttgtccgttgaggcagagacgcctgatcttgtagctgcataacttatccaaccttccttttgctatatggccttggtcaccaagggtgcggtgcgaaaagagagatgatctggctgtggtggctgtagttttctgggtgatgaaaacatgttgccttgaacgtttccctggcaccctattgatcaggacctgtaatttcatttctctttaaatcctctggacgttgaggcctggagcttgatgcattgatcacggaaaaagcacaagcggatcaaaagtttcataccagtagggtgtcattgtagttcttttcccagtgtgatttagattgttactcagcgggtattttcatattcttttcctcatatatgctggacatggatggaggaaaatcttactgattttcgttatgttgaaaaggttatgttcccctgaacacaaaaaaaaaaaaaaaaaaaaaa

SEQ ID NO: 57658 - DNA, 1639 bp, Oryza sativa
  Clone ID: PAT_MRT4530_59448C.1
aaagagaagagatagctctttgttgttcgcctccgctcgccgcgcctgcagatccccctctcgcctcctctcctctcctccccaaaccctagcgagcgaccaactcctgggtggggggatttttctccatggcgctgcagttcgtcgagtcgcagcgcgaggcgcggccggagctcgccgacccgtacgccgacctcgccgacctctaccagcggaagctctggcaccagctcaccctcaagctcgaccacttcctccagctccctgccgcgcagacgggtgacaccctcatacagctctacaacaatttcatcactgatttcgagacgaagatcaatcttctcaaacttgcgcatttcgcggtcatcgcttcgcgccagtaccccgacaaggatgctgctataagtttcctcgagggggtaatcacaaaattgcgcgagacaaaggacctgcgcatcaatgaacccattctctacgtcaagatgcaaatcgctgcgattaacctggagaagggaaatcagaaggagtgcaagaaacttttggacgaaggaaaatctactctagatagcatgactgatgttgatcccacagttcatgctagcctctactggatatcatctcagtaccataaggctcgccaagaatttgctgagttctacaagaatgcccttctgtatctggcttacactactgtagagtcactctctgagtctttcaaactggatttggcatttgatctctcccttgcagccttgcttggtgataacatctacaactttggggaattgttagctcacccgattaactgcaaggcgtccaagatcaacagtcttattggaaccaaggtggagtgggtctatcatatgttacaagcattcaacaccggcaacctagctctctaccaagaactatgtagggtccacaatgctgctctcagtgctcagccagctttggtgcagaatgaacggaaactgctagagaagatcaacattctatgtctgatggagataatctttagccgggcgtcagaagacagaactatcccattaagtgttatagccgagcgcactaagctttctatcagtgatgtggaatatcttcttatgaagagcctctcggttcatcttatagaggggataattgatgaggtggacagcacagttcacgtgtcatgggtccagcctagagtacttggaattccacaggtgaaggcgttgcgcgagcggttggacgcctgggttggaaaagtgcataccaccctgttgtccgttgaggcagagacgcctgatcttgtagctgcataacttatcgaccacttgtcctttcgctatacgagcttggtcaacaaggctgcggtgcttaatgaaaggtgatctggctgtggtgcttatagttttctggagaatgagaacatgttgccttggatatttccctgcgtcctgttgatcaggatctgtaatttcaccctttcttttatcctttgggaaaagagtcctggagctatcacggaaaagatacaaacgggccaaaagtttcataccggcaagatgttatcgtagttcttttagtcaaatttagattgtaatgcagaggatattttccccttttatttttacatggatgcaggaaactctagctg

SEQ ID NO: 57659 - DNA, 321 bp, Oryza sativa
  Clone ID: PAT_MRT4530_59449C.1
atggtggggctacgagcctacggcgcagagacggcggcgacggctgtccttctctctttctcctctgtttccgagcaggaggagagcgctggagggtggggccccggggtagagggagggggtgccagcgcaattggggatgtggtgaatgtggccgtgcccggctggccaggctatgacaggagcgcggtcgacggcaatggtgacgagctcggaacaactggatccgacgggaaactcgctcatttcggcctcggcggtgagattagcggcaggaggcagcgcagtgcagcggggttagcggtggtacagtgcggctga

SEQ ID NO: 57660 - DNA, 807 bp, Oryza sativa
  Clone ID: PAT_MRT4530_5944C.1
atggcggcggctgcccccgcgacgacgtcatccgcggccgcgaggccctcctcctcctcctcctcctcgcggcaatccgacgctcctctgcgcgccgccaccgtctccttcccttactccccacggccggccgcgttggctgcaggcgctcgggcctcgcgggttagccccgtcgtggtcgccgccggcggcgggcaccagcggcttatggggtcgttgactaacacccaggggctcaggtttggagtggttgtggcacggttcaatgagattgtcaccaacttgctactgcagggagctcttgagacatttgagagatattccgtcaaaaaagaaaatataacaataatgaccactattgtaaccgttatgcatgcatacaaaattgttttgttacccttgttcccgatgttaagggttaatatatgtttcatgcccatccacctgttcctttcttatttcattgttcagaaatactgttctgaagttgtaagtgttcctggcagttttgaaattcctgttgcggcacaaaagcttgggaagtctggaaagtttgatgcaattttgtgcattggcgctgtgattagaggtgacacaacccactacgatgctgttgcaaactctgctgcttcaggtgtactgtctgctggattgtctgctgagatcccatgcatatttggtgttctgacatgtgatgacatggaccaggctctaaatcgtgctggtggtaaggctggaaacaagggagctgaagccgctctaactgcaatcgagatggcctcgctgttccagcatcacctggcctga

SEQ ID NO: 57661 - DNA, 1212 bp, Oryza sativa
  Clone ID: PAT_MRT4530_59450C.1
ggcgcggcccgtgggtccgcgtcctgtctctcagcgcctgcccccctcaggagccgggccagaagctctacagatggctcgctcttcggccgcaccctgacaagcccgcgtcggttggcgccgagcgggccctgaagcgtgtccccgtggcgtgggccgtccccgccccgaagagcaggaagatgcaatatgatcagaagagaaaggatcatcctgtcactaatgggggcaatggtttgtatacttatgataagaaagctcataagcgggctagaaagaatgctgcggcttctgcggccgcagcagctgcagctgctgctgcagcagcagaggctactacacgtcctgtgggacttgatacattttggacatcatgcaatcgctgtcggatgcagtatgagtacttgagaatttacctgaatcacaaccttctgtgcccaaactgtcaccatgcatttatggctgtggagactggatatccttgcaatggaaccagttcctcgttctcctggtcaaccaagcagcagcagcagaaccacaagcactcatatagctcagcaagcagaacctctggtgttccaggaacgggacatggtgtataccaacaagagaacacttacgagacctacaacaaccaaagcttccaatggaatcagtactccaagacaaataattctgctggtacaaatgcttacagtagtactgcctcagagaaaccaaaaagaaaacatgaggagagctatatatacaattattcgtcaagtggcaatgagtttgggcaggagagacctacatcaggacgggggcgattttcaaaaaggaggcagaatattaataatggatatgcttctgttgattgtaatggagataacaaggaaactgtggctgcaactgcaggaacaactgtgcttgctgatgttggaagggttaatggtacttccgtggagaaattcagatcagcagtaagtggaagaagagctaatgtcatgagggagatattccaacttgacacccgaggtcttctcattgagaaagccaaggcagcaatccgtgaaaaattacaagatttgaatatttcagcaacaagacatattgcagccaaagggaaagcagaaagaaaaaatcacgtggaccacgatgtaaaggggaatggcatcctccctcataatccaagccataaattcaagatatgtaactcaaaaggtgctgatg

SEQ ID NO: 57662 - DNA, 2055 bp, Oryza sativa
  Clone ID: PAT_MRT4530_59451C.1
ggatggattgattggccgggatatgctgataccattgagaggaattgttgactgattgattcctacctggtgatggcttccaaggctgttcctgatgtagtcaccgacaagaaatgcgataaaaccatggcggcatcctctgaaatgtcgcaatcccaagaagttatttcgagagggggtaaacttgggactgcttcatccagagagactctgctgggggatgtagccacgtccagtggggtgaaagaacaagataaggatagctgttctgttgatgaatctgtgaagctggatggcaatgaagatgctgagaaaagctcgttgcgcggcagcgttaaggatagctcggcttctgccaaaggcagcgacagggcaagcagcctgacaaaggtgagtggcagcacgaaggtgagcgaccatgctgctgacattgttgggagcagcaagagcagtgtttatcgagccagtgctggcagtgatgtgagtgatgagagcacctgcagcagtatatgcagcagcgcgagcaaacctcacaagtcgaatgattcaaggtgggaagcgatacagatggtccgaaccaaagaaggttcgctggggttaggccatttcaggctacttaagaggcttggttgtggtgacattggcagtgtttatttgtcggagcttagtggaacaaagtgctacttcgctatgaagattatggacaaggcgtctctagcgagccgcaaaaagctactgagagcccagactgaaagggagatattgcagtgcctggaccatccttttttgccaacattgtacactcattttgagactgataagttctcatgcctagtaatggagttttgccctggaggagacctgcacaccctaaggcaaaagcaaccggggaagttttttccggaacaagctgccaagttttatgtggctgaggtgcttcttgctctagaatacctgcatatgcttggcatcatatatcgggaccttaagccagaaaatgttcttgtgagagaagatggccacatcatgctgtctgattttgatttgtccctaagatgtgctgtgagccctacccttctgaaatcctcaaaccctggggtagatccaaaccaaaagggtaatccatcttattgtgtacagccagtgtgcatcgagccagcttgtatccaaccctcttgtgttacaacgaccacatgcttcgctccacgctttttctcctccaaatccaaaaaggagaagaaggcaaaaacagacattgcaagtcaggtcagaccacttcctgagcttgttgcagaacctacagatgcaagatcgatgtcatttgttggcacccatgagtacttggcacctgagattataaagggtgaggggcatggaagtgctgtcgactggtggacttttggcatattcttgtatgaacttctttttggcaagacacctttcaaaggttcagggaatagagcaacattgttcaatgttgtcggacagtccctaaggttcccagaatcacctgttgtgagttttgctgcaaaggaccttattcggggtttgcttattaaggaaccacaacatcgtttggcttataagcgtggagcgacagaaataaagcaacatcccttttttgaaggtgttaactgggccttgataaggtgtgcaactcctccagatattcccaagccagttgagatccctaggtcagtagcctcaaccagtcaaaaggctacaacaactgctgagaaaggttcagacaattatcttgaattcgatttcttttagtggagtcttataaaatcatttatgtgcaagttgtaaagttcttttctttttcctagaccttttctggattcttataacttgatattcagttggcctatgctcccatttctgttcttaagttccttttgcatttcgtggacctccatcaatcgcattagattagatgggagacctttctgtttagaacctgtaatcctcctttttttttttcactgagcattaggtttccttgaacaacaaataaataatttcttttcaatctgcgactgcggttttccg

SEQ ID NO: 57663 - DNA, 294 bp, Oryza sativa
  Clone ID: PAT_MRT4530_59452C.1
atgtcgacctgccattcttcaccaccatcgctcgtggacctcgtgagcctcccaccttcttctccggcgggcggcggcggcggtggcgccggcgccggcgtggtgcaggtggtgccgctggacgtcagcgaggagctcctgggcaagttccaggacaccagcgagttcggcttcgagtacgagaagagcggcctctggtcgccgctggtggtgcggccggaggccctcgtgctcgccggcggcgggaagcgccggcgccggagctggaggaggaaggtgttttgctgctggtga

SEQ ID NO: 57664 - DNA, 243 bp, Oryza sativa
  Clone ID: PAT_MRT4530_59453C.1
acacagttcccgactgaacgcagtgaccaaccatattgattactcactcatagcaccagcttacacttatctccgctcgtattttgtggaattgtgaccgataacaattcacacagaaacagctatgaccatgattacccaagcttaatcgatcatatagggaaactgtacgcctgcagtacgttccggaatcccggtcgaccaacgctcccgacgcgtggtgcgaagacatggagtccaata

SEQ ID NO: 57665 - DNA, 437 bp, Oryza sativa
  Clone ID: PAT_MRT4530_59454C.1
ctttaattggacagaaaaaaaaatctgccctgggagcgaagcgtagaatcggcttctcaagatgcagatctttgtgacgaccctcacctgcaagaccatcaccctcgagggggagtgctgctacaccattgactatgtcaaggtcatcatccacgacaaggagggctattccctggaccaggagcgtctcatctttgctggcacgcactttgaggatggccggaccctgtccgagtacaacatccagaaggagtccaccctccaccttgtgctcaggctcaggggaggcatgcagatcttcctctagaccttgactggcaagaccatcacccttgaggtcgagtcctcggacaccattgacaatgtcgaggccaagatccatgacaaggagggcataccaccggaccaggagggtctgatcttcgctggcaagcagc

SEQ ID NO: 57666 - DNA, 308 bp, Oryza sativa
  unsure (1)..(308): unsure at all n locations
  Clone ID: PAT_MRT4530_59455C.1
acggtcgtgctccacacgcacggcctcgtgagcagggctgacgcggcatgccgtgttcgagagcgacgacggcgaggacctgaaccccatgggcatcgtcgagaccgtcnccagctacgtcgccagcgaccgcggcgcgcggcgcgcccgaccatgtatgtcgccagccatgcccgccgcggccgtggccgtggcgtgtagttcggctgataactgtggcggtgatgactgatgaggaattcgctctggaatttcctcctgaaataataaaaatagtggttggttcttcctgaaaaaaaaaaaaaaaa

SEQ ID NO: 57667 - DNA, 1536 bp, Oryza sativa
  Clone ID: PAT_MRT4530_59456C.1
atggctcccgcctgggtcttgctcgatcgcgtcgtcaagcccgccgtcttcgacgaagaagagagcaaaggtaagggagttgtgattgccttctcttgcactgatctagctaattctttctgcatggggcactcgaaaaaaaactcttcgactgctccccgtactccaaacccacccacgcgcaaatccgcgatggctcccacctgggtcttgctcgatcgcttcgtcaagcccactatcttcgacgaagaagagagcaaaggtaagggagaatcgaccggcgccccagtgaagtaccttccagccagattaaggcaggaagtccccgccggcatgcgggacgtgaagccctacccagaggttgcggatcctcccattgtatctcgcttctccatgctgatttcgcggaaggcgatcagggtagtggaatccatccatgtcgagtgcgccgacaagagccttgtcttgttctacgccggcaccggcttccccggcttctcccacggctgccacctgatctacgacgccatcgacggttctctcactgcagtgcacacgttcccctttcctgtgtccggagtcgtctgggtcggcacagccgctgtcctgcgccatgccggccgaccccttcaccaccgacttggtgttctcgttcggtgaatcgtgcctgtgctgggccgatctgttcatgggcatcctgttctgcgaccttgcgacgctgcgtgcacctcggttccgtttcatcccattgcccaaggcttgctccttcgaccccgtcggcaagtatggccggcctcacatgcccgagttccgttccatgggccgcgtcaacggtgtcatcaggttgatcgacatggagggttttaccaacgagtacctggccgtggatgaggtgaagctgaccatctggaccctgtcagccgacctcagcgagtgggagaaaggcccggtgtgtactgtaggagacatttgggccagtgaggaattcgtcgccatggggttgccgcagcttagaccgatgtgccctgtcctgagcatggttgacgaagatgtcgtctgtgtagtcatgactgaagtcgagattgaggagagcgatgtcacagatttcgacgatgagggcaacaagctcaagttcaaggcccagtacgttcttgacatcgacgtgcggcgtaagcgggtgttatccatcacccagcaccacattgaaagtatgggtgatcttataccagatctcatcgcctgtgagttcactgcatactcggagctctcaaaaggcatgcaggcaatggtggaaggaaatgagggtgaggaaagcacaaagcggatgaaggttaaatgatctctgcatcatgtggaacttcgatggtttttgcaacatatcaagtaggattaacattgaagattggtgtttgattagcacccatctatgtggaaggatgaatgtgatgtaatcattctctagaagttatgatgttattatcagatggtagtaaaactgaattaaaagtaaattttgttaacgctgatggttttaac

SEQ ID NO: 57668 - DNA, 257 bp, Oryza sativa
  Clone ID: PAT_MRT4530_59457C.1
ggggaaaaaaaaatgtttaaaaagatggggaaaacgggggacaagggggggacctttatgctggagcccaggaataccttcacggccaagggggggggaccggaagggaaccaaccaaccaaagaattaacttggaggaaaagcgggttcaggccgggaacccgtttccaaccaactaaaagactcgaaaacaaagagaaggccccaacgaaatttttggacaccgacaatttgaggcctaaaaaaccaccccaaac

SEQ ID NO: 57669 - DNA, 678 bp, Oryza sativa
  unsure (1)..(678): unsure at all n locations
  Clone ID: PAT_MRT4530_59458C.1
nactcactctaaagcggggccgccctcttttcttttcttttttttctttttttttttttttttttttttttttttttttttttttttttttttttttttttttttttttttttttttttgggggaagaaaacaacccaaggggggagggggggggaacattggaaaaaagcaagggaaaaagggggtttaagccaattaaaaaaaaaaaacttttaaaaaaaaaattaaaaagggggcctttaaaaaacggaaaggtaaccggggaaaaaaatattttaaagcacagggaaaaaggccaaaaaagggggttacaggcttccggggtttaagggaggcagggaaagcttaggctataaaaaagggggctttacttccaaagtttccggagggaaaggtttttttccggggtttttttaaaaaccttggccacgggcatttaaaaggcctttgggggaaaaggcccccttttttaaaaaaaagaaaaaattcaaatttttgggaaaaccgccttgagctcggttccggaaaccccattaattttttaagggatttttttaaaaaaaaaacccccccaaaaggtcattttttttgaaggaaacttaaaaaaaaaaaagggggaatccctattaggagaaggaaaataaatttttctggttatggaaccaggcctaaaaagg

SEQ ID NO: 57670 - DNA, 477 bp, Oryza sativa
  Clone ID: PAT_MRT4530_59459C.1
atggagagaagcaaccagcgatttccccagggcgccggcggtcaaggaaacttcgtcgctaggggttttcaaccggggtatggaggaggtgggtctcaggctgggagaggtcggccggcgatggtggaggtcatcgctccggtcggtcagttggataactggtctatcggcagcaattttggtgcacaagccgggccatctactggccatcagatgaacttcgacgatagagctatttggactaaggtccagcgtagagttgggctcaaggctgagcgcgacactgacgacagcgcgacagtgctcaaggtcatggtcaaacgtgtagcgacgccagtgtggcttggtggacgcttccaaccaatgccgatgctgatccatccattcaccaacggactaaccatccattcatttgtctcggacacattgatctccatgctgttgggtacatggcaggcttgctggtcaccttcctaa

SEQ ID NO: 57671 - DNA, 474 bp, Oryza sativa
  Clone ID: PAT_MRT4530_5945C.1
gtggtggtgccactacttttttgttttccactttttgcacagacacctttggtccgagagaaccgactgcgacttgccaaggacccattataaaatttgaccgacgcgacacattgcctctttatcaagacagaataaagtcccgcgccgacggcggcgggaggaaaccgatgttaaatgttctttccgcggaaatcatggtagtgctgttggatgccgaaaatgcactacctccggtcctatctggaacgcccgcacgcgctgcgacaacagggtgcccggcacgcgggcgggtaaagccgcttttccccggcctgggcacctattgaaagctttgccaacccttaaccttgttgcacggggagcttttatccacggccccgtcggcgtaaaaaagcaggggctccgagtcctccatttacgccatttggaaaaaagaaatggggacaggtgggggggggcccttgagcctgc

SEQ ID NO: 57672 - DNA, 1281 bp, Oryza sativa
  Clone ID: PAT_MRT4530_59460C.1
atggcggcggcggaggaggggcagtgggtgctcatggccaccggccgatctcccaccaacatcgccgtcatcaagtactgggggaagagggacgaggcgctcatcctccccgtcaacgacagcatcagcgtcaccctcgaccccgaccacctttccgccaccaccaccgtcgccgtcagcccttccttcccctccgaccgcatgtggctcaacggcaaggagatctccttgtcaggagggaggtttcagagctgcctgagggagatccggaagcgtgctcaagatgtcgaggatgagaagaaggggatcaggatcaagaaagaggactgggggaagctacatgtacacatagcatcgttcaacaacttccccactgctgctgttttcacccttggaaagctaatgaatgtgaaagaagatcatggtgaactttcttccatagcaaggcaagggtctggaagtgcatgccgcagtatatatgggggattcgtgaaatggtgtatgggaaaaaataatgatggaagcgacagcatagctgtacaacttgctgatgaggcacactggaatgatcttgttattatcatagcggtgactgtagttccagaacgggtgttgaaaatggaagaggctatcaagtctcgtaattttgagtcctttgccaggataattagccttgtggagaagtggaaccagtcagaaggaaccccacaggttgcttacaccttcgatgctgggcccaatgctgtcctaatcgcaccaaaccgcaaaaatgcaaccattctccttcagaagctcttgtattatttccctcctcaagataatgatctcagcagcgacgacgctgcgctgctggctgtgctctcgaacgccgcggagctcggctgctatgcccccgcgctccgcctcgacagcgcagcgaggcggccgctgtcgtcgtcgttgtcgaaggacgacggcgcggcgaggtggacgtgccgcgccgcggtggacctggcgagggtggtggagtcagccgcgccggaggagatgccgccgccattgacagtggacgaggaggtccggctcgagtgcttcgccaagagcagcggcgcggtgctcttccggctgtaccatggctgtctcttcgagctcagcttggcgacaatggaggtcaggatgactgtgaagatgaagccggtggtggcgctgttcctagtgaccgtcctcatcgcctcgcatggtgcgatgatgcagtgggcggcggaggcggagacgtgcaactacccaatctacaagtgctag

SEQ ID NO: 57673 - DNA, 462 bp, Oryza sativa
  Clone ID: PAT_MRT4530_59461C.1
atggccgacgcgcacaacaacggcgggacggagctacttcacgacacggaggtgcgcggcgagcttcttctcccgccgctgagctcgaagagacagccatggtacagccggaagagcaccgcgccgctgctcttggcgaagcactcgagccggacctcctcgtccactgtcaatggcggcggcatctcctccggcgcggctgactccaccaccctcgccaggtccaccgcggcgcggcacgtccacctcgccgcgccgtcgtccttcgacaacgacgacgacagcggccgcctcgctgcgctgtcgtccttcgacgacaacgatcgatatctcgtggcgcctcgccacggccaggccgagcgtcccgtccggctacgacacgaggagcatctccacgctcggcttggcgacgcgttcgaggttcgagggatgagggagtttgatctgcgccgacggcgatga

SEQ ID NO: 57674 - DNA, 2219 bp, Oryza sativa
  Clone ID: PAT_MRT4530_59462C.1
tttttttttttttttttttttaacaacaggacttgatcaatttatttcatcatttttttattaccagtattgtccttggagcagcaataacagccagtgtcaacggaggagaaaaatattacatcatcaaagccgagtttatgaccctacaaaagttgaattcgctttgcgctctcagtacaaactctccgaatgacatagtttcagctacactcccttggggagccccgtgaccgaatcgatcaatgctaggctttcgtcagtgacaacttttgggccagctccaagcctgctacagatgaagtagctcacatctcccttgaatttttggcatcggcatcttcgtctcggcaggagctgggagggcctccacatcttgtatcgatttcagtccagcatcgcttagaatcgacttgtcgccaaccatatagctgctgagatcattatcttgaggaaggataatactacaggagctcatcaggaagatgtacagctatgctgtcgcttccatcattattttttcccatacaccatttcccgaatcccccatatatactgcggcatgcacttccagacccttgccttgctatggaagaaagttcaccatgatcttctttcacattcattagctttccaagggtgaaaacaaaacaaaccaagccagcagccgaagaggccaaaccagcagcagtggggaagttgttgtacgatgctatgtgtacatgtagcttcccccagtcctctttcttgatcctgatccccttcttctcatcctcgacatcttgagcacgcttccggatctccctcaggcagctctgaaacctccctcctgacaaggagatctccttgccgttgagccacatgcggtcggaggggaaggaagggctgacggcgacggtggtggtggcggagaggtggtcggggtcgagggtgacgctgatgctgtcgttgacggggaggatgagcgcctcgtccctcttcccccagtacttgatgacggcgatgttggtgggagatcggccggtggccatgagcacccactgcccctcctccgccgccgccatggaaggagaccgatcggcaacaaagagaccacggggaggggcagaagatatcgagggcttcgtgggaggtagaggtgatcgcagatttagacagctccccttccccacaagttgcaaaaggaaatcagatcatggctagtaaaccaaaaggcattaagctcaagagaaaggaaatttgtggttcagctagacctattggtggcttagagaaatcatctcagaacgggaaaaagaagaagaatgatgactccccagccgaggtagtagaacttcaacctgtgacagagatgcagccacagccatatgctacagtactgggtaatctagtggttcccaatgacctagaacttttacatgtatcacagtcagcgttcgaattaacgggctatcacggtttggtcgatcaacggcggtgggaagttaggaatagtaccaagggtagcatcaaatgagtagctgtacttgagtggtctcatgttgataaagggggagtcagctctgagaaacctcgcgatttcttggacgacgtgcttccactccttgtagtcggcttcttggagggtcttcttggagtcgtcgaggagcgtgcggatgtgggtggtgaggcgagggacagtgtcggcgcgcctggcgagtagaagcgcaacgaggaggaacctggcgaggaagcggaggtgcttggtgggggcaaagagatggtcggcggcgtcggcgaggaagtagccgcggtcgaggacggcgtggtagaagacgaaggcctcggagaggagggcggtgtccgaggtgcgctggtactgggagtagtagaggtgagcgatgcgggcggcgatctcaccgacctgccatcggcggagcccggcgtcgaggaggcggtgacggtgctcctgctgcatgcgccacagctgggtgtagatgcggaaggccttgccgtattcatcgggctcccggcggccgaagagggggaggtcgcgcacgcgggcgaagcgccggtctgccttgtccagcagcgaccagaactgctcggccgtcccgccaccgccgccgccgccgccacctgcttgggcttgggattggggttggggagctacaacttggtgcggcgacgacgccatggccctgccgcccgggcctccccccgcttcctcgccgcctccc

SEQ ID NO: 57675 - DNA, 1508 bp, Oryza sativa
  Clone ID: PAT_MRT4530_59463C.1
ggctgtaaggtgtaagtgtgttcagcgagatgcgagcttcttcttgacctcgacgtagatccatggccggcaccggaggcagccctctgctccgctctccctctccggtgatgaacaccatgccgacgccgccctccgccgcggtgttcgacgtcgaggccgcgtccggcgctcgccgccttggcatcaagcccgccgccgacgccggcgccgccttcgtgctcgagtccaaagggaagtggtggcacgccgggttccacctgacgacggcgatcgtggggccgacggtgctgacgctcccgtacgcgctgcgggggatggggtgggcgctcggcctggtggcgctcaccgccgtcgccgccgtcaccttctacgcctactacctcatgtccagggtcctcgaccactgcgaggcccacggccgccgccacatccgcttccgcgagctcgccgccgacgtcctcggatctggatgggtgttctacttggtggtcaccgtgcaaactgccatcaacgccggtattaccatcgggagcatccttcttgcggctgactgcttacaaataatgtactcggaccttgcaccaaatggacccctgaaactgtaccatttcatcatcgtcgtcgctgtggttctgtccttgctctcccagctgccgtcgttccactccctgcgttacatcaacctcggctcgctcctcctcagcttcggctacaccatccttgtctcagctgcctgcatccgagcaggtgctttgagcgatgtcccggagaaggattactccctgagctcatccaattcggagaagaccttcaatgcgttcctctccatttccatcctcgcctccgtcttcggcaatggcattctgcctgaaatccaggcgacgctggcgccgccggcggccgggaagatgatgaaggcgctggtgctgtgctacacggtggtgttgttcaccttctacttgccggcgatcaccggctactgggcgttcggcagccaggtgcagtccaacgtcctgcagagcctcatgccggacaagggcccttccctggcgccgacgtggctgctcggcctcgccgtcgtgctcgtcctcctccagctgctcgccatcgcgctcgtctactcccaggtggcgtacgagatcatggagaagagctcggccgacgcggcgcgcggccggttctcgcggcggaacgtggcgccccgggtggcgctccggacggcgtacgtcgcggcgtgcgcgttcgtggccgcgatgctgcccttcttcggcgacatcgtcggcgtcgtcggcgccgtcggcttcatcccgctcgacttcgtgctccccgtcgtcatgtacaacatggcgctcgcaccgccgaggcggtcgccggtgtacctcgccaacgtcgccatcatggtcgtcttcaccggcgtcggcctcatcggcgccgtcgcctccgtacggaagctcgtgctcgacgccggccagttcaagctcttcagcggcaacgtcgtggactga

SEQ ID NO: 57676 - DNA, 288 bp, Oryza sativa
  Clone ID: PAT_MRT4530_59464C.1
atgacggagctaggctggtggctactggccatggctctcttctttggtggcggtggctgcggctacttccggcacagcacagctatcgggccgggccagcatgggtacaacccgactcccgagtcgaaccgtgttgtgcctgggacgggccaaatcaccgggccttgggtcaggccgtcggacctcgggccatatggccatttatacttgaaggctgctgtcctctctttcgctgttcatgcccagctaatctggaaatgctccaaacttctgattccccaactctag

SEQ ID NO: 57677 - DNA, 221 bp, Oryza sativa
  unsure (1)..(221): unsure at all n locations
  Clone ID: PAT_MRT4530_59465C.1
cacatctcaagggttgtttatggtacatgagttattcccattttggagaatggaaatgcgtttttcgcggctggtcttgggcccattgcccatcnattggatccctgaatggngctgccaattttcgggggttgacaccatggcgcagatcttcgggtgttgagcgatattatgggctnggtccacgagatattgtgtagtggcactgtggcgagcccttn

SEQ ID NO: 57678 - DNA, 293 bp, Oryza sativa
  Clone ID: PAT_MRT4530_59466C.1
ctgctgctctctccggagccaaggcgaggaggcggcggcggcggcggcggcggcggcgcgagacgagatcgtcgagtccggcaccccacccccgtccttcgcttcacacgaaaaggaagggaggaagatgagctccgtgtctgaggcggggcaccagaccgggatgctggtgtgcttcacctgcgcgcttcagtacattgcttttcccaattgatatgctgttcctataccattcctacaaaaacttttacactatcttttaaagcttaatattctacatttattcttacatt

SEQ ID NO: 57679 - DNA, 570 bp, Oryza sativa
  Clone ID: PAT_MRT4530_59467C.1
ccaaacaagctgcgaatctgcgataggatgaaatgaaaaccttcccgccaccgccacacgcgcgcccacccccctctcgatctccgctcccgccgcggccggcgcctcctccgcgcccatgccacgacgacgcctcctctccgcgcacctcatcggcggccgccgagcgcgacctctcccgcggccgcaccaccgaccggcgcgctgaggctgttcggcgaaatgcctgtggcggaccggaatgccgtctcttggacggcggccattggcgtgctcatgcgggccgggagggtgtgtcgcatgctgcaatgccacgatttctgtgtactgcagcagcggtcgtgcccacgatgcttttatgcattatttgaggggatgccgaggaagaacgtgatctcttggattgcgatgatcagcggcggtcagatgtgggctacgggaaggatgaagcccacgccaagcaccttggcatgtgccaatgtgccagacatattgcttggtttgcagatggccaaactgccaagcttggttattggtagttgcctctttggaagatcaagctgtgaataa

SEQ ID NO: 57680 - DNA, 1337 bp, Oryza sativa
  unsure (1)..(1337): unsure at all n locations
  Clone ID: PAT_MRT4530_59468C.1
tttttttttttttttttttttgtatgaaattcttaccttgaaatgatttcatttttaatatacgatcaaatccccaattgctacaacttacaaatgtcgcagtgcagctatgcaactatgttcagttgaaagctgtgcagtctcttctgatctctccatgcttcccggacttgactccgaccctgccaagcttgaccatggcctccttgaacgcctcgaagaagagcgtctggttcttggcgaagccggtcaccgccggccgcgacgcggcgtcggtgtagagctcctggtcggaggtgaacaggccgaggccgccggcgaggttggcgtagtaggcgttgtcgaaggcggccggggtgatggggtccatgttgacggcgatggtcggcgcgacgtcgcgcgggcacgccgccatcagctgccgcgcgtacgccgggtcgtaggacgggtccacgccgccgccgacgcggccgtacagccggccggcgaagcgcgtgcagtgcgcgaagccgacggtgtgcgcgccggagagcgccaccatgtcgagcacggtgaggttgttcttggcgaatatggcggcgaggtccttgacgcgcatgtccgggcctggcagcttgccggcgacgccgccggacttggagacgaggccgtctagccggccaagctcgacggtccagcgtgggccggacgacatggcgacgacgtccctggcggcgatggcgaggatgtcggcgcaggagaccacgccggggcacttcttctcgaccgccgccttggcgcgcaccaccgtgtcgaagccgtcgccggcgagcgacaggttgtccggcgagtccttctcggcgtcgttgccccgcgacgcgatcatgaccgacgcgtcacacccctcgacgaagcagtcgtggaagaagaggcggagcgtggccgggacggtgacgaaggtctccttcaccttcctcgccaccaccgaccgcacgacggactccacgccggggcacgtcgaccggtagtgctccggcgacagcctcgccgcctcgccgccggccgccgccgccattgccaccaccaccaccaccgccgccgccgccgcgacgccgtacaggctaccacgtcgctccatggagctgccgcgcctcctccttccgcccgatggactccagcttggggcacgacgagctgtagtaccccgccgacaagtccgccgccacgccggggaacgccggcattacggcnagcattgccaccgccgccatcacgacggcggcncacgggcttcttctccttctctccatggccgacgatgagaacatgagagggggaagaagaagaagaagaagaag

SEQ ID NO: 57681 - DNA, 475 bp, Oryza sativa
  unsure (1)..(475): unsure at all n locations
  Clone ID: PAT_MRT4530_59469C.1
cgtccgcggcatggcaccagaccacggggggggggggggatcacngaagcacgctggcagctaccccagggagcaaggccatcacggatgctgccgcggatacggataccacggaggatgtccccggagatgatccaccggccactagaagacggaccccatgtaccgcccccaggagcacaaggaaggaaggtcacagatcgtaccacgtacatacgtacgagcggcgccgactagtaacaacggacacaaaactaaaccaatgaatacacaataatgaaaatgccatgccaggacagtatatatgtgcacatataaaagatgtggcacgtatatgcatatatggaccacattacgtaccgtatgtatatgctagcatacggtggctgggcttatacctagatatatcacaatacatgagtatatgatactaaaaactagtgctcgtacctcttaatgaataatgaaatgtttt

SEQ ID NO: 57682 - DNA, 380 bp, Oryza sativa
  Clone ID: PAT_MRT4530_5946C.1
acctattgttgctactacaacatctagctggagtattcgaagaggacgaggaggttgagaaggttgcgacggactgagcgatggctacgagcgtgctgacgagctcttgcgcagcgaacattccgatcatagtacctgatactgagggatctagcacaccgaattgccttgcctacaacagcataaggggtgccaaacacaactctgtaccttggagttatcaacctgcctgtatagctcactactggaaatattgttgtctgcattctaattgaacaacttaattggggcctacactggttacatatgagatggctacgatagggaatcgcattcacatgttaacgacattgctaatgagcacactattagccatggat

SEQ ID NO: 57683 - DNA, 519 bp, Oryza sativa
  Clone ID: PAT_MRT4530_59470C.1
cacccgggaaatcgccggctgcgagccccctcctcctcctcctcctcctcctcttccggcgacccccgactccgctccagcgacccgatccccacctcgaccaatatggactcagagccctcatcgcagaacccggcagatatgacagcatttgtacaaaacctcctaacccagatgatgaaatgggaaccaagatcgatgagctggagcagagcgtcaacgacctgaaagctgagatgggtactgatgtgcctaccaagaaggccgacgaggcgaagcctgccgactccacataacttggccgcagaccagagattggcccgtaacgatttggcatcggtgatggatttttcagcgttttatgtgtatccgatattagttttcttggaccattgctgttgaatgactcgagagtgattttatgctatgagcgttctcctctagagtatctgctgctgctgctgctaaggcgatgtgtttggcttgtatgcaaatttgaatttagcagaatgccacaga

SEQ ID NO: 57684 - DNA, 848 bp, Oryza sativa
  Clone ID: PAT_MRT4530_59471C.1
catgtatattagtgatcccataaccatgtggcacataactgcccaaagtgtcaaaacagtttttttttttttctgaaaaggtcaaatatactgtccttttctttttgtaacacatcaaaatttcggtttatcatctaagtgctggaactagagataggaacaaagaacaaagactaattctaccttcatgtatatcaaaatttcggtttatcatctcccttttaggttttccttgttgcttttcttctttgtttcccctgttctatctctttcacctttcttggtgatattgtaaatactttctattctccttaatataactccagcttagcctggctttggtttcaaaaaaaaaaaaaggaacgaacagtgcatattatatactcaaaagactgatccacctccttttgttttacctagcaaaacatctttggcctcattaatcttcgaagcaaggtaatgactgccccctgcatccggatgattggcaaccatgacctttttgtgtgcctctttaaccttctcaggatggacattttctctgacacccaggattaaaccagcttcccttcgggccatttcaggttgaaaaccaccttcatagaatttgcgcatcctgggaactataggccttgctttataagcatgccaagcttggatgctatatctactggcaagagcagcggctgccaccgcaagtcctgctataagtggtgcagccatctcccccaccaatcagagcagccgctgaacaaaagaggatcagcgaagaggcgcaaggggatacacgcctactcgcagaagtcggcgatcgccggagaggcggccggaggcggtggaggtgggag

SEQ ID NO: 57685 - DNA, 2409 bp, Oryza sativa
  Clone ID: PAT_MRT4530_59472C.1
atgtctgcctccgaaaaccaggccgctgaagctagcaagggtgatgatgagaagatggaccctccaaagatgaaaatacgtatacgtctaccacccagaaagagattgtctaatggcctgctcaaggcagacatggacggacctgatgatagaaacaacgcccaaagtagtggagtgcctgtgcaaactaagagcacaataccaagcaagcagttgacaatccctgcagctcagtgttacgcaagcagcatctccaccagtatactgtggaatgagggtaataacaatgcctcgagccagacacttcccaatgaacctaactgtgacacttctagcgacaagctacctgaagaagccagtgacagcatcccaagcaagaagctgataatcaaagcagctcagcattacacaagcagcatctccacaggaggactgtgcaatgaggctaataacaatacctcgagcaagacactgaccaatgaatctaattgtgacacttctagcgacaagctacctgaagaaaccattgacaacatctcaagcaaggttctgacaatcactgcagctcaacatcaaatcgacagcatctccacaggagaactgtgcaatgaggctaataacaatacctcaaggaagattctgacaatcactgcagctcaacatcaaatcgacagcatctccacaggagaactgtgcaatgaggctaataacaatacctcaagcaagatacttcccaatgaacctaattgtgacatttctagtgacaagcaacctgaagaagccaatgataccatcccaagcaagaacctgatgatcactgctggtgtgtgtatggacgatgttagcaattactctgcaaaagagggtctatgtgaggatgccaatgacactatcccaagcacgaacctgatgatcactgctggagtgtgggggcacgatgttagcaattactctgcaaaagagggtctgtgtgaggaggccaatgacatcatcccaagaaagaacctgacaatcgttgatggagtgtgggaggacgatgttagtaattattctacaaaagaaggcctgtgtgaggaggccaatgacaccatcccaagcaagaacctgatcatcactgctggagtgtggggggacaatgttagcaattactctgcaaaagagggtttgtgtgaggagaccaatgacatcatcccaagaaagaacctgacgatcactgctggagtgtggggaaacgatgttagcaattactctgcgaaagaaggtctgtgtgaggaggccaatggcaatatcccaagcaacgcacatcctgcaacaattaaggaattacctgcaaagcctttagagagcacgccaagcaagaacctgacaactattgcaatgctgggtgaagaggaaaataacaacccccttaggttgtttcatgagactgacatcaacatccccagtaaggtagtattacctaaaaaatctaagaacaaccaaagaaggaacctggtaaccactgccgtcaagtgtgaggaggcaaacaacgaccccctgagccggaggttttctgaagatgctaatcgtaacattcctaccagaaacctgtctgataagactaagaacaatgcccaaagcaatagacctactaatccagataggaagaacaacccacagaagaagctttctaccactgcagtacatgctgctcctgccagaaagaacacctctgaaatcaagatggctaactctgaaatgaagccttctacctcttttggccaggctgcagaacaaggcatcaatctggcaaacttgaaggccataaaacagtaccaagaatttgaggaaaaggtcaaaagaactgtatatcttgattacttctcgcaccaagctacagagtcagtcatcagaactgctctgaatcaatttgggactgtgagagagatcaattttgtggtgaactacaccattccctttagcatcccacagtctgcattggtcataatggagactgagaaggatgctgtggctgtggtcaatatgctcaatgagttcccttttatgatgtctggaatgccaaggcctgtgagggcaactcgtgctacagctgagatgtttaatgatcgcccccggagacctgggaacaagttagagtttcgctgggtgggcccttcagatgctgattatcatattgtcaaaaagttgaagttaatgtcgaggagacatgagctggataacttggcattagtcaagcatgagctggaagaagagcatttccttgcaaaacatcaggaggagattttgaattgcaatcagaggaagcttgaagttatggactccatcatgttgaccggcaagtttacccacttgcaacacatttatagcgtcaaggtggatgaagtgttttgtaacaaatggctcgtgtaa

SEQ ID NO: 57686 - DNA, 2212 bp, Oryza sativa
  Clone ID: PAT_MRT4530_59473C.1
atgcgatccgcggcgaggccgctcgccgcgctccgtcgcgccccgccgcgtccgatcctcctccttctcggccgtctcttctgcgcctcgccgcagacaggtttcggcggcggagatccgggcccagcggacgcagacacggacgcgggagtggacgtggacgcgcggctcgtcggctcgctgtgccgggtgctcagcgacttccgcgggccgcgccacgacctgccggcggcgctgcgagggttcgcgccgcggctcacgccgcgcgacgccgcggcggggctgcgccggtgcaggcacctcccgctgccctcgctccggttcttcctcttcgccggggagctgcccgggttctcccaccacccggactcgctcctcgtcctcgcgaactcgctcgccggcgcgcggctcttcccgctgctgcgctcgctgctgtccgacctcccgccgtccgcgctctcgcggggcctcttcccgcttctgttccgcgcgtactcccgtgctcgcctccccgaagatgccatccgggccttctcatccatggcggggttcgggttccccccgacgattgctgatttccattcgttgctctttgctctgtcgcgtaatggcctagtagagtatggtgaaagattttttagggagtcgacagctcaatttgatgtttcagcgaaggcctacacaattttgatctctgggtgggctgttgttaagaagccggaaaatgcgcggagtctatttgatgaaatggtcaagagaggtgtggagcttgatgtgcatgtgtacaatgctttgattgatgccttatgtcggggaggggatattacatcagcgcaggagcagctgagcaatatgcaaaagagtcatgggcttgttccaaatgcggccacttatggtcctttccttcatgccgcatgcgcatcaaaggatgttcgtgctgctcttcgtgtgctagataggatgcacactcatgctctcacaccaaatgtattcacatacaatgctgttattcggttactgtgtgatttgggagagatcaatgaggcttacaatatcctggatgagatcaccacccaaggcgaaaagcctgatgtttggagctataacacactgcttaatgcgcactgtaaactgaaagaggtgaacaaggcgctgcggctcatttcaagaatggataaagaattatgtccgccagaccggcactcttataacatgctactgaaaatgttgattagtgtaggaaggtttgatacggctattgaggtttgggatgggatggaaaagcgtggtttccacccaggggcagcaacttatgctgtgatgatccatgggctagcttccaagaagggaagagcagaagatgcctgcagttactttgtgagaatggtggatgagggtatcccaccttaccaggccacttgtgaggtgttaagggatagattgctgatgcttggcctccgagaccaacttggagtgctcactgataggatgcggcggagcacttcatatacaatacaagaaatgtctactatcatgtgccgtaaccaatatggactcagagccctcatcgcagaacccggcagatatgacagcatttgtacaaaacctcctaacccagatgcaatcaaggtttgagtctatgtcccagaacattgtgtcaaagatagatgaaatgggaaccaagatcgatgagctggagcagagcgtcaacgacctgaaagctgagatgggtactgatgtgcctaccaagaaggccgacgaggcgaagcctgccgactccacataacttggccgcagaccagagattggcccgtaacgatttggcatcggtgatggatttttcagcgttttatgtgtatccgatattagttttcttggaccattgctgttgaatgactcgagagtgattttatgctatgagcgttctcctctagagtatctgctgctgctgctgctaaggcgatgtgtttggcttgtatgcaaatttgattttagcagaatgccacagatgtttgcttgctgataacaagccgcagctgctcgccttttataatgcttcagttcgagtattcagttgtgcccttattttacacaaatctgatacctgtgatttcagctcaggagtacaggcgtttggttatatccgaagtatatatgatctgaattctctaaaaaaaaaaaaaaaaaaaaagtggaaaaaaaaaattaaact
